United States Patent Application Publication US 2007/0067865 A1 - sequence listing, part 25

SEQ ID NO: 153984 - DNA, 402 bp, Arabidopsis thaliana columbia
  unsure (1)..(402): unsure at all n locations
tgaactttgccttcaaagattacttcaaaagacctcccattttttagaaggacagananggntactggaagttgtttgctggtaacttggcatctggaggagcagctggtgcctcttcccttctgtttgtgtactcccttgactatgcccgtacccgtctagctaatgatgccaaggctgcaaagaaaggaggtggtggaagacagtttgatggtcttgttgatgtctacagaaagacacttaagactgatggtattgctggtctgtaccgtggattcaacatctcatgtgttggtatcattgtctaccgtggtctgtactttggactctatgactctgtgaagcctgttctcctcactggtgacttacaggacagtttcttcgctagattcgctcttggat

SEQ ID NO: 153985 - DNA, 412 bp, Arabidopsis thaliana columbia
  unsure (1)..(412): unsure at all n locations
ggaagagcgatggcgacgaactcggcgagggttgggtccttctgaacnaanncggngccggcagagagggctgttgctcagnacgngagagcgaacactncagngnggngggacatagagaattgccaagtccctaacggtcttgatgctcatggaattgctcagaatatcacttcggcgcttcagaagatgaactattgtggtcctgtttctatctctgcttatggtgataccaatcgcatccctttgaccattcaacatgctcttaattccaccggaattgcgctcaaccacgtccccgccggggtgaaagatgcgagtgataagaagattctagtggacatgttgttttgggcgttagacaatcctgcacctgcgaattttatgtttaatatcaggagacagagacttt

SEQ ID NO: 153986 - DNA, 421 bp, Arabidopsis thaliana columbia
ggaggagatatgcaattgctgacgctaaatcctcggtcatttccaggacgccgccgcaagccatagacccttcctcatcctcgagtcttcttcttccttttcctcagattttgagctcccaacgcgctcttggtcttgtagctaggccttgtaatccacttcgacgaggattatctaggtttttatcaagtcgacagcttttccgacgatccaaagttgtcaaggcagtagcaaccccagaccccatcttggaagtacctttaactgaggaaaatgtagaaagcgttttggatgaaatccgaccttaccttatgtctgatggtggtaatgtggcattacatgagatcgatggaaatattgtgcgggttaagctgcagggagcatgcggatcatgttcaagttctactatgacaatgaagat

SEQ ID NO: 153987 - DNA, 411 bp, Arabidopsis thaliana columbia
cggtaacccaagagctctatgaggttgtgctcctttgtgagagagcgaagaggactctgtggtccacttctcagaccaccatcgagattgactctctatacgagggtatcgacttctactccaccatcacccgtgctagatttgaggagctcaacatggatctcttcaggaagtgtatggagccagttgagaagtgtcttcgtgatgctaagatggacaagagcactgttcatgatgttgtccttgttggtggttctacccgtatccctaaggttcagcaattgctccaggacttcttcaacggcaaagagctttgcaagtctattaaccctgatgaggctgttgcctacggtgctgctgtccagggagctattctcagcggtgaatgaaacgaggaggttcaagatcttc

SEQ ID NO: 153988 - DNA, 335 bp, Arabidopsis thaliana columbia
  unsure (1)..(335): unsure at all n locations
gagacgacgacgaggaaggaggaaaccttgctccntgttttcangaagccancgncgccggggcgaattttggggaaactctgcaaccctcaattcacgagcacatgcttcctccagtttacacagtagcctttctcttgtacaccaaaagcgatttgagctctcaagaacacactgcccacagactcaagacttgtctgtctgaaaccctgaccaagttctaccctcttgccggaagaatgaccggagtaaccgtcgattgtaccgatgaaggagctatctatggcgatgctcgagtcaataactgtcctcgcactggatgtctcaagtgccct

SEQ ID NO: 153989 - DNA, 423 bp, Arabidopsis thaliana columbia
  unsure (1)..(423): unsure at all n locations
tcgttcgacccacgctccggtggtaacactgttgctatggttgggctggacctgccnatcaccaagaatgctacattgactaatgagattgaagttgatgctcaccccattcgtgctatgaagttttctgtgtctcctgttgttcgtgttgctgttcagtgtaaggttgcgtctgaccttcccaagttggttgagggtctcaagaggttggccaagtctgatcctatggttgtgtgtacaatggaggaatcaggtgagcacattgttgctggtgcaggagaactccatcttgagatttgtcttaaggatcttcaggatgatttcatgggtggtgctgaaattatcaagtcagaccctgtggtcttcttccgtgagacaggttgtgatagatctactcgcacagttattagttagtctcctaac

SEQ ID NO: 153990 - DNA, 270 bp, Arabidopsis thaliana columbia
  unsure (1)..(270): unsure at all n locations
ccggaatggaagggccgacgcacgccacgcgtccgcaagatcggagacgcacncaacacaggttgngtcatcaaggaaggngagcacaagaagggggaggaacacaggaaacacggggcacgaccacaacaanggggagcacaaagaaggganaagcagacaagaacaaagacaagaaccacggnggngaagggaaaagccacgacggagaacggaaaagccacgacggggagaagaaaaaaaacgacagacaagaaggagaagaaacac

SEQ ID NO: 153991 - DNA, 364 bp, Arabidopsis thaliana columbia
  unsure (1)..(364): unsure at all n locations
cttaaatcaaaatacttaatagcanggcgattcctcactttaaactncnaccccgagcacacgcagtggttctgtagacagtcaagtgaaatccaatccacgaaataatttgatctgtgggcagcatcattgtggtaaaggtcgtaatgccagaggaataattaccgcaaggcatagagggggaggtcataagcgtctataccgtaaaatagattttcgacgaaatgcatacgacatatatggtcgaatcgtaaccatagaatacgaccctaatcgaaatgcatacatttgtctcatacactatggggatggtgagaagagatatattttacatcccagaggggctatttttggcgataccatt

SEQ ID NO: 153992 - DNA, 382 bp, Arabidopsis thaliana columbia
  unsure (1)..(382): unsure at all n locations
cttctcttctcttctccagatctgatcccataccgtcgattcattgnngnagnnctctgctgctttatcagagagcatcatcatgtacggaagagatccatggggaggtccattggagataaacactgcagattccgccaccgacgatgatcgtagtcggaatttaaacgatttggatcgtgcggctctttcacgtccactagatgagacgcagcagagttggttacttggtccaacggagcagaagaagaagaagtacgtcgatctcggctgtattatcggtagccgcaagatcttcgtctggactgttggtactcttgttgccgccgcgttactcgccggattcattaccttgatccgtaaaactgtgccggggttatat

SEQ ID NO: 153993 - DNA, 441 bp, Arabidopsis thaliana columbia
  unsure (1)..(441): unsure at all n locations
gcattngagatagctcaagcacttgatncttttcaactgtttttcctgagancacaaaggccaaggggcattgtctaaaggagttgcagttttgaacagcagtgagggtgttacggggactatctttttcacccaggaaggcgatggtgtgaccactgtgagtggaacagtttctggccttaagcctggtcttcatggtttccatgtccatgctcttggtgacaccactaacggttgcatgtctactggtccacatttcaaccccgatggtaaaacacacggtgcccctgaggatgctaatcgacatgctggtgatctaagtaacatcactgttggagatgatggaactgccaccttcacaatcactgattgcctgattcctcttactggaccaaaccctattgttggtaggtctgtgttgtcatgctgaccctgtttacc

SEQ ID NO: 153994 - DNA, 366 bp, Arabidopsis thaliana columbia
  unsure (1)..(366): unsure at all n locations
gagaaaacttcgnctctctnctctgctccgtcccctcatttcctgngagataaaggcggaggcgtctctccagttattttgctcatccatcgattcttagagttcaaaatggttgatcaagttcagcaccccactattgcgcagaaagctgccgggcagttcatgcgttcaagtgtttccaaggacgttcaagtgggttaccagaggccttctatgtatcaaagacatgcaacctacggaaactactccaatgctgcatttcaatttcctccgacatcccggatgttggcaacaactgcttctcccgtgtttgtccaaaccccaggagagaaggggttcactaactttgcccttgactttctgatg

SEQ ID NO: 153995 - DNA, 382 bp, Arabidopsis thaliana columbia
  unsure (1)..(382): unsure at all n locations
ccaaattcgatccgnnnccggcgaattcctcgatcttgatccganggcgaaagaaccagggggtgttctcgttactggagctgcacgacaaatcggatatgctcttgtacctatgattgcaaggggtatcatgcttggtgctgaccaacctgttatcctccacatgttggatattcctccagctgctgaagctttgaacggtgttaagatggagttgatcgatgctgctttccctcttcttaaaggtgttgttgctacaactgatgccgttgagggatgtactggagtcaatgttgctgttatggttggtgggttcccgaggaaagaaggtatggagaggaaagatgtgaatgccaagaatggttccatttacaaagtctca

SEQ ID NO: 153996 - DNA, 401 bp, Arabidopsis thaliana columbia
  unsure (1)..(401): unsure at all n locations
tcgacccacgctccgtgnctcattcattcgcaaatncgngacccctcctatagattcaagcgangangaanctgagggttttgttcctcgctctgcttctccttgcatctcctctgcttcaagttgctagatgtcaatcggatgccgaggatcattcaagtcttgttgacgatgttgtgggagaaaacactgatgatgcggttgaggaagatgaccatgatatggatatgaactcgtcctcatttccaggagttgagactgtttgtgttttccccaaaaacagtgccaaattggttccagctggagaagagactgagctccttagtgggcttaaaaatgaagggaaaactagagttggtgtgatgggaattagggccagcgatcatcttccctaatgatca

SEQ ID NO: 153997 - DNA, 252 bp, Arabidopsis thaliana columbia
  unsure (1)..(252): unsure at all n locations
aacaagtggaagctttaaaacgagtgtctgttttgctaaatggcgacgncgggaacgtacgtgacggaagttccgctaaaaggatcggccgagaaatactacaagaggtggaagaacgagaaccatgtcttccctgatgctatcggccaccacatccaaaatgttaccgttcacgaaggcgaacatgactctcacgggtctatcaggagttggaactacacatgggatggaaaggaggaggtgttcaaggag

SEQ ID NO: 153998 - DNA, 269 bp, Arabidopsis thaliana columbia
  unsure (1)..(269): unsure at all n locations
accggtatttaatggctcggacccacgcgtgcgactctccgcaaaaatgacacagttgcagcngcgtgcgctccctccgtcttgagcgggaaagcttccgcaaccactggcgatatcaaggatattcttggatcagttggtgctgagacagaggattctcagattgagcttttgttgaaggaagtgaaagggaaagacttggctgagctaattgctgctggaagggagaagttagcttcagtaccatcaggaggtggttggtggtgtgc

SEQ ID NO: 153999 - DNA, 378 bp, Arabidopsis thaliana columbia
caacaacaacaacaacactctcttacctctcacgtcactctgttctccaccgtaacccccaccgtcgatgactcctccatcgaagtggtccgacgtccacgtggcagaccaccaggttccaaaaacaaacctaaaccacccgtcttcgtcacacgtgacaccgaccctcctatgagtccttacatcctcgaagttccttcaggaaacgacgtcgtcgaagccatcaaccgtttctgccgccgtaaatccatcggagtctgcgtccttagtggctctggctctgtagctaacgtcactttacgtcagccatcaccggcagctcttggctctaccataactttccatggaaagtttgatctcctcttcgtctccggaacg

SEQ ID NO: 154000 - DNA, 446 bp, Arabidopsis thaliana columbia
  unsure (1)..(446): unsure at all n locations
accggtatttaatgtgccgagctcgacgccacgcgatccgtctcaaagaagacacagaggcagagaaatgtgcgtcttctcacaaaaaaaaanggcatcaacctcactcctcaaggcttctccggtgttggacaaatccgaatgggtcaagggacaaagcgttctcttccgtcagccttcttccgcttctgtcgtcctccgcaaccgtgccacctccctcaccgtccgtgccgcttcctcctacgccgatgagcttgttaagacagcgaaaactattgcgtctcccggacgtggaatcttggcgatggacgagtcaaacgcgacttgcgggaaacgtttggattcgatagggctagagaacactgaggcaaatcgtcaagctttccggactttgctggtctctgcacccggactcggacagtccgtcttcggcgcaattctatttg

SEQ ID NO: 154001 - DNA, 417 bp, Arabidopsis thaliana columbia
  unsure (1)..(417): unsure at all n locations
cctccctttttaacgaaggaacaaaatcatttgagagcttatacaaaagagtcacaaaacgattcagaatactgattgtgtccaactaaaaacttaaaacaacaccagagataacgataagtaaaaagattcaggctgattataattcttcttcaccggaatgagaaggatacttcagttctgatactcttcagtagtgggctggcaaaaaggcacttcccggctgacggttagccaaaggtccatggcatgagaggaacttagcgttgacaccatcagggacaacacgcttctcttgcctcaacttggtgaagtcagctctgttaaacttcgggaagccccaatttcctgctgacaattaatcttttgaccgccaggggaacttgaacttagcacgacnaaaagccctttgagcat

SEQ ID NO: 154002 - DNA, 337 bp, Arabidopsis thaliana columbia
  unsure (1)..(337): unsure at all n locations
accgacgcgtgcgtaaaaaccctagggtgagngagacagagagaatttctcactttgcagcgccnngcnnaccgaacacgaggcagttacgccaccaaatccaaccagcacaggatcgtcaaaactccaagaggtaaattgacgtaccagaccactaagaagagagctagtggacctaaatgtcccgttaccggcaagcgtattcagggtatttctcacttgaggccaactgagtacaagaggtcacgtttatcaagaaacaggaagaccgtgaaccgtgcttatggtggggttttgtcttggtctgctgttaaggaaagaatcattcgtgcctttc

SEQ ID NO: 154003 - DNA, 282 bp, Arabidopsis thaliana columbia
  unsure (1)..(282): unsure at all n locations
cacaaaaccctaatctacaagcncctcgagtcctatcaggccccacgaagaagaaggggggggccgcatactagctcgctgcttccagcggaaaagcttcaccaaccagtgccgatatcaagactatccttggatcagatggtgctgagacagaggattctcagatagagctattgttgaaggaagtgaaaggaaaagatttggctgagttgattgctgctggaagggagaagttagcttcagtgccggctggtggcggaagtggtgttgcggatgcttctg

SEQ ID NO: 154004 - DNA, 419 bp, Arabidopsis thaliana columbia
  unsure (1)..(419): unsure at all n locations
gttgaaaaagcacgacgcaagagcnaaggattttactgatgacgaagaaagagangganccagacgctgttgcaaaggctttcgttgagcactactactccaccttcgatgcaaatcgtccagggttggtttctctataccaagaaggatccatgttgaccttcgaaggccagaagatccagggctctcagaacatcgtcgctaagctcaccggcctccctttccagcagtgtaagcacaacatcaccaccgtcgattgtcagccttctggtcccgccggtggtatgctcgtctttgtctccggcaatcttcagctcgctggtgaacaacacgctctcaagttcagccagatgttccatttgatatcgaatcagggaaactactacgtgttcaatgacatattcaggtgaactatgcct

SEQ ID NO: 154005 - DNA, 343 bp, Arabidopsis thaliana columbia
  unsure (1)..(343): unsure at all n locations
cgtgagccgattctctctctcgaactcgatttatgcactcgtatcttgccaaaggatnagacggggntaagtgccctaanngnnggagctgcacttggatactgcattggcactcgccgttccaaacctgttgttgctgctgttgataaggatatcaaaactcaatcctccaaaagtccactcgagattgagaaactcgctgatattctcgatgatttcaagatggttttggtggtgagaaatgatcttaaaatgggtaaaggaaagattgcagctcaatgcagtcatgcaactttaggattatacataaagcttgttcgtcgagcgccaaaagcattggact

SEQ ID NO: 154006 - DNA, 306 bp, Arabidopsis thaliana columbia
  unsure (1)..(306): unsure at all n locations
ccaaccttcatgtcgggcannagagttgggtgccgttccggaagngannggaccgaacaagtgggagggatcttatggtccttcctctacacattacagncatcttagctggtatacaagaagctatggctgccatgagaccgagacagagcaacattgagagtctctatgatatcaagaagatggagtcagagatggataatcattggctttatcaagttgacaaagctatcttctttatagatataagatcgagggtacagtttgatttaagcgagagagtttaagatcttgtgtaacactgta

SEQ ID NO: 154007 - DNA, 368 bp, Arabidopsis thaliana columbia
  unsure (1)..(368): unsure at all n locations
ccggctagttcttaacatctctgnggngagaaagatgaatttcttactcgngccnccaaggggggggaatttctgagtggtcaggctcctctcttctctaaggcgaggtacactgtgaggtctttcggtatcaggcgtaatgaaaagattgcgtgctatgtcaccgtgagaggtgagaaggcaatgcagcttcttgagagtggcttgaaagtgaaggaatacgagctgttgaggaggaacttcagtgacactggctgcttcggattcggtatccaggagcacattgatcttggaatcaagtatgatccttctaccggattctacggtatggatttctacgttgttcttgaacgttcaggataccgtgt

SEQ ID NO: 154008 - DNA, 167 bp, Arabidopsis thaliana columbia
ggcgatgtggggctgcccttaacacacggagcagttattgggagcacctgcttttaccagaacatctctccattcccagactctcgtccatagatcttttgacctttcgattttacccgacgaggaaaagtaccaacgtccaagtaggtaaaggcggaggaaacgtt

SEQ ID NO: 154009 - DNA, 315 bp, Arabidopsis thaliana columbia
  unsure (1)..(315): unsure at all n locations
gagancgacgaggagcagaaattacgtgcgttttaggaccagacaatctctcaagaagtcagtggagatgctttgggcgaggagttcaaaggatacgttttcaagatcaagggtggttgcgataagcaaggtttcccaatgaagcagggagttttgactccaggccgggttcgccttttgcttcaccgaggaactccttgcttcagaggacatggaaggagaactggtgagaggagaagaaagtctgttcgtgggtgcattgtgagccctgatctttctgttctgaaccttgtcattgtgaaaaagggtgagaac

SEQ ID NO: 154010 - DNA, 308 bp, Arabidopsis thaliana columbia
  unsure (1)..(308): unsure at all n locations
tgaggntggatggatggttacgagaaaactgaaatnccatagaggacaactgctgctctcaattttgttaatgctcttttgaatcttctctgggcgtttgaactcagagctactgcatcatgggttttccaattgggaatcaaaaggggtatcttcagtctcgatgtttttagggaggcggacaaggactgtggtgcggaattcagaaggctgtctggaggtgcagcacttgttgccctgacgctatggcttgaccacatgcaggatgcaatactggaaggctacccagagtctccaaagtcagttgt

SEQ ID NO: 154011 - DNA, 344 bp, Arabidopsis thaliana columbia
  unsure (1)..(344): unsure at all n locations
gccancttttgcgttcgcatccttcattacttgggcaaaacaacaacttataatggccggttccctagaaactggccggttctcgggatgctcccctgtctgctcgtggtgctccacaggatctatgactatatcggtgagattctcgaaatctctgatttgacattttcattcaagggaccgtggttcgccggaatggataccttgctcacggttgatccagctaacattcatcatatgatgaactcaaacttctcaaattacatcaaaggatctgatttcaaagaagtttttgatgtcttcggagacggaattatcaccacggactctgagctatggaagaa

SEQ ID NO: 154012 - DNA, 362 bp, Arabidopsis thaliana columbia
  unsure (1)..(362): unsure at all n locations
ccgggccgagccacgcgnacgggaaggaagcccnccggancagcagaaacttttnantatttcggnnaagcagccnnaaaacaagaanaacttttgcagactacagcattcaaaccaaancgacccttnatttggtgctacgtctcaaaggtggtatgcaaatctttgtcaagaccctcactggtaaaacaatcacccttgaggttgagagttcagacaccattgacaatgtcaaagctaagatccaagataaagagggaattcctccggaacagcagaggcttatctttgccggaaagcaactcgaagatggacgcacccttgcagactacaacatccaaaaggaagacacactccatcat

SEQ ID NO: 154013 - DNA, 87 bp, Arabidopsis thaliana columbia
  unsure (1)..(87): unsure at all n locations
gacgcgcccngaagcggcgcaaaaagcgcggcgggngagganggaacgcgcagcgngaccgcnacacaagccagcgcccnagcgccc

SEQ ID NO: 154014 - DNA, 455 bp, Arabidopsis thaliana columbia
  unsure (1)..(455): unsure at all n locations
cgagagaagaatagnnngancancnngngaataaataaatggccgcnncagngangcaagcggcggggacattgaaaccagctggctgcacggcggagaagacggcggctagaggannaccgncgctcacaagagctcgnccctccttcaaaattgtcgccagtggcgtcaagaagatcaagaccgacaagcccttcggaattaacggcagcatggacttgagggacggcgtcgacgcctccggcagaaagggcaagggatacggtgtttacaagtacgtcgacaagtatggagctaacgtcgatggatacagtcctatttacaacgagaacgagtggtcagcgagtggtgacgtgtacaagggaggagtcaccggattggcaatttgggcggtaactctcgccggaattcttgccggaggtgctcttctggtgtacaacacaagtgctttggct

SEQ ID NO: 154015 - DNA, 249 bp, Arabidopsis thaliana columbia
  unsure (1)..(249): unsure at all n locations
agaancangagaaagaggctcannagaaaaaccnnngacanganacaagaaancncngagagggaaaacaaagaggannacaagaaanncngggagaaccccnggagagnccnnaaanngggnngnanngaagacaccgngaaccacaagcgnancacaccgcnacnnaganncnncagnnccaagaangaagaggaanngacaagcnnggangannanancgagaacangggagagaaccaaaaggcg

SEQ ID NO: 154016 - DNA, 197 bp, Arabidopsis thaliana columbia
  unsure (1)..(197): unsure at all n locations
gcaacaagggcaccgaagaagggagnnaaagngtttaaatataagaagccgnanaaagnaaacganccattgtgagagagacgcccaccccactacggtattggtggcgctttgcctcctaagaaggatctttctcgttacatcaaagggccaaagtcaatccgtcttaaaaggcagaagcgaatcctaaagcagag

SEQ ID NO: 154017 - DNA, 247 bp, Arabidopsis thaliana columbia
  unsure (1)..(247): unsure at all n locations
cacnccaagggagggaagatgcggagagagggagcctcaaacacgacagaancaagnacnggnnatcngnnggagcgcaaccaacagacacagnggaaagcangcnnnncagggccggnnngagaccaccaaagccnanggnagnggncggnncgaaaaangggcagaagncaacgagccaacangnnncacccannacaggngaaancnngaacnaagagngnngangcgnngagcaagaaagagc

SEQ ID NO: 154018 - DNA, 426 bp, Arabidopsis thaliana columbia
  unsure (1)..(426): unsure at all n locations
gaaaaaccctagccggctggaaggagtanaataatatgctatngaggancanagggaggcggacttttacgcttcctgatcttccttaccattatggcgcattggaaccggccattagtggagagatcatgcagattcatcaccagaagcatcaccaggcttatgttactaattacaataatgctcttgagcagcttgatcaagctgtgaacaagggagatgcttccactgttgttaagttgcagagcgccatcaaattcaacggcggaggtcatgtcaaccattcgattttctggaagaaccttgctccttccagtgaaggtggtggagagccaccaaaaggatctcttggtagtgccattgacgctcactttggctcccttgaaggtctggtgaaaaagatgagtgctgagggtgctgcagtgc

SEQ ID NO: 154019 - DNA, 337 bp, Arabidopsis thaliana columbia
  unsure (1)..(337): unsure at all n locations
acccacgcgnccggcaaaggggccacaagcgcancagctttgattatttcaaccacanncnccacngcaaggncgcacaatttcccaaactgcatcgcaccccaaggccnncgnccccnccgncnaggnggcnccnccnccgcccaacccaaacnancaaccaccgggagaaaanccnccnccgcngncgngagagcngagcnaagcccnnccancgncanaagncncagcacaggncncncccncnnccncggccgnnncgncnncnncaacnnccagagagagaacgnagcaaaacagggcnnaccggagcagaacggaaaaacccaaaacgaag

SEQ ID NO: 154020 - DNA, 452 bp, Arabidopsis thaliana columbia
  unsure (1)..(452): unsure at all n locations
ccgacaagctaaggtcattggngaagaagagaataactttgattgaagcccangncgangggagaggccacatacggctacaccttgaggatgttctgcatcgccttcacaaagagacgtgctaaccaagtgaagcgtacctgttacgctcaatccagccaaatccgtcagatccgcagaaagatgagtgagattatggtgaaggaggcttcatcttgtgacctcaaggagctagtggccaagttcatcccagaggccattggaagagagattgagaaggcaacacagggcatctacccgttgcagaatgtgttcatccgtaaagtgaagatcctaaaggctcccaagtttgaccttggaaagctcatggaggtgcatggagattacacagcanaggatgttggtgtgaaggtagacaggccagctgatgagacaatggttgaggagccaac

SEQ ID NO: 154021 - DNA, 247 bp, Arabidopsis thaliana columbia
  unsure (1)..(247): unsure at all n locations
aagggaaangnaagngnnnngggggcaaacccaagncaganncnancncngaaacccaaccaaacccnnaaaacgagaaaccaacagcaannngcgagaccccnngnngnggnnagccaaacggcggcnacgncgncggcagnngaagcaccggagagaanccgnnnnggaaaacnaggaccacagccaggnncgaggaagaagcagaagagaaaaggnagaggnancncngcaggacaaggagcaa

SEQ ID NO: 154022 - DNA, 434 bp, Arabidopsis thaliana columbia
  unsure (1)..(434): unsure at all n locations
gtcgatgccgagcaaacttcttccagnccaagtaagatcgttnnncnnnncccctttgcggggtcatctgattattctggggtatctcttccatcttcgncgcctaaagtctcggtgggcctgtactacgagtctctctgtccctactgctcttccttcattgttaaccacctcgcgaagctcttcgaagacgatctcatatcaatcgtcgatctccatctctctccgtggggcaataccaagctccgttccgataacgtcactgccgtttgccagcatggggcatttgaatgcttcttggataccgtagaagcttgtgcaattgatgcttggcctaaagtaagcgatcatttcccgttcatatactgtgtcgagaagttggtgactgaacataagtatgacaagtgggagacgtgttatgagaagctcaatct

SEQ ID NO: 154023 - DNA, 326 bp, Arabidopsis thaliana columbia
  unsure (1)..(326): unsure at all n locations
cggaagaaggancaggactncangnnccatatgttctttctcgcacgatactgcaaactccttgaagaaaactcattcaggggaaagactgctgatttcctatacatgctcctatttggagcatctgttttaaccggtattgtacttatcggtggaatgataccatacttgtcagcatcatttgctaaaatcatcttcctcagcaactcattaactntcatgatggtctatgtatggagcaaacaaaatccttatattcacatgagtttccttggtctgttcaccttcacagcagcttacctaccatgggtgcttcttggcttctc

SEQ ID NO: 154024 - DNA, 445 bp, Arabidopsis thaliana columbia
  unsure (1)..(445): unsure at all n locations
aacactagacagacaggaggcccaataaattggctgaaccaaaacacaaacaggagagngnncagggactgaaagaagaccgacaagtggttgccatgactggagatggagtcaatgatgctcctgccctgaagttggctgatattggtgtggctatgggcatttccgggacagaggtagcaaaggaggcatctgacttggtgttggcagatgataatttcagcaccattgttgcagctgttggtgaaggcaggtccatctataacaacatgaaggccttcatcaggtacatgatctcttccaacatcggtgaggttgcatcgatattcttgacagctgctcttggaatcccagaaggcatgatacccgttcaacttctgtgggtgaatctcgtaacagatggtcctccagctactggcttgggattcaacccccctgacaagga

SEQ ID NO: 154025 - DNA, 388 bp, Arabidopsis thaliana columbia
  unsure (1)..(388): unsure at all n locations
caacaaaccggncccggccgacgggttttctgtccgccggagagaacctctccgtttcaacataacacttctccttcatctggaataggaatcagagtgaatctgaagcctgagtatcggattactccgccgcctcagttgttgcctcgagtaggagatattcatcggagtagttttcagttcgatttcggattagagaggaaagttctcgcggaggcagagaaagataatccagattggagtaaatttgggagtgagaatccaccggctaagtttcatgaaccatcacctgcttcagtgggtcaaatgcagggcgtagatcatgcagtgatgaaatatactgctcctgggctcaacagagaagctgtcaacaaagctgttgcaaact

SEQ ID NO: 154026 - DNA, 96 bp, Arabidopsis thaliana columbia
  unsure (1)..(96): unsure at all n locations
agaagncacaggaagcggccgngngacaaagaggaagacngnngccaagccaaagggnccaacaggcagcccacggcacgganccgaccgagncaa

SEQ ID NO: 154027 - DNA, 218 bp, Arabidopsis thaliana columbia
  unsure (1)..(218): unsure at all n locations
gagaaaacgaaaacccnagnnncagataaataaatttacaccgaaaanggcngaagggcgcggnnngaagggcaccangcgggcacacactgacanggngacggcaancgccaccccaancgagaacgcagacagcagcgncncagcgncccgcgacaaagccagcaannnggggaaacccaccaaggacgacaaagccnacggnggagcncagaggc

SEQ ID NO: 154028 - DNA, 448 bp, Arabidopsis thaliana columbia
catcctctcactctctctctcctttggaataaatattgaggagaggaaatgtcggatcttgagacaccgcttgtgaggcccaagcggaagaagacttgggttgattactttgtcaagttcagatggatcattgtcatcttcatcgtccttccattctcagccacattctacttcctcatctacctcggggacatgtggtcagagtccaagtcctttgagaaacgtcagaaggaacacgacgagaatgtcaagaaagtcatcaaaaggcttaagggtagggatgcttccaaggacgggcttgtctgcactgctcgtaagccctggatcgctgttggaatgaggaacgttgactacaagagagcccggcatttcgaggttgacttgggggagttccgtaacatccttgagatcaacaaggagaagatgactgctagagtggagccttttg

SEQ ID NO: 154029 - DNA, 451 bp, Arabidopsis thaliana columbia
  unsure (1)..(451): unsure at all n locations
gaaaaagggaaagagccataccacnnnnaccatagganttatgtaatactcncaanccattgcatgcataagggtcttctctttctcaaaccatcgntttctgaatctgtcacaccaaaagagttcatggagactttgctgcagaagcttaaagactctctagccatagcacttgtccatttctatccgcttgcaggtcgcatctcgactttgaaaaccaacgactcaagatctcactcggtgtttgtggattgtaataacagtcctgctggatttatccatgctgaatcagatctaagtgtatcagacattcttggttccaaatatgttcctttggttgttcaatctttctttgaccatcacaaagcattgagtcgtgatggtgacaccatgactctcttatcagtcaaggtaacagaattggtagatggagtgttcataggattgtcta

SEQ ID NO: 154030 - DNA, 439 bp, Arabidopsis thaliana columbia
  unsure (1)..(439): unsure at all n locations
gcaggctctcttctctctgnnnngccaaagtaagttctctctncctcncatcgnctccgccggcggcatcaactatggccaggtcgctaacaaccttcctccccctaaaaacgtcatccctctcctcaagtctgtgggagctacaaaagtcaagctctatgacgccgatccacaagccctacgtgccttcgccggctccggcttcgagctcaccgtggccctcggtaacgagtacctggctcagatgagcgaccctattaaagcccaaggctgggtgaaggagaacgtccaagcttacctcccaaacaccaagatcgtggccatcgtagtgggaaacgaagtcctcacctcaaaccagtcagccctcacggcagccctcttcccggctatgcaaagcatccacggtgctctggtggattgtggcctaaacaagcagatc

SEQ ID NO: 154031 - DNA, 453 bp, Arabidopsis thaliana columbia
  unsure (1)..(453): unsure at all n locations
aaaaaaatctctgtaaaagcagaacganaaagtaaatactatttatggaatnggatcttaccgggggtgttctcttctctcctcatctccttcgtcgctttctatggattcttcgtcaaaccgaagcggaacggtctccgtcacgatcggaaaactgtttctaccgtcacctccgacgtcggatctgttaatattaccggagatactgtcgctgatgtcattgttgttggagctggtgttgctggttctgctcttgcttatactcttggaaaggataaacgccgagttcatgtgattgaaagagatttatcggagcctgatcgtattgttggggagttgttacagcctgggggttacctcaagttactggagttgggaattgaagattgtgtggaagaaatagatgctcagcgtgtgtatggttatgcactttttaaaaatgggaaacgcatt

SEQ ID NO: 154032 - DNA, 223 bp, Arabidopsis thaliana columbia
  unsure (1)..(223): unsure at all n locations
cacaccaaccaattacanttctaaaaagcccccnccaancggcggaaaanggcgaaggcaaacgcgccctctcccaccnccgnccncgggacancccgacagagnaagnngggaggaggaaancagcagcaaggacagagagnnagccacaacaagaggacaaccagacgnnnnagcgnnagagccaaagnaaaggaaagagccnnngaccagcacncnagag

SEQ ID NO: 154033 - DNA, 377 bp, Arabidopsis thaliana columbia
  unsure (1)..(377): unsure at all n locations
ctgaatcccttagatctncnnncaaanaaataagcgttcggngangnngagnatcggggctgcgttgtaggtctagcatgggccactgatgacagagctcttgagactgccttcgctcaatacggcgacgttattgattccaagatcattaacgatcgtgagactggaagatcaaggggattcggattcgtcaccttcaaggatgagaaagccatgaaggatgcgattgagggaatgaacggacaagatctcgatggccgtagcatcactgttaacgaggctcagtcacgaggaagcggtggcggcggaggccaccgtggaggtggtggcggtggataccgcagcggcggtggtggaggttactccggtggaggtgg

SEQ ID NO: 154034 - DNA, 308 bp, Arabidopsis thaliana columbia
  unsure (1)..(308): unsure at all n locations
tttttaagaaggnagggcagtcctctggcattgatgatgtctttacttcttccagaggatctactaaaactcttggaaactttgtcaaggcgacgtttgactgcttacagaagacatatgggttccttacaccagagttctggaaagagactagattctccagatcgccctaccaagagcacactgatttcttgtcgactaaggctgtttctgcaaccaaggttatcacggagggtgaagaccaagcttaagaccttcatgagataagttttggttgttcttaatactaatttctactttgaaaaaga

SEQ ID NO: 154035 - DNA, 446 bp, Arabidopsis thaliana columbia
  unsure (1)..(446): unsure at all n locations
gtgagagagagaacacagacganacctactaactttaatctcgnngccgcagnataatgaggtcatttctcggatatatgtctccttctgcggcggcgacaagaagctacaagaataaaaagtctgttttctctcttttcaagaaaccacttacttcgaaaatggctcgttctatctctaacgttaagatcgtatctgctttcgtctctcgtgaactctccaatgctatcttccgacgtggttatgcggccacggcggcgcaagggagcgtttcgagcggtggaagaagtggagctgttgcttcggctgtgatgaagaagaagggagtggaagaatcaacccagaagaattcttgggttccagatcccaaaaccggttattacagacccgaaaccggttccaacgagattgacgcggctgagctacgagcagctctcttgaacaac

SEQ ID NO: 154036 - DNA, 363 bp, Arabidopsis thaliana columbia
  unsure (1)..(363): unsure at all n locations
cttcttgtgatcacttgcagctatggccactcaatttgctctcgccgnctcaagaatgccgggcacacagcgactgcagtctaagagtgccattcactctttccctgctcaatgctcctccaagaggctagaagtcgctgaattctccggtctgcgtatgagtagtatcggtggggaagcatctttcttcgatgctgtagctgcacaaatcatccctaaggctgtgacaacatcaactcctgttagaggagagacagtggcgaaactgaaagttgcgattaacggttttggaaggattggtaggaactttcttaggtgttggcatggtcgtaaagactctcctctcgaagttgttgtacttaa

SEQ ID NO: 154037 - DNA, 441 bp, Arabidopsis thaliana columbia
gcttattagctccaccaaatctggaaaaccaataaattctttttatttcttctgcaaaaatgtcggagctaccctaaaaattgtctctttttgactcacttaccagatctccactagattttactcaattctttttcaaaaggtttaaacttttatagattccttgaagtgggtctaagcaatgcttcagagaaattccgatgatttcttctctaaccaaaataaaaatgaagtatcatttgatagtgatttttgtgttcttcttttgattctcttatctcttccttcccatcaataaacccaaaaaaattaatatcatttttgggatcttattgatcccaaaattcgtaaatccgttgacctttgtcggcatgatttgttcttacttaccgtaaaaaaaacagagctaggttttagttttcggacatggagggtatgaga

SEQ ID NO: 154038 - DNA, 433 bp, Arabidopsis thaliana columbia
  unsure (1)..(433): unsure at all n locations
cacaaaactctcactccaaaacncncaaataaaccttccttngancgaatactacaatggcggctgtatctgcaattggagttctcaaggtacctcctgcttcgacttccaattccaccggaaaagccacggaggcggttcccacgaggactctttctttctcctcctctgttacttcatccgacgacaagatttcactcaaatccaccgtctcccgtctttgtaaatctgttgttcgcaggaatccgatcatcgtctctcccaaagccgtctcagattctcaaaactctcaaacttgtctcgatcctgatgctagcagcagtgttttggggataatcttaggaggtggagctggaactcgtctttatccacttacgaagaagagagcgaaaccagctgtgcctcttggtgctaactataggcttattgatat

SEQ ID NO: 154039 - DNA, 454 bp, Arabidopsis thaliana columbia
  unsure (1)..(454): unsure at all n locations
gntgatctttctcctccatcaacaatcttgataantgacacgnggnatgggagctgggcgtgagctgaatagactccgaattaaccagaggtgggctgacaagcagtacaagaagtctcacttgggaaatgagtggaagaagccttttgctggttcttctcacgctaaaggaattgttcttgagaaaattggtattgaggctaagcagcctaactctgctatccgtaagtgtgctagagttcagcttatcaagaatggaaagaagattgctgcctttgtccccaatgatggttgtttgaactacatcgaggaaaacgatgaggtcttgattgctggatttggtcgtaagggtcacgctgtgggagatattcccggagttaggttcaaggtcgtgaaggtttctggtgtttcactcttggccctcttcaaggaaaagaaggagaagccaagatct

SEQ ID NO: 154040 - DNA, 396 bp, Arabidopsis thaliana columbia
  unsure (1)..(396): unsure at all n locations
acccacgcgtccgctnncatcgtccgannngaancnccggcgaaatgacagataagaacaaggaagaagactaagagagatttgttgagataatccaggagactcattctccggtttgaatcttcctcaatctcatcttcttccgctctttctttccaagctcataaaaaatggctgaggctgatgatattcaaccaatcgtgtgtgacaatggtaccggtatggtgaaggctggatttgcaggagatgatgctcccagggctgtttttcccagtgttgttggtaggccaagacatcatggtgtcatggttgggatgaaccataaggatgcatatgttggtgatgaagcacaatccaagagaggtattcttaccttgaagtatcctattgagcatg

SEQ ID NO: 154041 - DNA, 464 bp, Arabidopsis thaliana columbia
  unsure (1)..(464): unsure at all n locations
ccgacccacgcgnccgcaaaagcctattngggggancncaacctaaatanactccacgganccnnacaagnancgggcggcaagcttgtacaacgccccattctacaccacaaacggtggtgctccagtctccaacaacatctcttccctcaccatcggagaaagaggtccggttcttcttgaggattatcatttgatcgagaaggttgctaatttcaccagagagaggatccctgagagagtggttcatgctagaggaatcagtgctaagggtttctttgaagtcacccatgacatttcaaacctcacttgtgctgattttctcagagcccctggtgttcaaactccggttattgtccgtttctccaccgttgtccacgaacgtgccagttctgaaaccatgagggatattcgtggtttcgctagcaagttttacaccagagagggaaactttgatcttgttg

SEQ ID NO: 154042 - DNA, 386 bp, Arabidopsis thaliana columbia
  unsure (1)..(386): unsure at all n locations
aaagaagaacaatggctnccncnangtactaaacctctactatggnngcctctccgggtcaggcttttatggacgctcctttcaacggacttaagtcctccgctgccttcccagccacccgcaaggctaacaacgacattacttccatcacaagcaacggcggaagagttaactgcatgcaggtgtggcctccgattggaaagaagaagtttgagactctctcttaccttcctgaccttaccgattccgaattggctaaggaagttgactaccttatccgcaacaagtggattccttgtgttgaattcgagttggagcacggatttgtgtaccgtgagcacggtaactcacccggatactatgatggacggtactggacaatgtgg

SEQ ID NO: 154043 - DNA, 252 bp, Arabidopsis thaliana columbia
  unsure (1)..(252): unsure at all n locations
gaaggttaagaagcagagngnaaacttattaattttctcaagagccnnacccangggcgggttttttatcctcattgctacggccctcctggccaacgcttacactcctcctcctcctcctccaaccaccgcataccctgccgtgaaaaccgtggaagcggcagtggaaggaatggtgtactgtcaatcctgcgacaaattcggatcatggtcattggccggagcagaagctatagccggagctaaaatcag

SEQ ID NO: 154044 - DNA, 182 bp, Arabidopsis thaliana columbia
attcaatcatggcggatgttgaaccagaggttgctgctgctggagttcccaagaagaggacgtttaagaagtttgccttcaaaggagttgatctcgatgctcttctcgatatgtctactgatgatcttggcaagctctttctttttcggattcggagaaggtttttttagaggtttgacaag

SEQ ID NO: 154045 - DNA, 449 bp, Arabidopsis thaliana columbia
  unsure (1)..(449): unsure at all n locations
agtntcgaaagcctngagagagagaacacatacaattccaacnnncnncaancncggggcgcggggnattatgatctcatgccggccatatatctctccttctgcggcggcgacaagaagctacaagaataaaaagtctgttttctctcttttcaagaaaccacttacttcgaaaatggctcgttctatctctaacgttaagatcgtatctgctttcgtctctcgtgaactctccaatgctatcttccgacgtggttatgcggccacggcggcgcaagggagcgtttcgagcggtggaagaagtggagctgttgcttcggctgtgatgaagaagaagggagtggaagaatcaacccagaagatttcttgggttccagatcccaaaaccggttattacagacccgaaaccggttccaacgagatagacgcggctgagctacgagcagctc

SEQ ID NO: 154046 - DNA, 458 bp, Arabidopsis thaliana columbia
  unsure (1)..(458): unsure at all n locations
gttggagctttggacgacgacaanggacacttagtattggagngaaggnagcngctaagaaggggacctttgagaaagtnncagaccctctattcgagaggaggcctaagcaattcggtattggtggagctttacctcctaagaaggatctctctcgctacatcaaatggcccaaatccatccgtcttcaaaggcaaaagaggatcctgaagcagaggttgaaggtccctccagctcttaaccaattcaccaagactcttgacaagaatcttgctaccagcctcttcaaggtccttctgaagtacaggccagaagacaaagctgccaagaaggagcgtcttgtaaagaaggcccaagctgaagctgagggaaagccttctgagtctaagaagcccattgtagtcaaatacggcctcaaccatgtgacctacctcattgagcagaacaaggcccaactt

SEQ ID NO: 154047 - DNA, 374 bp, Arabidopsis thaliana columbia
  unsure (1)..(374): unsure at all n locations
cttttgttgtaaccatctncctgatattcnngctgtcgtaggccatcaaattgcttcgatantgcaccctagaanntctgcttcaacctaaagggcctcctccacccagatctgttaccatcttaccattgnngtcatcaccgcaacctgtnnctgctgttggnnatgatgtgggccaattgtatacccattgcgcagatgaacccctctcattgtcncctatcttaagncgaggtggagtnagaaacccattctactcaaactaggaaaccaatgcacnaaatttgagtaagaagccccgctgctctttctgtatcttcttcaaacataattggttttcccctttgtaattcttatcgtggtgtggaacaacg

SEQ ID NO: 154048 - DNA, 237 bp, Arabidopsis thaliana columbia
  unsure (1)..(237): unsure at all n locations
caaancnnacccannganggaanaacancancacgacgcgncaaaannctgnatcggaggaccgagagancnccatcnccngnccagaaacganncccaccaancccaannncgngaaanncgnnagggnnnnagnnngaancncaacncaacagaacgagncgacccaggannaggaagaagaaaagcgangaagaaggcgacgaanggccggnnnnncacaancgggctagncgc

SEQ ID NO: 154049 - DNA, 435 bp, Arabidopsis thaliana columbia
  unsure (1)..(435): unsure at all n locations
ctgagagggagcccatcngngcccnncaagcaataatggaaggacnncaggnncnnacccgggaggatgttggcgcagaagcggacagctcccgacaccaccaccggtaacaaagacatcatcatggtcgaccacatgaggaagatgaagaacaacgctattgtgtgcaacattggtcactttgacaatgagattgacatgcttggacttgagacttaccctggtgtgaagcgtatcaccatcaagccacagactgacaggtgggtgttcccagagaccaaggctggaatcattgtcttggctgagggtcgtctgatgaacttgggttgtgccactggtcacccaagtttcgtgatgtcttgctctttcaccaaccaggtgattgcccagcccgagctctggaacgagaaagcaagcggaaagtacgagaagaag

SEQ ID NO: 154050 - DNA, 249 bp, Arabidopsis thaliana columbia
  unsure (1)..(249): unsure at all n locations
aaacgagagggagagaagtaaaaaggcgacgncnggaacgnacgggacggaggnaccgaaaaaaggaccggcccacccacacnacaagaggnggaagaacgagaaccangacancccggangccancggccaccacagccaaaaagcnacacggcacgaaggcgaacangacncacacggggcgaacaggagggggaaccacacanggganggaaaggaggaggggnncaaggagagaagagagaaaga

SEQ ID NO: 154051 - DNA, 408 bp, Arabidopsis thaliana columbia
  unsure (1)..(408): unsure at all n locations
gaaaagaggngctaaaggngnacggattaaatattttttcaccaaagagagcnnngggcacgctgatcgagaagggcgnngcctccgagaccanccccgncgancncaagaaaggagaacacaagcagccngcnaaacncgctctacagccttttggtactgttcctgctgttgttgacggtgactacaaaatcttcgagtcccgtgcggtgatgaggtacgtagctgagaagtacaggtcacaaggacctgatcttttggggaaaaccgttgaagacagaggtcaagttgaacaatggcttgatgtggaagcgaccacttaccacccacccgctattgaacttaacgcttcacataatgttcgcatcagtcatgggattcccatctgatgagaagctgatcaggaga

SEQ ID NO: 154052 - DNA, 260 bp, Arabidopsis thaliana columbia
  unsure (1)..(260): unsure at all n locations
gcaaaaagaaaacaagaagancagaancggaancaacaagcccggaagaagaggccgaggggcccaaccagcagagcgtcagagggaagatgatgagctcgacgcagataacgatcctaacagcaccaccgaggacacgacatacacgggtaagtatgacagcgaacacggtcagcggaagcaccaagagcctaaggcgaaggaagacaaatacccactccccggtgagaagccagccacagaacacggcaacaggaacc

SEQ ID NO: 154053 - DNA, 453 bp, Arabidopsis thaliana columbia
  unsure (1)..(453): unsure at all n locations
gncacaatcaagaacgccgnngnnnaccgnctagttaacttcaacgacncncagcgncaggcgacgaaggatgctggngncatcgctgctttgaacgttatgcgaatcatcaacgagcctacagccgccgctattgcctacggtcttgacaaaaaggctaccagcgttggagagaagaatgttcttatcttcgatcttggtggtggcacttttgatgtctctcttcttaccattgaagagggtatctttgaggtgaaggcaactgctggtgacacccatcttggtggggaagattttgacaacagaatggttaaccactttgtccaagagttcaagaggaagagtaagaaggatatcaccggtaacccaagagctcttaggaggttgagaacttcctgtgagagagcgaagaggacttttttcttcactgctcagaccaccatcgagattgac

SEQ ID NO: 154054 - DNA, 443 bp, Arabidopsis thaliana columbia
  unsure (1)..(443): unsure at all n locations
anccttggtgctctcgctaacccncacaatatcataagtcggaanngncncagcncgngactggagcatcctgagccagctcaaaggaaccacaaccaccacgaagactagccaaaccggcgncacatctntgaaagctcccaacctaaacggatactgtgagagctggagagtcaacgtggagcttaacaacataagggactttaaggtggttccacaggaatgtgtatggttcgtccaaaagtacatgacctcatctcaatacgaagatgacgtggagagagccgtcgatgaagccatcctctacctcggaaaaacttgttgcgagaagaagacatgcgatggcatggatgcttggatctttgacattgatgacactcttctctcaaccattccttaccaacaggagcaacggttgtttcggtggtgagcaactgaacacg

SEQ ID NO: 154055 - DNA, 408 bp, Arabidopsis thaliana columbia
  unsure (1)..(408): unsure at all n locations
ggnggaatggcattnnggngnaccnanggcataatttttttttctgnacacncaacanncgggaggagttattacttgttgctgtcttgcttagacattcagggacaaaagtgatttttgcagatcatcagtttctccaaatagctgaaggagcttgtgaaatcctctcaaataaaggtgacaaggtcccgattttggtcttgatcccagagcctcttactcaatctgtttcaaggaagaagagatctgaggaaatgatggaatacgaagatgttgtagcgatggggaaatcggacttcgaggttatacgaccaacagatgagtgtgatgctatatctgttaattacacatcagggtaccactttaagccccaaaggtggtggttatagtcacagaggtgcttatttg

SEQ ID NO: 154056 - DNA, 366 bp, Arabidopsis thaliana columbia
  unsure (1)..(366): unsure at all n locations
accgggccgacccacgcgnccgagacaggaagtgaggaaacaccngaaaannnaattttatttaccacngnnnangnnaaaaaccgnnctttataggaaactcaggtcgatctacaccgnnacttccatgctcttggcgctggagttattgaggaggtccgtgtccaacgagacaaaggctttggtttcgtgagatataacactcatcccgaagctgctcttgctattcagatgggtaacactcagccttacctctttaacagacagataaagtgctcatggggaaacaagccaactccaccaggtacagtctcaaacccactttcctcacctgccccagctccagattctggtctatctgcattt

SEQ ID NO: 154057 - DNA, 437 bp, Arabidopsis thaliana columbia
  unsure (1)..(437): unsure at all n locations
gaagaatgtgaatcatcttctccaagtttaatcgttggttnnnnnccccactgngatcgtgagctttatatattatatacacgagaatcttgtacccaattaacatatacatacatgtaaatgtgtgtatgtatataatataaaattattctccttttcactaatttttcttcaaatactttaatgcccaccacctgttcgatcaaattccccatctcgaaaagctagaactttcttcgtctctattggtctctcactctctctcttacctcttctcatttgttctttctccttctaaattgggttatcaagtatattggatcaacgggtttgattcacgatttgtcatttcatcttcgtggagagagtttgatctgatttgttgatcgtcagcgttatgtctagtccgagaagtaacaagccgaagattgtcaacg

SEQ ID NO: 154058 - DNA, 452 bp, Arabidopsis thaliana columbia
  unsure (1)..(452): unsure at all n locations
gaagaagcaaatatggcggncccanngctaacataaaattttgngaagaagaggncngctagggggattagtccccagagtgaccgtccaatcaccgtcaaggaaagctggaggaggccaaagggtattgattcaagggtgagaagaaagttcaaaggtgtgactttgatgcccaatgttggttacggatctgacaagaagactcgtcactatcttcccaatggattcaagaaattcgttgttcacaacacaagtgagctcgagttgttgatgatgcacaacaggacttactgtgctgagattgctcacaacgtcttcactaagaagagaaaggcaattgttgagagagcttctcagctagacgttgttgttaccaacaggcttgctaggcttcgtagccaaaaaaacgagtgaagaagaatcttgcctactacttagttgtttcttctggt

SEQ ID NO: 154059 - DNA, 441 bp, Arabidopsis thaliana columbia
  unsure (1)..(441): unsure at all n locations
gacccacgcgnccggaccaaccccgngagganaaacngnngccgatactttatcttttataacaccggnnnnngnngggacggaaagagaaaaangggngggacccctgggaancnnggcggganaaacnacggcgnagctctaatggctggctggagtcgtatgatgactcaccgatcgtccaagcgagtcgccaaggcagttgatatgaaactactaggctctcttagcagagacgatttgaagaaaatttgtggtgataatttccctcaatggatatcgtttccagcatttgaacaggtcaaatggctgaataaactactgagcaagatgtggccatatattgcagaggcagcaacaatggtaataagagattctgttgaacctctgcttgaagattacagaccaccaggaattactttcctgaagttcaacaaattg

SEQ ID NO: 154060 - DNA, 263 bp, Arabidopsis thaliana columbia
  unsure (1)..(263): unsure at all n locations
cannaggggagaaacccnaancggcgacaaatagtttattttttgacncnanccacaagaggggggccactggaggcaagcagaagcaccgcacgaagaagcgaaagnangagaagggaaggcagccagccaacaccaagcncncaagcaacaagacggncagaagaanaagagnncgnggnggaaangnnaagnggcgagcgaagaggcacgaaacaggaaacnacccggggggaagagaagcaacnacccgcaagaccaga

SEQ ID NO: 154061 - DNA, 453 bp, Arabidopsis thaliana columbia
  unsure (1)..(453): unsure at all n locations
ggagaagaaccacgtccacgacaaccnccggattggtaatatttnacgncaccnacncaacgggcgcgtccggttgncagcagcagcaacattctaggagtctttcgtttggcattcacgcgccgccgtgttactctatcgccgaatgctcggaggagaatattgagagtttcggcgaaagcgtcgacgaagaatgctatggagtataggaaattaggagattccgatctcaacatcagcgaagttactatgggcactatgacatttggggagcaaaaaactgagaaagaatctcatgagatgctgagttatgcaattgaagagggcatcaattgcattgacactgctgaagcttatcccataccgatgaagaaggagacgcaaggtaaaacggatctttatatcagtagctggttgaagtctcagcaacgtgacaagatagttttggcaact

SEQ ID NO: 154062 - DNA, 449 bp, Arabidopsis thaliana columbia
  unsure (1)..(449): unsure at all n locations
ctgcttcttcttccttnncnnaccaaaaataaaatttgtnnnagncanacnnaanggcggggaattcgtagaaaaatcctcttctttcacatgagaaacccaaatcgacggaggagaataagagttctaagccggaatcagcttctgggagttcaacttcatcagctatgcctggcttgaatttcaatgcttttgatttctctaatatggctagtattctcaacgatcctagcatcagagaaatggctgagcaaatagctaaagatcctgcgtttaaccaattggctgagcagcttcagagatctattcctaacgctggccaggaaggtggtttccctaactttgatcctcaacagtatgtcaatacaatgcaacaggttatgcataaccctgagtttaagacaatggccgagaaacttggtaccgccttagttcaggatccacaaatg

SEQ ID NO: 154063 - DNA, 335 bp, Arabidopsis thaliana columbia
  unsure (1)..(335): unsure at all n locations
gggagcnnacaacgagcatgggnngatgaatgagtttaaggttctgcctggtcggatcgatgatcttcagtggtctgctgatgggatgaggatcgttgcttctggtgatggcaaaggcaaatctcttgttcgtgctttcatgtgggattcaggatcaaatgtgggagagtttgatggtcattctaggagagttcttagctgtgctatcaagccaactaggccgttccgtattgtaacttgtggggaggattttctggtgaatttttatgaaggtccttcttttaagttcaagctctcaagcagagagcattccaactttgtcaactgtgtgaggt

SEQ ID NO: 154064 - DNA, 424 bp, Arabidopsis thaliana columbia
  unsure (1)..(424): unsure at all n locations
ctaatctccttttaagggggcnnncgagatacagattttaaaaanggaancnnnnnggggggcatctgaatccggcaacgagggacatcccgacaagctnngngancaganctccgacgctatcctcgatgcttgccttgaacaagaccctgagagcaaagttgcttgtgagacttgtaccaagactaacatggtcatggtttttggagaaatcaccaccaaggctaacgttgattacgagcagattgttcgtaaaacatgccgtgagattggattcgtctctgctgacgttggtctagatgctgacaattgcaaggttctggttaacattgagcaacagagtcctgacattgcacaaggtgttcatggtcatctcaccaagaaaccaaaagaggttggagctggtgaccaaggtcacatgttt

SEQ ID NO: 154065 - DNA, 342 bp, Arabidopsis thaliana columbia
  unsure (1)..(342): unsure at all n locations
tttttcctcctcccacttgnctccgggggggaaggtctcggtggtggtggtggtcttggtagccggaagccgatcaagaatgtatctgatccggatgttgttgcggtcgccaagtatgccatcgaggaacataacaaggagtcgaaggagaagttggttttcgtcaaggttgtggagggaacgacgcaagtggtctccggtacaaagtacgatctgaaaattgcggcgaaggatggtggtggtaagatcaagaactatgaagctgttgttgtgaaaagctttggcttcattctaagagccttgagtctttcaaggcgttatagatctttaattgggattttt

SEQ ID NO: 154066 - DNA, 212 bp, Arabidopsis thaliana columbia
  unsure (1)..(212): unsure at all n locations
nccaacgcccttgnagaagannagccnccgcgtgctttttctagcancncccnncncaaccagacgggattagccagacgtctgttacaatgatattggaggatgcgatattcagaaacaggatattcgtgaggctgttgaattgcctcttacccaccacgagctttacaaacagattggtattgacccacctcgtggagtcttgctctatg

SEQ ID NO: 154067 - DNA, 390 bp, Arabidopsis thaliana columbia
  unsure (1)..(390): unsure at all n locations
cctgaacatttccagcaaggctcacacggttttcctttcttcancnnncccacaagaagcctggccggttcttactccgatcaatacctcggaatctttaacaaaacaaacaacggtaaagcctcgaataacgttatagctatcgagttagatattcataaagacgaagagttaggagatattgatgataatcatgttgggattaatattaaacggtttgagatctgttgcctctgcttctgctggttactatgatgataaagatggaagctttaaaaaactttcttagatcagcagagaggtaatgaggctttccatcgtttattgtcaacctgatcaacatgctaatgtttctttattcccttgctagatccctgttccggcacttaa

SEQ ID NO: 154068 - DNA, 275 bp, Arabidopsis thaliana columbia
caacaacaaaccaaacgaggcactgcttcacccgttacattgagttccacaggtgcacaactgcaaaaggtgaggatgcaaatgaatgcgagaggttcgccaagtactaccgcgctctctgccctggggaatgggttgacaagtggaatgagcagagggagactggaacattccctggccctctttgattcacacaagaatctctctttttcattttaagtttgagaccaaaaaaggtcgtgtggatgatcatgaaatctataactcttgtcttt

SEQ ID NO: 154069 - DNA, 148 bp, Arabidopsis thaliana columbia
caccgacgccgggaccgaggccacacagaagatcggtcttgtttatcagatcaacattgctccaaagaaatcagggtttgaagaggttacttacatcgttgatctgaagaaaggcgaagtcaccaaagggaaatatgaaggagggaaa

SEQ ID NO: 154070 - DNA, 340 bp, Arabidopsis thaliana columbia
  unsure (1)..(340): unsure at all n locations
ccggcganctatctctgggatttttttatggaaaagggagcccctactactgaagatacgtcaagcttcgaagaggatcagcttgcttccatgtccaccgaagatatcactagagctactcgacttctcgacaacgagattcgaattctcaaggaagacgcgcaaagaacaaatctagaatgtgattcttacaaggaagaagattaaggagaatcaggagaagattaaacctcaacatgcagctggcttacttggttggcaacattgtcgagaatttggagatgtattcagaaaatgatgctgaggaagatggtgcaaaatattgaacttgactcgcaac

SEQ ID NO: 154071 - DNA, 300 bp, Arabidopsis thaliana columbia
  unsure (1)..(300): unsure at all n locations
ttgcatcttgagncnccnncgcnncngcagggggccgcttcttagattcacggacgcccctcaccattagcggctccatcctccgcacgaatgctctctccgccgctcagaaacgtggtgaaagtctcggcgtctggaactgtactggtcgagaaatctgaagccgagaaaactcaacgcctcaaaaccgcttacctcgagaggattatccctgcgctcaaagaagagttcaagtacgttaatattcaccaggttccaaaggtacagaaaattgtagtgaattgtggtattggagatgcg

SEQ ID NO: 154072 - DNA, 353 bp, Arabidopsis thaliana columbia
  unsure (1)..(353): unsure at all n locations
aaaacctcctccgttctcaannncgcaaaanggcngacggggaagatctgaagcggaagcaacggcccccgaagaancggncgnnaggnngctagagnagnnctncagagggaagaagnngagcccgncgctgnnaacgancctttcatcaccaccgagtacatgacatacatgtttaagtatgacagtgttcacggtcagtggaagcaccatgagcttaaggtgaaggatgacaaaactcttctcttcggtgagaagccagtcactgttttcggcatcaagaaccctgaggacatcccatggagtgaggctggagctgactttgttgttgagtctactggggtcttcactga

SEQ ID NO: 154073 - DNA, 316 bp, Arabidopsis thaliana columbia
  unsure (1)..(316): unsure at all n locations
ctctctttttcacatcccaaggctagaaggcctcgatctattcacgcanaaaccagggnnccgggacaattcatcttacacgtatcctctattccttccttcctttctccgtcatcatcatttttcccaccgacaacaatctctcggagtttggatcaataatggcgttgaagtctagttctgctgatggtaaaaccagaagctctgttcagatcttcattgtgtttagtttatgttgcttcttttacattttgggagcatggcaacgaagtggttttggtaaaggagacagtattgctcttgagatgacccacag

SEQ ID NO: 154074 - DNA, 253 bp, Arabidopsis thaliana columbia
  unsure (1)..(253): unsure at all n locations
gcggacgcattttgagaccaaccnaaanccgtgaattttttcnggnaaccancancnaagaagagantttttagccggatatggtcccactcatgcttttgataggtctgttgttcatcttttaaagaagctaccaaatgtcaacaaatctgatttgattgaaggaaaattggaaatgaaacacccgggcttaaattctggatacaatggacagtacatatgttctcattgagcttccatggtccaaggtagt

SEQ ID NO: 154075 - DNA, 430 bp, Arabidopsis thaliana columbia
  unsure (1)..(430): unsure at all n locations
cttccgaacaagcctcctttaatcttaaccataacctgctattttacaaaaaancctnagataatcagagcttgatattatggatcatatcatcggctttatgggcacaacaaacatgtcacataacacaaaccttatgatcgctgccgcagccactaccactacgacctcttcgtcttcctcttcgtcctccggaggctcggggactaaccagctaagcaggtacgagaatcagaagagaagagattggaacactttcggacagtatctacgcaatcaccgtccaccactttctctctcccgttgcagtggtgctcatgttcttgaattcctcaggtacctcgaccaattcggcaagactaaggtataacatatacanctacatatgtgtctatctatctcttacatcaaaatactctttttgataatt

SEQ ID NO: 154076 - DNA, 377 bp, Arabidopsis thaliana columbia
ccacgacaaaggtgtcaaattaggtcatcatgctcgttataagcaggagcaggaaatggagattgaagctcttgaagctatacttatggatgagtttaaagaaattcattctagtgaaagtgggcttaatacttcgaatcgatgctttcagattacagtgactcctcaggatgatgaactggaggaattagcaatcccaccagttcagctggctttggttttctcgcacacagaaaattacccggacgaggctccgcttttggatgttaaaagtattcgaggaatccatgttagtgacctcaccatcttgaaagagaagcttgaacaagaggcatctgaaaatctaggtatggccatgatctatacactggtctcat

SEQ ID NO: 154077 - DNA, 390 bp, Arabidopsis thaliana columbia
  unsure (1)..(390): unsure at all n locations
cacaatctcaagattttctacttcnaaaaacactcactctttcttctagnnnctncttgcaacgcgggagtcttcttgcagatcttgttaaccttgacatctcagacaacagtgaaaagatcatcgctgaatacatatgggttggtggttctggtatggacatgagaagcatagccaggactctccctggacctgtgaaccgatccatcaaaactttcaaagtggaactatgatggttcaagcactggtcaagctcctggtcaagacagagaagtgatcttataccctcaagcaattttcaaagatcccatccggagaggcaacatcaacccttgtatgggtgatgcttacactccagcgggagagccaatccctactaacaagcgacat

SEQ ID NO: 154078 - DNA, 361 bp, Arabidopsis thaliana columbia
  unsure (1)..(361): unsure at all n locations
cgtcgataactgcgatctctcaggnnttccctccctttcggataccgaancactcaaacagtggcttcttgtagatgacgagcccgctcctacatggccattgcttcttgtgaaagcaacctacttccgatgtggtggcatggccataggactctgcatctcccataggctcgccgatgcagcctctctctcgattttcttacaggcttgggcagccacagctagaggagagagcgacttggtggccagtcctgacttttgttccacaaaactttaccccgcagcaaatgaagccattaaaattccaggggaagtagttaacagaacaagtgtcacgaagagatttgggttttgagcatct

SEQ ID NO: 154079 - DNA, 423 bp, Arabidopsis thaliana columbia
  unsure (1)..(423): unsure at all n locations
agcaaatccaaaccaaagnncnccannttcgtcgcttctttaagcnnnnncagnancatagagacactttttttgttttgatgagacccggctttagctggtacttcttcttcaactgcaatctctggatcgagtttctctcgttctggagcttcttctgaatctaaagctcttcaaatatgttcgattaggttatctgatcgaacccatttgtctcagagacgttactctatgaaacctttaaacgctgagtcacattcacgaagcgaatcttgggttactcgtgcttcaactctaatagctcctgaagttgaagagaaaggaggagaagttgaagactttgagcaacttgctaaaaagcttgaagatgcctctccactngaaacatggattaagctcttgagagattcggagaccaaatcg

SEQ ID NO: 154080 - DNA, 328 bp, Arabidopsis thaliana columbia
  unsure (1)..(328): unsure at all n locations
agctttgtgaccagatttctgaagcgatccctgactcttgcttagagcaagancctgaaaggagagtgtcgtgtgagacatgcaccaagaccaacatggtgatggtgtttggtgagatcactaccgctgcgaaagttgactatgagaagattgttagatccacttgcagggagattggttttatctctgctgatgttggtcttgacgctgacaaatgcaatgttttggttaacattgagcaacagagccctgacattgctcaaggtgttcatggtcatttgaccaagaagcctgaagatattggtgctggtgatcagggacatatgtt

SEQ ID NO: 154081 - DNA, 295 bp, Arabidopsis thaliana columbia
  unsure (1)..(295): unsure at all n locations
ggaagacaaattacctcatcgaggatnctcactcatctttttgacaaanngaggatgctttcaaggaattctcagcaagggatgatatcgctatcattcttttaagccaatatatcgccaatatgatccggttcttggtggatagctactacaagccagttcctgctatcttggagatcccttccaaggaccatccctatgatcctgctcatgattcaggtctctctcgcgtcatgtacctcttttttgcagaatctgtgtcacaactgttaaacatatgtcattgtgcaagctc

SEQ ID NO: 154082 - DNA, 325 bp, Arabidopsis thaliana columbia
  unsure (1)..(325): unsure at all n locations
agatgaagctcaaagtgtatgcagancagaaccttctttttcatcacgngcngnnatcatattgggcaaggttaaaggaatccaattcgatgaggtcttgatttccttggcgaagcgtcaacaattatctcctgaattcaaagatattaacccattggggaaagttccagctattgttgatggcaggcttaagctctttgagagtcacgcaatcctgatatatctatcctcggcgtttccaagtggtgctgatcattggtatccaaatgatctatccaatagagccaagattcactcagctttggattggcatcacaccaattta

SEQ ID NO: 154083 - DNA, 339 bp, Arabidopsis thaliana columbia
  unsure (1)..(339): unsure at all n locations
cggagagtgagagaagagagaaacannncgctcatttttccgccgccgctgctcgacctgtggtcaccttccaaaccttggatggcgacatgtccaccgatcaatcctccaccgtcgtacttcccgacgtcatgactgcgccagttcgaccagacatcgttaacttcgttcacgcccaaatctccaacaacagccgtcagccatacgccgtatcgaataaggccggtcaccatacctccgccgagtcctgtggataccgacgtgccgggtctcgtatccctcgtgttcccggtggtgggactcaccgtgctggtctagctgcgttcggtaacatgtgtc

SEQ ID NO: 154084 - DNA, 329 bp, Arabidopsis thaliana columbia
tcgatgaatctgacaaaatgattgacagtgccaggagcatgctacacgaggtgatcgcccatcctactgtctccatagctaaagctgctatcattgcatgtctaacagccagaacccatgcgttggctagggcaaatgctagtggctcacgttataacccacggctgaccgtaattgagaatatggagcgtacttcaaccttgctatctagatacgagacgatctacttgattctagacatggcagctgagctgactgaccgatggctggcaaagcatatcgtggcccttcactctaagaacactgagagtgctcacgaggaagctata

SEQ ID NO: 154085 - DNA, 395 bp, Arabidopsis thaliana columbia
cttccgaaaaaaaccacaaaaagtttcaatggccgcccctcaatttctctctcctcccctgccttcgccggaaaggctgtgaacctttcccccgcggcatctgaagtcctcggaagcggccgtgtgacaatgaggaagactgttgccaagccaaagggtccatcaggcagcccatggtacggatccgaccgagtcaagtacttgggtccattctctggcgagtcaccgagctaccttaccggagagttccccggagactacggatgggacaccgctggactttcagctgatcccgagacattcgcaaggaaccgtgagctagaagttatccacagcaggtgggctatgctcggagccctaggctgcgtcttccctgagcttttggctaggaacgg

SEQ ID NO: 154086 - DNA, 247 bp, Arabidopsis thaliana columbia
aaaaacccgcgaagccgcggatctttagccaaattcctaagggacaggttgatctactagattttattgactggtctggtgttgaatgtcttaaccaaagctcatgtcactctttgcccaatgctctcaagcagggatttagagaagatgaaggtttaaacttagagagtgatgctgatgaacaacttctcatctatatttcttttaaccaaattatcaaactacattcctttgctatcaaaggccc

SEQ ID NO: 154087 - DNA, 180 bp, Arabidopsis thaliana columbia
aaccggcgccgacaaatgcggccatgataccgtagacggaggcttaacggtgttctgtccctccgacagcgctgtcggtaagttcatgccgaaattcaaatccctttctccggcgaacaagactgcgttagtgctttaccacggcatgccggtttaccagtcgttacaaatgcttagatc

SEQ ID NO: 154088 - DNA, 315 bp, Arabidopsis thaliana columbia
tatgattctccggatggtgtgtaggttcgaggacggtacgaccaaatcttcgccaagattttgacgagagaagctcttagctttgtggctgagttacagagagagtttcgtggccatgtgaagtatgccatggagtgccggagagaggcaagacggcgttataactccggtgccgttcctgggtttgatccttccactatagtcatcagatacagtgattggagctgagccttcgttccttctgccgttgctgaccggagagttgagatcaccggtccggtcgagaggtagatgatcatcaacgcttttaacttc

SEQ ID NO: 154089 - DNA, 348 bp, Arabidopsis thaliana columbia
ctcaaaagtcgaatatcccaaattcgatccgctcctcggcgataatctccgatctagatccgatggcgaaagaaccagttcgtgtgctcgttactggagctgcaggacaaatcggatatgctcttgtacctatgattgcaaggggtatcatgcttggtgctgaccaacctgttatcctccacatgttggatattcctccagctgctgaagctttgaacggtgttaagatggagttgatcgatgctgctttccctcttcttaaaggtgttgttgctacaactgatgccgttgagggatgtactggagtcaatgttgctgttatggttggtggtttcccgaggaaagaag

SEQ ID NO: 154090 - DNA, 448 bp, Arabidopsis thaliana columbia
  unsure (1)..(448): unsure at all n locations
gggaagatgaagatggagagggaagaactcctccttattaccgntcggntcagaggagccgaaccgaaccgacccgnaaaccgaaatcctcaaaagaaattgccgatcggtttgctactgttcaaaacctcggtgccgagaaccgaaactgtcggttttttcggttcgggtttctcggtttcttccgaactcccaggcctagtttggttttatttttcacgagttttgcttctcttttcatcggcgacgacgacgtcgagtttctgtcaaaacgttaacgatccgactcgagcgtcgacagtaagagaagaagacagcgattgtgtgtagatcgacggcgaacgtgtgtcgatccgtctcgatcgacggagaatacgtttcgatccggtttcgatccaatcggggagtttgaggatccaaatcgggaattgcattaatactgatcttc

SEQ ID NO: 154091 - DNA, 428 bp, Arabidopsis thaliana columbia
  unsure (1)..(428): unsure at all n locations
ctctcagtgaacctttagaagttaaatctgctcatttccggaaagnntcactaactcttctggtctctctcggagtattgattcccggcgtttagcaatggaagaaagtagacaactcgaatcgtcgattgatcggctgctgaacgaagagaaacagatgaggctcgcagaaaatgtcgccggaactagaaaagcagctaccgagattcttaagctttgtttcgaagctaaggattggaaacttctcaacgaacagattttgaatctctcgaagaaacgtggtcagcttaagcaggctgtacaatccatggtgcaacatgcaatgcagtatattgatcagacactagacatagaaactcggattgagcctattaagactctaaacaatgtagcttgctgaaagatatatgtcgaaatcgagagagctc

SEQ ID NO: 154092 - DNA, 342 bp, Arabidopsis thaliana columbia
  unsure (1)..(342): unsure at all n locations
tgcttcgccctctcatttcctgagagattaatgncttttctctctccagntattttgctcatgcatcgattcttagagttcaaaatggttgatcaagttcagcaccccactattgcgcagaaagctgccgggcagttcatgcgttcaagtgtttccaaggacgttcaagtgggttaccagaggccttctatgtatcaaagacatgcaacctacggaaactactccaatgctgcatttcaatttcctccgacatcccggatgttggcaacaactgcttctcccgtgtttgtccaaaccccaggagagaaggggttcactaactttgcccttgactttctgatg

SEQ ID NO: 154093 - DNA, 313 bp, Arabidopsis thaliana columbia
ctgatcaccaaataagaaaactctaggtgcctactgtattgggtttccactatctttattgtagagatggagtcttcaagtccccaccatagtcacattgttgaggttaatgttggaaaatctgatgaagagagaataattgtggcgagtaaagtctgtggagaagcaccatgtgggttttcagattctaagaatgcttccggggatgctcactaacgctctgcttctatgcggaagctttgtatcgccgtcgtgctgtgtctagtgttcatgagtgttgaagttgttggtgggaataaagccaatatgttag

SEQ ID NO: 154094 - DNA, 446 bp, Arabidopsis thaliana columbia
gcccaacaacatcaagctctatgtccgctgttccttttcatggacaactgtgaagacatcagtcctgtttaccttgggtttgtcaagggtattgttgactctgaagatcttcctctcaacatctcaagagaaacattgcagcagaacaagatcctcaaggtcatccgcaagaaccttgtgaagaagtgtcttgagctcttctttgagattgctgagaacaaggaggactacaacaagttctatgaggctttctctaagaacctgaagctcggtatccatgatgactcccaaaacagaaccaagattgctgtgttgctccgttaccactcaaccaagagcggtgatgaattgaccagtcttaaagactacgtgacaaggattaatgaaggtcagaacgatatcttctatatcactggtgagagcaagaaggcctgtgagaactcttc

SEQ ID NO: 154095 - DNA, 391 bp, Arabidopsis thaliana columbia
  unsure (1)..(391): unsure at all n locations
ctatgatgacgacaccacccaatactatggctatgcttcaaaacctcgtcttctctgttccaatctctcgtatggtagttcggcgtcactccctcgctaccaccttctccgctgccgccacaaccgtcgtaccgtctcctaaaccggtatcagccaaaccggcgcgtactccacacgtggactcacatgttctcatcggaatgtcagagcctgagcttcaagagcttgctatcaacctcggtcaagaaggatacagaggaaagcagctccatcatcttatttacaagagaaaggttaataaagttgaagactntagcaatttgccactgacgtttcgtaaaggacttgtggatggtggatttaaagtgggaagatcacccatttaccaaac

SEQ ID NO: 154096 - DNA, 428 bp, Arabidopsis thaliana columbia
  unsure (1)..(428): unsure at all n locations
ccccacccgtccgaattggcaccagaaggaaaaaaccccatcatcattatctctatgnctncaagncttgcaagaaccggtcaatgggttttttctcaagatattccgaccgatgttgttgttgaagtcggagaagccaatttctctcttcataagttcatgttagtggctaagagtaactacataaggaagctaataatggaatccaaagatagcgacgtgacaagaatcaatctctcggatatacccggaggtcctgagatatttgagaaagctgccaagttctgttacggtgttaacttcgagatcaccgttcagaacgtggcggctcttcattgcgcagccgagtttcttcagatgaccgataagtactgcgacatcaaccttgctggtcggacacaagacttcctttctcaagtagctctctc

SEQ ID NO: 154097 - DNA, 331 bp, Arabidopsis thaliana columbia
tccgctctagccaaattacttggccacgaccataaactcaattcatccgcttagcttctaaaatctgaacatcgagaaaaaatgagttggtggcgggctggcgccatcggagctgccaagaagaaactcgacgaagatgaaccatcacaaagcttcgagagcgtcgctctcatcatcggcgttactggaatcgtcggaaacagcttggcggagattctccctctttccgacacacccggtggtccatggaaagtctacggcgtcgctcgtcgttctcgtcctacctggaacgccgatcatccgatcgattacatccagtgcgatgtcttcg

SEQ ID NO: 154098 - DNA, 257 bp, Arabidopsis thaliana columbia
  unsure (1)..(257): unsure at all n locations
gtccgcgactggatctgcattacccgctccactgttcctcatcttaaanggagcagactgcttctatatgcagctattctggttgaagacggatctattcacgactctcaaggcactttctttgatgggagtgcttccagcgttcgcgagacacaaatcactatctcaacttgcataagcatcaaacatgttgaaatctgctagaagacgaagaactcactatgaatgatctttttttgcgtcatgcgtatattcag

SEQ ID NO: 154099 - DNA, 410 bp, Arabidopsis thaliana columbia
aaataagattcatcagaagagtaaataaacattataatccaacaaaccaaactagaaaaatgtcagtagttttactctcttctacttctgcaacaatcaccaaatcccaatccaaaaagattccctttttatctcccaccacaaaattcccattaaaggtctcaatttctccatcaagatcgaaacttttccacaaccctttacgcgtggcggcgccgccgtctgtacccacttcggattcgacggaggagaagcggatcgaagaagaatacggcggagataaggaagaagaagggtctgagtttaagtggagagatcattggtatccagtttctttggttgaggatttggatccgaatgtgccaaccccgttccagctcttgggtcgagaccctgaactctggtttgat

SEQ ID NO: 154100 - DNA, 384 bp, Arabidopsis thaliana columbia
gtcttctgggtttttcctattcctctttccctcctctccttcaagttgctgcaatcccttgaaaacccaataaacccccaattttccatttctcataaagttcacatttttccttcttcttcttctgccaattctctgattccctcgtttcaatctccgttttgctttgcctatcagataaatttcttcttgctttcctttctatctcataacgataagttgaattaatctttgcgtcttagttcatcagtagagagagtagggttttttccgcttatttttagggaatttcattttgttggaggtgagaatctctattcgagtccccaagattctctttatatccctagtttagttgtatggttgagttttgattggaatatc

SEQ ID NO: 154101 - DNA, 429 bp, Arabidopsis thaliana columbia
aaggggaaccaacgtaaccctaattttgccctcccctctttgttcagaaaattttccctttactctcaaattccttttcgatttccctctcttaaacctccgaaagctcacatggcgtctcgaaactatcggtgggagctcttcgcagcttcgttaaccctaaccttagctttgattcacctggtcgaagcaaactccgaaggagatgctctctacgctcttcgccggagtttgacagatccagaccatgtcctccagagctgggatccaactcttgttaatccttgtacctggttccatgtcacctgtaaccaagacaaccgcgtcactcgtgtggatttgggaaattcaaacctctctggacatcttgcgcctgagcttgtgaagcttgaacatttacagtatctagagctctacaaaaacaacatc

SEQ ID NO: 154102 - DNA, 210 bp, Arabidopsis thaliana columbia
ctggaataaaatcagaattacaaacaaaaatgttcttgcaaaagcttcctctcattgggctgcttttgctcctgaccatcgtcgcctctccagcaaatgcagatggacctgtttgcccgccgtcgaacaaactaagccgggcaagtttccctgaaggttttttatttggcacggctactgcggcataccaggtcgaaggtgcgattaatg

SEQ ID NO: 154103 - DNA, 432 bp, Arabidopsis thaliana columbia
atagatgcgatgtttccaggtacacaagtgcctcgtctgcttcattcatcgagctacttctggggattccttgaaaatcaagttgaaggagtcgcctcttcctacaaccttgagatttaaggcttgtatcatgcttgttaaggttaatgaagaactgatgagttatgatcagacaccgatgatcgttgacattgtcatcagggacgaacataatgatctcaaagaaaagatatatccaagcatatatccaagcatatatccacttttaacagagcatatatacacatttgaacttgacgtagaggaggtgacttccacggagcttgtctttgagttcccacaactcaacaaaagaaattggaagataggagaatgcgggatactccaaagagaaacgagatcactttcgcggagctcttcgccggatctctc

SEQ ID NO: 154104 - DNA, 355 bp, Arabidopsis thaliana columbia
  unsure (1)..(355): unsure at all n locations
atagctagctagagagtaaaaagaacaaagccttctttagaagngagcgaagaaggcaaaacggaccatggtaaagactacgtggatcctccaccagctcctcttctcgacatgggtgagctcaaatcctggtctttctacagagctctcatcgctgagttcatcgctacactcctcttcctctacgtcaccgtcgctactgtcatcggccacaagaagcaaaccggtccttgtgacggcgttggtttacttgggatcgcttgggctttcggtggtatgatcttcgtcctcgtctactggaccggcggtatctctgggggtcacattaacccaactgtgacttttggtctgttct

SEQ ID NO: 154105 - DNA, 266 bp, Arabidopsis thaliana columbia
  unsure (1)..(266): unsure at all n locations
tccggccgatgtaaatgttgacaagatccctaaagctgcctttgtggttnaccaaggacaccatggagacaatgcggtttaccgtgcaaacgtaattctccctgcatcggccttcactgagaaagaaggaacctatgaaaatactgaaggatttacccaacagactgttccagctgttccaacagttggtgatgcaagagatgactggaagattgtgagaagcctatccgaggtctcggggtgtgaagcttccatacaactcaatc

SEQ ID NO: 154106 - DNA, 422 bp, Arabidopsis thaliana columbia
cttccgtcaaattttaggcagatcctaacattggcatcctgttctactcagatcagcaagaagagaaagtttgtagcggacggtgtgttctacgctgaattgaatgaggttcttacaagagagctagcagaggatggttactctggtgttgaggttagggttactcctatgaggactgagattatcatcagagctacacgtactcagaatgttctcggtgagaaggggaggagaattagggaattgacttcccttgttcagaagagattcaagtttccagttgacagtgttgagctttatgccgagaaggttaacaacagaggtctctgtgccatcgctcatgctgagtctttacgttacaagcttcttagtggtctcgctgttcgtagggctagctatggtgtgttgagggttgtatggag

SEQ ID NO: 154107 - DNA, 414 bp, Arabidopsis thaliana columbia
  unsure (1)..(414): unsure at all n locations
gttcaagcttcgcccacagttgccaaatcgcactanttgctcccacagctaaaagttgattctgaaaacctctctctctttgtgaacaagattaaaaagacgacttctcttttaacttattcctcctctgcttcttcaagatccattgtctgcaatttcaatcccttgtctcgtcatggattccgtcttctctaacgttgctcgtgctcccgaagatcctattctcggtgtaactgttgcttacaacaatgatcctagtcctagtaagatcaatttgggtgtcggtgcctaccgaactgatgaagggaagcctcttgttcttgatgtggtgcgtaaggcaaagcatcagctagtgaacgatccgtctcgggtcaaggaatacattcccattgttgggatttccgattttaacaa

SEQ ID NO: 154108 - DNA, 352 bp, Arabidopsis thaliana columbia
gaagaagttggcttctggtatctccatggtcactcccttggctcttgctgagtcgtaccctacccttgctgctgcaccgcatatgttcatcaatgcgtacaagaatgccttggctattgctgttgccactgagtacaccttccctcaagcagagaaggtcaaggaatacttgaaggatccaagcaagtttgctgttgcttcagtagctgcggtgtctgctgatgcaagtggtggtgccccagctgctgctaaggtagaggagaaggaagagtccgacgaagaagactatggaagtgatttcggtttgttcgatgaagagtagattttgtcggttaagatcttaccttttttg

SEQ ID NO: 154109 - DNA, 418 bp, Arabidopsis thaliana columbia
ccccgcgtccgttacccaaaaccccaaaagcctatcctctcttttccatggctgcttcagcttcgtctctcgctctctcttccttcaaccctaaatctcttcctttcggcgtctccagacctgcctccgtttccctcttatctccttccctctcctttaaactcaattccgactccgtttccttctccatcgccgccaaatggaactctcccgcttctcgcttcgcccgtaacgttgcgattacctcagagttcgaggtggaagaagatggtttcgctgacgtcgctccgccaaaagagcaatctttctctgctgaccttaaactcttcgttggtaaccttcctttcaacgttgacagtgctcagctcgctcagctctttgagagtgccggaaatgttgagatggttgaggtaatcta

SEQ ID NO: 154110 - DNA, 458 bp, Arabidopsis thaliana columbia
cttccacgtggtgttaacccacatcaagtacttcatctaactgccgtgtcaagctctacacatctcccgtcgagacttgcaagaacccaaccaatgtcaacaagggtctcaccggagttcccttctcgatgtactccgacaagaacttgaagctcttcaacgttggtcctttctacttcaccgccggttccaaggctgctcccgccactcccagatactgatcatcacattttgatttatgatgatgatcttgcatggcattatatatgactatatgaggtctctttaatcaatttattaactgatttttttccctagaaaatgttcttgtttgttagttccaaattcatttgattcgttgcattctatctttaaattataataaaattggaagaggtatgtacatcattgtttgacttatgcgagtgattatgcatgagaaattaatattgatatgt

SEQ ID NO: 154111 - DNA, 441 bp, Arabidopsis thaliana columbia
ctctcatcatcggcatcgctctctctaatactcctcagatggatcccgacgctgtatctaaggccttcgtcgaacattactattccaccttcgacaccaaccgtgtcggtctcgctggtctctatcaggaagcttctatgctcaccttcgaaggtcaaaagatccaaggagtccagagcatcgtcgctaagctcacctctcttcctttccagcagtgcaagcatcacatctccaccgttgattgtcagccttctggtcctgcttccggtatgctcgttttcgtctccggtaatctccagctcgccggagaagaacacgctctcaagttcagccagatgtttcatttgatgccgacgccacatgggaagctttacgtgttcaacgatatattcaggttggactatgcctgaacagaaatcagattgttggtagcatacatca

SEQ ID NO: 154112 - DNA, 427 bp, Arabidopsis thaliana columbia
atcagagtccctatccatcttctcatccctactcgagatcagacttcgacagagagtgcgatgagttcatcaacaagaaagcttgaggttgtttcaccagttcccgccgatatcgacatagctaattccgtcgagcctttacacatctctgagattgccaaagatcttaatatcaaccctcttcactacgatctctatggcaagtataaagctaaggttttgttgtctgcgtttgatgagcttcaaggacaagaagatggatactatgttgttgttggagggattactcctactcctcttggagaaggcaagagtactaccactgttggactttgccaagccttatgcgcttacctcgataagaaggttggtacttgtcttcgccaaccgtcacaaggacccacctttggaatcaaggaggtgcagc

SEQ ID NO: 154113 - DNA, 453 bp, Arabidopsis thaliana columbia
  unsure (1)..(453): unsure at all n locations
agccttccgttcgagccattctctgacgtatatgccaattgtgccatcgctgattncacagccaagcagagaggtctcagactctcagaggaacgtgtgcttttggatggttcaccagagagcccattggagacaataactgttcagctaagcaatgtggagtccaaattcgccagttccctgtctgaatcaggagaggttaaagtggaaggaaaggttaaagacggagtcccgcatttgacaaaggttggatcttttgaggtcgatgtaactcttgaaggtagtatcatactgtgcaggcaggtggatcaacctggtatgatcgggactgtcggaagcatccttggagagtctaatgtcaatgttaacttcatgagcgttgggagaattgcaccgaggaagcaagcgattatggcgattggagtagatgacataccaagcatagagacactg

SEQ ID NO: 154114 - DNA, 394 bp, Arabidopsis thaliana columbia
  unsure (1)..(394): unsure at all n locations
ggctagctgactttggctattccactgacactcctgagaaggatacagaaacttggaggcagagagtagatacttattgggatctcttgagtcctaaaattcaatcagacactgtaaggaacataatggacatgaaagcaagcatgggttcctttgctgctgctctgaaagaaaaagatgtttgggttatgaatgttgttcctgaagacggaccaaacacgcttaaactaatatacgacagatgcctgatgggtgctgttcatagctggtgtgaagcgttctcgacttacccgaggacttacgatttactccatgcctgggacatcatatctgatatcaagaagagaggttgcaacgcagaaaatntgctgttggagatggatcgtatacttcg

SEQ ID NO: 154115 - DNA, 165 bp, Arabidopsis thaliana columbia
ggggaggtttcggcggtggtgctggtggatgctccgggggaggattcggcggtggtgcaggaggaggtgctggtggaggagctggcggatgatttggtggtggtgcaggcggaggtcacggtggaggtgttggtggaggatttggtggaggttctggtggaggat

SEQ ID NO: 154116 - DNA, 446 bp, Arabidopsis thaliana columbia
gcattgtctctctccagacgaaaaatgggtgctccatgtttcaccagtaccaggttgtgggaagagctctcccgacagagaaggatgtgcagcctaagatttacaggatgaagctctgggctacgaacgaggttcgtgccaagtccaagttctggtatttcttgaggaagctcaagaaggtgaagaagagtaatggacagatgctcgccatcaacgagatctatgagaagaacccaacaacgatcaagaacttcggtatttggttgaggtaccagagtagaactgggtaccacaacatgtacaaggagtaccgtgacaccactcttaacggagcttgtgagcagatgtacactgagatggcatcccgtcaccgtgtcagattcccttgcattcagatcatcaagacagccactgtcccagccaagctgtgcaagagagagagcact

SEQ ID NO: 154117 - DNA, 222 bp, Arabidopsis thaliana columbia
agacgcggcgctcttagtaatagctgcatcttggtattgtgaccctgcaggaggaccaactggtaacatctgcagaatcatgggcagacgtcacagatcgtggataggccgatttcttgggaaagaagagagacgaaacataaccagatgagactccgatcgcttcagagtttgagcagaatgttcatatttcagagccggagcccgaagttcaacacgaaa

SEQ ID NO: 154118 - DNA, 344 bp, Arabidopsis thaliana columbia
cggagagtgagagaagagagaaacatttcgtgatatatggccgccgccgctgctcgtcctctcgtcaccatccaaaccttggatggtgacatgtccaccgatcaatcctccaccgtcgtacttcccgacgtcatgacggcgccagttcgaccagacatcgttaacttcgttcacgcccaaatctccaacaacagccgtcagccatacgccgtatcgaagaaggccggtcaccagacctccgccgagtcctggggaaccggacgtgccgtgtctcgtatccctcgtgttcccagtggtggtactcaccgtgctggtcaagctgcgttccggtacatgtgtcgtgg

SEQ ID NO: 154119 - DNA, 275 bp, Arabidopsis thaliana columbia
ggactggattttctatgctagcgtttcggtacctctatggatttgtcaaactttccttagcctctgctcttatgctttgtttggagttttggtacttgatggttctggttgttgttaccggtctccttcctaacccgttgataccagtcgatgccatctccatttgcatgaatatagaagggtggactgccatgatttcgatcgggtttaacgctgcgattagtgtgagagtatcgaatgagctgggtgcaggaaacgcagcgttagccaaattc

SEQ ID NO: 154120 - DNA, 438 bp, Arabidopsis thaliana columbia
gaaagaacctaattagattcaagttcacctaataatatatctagatgttggtatgcaaatctgtttgaatatgaaagattcgactattatcttaattacaaataactttctgaaacctttttttttattggtatcaaaattagatatttgatataaaaatagagaatctattctctttttttttagtaagatcttggagattgagtaatgcttactctcaaactttttgtatacactgtagttatattctttgtttctctcttcatatttggattcctatctaatgatccaggacgtaatccgggacgtgaagaataaaaaagaaagtttttttattgctttatttaattcgaggaaatgctcgaattttattaggattttatctattacacaccatcaaaaggagaaggtgaaagagagggattcgaaccctcggta

SEQ ID NO: 154121 - DNA, 443 bp, Arabidopsis thaliana columbia
acaacatcgaaattaagaatcaatcaaagtcctctcgttcgatcacactagaaagaaagatggcaacgtctggtgcgatttcaggagctactgtctcttccttcttcaccaaaactactactacttcaaacccatctcccaaactccattcctctgcttctcttttatcacagaaaactgtgtttcaaggagtttcgttggaagattcgaagaagagtgtatcagagatcttcgctgtctccgagagaaagatcggagggttaaatgggttgagaagattcgaaatcaaagcgagagcagcagcttctaagacaatagaggttgaagtagataagcctttgggtctgactctaggacagaagcaaggcggtggagttgtcatcaccggtgtggacggaggagggaacgcatcataagcagggcttaaatcttgagatcaagtt

SEQ ID NO: 154122 - DNA, 337 bp, Arabidopsis thaliana columbia
  unsure (1)..(337): unsure at all n locations
ctctcgcttttgaatggagatgtgagcttcctccattcaaagagcaaaactatctaattccatggcgttctccctcctctctccaattcctacctctgcctctctttttttcactctctccgccattaccgcttctaataatgcttnctcctcctctctctcccgtctttactctttatatcaccccaaaggaaccttacgaaccagaaccgcgacctcgtttttcggagcttctgggaacttgaggattggttccatggcggagaataagcaattggtttgtaggattggtggccgagccggtgctgaattggatgatatggatgaaggtgaaatc

SEQ ID NO: 154123 - DNA, 340 bp, Arabidopsis thaliana columbia
gttggtggttctggaatggacatgagaagtatagtccaggactctacctggaccagtgactgacccttcgcagctaccaaagtggaactatgatggttcaagcacaggccaagctcctggtgaagacagtgaagtcatcttataccctcaagccatattcaaggatcctttccgtagaggaaacaacattcttgtcatgtgcgatgcgtacactcccgcgggtgaaccaatcccgactaacaaaagacacgctgcggctaaggtctttagcaaccctgatgttgcagctgaagtgccatggtatggtattgagcaagaatacactttactccagaaagat

SEQ ID NO: 154124 - DNA, 405 bp, Arabidopsis thaliana columbia
cttggattgtgtttaggagttaaaaacttgctccgttccatcatgagattgcttcttagtgtgttgtttctcttggctttaaccacctactcaagtgcaacttattgtctatgtagagatggtgttggagagaaagatcttcaaacatcgatagattatgcatgtggagttttaaaagattgtaatcctattcatgagaaaggtccttgttatcaaccaaacaccatcaagagtcattgtgattgggcggttaatacttatttccaaagatttggtcaaatctctggaaagctgaatttctcaggaactgctactaccatccaaaatcttccttcaactgtgggtactggttgcttatatccttcaagtccaggtgcagggacaactcccacgacaggtacttct

SEQ ID NO: 154125 - DNA, 333 bp, Arabidopsis thaliana columbia
gatcgttccgtggttgggaacacgcaaaaccattgcctccatcagaaccgctcttagccacgtggataacttgatctccggtgttaccagaggtttccgctacaagacgaggctcgtgtacgcccattttcccatcaacgcctccatcggcggtgacggaaagtctatcgagatccgtaacttccttggcgagaagaaggtgaggaaggtagagatgttggatggtgtaaccattgttcgatctgagaaggtgaaggatgagattgttcttgacggtaacgatatcgagcttgtttcaaggtcgtgcgctctgatcaaccagaaatgtcacgt

SEQ ID NO: 154126 - DNA, 235 bp, Arabidopsis thaliana columbia
atgaacttgacggaacccaaaacgagtgggggtggtgcaagcaaaagcttggagccaatgcgattcttgctgtgtctcttgctgtctgcaaagctggggctgttgtcagcggcattcctctatacaagcacattgccaaccttgctggtaaccccaagattgtgctaccagttcctgccttcaacgtcatcaatggtggatcccatgccggaaacaagcttgctatgcaggagtt

SEQ ID NO: 154127 - DNA, 416 bp, Arabidopsis thaliana columbia
cttccgttcatgggcggaagaaaaccaggggaatatttgtcatttgggagaacataaaggggataaagcctttcatgaaatggaagaacatcatcattcttatcttcaatcggttaaagaatccgaagaagacgctagagcatcgctcttgtatagctacaaacatagcatcaatggcttcgcggctgagctaacccctgaccaagcctctaaactagaaaaattagcagaggttggttcagtattcaagagccatccaagaaaatatgaagcacatacgacacggtcatgggaatttgtaggattggaggaggaagaaaccgacagtgatgttccacgtcgaaaaaatgatgccgatgatcggtttcgtgtgggaagaaatttttgaaaaggcaaagcatggtgatggaatcatc

SEQ ID NO: 154128 - DNA, 374 bp, Arabidopsis thaliana columbia
  unsure (1)..(374): unsure at all n locations
cgataactggaacggcgtcgacagattccatcctaactctaaggtaagcaagcaagacatagaagacacgttcgacgtaccgttccgtatgtgtgttaaagaaggtaacgttgcgagcattatgtgttcgtacaatcaagttaatggtgttcctacatgtgctgatcctaatctcctcaagaagaccatacgcaatcaatggggtctcaacgggtatatcgtgtctgattgtgactctgtcggtgttttgtacgatacccaacattacactggtactcctgaagaagctgccgctgattccatcaaagctggcttggatttagatngggggccatttctaggagcccatacaatcgatgcggtgaagaaaaact

SEQ ID NO: 154129 - DNA, 350 bp, Arabidopsis thaliana columbia
ctcttctctctcgatatcatctaaatctccctgatctcaatttcgcaaaatggctgacaagaagatcattatcggaatcaacggtttcggaagaatcggtcgtttggttgctagagttgttcttcagagggatgatgttgagctcgtcgctgttaacgatcctttcatcaccaccgagtacatgacatacatgtttaagtatgacagtgttcacggtcagtggaagcaccatgagcttaaggtgaaggatgacaaaactcttcttttcggtgagaagccagtcactggtttcggcaataagaacccttgaggacatcccatggggtgaggctgggacttgctttgttgtt

SEQ ID NO: 154130 - DNA, 381 bp, Arabidopsis thaliana columbia
cctccctctttctccgatctcagatccattcttcaatctacaaagaagatggaaccagtctgttcatggggtaacacctctctcgtctccgtagatccagagatccacgacctaatcgagaaggagaaacgtcggcaatgtcgaggaatcgaacttatcgcttccgagaatttcacttccttcgccgtcatcgaagctctcggaagtgccttaaccaacaaatactccgaaggtattcctggtaatcgttattacggaggtaacgaattcatcgatgagatcgagaatctttgccgttcaagagctctcgaagctttccattgtgatccagcagcgtggggcgttaatgttcagccgtattctggatctccggcaaatttc

SEQ ID NO: 154131 - DNA, 223 bp, Arabidopsis thaliana columbia
  unsure (1)..(223): unsure at all n locations
gnannggcnngaaacaangaagggtgttgataactgaacgtacggtatttaatactcattatatcgaaaccgatatatgatgagcataacaacatatcacagcatattccaaaaccaaacagttacagagaatagaaactccacaagaccccctttattatattgattatcgaaaagacaccataataatacaatttcgatcgagatagtgatgacggtgatg

SEQ ID NO: 154132 - DNA, 279 bp, Arabidopsis thaliana columbia
ctttggacgaccatcggcgacagaggattcttgtattcttcttcttcttcggcgtaattggttccccggcttgaaaaaagggtctatccctcggaaaggtggtcagcaagctctttgcaaagaaagagatgcgcatcctcatggggggtctcgaggccaccggtaagactacgatcttgtacaagctcaagcttggagagatcgcgactaccattccaaccattgggttcaatgtggagaccgtggaatacaagaacactatctttaccccgtgggatg

SEQ ID NO: 154133 - DNA, 414 bp, Arabidopsis thaliana columbia
  unsure (1)..(414): unsure at all n locations
cgcgtacggtggtgctagaaggaggagaagcgnnagtgctgctacatggtggcatgaaactctttgactatatgggtacagatgagagattcagcaagctttttaaccagactggattcacaatcgcggtggtgaagaaggctcttgaagtttaccaaggcttcaaaggtgtgaatgtgttggttgatgtgggaggtggagttggtaacactcttggtggtgttacttctaaatatcccaatattaagggtatcaactttgatctaacttgtgccttggcacaagcacccacttatcccggtgtggagcatgttgccggagatatgtttggggatgtcccaaccggaaatgctatgaatctgaaacggattcctcatgattggaccgacgaagattgggtcaagattcttaaaa

SEQ ID NO: 154134 - DNA, 289 bp, Arabidopsis thaliana columbia
cttgcttgttcaaaagatcgaagcgcctgctcttcttgcttggagggacctgaaccggtccagggacttccaaggaaagcggctccaccttatctggatcgacgttacaatgccgtctcaaccagacgtgcaatttcacgttgagccacggacaggaagataaactttagggctccgtggcaatgctcgatccgagctcaacagccggatttgaaggacagcttagcttgtgctccttcatcagtagaggacaaaggaaatgatcttagaatcaaggaatgggaggtag

SEQ ID NO: 154135 - DNA, 309 bp, Arabidopsis thaliana columbia
gttaacatcactctactccgaggaatcctcttctggattgctcagcttctcggctccgtcgtggctcgcctaatccttaaattcgccaccggtggcttggctgtgccagcttttggtctctctgctggagtaagagtggtgaacgctttcgctttcgagatcgtgatgacattcgggcttgattacaccgtctacgctacaggcattgaccccaaaaacgggagtcttggaacaattgctcccatcgcaatcggtttcattgttggagccaacatgttagctggaggagctttctctggaagcctcatg

SEQ ID NO: 154136 - DNA, 400 bp, Arabidopsis thaliana columbia
  unsure (1)..(400): unsure at all n locations
caaacaaaaaaggnttcgctaaatgcttcctctcattgggctgcttttgctgctgaccatcgtcgcctctccagcaaatgcagatggacctgtttgcccgccgtcgaacaaactaagccgggcaagtttccctgaaggttttttatttggcacggctactgcggcataccatgtcgaaggtgcgattaatgaaacttgtcgtggaccagccttatgggacatctactgtagaagatatccagagaggtgcaataacgataacggcgatgtggccggtgatttcttccatcgttataaggaagatatccaactaatgaaaaatctaaacacagacgcctttagaatgtctatcgcatggccaagaatatttccttatgggagaaaggagaaaggagtgagt

SEQ ID NO: 154137 - DNA, 214 bp, Arabidopsis thaliana columbia
tctcaacgacgacgagccaagggggcaactttcagcggcgatgaaactgctcctttcttcggattcctaggcgctgaagtcgctctcgttttctcctgtatgggagcagcgtacggcacagcgaagagcggggttggtgtagcgccgatgggtgtgatgagaccagagcttgtgatgaaatcgattggtcctgttcgtatggctggagatttag

SEQ ID NO: 154138 - DNA, 453 bp, Arabidopsis thaliana columbia
acatttcaaacacaaaagtttcgtctccgattcatcctttctacgtcttggtttatgagctcaaaggagaagcccactctcggaggtacgcggattaagacccgcaaaaggaatattgctgctcctctcgaccctgctgctttttctgatgcactagttcagatttatctggataatgctggtgatctggaacttgttgccagaagtttagagtcatctgatcttaatttctcaagatacggtgatattttctttgaggttgttttcattggaggacgtactcaaactggttcagtgaaatctgatgaaggggaacgccacccttactctataatcgactgtgaaccaaagcgggaagctattttaccatcagttgtatacatacagaaatatttgcggaggaaagccttccttattaaagaccttgagaatgttacacggagattcttacag

SEQ ID NO: 154139 - DNA, 289 bp, Arabidopsis thaliana columbia
cctccttttttcactgccaccaatttctattgaatcttttgatgtttcatgtgtataaaaatagttaagaagggtgtgtttgtctttcttacaccacggataaaattaagagccgagtgaatcagagtaaatatctatgctaaaaacatcacaatcaaagacatttgatatctgtaaaacccagaatcaaataagcagagcttggagccgtaggagagcacaagagtttcaaagaatagagtaagcacgaactacctcaatcacaggggcttgacacatgggacatttt

SEQ ID NO: 154140 - DNA, 330 bp, Arabidopsis thaliana columbia
caatatttgacttcacatagagagagatatgatgatggcgacggaaacggaagttgtagctccggtaacggtaagcaacggcggaagcaaaggatgttgcaagtacggtggtcctggttacgcgactcctctcgccgctatgtctggtccatcggagaaacttatctacgtaaccgccgtctacaccggaactggaatagataaaccggattatttggcgacggtggatgtagatccaagctcgccttcgtattcaagtgttattcatagattaccaatgccttttgttggtgatgagcttcatcattctggatggaactcttgtagttc

SEQ ID NO: 154141 - DNA, 319 bp, Arabidopsis thaliana columbia
  unsure (1)..(319): unsure at all n locations
gagaagtttcacatcaacattgaggtcatagtccatttcgattctggaaagtcgaccaccactgggcacttgatctacaagttgggtggtattgacaagcgtgtcattgagaggttcgagaaggaggctgctgagatgaacaagaggtccttcaagtacgcatgggttttggacaaacttaaggctgagcgtgagcgtggtatcaccattgacattgctctctggaagttcgagaccaccaagtactactgcactgtcattgatgctcctggccatcgtgatttcatcaagaacatgatcacttgtacctnccaggctg

SEQ ID NO: 154142 - DNA, 492 bp, Arabidopsis thaliana columbia
  unsure (1)..(492): unsure at all n locations
ccgggtccgacccacgcccgtccgggttaggagcccaaaacactgncnngaaacattacatcnaaatttaatnggctngcnnctaannctaacagacagggnngggttncatgcaaaaccatgctctttctcgctgattcatncttccttatcanttccgatcntgctctcaagtgcccccaactaacacttcctcancctccttcacgagccttcctctgtttcaccactccaagcgtctcttcgtgagctcagagaccgtatcgattcagtcaaaaacactcaaaagatcaccgaagctatgaagcttgtcgctgcagctaaagtcaggagagctcaagaagctgttgtcaatggacgaccattctcagaaaccctagttgaagttctttacaacatcaacgaacagcttcaaaccgatgatgtcgatgtttccttaaccaaagtcagaccggttaagaaagtagctctcgttgtcgtcaccggtgatcg

SEQ ID NO: 154143 - DNA, 424 bp, Arabidopsis thaliana columbia
  unsure (1)..(424): unsure at all n locations
agataagagaacatgaggaactagagacacttanagtttcattccaggngaataaatctgagggagctgttgcggaaacacacttggatgatgaacaatctgaggaagctgtagcagaaacactcttgaatgatgaacttgatggggatgatgaagaagaagttgctgaagacaatcttgaacctctgaacagttcattgtcatcctcagaagaaaatagagtagatagaatccgtaggctagagcaaaagcttctcggtaaagaaaaactcttgggtggaggagttggctttgataaaccagaagcaaaacccgctagagttgaaggaaagaagaaggagaaaaagaagaagacaaagattcttgtgaaaggccaagccaaaaaggggacaaagatagaaatccctggatcatcaaagaggtt

SEQ ID NO: 154144 - DNA, 407 bp, Arabidopsis thaliana columbia
  unsure (1)..(407): unsure at all n locations
cggagcaaccacggcggnnccggaaggaagtaaaaagagcaanggcnccagccgnccgaggggggcaggaagagcggcgggggcgcccacgacaagactaggcgncagagctcagcagagagaggagacaacgcgccggaccgagaatgggcatgatgctgctggaagagcagggggcgcgcatgttcaggcagtccgcgccgatgcaaagacgatcaaagtgggccctccgccagcgccccccggtggccctccggggaccagaaactcagaccaagcaagagactctgcatcggcatagaaagacaggttggacttacagccaatgccaccaacagaagctgcagcgagagccaaagaagccgcaaaggagaccacaaatgtgaagccattgaccgacaggaaag

SEQ ID NO: 154145 - DNA, 351 bp, Arabidopsis thaliana columbia
  unsure (1)..(351): unsure at all n locations
nggcgagnctatcancncannncncatttgataatttcgtcatggcnnccgagaaagaagcggggctcgtcgacactccttgcgaccctcccaccatattggacaagatcatcagcaaagagattccatccaccgtggttcttgaggatgacaaggtcttagctgttagggacataacgccccagggtcctgttcacatcctccttattccaaaagtgagggatggcctaactggcctctctaaggctgaggaaaggcacatcgacatcttgggccgccttctctacactgccaagcttgtagcaaaacaagaaggcctagcagagggtttcagaattgctatcaatgatg

SEQ ID NO: 154146 - DNA, 147 bp, Arabidopsis thaliana columbia
  unsure (1)..(147): unsure at all n locations
tttgtgtggtttnttcttgtagagttttgtggaagctgctatgttattttggaggcgttaccaatgaaaccacacttcgcttgtttgatctttgcgtaatgtgaaagcgattgataattgtaaagtacacttggatattgttggtgg

SEQ ID NO: 154147 - DNA, 408 bp, Arabidopsis thaliana columbia
  unsure (1)..(408): unsure at all n locations
caaaaagcaaacacagagaagagaaanaggcctcattttgttaagnnancgcnngccacaccggcgaggannggaccgagaagcgcaaagccgccaacgaanccaagaaacngangggganagacnncactgcaacanggngcccaccnngccgnnncaaagcacccgncnnngctgacnaagccaagaagcaccncgacgnagncnncnncaagggcgangnngacgaanngaacactgnngctgaggagnnnaaagnncaggcaangccaacgnnnatcttcatgaaagaaggagagatcaaggagactgtggttggtgctgctaaagaagaaatcattgccaatctcgagaagcacaagacagttgttgctgctgcttgatttgcttttctctcttacctatttt

SEQ ID NO: 154148 - DNA, 276 bp, Arabidopsis thaliana columbia
  unsure (1)..(276): unsure at all n locations
gacccacgcgnccgcggaaagacgtcngcgacaacaacaccataataaaccctcncaaacnncagaccaagaaggcgacgccagagaaaggccagcgggccccccacaacncnnggtctgtttcaagaagaaagaacccgaccccaggggacgccggctgcaccaagaaaaaacccaactacggagagacactgcaacaccggaagaaaattcccaagagatcgcgtcgtctgaggcaacaacagcttctggagcagcagagactagcggcggaca

SEQ ID NO: 154149 - DNA, 460 bp, Arabidopsis thaliana columbia
  unsure (1)..(460): unsure at all n locations
ggcagcagataatgttncngacaaactttaatcggtttgaatctctncaggtggtgctgatggggcaccatcttcagctcagactgcagggacatccaagaaggaggaagtgaagcgcctacctggggggaaagttaaaaagaaagatcgacaggaagttatcattgaaaaggttgtacgcaacaaacgcaagtgtatcaccattgtgaaaggactagaactgtttgggataaaactcagtgatgcctctaaaaagcttggtaagaagtttgccactggagcatcagttgtcaagggaccaactgaaaaggagcaaattgatgttcaaggggatataatctatgatatcgttgaattcattacagacacttggcccgacgtacctgaaagatccattttttttatcgaagatgggaagaaggttcaggctgggtgatgatcacctttgtcctcgtttttt

SEQ ID NO: 154150 - DNA, 320 bp, Arabidopsis thaliana columbia
gtgccagccactcacatttatccagatgactggataccttcttgaaacaggagctaaacttggatgacgaataactaccaaaccgagagcgatgattacaagaaggctgttgagaagtgcaagaggaagcgcagaggtgtgatcgctccgaagaactgttcacccatcatgggccgactcgcatggcactgctgatggaactttcaacacgaaatcaaggactgtaggcccattcggaacaatgaggtgcgactctgagcaaactcatagagccaacaagtgtatccacatcgcgtccaggtcgttggagcctatcaggg

SEQ ID NO: 154151 - DNA, 479 bp, Arabidopsis thaliana columbia
  unsure (1)..(479): unsure at all n locations
aaaaaaaaatggctcaagcagtgacttcgatgcattcttacgtggagcatctcangctgtcgttgaaggaagtttacagatcaacggctcaaaccgtttgaacatctcaagagtctcggttgggtctcagagaaccggacttgtgatcagggctcagcagaacgtgtcagtaccagaaagtagtcgccggtcagtgattggactcgtggcggctggtttagccggtggttcattcgttaaagctgttttcgccgaagctattccgatcaaagttggtggtcctccacttccttccggtggcctacctggaacagataactcagaccaagcaagagacttttcattggcattgaaagatagattttacatacaaccattgtcaccaacagaagctgcagctagagccaaagattctgctaaagagatcatcaacgttaagtcatttatcgacaaaaaagcttggccctatgttcagaacg

SEQ ID NO: 154152 - DNA, 392 bp, Arabidopsis thaliana columbia
  unsure (1)..(392): unsure at all n locations
cctaactatacaaaacacanaacaagaaggtaaatttacaaaaggcncnccnaccgggcggaaagtcggcgagncaggaggcgccgccgacgagnccancancaacgaccancnccaacnnccaacggacggcaagaggagaaccgangaagaagagagggccaccnacacacaagggnccgcagaacacgggaaaacnaacaacaacaacaacggnagcaacaacgaccaagacaaaagaagcgaaagnngcaaagacaacgnaagangcagcgaccaacacaacgaaaacaacaagaacgcnacnnacaagcanggncncaccaaanngaccgancncacnaacgangagnaccggaagggggaccacggggcaagaaccgagcccgccc

SEQ ID NO: 154153 - DNA, 332 bp, Arabidopsis thaliana columbia
  unsure (1)..(332): unsure at all n locations
cttcggcaagctccagagaaacgagagnnccgattctattttctcntggggntcctgatcgcgtagctcaagcgaaaaaaatggcgtcgtttgatgaagcaccaccaggaaacgccaaggccggtgagaagatcttcaggaccaagtgtgctcagtgtcacaccgtcgaagcaggcgccggtcacaaacaaggacccaatctaaacggtctatttggaagacaatctggtacaactgctggttactcttactctgctgctaacaagaacaaagttgtggaatgggaagagaaggccttgtacgattacttgctcaaccccaagaagtacata

SEQ ID NO: 154154 - DNA, 322 bp, Arabidopsis thaliana columbia
  unsure (1)..(322): unsure at all n locations
gagccagccacccgcaanncnccagaagacattaatcntcctcgaaacaagagccaaaccaagacgaggaagaacaacccaaccgagagccaacaaacaagaaggccgnngagaagngcaggaggaagcgcacaggcgngaccgccgagaagaaccgngcacccancangggccgacacgcanggcacacggcaggaaccnncgacagccaancaaggaccggaggcccacgcggaacaaagaggngngacgcagagcaagcncaaggagccaacaacggnaaccacaacgccgccagagagagggaccccancagggagca

SEQ ID NO: 154155 - DNA, 471 bp, Arabidopsis thaliana columbia
  unsure (1)..(471): unsure at all n locations
cccacttctcacttcctttttcccgaancttgaattgtaaattcacaacaaatctgttgaagaacaaccaatcaaaacccaacattgcttctcaacaaaaaagcaaagcaaaagattttgcgagagaaaaaaaagaaaatggatttgttcaagatccttcttcttgtgttcttcgtgaacataagtttctgcttcgctgcagatccatattctttctataacttcgaagtctcttacattactgcttctcctcttggtgtccctcaacaggtcattgctataaatggaaagtttcctggtcctacaatcaatgttacaaccaatgaaaatctggttgttaatgtcagaaacaagttagacgagggacttcttcttcattggaatggaatccaacagagacgtgtgtcatggcaagatggagttttaggaacccaattgccaatcccaccaaagtggaattggacttatgag

SEQ ID NO: 154156 - DNA, 355 bp, Arabidopsis thaliana columbia
  unsure (1)..(355): unsure at all n locations
cgcgcacacacacacaccctcacgaagttaattagttctgaagaagaancaanggctnctgggaggtcttcctctccttttctatgcacctcatcctccaagagtgatttggggatttcttcgtttcctaaatcttctcagatttcgattcatcgatgtcagaagaaatcgatctcacggaagattgtttccgttatggctcctcaaaaggatcggtctcctggaactacaggatcggtgaaaactgggatgacaatgacggagaagattcttagctagagcttcggagaagtcattagtggttcctggtgataacatttgggttaatgttgatgttcttatgactcatgatgtt

SEQ ID NO: 154157 - DNA, 465 bp, Arabidopsis thaliana columbia
  unsure (1)..(465): unsure at all n locations
tgcgcgacagaattggcgannacgataaattcgtaaacctccgancgntaacggcgaccgccgatttttccggtaaaaatgaacgacggagatgtatcgaggcagatccagcagatggtgagatttatccgccaagaagcggaagagaaagcaaacgagatctcggtttctgctgaagaagaattcaacattgagaaactccagcttgttgaggcggagaagaagaagatcaggcaagattatgagaagaaggagaagcaagctgatgttcgcaagaagattgattactctatgcagctaaatgcatcaaggatcaaagttcttcaagcgcaagacgatattgtcaatgccatgaaagaccaagcagcttaggatcttctgaacgttagtcgcgatgagtatgcctacaaacagctcctcaaggatctaattgttcagtgattgctttcggtgaaagaaccttct

SEQ ID NO: 154158 - DNA, 462 bp, Arabidopsis thaliana columbia
  unsure (1)..(462): unsure at all n locations
ctngggcagaggaaaaagnntatagcgactcaatacctctaaaaggggctgnctctnccttctgctgtcttcagatctccatttcacggatcaatcctgtgtttgaaacaatgggtgttgaagttgtaaactctggtggatttgaggttgctccggctcctttcgaggggaaacctgagaagaacgggaagctggaccaaggaaaaggagatgatgcccccatcaattttggttcagtcggtgagctaccaaagaatgccgaagagaataataacaaagtggtcaactctgatgcacccaaaatgcagcagaagagtggcctgtggctaagcagatccactttttctaccttgttaaataccgttcttacgctgaccccaaaattaaagctaagcttgatctagctgataaagagcttgaaaagttgaacaaagctcggactggagttttggacaagttgag

SEQ ID NO: 154159 - DNA, 329 bp, Arabidopsis thaliana columbia
  unsure (1)..(329): unsure at all n locations
gacggagagtgagagaagagagaaacanaatgagatttatcgccgccgccgctgctcgtggtgtcgtcaccatccaaaccttggatggcgacatgtccaccgatcaatccttcaccgtcgtacttcccgacgtcatgacggcgccagttcgaccagacatcgttaacttcgttcacgcccaaatcttcaacaacagccgtcagccatacgccgtatcgaagaaggccggtcaccagacctccgccgagtcctggggaaccggacgtgccgtgtctcgtatccctcgtgttcccggtggtggtactcaccgtgctggtcaagctgcgttc

SEQ ID NO: 154160 - DNA, 450 bp, Arabidopsis thaliana columbia
  unsure (1)..(450): unsure at all n locations
tagaaactcactcctgacctctcgcatggcgacattatactctctagncatctntcttttttgtactctttttgtcactatcgtgagctcggaaacgccgtgcccgaatttcaagtcgatcatcagtttcggcgattcgattgcggacacgggaaacttggttggtctctctgatcgtaaccagcttcctgtgactgcgtttccaccgtacggagaaaccttcttccaccacccaaccggtcgttcctgcgatggccgcatcatcatggactttatcgctgaatttgtggggcttccttatgtgcctccgtactttggatctaaaaatagaaactttgataagggtgttaatttcgcggtagccggagcaacggcactgaaaagttccttttcttaagaagagaggaattcaaccacacaccaacgttagtttaggagttcagctaaaga

SEQ ID NO: 154161 - DNA, 258 bp, Arabidopsis thaliana columbia
  unsure (1)..(258): unsure at all n locations
ctcgcggcggctggncanancaagcatttagtgcagttttatcnccanncacccccgggggaggagtactagagcagngagatgctcaccgcaccaacagngaaggangaggnaangaaaancangccgggncagaaacaaaccagggccggncaaaggacaagcaccaaggccnnaggaggcgaaggagaagggaacggacaagaagggccgggagagaaacgcccnaaggaagacgcgacggccacaagaggagcg

SEQ ID NO: 154162 - DNA, 452 bp, Arabidopsis thaliana columbia
  unsure (1)..(452): unsure at all n locations
agcagatctggaagcagctccngcngtagttgcnattctctttnctgnngannggtacaaaagaccgaattaacggtaagcaagaggttatgattggttattcggattcaggaaaagatgctggacggttatctgctgcttggcagttatacaaagctcaagaagagcttgtgaaggttgctaaagagtacggtgtgaagctaacaatgtttcacggtcgtggtggcacggtcggaagaggaggtggaccaacccatcttgctatattgtctcagcctccggatactattaacggttccctccgtgtcacagttcaaggtgaagtcatcgagcaatcgtttggtgaagagcacttatgctttagaacacttcagcgtttcacagctgctacactcgagcacggtatgcgtcctccaatttcgcctaaaccagaatggctccgctttgctgga

SEQ ID NO: 154163 - DNA, 284 bp, Arabidopsis thaliana columbia
  unsure (1)..(284): unsure at all n locations
cacgcgtccgaagagacatcatattggcctatatgcagaacttatattatcnaacaccagaccacggnnnngcggggcggatcaacaaccccgggagcaacggtggcccggagggcaaanggaagaaacgaancaaagncacaactaaagaanccgacaacggctaccatgncaaggacaacagagngnaaccagctttggagacgccgaactcgccgacgaagaaggttgggggataagccagagcacataatcaacgagcgaaacataaactccgggattac

SEQ ID NO: 154164 - DNA, 477 bp, Arabidopsis thaliana columbia
  unsure (1)..(477): unsure at all n locations
cacgcagaatccgtggcacgaaagcnaaggtagaatanacctttaggaggaagannaccctagcgncggatggcgcagattacgtcctagnggctagagacctaactaatcttcagnnaaatcagtggcttaaaccccaaacaaaagcgtatactttggttcagcatgccaacacaatctgagtcatgcagtacctgcaacatactcctttgaccaactcttttggtgatatgagtttcatggaagagaagcctcagatgtacaacaatcagtttgggttaacaaactcgttcgatgctggaggtaacaatggataccagtatttcagttccgatcagggcagtaactccttcgactgttctgagttcgggtggagtgatcacgggcctaaaacacccgagatcttttaatgcttgtcaataacaacgaagcatcatttgttgaagaaaccaatgcagccaagagtcttaaccaaac

SEQ ID NO: 154165 - DNA, 461 bp, Arabidopsis thaliana columbia
  unsure (1)..(461): unsure at all n locations
cggacgcgtgggctggaactcgntgaggganagtgaatttttaatcagaagagaaagatccatgggtgataattgtatcagacttcttcactcagcctctgttttcttctgtttagggcttctaatttcatccttcaacttgttgcagggtattgcagctgaaaatctttccaagcagaaactgacctcatggattcttcagaatgagattgtaaaggaagtcaatgagaatccaaacgctggatggaaagcttctttcaatgatcggtttgcaaacgccactgttgcagagtttaagcgccttcttggtgttaaaccaacaccaaagacggaatttttgggtgtgcctattgtaagccatgatatatctttgaagcttccaaaagaatttgatgctagaaccgcttggtcacagtgcaccagtattggaaggatcttagatcatggtcactggggttctt

SEQ ID NO: 154166 - DNA, 464 bp, Arabidopsis thaliana columbia
  unsure (1)..(464): unsure at all n locations
ctcttctctctcgatatcatctaaattacatagatctcaattncgcaaaatggctgacaaggggatcataatcggaatcaacggtctcggaagaatcggtcgtttggttgctagagttgttcttcagagggatgatgttgagctcgtcgctgttaacgatcctttcatcaccaccgagtacatgacatacatgtttaagtatgacagtgttcacggtcagtggaagcaccatgagcttaaggtgaaggatgacaaaactcttctcttcggtgagaagccagtcactgttttcggcatcaggaaccctgaggacatcccatggggtgaggctggagctgactttgttgttgagtctactggtgtcttcactgacaaagacaaggctgctgcttacttgaagggtggtgcttaaaaggttgtcatctctgccccaagcaaagatgcgctcatttttcgttgttggt

SEQ ID NO: 154167 - DNA, 390 bp, Arabidopsis thaliana columbia
  unsure (1)..(390): unsure at all n locations
caacagtttttgtctcattcccganctgaatacattttctacgagccanggcnacaactttgggcggctatgaaactgctcctttcttcggattccttggcgctgccgccgctctcgttttctcctgtatgggagcagcgtacgggacagcgaagagcggggttggtgtagcgtcgatgggtgtgatgagaccagagcttgtgatgaaatcgattgttcctgttgttatggctggagttttaggtatttatggtttgatcattgctgttatcatcagtaccggaatcaaccctaaggccaagtcttactatctatttcgatggctatgctcatctctcttccggacttgctttgtggtctcgctgggtctctctcgccgtatgggtattg

SEQ ID NO: 154168 - DNA, 423 bp, Arabidopsis thaliana columbia
  unsure (1)..(423): unsure at all n locations
atccgagagagaagaagagaaangcagataacgttttaacccncaccggcaaaactataagcgctagaagttgagagcagcgacaccatcgacaatgttaaagccaaaatccaggacaaagagggcataccacctgatcaacagaggctgatttttgctggtaagcaattggaagatggccggaccttagctgattacaacatccagaaagagtctactcttcatcttgtcctcaggctcagaggtggaaccatgatcaaggtgaagacactcactggaaaagaaatcgagattgatatcgaaccaaccgacactattgatcggatcaaagaacgtgttgaagagaaagaaagcattcctcctgttcaacaaaggctcatatatgccggaaaacagcttgctgatgacataacggccaaagat

SEQ ID NO: 154169 - DNA, 249 bp, Arabidopsis thaliana columbia
  unsure (1)..(249): unsure at all n locations
aaggaagggaagcactcacgcccgnnggctgatgaaacttttcttggcaagaactggagaagatttatggagaattcttgaggatcagtgaagnggaagaatatgaagtttataagtgaggttcaagagagagatggtaggctctggtttggtctgtgtttttgccttcagtttgggttcttgaccgtcaatgatttatacgttttacattatataagtttttcatgtgtgtggatttgatgataatta

SEQ ID NO: 154170 - DNA, 274 bp, Arabidopsis thaliana columbia
acgcagaaactgggcacgaacgctatgagtaattttccgaggagaagaaccctagcgggggataccataaacgacctagggcgaagactaataatcgtcaaaaatcagtggctaaaccaaacaaaagcgtaactttggttcaggagccaacacatgtgagtcagcattgactggaacaacgtcttagacaactgtaatggtgatattgagtctcatggaagagatgcctcagatgtacaacaagcagttggggttaacaaactcgatcgatgct

SEQ ID NO: 154171 - DNA, 460 bp, Arabidopsis thaliana columbia
  unsure (1)..(460): unsure at all n locations
ctctgtctctctgtccatnnncgnggctaagtatattttttaagggctntncaagaaatgatggaatctgcagggatccagcaactgcttgctgctgaacgtgaagctcagcaaattgtcaatgccgctaggaccgcaaaaatgactagactgaagcaagccaaggaagaagctgaaacagaggttgctgagcacaaaaccagtacagagcaggggttccagaggaaactcgaagcgacaagtggagattcaggtgcaaacgtgaagaggcttgagcaagagactgatgccaaaatcgagcaattgaagaacgaagctacgagaatttccaaagatgttgtggatatgcttctgaaaaatgtgaccacagtgaacaactgagtataatatctcaaggaaaccatcaactgtaaaatggtgtgataatttcagtggatacggtcattcctttctttatatt

SEQ ID NO: 154172 - DNA, 448 bp, Arabidopsis thaliana columbia
  unsure (1)..(448): unsure at all n locations
gttaagcaagagagaaactagagatgatgnttantacgcacaacatgctttcctgcaacatcagaggagtcaccagtggatttcctctacggatcgaagctgggaacgtgattgagaaggaagtcgatttcaatcccgattttatcaggcacatgttcgcgaagattgagtggaaagctctggtggaaggtgcgcgttccatgggatacgctgagttaccggaggaatctccggacgccgcggtgctgaaatcagatgagcccttccttaagaaactccaccacgcgttgctcgagctccaccttgaggaaggcgcgcttgtttgccctgagactggacggaaagtttcggttaataaaggaatcccaaatatgcttctccatgaagacgaaggttaattgattgtgagatttttccttgtaagtttcaatctatgatgtttctgatg

SEQ ID NO: 154173 - DNA, 421 bp, Arabidopsis thaliana columbia
  unsure (1)..(421): unsure at all n locations
caaagctgtcgtttactgccaagnnagagatgctagatatcgctncncaactncttctacgctcaagttgtcaggaaagagaaggagaagctgggtgctatgttggacgaagacccacagctgatggaacgaagaggaaccttagctaaacggctagagctttacaaacaagctagagacgacatcgatgcagtggcttggaagtaagggggtttgctaagacatattctttatattgttaatttctttgttcgtgtgggcacactgcattataatagatatgtttggagttctaacttncagtctacacaaacatacacgcgactactcatgttttcttgggtcgctaanttctatcacaactttcccacttnttttttggtgtgtattcttcgattcttgaatactggttttttagaac

SEQ ID NO: 154174 - DNA, 388 bp, Arabidopsis thaliana columbia
  unsure (1)..(388): unsure at all n locations
ggccaattagcatcctttaacacgnngcttcaactggataatgaacatatgaaggcgataatagcaaaaatagagtcccttcgtcctaatgttctgctggtagagaaaagtgcatcttcatatgcccagcaataccttctagagaaggaaatttcattggtgctcaatgtgaaaaggtcattgctggaccgtatagcccgttgcactggtgctgttctttgcccctcactagatagtattagtactgctcgattgggtcactgtgagctgttccggactgagagagtgttggagcaacatgaagctggcaatcagtcaaacagaaaaccatcaaggacattgatgtactttgaagggtgtcctaggcgcctaggttgcacggttgtgc

SEQ ID NO: 154175 - DNA, 397 bp, Arabidopsis thaliana columbia
  unsure (1)..(397): unsure at all n locations
gatgcagatcttcgtgaaaaccctaacggggaagtccanataccctngaggnngaatcatccgagaccatttacaatgtgaaggcgaagatccaagacaaggaaggaatcccaccggaccagcagcgattgattttcgccgggaaacagcttgaagacggccgtaccctcgccgactacaacatccagaaggaatcgacgcttcatctcgtcctccgtctccgtggtggtgctaagaagaggaagaagaagacttacaccaagccgaagaagatcaagcacaagcataagaaggttaagctcgctgttcttcagttttacaaaatcgatggatctggaaaggttcatcgtntgaggaaggagtgccctaacgcatcctgtggagctgggactttcat

SEQ ID NO: 154176 - DNA, 341 bp, Arabidopsis thaliana columbia
gaagaaaacattcgtagatctatttccgcatctgcttaaacacctacatcgtcgtagatcgcaaaccatggccgtcgctgtagctaagcttctgatctccgccatggcggttttcatgcttgtttctgtttcgttcgcgacctcggaagtgccgttcatggtggttcacaagaaagccactctcaacaggctcaaatctggcgccgaacgcgtctccgtttcctacgccatctataaccaaggatcctcgtcggcgtatgatgtgactctgacagataatagctgggataaaaagacttttgaagttgttaatggaaacacttcaaaatcttgggaaagac

SEQ ID NO: 154177 - DNA, 302 bp, Arabidopsis thaliana columbia
gcagaaactaagacaaaattaagacttttctctcttcttcttctccactgggtcgatcggggcgaggttcacttgtgcggaggcactttaacaacagattcgccatggccgccgccgtcgcagcaccgagactcatctccttgaaagccgtcgcgaagctaggtttccgtgagatctctcaaatccgacaattggctccgcttcactctgcgatacctcatttcggaatgctgcgatgtagatcgcggcagccgttttctacctcttgtgtgaaagctcaagctactgctactgagcaatca

SEQ ID NO: 154178 - DNA, 452 bp, Arabidopsis thaliana columbia
  unsure (1)..(452): unsure at all n locations
cggacgcgtggggaagacgaaacgatgcctataagtgcgacaatggtcggagctttgctgggtctcggtacccagatgtactccaacgccctccgcaagctcccttatatgcgtcatccgtgggagcatgtggtgggtatgggacttggtgctgtgtttgcgaaccagctcgtgaaatgggatgtgaagcttaaggaagatcttgatgtgatgctcgctaaggctagagctgctaatgagcgccgttactttgatgaagatcgggattaattttgcgtgatctttgaagtcttcagaaaagaaatatcttcccctgaactcatctcaagtgcttgttntgtctgatctttcctgtataagcgtttcttctccttctctttgacttcagctctggagatcttttcattcactggtttcgaatatgaacctaaagaattgtgtttttacaatct

SEQ ID NO: 154179 - DNA, 167 bp, Arabidopsis thaliana columbia
atctctcttacacactacacaaattcaacaactgaaaccaactcagagcaaaagcttgatttgacactatggcgagcattagcaacgagcccgagcgtgagaacagagacgaagaagagactggagccaacgaagatgaagacaccggtgctcaggttgctcctatc

SEQ ID NO: 154180 - DNA, 406 bp, Arabidopsis thaliana columbia
acgcaccaccgttgtcgtccaccttagtggtcgtagaaaccaaatcagtataaaattctgatgaccgggaatgcaaactcaacgggttgttccctcgagatcggcggcgaaatctttttgaagatctcctaaagatttacatttctcattatctcttttctccccattttcaagttccgattcatgcaacaatgaaccaaatcaaagatccaaaccctaatctaccggaacggctcttcgccgtcgattgctatgccgataaagcccgtcttaatatatattcaagacctgaatatctcgggacaagtgctaaccttctcaaaggctctgaagaatgggaacgaatcacaagttcacaatttggtgaagctggtcgaattcccctgtcggtcgatgcttacattca

SEQ ID NO: 154181 - DNA, 446 bp, Arabidopsis thaliana columbia
caaaccgaacgagccgaggccttgttcaagagaatcattgagagtgatagtctcacttttggtgccatcacatacaacgagatgatgactttatacatgtcagttgggcaagttgagaaagtacctgaggttattgaagtgttaaagcagaaaaaggtttctccggatatttttacttataatttgtggctaagttcatgtgctgcaacctttaatatagatgagcttagaaagattcttgaagagatgaggcatgatgctagttccaatgagggttgggttcggtatatcgatcttactagcatctacataaacagtagtagagtaactaatgcagagtctactttgcctgtcgaagctgagaaatctatttcgcaaagagaatggatcacatatgacttccttatgattctgcacactggtctagggaacaaggttatgataga

SEQ ID NO: 154182 - DNA, 435 bp, Arabidopsis thaliana columbia
atttagacaaaaaaataaatatggagctcgagacctcagtttatcgaccaaacgtcgccgggtatgattctccggatggtgtggaggttcgaggacggtacgaccaaatcttcgccaagattttgacgagagaagctcttagctttgtggctgagttacagagagagtttcgtggccatgtgaagtatgccatggagtgccggagagaggcaagacggcgttataactccggtgccgttcctgggtttgatccttccactaagttcatcagagacggtgattggagctgtgcctccgtccctcctgccgttgctgaccggagagttgagatcaccggtccggtcgagaggaagatgatcatcaacgctcttaactccggagcttaaggctttatggctgatttcgaggacgctttgtcttcaagctgggagaatc

SEQ ID NO: 154183 - DNA, 459 bp, Arabidopsis thaliana columbia
gaagaaggcggttacgagatcatcaagaaagcaatcgataaattgggactgagacacaaaggacacattgctgcttacggtgaaggcaatgagcgtcgtctcacaggacaccacgagactgctgacatcaacactttcctttggggtgttgcgaaccgcggagcatcgatccgagtaggacgtgatacggagaaagaagggaaaggatactttgaggacaggaggccagcttcgaacatggatccttacattgtcacttccatgattgcagagactacaatcctctggaatccttgatgatcatcagatcaagaaaaaatcttgaatgtcactcaaatttgtgtttcttgcaagattcaaagtttgtgttctctatcaagcaatgtcttaagataagtcaaagatttgctctgcttattctgctttttatttacttcacatcctattgaaaacatttct

SEQ ID NO: 154184 - DNA, 413 bp, Arabidopsis thaliana columbia
  unsure (1)..(413): unsure at all n locations
ctttaacctaatttcacttcgtctctctctcgcgctcccaatttctccgccggcgggaaaaccatgtcgcacttcggaaggtcaggtccaccggatatcagcgacacctactcacttctcgtccttaacatcaccttccgtacgactgctgatgatctctatcctctattcgcaaagtatggaaaggtcgttgatgtgtttattcccagagatcgaaggacttgggattcgcgtggntttgcgtttgttcggcttaagtttaaagacgaagctcacaaagcagtggaaaggcttgatggaagagttgttgatggcagagaaataactgttcagtttgcgaaatatgggccaaatgctgaaaaaattttcaaaggaagagttgtggaaccaccgtcgaagtcacgaagatctag

SEQ ID NO: 154185 - DNA, 313 bp, Arabidopsis thaliana columbia
gaaagattatccttaccgtggattcggcggaaaatgcaattctttcttgaagaattctagagttgtgagtattgatgggtacgaagatgttcctactaaagacgagactgcgttgaagaaagctatttcataccaaccggttagtgtagctattgaagccggtggaagaattttttaacattaccaaacgggtatttttaccggaagttgtggtacaaatcttgatcacgcggcggttgctgtcgggtacggatcataaaacggtgttgactactggattgtaaggaactctttggggacacaatttgggtga

SEQ ID NO: 154186 - DNA, 425 bp, Arabidopsis thaliana columbia
gttcctccttcctgctctgaaaaatggcgaatagaacgaagaaggttggaatcgtcggcagggacggaacacgttatggtgcgagtatcaggaagcagattaagaagatggaggtcagccagcacagcaagtacttctgtgagttctgtggcaagtacggagtgaagcgaaaggctgttggtatctggggttgcaaggattgtggcaaggtcaaggcaggtggtgcttacacaatgaacaccgccagtccggtcactgttagaagcacgatcagaaggttgagggagcagatcgagggttaaaagtctgctggctttttatatttgggttccttgttttgacaatttaagttttgcaaaccctatgcttgtgattttgaatcaagaactatacattgagcagtttaagcaaggttttattaaaaa

SEQ ID NO: 154187 - DNA, 332 bp, Arabidopsis thaliana columbia
cggacgcgtgggacttgatgacatcgacttgtttgagatcaatgaggcatttgcatctcaggttgtttattgccgtagcgagagggggacttgacccatagaaaatcaatgtcaacggaggtgcaatggccataggccatcctttgggcgctacaggagcgcgttgtgttgctacattgttgcacgagatgaaacgccgtggtaaagactgccgttttggagtagtgtcaatgtgcattgggacggggatgggtgcagcagctgtgtttgagagaggagatggagttgatgagctttgcaacgcaaggaaagttgaatcgcaaggtcttttg

SEQ ID NO: 154188 - DNA, 342 bp, Arabidopsis thaliana columbia
ccaggcgtacgcgattatctataaggaacttctacaaacgatctttgttcttcacaatgaactcgaatcaacgtgctcgtggatctttggggagggctgatcaatcttccattctttgacacctacaccttaaactctttcttgtcgtgtcaaggaagaattgtgtccctcttctttaccaaggcctaaaagccagctaacaagaggtgatgtttgattaagggtttgaagagcactgaacattcatatgttctgtggtcgtaaaccgactctgttgctcgctaccataaaagctttggataatcttggattggattttcaacaagctgagctcatcttatt

SEQ ID NO: 154189 - DNA, 223 bp, Arabidopsis thaliana columbia
  unsure (1)..(223): unsure at all n locations
ggntgaagctaagaaagctgcaactcaagaacaacctttcgttactcctgctgaggttttggtgtcagagctttggaaacagaggcttgtgctactcctcctcctatggtgttaaagtatggtgaagaaggacgtgaaagaaacagctttcagattgatgatcatgatgtgactgatgaattggaaaatgtgatgtttggtggtgattatgttaaggaggagg

SEQ ID NO: 154190 - DNA, 456 bp, Arabidopsis thaliana columbia
aacaacatctgttgttcttgcacaaggttttatcgctgagggtgtcaaggtggtagctgctggtgcaaaccctgttttgatcaccagaggtattgagaagacagcaaaggctttggttaccgagctcaagaaaatgtctaaggaggttgaagacagtgaacttgcagatgttgcagctgttagtgcgggtaacaacgacgaaattggaaatatgattgctgaagcaatgagcaaagtgggcaggaaaggtgtggtgacccttgaggagggtaaaagtgccgagaacaacctctacgtcgtagaaggaatgcaatttgaccgtggttatatctctccttactttgtgacagacagcgagaaaatgttcgtcgagttcgacaattgcaagttaactttcgttgacaagaaaattaccaatgcaagggatcttggtggtggtttggaggatgcaattag

SEQ ID NO: 154191 - DNA, 307 bp, Arabidopsis thaliana columbia
caaagacaatgaagatgaattcgcgagctttaatagtttggtttctattgttgtcggctgtgttggccatcaaggttggtgcgctggatcgatgacacaaaacaagttggtgaaaaccaagtggaggagtcaaagtcgacatgcaagtatggaaattgtgcacagtatggagagaatcattttgtagaaacagatgaagtccttgatggggaagaagaagaagaatccaaaaataaccaaggtggaattgggagaggccaatgaggacaaaaaggcggtggtggtggtggcctatgaggacaaaaag

SEQ ID NO: 154192 - DNA, 374 bp, Arabidopsis thaliana columbia
atcatttcttcttcttcttcctcactttgttcatcatcttcttctccgatctaaacaacagtggcgacaccaggagcgtccgtgagcaagagatgaattcgtatacatggcgaaactcgccgaacaagcagagcgttacgaagaaatggttgaattcatggagaaagtcgcgaaagctgttgacaaagacgaactcaccgtcgaagaacgtaatctcctctccgtcgcttacaaaaacgtcatcggagctcgtcgtgcttcgtggagaatcatttcatcgatcgaacaaaaggaggagtctcgcggtaacgatgaaccacgttcgttgatccgtgactacagaagcaaaatccgaacggaactttctgatatct

SEQ ID NO: 154193 - DNA, 352 bp, Arabidopsis thaliana columbia
aatcaccaaaataacatgggtgttaaccaaaagggaggggaagaaccatattcttataacaccgctaataatttagtcgacttttgtgtgataaattagtcgacttcctccatcttgctaccttcggcatcagcatcgtcttcaaggggaggcatctcagcatcggcttcaacagcatcatcgtcatcaatgctcagtccaagcttcagcatcctgtggatcctgcttccgaaagtgtttggctcatcaaggctgaaaccagaagtgagaagagcggtctcaaagaggagaagcacaaggtccttcacagacttggcggttcttgtctgcgtcaggtcgcttttctcaactt

SEQ ID NO: 154194 - DNA, 389 bp, Arabidopsis thaliana columbia
cggacgcgtgggctaagctctagctcaaagttttctctctcaaatccgccatgactgaacagcacgcgaactggtctgcttgcgataacaatggaggaacatgtgtggccatcgctggatcggattactgtgttatcgccgccgatactcggatgtctactggttacagtattcttagtcgcgattactccaaaatccataaactagcggacagagctgttttgtcttcctctggcttccaggctgatgtgaaagctttgcagaaggttctcaaatccagacacttgatctatcaacatcagcataacaagcagatgagctgtcctgcaatggcccagcttctctccaacacgctttatttcaagcgggttttcccctactatgccttt

SEQ ID NO: 154195 - DNA, 462 bp, Arabidopsis thaliana columbia
cgtccggagagctctggatgctggtattgttgcgcatgctgcacttgatgttttcaccaaagagcctgcggctaaagatagcaagctcgtgcagcacgagagggtcactgtgacacctcatcttggagctagtaccatggaggctcaggaaggagttgccatcgaaattgctgaagctgttgttggagctctgaatggagagcttgctgctactgcagtcaatgcacctatggtttctgctgaggttctgaccgagctgaaaccatatgtggtgctagccgagaaactaggaagactggcagtgcaactggtggccggaggaagcggtgtgaaaaacgcgaaaatcacatacgcctcagcaagagccactgatgatcttgacaccagacttctccgagccatgatcaccaagggaatcatcgagccaatctctgacgtatatgtcaatttggtcaacgctga

SEQ ID NO: 154196 - DNA, 410 bp, Arabidopsis thaliana columbia
  unsure (1)..(410): unsure at all n locations
aacaaaacatcatcatatatcctattgactatattaatttcttctaagtgcaaaataggaggagtggagtcaatgaaggggaggctcatantggtttttatgctggctattgtggctctctccgccgtaggaaacgtggctgctcagacagaggctcctgctccaagtcctacttccgatgctgctatgtttgtcccgtcattgtttgcatctgtcgctgctttggcatcagggtttctcttctaaaccaatctccacattccattgagttaggttctaaattgttttgccttctactttcgtctatgtcttatggcctgagctttacgttatttgtttctaaaatttggactacttctgtgctgtgtgtattatgattcataacttaatactattttttaattgcttga

SEQ ID NO: 154197 - DNA, 336 bp, Arabidopsis thaliana columbia
agctcctaacaaagcaatatcatttccaatttataaaagttaaagccatggctgcatctttctctgtcccctctatgataatggaagaagaagggagattccaagcggaggttgcggaagtgcatacttggtggagctcagagaggttcaagctaacaaggcgcccttacactgcccgtgacgtggtggctctacgtggccatctcaagcaaggctatgcttcgaacgagatggctaagaagctgtggagaacgctcaaaaccaataaggcaacggtacgggcttttgcaccttcggagcgttggaccctgttcaggtgaccatgatggctaaaca

SEQ ID NO: 154198 - DNA, 448 bp, Arabidopsis thaliana columbia
cggaccggaacggaagggccgggccagagcgaccggtttagatctcgaacaaaacaaagtctccagaagaaaaaaccaaattccatggcgtctaaagcgaagcagcatcttcgttatcaggcgagaaaatttgcgacacgatcaacacatgctttcacggtgcttatacttcttctcgtagtgattctgattcttctgggtctcgggattttgtcactacctaatgctaatagaaactcttccaagacgaatgatttgaccaacattgtacgaaagagtgagacgagttctggagatgaagaagggaacggtgaacgttgggttgacgttatttcttgggagcctcgagctgctgtttatcacaatttcttgactaatgaagaatgtgagcacttgatcagccttgctaagccgagtatggttaattccacacgggaagatgagaaaa

SEQ ID NO: 154199 - DNA, 422 bp, Arabidopsis thaliana columbia
aaaaaaaaacccttcaaaacatttccttattctttcttcttcatctacaacaatggctggagttgcctttggttcctttgatgattcattcagcttggcttctctaagagcttacctcgctgagttcatctccactttactctttgttttcgctggtgttggctctgccattgcctacgcaaagctgacgtcggacgctgctcttgatacaccgggactagtggccatcgcggtttgtcatggttttgctctcttcgtggccgttgcaatcggagccaacatctccggtggccatgtgaacccagccgtcacttttggtcttgctgtcggtggtcaaatcacagtcatcaccggagttttctactggatcgctcagcttctcggctccaccggcgcttgtttcctccttaaatacgtcaccg

SEQ ID NO: 154200 - DNA, 451 bp, Arabidopsis thaliana columbia
cttattaactcaatgacggcgactgcgtttagggtcggcttgtggatggccgttacggctggcggtctcttaaccgcagcaggacgccaaaatccccggcgtttacagtggcggaccgtggcagaatgcacacgccactttctacggtggcagtgacgcctccggcacaatgggcggcgcgtgtgggtacgggaacttgtacagccaaggatacggtgtgaacacggtggcgttgagcactgctttgttcaacaacggattcagcttgggtgcttgttttgagattaagtgtactgatgatccgagatggtgtgttccgggaaatccatctattcttgtgacggcgactaacttttgtccgtcgaattttgctcaaccgagtgacgaccgaggggggtgcaattcggcgtgcgagccatttgatcttcgcatgcctatggttctcaagatc

SEQ ID NO: 154201 - DNA, 365 bp, Arabidopsis thaliana columbia
gcaaataaaccttttataaaaacgcttttctaaactgttgagaaccgcactcaaggtggatacattgagaaggagcggggcttttcccttatcaatttatctgtgaatgacattgctcaaggaaataattaaactttttttgcatttttgagtgcactaatgatatatacaatgctccaacttctgaggaacttgtagatcacactttttaggtcaaaaaaatttcttatgcacaaactcttttacttgaccgaatataatattttttagagtgtgtcttactatttcaaacttttttctttctttacaataatctttctcaaaacaattcttttttttgaactctctattgctttataaacaat

SEQ ID NO: 154202 - DNA, 363 bp, Arabidopsis thaliana columbia
gaaactggcccctatgttttccattacatcatagaaggacgtgtttgctacttgacaatgtgtgaccgctcttacccaaagaaactcgctttccaatacctggaagatctcaagaatgaatttgaacgtgtcaatgggcctaacattgaaacagctgctcggccttatgcctttattaaatttgatacattcatacagaaaaccaagaaactgtaccaagacactcgtacgcaacgaaacatcgccaagttgaatgatgaactctatgaggttcatcaaataatgacccggaatgtgcaagaagtcttaggtgttggtgaaaagctggaccaggtgagcgagatgtcgagccggttaacatct

SEQ ID NO: 154203 - DNA, 418 bp, Arabidopsis thaliana columbia
gtcacactctcattctcgtttgtgtttttgattggcggagaattggtgatagataagcttgttcttccctcttctcaacttggtggatctgtcatcgatggcctctttgatgctcaacggggccattaccttccccaaaggtttaggttcccctggttccaatttgcatgccagatcgattcctcggccgaccttactctcagttacccgaacctccacacctagactctcggtggctactagatgcagcagcagcagcgtgtcgtcttcccggccatcggcgcaacctaggttcattcagcacaagaaggaggcttactggttctacaggttcttatccatcgtatacgaccatgtcaataatcctgggcattggaccgaggatatgagagacgacgctcttgagccagcggatctc

SEQ ID NO: 154204 - DNA, 451 bp, Arabidopsis thaliana columbia
agaacacaaaacacacaaaaacaaagaggttctttctttgaagaagaaatggaaaaagttgatgtttatgatgagcttgttaacctaaaggcaacagagctgagattgggattaccagggacagaagaaactgtttcttgtggaaaaagcaacaaaagagttttacctgaagctactgagaaagagattgaatccactggaaaaactgaaaccgcttctcctccaaaggctcagattgttggatggccaccagttagatcttacagaaagaacaatgttcagacaaagaagagtgaatctgaaggtcaaggaaactatgtgaaagtaagtatggatggtgctccatatctaaggaagatagatctaacgatgtataaacaatatccagagttgatgaaatcacttgaaaacatgtttaaattctctgtgggagaatattttgagagagaag

SEQ ID NO: 154205 - DNA, 336 bp, Arabidopsis thaliana columbia
aggcgtacgtttcccttcttcaatgcatacgagctccaattatagaagccaggaagctgaggatgcttcttgcgcagttcatgaagcccgaggctgtgaggaggtatgttggtgttatggatgagattgctcaaagacattttgagacggaatgggccaatcaagatcaagtcattgtcttccctcttaccaaaaagttcacgttttcaatagcatgccgttcgttcctgagcatggaagatcccgcaagagtaaggcatctagaagagcaatacaatacggtagcggtagggatcttctcaatcccaatagactttgccaggaacactcgttaac

SEQ ID NO: 154206 - DNA, 421 bp, Arabidopsis thaliana columbia
gacgaacacttacaaaaaaaaatctctttgtgagctttagcgatcgtaacaatggcgaacgaggtgattcttcttgatttctggccgagtatgttcgggatgaggacaaggatcgcattgagggagaaaggtgttgaatttgagtacagagaagaagatctaaggaacaagagtcctttgcttctccagatgaatccgattcacaagaagattcctgttctcatccacaatggtaaaccggttaacgaatctatcatccaggttcagtacattgacgaggtctggtctcacaagaaccctatccttccttctgatccttacctgagagctcaagctaggttctgggctgatttcattgacaagaagctgtatgatgctcagaggaaggtgtgggcgacaaaaggtgaggaacaagaggcaa

SEQ ID NO: 154207 - DNA, 492 bp, Arabidopsis thaliana columbia
  unsure (1)..(492): unsure at all n locations
gcgtccgcaaaaaccttttacattcttaatcaatttcaactcctatgtggctntgacttgatcatctctgggatgagtagctgtcgctggtccacggcggggagaancggccttggcaaggcttcgtaaacaccataccttcagtttccgacctagctccggcaatgatcaatcggaagctggaagtgcgagatcgtacggtgaggattcgctaccggaagaagcagtgaaagttacacgtagtatcatgataattaaaccaccgggttaccaaggcagttcagctccagcttcgcctgccggttcaactccgccgctatcacctttctctccgccgctgtctccgttctctgcaaacgcagggggaaaggaaccctttcggtttaggagacggtcgacgtcggatgcgttcgagaaggcagcaggaggatcagagactggaccaaggagctctcctnctacttacggcatgtgatctctaacacacaacac

SEQ ID NO: 154208 - DNA, 459 bp, Arabidopsis thaliana columbia
gaggagctggtactgtgaagttcttaaagcataagaacactgggaagattcgtctcgttatgaggcaatctaaaactttgaagatctgtgctaatcacttcgttaaatcgggcatgagtgttcaggaacacgttgggaatgaaaagtcatgtgtgtggcacgctcgtgactttgctgatggtgaactcaaggatgagcttttctgtatccgatttgcttctattgagaattgcaaaacatttatgcaaaagttcaaggaagttgctgagtctgaagaagagaaagaagagagcaaagatgccgctgacactgctggccttcttgagaaattgactgtggaagagacaaaaacggaggagaaaaccgaagcgaaagcttgggagacggcaaagactgaagtgaaagcagaagaaagaaagagagcgaggcagagaaatcttgtgaagcaaagaaacagaa

SEQ ID NO: 154209 - DNA, 436 bp, Arabidopsis thaliana columbia
cggacgcgtgggattttccggtgaaatcgaaaaaaaaagcgagatcttcttctctaatggcgacgaccttaagcagagatcaatatgtctacatggcgaagctcgccgagcaagccgagcgttacgaagagatggttcaattcatggaacagctcgtaagtggagctacaccggccggtgagctgaccgtagaagagaggaatcttctctcggtcgcgtataagaacgtgattggatctcttcgtgcggcatggagaatcgtgtcttcgattgagcaaaaggaagagagcaggaagaacgaagaacacgtgtcgcttgttaaggattacagatctaaagttgagactgagctttcttcgatctgttctgggattctcaggttacttgattcgcatctaattcctttaactcctgccagtgagtctaaggtttttta

SEQ ID NO: 154210 - DNA, 380 bp, Arabidopsis thaliana columbia
ggagaacacaaatccaattcacactgttaactgttgggtcggatcctgagtgatattgcgagaccgatgatgtggaagagcattgctgggttgtcgaaggcagcggcagcggcaagaacacacggatctcggcggtgcttttccacagcgattcctggtccttgcatcgtccacaagcgtggtgctgatattcttcacgatccatggttcaataaggacacaggttttcctttgactgagagagatagattagggatacgaggcttgcttcctcctcgtgttatgacctgtgtacagcaatgtgatccgttcattgagtcgtttcgttcgctagagaacaacacaaaaggagagcctgaaaacgttgttgcattagctta

SEQ ID NO: 154211 - DNA, 429 bp, Arabidopsis thaliana columbia
attttgactcgcaaaatctcaacgaatctcgaaaatggattcacgaaccaaggggaagacggtgatggaagttggtggcgatggcgttgccgtcataacactcatcaatcctcccgtcaattctctatccttcgacgtgctatacaatctcaaaagtaattacgaggaggccttgagcaggaatgatgttaaagctattgttattactggtgcaaaggggaggttctctggtggctttgatatatctggttttggtgaaatgcagaaggggaatgtcaaagagccaaaggctggttacatttcgattgacatcataacccacttgcttgaagctgctaggaaaccggcttgcgctgccattgatggacttgccttgggaggaggattagaacttgcttttgcttgcatgctaggatattcagctctgct

SEQ ID NO: 154212 - DNA, 403 bp, Arabidopsis thaliana columbia
atcaaaagaagctttggcaaagagctaaagatcaaagcttttctttgagaatgagattgtggattgtgagtgtactcgtgcttacacaccttgtccatggagctctctgttgggggaaggatggtcactacactgtttgcaaattagctgagggattctttgaggatgatactattgctgcagtgaagaaacttctgcctgaatcagttgatggtggtggactagcagatttttgctcatggcctgatgaaattaaaaaactctcgcaatggcaatggactagcactttgcactatgttaacacacctgaatacaggtgcaactaccagtattggcgggactgccatgacactcataagcataaagactggtgtgtgacaggagcgatcttcaaatacacaaa

SEQ ID NO: 154213 - DNA, 421 bp, Arabidopsis thaliana columbia
  unsure (1)..(421): unsure at all n locations
ccacgcgtccgaagaaagatagagaaaaaaaatgggaggcaaaggtgtgatgatggtggcgatactttgcctgggggcactctctgcagggtgtgaagcagtaacagaggctgagccaggtttgatgatgaacttctacaaggacacgtgtcctcaggccgaagacatcgtccgtgaacaagtcaaactcctctacaaacgccacaagaacaccgctttctcttggctccgtaacatcttccatgactgcgccgntgagtcatgtgatgcgtcgcttttgctggattcgacaagaagagagctaggagagaaagaacacgacaggagctttggacttagaaactttaggtacatcgaggagatcaaggaagctctcgagagggagtgtcctggtgttgtctcatgttttgacattctcgtc

SEQ ID NO: 154214 - DNA, 529 bp, Arabidopsis thaliana columbia
  unsure (1)..(529): unsure at all n locations
cgtccgcttaccttnggttctcctcaaccgnncttctttcttctcctttgaactcagnannacttagaanccaaagagactctttcgtagacccgaagaagagagaggtgagcggtagaaggganngtgaaccctaagggcgtatnccgttagggctgattnnttcagttatcgatannacgattcttggatcttgttcaacaagggctacgaattacaaacnagtaaangaaaggagctaatganagctacccaagacatnntgaaccgtgggatnctctgagttcatntgtnntatggctgctgatannctgagcctctcgaggaattcttcttcaatcttcctcttcttgctgaagaataagaatggtgccgtatggtgtttgtngccatcgaaacaaggcccttggaagagcatgtgatgtaaccagacccgtgatcgcttgttccgttacatcaaacgaggctagtcagttgaaatctcaaatcagcacctttaggatgccattgagaagctcctcatctagat

SEQ ID NO: 154215 - DNA, 153 bp, Arabidopsis thaliana columbia
  unsure (1)..(153): unsure at all n locations
gaatataaaaagngtttttaactaacctctttactctttgagaaacatccttttcatcttgagtgtactctgatacatgtcgccgcttccatttaacttaataattcaaatgacctctatctaatttcctgcaatttggttaaagactaccct

SEQ ID NO: 154216 - DNA, 418 bp, Arabidopsis thaliana columbia
  unsure (1)..(418): unsure at all n locations
gcgtncgcgtgtatctccgtcacttgtagtgatttatcatgcaataaacgactaaaaaaagattcactgatgcaattttaatctttcgtgccgtatacatcataaccaaatcaaagtcgtatttactttactttttttacccatgagggattccttgtatatttcaacaaaaaaaatttgatttttttcagtaaatgtaaatagcagaattgtggctagggaagtatattatcgacctagctaactttattgtagaaattttcgggataaatgattggaccatgcaaactagaaataccttttcttggataagggaagagattactcgctccatatctgtctcactcataatatatataataacttgggcatccatttcaagtgcatatccgatttttgcccagcagaattatgaaaa

SEQ ID NO: 154217 - DNA, 460 bp, Arabidopsis thaliana columbia
  unsure (1)..(460): unsure at all n locations
tgcctcggtgcagctggaggtctagaagccatcgccaccgtgaaggctatcaacactggatggctgcatccttccatcaaccaatgtaacccagaacaagctgtggactttgacacggtcccaaacgagaagaagcaacacgaggttgatgttgccatatcaaactcgttcgggttcggtggacacaactcggtagtcgccttctctgccttcaaaccctgatttcttcataccttttagattctctgccctatcggttactatcatcatccatcaccaccacttgcagcttcttggttcacaagttggagctcttcctctggccttttgcggttctttcattccccgtttcttacggntgctgagatttcagattttggttgttctctctcttggctgcggaatgttgtgtatcttagntcgttccatatttgcgtaatttataaaaacagaaactgag

SEQ ID NO: 154218 - DNA, 396 bp, Arabidopsis thaliana columbia
catgactactctctctctcactttcacatgtcctgtgctcccttgctactgcaccaaacccagaggatccgttcttgtcggcgccggtcagaccacagctccggccgaatccaccgcctctgatgacgcagatcgtctcgagccaagagttgagttgaaagatggttcttttattctcaaggagaaggttcgaaaagggatcaatcctcatgagaaggttaagatcgagagagagcccatgaagttggttatggagaatggtattgaagagcttgctaagaaatctatggaagagcttgatagtaaaaagtcttctaaagatgatattgatgttagactcaagtggcttggtctttttcaccgtcgaaagcatcagtatgggaagtttatgatgag

SEQ ID NO: 154219 - DNA, 372 bp, Arabidopsis thaliana columbia
cgtcactcaggatcagatcttagctaaattgttacaagctcaaaatgagtaagcttcagagggaggccgttcgtgaaggcgtgactactatcacagggaaatccgaggcaaagaaacgtaactttgtcgagactattgagctccagatcggtctgaagaactatgaccctcaaaaggacaagcgtttcagtggatctgtcaagttaccacatatcccccgtcctaaaatgaagatctgcatgctcggagatgcccagcatgttgaagaggctgagaagatggggttggaaaacatggatgttgagtctctaaaaaagcttaacaagaacaagaaacttgtcaagaagcttgcaaagaaataccatgcttttt

SEQ ID NO: 154220 - DNA, 263 bp, Arabidopsis thaliana columbia
ggaggatttctaatgcgagatctaaaaacatatctttccgtagcaccggtactaagtactggatggttcggttcgttagcaggtttattaatagagattaatcgtttatttccagatgcattaacatttccctttttttcattctagttattaacatcagaaaggggtgaaaaatttagagatacaatcaacaatcggggactaacccccccaccttttctaattagtagaataaattagaaaaggtgggggggggggggaaa

SEQ ID NO: 154221 - DNA, 199 bp, Arabidopsis thaliana columbia
  unsure (1)..(199): unsure at all n locations
cgaccacgcgtncgatcaacaacggcatgtctcccgcggttctctatgacttttcaatatttgctcatttggcgaaactaataagtctgtggggagagaggcttcacgtccctcaactctccaactcaaccacccccttgaaaaatctccacaagatgtctttgattctgtgcaagatcaataaaagttttgatcaaac

SEQ ID NO: 154222 - DNA, 429 bp, Arabidopsis thaliana columbia
gcgtccgttcttcgcttctggacttctccggagaaattcgtcctcctagaaactcatcggaactccaggcgcgccgtcgttgggaatgcgtctgccggcgccgatgctcagctcatcagcgatctgcccaaccttgagattgtatccagcttcagcgtcgggctcgacaagatcgatttggggaaatgcaaagaaaaagggatccgcgtcaccaacacccccgacgttctcaccgaagacgtcgcagatctcgccatcgggcttatcctggctctccttcgacggctgtgtgagtgcgatcgctatgtaaggagcggaaaatggaagcaaggtgaattccaactcactaccaagtttagtggaaaatcccgggggatcattggtctaggtagaattgggactgccatcgcaaagagggctgaagccttt

SEQ ID NO: 154223 - DNA, 427 bp, Arabidopsis thaliana columbia
attcagagaaaacagaagaaactatggcaactcaagccgccggaatcttcagccccggcatgagacaaccactactgtggcggcgggagaaactccacctcttctcatcaagccaccgtcccaagtctctctccttcaccaaaaccgccatccgcgccgagaaaacagagtcctcctctgctgccccagccgtgaaagaagctccagttggattcactcccccgcagctagacccaaacacaccatcaccaatcttcgccggaagcacaggaggtctcctccgtaaagcacaagtagaggaattttacgtgatcacatggaactcaccgaaagaacaaatcttttagatgccaacaagaagagctgcgataatgagagaaggaccgaatctattgaaactggctaggaaagaacagtgtttggcttt

SEQ ID NO: 154224 - DNA, 98 bp, Arabidopsis thaliana columbia
attgtccctggtctgtttctaaaccaggatatcgtttttttcaatgtgtctgatttggttgacccatgaaaagaagaaagagtggcagttgcatggtt

SEQ ID NO: 154225 - DNA, 404 bp, Arabidopsis thaliana columbia
ctcaattcttagagaaggcaacttcggctctcagcgaagccaaagaatccgttacaagcaccgctgaatccgtcacgggttgtctcactgatgctgagaaaaccgttaaccaaaccgccaggagcactctaactgacgccgagacaaccgttgcagcatctgttgaaacggtcaagaccgaggctgcagccgcaccagacaaagcgtctggtgtgtctacacaggctaaggatgcagtggacaaagctttttctagaggtatagaaggagccaaatctttgcttcaaactttcgaagcgaagagcagcgatatttcctcaaagcttgttggaggtgttaccaatcttgtgagtggagcatcgagcagcaccgtggcaaaccgagaccttccagtatctacagac

SEQ ID NO: 154226 - DNA, 305 bp, Arabidopsis thaliana columbia
  unsure (1)..(305): unsure at all n locations
cggacgcgtgggtctgcacaaaaccctaatctcacaatctcctacgagatctatcantctcgacgaatatgaagggtgggtgcgggtacttgctcgctgttttgagcggaaaagcttcaccaaccagtgccgatatcaagactatccttggatcagttggtgctgagacagaggattctcagattgagcttttgttgaaggaagtgaaaggaaaagatttggctgagttgattgctgctggaagggagaagttagcttcagtgccgtctggtggcggaggtggtgatgcggttgcttctgctaca

SEQ ID NO: 154227 - DNA, 291 bp, Arabidopsis thaliana columbia
  unsure (1)..(291): unsure at all n locations
gcgtccgagataattctgcgactcttgagaaaggaagttgattgaaggagaatagtanaagaagaagagagggatattcttgtggggtcgacgtacaaagaagatcgccttatctcaagtgtctgcgtctctcgccttttctcttcccaattctggtgccctaaagctagccacaatcacaaacccaacttctacatgtcgggttcatgttccgcaacttgctggaatccgatccaccttcgcttcttgttctcctctcttgccattgaagttgagcatgacccttacagg

SEQ ID NO: 154228 - DNA, 429 bp, Arabidopsis thaliana columbia
accagcttctcaaagctttagcctcgagagcaaaattctctcaagctttagccatgtctggcgtgtgcttcttccctctgtgctttgaatcctaaatcccttcctctctgcgtctccagacccgcttccgtctccgtcttacctccttccctctccttcaaacttcactccgaccacctcgtctctatcttcgcttcctccgccctcaaatgctcatcccccgccgagtacccgtcgcgtttcggtagaaacgttgctgtatcttcggattttgaggtggaggaagatgatatggtcgcttacggtgacgattcagcgcctgtggagcgtaactccttctctcctgaccttaagctctttgctggtaaccttttctttaaacgtgatagcgctcaccttgctcagttctttagagcgctggaaatgttt

SEQ ID NO: 154229 - DNA, 459 bp, Arabidopsis thaliana columbia
aagaaatcgaatctatcgtgtgtgtagattgcttctctctatctcttctctcgctacacaacagtggctgcttacacgtgtacttgccgtccgccgatttctatccggtcagagatgagaatcgcttcctcgccgacgggttccttctctactcgacagatgttctctgtgttgccggaatcgagcggattgaggactcgcgtttctctatcttcactctcgaagaattctagggtttcccgattacgacgaggcgttatctgtgaagctcaggacactgctacaggaattccagtggtcaacgattcaacatgggactctctagttctcaaggctgatgagcctgtgtttgtcgacttttgggcaccatggtgtggaccctgcaaaatgattgatcccattgtcaacgaactcgcgcaaaagtacgccggccagttcaaggtctacaaacttaacact

SEQ ID NO: 154230 - DNA, 428 bp, Arabidopsis thaliana columbia
aacaccaccaatcatggctcttctcttcatactcgacgatgaagttgtgaagctatcaccgcatgctcgggccattagagatgtggaagatgaagaactaagaagctttttcttcggaatgtccccatggcagtttatactcattgtcgcggccagttcaataggagaagagctcttttaccgtgttgctgtacagggtgctctgtctgatatattcttgaaaggaacacagttgatgacagattctagaggcatggcatctctgaccggagtgtttcctccatttgtcccatttgctgaagtctttgcagctgtaatcaccccgactcttacaggctctctctacttttttggtgcggctccaaaagacccgacatacataggtggcccggtcttaagggcacggggaggagattttaaaaagcttt

SEQ ID NO: 154231 - DNA, 364 bp, Arabidopsis thaliana columbia
atcttctcctccgatcattagtctctttaatctttctcagcctcttcttgttcgtgatctgtcttcctccggaaaaggaggggggccggtaacggaaatgctactaacggtgacggagggtttagtttccctaaaggaccggtgatgccgaagataacgaccggagcagcaaagagaggtagcggagtctgccacgacgatagtggtccgacggtgaatgccacaaccatcgatgagcttcattcgttacagaagaaacgttctgctcctaccacaccgatcaaccaaaacgccgccgctgcttttgccgccgtcttcgaggaggaacgtcagaagattcagcttcaatctatcagtgcatcgt

SEQ ID NO: 154232 - DNA, 419 bp, Arabidopsis thaliana columbia
gcattatctatctcccccaacattctctcgcatgcggctcttgcaacccacggaagggcggaaagcactcccctaaagcccctaagctaccagttcctccggtgaccgtccctaagctaccagttcctccggtgaccgtccctaagctaccagtccctccggtgaccgtccctaagctacccgttcctcctgtgaccatccctaagctacccgttccaccagtgactgtacctaagctacccgttcctcctgtgaccgtccccaagctacccgttcctccagtgaccgtccccaagctacccgttcctccagtgacagtccctaagctacccgttcccccggtaactgtacctaagctacccgttcctccagtgaccgtccctaagctaccccttccttcgatttcagggctacccata

SEQ ID NO: 154233 - DNA, 411 bp, Arabidopsis thaliana columbia
ggaaaagatcttttaaaccccaaaataatcaatcaagcaaataagcaatcaatcggaggaagcaatgaataatctcccagaagattgcatcgccaagatcctttccttgacaactcctctcgacgtttgccgtttatcggcggtctccagtatcttcagatccgccgccggctccgacgatgtctggaatcatttcttaccggctgatttccccgccggctttgcggcacctgctggtcttcccaccaggaagcaactcttcttctccctcgtcgataaccctcttcttatcaacggcactcttttgagcttttcgctggagagaaagagtggcaacaagtgctacatgatggcagcgagggccttgaatattgtttggggacatgagcaaagatactggcactggatctc

SEQ ID NO: 154234 - DNA, 463 bp, Arabidopsis thaliana columbia
gttcaaaatcatttcttctctcttccgtcaaaattattattctctcgcagtcgtcaagagcttcttctacaacaatgcagacgacgagaagtgttcaagtaaataatgtctcagatctagccacagagagagagattcacgagtttttctccttctcaggcgacatagaacacattgaaatccaaaaagaatttggacagtctcgaatcgcatttgttacatttactgatcccaaagccctcgaaattgccttgttattatcgggtgcgacgattgtggaccagattgttacaataacacgagctgaaaactatgttcagaggcgtgagacacatgaagtaagaatgttggacaacgcgatgcctcttggtcttcaagagagtactacacagacttaaacgaacatggatggtaatagtagagcatacgttaggcaagcacaagatgtggtggcaacggtttt

SEQ ID NO: 154235 - DNA, 457 bp, Arabidopsis thaliana columbia
  unsure (1)..(457): unsure at all n locations
atcgctctcatccttcgcttcttcgaattccaaaggtagaacagtagaagaaatcatggatccagctgaaatgagatatttggaagaagaggatggtccgttgatgaagacaatcaaaggtagtatcactggttttggtgctgggactatttacggaaccattttagccacatggaaagatgttccaagagtggagagaaatgtggctcttccaggacttattagaacactgaagatgatgggaacccatgggctgacttttgctgctataggaggtgtttacatcggtgttgaacagctggttcagaattttagatccaagagagatttttacaatggtgctattggtggttttgtcgctggagcttctgtgcttggctatagagcaaggagcatnccgacagcgatagctgcaggtgcaacactagctgttacctctgctttgattgattctgga

SEQ ID NO: 154236 - DNA, 420 bp, Arabidopsis thaliana columbia
cttgaattgctcaagactgctatcgagaaggctggatacactggaaaggttgtcattggaatggatgttgccgcttcagagttctactcagaagacaagacctacgacttgaacttcaaagaagagaacaacaatggctctcagaagatttctggtgatgctctaaaggacctgtacaagtcctttgtcgctgagtacccaatcgtgtccattgaggacccatttgaccaagatgactgggagcactatgctaagatgaccactgagtgtggaaccgaggttcagattgtcggtgatgatttgttggtcactaaccccaagagagttgctaaggcaatcgcagagaagtcttgcaatgctctttctttgaagttaaccaaatcggatctgaaccgagagtattgaggccagtaagatgtc

SEQ ID NO: 154237 - DNA, 473 bp, Arabidopsis thaliana columbia
  unsure (1)..(473): unsure at all n locations
gaaaagcaaaaatggctcgatctttcgctattgctgtgatctgtatcgtcctcatcgccggcggtactggtcaagctccgacttgaccaccaaccgctacaccagctccaccaacttcaacaactcctccaccagcagcaactcctcctcctgtctcagcaccaccaccagtcacaacatctcctcctccagtcaccactgctccttctccagcaaatccaccaccaccagtctcttctcctcctcctgcttctcctccaccagctactcctnctccagtcgcttctcctcctcctcccgttgcttctcctccaccagcaactcctncttccgtcgctactcctcccccagctcctctagcttcccctcctgctcaagttccagctccagcaccgaccacgaagccagattctccatctccatctccgtcatctagcccacctttttcattaagcgacgttctggacctagca

SEQ ID NO: 154238 - DNA, 464 bp, Arabidopsis thaliana columbia
cggacgcgtgggagaagaagcaatggggagaaagaagggattaccggagttcgaagagtcggcgccggatggctttgatccggaaaatccatacaaggatccggtggcgatggttgaaatgagagagcacatcgttcgagagaaatggatccaaatcgagaaggctaagatcttgcgtgagaaggtcaaatggtgttaccgcgtcgaaggagtcaatcactatcagaaatgtcgccatcttgctcagcagtatctcgattccactcgcggcgtcggttggggaaaggatcatcgttctatttcgctccacggtcccaaaccggaggctgttgaagctgaataatgttgtgtgcctcattgagatgtctgaggttttgatatgggacatagaatggaatcatttcacaagctaatggctcccttatatttttcaaactctcgagatttttttggtcttagaaact

SEQ ID NO: 154239 - DNA, 410 bp, Arabidopsis thaliana columbia
gtgagctcattgacgagtcactcattatctttgtagacaacaagatagagatgcctatgggttttcaagacatgggccgaggtattgttcatgaagaagatgaggatccatgtgaacgtaacatattgtgggactcgaaggacatcgttgatgctttgacaaacaattcaggaacagaagcaattgagggcatcttcctggatgcgtctgacttgacctgcgagcttagtcctactgcgtttggtaagatgtataatcttagattgctgaagctctaattgtcaacctctgggaaccagtgcaagcttactctaccttacggcctaaacactttgcctgatgagctaagtctactttactgggagaaataccctctgggttacttgtctcagaaatttaatcctgtgaac

SEQ ID NO: 154240 - DNA, 455 bp, Arabidopsis thaliana columbia
gcctcctttcggattcaaatctcagatctagctcaaccatggcgttgctcgtcgagaagacctcaagtggccgtgaatacaaggtcaaagacatgtctcaagccgatttcggtcgtctcgaactcgagctcgccgaagttgagatgcctggactcatggcttgtcgtaccgaattcggaccttctcagccattcaaaggcgctagaatcaccggatctcttcacatgaccatccaaaccgccgtactcatcgaaaccctaactgctctcggtgctgaagtcagatggtgttcctgcaacatcttttccactcaagaccacgccgccgcagccatcgctcgtgactccgccgctgttttcgcctggaaaggtgagactcttcaggagtactggtggtgtaccgagcgtgctctagattggggtccaggtggtggtcctgatctgattgttgatgat

SEQ ID NO: 154241 - DNA, 371 bp, Arabidopsis thaliana columbia
agaaaggaaacattaaaaaagatggcagtctcttttcctcgtcttccgaggtgggtgtgtggtggtagtaacactaaagatagagagaagaaagagtcaattcctaaaggatcttcttcacttagtccttcactgaagaagactactactagtaagactggttcttcctcttcatcagtgaagaagaccaagagaggatggattggaagaggaggatcaggatcaggaggggaagaggataagattgggaatgtggtgtttcctgaacctgatgatccagagtggtcaatttggttgggttgagccccattgaccaagttttaaagcttaagatgattattgttggggctttgtggtttttggctcccctt

SEQ ID NO: 154242 - DNA, 438 bp, Arabidopsis thaliana columbia
cagactttattcgggttccatggacaaaactataaaagtttggagtttggataatctacagtgtatacaaacactcactgatcattcatcagttgtgatgtctctcatttgctgggatcaattccttttgtcttgttcattggacaacacggttaagatatgggctgcaatcgaaggtggcaatttggaagtaacatatactcacaaagaagaacatggagtgctagctctatgtggtgtacatgatgcagaagccaagcctgttttgttatgcgcttgcaatgacaacaccttgcgcctctacgacttaccatcatttacggagaggggaaaaatctttgcaaagcaagagatacgggcgatccagataggtcccgggggcatatttttcacgggtgacggaactgggcaagttaagatggaaatggtgcactgaac

SEQ ID NO: 154243 - DNA, 361 bp, Arabidopsis thaliana columbia
agaacagagagagagagagagactccattgttgaagtgtgttcactgaactcctcctcaaacaacaatggcgacgacggttacactcaaatccttcaccggacttcgtcaatcatcaacggagcaaacaaacttcgtctctcatgtaccgtcatcactttctctccctcaacgacggacctctctccgagtaaccgcagccagagccactcccaaactctccaaccgtaaactccgtgtcgccgtcatcggtggtggaccagcaggcggggcagctgcagagactctagcacaaggaggaatcgagacgattctcatcgagcgtaagatggacaattgcaagccttgcggtggcgcgattc

SEQ ID NO: 154244 - DNA, 449 bp, Arabidopsis thaliana columbia
tctagcacttgtgctacatatggagagcctgaaaaaatgccgattactgaagacactccacagggaccgattaatccatacggaaaagctaaaaagatggcagaggatatgatcttggatttctcaaagaactctgacatggcggttatgatcttaagatacttcaatgtgattggttcagatccaggaggtagattaggagaagcgccaagacccgaacttcgtgagcaaggaaggatttctggtgcttgtttcgatgcagctcgtggtttcattcccggactacaagtgaaaggaacggattacaaaacatcggacggtacttgcattagagactatatagatgttactgacctcgtggatgctcacgtgaaggctctcgagaaagctcagcctcgaaaaagtggtatctacaatgttggaaccggaaaagggagaacggttaaaga

SEQ ID NO: 154245 - DNA, 538 bp, Arabidopsis thaliana columbia
  unsure (1)..(538): unsure at all n locations
gggaattcaccgggtccgagcccgagcgcgtccgcnntccgttcttcaaacccannaatatggcgtccagtcatttttnncagcgggagatatangnnagtcaacagagtgtaagaagggtgcccttttgcgatcacgcccgtgtanngttcctcttccaagcttaatgagaattacccccaatctatatccaggagcctactacaaanggtgtatataaaaaaccgttgcgtcaacctgcgaccaaagttatctgaagaaacctgtattatgtgcttctcgtgtggaagtgttgtgttctcccatatggagcccttgttgcagagaaagtggttgtcctaatcatgcaattacctgtggtgctggtactggtgtatttcttctgatacggcggaccacaattttgctacaaaggtttgcaagacaatcaccttggccatctccttacctggatacgtttggagaagaggatatcgatatgatcagaggaaaacgactattacctgatgaagaacgttatgctgctttaacttacttg

SEQ ID NO: 154246 - DNA, 462 bp, Arabidopsis thaliana columbia
ggtagttaccatcaaaggcgatgatccagatgcagtgattcctgggctaatggctgctggggaggcagcttgtgcatctgttcatggtgccaacaggcttggtgcaaattcactgctcgacattgtcgtatttggtcgtgcttgtgcaaatagggttgcagagataagcaaaccaggggagaaacagaaacctcttgagaaggatgcgggtgagaagactattgcatggctggacaggttgagaaactcaaacgggtctctacctacttcaactatcagattgaacatgcagaggattatgcagaacaacgcagctgtgttccgcacgcaagaaacattggaagaaggttgtcagttgattgacaaggcctgggaaagttttggggacgtccaggtgaaagatcggagtatgatatggaactcggatttgatagagacattggaactggagaaccttttgat

SEQ ID NO: 154247 - DNA, 405 bp, Arabidopsis thaliana columbia
gataatgggaggagctttatcaactgtgtttgtaagtggagaagatgcaacagctgcagggaccgaatctgagccaagtcgcgtcctaaagtttagctcttccgctcggtggcaacttcatttcaacgagatcaaagaatcaaacaaactgctggtggttgatttctcggcctcatggtgcggaccatgtaggatgattgagcctgcgattcatgccatggctgataaagataatgatgtcgatttcgtcaaattagatgttgatgaacttcctgatgtggctaaagagtttaatgtgacggcaatgcctacctttgtgctggtgaaaaggggttaagaaattgaaagaattattgttgccctaaaggacgaacttgataaggaagtttggcaactcaaaacata

SEQ ID NO: 154248 - DNA, 293 bp, Arabidopsis thaliana columbia
ctctctctaatcaaaaagcttttaacctcagccgttaaatctttctccgatcatgccgaccagaaacatcgccattggtggagtccaagaagaggtctatcaccccaacgcacttagggcggcgctcgctgagtttatctcgactttgatcttcgtcttcgccggctcaggctccggaattgctttcaacaagatcactgacaatggagcaaccactccttccggcctcgtcgccgctgccttagctcatgctttcggtctctttgtcgctgtctctgttggcgctaacattt

SEQ ID NO: 154249 - DNA, 392 bp, Arabidopsis thaliana columbia
tccaaatcggaaggatgataacgtcgtccctaacctcatctctgcaagctctcaagctttcgtctccgttcgcccatggctccactcctctctcatctctctctaagcccaattccttcccgaaccacagaatgcccgctttagttccggtcatcagagccatgaaaacgatgcaggggcgcgtggtgtgcgcaaccagtgacaagactgtggcggtggaggtggtgaggctggctccccaccccaaggtcaagaggcgcgtgaggatgaagaagaagttccaagctcacgaccccgataatcagttcaaggttggcgacgtggtcagactggaaaagagcagacccatcagttagactaaatcatttggggcgcttcctggcatcgcaagg

SEQ ID NO: 154250 - DNA, 405 bp, Arabidopsis thaliana columbia
  unsure (1)..(405): unsure at all n locations
agctactctctttaaaagaaannncgttgaaatatatttaagcagaaganggcccaaaagggggaagcataaggagggaaaggagccacacctatgggacganggancgacacangacgccgngaccaagaaacagctcgcagcaggcatagacggaattcaatatgttcagtttgattatgtcaagaacggacaacccgaacaagctcctcttcgtggtaccaaaggccgagttctcccagctgatccgtttgtgattaaccatccagacgaacatctagtttctgtagaaggttggtatagccctgaaggtatcattcaaggaattaagttcatcttcaacaagaagacttctgatgtcattggatccgatgaggtgactcactttactttacaagttaaaga

SEQ ID NO: 154251 - DNA, 441 bp, Arabidopsis thaliana columbia
  unsure (1)..(441): unsure at all n locations
acaaaacacacatcaaaaacgannntctagataaatttatccgaaaaangncagagaccaacgagaatttttgccaagccgggcagcccgctggcaaagctgaggagaagagcaatgttctgctggacaaggccaaggatgctgctgctgcagctggagcttccgcgcaacaggcgggaaagagtatatcggatgcggcagtgggaggtgttaacttcgtgaaggacaagaccggcctgaacaagtagcgatccgagtcaactttgggagttataatttcccttttctaattaattgttgggattttcaaataaaatttgggagtcataattgattctcgtactcatcgcacttgttgttgtttttagtgtagtaatgctttaatgattcttctccctttagatgtactacgtttggaactttaagtttaatcaacaaaat

SEQ ID NO: 154252 - DNA, 250 bp, Arabidopsis thaliana columbia
ggatctaaacctcttccgttggtcgcggcggcgaagaagatgaaaagcaagaaagatgacaattataacttttcagctagacctgacgaagccactggtcctttttctgaatccattcttctcaaagagaagaagattgatgaagaaggtgatcttcttcccgagtttgctgatgcttaagaaatggagctatatcagcttctggatcatcagcttctgagtgactcgtatgaagaaaggatgaggcact

SEQ ID NO: 154253 - DNA, 306 bp, Arabidopsis thaliana columbia
caaagcggaaaccagccccccgccaagggctgggaagaggaaagcgccgagcacggcagcgaaccaaccggaaggtacaccggagacacagatctgcaacatgagcgcagcaacggcgacaacaatgaagcgagtagcggaagagacagaccacgcgcagagcacacggagaaggagcctgggactaaggatagacacagaacaggaccgtacggtcagacctaacgaacagagaacaacgccaaaggccaaaccggagcaggaaacaacagggccaagggacacgacacggaaggagcagaacaa

SEQ ID NO: 154254 - DNA, 161 bp, Arabidopsis thaliana columbia
  unsure (1)..(161): unsure at all n locations
ccggaaaggcctgngagaaagcnncggcatactttttccagacaagaannggctgggacgagccctggcaacnacgggcaagaagaagaagaaaacnaaaangccannagaggnaaaaccaacggaacaaccngangcaccaaangacacngganactacc

SEQ ID NO: 154255 - DNA, 317 bp, Arabidopsis thaliana columbia
  unsure (1)..(317): unsure at all n locations
cacaacctagctagctagnaaacagttttaaatatattctaaaaanggcnncaagnaccagagcgcgnttcgaggcacncaagcggccctccaacacaacaaacnccgccgggggnagcngaaccccgagcggcggaggaagccccacncccaagccaaagccaacaccaaaaccaaccccaagcccnagcncaggcncgagcaagagcccaaaagacacccncaagcncggagacagcgccaangngcncaacggccaccaggacaggacccanggcaagccaccggncgagccaagccgcagccacaaccaagga

SEQ ID NO: 154256 - DNA, 336 bp, Arabidopsis thaliana columbia
  unsure (1)..(336): unsure at all n locations
ggggcgacagganncagaggcaaaagattgataggtttgnaaaggggaggnancagggggagcggngacggcaaacnanggacgccccacacagaaaagagaancngaggaggnnacaaacaccaagagcgccgcgagaccccaagcacgacgcacagagaganngaggacnacacnnaacagggcagggcaaanaccaacggaaanacnaagacacnngcagganaggcacgaaagggaaccaagcacaggagaaagacgcgccagaccaacacaaaaccgggnaacgaccncgaggggaganagagcagaggagaaccagccaagcgaagcacc

SEQ ID NO: 154257 - DNA, 448 bp, Arabidopsis thaliana columbia
  unsure (1)..(448): unsure at all n locations
cacaagcgnataancncacccaagaatttaaatgctttatnagagagaaagagagagaaaggggggcgacaacaacagaagcaacgaacacatcaacgaccaagggagaagancagaagcagncncagaancnncgacancaagaagnnggncacaagagnctcttacagagcgatgatctctaccagtatatactggagacaagtgtgtatcctagagaaccagaatcaatgaaggaactcagggaagtgacagcaaaacatccatggaacataatgaccacatcagctgatgaaggacagttcttaaacatgcttatcaagctcgttaacgccaagaacacaatggagatcggagtttacactggctactctcttctcgccaccgttcttgctctccctgaagacggcaaaattctggctatggatggcaacagagagaattacga

SEQ ID NO: 154258 - DNA, 235 bp, Arabidopsis thaliana columbia
  unsure (1)..(235): unsure at all n locations
gaaaaccgggcgacccaccgccgcgatgacaccaaanggggggtttacatactttaaggccaaagagaggcggctgagaancaggcggcngagaaccctcacaggacagncnacgacganaagagaangaacgggcgaaaannngaggacaaggaggnncaaaaggacaggaaacaagnaccncaccaganngngaacaaggaagggaagccaaacanncaagccaagaacaagg

SEQ ID NO: 154259 - DNA, 370 bp, Arabidopsis thaliana columbia
  unsure (1)..(370): unsure at all n locations
gaaacccggncgacccacgcgnccgggggagggaaaccacnacncgcgaaatagatanaatgccagagcnaacacnnacaagggggggcgacagagggaaggggcgcaccccacagacaaaaggncgacgcggacacagcccggcgcacagacgaaacacgagaacgcgacggaacgcagggacccggagccggcgacgcacgaaacaaaaaacggcccgaccaacacacgacggaaggacaggggccaaccacggagggaacgggagacggagaaagaaggcacgagaacggagagggagccagagaaacggccaccacaaacaaggaaggcagcaggcgcgcaaaaaacccaagcccgacacggggag

SEQ ID NO: 154260 - DNA, 430 bp, Arabidopsis thaliana columbia
  unsure (1)..(430): unsure at all n locations
cgatggctcaaatctcaancnnncncnccggataattatttctctcgganngaaancatccaggggtgccaccgcaaccgagaagctccctcagctcaaatccgccgtcgatggacttactgagatgagcgagaatgagaagagtggattcatcaacctcgtttcacgttacctcagtggtgaagcccagcacattgaatggagcaagatccagacacctactgatgaaattgttgttccttatgataaaatggctaacgtctctgaagatgcttccgagaccaaatatctgttggacaagcttgttgtgctgaagcttaatggaggtttgggaaccacaatgggatgcactggtccaaaatcggttattgaagttcgtgatggtttgacatttcttgacccgattgttatccagattgagaatctcaac

SEQ ID NO: 154261 - DNA, 397 bp, Arabidopsis thaliana columbia
  unsure (1)..(397): unsure at all n locations
caaaattagacaaaaaanaaaaattttttttgttacctcagnnnatcgaccaaacgtcgccgtttattattctccggatggtgtgcaggttcgaggacggtacgaccaaatcttcgccaagattttgacgagagaagctcttagctttgtggctgagttacagagagagtttcgtggccatgtgaagtatgccatggagtgccggagagaggcaagacggcgttataactccggtgccgttcctgggtttgatccttccactaagttcatcagagacggagattggagctgtgccttcgtccctcctgccgttgctgaccggagagttgagatcaccggtccggtcaagaggaagaatatcattaacgcttttaacttcagagctaaagtttttatg

SEQ ID NO: 154262 - DNA, 362 bp, Arabidopsis thaliana columbia
  unsure (1)..(362): unsure at all n locations
caaagatattcctactacacangggttttcatgacttgcctnacgctncatcngacaaggggggaagngaaacctnnctccagaatgcatttgaaagtatactgaaaacgtatttgaggaagaacccgatggcgaagacgatatgggaactagttaagtcggtggacaacgaaaagatctcttacgaccacttctttttcaggacatttaaggccgatggttatggaattgattccctggcgagttttttcatggattatggatataaagttggaggcagacttgattttccaatgaagaaagtacaagttctctggctttctcctccggatgttcacttccccgataatggttacggtatt

SEQ ID NO: 154263 - DNA, 421 bp, Arabidopsis thaliana columbia
  unsure (1)..(421): unsure at all n locations
gccacgcgtcgctcacganttttcataatttctcccaaaagangncgaaccgtagagttttcttcgacatgagtctcagcggtactcccatcggacggatcgagatggagcttttcgctgatacaaccccaaacacggcggagaatttccgtgctctctgtaccggcgagaaaggaatgggaaagctaggtaagccacttcacttcaaaggatcgatcttccaccgtgtgattcccggattcatgtgtcaaggaggtgatttcaccgccaagaacggaaccggtggtgaatcgatctacggtgctaagttcaaggacgagaactttatcaagaagcatacaggagctgggattctttcaatggctaactctggcctaacactaacggatctcagttcttcatctgaaccgatagacgttgt

SEQ ID NO: 154264 - DNA, 350 bp, Arabidopsis thaliana columbia
ccatctgcttcctgcgccaaatcaccattaccaatctccagattctccctcccattctccctaaaccccaacaaatcatcctcctcctcccgccgccgcggtatcaaatccagctctccctcctccatctccgccgtgctcaacacaaccaccaatgtcacaaccactccctctccaaccaaacctaccaaacccgaaacattcatctcccgattcgctccagatcaaccccgcaaaggcgctgatatcctcgtcgaagctttagaacgtcaaggcgtagaaaccgtattcgcttaccctggaggtgcatcaatggagattcaccaagccttaacccgctcttcctcaat

SEQ ID NO: 154265 - DNA, 451 bp, Arabidopsis thaliana columbia
  unsure (1)..(451): unsure at all n locations
gagacagagaggtagagagaggaacganggctgnatagattaagnagacgangnnggaagaacaatagaggtagagactgtgtgtgaaaaaagagaaagaggagaggaagctgaaacattgactccatgggagcaacactccagcatcataagcatccctcgattcgactacaaagctccctcttctctgcttcatcattctcattccggattcctcgtcacctgcaacatcaaaagggagaaaagtgctactaaagaggtcatgtccatccttggaaagtatattgggtccatgcatgaggagaaacctgaagttctaaactctactgcatccaaaaaacaaaaagtttgtgcacaagagacagaggaaggcggagagaagactgtacctcttgagaatgatgccttgcaggaaacaggtgaaaatccaaatgttgaggatcttaaatta

SEQ ID NO: 154266 - DNA, 446 bp, Arabidopsis thaliana columbia
  unsure (1)..(446): unsure at all n locations
aaacaaacaaacaaaaanatcnnagngagctttaattttttcngcaanggcagacgaggngaggctgcttgatttctggccgagcatgtttggaatgaggacgaggattgctttagaagagaaaaatgtcaaattcgattacagagaacaagatctgtggaacaaaagcccgattctcctcgagatgaatccggttcataagaaaataccggttctcatccacaatggtaatccggtatgtgaatcactcatccagatcgaatacatcgaccaagtttggcctaacaaaaccccacttcttccttctgatccttaccaaagagcttaagccaaattttggggagatttcaatgataagaaggtgtatgcttcagcgaggttgatttggggagctaaaggcgaagagcatgaggcggggaagaagagttcatcgagatctaagacac

SEQ ID NO: 154267 - DNA, 321 bp, Arabidopsis thaliana columbia
gactggatcaggaaagggcgcgaagcgtgagtaggttgatgctcgccaccacatgctaggccgcttgtcttcggtagtagcacaggatctgctcaatggccagaatattgaggctgtccggtgcgaggagatttgtctctgcggcggacctgttcgccagaagatgaagaacatgaggtttctccggaagcgtatgaacactaaaccttctcacggacctattcacttccgggctccctccaagatcttctggcgtaccgttcgcggtatgattccacacaagactaagcgtggagctaatgcacttgcccgcttgaaggt

SEQ ID NO: 154268 - DNA, 161 bp, Arabidopsis thaliana columbia
  unsure (1)..(161): unsure at all n locations
gacttatcgagcttaggagganngaagcatcaaggtagacngcgncnacactngctaggggggctaatgtggcctacttacccggcggccagagcatgctctttgccctgaaccgttgatcttgatcagatatgatggttgtttgggagcattttgtgata

SEQ ID NO: 154269 - DNA, 384 bp, Arabidopsis thaliana columbia
  unsure (1)..(384): unsure at all n locations
gccaaactcatctaaaacgacaaatttttgtaataaattgnatttgaaaagggttttcaagaaaacgatatccatcaaaaatattatgattttttctgtcaattaatattctttcattcttttatagagttgatcaacttcatgggcattttttagttccctcaagttttgatcctcttattttatttctttttttgttgataaatttattttagttttgatctatggaggttgcttatttcaaacctcgttgatcacttttatttctgtataaaccaaaaaaccagtctttggaatttttctaaaaagacaggttttatttcttcaaccattttttaattataattttatataatccttgtttttgtagtacatttttttttt

SEQ ID NO: 154270 - DNA, 457 bp, Arabidopsis thaliana columbia
  unsure (1)..(457): unsure at all n locations
gcaggttataagctgngtagtattttttgagttttatagacactatgagaagaggtagagggaaagggaagaagcagaatgcatctgctcgggaagatcgtggaagcggtgatgaagaaaagattccagcttacaggagaagaggaagaccacagaagccgatgaaagatgatttcgaagaggaagaagaagaagatgatgaagagatggtagagaaaatggaagtagaagatgaagatgaagagattgatgatggttcagtaacaagtaaagatttgaaggagagaaagaggaagatgtctaatggaagcaatactgatctgactgaagaagagaatggtttaggatcgaaaccaaacaccgatgattccacgagatcgacatctattgggtttagacaaaatggaagccggaggaaaagcaagccgtgacgagctgctgaagctgtcgtggaatg

SEQ ID NO: 154271 - DNA, 409 bp, Arabidopsis thaliana columbia
  unsure (1)..(409): unsure at all n locations
ancatctcccatggcggaaancgaagncttttactttgattaagaagaagacaaagctttgggatttatagaatggcgtgtgtatcgacatgcttgattctctcccctaggttaactcaagtgggtttatcatcaaagaagccttttttgattcggctcagatctcctgttgatcgctactcttttcccagaatgttaacggaaaggtgtttgagcactcgtcggaaggttaatcgccatggaatcgctggggtgaaggctgccagtttagataaggttagcggcgcaatcaaaccaagtggaatggtggagagtgacaagttgcccgctggatgtcggaaacgagccgaggaagcggtagatgagtgtggcccgaagagtaactgttggggatgttgctagtagaggt

SEQ ID NO: 154272 - DNA, 211 bp, Arabidopsis thaliana columbia
  unsure (1)..(211): unsure at all n locations
accaagtccattaagcagaacaagccnaagcncncggggaacaagncnagccncaagaaggaaccccccaggagggcaaaggcgggggcnaaccaggnggnggacaacnacnacaggccggacnggaagaaagcngcacnggcnagacncagcgccancagcaaagggcncagggnggccaagnccggngccaagcaaagaaacagacaag

SEQ ID NO: 154273 - DNA, 398 bp, Arabidopsis thaliana columbia
  unsure (1)..(398): unsure at all n locations
ggcgcccagctccggagaggagactgctaancgnnccgggttttnatacttatccanncnncnctcaagancgaagagttactgagnnngaagnggagaacaaaccagngggcccgacaaaccccactagaaactttgtttagtgtgtcttcttaaagcctgcaagatgcagagaccaccttctgaagatttctccttgaaggagacgagacctcatctaggtggaggaaaactctctggagataagcttaccagtacttatgaccttgttgagcaaatgcagtatctctatgttcgtgtggttaaggcaaaggagttacctggcaaggatatgactggtagttgtgacccttatgttgaggttaagcttggaaactacaaaagcaccactaggcatt

SEQ ID NO: 154274 - DNA, 445 bp, Arabidopsis thaliana columbia
  unsure (1)..(445): unsure at all n locations
gaagaggntgacaacagaatggnnaaccacaaggtacaatagttcaagaggaagagnaagaaggatatcaccggtaacccaagagctcttaggaggttgagaacttcctgtgagagagcgaagaggactctttcttccactgctcagaccaccatcgagattgactctctatacgagggtatcgacttctactccaccatcacccgtgctagatttgaggagctcaacatggatctcttcaggaagtgtatggagccagttgagaagtgtcttcgtgatgctaagatggacaagagcactgttcatgatgttgtccttgttggtggctctacccgtatccctaaggttcagcaattgctccaggacttcttcaacggcaaagagctttgcaagtctattaaccctgatgaggctgatgcctacggtgctgcttgccagggagcta

SEQ ID NO: 154275 - DNA, 297 bp, Arabidopsis thaliana columbia
  unsure (1)..(297): unsure at all n locations
caaatcttatcaatggcttcctcactcgactcancttttcaacccaagncagcatttttgggagatagaaatgggttcaaggtctcaagcacaccttttgctcaagggggttactccagtaagaccattgagtgcaaagaatcaaggataggaaagcaaccgatcgctgtaccttccaatgtaaccattgcattggaaggtcaagacttgaaagtgaagggtccattaggagagctggctttaacttacccacgcgaagttgagcttacaaaggaagaatccggtttcttaagggtc

SEQ ID NO: 154276 - DNA, 406 bp, Arabidopsis thaliana columbia
ctacgctctctcaaaagtcgaatattccaataacgatccgttttccggcgataatctccgatctagatccgatggcgaaagaaccagttcgtgtgctcgttactggagctgcaggacaaatcggatatgctcttgtacctatgattgcaaggggtatcatgcttggtgctgaccaacctgttatcctccacatgttggatattcctccagctgctgaagctttgaacggtgttaagatggagttgatcgatgctgctttccctcttcttaaaggtgttgttgctacaactgatgccgttgagggatgtactggagtcaatggtgctgttatggtttgtggtttcccgaggaaagaaggtatggagaggaaggatgtgatgtccaagaatgttttcatctacaagtc

SEQ ID NO: 154277 - DNA, 329 bp, Arabidopsis thaliana columbia
gccgccgtaaatacatcggagacagtgaataaagtttctctggctctgcagctaacgtcgctttacttcagccatcaccggcacctctcggctctaccataactttccatggaaagtttgatctcctctccgtctcccgcaacgattgtccctcctccgcctcgtactgccttgtctcctgccgtttctaacttctccaccgtcatactaaccaatccttctttcacaaatctctatatttctttgttcgattctgtttgccctgtgctaggaggaatcaagaaaccaggggttttcttttaggcttgtgatcatgaagaagcgcttgc

SEQ ID NO: 154278 - DNA, 386 bp, Arabidopsis thaliana columbia
aatttagacaaaaaaataaatatggagctcgatacttattttatcgaccaaacgtcgccgtttatgattcttcggatggtgtggaggttccaggacggtacgaccaaatcttcgccaagattttgacgagagaagctcttagctttgtggctgagttacagagagagtttcgtggccatgtgaagtatgccatggagtgccggagagaggcaagaccgcgttataactccggtgccgttcctgggtttgatccttccactaagttcatcagaaacggggattggagctgtgccctccgcccttctggcggtgcttgcccggagaggtgagatcacccggtccgcgtcgagagggagaatgatcattcaacgcttcttaaacttccg

SEQ ID NO: 154279 - DNA, 447 bp, Arabidopsis thaliana columbia
tggtagagtttatggagaaagactcctccgctgatgatggcgatgaactcaccgtagaagagcgaaatcttctctccgtcgcttataagaatgtgattggtgctcgccgtgcctcgtggcgtatcatttcatcgatcgagcagaaggaagagagccgtggtaacgatgaccacgtcacggcgatccgtgaatataggtctaagatcgagacggaactctccggaatctgcgacggaatccttaagttgcttgactctagactcatccctgccgctgcttctggtgattccaaggtcttttaccttaagatgaagggagattatcacaggtacttggctgagtttaagactggtcaagagaggaaagacgccgccgaacatacactcgccgcttacaaatctgctcaggatattgctaatgcagagcttgctccaacacacccaaatt

SEQ ID NO: 154280 - DNA, 424 bp, Arabidopsis thaliana columbia
  unsure (1)..(424): unsure at all n locations
agcttatcgcggcgattagntcccggcgtgnagattaagagagataagaaaatggcgactgatggatctgctagctcagcgcagctctctcagaaggaagctgatgtcaggatgatgtgtgccgctgaggttcatcttggaaccaagaattgcaattaccagatggagcgttacgtcttcaagagacgcaacgatggtatttacatcttcaaccttggcaaaacatgggaaaagctccagatggctgctagagttattgttgccattgagaacccacaggacatcatcgtccagtcagctaggccctatggacagagagctgtgttgaagtttgctcagtacactggagccaatgccattgctggaagacacactcctggtacctttaccaatcagatgcagacatccttcagtgaaccaaggc

SEQ ID NO: 154281 - DNA, 436 bp, Arabidopsis thaliana columbia
aaaaatgggtaaagccggctcttaacttattggttatttggttggaaatggagttgcggatccgaagtttgatggaaatgcttttgtcccgtttgcacatgggatgggactaatctctgatgaactctttgagaacgttacaaaagcttgcaagggaaatttctatgaaatagagggactcgagtgcgaggaacagtatacgaaagttaacgatgatactaaccagttgaatatatacaacattcttgagccatgttaccacggaacatcgctatctgcattcgacattagatcgcttccttcaagtctccttcagctaggcaaaactgaaaaacggttacctataagaaaaagaatgtttggtcgagcgtggccagttcgtgcgcctgttcatccaggcattgtccctagctggtctcaactttttgccgacgtc

SEQ ID NO: 154282 - DNA, 449 bp, Arabidopsis thaliana columbia
catcactgaatcaaaaaccctagcgatactacaatacatgagcccgagccgcgttgcgaaagcattggaatcgtagtctaagagaatgtcgacagtgggagagctcgcttgcagctacgctgttatgatcctcgaggatgagggtattgctatcacggctgacaaaatcgccactttggtgaaagctgctggtgttaccattgagtcatactggccaatgctattcgccaagatggctgagaaacgtaatgtcactgatctcatcatgaacgttggtgctggtggtggaggtggtgcgcctgttgcagctgctgctcctgctgctggcggtggagctgccgctgctgctcctgctgccgaggagaagaagaaggaccaaccatcataagaaaggggtggggatttggggttttgctttgctcgattaagtgcattatacttggtttttc

SEQ ID NO: 154283 - DNA, 468 bp, Arabidopsis thaliana columbia
gaattcggcgccacgcgtccgttagacctttttatcctaatttcataactagtttgaggagatttagaggagtgggtggttctttggataacaatatcccaaactgaaaatggctaagtcatatggagctatcttcctcttgaccctcattgtcctcttcatgcttcaaaccatggttatggcctcaagtggatctaatgtgaagtggagccagaaacgttatggaccaggaagcctgaaacgtacccaatgcccatcggaatgtgataggaggtgtaaaaagacacagtaccacaaggcttgcattacgttctgcaacaaatgctgcaggaagtgtctctgtgtgcctccgggttactatgggaacaaacaagtttgctcctgctacaacaactggaaaactcaagagggtggaccaaaatgcccttgaaaaaatctcccttcgttccctttttataataaaaattt

SEQ ID NO: 154284 - DNA, 457 bp, Arabidopsis thaliana columbia
ctttattggagaaaccctaatcggcgacaattggtttttctcgtgactctatccacaagaggcgtgccactggaggcaagcagaagcaatggaggaagaagcgaaagtatgagatgggaaggcagccagccaacaccaagctctcaagcaacaagacggtcagaagaataagagttcgtggtggaaatgttaagtggcgtgcgttgaggctcgatactggtaactactcgtggggaagtgaagcaactacccgcaagaccagagtccttgatgtggtctacaatgcctccaacaatgagcttgtacgtactaagacacttgtcaagagtgctattgttcaggttgatgctgctccgttcaagcagtggtacctctcgcactatggtgttgagcttgggcgcaagaagaagagtgcttcttccaccaagaaggacggaaaggaaggtgaagaggcagc

SEQ ID NO: 154285 - DNA, 389 bp, Arabidopsis thaliana columbia
  unsure (1)..(389): unsure at all n locations
gcttgacgctgcttcaaggctattcttcttcngatgaagaagaagcagaggagagagcttttggggattacgacaactccgacgaagatggggataatgatgttcggagatatgaatcgtcttctgtgtttgatttctctgcatctgcctcctccgctaaaaacgccggccttccttcagctgacgacgttttctctcagatttcagggccaccggagtttctaaacaaccgcacagaagcagataatgaagcttcagctagagatgcagaacatgcaaatcgtattagtcgcaaaaagaagaaagttaaaccaaaaggtgttggcatggaagcaaaacctaaactagttggaatccatgagagagtaagaaacgatattgatgcaccc

SEQ ID NO: 154286 - DNA, 299 bp, Arabidopsis thaliana columbia
  unsure (1)..(299): unsure at all n locations
cttattcttcctcttcctccgccagaaacgtaacttgcgaagangagcaacgacaaggacaggatgaacatgtccgatctgtccaccgctcttaacgaggaggatcgtgccgggcttgttaatgctcttaagaacaagttgcagaatttggctggacaacactctgatgtccttgaaaacttgactccaccagtcaggaagcgtgtcgtgtatctaagtatgattcataaccaaaatgatgagaaggaagctaaattactttgaggagtgaatcttatttttaaagtttttaatcaaaa

SEQ ID NO: 154287 - DNA, 397 bp, Arabidopsis thaliana columbia
  unsure (1)..(397): unsure at all n locations
gccactgccgatggacacaacgncgatgggtgcttgaaggccattgggcttacagatcagagagagactactgttgtttggagcaaatccactggccttcctctccacaaggctattgtctggatggatgctcgtaccagctccatctgcaggagactagagaaagaactctcgggaggaagatcccattttgtggagtcttgcggcttgccaataagcacatacttctctgccatgaagctgctttggctcatggagaatgtggatgatgtcaaagacgctatcaagaaaggggatgccatctttggcactatcgacacatggttgatctggaacatgactggcggtattaatggcggccttcatgtcactgatgtcaccaatgcttcacggacat

SEQ ID NO: 154288 - DNA, 338 bp, Arabidopsis thaliana columbia
tagcttttttgtaccgaacatctttatccatgatacatggctgaggcttctgatttgttggaatggcctaagaaggataaccgtcgttttctccatgttgtctaccgcgttggtgatcttgatcgcaccattgagttttacactgaggtctttggtatgaagctgttgaggaaaagagatatccctgaggagaagtattctaatgcttttcttggttttggacctgaaacatctaactttgtttgtggagctcacatataactatggtgttagctcatatgatattggaactggctttgggcattttgccatttcaactcaagatgtttccaaactgg

SEQ ID NO: 154289 - DNA, 447 bp, Arabidopsis thaliana columbia
  unsure (1)..(447): unsure at all n locations
ggaggtagcagcagcgactgcgacgagcttcttactgcttcgagctcgnacgncagcgantatgccggcttctacacgtaatctgagatctaaaccgagattttcttcatcttcatctctcagagcttctctttcgaatggctttctttcgccgtataccggaggaagcatctctagtgacttatgcggcgctaagcttcgtgcggaatcgcttaatccgttaaatttttccagttccaagcctaaacgcggagttgtcactatggttatacctttctcaaagggaagtgcacacgaacaacctcctcctgatttggcatcatatttgttcaagaaccgaattgtatatttgggaatgtctctcgtaccttcagttactgagttgatacttgcggaagttctttaccttcagtatgaagacgaggaaaagcctatttacctttacat

SEQ ID NO: 154290 - DNA, 435 bp, Arabidopsis thaliana columbia
  unsure (1)..(435): unsure at all n locations
caaaaataaaacacacaatctcaagaaaatcaacttcntattacaaagattcaatcttcttggttcttcttgcaaccatgagtcttcttgcagatcttgttaaccttgacatctcagacaacagtgaaaagatcatcgctgaatacatatgggttggtggttctggtatggacatgagaagcaaagccaggactctccctggacctgtgaccgatccatcaaaacttccaaagtggaactatgatggttcaagcactggtcaagctcctggtcaagacagtgaagtgatcttataccctcaagcaattttcaaagatccattccgtagaggcaacaacatccttgttatgtgtgatgcttacactccagcgggagagccaatccctactaacaagcgacatgctgcggctgagatctttgctaaccctgatgtta

SEQ ID NO: 154291 - DNA, 435 bp, Arabidopsis thaliana columbia
  unsure (1)..(435): unsure at all n locations
ggtaagttgatttgctcnnnnaaattcactanacttctcctccatacactttcctctgcaatcctcagttttttttctaagccctaataccatctcaaagaagagatcaagatttgaaatcaagaagacaccattactcagatcaacatgcttgccgttcaccgtccttcttccgccgtatcagacggagattccgttcagattccgatgatgatcgcgtcgtttcaaaaacgttttccttctctctcacgcgactccacggccgctcgttttcacacacacgaggttggtcctaatcagtgttgctccgccgttattcaagagatctccgctccaatctccaccgtttggtccgtcgtacgccgctttgataacccacaagcttacaaacactttctcaaaagctgtagcgtcatcggcggagacggcgataac

SEQ ID NO: 154292 - DNA, 460 bp, Arabidopsis thaliana columbia
  unsure (1)..(460): unsure at all n locations
cggacgcgtgggctccaacactaaanaaattttactgactctctctctctctctctccgtaacaaaaaaatcaccaatggcaaaacaatatctctttgtactcctctcaatctcctatctcttatcactggagctcacggcggccaccgcagcctcacagaccggagcttccaaaaaagccataaacttcatccaatcttcttgcaaaaccaccacataccctgccttatgtgtccactcactctccgtctacgcaaacgacatccaaacaagccctaaacgtttagctgagaccgctatagccgtgacactaagccgagcccaatccacgaagctcttcgtctcgcgtctaacacgtatgaagggtcttaagaagcgcgaggtcgaagccatcaaagattgcgtcgaggagatgaacgataccgttgaccgtttgaccaaatctgttcaagaactgaag

SEQ ID NO: 154293 - DNA, 391 bp, Arabidopsis thaliana columbia
  unsure (1)..(391): unsure at all n locations
ggaagatttaagatacttgttgataaggatatcngtataagctttngaaannntnggcaaaggtctcatttgatccgacttttctgttgaaggtgaaatagatacaaaaaaaatgggctcagaggaaaacaacagcacaagctttccaccaacagagccaaagctctgtgataacggatgtggattcttcgggtcaccatccaacatgaatctctgctcgaaatgttacagaagcttaagagccgaggaagatcaaaccgcggtagcgaaagctgcggtgaagaactctttaaagcttccatcttgcagtatcattgcacctggacaaaaacatcctctggaaattaaaccagctcatttggaaaccgttgttgtaaccgctgagccgtct

SEQ ID NO: 154294 - DNA, 445 bp, Arabidopsis thaliana columbia
acaaaactcgcttcctgataatcaaattaaattcttctctatcaagcttatcgaaaagtcacatcttttggaagaaacaatggctcgtaccaagcaaaccgctaggaaatccaccggaggtaaagctcccaggaagcagcttgccaccaaggcggcgaggaaatcagcaccaaccaccggaggagtcaagaagcctcaccgttaccgtccaggaaccgtcgctcttcgtgagattcgtaagtaccagaagagtactgaattgttgatccgcaagcttcccttccagcgtctcgttcgggaaatagctcaggacttcaagacggatctgaggtttcagagtcacgcggtgttagctcttcaagaggcggctgaggcatacctagttggacttttcgaggatactaatctctgcgctattcacgccaagagggttacgatcatgcct

SEQ ID NO: 154295 - DNA, 439 bp, Arabidopsis thaliana columbia
  unsure (1)..(439): unsure at all n locations
tcaaaatatggatagtcacaaatggagncttggnttcacattacttgctttcctcttcatcacttcctcttccgctgagctcatcattaaacaggtcacacagggcagaggaatagagtacaacaactcttacagtctcacgtcgaatcttggagtgacgacaagagagttgagagacgagcgaccatcaagtaagatagtgacaatcacaagcttctctgtgattaaggacagaggagaaccctatgaatcatctatttttgaggctgccggttacaaatggagattagttttgtacgtgaagggtaatccgaaaggcggtataaataatcatatttcactttacgcgaggatagaagagacagaaactcttccaagagggtgggaagtgaatgttgatctcaaactctttgtccacaatcggaaggtaaagaaatat

SEQ ID NO: 154296 - DNA, 416 bp, Arabidopsis thaliana columbia
  unsure (1)..(416): unsure at all n locations
gaaactagaaaacgcctatctctgctcattggcttcntcatctccgatcaaatccgcggtcgtagtcagagagagagacaaatggctatgcctagggcaacctctggtcccgcttacccggagaggttctacgctgctgcatcttatgtcggtctcgacggatctgattcgtcggcgaaaaacgtcatctcgaaattccccgatgatactgcactacttctctatgcgctataccagcaggctactgtaggaccatgcaacactccgaaacctagtgcctggagaccagtggagcaaagcaaatggaaaagttggcaggggctcggaaccatgccctccattgaggcaatgcgtctctttgtgaaaattctggaggaagatgatcctggttggtattcgagggcatctaatgatat

SEQ ID NO: 154297 - DNA, 371 bp, Arabidopsis thaliana columbia
  unsure (1)..(371): unsure at all n locations
ggaattaacactaaaattgctggttttgcttcngtttatcttaaatcatcatgttggttctggctctatcgtcaagtttcttcccggttttgaaggccctcttcctttcgaacttgaaaccgggtacattggtattggtgaggaagaggaagtgcaattgttctattatttcatcaaatctgagagaaatccaaaagaagaccctcttcttctctggttaagtggaggacctggatgttcttctatcactggccttcttttccagaatggacctttggctttgaagtccgaggtttacaatggaagtgttccttctttggtctctactacatattccgggactaagacggggaacataatattcttggatc

SEQ ID NO: 154298 - DNA, 375 bp, Arabidopsis thaliana columbia
aacctacgcttctgctaagctattctatgagtagtcagactagcaataaacccttcattttaagcattctgtttccttcttgagaaacctagatattttggtttcttgtatccggtgatgaagatacagtgtgatgtgtgtgagaaagctccggcgacggtgatttgttgcgccgacgaagctgctctctgtcctcaatgcgacatcgagattcacgccgctaacaaactcgctagcaagcaccaacgtcttcatcttaattccctctccaccaaattccctcgttgcgatatctgccaagagaaggcagctttcattttctgtgtagaggatagagctctgctttgcagggactgcgatgaatccatccacgtg

SEQ ID NO: 154299 - DNA, 450 bp, Arabidopsis thaliana columbia
  unsure (1)..(450): unsure at all n locations
tccgtctgtcgcagagcatcgctcgaattaggagtttcngtctgagagaagatgagggaaattattagcattcatatcggacaagccgggatccaagtcggaaattcctgctgggagctttactgtctcgaacatggaatccagcccgacggaatgatgccgagtgatactacagttggtgttgcacacgatgcgttcaatactttctttagcgagactggagctgggaagcatgtccctagggctgtcttcgatgatctcgagcctaccgttatcgacgaagttcgtactggtacttaccgtcaacttttccatccagagcagctcatttctgggaaagaagatgctgctaacaacttttctagaggacattacactgttggaaaggaaattgtggatctatgtcttgaccgtgtgaggaagcttgcccgcaactgtactggcttacaa

SEQ ID NO: 154300 - DNA, 434 bp, Arabidopsis thaliana columbia
catggctgcatctttctctgtcccctctatgataatgtaagaagaagggagattcgaagcggaggttgcggaagtgcagacttggtggagctcagagaggttcaagctaacaaggcgcccttacactgcccgtgacgtggtggctctacgtggccatctcaagcaaggctatgcttcgaacgagatggctaagaagctgtggagaacgctcaaaagccatcaagccaacggtacggcctctcgcaccttcggagcgttggaccctgttcaggtgaccatgatggctaaacatttggacaccatctatgtctctggttggcagtgctcgtccactcacacatccactaatgagcctggtcctgatcttgctgattatccgtacgacaccgttcctaacaaggttgaacacctcttcttcgctcagcagtaccatg

SEQ ID NO: 154301 - DNA, 457 bp, Arabidopsis thaliana columbia
aaacaaaaatggttttgcaaaagcttcctctatattgctgcttttgctcctgaccatcgtcgcctctccagcaaatgcagatggacctgtttgcccgccgtcgaacaaactaagccgggcaagtttccctgaaggttttttatttggcacggctactgcggcataccaggtcgaaggtgcgattaatgaaacttgtcgtggaccagccttatgggacatctactgtagaagatatccagagaggtgcaataacgataacggcgatgtggccgttgatttcttccatcgttataaggaagatatccaactaatgaagaatctaaacacagacgcctttagaatgtctatcgcatggccaagaatatttcctcatgggagaaaggagaaaggagtgagtcaagctggtgtgcaattctaccacgaccttatcgacgagctcataaaaatggtataactc

SEQ ID NO: 154302 - DNA, 417 bp, Arabidopsis thaliana columbia
gaaaacaagtagaaactttaaaacgagagtttagatgtatttggcgacatcgggaacgtacgtgacggaggttccgttgaaaggatcggcggagaaacactacaagagctggaagagcgagaaccatgtcttcgctgacgccattggccaccacatccaaaatgtcgttgttcacgaaggcgaacatgactctcacgggtctatcaggagttgggactacacatatgatggaaagaaggagatgttcaaagagaagagagagatagatgatgagaataaaacattgacgaaaagaggactggatggtcacgtgatggagcatctcaaagtatttgatatcatctacgaatttattcccaaatctgaggatagctgcgtctgcaaaatcactatgatatgggagaagcgcaacgatga

SEQ ID NO: 154303 - DNA, 425 bp, Arabidopsis thaliana columbia
  unsure (1)..(425): unsure at all n locations
ctaccgcggacgcgtgggttcgctcattctctcttcttanatatttccaaaacaatacctttcttcttctgtcttcagaagaaacgagagattcgagtgatgttttatgaactactactagtgtttttttccgtgaagtaaagagaaacggtaactttttctatttgttttcaagaaaagccaaagaaaaaaagaatttttaatatactctgttttttgcaatgattttgttttgtgaaatttttctcggagaagaaagtaatttagaagacggagagtggcaaaacgaaatataaaaaaaaaggttttcaattttttttaggaaaaaaaaagttttttccttttttaaaacccttcctttgtttcagaaccggtgccttaggaggaaattggttcccaggttaattgcgttttttctttttttt

SEQ ID NO: 154304 - DNA, 442 bp, Arabidopsis thaliana columbia
  unsure (1)..(442): unsure at all n locations
cgaagagcttgctatctgcgaggatanagtccgtttcgtggtgttatggagaaatatcctccgtatcaagctatattctcgaagatgtcttatggagagagccagatgctcgacaaagcattttatgaagaagaagtcagaaggctttgcttagcctttgagcagcagttccattacgcggtattctttgcgtatatgaggttaagagagcaggagatcaggaaccttatgtggatatctgaatgtgttgcacagaaccagaagtccaggatccacgacagtgtcgtctacatgttctgattctggtggtgagtcaaaaacacataaacaaatgtgaaatcttgagtctggttttcttcatcgctcctcatgtacaatcgttggtttttacattccctgtttctgtcgctctgtgtttaccagagtgcgtgtattgagtatc

SEQ ID NO: 154305 - DNA, 446 bp, Arabidopsis thaliana columbia
gtcctttccatcaggaccttatccacagttcactcacagcgagactctatttactcgccggcgaagaacaaaatggcgggaagagcgattttctctgtatcttgttcatctactccttccttgtgtatcccttattcaactgcttcgttttcatcgatgaatcgactggcgctccccgccgtccggatttctccccgaaccaacagatttcccaggattcactgctctatgtctgctaacgacatcaaagcgggaaccaatatcgaagtcgatggtgctccttggcgtgttcttgagtttcttcatgttaaaccaggaaaaggtgcggcatttgtgagaactaagatcaggaactatgtgaatggtagcacagtcgagagaacatttcgtgctggaatttcttgtgaggaagctaatatatataaagaaaccaaacaattcacata

SEQ ID NO: 154306 - DNA, 302 bp, Arabidopsis thaliana columbia
accaacccttccgaaaccctatttggggaatcatcaattttttttcatcaccatggatccttacaagtagggggctttaaacacgtgcaggagccccattctacaccacatacggtggtgctccattcttcaacaacattttttccctcaccatcggagaaagaggtcccggtcttcttttagattatcatctgatcgagaaagttgctaatttcaccagatagaggatccctgagagagtggttcatgctatatgcataaatgctaaagcttttttttaagtcacccctttcatttcaaac

SEQ ID NO: 154307 - DNA, 457 bp, Arabidopsis thaliana columbia
gttgtctaaagcgaaccaacaaaaagtcttcatctttaatcattcaatggcttcttcgtctgctatgcagatggttcacactggccgctccattgcccagattgggttcggtgttaagtcgcaattagtttctgcaaatcgaacaactcaatcagtttgctttggagctcgttcctctggaattgcattatcttcgagattgcactatgcatcacccattaagcaattttctggggtttatgcgaccaccaagcatcagagaaccgcttgtgttaaatccatggctgctgaggaagaagaagtaatcgaacctcaagctaaagtgacaaacaaggtttactttgatgtggaaattggaggtgaagttgctggcagaattgtgatgggtctctttggagaagttgtgcctaaaacccgtgaaaacttccgtgccttgtgtactggtgagaagaaatac

SEQ ID NO: 154308 - DNA, 455 bp, Arabidopsis thaliana columbia
tgaggttagagaaagaagttgaaattcttgtacagcaggatgatggaggcggagagcgtcttcaatctatctatgagaggttagacgccatggatgcagaaaccgctgagaaacgtgctgctgaaattctgtttggacttggtttcgacaaggaaatgcaggcgaagaagacaaaagatttctctggtggttggaggatgagaattgcattggcaagagcactcttcattatgccgacaatccttttgcttgatgagccgactaatcatttagatttggaagcttgtgtgtggctagaagagagcctgaagaattttgatcgcatccttgttgtggtatcccactcacaggatttcttgaatggagtgtgtacaaacatcatccacatgcagagcaaacagctcaagtactacactggtaactttgatcagtattgccagactcgttctgaactt

SEQ ID NO: 154309 - DNA, 379 bp, Arabidopsis thaliana columbia
  unsure (1)..(379): unsure at all n locations
gaccggacacggaagtgccgaccgacgcatgcgtactagctgacatcgtcttgatgtggcattccttattaaactcccagtgatccgtaagtcgtgtgttcggccaagttactgcctggtgaaagaaaggaaaagagaaaagagattattcaaaccggtttgcgtttggttatttacctattttgggagagatttctctttgttgtgattctttgtattttgcaaaatcttactttggtgccaaacccatcgaacgcttctttttttcgaattcctttttttcattcctcctcgaatgtgtgttatcatggctatacaaataaataaaatgaaagacttcttttaaaaaaatacgaattnntaaaaaaaaaataatttc

SEQ ID NO: 154310 - DNA, 351 bp, Arabidopsis thaliana columbia
accgacgcgtccgaggatctcggagacccgccaaagcacgaaagccataatctttcagaaaatgaattcctatgcgaagagtgcataaccgcatggataagctcacactaacccgtcaatttgggatccaattcgggattttccttgagggatattggtaaggaattggaatgtaataatatcgattcataatggattcatatcgatacagaagaaaaggttctctatcgattcaacaagtgctgtacttatgggaaagcgatagagaaagagaaaaaaaaaaacgaagatttcacatagtggattttttttttttttttgatcaaaaaaaaatctgattgaatttatttc

SEQ ID NO: 154311 - DNA, 453 bp, Arabidopsis thaliana columbia
caggaagcaaatttgtttcagggagtaccaaaatgagtaagcttcagagtgaagccgtgagagaggcaataagctccattatcactcactgtaaggagacaaagccacgcaacttcactgagactattgaactccagattggtctcaagaactatgaccctcaaaaggacaagagatttagcggttctgtgaaattgcctcacgttcctaggccaaagatgaagatttgcatgcttggtgatgcccagcacgtcgaagaggctgagaagattggattggaatctatggatgttgaagctcttaagaagttgaacaagaacaagaaacttgttaagaagcttgctaagaaattccatgctttccttgcttctgaatctgtcattaagcaaattcctcgtcttcttggtcctggtctcaacaaggcaagaaaattcccaactcttgttagccacc

SEQ ID NO: 154312 - DNA, 380 bp, Arabidopsis thaliana columbia
gaccgaattcagaagatcgaagaagattagtttaggaagcggcgctggttatgatcgtcacatcactatcttctcaccggagggggccctctttcaaattgaatatatcccttcaaggccgtgaaaacagctggtattacttcaatcggagttcgtgggaaagattcggtttgcgtcgttacccagaagaaagttcctgacaagcttttggatcagtctagtgttacacatctgttccctatcaccaagtacattggattggtagctactggcattacagctgatgcaaggtctttggttcaacaagcaaggaatcaagcagctgaatttcggttcacttatggatatgagatgcctgttgacattcttgctaaatggat

SEQ ID NO: 154313 - DNA, 380 bp, Arabidopsis thaliana columbia
ctccgatgggagcctcactgttcatgccggtgaaagattaggccgtggtatagtgacggatgctatcactactcctgtggtgaacacatctgcctacttcttcaagaaaactgctgagcttattgacttcaaggagaaaaggagtgtgagtttcgagtatggtcgttatggtaaccctacgactgtggtacttgaagataagataagtgcacttgaaggggctgaatcaactttggttatggcatctgggatgtgtgcaagcactgttatgcttttggcattggttcctgctggtggacacattgtcactactactgattgctacaggaagactaggatcttcatggagaattttctcccaagttgggatcactgtcact

SEQ ID NO: 154314 - DNA, 346 bp, Arabidopsis thaliana columbia
acgctgctctctaaagaaaattttgctctctttatctctcgatttgattcataaaccctagcgggtagatttttattgcgagcagggagaatggcggtcgcagaaacctttgctttccaagctgagatcaaccagttgctctccctcatcatcaataccttttactctaacaaggagatcttccttcgtgaactcatcagtaactcttctgatgctttggacaagattaggtttgagtccttgacagacaagagcaagctcgatggtcagccaaagctcttcattcacatcattcccgacaagactaacaacaccttgacgattatcgatagtggtattgggatga

SEQ ID NO: 154315 - DNA, 367 bp, Arabidopsis thaliana columbia
gcacctgcttcgcttctcctctctcgctctttactcaagactcgtttactctttcaaagcgaagctttcaagatgcaagacaaagagggtcaggtcactgagctttacattcctaggaaatgttctgctactaaccggttgatcacatccaaggatcatgcctctgttcagctcaacattggtcatttagatgctaatggcttgtacaccggacagttcacaacctttgctctctgcggttttgtccgtgctcagggagacgcttacaagtgtgtcttcaggttgtgtcataagaagaaggttgaagccaatcaaaactaaaatctttatctgtcttttcttttatctaatcttttttctttttttt

SEQ ID NO: 154316 - DNA, 439 bp, Arabidopsis thaliana columbia
ctcagatctgaatccatccatcaccgatctctaatggcggcaccaccagcatcatcctgggcgagggaagagttcagtacctcgcaaagctcgcagagcaagcggaacgttacgaagaaatggttgaattcatggaaaaagtcgctgaagccgttgacaaagactttctcaccgtcgaagaacgtaatctcctctccgtcgcttacaaaaacgtaatcggcgctcgtcgtgcttcctggagaatcatctcttccattgaacaaaaagaagagagtcgtggtaacgatgaccatgtgaccactatccgtgattacagaagcatgatcgaatctgagttatcaaaaatctgtgacggtattcttaagcttctttatactagaccttgttcctgcttctgcttatggagaatctaaggttttttaccttaagattaatggag

SEQ ID NO: 154317 - DNA, 178 bp, Arabidopsis thaliana columbia
  unsure (1)..(178): unsure at all n locations
ctccgctcttgcaattggttcgttgctactactttttgggtgtctaattgtccanacagaaattttataaataaaaagaaaagaccaataactcactttttctaagtaatggggaaaaggaccgaaacatgccactgaaagactctactgagacaaagatggtctttttttaacgtat

SEQ ID NO: 154318 - DNA, 367 bp, Arabidopsis thaliana columbia
  unsure (1)..(367): unsure at all n locations
gtccgatcaaaaatggagtataggttttatatctctcgcttttctctncancactncctcttcagctgaggtcatcattcaagagggcacggagggcagaggaatagagtacaacagttcttacagtctcgaggagaatcttggagtgacaagagagttgagagaagagcgaccatcgagtaagatagtgacaataacaagcttctcagtgattaaaggcagaggagaaccctatgaatcctctgtttttgaggctgctggttacaaattgtgattggttttgtacgtgaatggtaataaaaacgacggtggaaatgatcatattttcctttacgcaaggatcggagagacaaactctcttccatta

SEQ ID NO: 154319 - DNA, 455 bp, Arabidopsis thaliana columbia
attgggaaccgggattgtcgacttattgtttatccccgagggcagtcccagccaccatgcgatgtttcagtatttcttgaagtgacagattcacgaagctcaagtgattggagctgttttgttagccaccgactatcagttgtgaaccagagattggaggagaagtcggtgacaaaagaatctcagaatcgctactcgaaagctgcaaaggattggggttggcgtgagtttgtgacacttactagtttgtttgatcaagactctggctttcttgttcaagacactgttgttttctccgctgaggttcttattttgaaagagacatctgctacaaaagagtatgtggaggcagactcaactaattcagtttctccgactgataacagcgtcaaaaaaagttcatttacttggaaagtggaaaatttcttagccttcaaagagataatggaaacacg

SEQ ID NO: 154320 - DNA, 151 bp, Arabidopsis thaliana columbia
acggagagagtgcatttcgatccacattggtcattctggtatccaggtcggaaatgcttgctaggagctttactaggttaaagattgcattcatcctgatggccatatgccgagtgacaagactgttggtggaggtgacgattctttcaac

SEQ ID NO: 154321 - DNA, 331 bp, Arabidopsis thaliana columbia
  unsure (1)..(331): unsure at all n locations
ccaaaaccttaaaaaacaagtgtaacctttaaatctttatgaaaagagcaaaaatggctacgtcagaaactttcttaacggaaatgccgctaaaagaatccgccgaaaaatactacaagaggtggaagaacgagaaccatgtcttccctgatgctatcggccaccacatccaaaatgttaccgttcacgaatgcgaacatgactctcacgggtctatcaggagttggaactacacatgggatggaaaggaggaggtgtttcatgntagaagatagattatcttttttaccataacttttatctttaaatgacttttgatattacctttatt

SEQ ID NO: 154322 - DNA, 393 bp, Arabidopsis thaliana columbia
  unsure (1)..(393): unsure at all n locations
gatttaaagattatcccccgggacttaaaaaaaatggtgggcacatgacctgntcaagaacaacacaagactcaggcaaacattggttgtgtgctttattcgaaactataataatatctgaagaaagtgacaagaagaccagaaaagagagaggtgaggtgaaaaacggttttggtgcatggtcctctctagcgagcgtccttggacaaaagaccttgcgcttcaactttccttgcgttgcgaagctcatcaactccatctcctctctcaaacacagctgctgcacccatccccgtcccaatgcacattgacactactccaaaacggcagtctttaccacggcgtttcatctcgtgcaacaatgtatcaacacaacgcgctcctgtagcgccc

SEQ ID NO: 154323 - DNA, 412 bp, Arabidopsis thaliana columbia
gggtcatagctgtagccgctgttgtgattagcaaatggttataccgatggtcgaaccggaagtgcaatggcaaggtagcaggcggtatcaatgggtttaccgatcatcggagagacatgcgacttctttgagccccatggattatacgagatctcaccctttgtcaagaagaggatgttaaagtacgggccattgtttcggacaaatattttcggatcgaacaccgtggttttgacagaacctgatatcatcttcgaagcttttcggcaagagaacaagtctattgtgtttagctatccaaaagcttttgtcaaagccattggaaaaaaaaacgtgttcctcaaacatgaatacatcctcaagcacttcatgcaaatcaaacttcaacatctttggctctgatgctttaaaa

SEQ ID NO: 154324 - DNA, 409 bp, Arabidopsis thaliana columbia
gagaaaacttcgtctctcttctctgcttcttcctctcatttcctgtgagataaaggcggagtcgctctccagttattttactgatccatcgattcttagagttcaaaatggttgatcaagttcagcaccccactattgcgcagaaagctgccgggcagttcatgcgttcaattgtttccaaggacgttcaagtgggttaccagaggccttctatgtatcaaagacatgcaacctactgaaactactccaatgctgcatttcaatttcctccgacatcccggatgttggcaacaactgcttctcccgtgtttgttcaaacccccatagagaaggggttcactaactttgcccttgactttctgattggtggtttttctgcttccgtctccaatactgcttcttcttccta

SEQ ID NO: 154325 - DNA, 293 bp, Arabidopsis thaliana columbia
  unsure (1)..(293): unsure at all n locations
taacttttgttgtttagttaaaaaagtcttctcatcctaaaaagtggtgtaaaaaatgagcgaatttctcatacacaaagaatcggatccaatcnatnattccngcnaggaggtttctcttatctccatttgtcngcntcacatttatcggcgttctcgtctctctctacttcagatcttccttcaaatctccacaacaccaatatcaaaataggttattttctactgaataattttcattgtataatgttacttatgaaacattacctatactcttaaatattcttaaatct

SEQ ID NO: 154326 - DNA, 402 bp, Arabidopsis thaliana columbia
ctcttttctctccagatttcgattcccgaggctcgagagaaaaccgtaaatctcttctccggtcactcaatcaaccaaggaggcgtgagattcttcacatccagggtggtcaatgcggtaaccagatcggagccaagttctgggaagtggtttgcgccgagcacggcatctatccaaccggaaggtacaccggagactcagatctgcaacttgagcgcatcaacgtttactacaatgaagcgagttgcggtagattcgttcctcgtgcagtgctcatggatttggagcctgggactatggatagtctcagatctggaccgtacggtcagacctttcgacctgataacttcgtctttggtcaatccggtgcgggtaacaactgtgccaagggacactacactg

SEQ ID NO: 154327 - DNA, 354 bp, Arabidopsis thaliana columbia
  unsure (1)..(354): unsure at all n locations
cattttcttaccactcaaatagtgcgcactctttatcatcgtttgaaactaaacatgggggcggataaaagcaagaggctggtgatcgnaggaactggttacatcgggaaattcctagtagaagcgagcgccaaagctggccactccacattcgctctcgttagagtatcaactctatccgatcctgtcaagggcaaaaccgtccagagtttcaaagatctcggcgtcacaatactacacggagatttgaatgatcacgagagcttagtgaaggctattaaacaggttgatgtggtgatatctaccgttgggagcatgcaaatcttggatcaaaccaaaatcatttccggcatc

SEQ ID NO: 154328 - DNA, 449 bp, Arabidopsis thaliana columbia
attttgctaaagcagcagccagtcgggacattgaaatggcgactgaagatgtgcaagaggccataatcgataagaggggctgttccattagagtcatccccgacttccctaaaccaggaatcatgtttcaagacataacgacgcttcttctcgacactgaggcctttaaggatactattgctttgtttgttgatagatacaaagataaaggcatatctgttgttgcaggtgttgaagctagaggtttcatttttggccctcctattgcgttggctattggtgccaaatttgttcccatgaggaagcccaagaagctacctgggaaggttatttcggaggagtattcgttggagtatggaacagatacgattgagatgcacgtaggtgcagtaaatcctggtgagcgtgctattattattgatgacctcattgccacgggtgggactctc

SEQ ID NO: 154329 - DNA, 224 bp, Arabidopsis thaliana columbia
  unsure (1)..(224): unsure at all n locations
agccgactcttacaactttatctcccaaaacacaaaacaattttttttttcttccacttctctctcaatcgccatggtctttactaaattcagacgtccttccccatctccaatcantctcctttcccttccatcatccaacacacaatccctcttctntctcaaatcatgcaccactcttttttttcgtttcacatccattactacatacaatttcaatttca

SEQ ID NO: 154330 - DNA, 450 bp, Arabidopsis thaliana columbia
tccgttggccttgtttcgtccacccaacaaactttttaaaaaaaactcgatcggctgatacttaatgggccacttgattttggaggtgggtacctttttttgttgtaatttttccatacacccaatttcccgtggaagaaaaggagtcagctttttcgtttgctttaaagcttgaatctttacatagttccagttactttctatagagcttcataatccctagttgcccaaaaggattctgggttttgtgagaatgatgacgtcatgtcggaatatagatttaggtacgatgatgatggcatgtggttgtggccgtcgtcagtttccttcattagcgaagactgtttgtaagtttactagcagcaatagaagctattgcggtctggtggggagttgcaaagcggtgccaacgaaatcaaaagagatctctttgctcaatggtattggtca

SEQ ID NO: 154331 - DNA, 270 bp, Arabidopsis thaliana columbia
  unsure (1)..(270): unsure at all n locations
cggaaaacccgggtcagcccgactcgtacagagtttacaatctcaacttccaaaccgtnatgctttttgtccggccaagatgttntcatagccctttttctaacatactgatcgacnntnaacccnccacttgatgtcttgtctattttggcctttacttcttccacatctactccaaatttagacagactcaatttttttttttctttccattcttaaatctccccaatatgtaacatttttattaaacaaatattttgtacatttttt

SEQ ID NO: 154332 - DNA, 458 bp, Arabidopsis thaliana columbia
  unsure (1)..(458): unsure at all n locations
gaaggcttccaattttgccaaaccgtgagtgaaatcggaaatcatacatcgcctccgtctctcatttcaaacgcgatctccatctacttcgggaggcgccgccatggaatctccgaagaattctctgatcccgagcttnctctattcatcatcttcatctccgagatctttcctcctcgaccaggtgctcaattccaactccaacgctgcattcgagaaatctccttctccggccccgcgttcctctcctacgtcgatgatttctcggaagaatttccttattgcatctcccaccgagccagggaaggggatcgagatgtattcacctgccttctacgctgcttgtacctttggtggaattctcaactgtggtcttactcacatgaccgtgactcctctcgatctcgtcaagtgcaatatgcagattgatccagcgaagtacaagagcatctcgtctg

SEQ ID NO: 154333 - DNA, 445 bp, Arabidopsis thaliana columbia
  unsure (1)..(445): unsure at all n locations
gactcatcctcatgaatcttacggatcaccccaatgtactctcatatcaagcagagtagaagaaaccagagagcaatatatataaaagcacaggataanantatagagaatcaccctgtctctttaaaacaagaagataaattaatacacacataagtgtatgtaaattatatatctttattgtttttagcattggaagccaggaagaagttgtttgctgcaaacattaatgagtagacttaaagatattgggaggttcaaagttattccaatatatttttccttaatatactttcttaatactatcttcttactgattggatggtattcttttatattttatctcattttttaacctattattttttaatcaatataatattaatttcttttttttcaattttttaatatataattctataattcattattatactcatttaat

SEQ ID NO: 154334 - DNA, 340 bp, Arabidopsis thaliana columbia
  unsure (1)..(340): unsure at all n locations
tttcttgtctcggccagtcttatgactttctcttaagctgtcgtgcattccatcaagggcgtgttcctaaaagatagcaagaggaatcananactgancnagtgtttaacccatgcaatgtatgataactgcctgtcaaattagcaaggccgagtgttatcattttttctttgtgtgacagatcttttctggtactgggacttgcctagaaccatataatgattctaccgtttccaaagctcgttcgcatcatccgttgtccatatctttgccttttcacaaatcgcatacattatctggatggaaacagcaagccctttttctaatgaattcacccaat

SEQ ID NO: 154335 - DNA, 269 bp, Arabidopsis thaliana columbia
  unsure (1)..(269): unsure at all n locations
ctcctacaccatttgaacccttttttattctcacagtgtttctagttctaggaacgtcttatagacgaaggaanattggaaaattgatcggattttttcgggtgcttaaaccatttatcaacttcatcttcttcagactcttgaagagctctgttctctttttgttggaatgagtctaaaccatctatgaaactccaaatgtcaagatctaaatcaaaatgcatctccagcatctctgcataagacattgaaacatttggagataactc

SEQ ID NO: 154336 - DNA, 433 bp, Arabidopsis thaliana columbia
  unsure (1)..(433): unsure at all n locations
caaagttcatataataagaaaaacagagagaaacacacagagagctagaggagagtgagtgtcaggggttgtgttcgctgcggagatcanatccatggcaaacatctgccaatgcctttgaatccgtcgatgaatccggaatcaacgaagcctgggttgagatctccagccgcagatcatttgtcgccggcgaaggtagtcggaagaagctagagaggaagaagagccaagtgttactggaaggttacgttgagactgcttcttcttcctcggtggatgatcaaaaggacgatctgacgagatccaagagtttgacggatgacgacctcgaagatcttagaggttgtttagatctagggtttggttttagctactaccagatccctgagctctgcaacactttacctgctttggagctttgctattcaatgag

SEQ ID NO: 154337 - DNA, 463 bp, Arabidopsis thaliana columbia
gcgccgagccttccgttctttttgcaaaccaacgtaaaacactaactaaaagatcaatatggctggagtgatgaaggtggcatgcatggtcttggggtgcgatgattgtggccggtccaatcacagcgaacgcgcttatgagttgtggcaccgtcaacggcaacctggcagggtgcattgcctacttgacccgaggtgctccacttacccaagggtgctgcaacggcgttactaaccttaaaaacatggccagtacaaccccagaccgtcagcaagcttgccgttgccttcaatctgccgctaaagccgttggtcccggtctcaacacttgccgtgcagctggacttcctaacgcatgcaaagtcaatatttcttacaaaatcagcgccagcaccaacttcaacaacctgaggtgatgagcgacggtcaaatgaaactactatccgttgttccaatattatat

SEQ ID NO: 154338 - DNA, 368 bp, Arabidopsis thaliana columbia
  unsure (1)..(368): unsure at all n locations
acgtttcttcaaaacgattcgggtcaaggttattgtctttctcattcagtgaagcttnaatcagaggctctataatagatagaaggggactnaattnattgggaacactccattggtgtatttgaacaatgttgctgaaggatgtgttggtggtgttgctgctaagctttttatgatggaaccgtgctctagcgtcaaagacaggattggttttagcatgatttctgatgcagaaaagaaaggtcttatcaaaccaagagagattgtgctgattgatccaacaagttgaaacacttgatctagtgttagcatttacggcatcttccaaaatgctacatatctattattacaatgccatcttctttttt

SEQ ID NO: 154339 - DNA, 445 bp, Arabidopsis thaliana columbia
cgtttactgtgagtctctcaaagaaaccaaatgcagagaaaagagataacacacacaaaagaaaatggcatcaacctgagtcggcaaggcttctccggtgttggacaaatccgaatgggtcaagggacaaagcgttctcttccgtcagccttcttccgcttctgtcgtcctccgcaaccgtgccacctccctcaccgtccgtgccgcttcctcctacgccgatgagcttgttaagacagcgaaaactattgcgtctcccggacgtggaatcttggcgatggacgagtcaaacgcgacttgcgggaaacgtttggattcgatagggctagagaacactgaagcaaatcgtcaagctttccggactttgctggtctctgcaccgggactcggacagtacgtcttcggcgcaattctatttgaagagactctgtaccagtctaccacc

SEQ ID NO: 154340 - DNA, 462 bp, Arabidopsis thaliana columbia
tttctattgtaaaattccccggtggaggcgttttctcaatggacaaccaattttgggctttgcaacgctggaaacacgacgataggcagagtcgttcacttcgttcgtcttctagctgaaaagtgcgttcgctttgcagacagatggtattagctgtcccgttgtcttgggagggagtcgctcagagaattgtgcaccgcaccgaaccatattataagaggcacatgaaccgtgatacataagtagttaacgacagttgttgccttgagagctcctccatatgactagcaagtatggacgaagatccagactcatcacagaagattatttgatcgccttaacgtgacgataatatacacttccggtagtttactaaccgatagcttttgcaacaaccttctactagctgggtttgagcaagaacctgaggatcatgattcggtcatcaacgatggtggtgcg

SEQ ID NO: 154341 - DNA, 267 bp, Arabidopsis thaliana columbia
atcacaaaaccctaatttcgaatctttattcttcagaatggctttctgtaacaaactcgggggtctattgagacagaggatgtcttctaacggaaatgttccggttacgtctatgctcggatctctccggttgatgtctaccaagcttttcatcggaggtctctcatggggaaccgatgacgcatccttaagggatgcttttgctcacttcggtgacgttgttgatgctaaagttatcgttggtagagagacaggaagatcaagggg

SEQ ID NO: 154342 - DNA, 251 bp, Arabidopsis thaliana columbia
gagagagatagagagatagagttatttctttggcgatgatgatccgaaacgcatcttgggagctaggaatgacgtggatctccggtcatttcggtggtttgagatctatgtcttcatggtggaagagcggtgagcctgctcctaaagatccggaccttggagttaccgtagctcttctagctgatcctagtactgaaaaagtctatgttggtgtgcgagcatattttgtagattatggcaagcctgttggc

SEQ ID NO: 154343 - DNA, 452 bp, Arabidopsis thaliana columbia
aacaagttggatagattttgctttggatctcacatctgagatcagattaatctctgtgtgaagtcgaagaacgaaacgggtagttcccatggatctctcttcacgcttctcatcgatccttatccttctcttgatctccatctccatagcttcggctgagattcgtaaatcagagatccgatccgatgatcgtccaatcatccctttagacgaattcggtttcactcacaacggtcgtcttgagcttgacgcttccaagatctggctttccaacagcaatcccgatctcgatctctccaaagtgggcttctttctctgcactagagacgcttgggttcatgtgatccaacagcttgaagaagaagagatcacgtgcgctctacaatcagatctcgttaagcatgtgttcaccttcaacaatcttcagggaggagataagagcagattcttca

SEQ ID NO: 154344 - DNA, 456 bp, Arabidopsis thaliana columbia
gtgaatctcatgaaggtttttcccgaaaggctttggaggggctcttggcctcctctttgggttggctctttgttcgggggctcattcccttagctgtgacgtcaaggttgttggcgatgtcgaagtcattggctactcagaaatcagcaaaatcaagatccccaatgcattctcaggacttcgagttacgatagaatgcaaggcggccgattcaaaaggccattttgtaacgaggggaagcggagaagtggacgaaacaggaaagtttcatcttaatattcctcatgacattgtcggtgatgacggaactctaaaagaagcttgctatgctcatcttcaaagtgccttcggcaacccttgtccggcccacgatggccttgaggcctccaagatcgtgtttctatcgaaatccggccaaaaccacgttttgggtctcaaaaaaagtcttaaattctc

SEQ ID NO: 154345 - DNA, 445 bp, Arabidopsis thaliana columbia
  unsure (1)..(445): unsure at all n locations
tgagcatggtcctacccggtgttgtgggtttcaagctaacgggaaagttaaaagatggaaggacagctactgatttggggtgagacagtgactcanatgttgaggaaacatggagtagttggaaagtttgttgaattccacggggaagggatgagagaattgtctttagctgaccgtgctacaattgccaatatgtctcctgagtacggtgcgaccatgggattcttcccagtcgatcatgtcactttgcagtatctaaggttgacaggcaggagcgatgacactgtctccatgatagaggcgtatttacgagcaaacaagatgtttgtggattacagtgagccggtgagttagacagtttattcctcatgtctggaattgaatctcgaagatgtggaaccttgtgtttctggtcccaagaagcctcatgattcgtgttcctttg

SEQ ID NO: 154346 - DNA, 454 bp, Arabidopsis thaliana columbia
ggaagttcgttgagagccttggagttgagttgatcttaaagaggctggttaactcaagggagaggacctcccgtgttagagcgacccgagatgacttatgagaagcttatggaatacggaaacatgcttgtgatggaacaagagaatgtcaagagagtccaacttgccgagacctacctcagccaggctgctttgggagacgcaaacgctgacgccatcggccgcggaactttctacggtaaaacagatgaaaaggagcccagcaagtaaacctgccagttcctgaagggtgtactgatcctgtggctgaaaactttgatccaacggctagaagtgacgatggaacctgtgtctacaacttttgagcaatattatcctgcttattaatttgctgttttactcctattgtctcttttggtttatttttctcctttgtgtaattgtggattggatc

SEQ ID NO: 154347 - DNA, 401 bp, Arabidopsis thaliana columbia
agaagaatgactaatatggccggaaccttctctcaccgagttccggtggaaatcaccaccacgagcctccgtcacaagagcggcgcatttcagattcagattcagactccggatctgattcagagaatcatcagcaccgtcacaatgatctatcaaactccatcttcgaagcttacctcgattgccactcatcttcgtccccttcctcaatcgatctcgctaagatccaatcttttctcgcctcgtcttcttccggtgctgtctcgtgccttatctgtctcgaacgcattaaacgaaccgatcctacatggtcctgcacttcctcatgcttcgccgtctttcaccttttctgcattcaatcatgggctcgtcagtgcttagatctacaagccgcgcgtgca

SEQ ID NO: 154348 - DNA, 450 bp, Arabidopsis thaliana columbia
ctcaatcgattcaagaggcaccaagaattctatgaagacgttattaatcccagaaccagagccaacttcccctgaagttgtagaaagttctgtgtcctctgtttcagctgaatccgagacaccaatttcgattatacgtaagaagaaacaatcagagccaaggttttactctagcccaaccaacacgttttacacagaagcaaaacaaagctttaccaacacagaattcagtgaatgtgcaagcataagcactattggtataggtggtattgatttggagaagaatggtgtaatgatatacagaggaagtatagggagtgatgttagtgatgagagtagctcaagtggtctgagtaatgcagcttacaagccacatttagataataacgataggcgttgtgttgcgattcaagaaggtcgctctcgggttgggtcgtcgcttgaggcttt

SEQ ID NO: 154349 - DNA, 393 bp, Arabidopsis thaliana columbia
gcaggatgggtcgtgcaatggtctacagcattatgcagctttaggaagagatagtgtagcgtctcttgtgaacatttatgatgggcttttttctcttagtaattttcaatctcatatagttctcttcttgtaaactggcttctctcagtttgaagctgcggcagttaatctagttgcaggagaaaaaccagctgatgtctactctgaaatttcacggagagttcatgaaataatgaagaaggacagcagctaggatcctgagtcaaacccaaccgccgcactggcaaagatccttatcactcaagtgagtatcaacggttttttattgaacattattccacagcaaaagttcttcccagtgatgcaattttttcttctaatttcaagtccaca

SEQ ID NO: 154350 - DNA, 323 bp, Arabidopsis thaliana columbia
cttccgatacctgattaatgggccaggtttggaattactatataacctgatatgtggaataaacgtgcggggttcacagaatggttgcgggacgtaaagaaggttaatttggaaagctagccaccttgggaagagaagaaaatgtttaaagattctatggaggatcataatactgttacatttacctcgaaaaatactatgacattgatggttactatagacttaacttggaaaaagagatgaaaaaaggtttgaagaaagctagattagtgaacgtactgtgttcaatgatgaggaacaacccccactgtagatgcatgaat

SEQ ID NO: 154351 - DNA, 409 bp, Arabidopsis thaliana columbia
cactgacctccgtgaccttctaccgaattccaccgttgtcgaggctggatcttccgatagttgcgattcaagcgccgttcttaacgacgaaacaagttctgataacggaagattgactccgcctgtgacggttactggcgggagtttcttacagtttgtgaaaacagagcaaacagaggatcacgaggattttctaagcggtgaagaagcttgtggtttcttctccgatgaacagccgccgtcacttcattggtactctgcttaaaacattggacttggaattgttaatcaattggtgctctgtttaagctaatgggaaaacagagaaaagggcaaaaggtggaatattggataaataaggattaaggttgtaggggatattaaattaaatccgcgggagaagtaattt

SEQ ID NO: 154352 - DNA, 458 bp, Arabidopsis thaliana columbia
actccatagctagctagagagtaaaaagaacaaagatgtcgaaagaagtgagcgaagaaggcaaaacccaccatggaaaagactacgtggatcctccaccagctcctcttgtcgacatgggtgagctcaaatcctggtctttctacagagctctcatcgctgagttcatcgctacactcctcttcctctacgtcaccgtcgctactgtcatcggccacaagaagcaaaccggtccttgtgacggcgttggtttacttggtatcgcttgagctttcggtggtatgatcttcgtactcgtctactgcaccgtcggtatctctggtggtcacattaacccagctgtgactttcggtctgttcttggcccgtaaggtctctttggtgcgagctcttggttacatgatagctcagtgtcttggagccatttgtggtgtgggtttcgtgaaagctttcatgaaa

SEQ ID NO: 154353 - DNA, 306 bp, Arabidopsis thaliana columbia
  unsure (1)..(306): unsure at all n locations
gtccgctataatccgatctgagaaatttcgccggagctatggttttgttgtttaccgatcaatcctttaatcaatggcaatggctgggttccgtcncgaagggaggcgtctcctcccttcaatcgccgctcgcccaatcgctgctatccgatctcctctctcttctgaccaggaggaaggacttcttggagttcgatctatctcaactcaagtggtgcgtaaccgcatgaagagtgttaagaacatccaaatgatcacaaaggcattgaatatggttgctgcttccaaactcatagcacttcaagg

SEQ ID NO: 154354 - DNA, 266 bp, Arabidopsis thaliana columbia
tctagtgtagattacacatttgatgttctattttttccccagattcttcgccaaatgtctgatgatatttaggaaagggaggggggccctcctatacctccttgggataatcttcattattggagagtagacaatgctgttccataccaggatttacctatcattgatctttattctctctttcaacttaataaatttttaaaatattttccaaaattttctctaactaccatttctttataattattcaaatcatacaaagattt

SEQ ID NO: 154355 - DNA, 322 bp, Arabidopsis thaliana columbia
gtcccagagaaatgatgaccctcaaactgcttccaggccgtgggataaagcaagagatgggtttgttatgggtgaaggagctgggtttctggtgatggaaagcttggaacatgcaatgaaacgtggtgctccaattgtagcagaatatcttggaggtgctgttaattgtgatgctcaccatatgactgatccaagagctgatggtcttggggtttcttcatgcattgaaagatgcctggaagatgctggtgtatcacctgaggaggtaaattacatcaatgcacatgcaacttccactcttgctggagatcttgctgagatt

SEQ ID NO: 154356 - DNA, 397 bp, Arabidopsis thaliana columbia
catggcaacttctctccaagccgccgcatacttttcttcaaccggcgaagattgccgcttctccttctcgtaatgtccatgtgcgatcaaaccaaaccgtgggcaagtcctttgggttagactcttcacaagctaggctcacgtgctctctccactctgacctcaaagacttcgctggaaaatgctccgacgccgccaagatcgccggttttgctctagccacctctgctctcgttgtctcgggggccggtgcggagggagcaccaaagaggcttacgtacgacgtgatacagagcaagacttacatggaggtaaagggtaccggttcggcaaaccagtgtccaactatcgatggtggctctgagacattctcgttcaaagctggtaagttcacagg

SEQ ID NO: 154357 - DNA, 449 bp, Arabidopsis thaliana columbia
gaagaaaaaaagcaaagaacacttgaacgttttctagatagagatggaagggaaagaagaggatgggcgagtgggagctaacaagtggccggagaggcaaccgataggtacatcggctcagacggacaaagactacaaggagccaccaccagctccatttttcgagccaggcgagctgagttcgtggtccttctacagagccggaatcgccgagttcatagccaccttcctgtttctatacataacagtattgacagtgatgggagtgaagagagcaccaaacatgtgtgcctctgttggaatccaaggcattgcttgggctttcggtggcatgatctttgcccttgtctactgtactgctggaatctctggtgggcacataaacccagcggtgacatttggtctgttcttggctcggaagctgtcattgacgagagctgtcttttaca

SEQ ID NO: 154358 - DNA, 438 bp, Arabidopsis thaliana columbia
  unsure (1)..(438): unsure at all n locations
ctcatcttcacaggaaacaatggtgtttgttaagtcctccaaatcgaatgcttacttgaaggcgtaccaagtgaaggtgacgcaaggatanatgggaagactgattacagggcaaggatccgtcttatcaatcaagacaagaacaagtacaacacccctaagtaccgttttgttgttcgatttaccaacaaagacattgtggcacagattgtatctgcaagcatagctggtgacattgttaaagcttcggcttacgcacattagctttctcattatggactcactgttggtcttaccaactatgctgcagcttactgtactttcctttttttggctcgttcatttttttaatattctataaatgtatgattagttcctatgattcttattagtccactttttagtccttttttattttatctcactgttttttttaaa

SEQ ID NO: 154359 - DNA, 353 bp, Arabidopsis thaliana columbia
  unsure (1)..(353): unsure at all n locations
cattaccatcactctctttgtttcgttactttcaatgaaggataatcttgaaagagcggagcttatggtttcttgtaccgcctttcatnacttcttctgtgtctctttgcagtgacaacatctgtttcagttcagcctacgtgtacttttccggcgatttacaacttcggagattctaattccgacactggaggtatctccgccgcttttgagcctattagggatccttacggtcaaggtttcttccacagacccaccggaagagactccgatggccgtctcaccattgatttcattgctgagcgtgtggggttaccgtatttgagcccatacttaaactcgttaggatcaaa

SEQ ID NO: 154360 - DNA, 393 bp, Arabidopsis thaliana columbia
gaagattttgacaacagaatggttaatcactttgtccaagagttcaagaggaagagcgagagggatatcaccggggacgcggagctcttaggaggttgagaacttcctgtgagagagcgaagaggactctttcttccactgctcagaccaccatcgagattgactctctatacgagggtatcgacttctactccaccatcacccgtgctagatttgaggagctcaacatggatctcttcaggaagtgtatggagccagttgagaagtgtcttcgtgatgctaagatggacaagagcactgttcatgatgttgtccttgttggtggttctacccgtatccctaaggttcagcaattgctccaggacttcttcaacggcaaaaaactttgcaagt

SEQ ID NO: 154361 - DNA, 384 bp, Arabidopsis thaliana columbia
cccaatccttctctgagaaaaaacaacaaatcctaattttatctttaatcagccggaaaaaatggagagagcgatcgagagacagcgcggtcttcttgagcatctccgaccttcttcttcttcttcgcacaattacgaggcttctctatctgcttctgcttgcttggctggggacagtgctgcatatcagaggacctctctctatggagatgatgttgtcattgtcgcggcacataggactccactatgcaagtccaaacgtggcaatttcaaggatacatatcccgatgatttgctcccacctgttttgagggcattgatagataagaccaatctaaacccaagtgaagtaggtgacattgttgttggtactggtttggcacc

SEQ ID NO: 154362 - DNA, 416 bp, Arabidopsis thaliana columbia
  unsure (1)..(416): unsure at all n locations
cgtccggctaaactagatcagctatggcgaccggtggtgcttcggcggatttggaagatgttcagacggcggatctcatgtcggagcggctgcgccgcctcaagtgttctcagaagcccgacaaacgcctcatcttcattggacctccagggtcagggaaaggtactcaatctccagtagtgaaggatgagtattgcttgtgtcacttatccactggagacatgttaagagctgctgttgcttctaagacccctcttggtgtcaaggctaaagaagctatggaaaaaggagagctcgtctctgatgatttggttgttggtataattgatgaanccattaacaagccaaaatgtcaaaaaggatttatccttgatgggttccccaggactgttactcaagcagagaagctcgatgag

SEQ ID NO: 154363 - DNA, 432 bp, Arabidopsis thaliana columbia
cgtccgacacagcgtgggaagaactcactgtgtcattcttgtccatcgtttgtaccctgaggtggagccggccttaaacccgggccacgcccctcacatgctacacaagtgtcctgactcgatccctgacccaaaggcggtccagtacgtgcgtaacgaccgtggcacccccatggtgctagacaacaattactaccgtaacatcctagacaacaagggtttgctccttgtggaccatcagctcgcacacgacaaacgaaccacaccaatcgttaagaagatggctaatgaccaggcctacttcttcaaggagttcactagggcaatccatatcttattctaaaacaaccccttgactggctctaagggtgagatcatgaaacaatgttatctcccaaacaaaaaccatttaaattttgaaaaaattataaa

SEQ ID NO: 154364 - DNA, 436 bp, Arabidopsis thaliana columbia
cgtacggaaattatccaccaccaatctgaaccatggtgattgtttcacagcttcatcgccagcatcgggctgtcttcaccagctccgtagggcggttccctgctcacgtacttgatctcagccacttcatctgggtttggttgaagcttcacatcccgcacgatgaagagtagatagtcaacttcgtgctctccccatttcccatcagaaggtgccttgtaaagcatgcgtcccaagggagtgaactcatcgactggtacatcttctgctacaataccgagctcatcgaaaagcttcctttgtgcggcatttcttacaccaagcacattctcttcaataagctcggattcacggtaaagaggatggctgcaacaagtgtttgtccacacaagcgggaaagtaacctttgtttttgacccgtccttaaaaacaactt

SEQ ID NO: 154365 - DNA, 448 bp, Arabidopsis thaliana columbia
  unsure (1)..(448): unsure at all n locations
gcccacgcgtccggcgtgccagtctctaacaaaaatctcaatctttccatacttatcgatcacctcacctgctgtgtctctattacctaacgccagccttaaaaatccaatctttcacctttcttctccgagatttcactacactgcgcaataaaaaaatggcgaatacccaactcaaatccgatgcaatcatggacatgatgaaggaacatctttccaccgacgccgggaaagaggtcacagagaagatcggtcttgtttatcagatcaacattgctccaaagaaattagggtttgaagaggttacttacatcgttgatctgaagaaaggcgaantcaccaaagggaaatatgaaggagggaaagtggatgctaccttctccttcaaagatgatgattttgtcaaagttgccactggaaaaatgaattctcatatggctttcattta

SEQ ID NO: 154366 - DNA, 342 bp, Arabidopsis thaliana columbia
  unsure (1)..(342): unsure at all n locations
cgggagtntggagcctttggaccgacgacaatttgtcttctaagaaaggagntgaaggtnagctgcgtacgaatgaattaccgcggggagggtcggcaaactcctctattctagaggaggccctaanctaattcggtattggntggagcctttaccctcctaagaagagatcgtctctcgctacatcaaattgcccaaatccatccgtcttcaaaggcaaaagaggatcctgaagcagaggttgaaggaacctccatctcttaaccaattcaccaatactctttacttgaatcttgctaccagtcttttcaaggtccttctgaagggcaggccagaagacaa

SEQ ID NO: 154367 - DNA, 424 bp, Arabidopsis thaliana columbia
aaggtatttcgcagttaatagaaaaaaggataacttccaggaagaataaagatttcgcgaaaagggatgagattagagagaagctgacaagaaaaggaatagcgttaatggacattggcaaagaaactgtatggagaccatgcttcccttctcaggctgattccagcacttgagcttagagcagagtcatggagatagttaacggtttcttcatttctctaactcttcttctttagccttttgtttgaggctctttctttataactctgtttttggaattgtgcaatgacttcaaaatatacacttgctgtttgttgtattcttaccattcacaatgacattgtaacaatattgttactttggatattggttctatagccaaacttgatctatacgcttttggatatttgttctatgaaactct

SEQ ID NO: 154368 - DNA, 290 bp, Arabidopsis thaliana columbia
acgagaaaacttcgtctctcttctctgcttctttctctcatttcctgtgagataaaggcggcaggctctctccagggagtcccgtcagccatcaattcttagagttcaaaatggttgatcaagttcagcaccccactattgcgcataaagctgccgggcagttcatgcgttcatgtgtttccaaggacgttcaagtgggttaccagaggccttctatgtatcaaagacatgcaacctactgaaactactccaatgcttcatttcaatttccttctgacatcccttatgtt

SEQ ID NO: 154369 - DNA, 410 bp, Arabidopsis thaliana columbia
cttctctctttcttttcacctctcgccggatcccggcgatcttataggagggaaatctatcaggatcggtatgctaggatctctaacaaacaatgaatcgccaccacgatcccaatcctttcgatgaggacgaagaaatcgtcaatcctttttcgaaaggtggtggaagggttcctgctgcatctaggccagttgaatatggtcaaagccttgatgctactgttgatattccattggataatatgaatgactcttcacagaaacagagaaagcttgctgactgggaagctgagctcaagaagaaagaaatggatataaagcgaagagaggaagctattgctaaatttggtgtgcagatagatcataaaaactggccacccgttttcccaatcatacaccatgacatttct

SEQ ID NO: 154370 - DNA, 353 bp, Arabidopsis thaliana columbia
aaaataaatatggagctcgagacctcagtttatcgaccaaacgtcgccgtttatgagtctgcggatggtgtggagggtggaggacggtacgaccaaatcttcgccaagattttgacgagagaagctcttagctttgtggctgagttacagagagagtttcgtggccatgtgaagtatgccatggagtgccggagagaggcaagacggcgttataactccggtgccgttcctgggtttgatccttccactaagttcatcagagacggtgattggagctgtgcctccgtccctcctgccgttgctgaccggagagtttaaatcaccggtccggtcgagaggaagatgatcatcaa

SEQ ID NO: 154371 - DNA, 466 bp, Arabidopsis thaliana columbia
gcagccagagagagagacaagtgagagggatctaccaaacgaagcaacaatggtgaagttcgtgaggcataacaagggcgtgagccgtcttcaaagacgttaccccggaaagaaagccgtcatcatcaaatccttcgacgacggtaaccgtgatcgtccttacggacactgcctcgtcgccggactcaagaagtacccgagcaaagtcatccgcaaagactcagctaagaagacagctaagaaatctagggttaagtgtttcatcaagcttgttaattaccagcatctgatgcctactcgttacacactcgacgtggatctcaaggaaatggcgactcttgatgctcttcagagtaaggataagaaagttgctgctcttaaggaagctaaagctaagcttgaggagaggttcaaaacccggaagaacagatggttctttaccaagctcaagttcttaagaaatttt

SEQ ID NO: 154372 - DNA, 379 bp, Arabidopsis thaliana columbia
  unsure (1)..(379): unsure at all n locations
gagagatcatctctttcgtgccattgaaacaatcccttgcgtcgccaagaaagctcaatgggctgtgaaatggatcggcggggctgagactttcnccnaacgaatcatcgctttcgcttgcgtcgaaggtatcttcttctccggaagcttttgttcaatcttctggctgaagaaacgaggactcatgcctggattaacattctcaaacgaattgatctcacgtgacgaaggtttacactgtgatttcgcttgtctactctacacgctactcaaaacaaagcttagcgaagaacgcgtgaaatcaatcgtctgcgacgcggtccaaatctagagagagtttgtgtgcgacgccctttcctgcgcgttgtttgggattaac

SEQ ID NO: 154373 - DNA, 250 bp, Arabidopsis thaliana columbia
ctcagatctgagaatcatttcttcttcttcttcctcactttggtcatcatcttcttctccgagtcgaaacaacaatggggacacgaccagctttctcagcaagagatgaattcgtatacatggcgaaactcgccgaacaagcagagcgttacgaagaaatggttgaattcatggagaaagtcgcgaaagctgttgacaaagacgaactcaccgtccaagaacgtaatctcctttccggcttttacaaaaa

SEQ ID NO: 154374 - DNA, 297 bp, Arabidopsis thaliana columbia
  unsure (1)..(297): unsure at all n locations
ctcaattcaactcatttcttaacctcttctttctcctccaaacaagtcttcctctagcgcggtcaaccacaaacgagccntcggattcaacacactcatcacttgcgcacaagaaaccatcgtgatcggactagctgctgactctggctgcggcaaaagtacctttatgctgaggctcaccagcgtctttggtggcgctgctaagccaccaaaaggcgggaaccctgattccaacacactcatcagcgacacgaccactgtgatctgtcttgatgattaccattctttggataggta

SEQ ID NO: 154375 - DNA, 259 bp, Arabidopsis thaliana columbia
ctttcttcagaggtaaaccaccgtaaattcacctcagaggaacatgatccacatatactcacccactctccctttggtaacacctggccaactatctcactgcttcttaatgatagcactgataactcaattaataatcactttaactcaactctacaatcactaatgtaactgctaacgctgtcaataagacaacaaacatatttgctatctccgtaatactagaggttattatggctatttaacttatgaacttccc

SEQ ID NO: 154376 - DNA, 359 bp, Arabidopsis thaliana columbia
  unsure (1)..(359): unsure at all n locations
cgtgttcttgcgaaatcatgcccggagaatttgtttttcgactccaacgattcggattcttcctgagagactacccacaaaggccagggagatcanaaatcagtgtcacggagacagtggatgacggcatgtgtgtgcgcatctgcagctttaattagcaattcttatacctttgtctctgtacaaagcgcagccgctttagacaagaaaccaggaggttcatgtcgtaactgccagggcagtggtgctgttctttgtgatatgtgtggtggtacaggaaaatggaaagctctcaaccgaaaacgtgcgaaagatgtatatgagtttacggaatgtccaaaactgtacggtcgaggtaa

SEQ ID NO: 154377 - DNA, 387 bp, Arabidopsis thaliana columbia
acgatttcgacattgtcactaataagaaagttagcgacgttgctcagcctttggttgaggcggatattccgtttaagagccagatcgtcaaggatcacgatatgaaggagaggctttgtttggaggtggagaggttagggctaagtactttgattatgggtagtagaggatttggtgctacgaagaggagtagtaaagggagattagggagtgtcagtgattactcagttcaccattgtgcttgtccggtggttgttgttagatttcctgatgataaggatggagaagatgagaaatccggcgacagtggtggggagaatctgatggacagtgataaacttcatacagtgcctgaggtggctgtagaagagggagataaggatgagt

SEQ ID NO: 154378 - DNA, 425 bp, Arabidopsis thaliana columbia
  unsure (1)..(425): unsure at all n locations
aaattccgggcggaccgacgcgtccggggtttttcgcctctttctcaactctcttttttttaacctagcagtcgtctttttctcaggggggcatgggaaagtgtgagggcggcaccaaagttgttgcanagattaaggccactaagcctttgaagaaaggcaagagagagcctgaagatgatattgacaccaaagtgagtcttaagaagcagaagaaagacgtgattgctgctgtccagaacgaaaaagctgtgaagaaggttcctaagaaggttgagagctctgatgattcagattctgaatctgaggaagaggagaaggctaataaagtcccagccaagaaggctgcttcaagcagtgatgagtcatctgatgactcttcttcagatgatgaacctgcacccaagaaggccgttgctgtttct

SEQ ID NO: 154379 - DNA, 429 bp, Arabidopsis thaliana columbia
cgtctctctctctctctctttctctttctctcatcttcttcttatctccctccaaagacggcgacgtgtataatctatcatggctgacagtaacgctttcatcggaagatctcgccggaaaaaaacttctctctgagatcagatctcttacgattctcagctcaatcttatcttttcctttgttgtgctgcttttcactctcttctgcgcgacgaatttggccttgttttttgtttgtttgtcgtatccgacgcggaggtattgagaaaccgtggcttaagacggaggaagaagatggaagctaacgggattgagaacttgacgaatccgaatcaggaaagagagtttataaggagacatcataagcatgagcttgtggataatcagagtagctctacgcttgttaaacatatcaacgctcctgttcat

SEQ ID NO: 154380 - DNA, 271 bp, Arabidopsis thaliana columbia
  unsure (1)..(271): unsure at all n locations
taagcatatgcacaagatgaagaggacctcataatatggagagaaatgagtgctcttgtgggcccgatgtttttgacgaggnctgcaaaaaggaatcaaactgtaatttggcaaaaacctttgacaaatgattgttatttgggaagagaacctggaacccatcctccttttttcaattctgacagtgaccctgatgctttgtatggtgttaacattgaaacatgcattactcaatacagtgaccattaccacaaaacctatggaagtttat

SEQ ID NO: 154381 - DNA, 362 bp, Arabidopsis thaliana columbia
  unsure (1)..(362): unsure at all n locations
atctcttcttccttcttcttctctctttattcatgataatccacacgcaaaaatgggggggcaacaagcggctcgggggctcctttccaatttggcgaangctgctttcggtcttggaacggcggcgacggtgctgaatacatcgcttttcaccgttgacggctgttaaagagctgttatcttcgatcgattcatgggagtgatggatcagactgtgggtgaagggactcatttcttgatcccgattcttcagaggcctcacatcttctatatccgcacgaagcctcacacgttctcttcaatctctggtactaacgatctccagatggttaatctcactcttcgtgttctctttcgttctg

SEQ ID NO: 154382 - DNA, 433 bp, Arabidopsis thaliana columbia
  unsure (1)..(433): unsure at all n locations
cgcaagctaccacagatttagagtttatccaccttatctttcgccgagatccaacagtgggtgatgtggaaccagagggtgcggcancaggagttccaaagaagagaacgttcaagaaattcgccttcaaaggagtcgatctcgatgctcttctcgacatgtctaccgatgatcttgtcaagctcttctcttcccgtattcgcagaaggttctctagaggattgacgagaaagcctatggctttgattaagaaactccgcaaggcgaaaagagaggcaccagctggtgagaagccagaaccagtgagaacccacttgaggaacatgatcattgtgcctgaaatgattggaagcatcattggtgtgtacaatggaaagactttcaaccaagtggagatcaagcctgagatgattggacattaccttgcagagtt

SEQ ID NO: 154383 - DNA, 361 bp, Arabidopsis thaliana columbia
cggacgcgtgggattcgatttgatttttttctcgaatcgaagcgatggttttctacgtcagggcccgtcctgaggctgccgactacaccatcttcatggggcttgataagttcgagaacgaggagctcatcaagtacggcttccctgaagatgtctggtttcacgtggataaaatgtcgtcagctcatgtttacttgaggcttcatagaggccaaagttttgatgacattagtgaaggtgtgctggaggactgtgctcagcttgtgaaagctaactccattcaaggcaacaacgtgaacaacgttgatgttgtgtacactccgtggtccaacttgaagaaaactgcctccatggatgttgg

SEQ ID NO: 154384 - DNA, 237 bp, Arabidopsis thaliana columbia
  unsure (1)..(237): unsure at all n locations
atcacttttcatcgatcttcaaattccagtataaactcgatgaatcttcaagctgcgccgggtatcttcagattccgcccgagtccacttgntttcactcccanaacttcgtttcgtcgcttcttaatccgagcgaaaactgaaccgtcggagaaatcagtattgattatgaggaaattctccgagcaatatgctcgtttctctggtacttacttctgttttgataaaggagtttct

SEQ ID NO: 154385 - DNA, 392 bp, Arabidopsis thaliana columbia
cactgttccagcttacttcaatgatgctcaaaggcaagctaccaaggatgccggtgttattgctgggctcaatgttgctgggatcggcaacgaacctactgctgctgctattgcctacggtcttgataagaagggtggtgagaagaacatccttgtatttgaccttggtggtggtacttttgatgtcagtgtcttgaccattgataacggagtgtttgaggttctctccacaaatggtgacactcacttgggaggtgaggactttgaccacaggatcatggagtacttcatcaagttaattaagaagaagcaccagaaggacatcagcaaggacaacaaggctcttggtaagctccgaagggaatgtgagagggcatagagagcttctaagc

SEQ ID NO: 154386 - DNA, 352 bp, Arabidopsis thaliana columbia
  unsure (1)..(352): unsure at all n locations
cacatctttctcctttgccctcgntttttttcggttctcggctttcgttcttcacttttaggcgggcaaatatgagaggccgaggggacaggangacttggtggtggaggattcagaggtggaagagatggtggtggatgaggtttttttgggttttttnttttttttttttttntgtttgtgtattttttttttttttttttttttttttttttttttttttttttatttttttgtattattttttatttttgtttttttttaaattttttttttatttttgggggggggttgtttaatattttttatattttttttttatatagttttttttttttttattttttttttt

SEQ ID NO: 154387 - DNA, 459 bp, Arabidopsis thaliana columbia
  unsure (1)..(459): unsure at all n locations
cgggncggccgacgcgtacgctctcttcttcnctctcgccattgncgtagttctctttctctaaccctaaaatacctagagagagcatatacctgaaggcggccagtcaatcatggantacgctgctcggagaaatcagaaaggcgctttcgaaggcttttacaaacttatcatgcgccgtaattccgtttacgtcactttcatcatcgccggcgcatttttcggtgaacgggctgtggattacggtgttcataagctctgggaacgcaacaattttgtgaaactatattaagacatctctgtgttgcatcaaatgcctgtggggggtcggggtgttattttttttaatcttttttttacctaaatctttttctcataaattttactattttttttttctatctataaacttcttccctttcttcttttacttattttctaaatttttctccaattttt

SEQ ID NO: 154388 - DNA, 485 bp, Arabidopsis thaliana columbia
atttttgccagtcctcttgcaagaaagttggctgaagataataatgtacctctctcaagcattaggaggcacaggtcctgaaggacggatagtgaaggctgatgtcgaagatttcttagcttcaggcagtaaagaaactactgccaaaccttccaagcaagtggattcaaaggttccagctcttgactatgttgacatccctcacactcagatacgaaaggtcacagcctcacgtttggcattctcaaagcaaactattcctcactactacttgaccgtggatacatgtgttgacaaaatgatgggtcttaggagtcaactcaattcatttcaagaggcttccggtgggaaaaggatatctgtaaatgatcttgttattaaagctgctgcactggctcttcgaaaagttcctcagtgcaatagttcatggacagatgaatacattcgccaatttaaaaatgtgaacatcaatgtcgctgtacaaa

SEQ ID NO: 154389 - DNA, 273 bp, Arabidopsis thaliana columbia
  unsure (1)..(273): unsure at all n locations
tttcacaacattttacttatcttcttcctctctctctcaatacctctctcgatcgctttatccaccatgcccgcccgccaatcttcatctctccntccttctcctccaaacccacttcncttaccatcaaatcctcaatcacatcagctaattaccaattctttaccttttccaagacaacaaccttccttcatctcctcatcatcatccactgtctcctctccttaacgctaaacaaatcccaacaatccagtttttattacttctatctct

SEQ ID NO: 154390 - DNA, 474 bp, Arabidopsis thaliana columbia
caaaggactttataggggagcaacatcgttttttatgggaatggcttttgaaagttcattgatgtgtggcatatactcggaggctgagctgttcttgcgggtaacattgcagaccaaatgatctttcactgtattttcctccagatttcaaatttcgcttctttcttgttttattgtaaagggaactttgccagatgatgggccacgaccagagataattgttccgtctgctatgtttggtggagctatcattagttttgtgttatgtccaacagagctagtaaaggtgaaatctccagaacaccatttctttccccgcaattatcacctttgatggtttccatggagttttgggacattcactgttttgttcagtgtagaatgcagatccaaagaacggattctctggtttctaacttccgtagatacaacagtcctcttgattgggccggtcaaaccgttaaaaatgatggg

SEQ ID NO: 154391 - DNA, 450 bp, Arabidopsis thaliana columbia
  unsure (1)..(450): unsure at all n locations
gcttggtctctttcattggcacaaagagagttaattctgaaattgagagagacaganaaaaggggcgtcttttctgaaagcaggcagcgatccaaagaagaacttcctcgctcgtatgcatatgaaagccatatctactcgccttcgcagatacggtctgaggtacgatgatctgtacgatcagtattacagtatggacatcaaagaggctatgaacagattgcccagggaggtcgttgatgctcgtaaccagcgtctcaagcgtgccatggacctctccatgaagcacgagtacctccccaaggatcttcaggcggtgcaaaccccattccgtggctatcttcaggacatgcttgctcttgttgagagggaaagcaaggaacgagaggccctggtagctctaccactataccaacgcacactcccataagcattcctttccccttttct

SEQ ID NO: 154392 - DNA, 466 bp, Arabidopsis thaliana columbia
  unsure (1)..(466): unsure at all n locations
aacccgggccgccgacgcgtccgctgtgaaaacctcanatcgcaaatatgcactctaccggtactcgttctgagcgattcgttcgggcgtgaatctggaaccacgccccatcatggtaatatccaagcttccaaggctgttgctgatatcattcgtacaacattgggtcctcgttctatgttgaagatgcttcttgatgctggtggagggatagttgttactaatgatgggattgctacattttgccagctaggttcctctcttcctgcaactaacttatttattgttttatgcctctctctattattattattttccttttttggggcggggggggttgtattttttattttattacttacttttctccatttttatttctttttatttctttttctttcctttttctttttttctttatcttatttatttatttttttcttttttttctattttcttttttttc

SEQ ID NO: 154393 - DNA, 443 bp, Arabidopsis thaliana columbia
  unsure (1)..(443): unsure at all n locations
caaaagttctctctttacttctcttatatgttttcgcgtcattagcctccggtgatgagcgcatcattaacgacgatggccggcttccattnnactgcaagtggagaacctatgaanaagtgaggtccatctacttacaatggtccgcagaacacgggaaaactaacatcaacaacaactgtatcatcaacgaccaagacaaattattcaatatttncaaagacaacttaagattcatcgatctacacaacgaaaacaacatgaacgctacttacaagcttggtctcaccaaatttaccgatctcactaacgatgagttctctaagttgttcctttgtgcaagaatctgttccttcctcctcatctttatcgccaaataattttaaccactatttctctatcctcttttaaacctccatgtttttttcattaaacttttttat

SEQ ID NO: 154394 - DNA, 301 bp, Arabidopsis thaliana columbia
  unsure (1)..(301): unsure at all n locations
atcgcaaatatgcacgcaccggtacttgttttgagcgattcgttgaagcgtgaatctcgaantaaggttcatcatcccgatatccaancttccaaggctgttgctgatatcattcgtacaacattgggtcctcgttctatgttgaagatgcttcttgatgctggtgtagggattgttgttactaatgatgggaatgctattcttcgtgagctagatgtctctcatcctgcagctaagtcaatgattgagttgagccgtacgcatgatttataagttggcgattggacaacttctgtttttg

SEQ ID NO: 154395 - DNA, 127 bp, Arabidopsis thaliana columbia
  unsure (1)..(127): unsure at all n locations
cgctcatttactgttctgtttcactttctctttttctgnatactctctaaatgatnncgggagggctgtaattaagggggggggggatatatatttttnntatttaccctttttaacaaacctatca

SEQ ID NO: 154396 - DNA, 400 bp, Arabidopsis thaliana columbia
  unsure (1)..(400): unsure at all n locations
caaaatcaaagaagaaccgaacgatatagttaaacgaattcttctcaagtgttaaagagggtcttttaaatatgatagccggccacaatcttctcnccataaggtcntctttaccaggtagagtatgctatggaggccattggaaacgccggttctgcgattgtaatcttatccaaagactgtgttgtgttgatccgtgagaagaaagtcacctcaaaacttcttcaaacctcaacctcttctgagaaaatgtacaagattgatgaccatgttgcctgtgctgttgctgttataatgtctgatgctaacatacttatcaacactgctccagttcaatctcaaagttacaccttcatgtaccaataacccatgcccgttgagcaccttgttcaaatttttt

SEQ ID NO: 154397 - DNA, 477 bp, Arabidopsis thaliana columbia
  unsure (1)..(477): unsure at all n locations
gcttctcttcaatcgaaaaaaaagaaaggatttgctctagattgttgaatcgaaaatgtcgacaagggaagagaatgtggacagggcgaaattagcctaacaagctgaacgttacgaagaaatggttgaattcatggagaaagttgcgaaaactgttgatgttgaggaactttcagttgaagagaggaatcttctctctgttgcttacaagaacgtgattggagcgagaagagcttcgtggagaatcatttcttcgattgagcagaaagaagagagcaaagggaacgaagatcatgttgctattatcaaggattacagaggaaagattgaatccgagcttagcaaaatctgtgatgggattttgaatgttcttgaagctcatcttattccttctgcttcaccagctgaatctaaagtgttttatcttaagatgaaaggggatttttatangtatcttgcttagtttaaagctggtgc

SEQ ID NO: 154398 - DNA, 382 bp, Arabidopsis thaliana columbia
  unsure (1)..(382): unsure at all n locations
gcgtccggacaccaaacattcgtgatatctatacccttattttcaagctaggtcaaggtcaatttgcgacgacttatctatgtgacacggattgcctcangcgttgactacgcttgtaagtcaatatccaagaggaagttgatctctaaagaagatgttgaggatgttagaagggagattcagataatgcatcatttagctggtcacggtagtatcgtgacgattaaaggagcttatgaggactctttgtatgttcacattgttatggagctttgtgctggaggtgaattgtttgataggattattcagagaggacattatagtgagaggaaagctgctgagctgactaagatcattgtcggtgttgttgaagctgtgtcaa

SEQ ID NO: 154399 - DNA, 363 bp, Arabidopsis thaliana columbia
acgatgacttctttctctctcactttcacatctattcttctcccttcctcctccaccaaacccgagagatccgtacttgggggcgccggtcaaaccacaactacagccaaatccaccacctctgttgacgcaaatcgtctcaagccacaaattgagttgaaagatagcttttttattctcaaggagaagtttctaaaagggatcaatcctcaggagaaggttaagatcgagagagagcccatgaagttgtttatacaaaatggtattgaaaaacttgctaagaaaattattgaaaatcttgatagtgcaaagacttctaaagatgatattgatgatagactcaagatgcttgttctctttcac

SEQ ID NO: 154400 - DNA, 294 bp, Arabidopsis thaliana columbia
ggcaaaggccattaaaaatgatgctgttctaaagggaatgaagaattctcacttgagagaggctgctgccctagctcagttgtgggcttgactggaagaagaagtgcataagaatgcgaatctaacagaggtcgatgtggctgacaggcttcttgaattccgttcaatgcaagatggttttatggatacaagctttgatacaataagtggttccggtgcaaatggtgctattatacattataagcccgagcctgagagctgcaatcgggtagaccctcaaaaacttttttgctt

SEQ ID NO: 154401 - DNA, 334 bp, Arabidopsis thaliana columbia
  unsure (1)..(334): unsure at all n locations
cggaancccgggccgccgcacctacggctataccaaaagccattgcacatgctggtttggaatcttctcaagttgattactatgacgtcaatgaagcattggcacgccagcacttgcaaatcaaaagctactcgggattgctccagagaaagtgaacgtaaatggaggagctgtctccttaggacaccctctatgctgcagtggcgcccgtattctaatcacgttgcttgggatactaaagaagagaaacggaaagtacggtgtgggaggagtgtgcaactgatgacgaggntcttttttccttgttcttgtgctccttttttgcgtggggggg

SEQ ID NO: 154402 - DNA, 467 bp, Arabidopsis thaliana columbia
ggctaaacgttttctgcttcttcttcctcttttgtcatctattcttcttcttgccgtgtccggcgcagcttactccacaagggcggcgtatcaaggctacaagccggagaaattcacccacctccacttctacttccatgacgtcatctccggtgacaaacctaccgccgtcaaagttgccgaagcccgcccaacaaccaccctcaacgtcaagtttggcgtgattatgatcgctgatgatccgttgaccgaaggaccagacccgagctcaaaggaagtgggaagagctcaggggatgtacgcatcaacagccatgaaggacatagtcttcacaatggtctttaactatgttttcacggcaggagagtttaatggaagcaccatcgcggtgtatggacggaatgatatattttcgaaggtgagagagttgccgattattggaggaactggtgctttcaggtttgcta

SEQ ID NO: 154403 - DNA, 428 bp, Arabidopsis thaliana columbia
  unsure (1)..(428): unsure at all n locations
ggcgcgatggtgcatgcattcgagtgcttattctacaatacaatgtcggagaangacgaaaggatttaacgcatcatncccgccaccttatcacagaaaattgccaaactgtacccatttgtgtccggagatatgtcatcctgggcagtgtccattgccagagaattttttttaaaaggtggttgttcaatgcaagtgcctaaccttgaagaaagaatgggtatgccaggatgttcaagcatcccatatggccacaggttctgatcctaaataagtaccaaagaactcattctttgttggtctggttctttgtcatttcaatctttaatttctttttcttgtttctaattattttttacacaattattcttttatataattttccttttttattttttttcttatatatttttcttttcttttttttt

SEQ ID NO: 154404 - DNA, 254 bp, Arabidopsis thaliana columbia
  unsure (1)..(254): unsure at all n locations
acgctctaatcaaaaagcttttaacctcattcgttaaatctttctccgatcatgccnacgagaagcatctacattggtggagcccgggaaaaaatctatcaccccaacgcacttaaggcggcgctcgctgagtttatctcgactttgatcttcgtcttcgccggctcatgcttctgaattgctttcaacaagatcactgacaatggagcaaccactccttccggcctcgtcgccgctgccttagctcatgcttt

SEQ ID NO: 154405 - DNA, 447 bp, Arabidopsis thaliana columbia
gcttgccattgagcgtggatggagcgagtcttcctttcccaacgtccgtagcccaccagctgtcggttatgatttctctgagcgtcgcgagaagctcaaatccggctacaaagctacaacaactgggaaattcactgaggctctccgtctcttcctttctatcctgcacaccatccctctagtggtagtcgagacaagaagagaagtggatgaggtcaaggaattaatcgttatcgttaaagaatatgtccttggtcttcaaatggagctcaagaggagagagatgaaagatgatccggtgaggcagcaagagctcgctgcttacttcactcactgcaacctccaaacacctcacttacggcttgcgctgcttagtgcaatgggtgtctgctacaaagcaaaaaacctcgccactgcttctaatttcgccagaagactgttggaaac

SEQ ID NO: 154406 - DNA, 374 bp, Arabidopsis thaliana columbia
acgctcagatctgaatccatccatcaccgatctttaattgcggcaccaccagcatcatcctcggcgaggttaaattcatgtaccgcgcagagctctcaaaacaagctgaacgttacgaagaaatggttgaattcatggaaaaagtcgctgaagccgttgacaaaaacgaacttatcttctaagaacgtaatctcctctccgtcgcttacaaaaacgtaatcggcgctcgtcgtgcttcctggagaatcatctcttccattgaacaaaaaaaagagagtcctggtaacgatgaccatgtgaccactaaccgtgattacagaagcaagatctaattttaattattcaaaatctggtactgtattcttaaccttctt

SEQ ID NO: 154407 - DNA, 381 bp, Arabidopsis thaliana columbia
  unsure (1)..(381): unsure at all n locations
cgtacgggagcactctcttctctttgtctctgngactcacattcatccaatccannanncattntcggcaggttatgataaaccggaagtcagcagtanantanttcatcaggagggtgacgtggaaatcgtcgatagaagtcagaaggataaggacgaggaaaaagaagaagggaaaggtggattcctcgataaggtgaaagatttcattcatgacattggtgagaaactcgagggaaccattggctttgggaagccaactgctgatgtctctgcgattcatatccctaagatcaatcttgagagggcagatattgttgtggatttcctttttaagaaccccaatccagttcctatccctctcatcgatttcaactacct

SEQ ID NO: 154408 - DNA, 360 bp, Arabidopsis thaliana columbia
gtcacactaattagtgagctctctttttttttcccaactaagttgatacaacttataaacgggctaaacataactgaggcggcgatcattttctttaatgcccaactaattcttatacatccaaaaccttttcgaacaacaaagccagaacctagaatctacccaatatatggttactgtcgcctaatctcaagactatgacgaacttaactgccaccaacgctagaaatggtgccacttgatactaacttgacgctcgcatggtttgtttggctgcgaacaaagccattgattgtacaaattgtgaaacatctggcttacaaaaacgaaaagtttctgttgctggactccaaaagcaca

SEQ ID NO: 154409 - DNA, 349 bp, Arabidopsis thaliana columbia
  unsure (1)..(349): unsure at all n locations
gtgttgattctggaaaatttaccacattggtcacttgatctataagcttgntggtatggcgaagcttttcatagagacgccgcagaaaaatacttcttanatgaacaagaggtccttcaagtacgcatgggtgttggacaaacttaacgccgagcgtgagcgtgttttttccatcgatattgctctataaaagctccagaccaccaagtactactgtacagtcattgatgccccatgacatcctgatttcatcaagaacatgattactggtaccttccactcttattttgctgttcttatcattgactccaccactgcacttttttagctttctttcttttaagatttt

SEQ ID NO: 154410 - DNA, 446 bp, Arabidopsis thaliana columbia
caaaaatggagtataggtttcatatctctcgcttttctcttcatcacttcctcttcagctgagtgcatcattcaacaggtcacaacgggcagaggaatagagtacaacagttcttacagtctcgaggagaatcttggagtgacaagagagttgagagaagagcgaccatcgtgtaagatagtgacaataacaagcttctcagtgattaaaggcagaggagaaccctatgaatcctctgtttttgaggctgctggttacaaatggagattggttttgtacgtgaatggtaataaaaacgacggtggaaatgatcatatttccctttacgcaaggatcgaagagacaaactctcttccattaggttgggaagtgaaatgtgatcttaaactctttgtccataatgggaagctacacaaatatttgactgttacagatggcttattgaa

SEQ ID NO: 154411 - DNA, 357 bp, Arabidopsis thaliana columbia
  unsure (1)..(357): unsure at all n locations
accgctgtaacaatatgtcccgcaagctgattgttttctggctcatgggtgccaaanagaagtggcgcgctggagatgttccggcaggccgtgctattctacaagaggcttatgctgcaattcccaactctgaagaaatctggcttgctgctttcaagcttgagtttgaaaacaaggagccggagagggcaagaatgctgcttgcaaaaacaagggaaagaagagggactgaaaaggtctggatgaaatcaaccattggtgagagagaacttggcaacctaaaagaggagaggagattgcttaatgaaagtttgaagcaatttccaacattcttcaagctttgggtaatgcttgggc

SEQ ID NO: 154412 - DNA, 435 bp, Arabidopsis thaliana columbia
gtatggctttcagtgggtgacagttttatattgttcttcttcccaagaggatcagacaagtttgaaaagcggattgggtgcgtggcacacaatgcttggcctgtttgtttacatacttgctgtcgggaatgcagctttagggtttctggaaaagctgactttcttggagaatggagggcttgacaagtatggatccgaagcatttcttatcaacttcacggccattatcactattctctttggtgcctttgtggtactcactgcttctgctgagtctccttctccttctccttccgtctccaatgatgatagtgttgacttcagttattctgctatataaaacactttctacattccacgttacatctgttttgccccttgtactcttaaaacttcatttatgtatgatgcatttgttgcgaaaagctttgtgtg

SEQ ID NO: 154413 - DNA, 406 bp, Arabidopsis thaliana columbia
  unsure (1)..(406): unsure at all n locations
gatagctgcaggtgcaacactagctgttacttctgctttgattgattctggaggtcagacgacaagagtagacaatggcgagagaagactatccttacaccgtcgagaaaagagctgaagctgattcctgatttctcttttggtcactgagattaataagatgtgcattcgctgatccggggatcttgagataatctcttttgtttattttatctggatatgtgatatcatgatactctttgctcttgtttcttcttgttttcttgagagcgactttctcacatcttttgtctgaatgtttcctgcaataaaaattcaactttgtctgccnnnaaaaaaaaaatatataaaaataaaaaataaataaatattatattttatatataataatatattttatatatct

SEQ ID NO: 154414 - DNA, 410 bp, Arabidopsis thaliana columbia
gtcaggtcagggaacaacaatggcttcttctgcaacagcaccaaattcgctatctttcttggcatgttctctctttttatccggcggtcaccaaatccctaaaacctacatttccgtttcaaaactcggctccggcagagtctcgaagccgctttctgtctcttcccagctagcgactctaccgattctatcattcgaaggagagaaggtcggagagacgtatctagacctcaaagcggcgccggaggataccgcgcgtgccgttgtgcaccgagccatcgtgacggacctgaataacaagcggcgaggtactgcttccacactgactcgcggtgaagttcgtggtggtggaattaaaccttactcacagaagaaaactggccacgcgaggcgtggatctcagagaacac

SEQ ID NO: 154415 - DNA, 426 bp, Arabidopsis thaliana columbia
atattacaatcctgctactgtacagatgctctccaactcatgggttccaaacataactgggctattaaagatggtagggaaggggcggctttctatcatacagtgggaggcacttgctctgttgctgatagggaatagtgtaaaccaattaccgtcttcttcctgaagtgcctacagccatggaaattcctctggctacgggtgcatacgtctgcaccgttatctttgtcactgtcccgtcaatggcatctgtcttcaacgagtatgctctaaagagtcagtatgacacaagcatatatcttcagaatttattcctctatggttatggtgcaatattcaactttcttggaatactaggaactgttatatataaaggtcctggcagctttgacatcctacaaggacattctagggctaccatgtttt

SEQ ID NO: 154416 - DNA, 449 bp, Arabidopsis thaliana columbia
cgcgtccgatcagcattcagcagccagacgaaactttttacgatctaccatcgaaccaggatacttctgcattaccatggcaacaagaaatgctgggagaattgtgtctcgtaggttctctagtggcaaagttcttagcgaagaggagagagccgctgagaatgttttcattaagaaaatggagcaggagaagcttcagaagttagctcgacagggtcctggagaacaagcagcagggtcagcaagcgaagcaaaggttgctggtgcaacagcatctgcatcagctgagtcgggcccaaaggtgtcagaagacaagaacagaaactatgcggttgtggcaggtgtggttgctattgtcggttcgattggttggtacttgaaagcaagtggaaagaagcagccagaggttcaagagttaagagatagattgattgatggacttgtgatga

SEQ ID NO: 154417 - DNA, 417 bp, Arabidopsis thaliana columbia
cggaaaggaagggccgggccgagcgacccgtcaggatctgattttaactgaatggacactagcttagagtgagtaagcttcagagtgagggcgggcgtgaagccatcactagtagcgacagggaaatccgaggcaaagaaacgtaactttgtcgagactattgagctccagatcggtctgaagaactatgaccctcaaaaggacaagcgtttcagtggatctgtcaagttaccacatatcccccgtcctaaaatgaagatctgcatgctcggagatgcccagcatgttgaagaggctgagaagatggggttggaaaacatggatgttgagtctctaaaaaagcttaacaagaacaagaaactcgtgaagaagcttgcaaagaaataccatgcttttttgggctttgagtctggcatt

SEQ ID NO: 154418 - DNA, 377 bp, Arabidopsis thaliana columbia
  unsure (1)..(377): unsure at all n locations
aagaaatttgcagaagagagaaaaacttaaatggcggttctttgctcgtcttcnacggggagactctcttcttggtcctcgaatcctccggaagtgagagaaagtctccgtttttagggttctctttaacggctatctcgaagccgtcggtacgagtcggcatttatgcgaattcgaaaagaggattgcaagtgaagtgtgaagctgagccgacgactacgacttctcttgttccggcgaatcaacgatggatgttcgacgaaaaagaagctaatggccctgacatctggaacacgacatggtatccaaaagcttcagaccatgtgaacacggacaagccctggtttgtggttgatgcaactgaccaaattcctggt

SEQ ID NO: 154419 - DNA, 396 bp, Arabidopsis thaliana columbia
  unsure (1)..(396): unsure at all n locations
aaacgagcaaaagaagaagagaaacaacaagaagtagtaatggcttcctctatgctgtcctccgccgctgtggttacaggccgggctcangccaccatggtcgctccattcaccggcttgaagtcatccgctgcattcccggtcacccgcaagaccaacaaggacatcacttccatcgcaagcaacgggggaagagttagctgcatgaaggtgtggccaccaattggaaagaagaagtttgagactctatcttacctccctgaccttagtgacgtcgaattggctaaggaagttgactaccttctccgcaacaagtggattccttgtgttgaattcgagttagagcacggatttgtgtaccgtgagcacggaaacactcccggatactacgatgga

SEQ ID NO: 154420 - DNA, 426 bp, Arabidopsis thaliana columbia
caaaaatcaaacacagagaagagaaaatggcctcagaaggagaagttatcgcttgccacaccgttgaagattggaccgaggggctcaaagccgccaacgaatccaagaaactgattgtgatagacttcactgcaacatggtgcccaccttgccgtttcattgcacccgtctttgctgacttagccaagaagcacctcgacgtagtcttcttcaaggtcgatgttgacgaattgaacactgttgctgaggagtttaaagttcaggcaatgccaacgtttatcttcatgaaagaaggagagatcaaggagactgtggttggtgctgctaaagaagaaatcattgccaatctcgagaagcacaagacagttgttgctgctgcttgatttgcttttctctcttacctattttgctaaaataatgttggtg

SEQ ID NO: 154421 - DNA, 462 bp, Arabidopsis thaliana columbia
gctaattttcaatcgattttgcagaagtttgttgctcctggaatagaaatcgaagatggagaagtacggattgcaggtgagagctccttcccagaaaaaacaatcatcatctcgacctccacttcgacccgcttcaatatttgatgaagaagaagatcacgacgtcgagaaggagatttctcgtcaagcaacaaagaccaaagctcataaagaaattgaggagcagcataagaaagccttagaggaggatccttctgctttttcatatgatgaagtttatgatgatatgaaacagaaagctgttcttcctcgaatgcaagatcgtgaagaacgcaagccaaggtatatacagaatttgatgaaacaggcagaacgtagagagaaagaacatgagatagtttatgagagaaagcttgcgaaagaaagggagaaagacgaacatcttttttcggataaaagaaa

SEQ ID NO: 154422 - DNA, 413 bp, Arabidopsis thaliana columbia
cgcagacgcagcttttagtatttttttcaacaatcgctttttttttttctcgatctgcgtgaagctctcgaatcggtgggtttgagttttggagaatggtgtttttccgcagcgtatcggcctttactaggctgaggtctcgcgtcggccaacaatcttcactcagcaattctgtcagatggattcagatgcagagctctaccgacctggacctgaagtcgcagctgcaagagttaattccggaacagcaggaccgtctgaagaaactgaagtcagaacatgggaaggtccaactgggaaaccatcactgtgatatggttattggtggaatgagagggatgactggattgctttgggaaacctccatgcttgacccggagaaggtattcgctttaggggattgccattcctga

SEQ ID NO: 154423 - DNA, 486 bp, Arabidopsis thaliana columbia
cgcgtacggaacaaagaaaaaacttggtgaaatcgattcttttcaatgatcgtcttcctaatcactttcagcaactcgatcaatccttactgggacgatgccgaaaaacaaaggaaagggaggaaagaacaggaagagaggaaagaacgaagctgatgacgaaaagcgagagcttatattcaaagaagatggacaagaatacgcacaagttcttcgtatgctcggtaacggtcgatgcgacgttatgtgcattgacggtgttaagcgtctttgccatatccgtggtaagatgcataagaaggtttggattgctgctggtgacatcatacttgttggtctaagagattaccaggatgataaagctgatgttatactcaagtatatgtctgatgaggctaggcttcttaaggcgtatggtgagcttccggagaatactcgtcttaacgaaagtattgttggtgatcttgatgatgatgatgatgttgt

SEQ ID NO: 154424 - DNA, 420 bp, Arabidopsis thaliana columbia
  unsure (1)..(420): unsure at all n locations
ttaacaacacaaatcaaactttgttaacaggaaaatacagaaaaaagagttgggtgtcgaagttacatntgacattannatatcggtatgcttgtttncttggaatcggaagctaaagaaagtcntgnctgtattattnatttgactggaagagaccgagaccgaatggattgtccggtgatcagctgcactagagataggaattgcagcggtaggactcgacaacatgaaatcatgtttgttctttttcggtttctgatcttgatggtcagtgcccgctaaaaaacttcctacaaccacctgaaccggactcgcggctactagtaaaccggcgaggccaccgcctactacacgtncatcgngacttgctaacgatacactcattcctcccgttctacttcgtgttccgcctgaatcatt

SEQ ID NO: 154425 - DNA, 400 bp, Arabidopsis thaliana columbia
ggtgccttaaatgttgatgtcactgagttccaaaccaacttggtcccatacccaagaatccggttcatgctttcctccgatgcgccagtcatctccgcagagaaagccttccatgagcaactctcagttgctgagatcacaaacagtgcttttgagccagcttccatgatggctaagtgtgacccacgtcacggaaagtacatggcttgctgtttgatgtaccgtggtgatgttgtccccaaggatgtaaacgcagctgttggcaccatcaagaccaagcgcactattcagtttgttgactggtgtcctactggattcaagtgtggtatcaactaccagccaccaacaagtgttccaagaggtgatcttgctaaagtccaaagagctgtttgcatgatct

SEQ ID NO: 154426 - DNA, 470 bp, Arabidopsis thaliana columbia
ctcacagaaaaacctagaaagctctatagagtaagagagagagagatggaaggtaaagaaggggatgttagagtcggaggtagcgggtttccggagaggcaaccgatcggaacttcggctcagagtgacaaggactacaaagagccaccacctgcgccgttgttcgagcccggcgagctagcttcatggtccttctggagagctgggattgctgagtttatagctacgtttttgttcctgtacatcactgttttgactgttatgggtgtgaagaggtcaccgaacatgtgtgcttccgtcggaatccaaggtatcgcttgggctttcggtggtatgatcttcgctctcgtctactgcaccgctggtatcttcggtggacacatcaacccaacggttacgttcggtttgttcttagcttggaagctttcgctcacactagctgtgtactacatattgatgcagtgcttatg

SEQ ID NO: 154427 - DNA, 449 bp, Arabidopsis thaliana columbia
aaattcagagggaagatcgatactttccacatcggagaaggtgtttcgtttctgctgatcagcagatgacttcttctttttctcggattgatccttttggattcttcgaaagatggaccctaataatcagatacaggcaccagttgaaaattatgcaaacccaaggacatgtcttttccatgttctcttcaagggtgctgcgttggcgttttacattctctctgctctcttcttcaacagctttgtcatcatctttgtagtcactgttcttcttgctgctcttgacttctgggtggttaagaatgtcagtgggcgtatactggttggtctcaagtggtggaacgagatcaatgacttgggagaaagtgtctggaaattcgagtctcttgatcaggagtctttggctcggatgaacaagaaagactcatggcttttctggtggacacttt

SEQ ID NO: 154428 - DNA, 422 bp, Arabidopsis thaliana columbia
  unsure (1)..(422): unsure at all n locations
aaaaaaaaaaaccggggcggccaaacgtccggnatccgncaccatttctaacgatggttctattatcatgaatctcctcnacattgttgttcctgctgctaagatcgttgttgtatcnacaaatcccaagactccgaggtgggtgatgggacaactacagtggttcttcttgcatcagagtttttgaaggaagctatttcatttattgaggatggtgtacacgctcagaatctaattaggagttaccgcacttcaagcactttgtcaattgccaaggttaaagaactcgcttttagcatcgaagttaagagtttatagcaaaagaaaggtntattggctaaaggcgctgttactactctatcatttaagcttatctgtggaaaaaatgatttattttctacaattgtttattatttttattt

SEQ ID NO: 154429 - DNA, 297 bp, Arabidopsis thaliana columbia
aaaatcagaattacaaacaaaaatggttttgttaaagcttcctctcattgggctgcttttggtgcctgaccatcggcgcctgtggagcaaatgcagatggacctgtttgcccgccgtcgaacaaactaagccgggcaagtttccctgaaggttttttatttggcacggctactgcggcataccaagtcgaaggtgcgattaatgaaacttgtcgtggaccagccttatgggacatctactgtagaagatatccaaagaggtgcaataacgataacggcgatgtggccggtgatttct

SEQ ID NO: 154430 - DNA, 431 bp, Arabidopsis thaliana columbia
gcgatcgagacaaagaagaaaaactaaaaaagagaacccctaagaatcgaatatttattatttcgccccggagattctatttctgatgcggttgcgacccctaaaaagagtagagctttcgtgaagccaccatgtgtggaggagctataatctccgatttcatacctccgccgaggtccctccgcgtcactaacgagtttatctggccggacctgaaaaacaaagtgaaagcttcaaagaagagatcgaataagcgatccgatttcttcgatcttgacgatgatttcgaagctgatttccaagggtttaaggatgactcggcttttgactgcgaagacgatgatgatgtcttcgtcaatgttaagcctttcgtcttcaccgcaactactaagcccgtagcttccgctttcgtctccactggttcagcatat

SEQ ID NO: 154431 - DNA, 404 bp, Arabidopsis thaliana columbia
gcgaaacactcaagcttgcagagatctttcacttttatccttgagaagtagcaaaaatggctgaggggggggtcaccatccgggccgggggggtcatgaccaacagacttctctccaggaagcagttcgttattgatgttcttcaccctggaagagccaatgtttcaaaggctgagctgaaggagaagctagcaaggatgtacgaggtcaaggatccaaatgcaatcttcgtattcaaattcagaacccactttggaggtggtaaatcatccgggtttggtttgatctatgatactgttgagagcgctaagaagtttgaacccaaatacagacttatcaagaatggacttgacactaagattgagaagtcaaggaaacaaattaaggaaaggaagaacagggcg

SEQ ID NO: 154432 - DNA, 307 bp, Arabidopsis thaliana columbia
  unsure (1)..(307): unsure at all n locations
ctctcgggttttgctggtcttccttgctcctctcgcttttgaatggagatgtgagctttctgcattcaaagaacaaaacgatggaattccatancattctccctcctctctccaattcctacctctgcctctctttttttcactctctccgccattaccgcttctaataatgcttcctcctcctctctctcccgtctttactctttatatcaccccaaaggaaccttacgaaccagaaccgcgacctcgtttttcggagcttctgggaacctgaggattgtttccatggccggaaataagcaatttg

SEQ ID NO: 154433 - DNA, 294 bp, Arabidopsis thaliana columbia
  unsure (1)..(294): unsure at all n locations
gcgcggacacgtgggcgtgaaatcaccgattaggtttctgtgcaaaagagtttctccgccatgagagctaggtggaagaagaagcgagtgaggaggctnaaaaggaagagactaaagatgagacagcgatctaagtagactcatcttcaaaaccttccctgtttctgtcttttcgcttaaatcctaagtacttttgtctgaacttgtttcaattaaattattccttgttgttggattgttatggattctcaattaatgttaaagcttaatctatctactcaatttattacgaat

SEQ ID NO: 154434 - DNA, 431 bp, Arabidopsis thaliana columbia
acggaactcggagttatgggacagtaatttggaattggaaaacgttgttgaatcgattaaagggtggtcaacaaaagggaagagaggaaggagaggtgatttgaagtttgatgaagcagatttgaaggatccacctttagaagatgtgaaggatattgatgatgctaatggtctattgttcttagctactactgcagaagcagctgctaatcttaatgttgctgagacttctgcttcgcgttccgttgaagagaaatatctggaaatggtcaagaagaggaagaagaagcagaagagattgtctgagatggagaaagagtcatcaacatctactcatcatgatcatcagcttgatcaggttgttgttgttgcagctgaagaaagtggtggtgccggtgcacgtgagaagcacgtgtgtgtgacttgcaaca

SEQ ID NO: 154435 - DNA, 447 bp, Arabidopsis thaliana columbia
  unsure (1)..(447): unsure at all n locations
ctcaaccttttggtggaaaaaaccagaaaatttggttgcatccaatttccgacgccaatggagacaatcccttcggctcgtgtggcgccnacnaattctacgccaaacattccgttagccactcctccgctttcatcaccaaccctcgcggtctcaaactcttcactcaatggtggtcaccactccctccaactaaaccaatcggtatcatcgctgtcgttcatggcttcaccggcgaatccagttggttccttcagctcacatcaatcctcttcgctaaatccggtttcataacctgcgcaattgatcaccaaggccatggattctccgatggactcatcgctcatatccctgacatcaatcccgtcgtcgatgactgtatctctntcttcgatgacttccgtagccgtcaaacaccctcagatctgccggngtttctctactctg

SEQ ID NO: 154436 - DNA, 427 bp, Arabidopsis thaliana columbia
caagaagaaaaaaaaaaacagagtagatattgttaaaaaaaaaaatgagtagctccgattctggtcagcttcacaagatcggtcggctatggtagctttcaagagcctgacatcatccatgtcatgcttaatcgtattcctgagattgtctctgcaacacttcctggctttaagagatttaggcttaaaggacgtttgtatccatgtattatcccctctgagaatggagaagttcatggaaaggtactaatgggattgactaatgatgaacttgagaatgtagattgggttgaaggaaacgaatatgaaagagtgtttgttgaagttgtaagaaaagacaattctgagaagatgagagtggaaacatatccatggatcaacaagaatgatcctgatattggtggagaatgggatttcgaggaatgga

SEQ ID NO: 154437 - DNA, 466 bp, Arabidopsis thaliana columbia
  unsure (1)..(466): unsure at all n locations
ggaatnccggtcgaccacgcgtgcgctctcttctcttcacaacgcatcatctcatgcattttgggctattatataaacacccaacttcctcgcgaaatcttacaccaaggacaggtattccattaaaagaaacattttctatagtcaagcataaagagcattccaatggcgatcccaagtttctccatgtgtcacaagcccgagctccttaaggaaggcaaaagcgaaggccaagaagaagaagggctaagctacgagttccaagagatgttggactctcttcctaaggagagaggacggagaaatcgttacctttacttattccaagggtttcggtgccaagctaaggagattcaagctatcacgtctttccaaaaacattttcagtcccttccagacgacgttgtcctcgccaccatacctaaatctggcacaaccttgttaaaagctttaactttcaccatcc

SEQ ID NO: 154438 - DNA, 282 bp, Arabidopsis thaliana columbia
acgcgcctcatgacttcgtcaaggcttatgcttcttatctcaagcgatctggcaagatcgagcttgccacatggacagacagtgtggggaccggaaagttgaaggagcttgcaccatatgatcctgattggtactacatcagagctgcatctatggcaaggaaggtttacctgatgggaggacttggtgttggtgctttccgtagaatctatggtggaagcaagaagaacggtagtcgcccacctcacttttgcaaaagcagtggtggtattgcccgtcaca

SEQ ID NO: 154439 - DNA, 375 bp, Arabidopsis thaliana columbia
  unsure (1)..(375): unsure at all n locations
ctttgttaagactctcaccggaaagactatcaccctcgaggtggaaagctctgacacgatcggcaacgttaagggcgggggccgggataangaaggcattcctccggatcagcagaggcttattttcgccggaaaacagctagaggatggccgtacgttggctgattacaatatccagaaggaatccaccctccacttggttctcaggctccgtggtggtatgcagattttcgtcaagaccttaacgggaaagacgattactcttgaggtggagagttctgacaccatcgacaacgtcaaagccaagatccaagacaaggaaggtattcctccggaccagcagaggttgatcttcgctggaaagcaattggagga

SEQ ID NO: 154440 - DNA, 425 bp, Arabidopsis thaliana columbia
  unsure (1)..(425): unsure at all n locations
gacctctttctcttcttctccatccttcttctctcggcgctcgcttcatccccaccaccttcgaggtcgggccctttgagggaagctgctgggatnnntgtgaaacaagctctaaggagcattgatgcgtttccaagagcagaggatcatttgcttcagaagacacaatctggcgctgttgtatctattggtggacttcttataatggctactttgttcttacacgagctgagttattatcttaacacacttacagtgcaccagatgtcagtggacttaaagcgtggagaaactcttccaattcatgtaaatatgacgtttgcatctttaccttgtgatgtactgagcgtagatgctatcgacatgtcagggaagcatgaagtggatcttgatacaaacatttggaagctccgtctcaacaatca

SEQ ID NO: 154441 - DNA, 292 bp, Arabidopsis thaliana columbia
  unsure (1)..(292): unsure at all n locations
gcgcggacacctgggtcacaccctaaaactcagcatcaatttccgttaccttttcaaatctacacacagtgtangatttcaaagcctgtggggaacacctanccggaaaaacctacatctccggagatcaattgtctgtggatgatgtcaaggtttacgctgccgttccagtgaaacccatcgatgccttccccaatgctagcaagtggtacgagtccgtggcttcccaacttgctaaaagtttccctggaaaggccgttggagtacaattcggtggctctgctgctgctgc

SEQ ID NO: 154442 - DNA, 435 bp, Arabidopsis thaliana columbia
gcgtacaactgtgcgctcttgttatctctgctttgaagttaaatcaactttggctatggcttcttcgacagcttagtctctgtcatggagctgctctccttgttggtcacacagcttcaatggcggtgcaaatgaaaccctaaaagtatctgagcgaaggttcaattttgaagttgtttcccagaagaaagctaagaaacttcgcaaggtaattttgaaagaggatgtgacggatttgggtaagcaagggcaattacttgatgtgaaagctggatttttcagaaacttcctcttgcctactggaaaggctcagcttatgactccacttctgctcaaagaattgaagatggaagacgaacggattgaagcagagaagcaaaaggtgaaagaagaggcacaacaactggcgatggtattccaaaccgtggtgctttc

SEQ ID NO: 154443 - DNA, 467 bp, Arabidopsis thaliana columbia
  unsure (1)..(467): unsure at all n locations
acgcgaatcgaaacgaaaaagatcgagatcagtgtagaataagaagacgaaatcacaaaaccatggtcttgttcgattggttgtgcgggaatcgtaacttcgttagggttatggcaaaaagaagcaaagatcttgtttctcggtctcgataatgctggcaaaactacattacttcacatgctcaaagacgagagattagttcagcatcagccgacgcaacatccaacgtctgaagaacttagcattggaaaaatcaagttcaaggcttttgatttgggtggtcatcagattgctcgtanggtttggaaagattactatgccaaggttgatgctgttgtctaccttgtggatgcttatgacaaagaaagatttgcagagtcaaaaagagagcttgatgctcttctctcggatgaagcccttgcaactgtcccgtttctgattcttgggaacaagattgatatccctta

SEQ ID NO: 154444 - DNA, 414 bp, Arabidopsis thaliana columbia
  unsure (1)..(414): unsure at all n locations
agacaatcgagtctcgagtctgtgaaaccaattctcgcgagtgggagattgtagccatggcaggagtatcgctcaagtgtggcgattgtnnnacnctgctgaagtccgtggaggaggctcaggagcacgctgagctcacctctcactccaatttcgccgagtccactgaggccgtgctcaatctcgtttgtactacttgcaccaagccttgtcgctcaaaaatcgaaagcgatttgcacacgaaaagaacagggcatactgagtttgtagataagacattggagacaatcaaacccatcagcttggaagctcctaaggttgccatggagattgatgataatgctagtggtagtggagaggctgcaaaagagatggttgttccaaacgttgacaataacattctccaggaacttg

SEQ ID NO: 154445 - DNA, 445 bp, Arabidopsis thaliana columbia
ggttagagcaaaacactgtctgaaacaaacaacaaaaaaatggcttgctctaatctaacagcggtgtgggtttcagcagggccggctctttctgctgattcatcttccttatcattccgatctgttctcaagtgcccaactaacacttcctcacctccttcacgagcttcctctgtttcaccactccaagcgtctcttcgtgagctcagagaccgtatcgattcagtcaaaaacactcaaaagatcaccgaagctatgaagcttgtcgctgcagctaaagtcaggagagctcaagaagctgttgtcaatggacgaccattctcagaaaccctagttgaagttctttacaacatcaacgaacagcttcaaaccgatgatgtcgatgttcccttaaccaaagtcagaccggttaaaaaagtagctctcgttgtcgtcaccggtgatc

SEQ ID NO: 154446 - DNA, 479 bp, Arabidopsis thaliana columbia
ggcgcaaaaaaatggggaggaagcggaagcacagtgagactgaagctccggcgccggtgaaaaagagcgatgagcctgctccggatggggccggaaggactctattgggatggaaagataagagtgaaggtgaagctgagaaagctaaagctttgacttcatctggattcaagaacaaagagaaggttggtgacttgttctcgtcgtatcagtttcaggtatcggagtttgatgttgaacattgtttcacttctaccacactgtaagaaagacagtaaagttgaagcaaagagtagcaaacgcgcgactttgaatgagctcattgagcttaagaattctaattcctgcttgttcttcgagtgtaggaaacataaagatctttacatgtggatggtcaaatcccctaatggaccatctgtgaaatttttggtaaagctgtgcacgcaatggaagagatgaaactcacttgaaattatttt

SEQ ID NO: 154447 - DNA, 364 bp, Arabidopsis thaliana columbia
acgctctgactaacattcttcttcacttatctcccatctttctctcttcaataataataaacatgggtctcaccgacgtagtgatgtgcttgttcactctctatttcatcaacctatggtggcgccggtacttttccgccggaagcagccagtgtagcttgaacattccaccttgaccaaaaggatggccactagtcggaaacctactccaagtcatattccaacgtcgccatttcgtcttcttaatgcgtgacctacgtaaaaagtatggtccaatattcaccatgcagatgggacaacgtacgatgattatcatgacggacgaaaaactcattcaccaggcactagtccaacgcggccctac

SEQ ID NO: 154448 - DNA, 423 bp, Arabidopsis thaliana columbia
  unsure (1)..(423): unsure at all n locations
aaaaccgggccggcccacacatccgctcttcttcaatcaaatcttcaaatcctttctaagatgccttcaatgccanaagagcggctcgtaacaccaaccccgggcgggtgctgtatnttcccaattcactacccacagatctgggaaatgtacaaaaaagccgaagcatcattctggaccgccgaagaagtatatctatcacaagacaaccgcgactgggaaaacagtctcaacgacggtgaacgtcacttcatcaaacacgtcctcgctttcttcgctgcatctgacggaatcgtactagagaatctcgcttctcgcttcatgtccgatgttcaagtctctgaagcgcgtgctttctacggtttccagatcgcgattgaaaacatccactcggagatgtatagtctccttttcgatacttat

SEQ ID NO: 154449 - DNA, 268 bp, Arabidopsis thaliana columbia
  unsure (1)..(268): unsure at all n locations
acgcggacgcgtggggtttcaagggttttcgtttttatcttttcctccgaagaaaaaaataagctgttgaagaaaaagaagatgccgtgtccanttattgaggaagtgaatgaggaggctcttatggatgccattaaagagcagatgaagctccagaaggagaacgatgttgtttttgatgatgtgaaagatggagacaaaaacgatgatgattttgatgactactactattagattgtttatggaactgtttagaattatgcttcca

SEQ ID NO: 154450 - DNA, 423 bp, Arabidopsis thaliana columbia
cgctgatagagagtagagagacacacgcagattttgagctgcgtgctctgttttaagcttgggggaggaaaaacatggcggacggggagtcagataagaacattgagatttggaagattaagaagctaatcaaaggacttgaaaccgcaagaggtaatggaacaagtatgatctctcttataatgcctcctagagatcaagtagctcgtgtcactaagatgcttgctgatgaatacggaaccgcctcaaacatcaagagtcgagtgaatcgtcaatctgttttatctgccattacttctgctcaacaaagattgaagctttacaacaaagttcctccgaatggtcttgttctctatactggaaccattgttactgatgatgggaaagagaaaaaagtgacgattgatttcgagccttttaaac

SEQ ID NO: 154451 - DNA, 438 bp, Arabidopsis thaliana columbia
attcgaagaataaaagataagaactttgacgttttgaagcttaaagcttgaaacttgtttcgtgcatggcggctcgtagggtggcttctcttttatctcgatctttttcagcttcctctcccttactgtttcgttctcaagggagaaattgttacaatggagggatcttaaggagatttggaacctcttctgctgctgctgaggaaatcataaacccatctgttcaagtttctcacacacagctcctcatcaatgggaactttgttgactctgcttctggtaagacgtttccgactcttgatccgaggacaggcgaagtcattgctcatgtagctgaaggcgatgctgaagatatcaatcgagctgtgaaagctgcaaggacggcctttgatgaatgaccttggcctaaaatgagtgcttatgaaaggtcaagagttt

SEQ ID NO: 154452 - DNA, 465 bp, Arabidopsis thaliana columbia
  unsure (1)..(465): unsure at all n locations
aatgctactaacggtgacggagggtttagtttccctaaaggaccggtgatgccgaaggtaacgaccggagcagcaggggggggtagcgnantctgccacgacgatagtggtccgacggtgaatgccacaaccatcgatgagcttcattcgttacagaagaaacgttctgctcctaccacaccgatcaaccaaaacgccgccgctgcttttgccgccgtctccgaggaggagcgtcagaagattcagcttcaatctatcagtgcatcgttagcatcgttaacgagagagtcaggaccaaaagtggtgagaggagatccggcgganaaaaaaaccgatggttcaactactccggcgtacgctcacggccaacatcattctatcttttctccggctactggtgctgtcagtgatagctccttgaagtttactcacgtcctctacaatctttcgcctgcagagctttat

SEQ ID NO: 154453 - DNA, 239 bp, Arabidopsis thaliana columbia
aggaacggggtggcgttattaaaaaagagcacaagaagaacaaagaaaaaacaacatcgcaagagacaacgcgtaaaacacttattaaagatcaccatttaccataggcatgaatagacctcatatgaaaaatttaaaaaatagatttgataacttattagatgcatggaattaaggattaagagctccatcatcaattggattaaggacgaacattcaccccaattttgtggatcatg

SEQ ID NO: 154454 - DNA, 314 bp, Arabidopsis thaliana columbia
acggagcttccctttctcaatatcgcttgcttgttaaggagcagcgactgatgctcaaagtgggggcactgagaaccagcggggcggtattgtttttccgaaaggaaatcctattcctagtgtcaaggctctaacattttatcgttctggaacattctctattgatgtgcattacagtgatgtgaacgatttgcaagcacctcctaaaatcagcacatacacgattggtcccttccagtcatcaaaaggcgagagggcaaagctgaaagtgaaagttagattgaacctgcatggaattgtctctgttgaatcag

SEQ ID NO: 154455 - DNA, 300 bp, Arabidopsis thaliana columbia
caaggcttttatatccttaacacgattattgataatctggactacagtgtgattgcgccttggatgaaaggtgtgtggggtgggctattcacacgcgttcaaaacaaaaagacagtcaagttccagaagtcgctagtaatattcatgtcgcttttcttggtgaagcatgtacaggcttatctagtggagactatgaatactgttcagccaaacatcatcactgctatcgtggagcatttctggattccgaacctgaaactgatcatggggagtatggaggtcaagttaacggcagttgct

SEQ ID NO: 154456 - DNA, 401 bp, Arabidopsis thaliana columbia
aaaatgaaaagaaagattgtcaacccacggattattcttcttgactgtcctcttgagtacaagaaaggtgaaaatgaaacgcaatgctgagttggttagagaagaggactgggaagtgttgttgaagttggaagaggaatatatcgagaacatttgcgttcaaatactaaagttcaagcctgatttggttatcacagagaagggtcttagtgacttggcctgtcactatttcagtaaagctggggtaagtgcaatccgaaggttgagaaaaactgacaacaacagaatcgccaaggcttgtggagcagtaattgtgaacaggcccgacgaactgcaagagtctgatatcggtactggggctggcttgtttgaggtcaagaaaatttgagatgatttctttt

SEQ ID NO: 154457 - DNA, 367 bp, Arabidopsis thaliana columbia
  unsure (1)..(367): unsure at all n locations
gcgatttatcacattttcgtagccgcaagactcctttcatattcttacttgcaactatgggtaaagagaggtttcacattaacgtttgtgtgattgntcatnttgattctggaaaatcgaccacaactggtcacttgatctataagcttggtggtattgacaagcgtgtcatttatattttcgagaaggaggctgctgagatgaacaagaggtccttcaagtacgcatgggtgttggacaaacttaatgccgagcgtgagctttgtattaccatcgatattgctctatggaagttcgataccaccaantactactgcacaggcgttgatgccccangacattcttatttcatcaagaacattattac

SEQ ID NO: 154458 - DNA, 423 bp, Arabidopsis thaliana columbia
  unsure (1)..(423): unsure at all n locations
ggaanacccgggtcgggccgcgcgtgacaaaaaatctttttaaagagctttgaagatccatggcgatgtctcatgtccagcctatnctacgcctggtcatatcactctgcttggtacgggctttacatgacaccataaatttcgaatactgcgccaaaaatggaaacgattacggaaccgtcactagcattgtggtctctccatctgttgggcctcacgaaaacccaaccatcactataaatttattcggttctgcaagcaaaaacatccccgcgggaacccttgtgtacgtagcctttaaagatggggaatttaccggccttttaaaaacttacaacctttgtgatgtgagtgcatgtaacaatgaagctgaaattgaagctggcaccaactttgagttaactctttccgacgttctttatg

SEQ ID NO: 154459 - DNA, 408 bp, Arabidopsis thaliana columbia
cgcgtacgtatgtgtatggagtgcttgtatttgaagccatggccacatttatcggtcaagtctccgttgtctcggttattactctcgtttgaggcgccacaactgccttgataacaacggctaggaaaggggttacattgttgctgtcgtatttgatattcacaaagccgttaacggaacatcacggatcaggcttgctgttgatagcaatggggattgtattgaagatggttccaatggatagtaaagctccggccaagattccggcgagaccagcggttaggatcgcaagaggcgatggtgatagaaaaaaggacgaagaaagggagtcattggtttgagaatttgccatgtatttatatatatttaatctcacaatatcaaaaggttttatataataatgtttga

SEQ ID NO: 154460 - DNA, 283 bp, Arabidopsis thaliana columbia
  unsure (1)..(283): unsure at all n locations
acacgatttagttttttgaaaccctaagctcgatttcgatcctccggcatactcnatttggcctgcgaatctatactggtctgccgtgttactattcaatcnncnagaatgtcgatgtctaagagttcaaagatgcttcagttcatcaactacaggatgcgagtgactattcttttctgaagacatctcgataggaagttcatgtcctttgaccgtcacatgaactcttttctcacctattgctattattttttatagcttccaccaactaaatggaataata

SEQ ID NO: 154461 - DNA, 379 bp, Arabidopsis thaliana columbia
acgatttcttgttctttggacgaccatcgtcgacattgttaagtctagagtcttcttcttgttcggcgtaattttttgccccgctgggaaaatggatctatccttcggaaagttgttcagcaagctctttgcaaagaaagagatgcgtatcctcatggtgggtctcgatgcatctggtaagactacgatcttgtacaagctcaagcttggagagatcgtgactacgattccaaccattggtttcaatgtggagactgtggaatacaagaacattagctttaccgtgtgggatgtctggggtcaagacaagattcgtgcattgtggaagcactacttccagaacactcaaggacttatctttgtggtggacagcaatgat

SEQ ID NO: 154462 - DNA, 442 bp, Arabidopsis thaliana columbia
gcggaagaacaagatgccaagacatttgcctcatgggtatgtatatttgtatgtgttatgtctgaactggtgtcctgaaccttgaaggtgtgcgttttcgttatcatgtattcgacaggggattgattacctcaagtatgataactgcgaaaatacagggacaagtccaagagaaagataccctaagatgagtaaagcgctgttaaattcaggaagatccatattcttctctctgtgcgaatggtaaaaaagactaattaagaagaagattcacttattcagacaactatggtctgatgatactaaacaagaaattgactggtaagtgcaagggacaagaggatccagcaacttgggcaggagatattggcaacagttggagaacaacaagagatatccaagataattggaaaaggtttcttttctttgatggttttttccc

SEQ ID NO: 154463 - DNA, 379 bp, Arabidopsis thaliana columbia
  unsure (1)..(379): unsure at all n locations
ggtgctttcaggtttcaccagtaccaggttgtgggaagagctctcccgacaganaagggtgggcagcctaagatggacggggtgaagctctgggctacnaacgaggttcgtgccaagtccaagttctggtatttcttgaggaagctcaagaaggtgaagaagagtaatggacagatgctcgccatcaacgagatctatgagaagaacccaacaacgatcaagaacttcggtatttggttgaggtaccagagtagaactgggtaccacaacatgtacaaggagtaccgtgacaccactcttaacggagctggtggggggatgtacactgagatggcattccgacaccgggtcagattcccttgcatttataatcattaag

SEQ ID NO: 154464 - DNA, 344 bp, Arabidopsis thaliana columbia
  unsure (1)..(344): unsure at all n locations
aactaatcttaaagatgtaacctaaaataactaaacaatttaagtcgngtacccngttgttcatctaaaaaatcagcgtgagctgttccaacaaggcaacatatggtgtcacttgctagtgatactggtggaagtgtgagacatccagcttcgttttgtggtgttttttgtcttaagccgacttatggacgtgtttttaggtttgggcttatggcttatgcgtattcattggatgtgattgggtgttttgggttctaccgttgcttatacttttatgcatctttattctatttaaattattggtgggtggggggggggggtggacattcaaaatttactttttt

SEQ ID NO: 154465 - DNA, 425 bp, Arabidopsis thaliana columbia
  unsure (1)..(425): unsure at all n locations
gcggtttttattttattttgatcggagatcgagatcagctagacatggctcctgccatgaanatgggctgcggtctattgacggttggcactgtcnnaatggtcatcggttccttgttacaattggcctttattaatagattggaagattcgtacggaactggatttccgtctctaagaggacttcgaggacagaacacccgctatctacgagatgtctcccggtgggcaaatgacaaagatgcagaattgttacggattggcaatgtcaagcctgaagtagtcagttggtcccctcgaattattgtgcttcatgactttgtcagtccggaggaatgtgaatacctaaaaacaatcgcccggcctcgcctttaagtttccactgttgttgatgtaaaaaccggaaagggagttaaagtgacgtga

SEQ ID NO: 154466 - DNA, 140 bp, Arabidopsis thaliana columbia
acgataagactaggcaaagctctttacaattctttccacaggaccgcaaagcctacattgcttagtgttatttttagaccgtgtgagatgattactcgtttataaagatcatgaattgaataagataagatcaatcatgg

SEQ ID NO: 154467 - DNA, 426 bp, Arabidopsis thaliana columbia
cgatgatttgctcgcacctgttttgagggctttgatagagaagacgaatctaaacccaagtggggtaggtgacattgttgtgggtgctggtttggcacctggatctcagagagccagtgaatgcaggatggctgcgttctatgctggtttccctgaaaccgtggctgtcagaactgtgaatagacagtgctcatctgggcttcaggctgttgctgatgtagccgctgccattaaagcgggattttatgacattggtatcggggctggtttggagtccatgactaccaatccaatggcatgggaagggtcagtcaacccagcggtgaataaatttgcacaagcgcagaattgtcttcttcctatgggtgttacgtcagaaaatgtagcacaacgctttggtgtctcaaggcaggagcaagatcaagc

SEQ ID NO: 154468 - DNA, 431 bp, Arabidopsis thaliana columbia; identical to SEQ ID NO: 131028
  unsure (1)..(431): unsure at all n locations

SEQ ID NO: 154469 - DNA, 428 bp, Arabidopsis thaliana columbia
  unsure (1)..(428): unsure at all n locations
acgctctttaaaagaaattcgtaagtactatcaagaagcagaagatggcccaaaaggtggaagcagaaggagggaaaggagccgacgggatgggacnatggatcgacacatgacgccgtgaccaagattcagctcgcagcaggcatagacggaattcaatatgttcagtttgattatgtcaagaacggacaacccgaacaagctcctcttcgtggtaccaaaggccgtgttctcccagctgatccgtttgtgattaaccatccagacgaacatctagtttctgtagaaggttggtatagccctgaaggtatcattcaaggaattaagttcatctccaacaagaagacttctgatgtcattggatccgatgagggtactcacttcactctacaagttaaagacaagaagatcattggctttcatgggtc

SEQ ID NO: 154470 - DNA, 440 bp, Arabidopsis thaliana columbia
gagcattcgaaaagttcgccggaaaaacaaaaacatgccgacgaacaacactccgttcctcggtatttttctcctgtttggggggttactccggttcgattcatttcccggtttagaagctgcaaccgggaaattagcttcgattccaggattatacgtgttcggagattcgttagttgatgccggcaacaataattacttaccaatttcaatatctaaagctaattatccacataacggcgtcgattttccgaacaagaaacctaccggaagattctgtaacggcaagaacgccgccgatgctatcgctgagaaatttggtttacccgtaccacctccctatctctcacttagaggcttactaaaaagggagaagagaaaatctgccgccgtgactggtgtgaatattgctttcggtggagccggaatcttcaacagtt

SEQ ID NO: 154471 - DNA, 375 bp, Arabidopsis thaliana columbia
tttactgtgagtctctcaaagaaaccaaaggcagagaaaagagataacacacacaaaggaaagtggcatcaacctggctgggcaaggcttctccggtgttggacaaatccgaatgggtcaagggacaaagcgttctcttccgtcagccttcttccgcttctgtcgtcctccgcaaccgtgccacctccctcaccgtccgtgccgcttcctcctacgccgatgagcttgttaagacagcgaaaactattgcgtctcccggacgtggaatcttggcgatggacgagtcaaacgcgacttgcgggaaacgtttggattcgatagggctagagaacactgaggcaaatcgtcaagctttccggactttgctggtctctg

SEQ ID NO: 154472 - DNA, 469 bp, Arabidopsis thaliana columbia
  unsure (1)..(469): unsure at all n locations
gcgaatcaagaattaccaaacannaaaatggttttgcaataagctttctctctcaattgggcatgcattttgactccgtgacggatcataacacctatggcgagcgagagtgcannnatagacaactgttttgcccnngccgtcgaacaaaacctaagctcgggcaatgtttcctctgaaggtgtttttattttggcgacggctacctgcggcatactcaggtcgaagggtgccgattaaattgaaactttgtcgtggaccaagccttatgggacaatctacttgtagaagatatcctagagaggtgcaataacgataacggcgatgtggccgttgatttcttccatcgttataaggaagatatccaactaatgaagaatctaaacacagacgcctttagaatgtctatcgcatggccaagaatatttcctcatgggagaaaggagaaaggagtgagtcaagctggtgt

SEQ ID NO: 154473 - DNA, 381 bp, Arabidopsis thaliana columbia
  unsure (1)..(381): unsure at all n locations
acggtaaattcctcgaccgagaaagataacatggtatatcatcaagacatcggtgaatctgaatgggtcgacactacagaggggggggtanatgacnacaaagtggttgtcaaagaagagagaggagacagtgaaaaagaagaagaaggtgaaaccggagatctcataagcgagaagacagattcagttgatattcataagaaagaagatgagactaaaccgattaataaatcatccgggatcaagaacgtgtctggtaacaaaactagtcgaaagaaggtggattggacaccagagctgcacaagaagtttgtgcaagcagttgaccaactcggcgttgatcaagcgataccttcgcggattcttgagttgatgaaagta

SEQ ID NO: 154474 - DNA, 409 bp, Arabidopsis thaliana columbia
gtccattacaaacaacaacagcatcataaatctcatcacgacgaactttcttctctttctccggcgattcaatcgtccggttcgcgattccttcctccgccgccggagaaaccttcacaacctccgtctcaaacctaaccatctcctcaatcccaaactccttagcgaaatctttcaaatacgccaaaacttcgccatgactcggaaacctcctcggatctctagacacaccggaacgaaccacgaacgggaaatctctgtatccggtacactctcgtgtaccgttgattcgtagagatctatagacgcttgaatgaacaacggatcgggtcgggtcaacacttaacggatccgattcgacttcatcggtgtagatccaggttcctccgacttgtttttgtttctcgaa

SEQ ID NO: 154475 - DNA, 440 bp, Arabidopsis thaliana columbia
cggacgcgtgggtcacaccctaaaactcagcaacaatggccgttaccttttcagatctacacacagaggagggtgtcaggtccgtggaggagcacctcgccggaaaaacctacatctccggagatcaattgtctgtggatgatgtcaaggtttacgctgccgttccagtgaaacccagcgatgccttccccaatgctagcaagtggtacgagtccgtggcttcccaacttgctaaaagtttccctggaaaggccgttggagtacaattcggtggctctgctgctgctgctccagctgttgaagctgaggcacctgcagctgcagctgatgatgatgatgacatggatctctttggtgacgagaccgaagaagaaaagaaagcttcagaggaaagggaggctgctaagaaggacaccaagaagcctaaagagagtggaaag

SEQ ID NO: 154476 - DNA, 453 bp, Arabidopsis thaliana columbia
  unsure (1)..(453): unsure at all n locations
ggaanacccgggacggcgcccgcgtgcgagagactaaaatggtttcgttgaagctccataatcgtctcgcatcctcagtactcaantgcgggaagggaaaaatatggcggggcgccggcgaangaagtgatatctccatggccaattcgcgtcaaaacatcaggaagcttgtgaaggatggattcatcatcaggaagccaacgaagatccactcacgatccagggcacgtcaattgaatatagccaagagaaagggacgtcactctggttatggtaagaggaagggtacccgagaggcaaggttgccaacaaaagttttgtggatgaggaggatgagagtgctgaagcgtctgttgaaaaagtatatggagaccaagaagattgacagacatatgtaccatgacatgtacatgaaagtcaagggaaacgtcttcaaaaacaagcgtgtgttga

SEQ ID NO: 154477 - DNA, 405 bp, Arabidopsis thaliana columbia
  unsure (1)..(405): unsure at all n locations
atcctccgcaatttcgcaattttgtgaaggagccgccggctaaatttgatggcagaccaaaggtcggagatcgtcaatgctctgtgcggggagatggaagctgtttccgtttcatcaactcangcatcttcttcgtccgatggattccagatgagtgaagaagttgagaagagatacaaaattgttaggagtatcggtgaggaatgtatacaagaggaagagctaaagaatcttcttgctaagaaagctgctccgatttgctacgacggctttgaaccatcaggaagaatgcacattgctcanggagtgatgaaagtcatcaatgtgaacaaaatgacttcaactggttgcagagtgaagatttggattgctgattggtttgctcagttgaacaacaaaatgggt

SEQ ID NO: 154478 - DNA, 466 bp, Arabidopsis thaliana columbia
  unsure (1)..(466): unsure at all n locations
cacgcgtgccaaaaaccaaaattcactgccaaaaaaaacacatcaaaacgatgccgtcngaagcggaaagctgaggggattcaactccggcaggtccggcaccaccaccgaatttctggggaaccatgccggaggaagagtactacacttcacaaggagtacgtaacagcaaatcatacttcgaaacaccaaacggcaagctcttcactcagagcttcttaccattagatggtgaaatcaaaggcactgtgtacatgtctcatggatacggatccgatacaagctggatgtttcagaagatctgtatgagtttctctagttggggttacgctgttttcgccgccgatcttctcggtcacggccgttccgatggtatccgctgctacatgggtgatatggagaaagttgcagcaacatcattggctttcttcaagcatgttcgttgtagtgatccatataaagatct

SEQ ID NO: 154479 - DNA, 335 bp, Arabidopsis thaliana columbia
  unsure (1)..(335): unsure at all n locations
agtctctcaaagaaaccaaatgcttataaaagagataacacacacaaaaaaagggggcgtcaacatcactggtcggggctggtccantattnnacaaatccnaatgggtcaagggacaaagcgttctcttccgtcagccttcttccgcttctgtcgtcctcctcaaccttgccacctccctcaccgtccgtgccgcttcctcctacgccgatgagcttgttaagacagcgaaaactattgcgtctcccggacgtggaatcttggcgatggacgagtcaaacgcgacttgctggaaacctttggattcgatagggctagaaaacactgaagcaaat

SEQ ID NO: 154480 - DNA, 396 bp, Arabidopsis thaliana columbia
  unsure (1)..(396): unsure at all n locations
cgcgtccgctatctcttcctctctctcaaacgagatttcctcttcatctcaagagaaatggctnaatccaagggggtggttccagaggctgggctggggaagatcaagaggcaagaggaatgggcattggccaagaaagatgaagctgtagctgctaagaagaagagtgttgaggcccgcatgcttatcttcaagagagctgagcagtatgccaaagaatacgctgagaaggataacgagttgatccgattgaagcgggaggctaagttgaaaggaggtttctacgttgaccctgaggctaagttgctctttatcattcgtatccgtggtatcaatgccattgacccaaaaaccaagaagattctgcagctcctgcgtttgagacagatcttcaat

SEQ ID NO: 154481 - DNA, 463 bp, Arabidopsis thaliana columbia
acaccctaatcctctctgaaaccctagacatcgcatctgaaaatgaccggagaagtcgtcaacccgaaagcgtatccgcttgcgggtgctcagttatcgataacaattcttgacctcgttcaacaagctactaactacaagcagctcaagaagggtgctaatgaagctacgaatactcttaatcgtggaatctccgagtttgttgtcatggctgcagatgctgagcctctagagattcttcttcatcttcccctacttgctgaggataagaatgttccttatgtctttgtgccttcaaagcaagccttgggaagagcctgtggtgtgactagacctgttatcgcttgttcagtcacatctaacgaagctagtcaattgaaatcacagattcaacatcttaaggatgctattgagaagcttctgatctaagcattctctgaattgattgctcggtatgatgggt

SEQ ID NO: 154482 - DNA, 465 bp, Arabidopsis thaliana columbia
acgcttatcttctttgctcagaaacttctctcatgttaattcaagtttcatagttttggtgtagtgtttgtacaccgatctggctcgttagttgaaacttatcagaatggctcgtccacaagaccctccacgtggtttcttcccttttggaaaccccttcaaaaatctatcttctaagaactcggtactctcctcaaagcttctcccactcctgaacaattttgagaccaacttagcatcttctattagtaagcttgtccctaaggaaaagagcgatatcctgactgtctcatggatgaaacaagctatggaatctctttgcgagacacataatggtatcaagacccttataaccgatcttgagcttcctgtatcaaattgggaggataaatgggttgatgtctatcttgacattagtgtgaaacttcttgatctctcaaatcctttaactctgagctacccttc

SEQ ID NO: 154483 - DNA, 454 bp, Arabidopsis thaliana columbia
acggaaaatctgaaactctgcgttcgaattttcttagaacattagagatctggtattatctgggtgcgatctgttcacgcatggggtgtaagaagacagaatcaaccaacaagaatgttaagaaggccaatctattggaccaccactcgatcaagcacatccttgacgaatccgtctccgatgtaagaattttctaagattttccttgttcgttgctccatatttctctgatatgtgaatctatgattcgtagatcgttacgagccgtggctataaggaggatgtgagattgagcaacctcaaactgattttgggaacgattatcatcgttgttgctcttgttgctcaattctacaacaagaaattccctgagaacaaggattttttgattggatgcatcgcattatatccttttttctcgaattcaattgatactttctgctttctgcttgac

SEQ ID NO: 154484 - DNA, 270 bp, Arabidopsis thaliana columbia
cacaacttgtaacttcaaatagattactttcaaagaagagagagagaaagaaagatggagaggaacatgaagtttccagtggtggacttgtccaagctcaatggggaagagagagaccaaaccatggctctaatcaatgaagcttgtgagaattggggcttctttgagatagtgaaccatggattaccacatgacttaatggacaagatcgagaagatgacaaaggaccattacaagacatgccaagaacaaaagttcaatgacatgctc

SEQ ID NO: 154485 - DNA, 275 bp, Arabidopsis thaliana columbia
ctctttccctaaacacactgattattttctatccgacgccgccatgtctctgctctcagatgtcgttaacctcaacctgagcgatgccaccgtgaaaatcatcgccgaatacatatggatcggtggatctggaatggatatcagaagcaaagccaggacactaccaggaccagtgactgatccatcaaagcttcccaagtggaactacgacggatccagcaccggtcaggctgctggagaagacagtgaaatcattctataccctcaagcaatat

SEQ ID NO: 154486 - DNA, 403 bp, Arabidopsis thaliana columbia
gcggtcaaatttgacattgatgccaatggaattctatctgtcagtgctgttgacaagggcacaggaaaggggcaagacatcaggatgggtggcgcaagtacattgcccaaggatgaggtagaccaaatggtccacgaggcagaaagatttgcaaaagatgacaaagagaagagagacgcattcgacacgaaaaaccaagcagattcagtggtgtaccatacagagaagcaactgaaagaactaggagagaaaattccaggtgaagtgaaaagagatgtggaggctaagctacaagagctgaaaacaagataggagtggatcaacccagaatcaaaacccatgctgctttacaaaaggatcaattgcagcttatcaccagctgactgagtcagtcagtctcacg

SEQ ID NO: 154487 - DNA, 413 bp, Arabidopsis thaliana columbia
  unsure (1)..(413): unsure at all n locations
gaaaccgtcttattcctccttcaatctatcttgttcgtatcatctgctctgcgatttcaatggcgagcctttgattgagaccttgggtgtatccttagttcgctgctaccggagttgccgttgggatctatgcgttttccttgatcagaaacatcaccggaaaccctgaagtcagatgcaccaaggagaacagggctgctggaattttggataaccatgcagagggagagaagtataaggaaaattttctgaggaagtttgttcgcaacaagaaacctgaaatcatgcctggactcaacaagntcttcactgatcctacatactgaaaccatcttntcacaccgctttgtcatattagtttctggaattgaatttcttttgtgatattaaaccggatttgtcaaatttcacat

SEQ ID NO: 154488 - DNA, 228 bp, Arabidopsis thaliana columbia
  unsure (1)..(228): unsure at all n locations
ccgggacggcgccacgcgtccgaaagcttttaacctcanccgttaaatctttctccgatcatgccgaccagaaacatcnccattggtggggtccaagaagaggtctgtcacgccaacacacttatggcggcgctcgctgagtttatctcgactttgatcttcgtcttcgccggctcaggctccggaattgctttcaacaagatcactgacaatggagcaaccactcct

SEQ ID NO: 154489 - DNA, 337 bp, Arabidopsis thaliana columbia
  unsure (1)..(337): unsure at all n locations
ctctttccctaaacacactaattattttctatccgacaccnccatattatnacaactacttctgtgaaacttgaaacgggggggtagtccactacacttttaaattcatcatgaaaaatggtggcttaaacactgtgaaatattatccttaccctggatactgccaaaaccacaatcctatctatcaaaactctacaattgtgagtattgatgggtacgaacatgttcctactaaagacgagactgcgttgaaaaaagctattttataccaaccggttagtgtacctattgaagccggtcgaagaatttttcaacattaccaatcaggtatttttac

SEQ ID NO: 154490 - DNA, 372 bp, Arabidopsis thaliana columbia
  unsure (1)..(372): unsure at all n locations
agatgatttaccgaaagtggagtttgctgtccggcccaccggttatcctcngcggagcggtggttgctgccggcgccggcggattcgtcttgcaaaacgtaacgaaaggggagcagaagaagaatgtctcaacaaacaagtgagaagacaaatggagagatgctacaaaatgtggtgatcatgtgatttgatacaatttagttcttgcagtgtataagctcaataatgcttttgtaagcttttgaatacacagatctttgtggtgtttttagattcttgttactaataatgatatttcattttccgaaagagttgtttatttttataaaataataatttgattttataaatttttttatattgtttgtttat

SEQ ID NO: 154491 - DNA, 387 bp, Arabidopsis thaliana columbia
  unsure (1)..(387): unsure at all n locations
aaaaaaaagaaaacacaaaaacaaagattataatggcttcctcaaccatggctttgtcctcccctgccttcgccggaaagggtgggaagcctgccncatcaaatgtcctcggaagcggccgtgtgaccatgaggaagactgtcgccaagccaaagggtccatcaggcagcccatggtacggatctgaccgagtcaagtacttgggtccattctccggcgagcccccgagctaccttaccggtgagttccccggtgactacggatgggacaccgctggtctatccgccgacccagagaccttcgccaggaaccgtgagctagaagttatccacagcagatgggccatgctcggagccctangctgcgttttccctgagctattggcta

SEQ ID NO: 154492 - DNA, 361 bp, Arabidopsis thaliana columbia
acaattcttaagctagttttatacttttcttcttcctttcatttgggttaagagaagccatgggtggcgagtttctccgaaccctagatcgtcagattcttttgggtgtcttcgttgctttcgtcgccgttggtgctggtgctgcttattttcttacatcctccaagaaacgcagagtgtgtttggatccagagaatttcaaggagttcaagcttgttaagagacatcagcttagtcacaatgtggccaagttcgtttttgaactcccaacttctacttctgtgttgggtctttccattggacaacacattatttgcaggttaaaggatggtcaaggagaggatgttattaagccatacac

SEQ ID NO: 154493 - DNA, 231 bp, Arabidopsis thaliana columbia
  unsure (1)..(231): unsure at all n locations
atccatatcaccgatgatgcctcgccgtgacgtcctcttcctctcactcctcctcgggatcgccaccgtctccgctggggcattagccnacnatgaagcagattgtgtctacacattcttccttagaaccggatcaaccttcaaagccggtacagattcgatcataagcgctagagtctacgacaaatacggagactacatcgggatccgaaacctagaagcatggggtgg

SEQ ID NO: 154494 - DNA, 207 bp, Arabidopsis thaliana columbia
  unsure (1)..(207): unsure at all n locations
atcggccgttgcatttcccggcgataagagttttaaagtttagaaagagtgagccagatcttcatcgtcgtggttcttgatagttgcgcgagctctcnatcttctgcttttgcttttccgattaagatcgtagaccatggccgatgctgatgacattcaacctattgtctgtgacaatggtactggaatggttaacgctggattctc

SEQ ID NO: 154495 - DNA, 325 bp, Arabidopsis thaliana columbia
  unsure (1)..(325): unsure at all n locations
cgtccgacaattccaaatctctcttccattttctccacacaaatttctcttcaatctcccataatggggggaaccgccgttgtggcggggtacggtaacggtgcgataacggaggcgaagaaatctcccttctccgtgaaggtcggtttggctcagatgctccgtggtggtgttatcatggatgtcgtcaacgccgagcaagctcgtatcgncgaggaggctggtgcttgcgccgtcatggctttggagcgtgttcctgctgatatccgcgctcaaggaggcgtcgctcgtatgagcgatccacaaatgatttaagaaattaaac

SEQ ID NO: 154496 - DNA, 314 bp, Arabidopsis thaliana columbia
ggccggccacgcgtccaataactctttcctctgttcatcatgatggtacattgcataccatttcaggcagcaccacaatgcttcaagtgactaaaaaggagggagagtttttgttttctgatataccaaaaagacctgttccatccctatttaggggattcagtgccccagttcgtgttgaaactgatctctctaatgatgacttattcttcctcctagcacatgattcagatgaattcaataggtgggaggccggtcaagtttctggcaagaaagctgatgctgaacttaatttctgattttcagcaaaaata

SEQ ID NO: 154497 - DNA, 460 bp, Arabidopsis thaliana columbia
gaaactttggtttaagcttgttgaggcaacattctcaagaatcctgataagctttctgttttggcccattgcaacactggcggccgggctaccaccttatatggtactgccctccgtgtcatccgtgcactccatactcaaggaatcttagaaagagcatactgcacagaaactcgtccatttaatcaaggatcgaggcttacagcgtttgagttggtgcatgagaaaatccctgcaactctcattgcagactcagctgcagctgcactgatgaaagatggtcgtgttgatggtgtcatccttggagctgatcgtgtggcttcaaatggcgatacttctaacaagaatgggacttacaatctcgccttgtgcgcaaaacatcacgggatcccattttatgttgctgcaccttttacctccaatgatctgtcactttcatccgggatagaaatccttttat

SEQ ID NO: 154498 - DNA, 376 bp, Arabidopsis thaliana columbia
  unsure (1)..(376): unsure at all n locations
acgccgaagccgaaaaaatgccggcggtttaagagtactcccaaggttaaccgtaaccctgacctagtcangctagttggaaggtgtgggaggtctcacatgtaccacaagagaggtttgtgggctatcaaggccaagaacggtggcgttttccctcgtcacgatgctcatccaaaggtcgacgctccggttgagaagcctgccaagttttatccggcggaagacgttaagaagccgcttgttaacagacgcaagcctaagcctaccaagctaaaagccagcatcactccaggaactgtgttgatcattcttgctggtagatacaagggttagagagttgtcttactcaagcaactttcttgtggtttgttttttg

SEQ ID NO: 154499 - DNA, 230 bp, Arabidopsis thaliana columbia
ctgattcaccaacatcctaaaacccttttgttcaaatctatggctaccatttccagaatcttaccaacggattacatattagagtggatggggactcaacaccttatgtgtctcttctacaaccagaactcaaactcacttatattctcccaagacaggttctgcatgtaactctggtataagtttgaggattcacaatacttaacctattatccctgtctttgctcttt

SEQ ID NO: 154500 - DNA, 453 bp, Arabidopsis thaliana columbia
agaaaacatggctgcttggttggttggtatcaataccctcaagatccaaccttttcttgttccttccgttggtcctgatgaggtgagagttaggatgaaagctgttggtatttgtggaagtgatgttcattaccttaagaccatgagatgtgcggattttgtggtgaaagagccgatggtgattggacatgaatgtgctgggatcattgaagaagtaggtgaagaagtgaaacatttagtggttggtgaccgtgtagctcttgaacctgggattagttgttggagatgcaatctctgcagggaaggacgatacaacctttgtccagaaatgaagttctttgcaactccaccggttcatggctctttagctaaccaagtggtacaccctgcggacctatgcttcaaattgcctgagaatgtgagtttggaggaaggagcaatgtgtgaaccact

SEQ ID NO: 154501 - DNA, 256 bp, Arabidopsis thaliana columbia
ctcaagggaatggagaaaggaattgattacattatgggctcattggctgcaaatgacgggattgactggtttgattacagggagcaactgcagaaggcagaccaattgaaccttgaagtctactgatcaaaaagcctttgacatttctgtggcacagtatagctcaacaaaactgtaattctcgcttctgaatatctctattttgaagataaaagtcttagatatgttatactaaaaaaagagttcttttatctaa

SEQ ID NO: 154502 - DNA, 217 bp, Arabidopsis thaliana columbia
aaaaaaagatgcagatcttcttgaaaaccctatctgggaagacgatcactctcgaggtcgagggctcttacaccatcgacgaggtgaaggccaagatccaagacacggaatgaatcccacctgaccatcaaccattgattttccacggaaagcagctcgaatacggacgtaccttaaacgattacaacatccagaaggaatcaacgctttaccttgt

SEQ ID NO: 154503 - DNA, 209 bp, Arabidopsis thaliana columbia
cccacacgtacgtccaaatctctcttccattttttccatacaaatttctcttcaatctcccataatgggaggaaccatcgtggtggcggggtacggtaacagttcgataactgatgcgaaaaaatctcccttcttcgtgaaggtcggtttggctcagatgctccgtggtggttttatcatggatgtcgtcaacgccgagcaagctcgta

SEQ ID NO: 154504 - DNA, 378 bp, Arabidopsis thaliana columbia
ctgtatctgattcccttttttacggtagctgtatatttgagtagtgtaagcgtcgatgaagggggttacatcgtgtaggagtcgggccaaggatgattgggtggctgtagcgataactgacgacgatttggtcgttgagcttcttttacggctgaagcatgccggaacggtagtgtcggataatccggcggtgattctccctccgttgcggtggggaatccgtcaacgacggtctcgttcctcaagatttggtggctgcggctgctttctcgttttcttgaagaaagatgtcgattccgttagagccagtccgaagacttctttctcgtggagcggcggatctggaagtggtggcggcttttgtttttctttcgtcga

SEQ ID NO: 154505 - DNA, 392 bp, Arabidopsis thaliana columbia
cacataaccacttctgtctctgcgaatctccttatgactctttgagaagctttcctctgtttgtccgctggtaagctggcgttgtctctctctctctcgcttctcagatctgttccttaaacctttaatttctcaccgacgagtggatctgaatccacagttatgggtagctccggcgacgttaactggaaacttgcggaccaccccaagcttcccaaaggcaaaactatcggtttgattgttctcgatggatggggtgaatctgatcccgatcaatacaattgcatccataaagctccaacttctgccctggattcccttaaagacgggaagcccgacacatggaggttgatcaaagctcatggtaccgccgttggtttccccagcgaaga

SEQ ID NO: 154506 - DNA, 195 bp, Arabidopsis thaliana columbia
gctttcgacctctctcttctcattcctttgcttcttctcacttctcgaattccttctcttcagagatcataaatggctcaggtgggtgctaccaagtcaattcaaggctcgatgttatctcccaacggtggatctgtgtctacaagatccgagaagctattgaaaccagctagttttgcagtgaaagttcttggc

SEQ ID NO: 154507 - DNA, 354 bp, Arabidopsis thaliana columbia
cgaaaacgctagaacaataactttgatcgttcttcttcttctcttgaatcggaaacaatggcggatgaacataagcatgaagaatcttcacctaatttggatccagcagtggaggttgtagagagggaatcgttgatggagaagttatcggagaagatccatcacaaaggtgattcgtcgtcttcatcatcatcagatgacgaaaacgagaagaagtcttcgtcatcgtctccaaagtctttgaaatcgaaggtttatcgtttgttcggaagagagagacctgttcataaggttctcggcggcggaaaaccggcagatatatttatgtggaaggacaagaaaatgtcaggaggt

SEQ ID NO: 154508 - DNA, 301 bp, Arabidopsis thaliana columbia
cctttaactctctttctcttttcttacaaatccttctttacatctgggaggcggcttaactaagtggggcctctccatctaactctctcccaatcctcttccaccacctcctcatcaaaccgccggtttaccccctcttccaccgcccttccaatattcatggcccaatcttctaccttcgactttgttccctccttcccgctgtcatatttttctcctctctcgcaagagaatgcttcacaggccaaaactatgtcattttatcaaaccaccctccttttttaacctccaaatacttcgc

SEQ ID NO: 154509 - DNA, 395 bp, Arabidopsis thaliana columbia
gcgtacgcacttccttatcacaatgtcttcctctatctttcccctcctcacaaccgccatctgcgtcgcgatcctcctctggtgcgagcgtggccacaacggcgacaattccaaacatccaccgtccattcaacaaaatctacgccttcggagattctttcaccgacaccggaaactcacgctccggcgaaggaccagccggattcggacacttgtcaagtcctccatacggcatgactttcttccgacgaccaacaaaccgttactccgacggtcgtctaaccatcgacttcgtggcagagtcaatgaaattaccggttcttgcaccgtatcttaaccctaaaaccacttacgcttaccggacaacaacggatactcacggcggtaatttcgct

SEQ ID NO: 154510 - DNA, 294 bp, Arabidopsis thaliana columbia
  unsure (1)..(294): unsure at all n locations
aacagattctcataatcatctcttctttttttttctttacgaaaagaagaaagatcgaacctgccaagtttacacaagagggaaaaaagaacgatggctcttgtcaccttcttgtttattgctacccttggagcaatgacgncacatgtcaatggttacgccggaggaggttgggtcaacgcacacgccacattctacggtggtggtgatgcttccggcacaatgggaggggcttgtggatacggaaacctatattgccaaggctatgggaccaacactgcggctcttagcacg

SEQ ID NO: 154511 - DNA, 229 bp, Arabidopsis thaliana columbia
cacgcgaaaaactttcgcttcgctttaccccgggtgctattcctccacaggtttattcccagagcacattccggtctttcgtgcagcggggccggcctttcaaaaatacatcactaaaggatatgtctccgaaacagagtcaggcaaaagacttgctcaagtggtgagtgatccaagcttgaccaaatcaggggtttaatggagcttgaacaatgcttccgcttttttt

SEQ ID NO: 154512 - DNA, 242 bp, Arabidopsis thaliana columbia
gtctcttcgtatggtagcaccccgttgcttgatgcaccaagaaggtggtacattcgaggaactaccagcgtatgatctctctatgcaatcagataaggctgttattcttgaccatggcacagatgtatttatttggttgggagccgaactgtcagctgacgaggtgaagagtgctgcagtcttagcagcttgcagaacgttagctgaagagctaactgaattccgggtttcagctccacgta

SEQ ID NO: 154513 - DNA, 358 bp, Arabidopsis thaliana columbia
ctcaccaggaagaactctgtaacgggaatagtgtacagaaacgatcctacgattttcgcttgggagttgataaacgagcctcgatgcacgactgatgtctctggcaaaactctccaagattggatagacgaaatgacgggattcattaagtcaatcgatgacaagcatctcctcacagtaggtctggaaggcttctatggtcctaatagcccgaaagggctcacagttaatccagaacagtgggcatcccagctcggaacagactttgttcaaaactctaactcctcaaacatagattttgcatccgttcatatctaccctgatcactggtaagtgagctggatcagagaatcaagat

SEQ ID NO: 154514 - DNA, 258 bp, Arabidopsis thaliana columbia
aacttttgcttcgctttacctcagatgtatctctttcacaggattattcccacagcacattcgcggtcttccgtaaaagctggcggtgcctttcagaattacatcactaaatgatatgtctcccaaacagattcaagcaaaagacttgctcaactggtgagtgatccaagcttgactaaatcagtgttttattggagctggaacaatgctttagctttttttgagaaccagttatcagaagaagcaagtgactttttt

SEQ ID NO: 154515 - DNA, 181 bp, Arabidopsis thaliana columbia
acgaataaatttcttaagaaagcaaatctgaagatctcactttaaacacgaaggtggaaacatcggggaaggaccaccggaggaggcgctagagcacctaacgttcgtgagaattgcaacgatccatattctggcttccgactcaaatctctacaaatacgctaaacaaaacttcggtcct

SEQ ID NO: 154516 - DNA, 332 bp, Arabidopsis thaliana columbia
ccggacgagccacgcgtacggcacttctttcgtccagtcgatgatattaacgttggagaacgacggaggcaggcgaggttagggtttctaatgatttgggtgggttacacgcttatggcagtgaagaaagcctgcgaaatgttcccgaagagtttgatcgaagatgttcacaaacggggttgcatgaagcaaaccggtgttagccttagatacatgatggagtttggttccaaacctactgagaggaatcttttgatttctgctcagtttttgcataaggagcttccgattcgcgtcgccaggagagcgatcgaactccagacgctttctta

SEQ ID NO: 154517 - DNA, 245 bp, Arabidopsis thaliana columbia
  unsure (1)..(245): unsure at all n locations
aaaaaattgttatgcaaaaagatttgtttttttcattggtcttcttctactacacgcatttgggtcagcagagagagtggggtcggcagctcggcgattcaattctcagaagattatggctttcgctactggaatcacgacgtcttcaaatccaacttttcttggtctaaagatctccaacacaagtctacgttctgtggtttcatgtaattcgatttncgttccttctttgacatatgtgaaat

SEQ ID NO: 154518 - DNA, 291 bp, Arabidopsis thaliana columbia
gaagaaaagaagaagatgttagagtcggatctaacatttttccggagaggcaacctatcggaacttgggctcatagagacaaggggctggaatacccaccacctgctcctttgttcgagcccggcgatctagctatattgtccttcttgagagctgggattgctgagtttatatctacttttttgttcctgcacatcactgttttcactgttatggttgttaagaggtcacctaacatttgttctttcgacttaatccaagatttcactttgtctttctgaattaattatt

SEQ ID NO: 154519 - DNA, 359 bp, Arabidopsis thaliana columbia
ctttaatctttctcagcctcttcttgttcgtgatctctcttcctccggaaaaagatgtcggccggtaacggaaatgctactaacggtgacggagggtttagtttccctaaaggaccggtgatgccgaagataacgaccggagcagcaaagagaggtagcggagtctgccacgacgatagtggtccgacggtgaatgccacaaccatcgatgagcttcattcgttacagaagaaacgttctgctcctaccacaccgatcaaccaaaacgccgccgctgcttttgccgccgtcttcgaagaggagcgtcagaagattcagctttaatctatcaatgcatcgttagcattgttaacgagaga

SEQ ID NO: 154520 - DNA, 402 bp, Arabidopsis thaliana columbia
  unsure (1)..(402): unsure at all n locations
gcgtgcgaaacacatagccatagtccctcaagagccgtgcttgttctgaactaccatttacgaaaacattgcatatggacatgaatgtgcgagcgaagcananatcatacaagccgcgactctagccagtgcgcacaaattcatatccgcgctaccagaaggttacaaaacgtatgttggcgagagaggcgttcagctctcgggaggacagaaacagaggatcgcgatcgcacgtgccctcgtgaggaaagcagagatcatgctgcttgacgaggctacaagcgctcttgatgcagagtccgagagatcagtccaagaagcattagaccaggcttgctctggtagaacatcaatagtcgtggctcataagctatctacaatcaggaacgcacacgtgatcgc

SEQ ID NO: 154521 - DNA, 317 bp, Arabidopsis thaliana columbia
aatcaagacctcattttatcgaccaaacctttccttttatgatcctccatatactataacagtgctaggacacatacaacgggcgtgtcggccaagatatcatccagagaagctcttaactctgtgccctcatatcaatataagttctaccagacatgtacagaacgcattttagcgacagagagagtcaagactcggtagtacataaacagacgatcgtgatcgcacgtcccctactgaggaaagcagagatcatgcttcttgacgaggctacaagcgctcttgatgcaaagtccgagaaatcaatccaagaagca

SEQ ID NO: 154522 - DNA, 403 bp, Arabidopsis thaliana columbia
  unsure (1)..(403): unsure at all n locations
cggaancccggggggcccacgcgtccgctcagaaagatcaatctagagagaccaaaaatatatcggaagagatggcttctacctgcgcggtgtcattgttgacaccagttagccagacccattcgtctcctttccttaagccattacctcttaaaccatccaaggctttggttgcaactggaggcagagcacataggcttcaagttaaggccctcaagatggacatggctttgacccggatcttcgcggctgctcttactgcttctatggtgattcctgatatagctgaagctgctgtttctggaatctttccttccttttaaaatttcttgctcatcattgcttttggttaccttgtcctcactttcatcaatggagtagtcttcttccttttaaaactttt

SEQ ID NO: 154523 - DNA, 446 bp, Arabidopsis thaliana columbia
  unsure (1)..(446): unsure at all n locations
gtgagaccagttgctaaatattactctgcatttaaagatgctatggtgtgtggcaaaggaaggtatacacttgtaaaagaggtagagcnatttttaaaatggagtgtatgacaagcctcttccatgctttggttgtggaatccgatggttctcctttctcttgggttttgtgttccctttcttatggtactatgcaacacttttatatttcgggaactactaccgcaaggatcctagagaaagagcctgccttgctgcttccgcaatcactgacatgggattcttcctttttctactaatgattggttttttcttgtggctctaaatggttcttttaacttattccccataaatcttgaaaatttatattatgggaaagtttcttattctttttaaaaataaaaataggatgggacctttttattttttttttttaaacccctttt

SEQ ID NO: 154524 - DNA, 299 bp, Arabidopsis thaliana columbia
attctctcacatgaagccaaacagcattcttggtttatcacacgggtttctactagggcatttacagtcctcggggctggatttgccaaagaacatcagtgtggtcgctgtatgccctaagggaatgggtccttctgtgaggaggctttacgtccaaggaaaagaaattaacggtgctggaatcaacgccagttttgcagtccaccaggatgttgacggtagagccgccgatgttgcattgggatggtcagtagcacttggttctccggttacttttgcttcttactcttgaacaggag

SEQ ID NO: 154525 - DNA, 392 bp, Arabidopsis thaliana columbia
cagatccacacactctctcttatatctctccggcgaaaactttccgatcaccgacaaaaaaaaaaaaatggttgcagacgcgaggggttcatcatcaagctcatttaacttcctaatctacggtaaaaccggatggatcggtggtttactcggtaaactctgcgaagctcaaggaatcacttacacttacggctccggtcgtcttcaagatcgtcaatcgatcgtcgccgacatcgaatccgtgaaacctagccacgtgttcaacgctgctggagtcaccggtcgtcctaatgttgattggtgcgaatcttacaaagttgagacgattcgtactaatgtcgccggaaccctaactctcgctgacattgcagagagaaaggacttgttctgat

SEQ ID NO: 154526 - DNA, 294 bp, Arabidopsis thaliana columbia
  unsure (1)..(294): unsure at all n locations
caacaatggattacgattacagaaacaagtctggtggtccttcttaccctcgacctgtgtatggacctccatcaggatcgtgcggtccntcatctaaccatcctatgtacggttaccctaagatcggtcaacaaaccggtcccggcccacagtttttctctccgccggagagaaactcttcgtttcaacataacacttctccttcatctggaataggaatcagagtgaatttgaagcctgagtatcggattactccgccgcctcagttgttgcctcgagtaggagatattcatc

SEQ ID NO: 154527 - DNA, 463 bp, Arabidopsis thaliana columbia
  unsure (1)..(463): unsure at all n locations
cgagcactgagccagagcgtgagaaccgtgaagatgaaaccgaagtcaacgaanatgaggacggcggagctcaggtggcggcgagcgttangcttgaagaggttgcagtcaccaccggcgaagaagatgaagacgccgtcctcgatctgaaatcgaagatgtatcgattcgataaagaagggaaccaatggaaggagagaggagctggaactgtgaagttattgaagcataaggaaactggaaaagttcgtcttgttatgagacaatctaaaaccctaaagatctgtgccaatcacctcatttcgtctgggatgagtgttcangaacatagtgggaatgaaaagtcttgtttatggcacgctactgatttctccgacggcgagttgaaagatgagcttttctgcattcgatttgctttcattgagaattgcaaaacatttatggagaaattcactgaaatagc

SEQ ID NO: 154528 - DNA, 249 bp, Arabidopsis thaliana columbia
caaacagagaaaatgtgtggcggttctattatttccgattatgcccctctcatcaggaatgccaaaaaccataggcgcacggctgaagaactcttgtcaaagctcgatgcttcccccgccgacaacttctgaagtttctattccacctgcaaactccatcccaccaaccaaattaacgtgaaaaacgatgcattgaaaaatgaacaggcaacataaccttttaaacgcatgaagaaaaagaatgtttat

SEQ ID NO: 154529 - DNA, 262 bp, Arabidopsis thaliana columbia
  unsure (1)..(262): unsure at all n locations
cggacccgtgggatgacggcnacaaacaagcaagtcatattgaaagactacttgagtggttgcgctagggaatccgatggggagggacgaccaccaccgtcnaacttagggttccggaaggtactaactctgttctagtgaagaatctctacttgtcatgcgatccttacatgagaattcgcatggggaaacctgatccttccactgctgctcttgctcaagcttacactcccgggcagccaatccaagggtattgagtgtc

SEQ ID NO: 154530 - DNA, 376 bp, Arabidopsis thaliana columbia
  unsure (1)..(376): unsure at all n locations
ctgtttttcacgccggagatagagagagagatttaaataagcgagaaaaagctagaaactttagaatggccaataatggaggcgagcgaatctgtcnagtacaatggcttcgagacctctaacggtaacgtcgaccatggttggaagaaagtcgtgtacccgaaacgtcaccggaagcaaaaacaagcggatcaagcgacggcaaatggtggcaaaactgttgcttcaaatggaaccgtagctaacggcggagataacgttttccgttcgttggaagagcaagctgaggatcgtcgacgacggatcttagcggcgaagatgactgctattgattcagatgatgatggtgttgttagatctaaacatcgatctaatg

SEQ ID NO: 154531 - DNA, 342 bp, Arabidopsis thaliana columbia
cgcatctcttttcatttctctctgatttctctttctctccgtccaactatgtctgccttcacgagcagattctccgatgggttggtcgccaacgctgcctacatcggcacacctggaaaaggtattttggctgctgatgagtccactggtaccattggaaagcgtcttgcgagcatcaacgtcgagaacgttgagaccaacagacgtaacctccgtgagcttctcttcaccgcccctggtgctctttcatgcctcactggtgtcatccttttcgaagagactctgtaccaaaagagttccgattgttagcttttcgttgatattttgaaggaaggaggagtt

SEQ ID NO: 154532 - DNA, 346 bp, Arabidopsis thaliana columbia
ctttctctctcgctgcttctcgaatcttctgtatcatcttcttcttcttcaagtgaaaaatggccgatggtgaggatatggaggggcttgtctttgacaatggaactggaatggtgaaggctggttttgctggtgatgatgccccgagagcagtgttcccaagtattgttggtcgtcctaggcacactggtgtcatggttggtatgggtcagaaagatgcttacgttggtgatgaagctcagtccaagagaggtatcctcactctgaagtatccaatcgaacatggtattgtaagttactgggatgacatggaaaagatattgcattacactttctacaacgagct

SEQ ID NO: 154533 - DNA, 339 bp, Arabidopsis thaliana columbia
  unsure (1)..(339): unsure at all n locations
gccatttgagttagcctctgtatagatcgatgtctagcctgagaagagctctgctcgtagcagggaagacgaagagcaggcgtagaaaactgccatttcatcaccggaatcaactacaacggtctcagcgtgaagcaactacaagagctccgtggaatcctccgtgaaaacacaaacacgaagctcctcgtcgccaagaacactttagtctacaaagccttggaaggaaccaaatgggagtctctgaagccatgtatgaaaggtatgaacgcttggctattcgttcaatctgaagatatacctgctgctttgaagactttcatcaattntcagaaagag

SEQ ID NO: 154534 - DNA, 330 bp, Arabidopsis thaliana columbia
atttcttctcaggtaatactcgtaagatttatcaacacaagcaaaaaagatggcccaaaagcgagaagcaaagggtggtgagatgggagatgtattggatgatggtgtttacgaaaatgttagaaaggtatatgtagggcaagcacaatacggtatagccttcgtcaagtttgagtatgtcaatggttctcaagtggttgttggagatgaacatggaaagaagacagagctaggagttgaagagtttgagattgatgcggatgactacatcgtatacgtggaaggttatcgtgagaaagttaacgatatgacgttagaaatgatcacgtt

SEQ ID NO: 154535 - DNA, 408 bp, Arabidopsis thaliana columbia
cgaacgagagagagaaacgaattcttctcaggtgttaaagaatgtctcggagatatggtaggggtaccacaatgtggtgggcagaaggtcgtctttaccaggtagagtatgctatggaggccattggaaacgccggttctgcgattggaatcttatccaaagacggtgttgtgttgatcggtgagaagaaagtcacctcaaagcttcttcaaacctcaacctctgctgagaaaatgtacaagattgatgaccatgttgcctgtgctgttgctggtataatgtctgatgctaacatacttatcaacacggctcgagttcaagctcaacgttacaccttcatgtaccaagagcccatgccggttgagcaactggttcaatctttttgtgacacaaaaacaggatacacac

SEQ ID NO: 154536 - DNA, 384 bp, Arabidopsis thaliana columbia
  unsure (1)..(384): unsure at all n locations
ccgaaacgcagcttcgaagcgaggaatgacttttatctccggtcatttcggtggttggagatctatgtcttcatgggggaggagcgttnancctgctcctaaagatccgatcctcggagttaccgaagcttttctcgctgatcctagtcctgaaaaagttaatgttgttgtgggagcatatcgtgatgataatgggaagcctgttgtcttggaatgtgtcagagaagctgagaaaaggcttgctgggagcactttcatggagtaccttcctatgggaggaagtgccaaaatggtggacctaacattgaagcttgcctattgtgacaataactaatttatcaaagataaaagaattgctgcagttcaaactctttctggcacttg

SEQ ID NO: 154537 - DNA, 468 bp, Arabidopsis thaliana columbia
gcaaagatgaagcttgatactagtgggttcgagacttccatgcctatgattggatttggctcgagcagtgatatgctggatgagctttcttctgtaccctcgtttgatctaccccgtactaaagagtttgatggatttcagaaaaaagctaaagacatgttgaagcatgcaaaaggaacaaccactctcgcttttatcttcaaaggtggtgttatggtcgctgctgattctcgggctagcatgggaggatatatctcctcacaatctgtgaagaagattattgaaatcaatccttatatgctcggtacaatggctggaggagctgctgattgccaattctggcacagaaatcttggaattaagtgccgtctacatgagctggcaaacaagaagagaatctctgtttccggagcttcgaaacttcttgccaacatgctctattcataccgtggaatgggactttctgtt

SEQ ID NO: 154538 - DNA, 310 bp, Arabidopsis thaliana columbia
  unsure (1)..(310): unsure at all n locations
acaactgatccttctctcatcctcagaaagaatttctcaaaccatgctgcttacttcacncntcaccgccggccattttttgaggagacaagagccctttgtctcaccccaaatttcaccatctcttcctctctggaaactctccggttgcactaccatctaggacacaatcattctttcctctctctctcttcaaacccaaaaccaaatctgctcctaaaaaggtttataatcccaacatcaagttttaggatgtcatctttgcaacttctgtttgtattggttccacaaaggcaaatgaacttttctt

SEQ ID NO: 154539 - DNA, 419 bp, Arabidopsis thaliana columbia
  unsure (1)..(419): unsure at all n locations
gttcttgttgctgtagaacacaaacagaacaatcaaaaaatcaattgaagagtctctcantcgttaggggaagcaaatagagaaagggctggctttactgcctccgcttccaccgtctccgccgctcgtccggctctccttctcaagcctaccgtcgccatctctgctcctgttcttggtttgcctccaatgggtaagaagaagggaggagtgagatgttcaatggagacaaagcaaggaaacgtctcagtcatgggggctggagtttcagctgcagcaacagctgctttgacggcggtgatgagcaatcccgcgatggctttggttgatgagaggatgtcaacagaaggaacaggattaccctttggtctaagcaacaacctcttgggttggattctgtttggagtcctttggttgat

SEQ ID NO: 154540 - DNA, 275 bp, Arabidopsis thaliana columbia
  unsure (1)..(275): unsure at all n locations
agcttgctctctgggtttttgctcagtgtgctacgtgagatatagagagatggaangtctnattgaaaccataaaaattctggctggacccgcgaagcccatcggagtgagaaggcttctccaaccctcacatggcttaaagcaaagacttttcaccacaaacttacctgccttgtccttatcctctaatggtcacaagaaatttcaagcctttcagcaaatcccacttgggatttcggttttccacaaggagagaagcagaggattcatcttca

SEQ ID NO: 154541 - DNA, 321 bp, Arabidopsis thaliana columbia
  unsure (1)..(321): unsure at all n locations
gttaaatctttctccgatcatcccgaccagaaacatctccattggtggagtccaataagagggctatcaccccaacgcacggagggcggcgctcnctcattttatctcgacttttatcttcatcttcaccggctcaagctccggaattgctttcaacaagatcactgacaatgtagcaaccactccttccggcctcgacaccgctgccttagctcatgctttcagtctctttgtcgctgtctctattggcgctaacatttcctgtagccacattaaccctgccgttaccttcggtgtcttactcggtggtaacatcactct

SEQ ID NO: 154542 - DNA, 309 bp, Arabidopsis thaliana columbia
  unsure (1)..(309): unsure at all n locations
agaggctctgataaaaaaaaaaacaaaaaaatatgacaaaggcttattcaacacntntcctggcgtttctgatattgatcggggggatggccatgacactgaacctttttcccacggtagaggcaaagaagcggagtagagatgctcctatagtgaaaggtctctcatggaacttttaccagaaagcatgtccgaaagtcgaaaacatcatcagaaaagagctcaagaaagtcttcaagcgagatattggtttagccgctgccatccttcgtatacatttccatgattgcttcgttcacggatgtgaag

SEQ ID NO: 154543 - DNA, 333 bp, Arabidopsis thaliana columbia
cgccaatacaacggtttctactcgtttgacacgaccactaacgagtggaaactgctagctccggtcgaagaaggagccgtcctggtagtttccactcaatggcagccgatgaggaaaacgtttacgttttcggtggagtgagtgctacggcacgactcaatacactagactcttacaacatcgttgataagaagtggtttcattgttcgactccaggagattcccttaccgcaagaggaggagcagggctcgaagtggtgcaagggaaggtatgggttgtgtatgggtttaacggatgtgaagtagatgatgtgtattactactattcctgtt

SEQ ID NO: 154544 - DNA, 273 bp, Arabidopsis thaliana columbia
ggaagctaaggagaggcgaattcgaatcgagatgatggtgtctgggtcagggatatgtgcaaagcgtgtcgttggtgatcagctcaccatatgtgtggtcgtcttgcttcgatcatagctaaagagttgctcaatggacagagtgttgttgttgtccgatgtgaggagatttgtttgtctggtggtttggttcgtcagaagatgtattccattaggttttttaggaaacgcattgaacactaaacctttcttttggacctattcattttcttt

SEQ ID NO: 154545 - DNA, 291 bp, Arabidopsis thaliana columbia
ttttcaaaccacttgcaaaattcgaatcagatcttctcttcaatcgaaaaaaaagaaaggattggctctagattgttgaatcgagagatgtctacaagggaagagaatgtttacatggcgaaattagccgaacaagctgaacgttacgaagaaatggttgaattcatggagaaagttgcgaaaactgttgatgttgaggaactttcagttgaagagaggaatcttctttcttgtgcttacaagaacgtgatttggagcgagaagaagctttctgggagaaatcattttttt

SEQ ID NO: 154546 - DNA, 294 bp, Arabidopsis thaliana columbia
cgtccgttcggaaatcggggattcctctggttcttccaactgttaaggacaaggctgttcctgagagaccagttgaaaaagagaaacctaagagttatacgtatagtgcggatttgactaagaatcagaagaagaagatccgtaagaaagctaagaaagtggaaggttcagaggaaaatgagagagactcttctaactctgaggcaagaccaaatggaaatgcaactgtggagaggttggaagagaagtctgaaagagtaaaagatgcagagaatgttagtcaaaagagccggg

SEQ ID NO: 154547 - DNA, 424 bp, Arabidopsis thaliana columbia
ataacactcacacacacactttctcttctcttattttctcagttcttttaactcttttctctgcatatattcaaatggcgcaccagcgaggttgaacaagtgactccagtagcagctgagaacatcgaggtgccaccaccaaaggctgtggagtcggaggaagtcaccaccgtctccgagtctcttccagctccggtaacagaatctcaagcgcctgtcgaagtaacaactaaagatttggtcgtggaagagacagagaaaccaatcgaagaaacagaggaagctcaagttgaaactccggaggttgtggagatcaagaaagatgaagaagctccggttgaaactccggtggttgtggaggatgagagcaaaacagaggaagttgtagaggcgaagaaagaggtagaagttgaagaaaagtaga

SEQ ID NO: 154548 - DNA, 364 bp, Arabidopsis thaliana columbia
attgacgccgcaggggaggctaaagtctctgactttgggctggccagactgttggcttcggcgctggacaggtgcgtgttgagtggcaaggtacagagcgcgttggggtacacagccccggagtttgcatgccggacagtcaagataaccgacaggtgcgatgtttacgggtttgggatcctggtgctggaggtggtgacagggaagagacccgtggagtacgctgaggacgacgtcgtggtcttgtgtgagacggtgagagaagggttagaagaagggagggtggaggagtttcaaaaccctctgtttggagggtatttttgagctatattttgcaatctttttaattaactaaggttttttt

SEQ ID NO: 154549 - DNA, 331 bp, Arabidopsis thaliana columbia
caaacacctttacgtctttgacctcgagacccggacttggtccatttctccagccaccggagacgttccacacctctcttgttgaggtgtccggatggtgtcagtaggatcgaccctctatgtctttggaggccgagacgcttcacgccaatacaacggtttctactcgtttgacacgaccactaacgagtggaaactgctaactcctgtcgaagaaagacccactcctcgtagtttccactcaatggcagccgatgaggaaaacgtttacgttttcggtggagtgagtgctacggcacgactcaatacactagactcttacaacatcgtt

SEQ ID NO: 154550 - DNA, 306 bp, Arabidopsis thaliana columbia
gaccacgcgtccggaaaaaccatcgaccaaaccatcttttcggactttacttagagacactcgtggctctctcgaggtatggaacccgtcaactcagctgaggcgacccgataacccggtgttccgtcctgaaccaccagcgtggcaaaacttgagtgatccacgtggcaccagtcctcaaccccgaccacaacaagaaccagcttcatccaaccctgttcggtctgatcaagaaatcgctgtcacgacctcatggatggctctgaaagacccatcaccggagacaatcttcaagaagacgatcac

SEQ ID NO: 154551 - DNA, 452 bp, Arabidopsis thaliana columbia
ccggtccggggttcgcgcgcacgcgtcacgcgtcctatcaacgagtttctgcaaagcctgattcgtgctgcaccttgcctctctttctctctcttccttcgtttctctctcgatgtgaagagagaaaattcgttcgatttcgttttctcttcttcttttggattttcccggaaaattttggaatcggtgagtctctatcgattactggtcaaccatgaatatctttagatttgctggcgatatgagtcacttgatcagtgtcttaatccttcttctcaaaatctacgcgacgaaatcttgcgctggaatctctctcaagactcaagagctctatgcgcttgtgttcttgactcggtacttggatctgtttacggattatgtatctctgtacaacagcatcatgaagattgtcttcattgccagctctttggctatcgtttggtgtatgcgta

SEQ ID NO: 154552 - DNA, 148 bp, Arabidopsis thaliana columbia
aatggccccgaagaaaggagtgaaggtagctgctaagaagaagaccgcgcagaaagtttcaaaccctctattcgagaggaggcctaaacaattaaatatttgcggaactttacctagaaagatggatatttgttaatacatcaaatgg

SEQ ID NO: 154553 - DNA, 318 bp, Arabidopsis thaliana columbia
  unsure (1)..(318): unsure at all n locations
tcgcaagataatggcatcanaattctcaggttagtggctaacgacttcagnccgtcgtagcccgcccgcctgtgtcgattcccagtcgcgagcgggttctcttcttcttcttcttcttcctctaccaaccccaaatctcaatctctcaatttctccttcctctcccgatcgtctccacgtctcttgggactttcacgaagcttcgttagctctccgatggcgactgctctcacttctgatcgtaatctccatcaagaggatcgagccatgcctcagcttcttactgagtttatggtggatatgacatgtgagggttgt

SEQ ID NO: 154554 - DNA, 312 bp, Arabidopsis thaliana columbia
gcatgactatagattctcggttttcaaagcgaatctcaggcgagcgaggcgtcaccagaagttggatccgtcggcgactcatggtgttactcagttctcagatctgactcggtctgagttccgtaagaagcacttgggggttagaagtggctttaagcttcctaaagatgccaacaaggctccgattcttcctaccgaaaatctccctgaggattttgattggagagatcatggcgccggtactcccggcaaaaatcagggatcttgcggctcttgctggagtttcagcgccactggagcttttgaaggtgc

SEQ ID NO: 154555 - DNA, 365 bp, Arabidopsis thaliana columbia
ctttttgcagagcttcttcttcttcttctccaaaaatcccaactttcttctctttcccggtttgttcgtctccagcatgggcgcgtgttgtaacctaatccaaatcttacccattgatggaataacatcatcacgacgcgtcaaaattctgtatcggaggaccgagagatctccatctcctgtccagattcgattcccaccaatcccaatttcgtgaaattcgttagggttttagtttgaatctcatctcatcagatcgagtcgacccaggattaggaagaagaaaagcgatgaagatggcgacgaatggccggtttttcacaatcgggctagtcgcgtcttggtactcatcgaacatttgtgta

SEQ ID NO: 154556 - DNA, 408 bp, Arabidopsis thaliana columbia
atcatcgctcccaattttacattcttcttctcgccaaaccctaattgtttcgatttctgctacattcttccggaaacttgttctatctctgacggatctcgaatcggtattctcagctgctgaaatctccgagaacgttttgctgcgaggtggagaacggttggaaggaatccctctctcaagggattgttatcgtaggtcctaaagcaagaactagggacaaaccttgggatattctctaatctttcatctttgattaggacagcaaagacttaagaagcagcatgactcggattttggttcaaagaggttcatcaggcagttcttccaactttagccggccttcttactcatctaggtcttcctcgggatcagaaacacagattaacaataattttccgggtcctc

SEQ ID NO: 154557 - DNA, 446 bp, Arabidopsis thaliana columbia
gtatactacaagtccccaccaccaccgtacttctacagttccccaccaccactgtactacgctccttcaccaaaggtggactacaagtccccaccaccaccatacgtctacagttccccacccccaccgtactactctccatctccaaaggtatactacaagtccccaccaccaccgtacgtctacagttctccaccaccaccgtactactctccttctccaaaggtttactacaagtccccacctccaccatacgtttacagttccccacccccaccgtactactctccatctccaaaggtttactacaagtccccaccaccaccgatcgtttacagttccccaccaccaccgaactactcttcttttccaaaagtatactaaaagtctccacctcccccatacgttttacagtccccacccaccatcgtactacttttcttttt

SEQ ID NO: 154558 - DNA, 347 bp, Arabidopsis thaliana columbia
  unsure (1)..(347): unsure at all n locations
cttatatgtattccccatatggatacggaaaagctcctaggtttagaaggcctatgcgttacatgccgtaccaataaaaccgtcatcatggttaagcatagaagggattcgctaccagtgtggatgcgtgtattggctatacccatccttcattgagctttctttatgactttggctctttcgccttttagaactttgcgcgtaaacattttcgaacctagactggtattataagtttcatatcgntttgatatgatgcatataatgattggatcaagtgttgcttatataattgggactattgggttatagctgaaatctgttaaatgaaagtgttgactctttta

SEQ ID NO: 154559 - DNA, 426 bp, Arabidopsis thaliana columbia
gaccacgcgtccgaaagtctcttcttgattatcgtccagggattgcaactgagagaaagtaacgatgccggcgaaacagaggacagctaaggtcaacaggaatcctgatctgatcaggggagttggtaaatactcaaggtctcagatgtaccataagagaggtttgtgggcaatcaaggccaaaaatggaggcgttttcccccgccacgacgctaaatctaaggttgatgctccggtggagaagccaccgaagttctatccagctgaagacgtgaagaaacctcttcccaacaggcgcacggcaaaaccagccaagctcagagctagcatcactccagggacagtgcttatcatccttgcttgtagatttaagggcaagagaagtggctttcttaagcagctttggctcggtttgcttcttgtgac

SEQ ID NO: 154560 - DNA, 435 bp, Arabidopsis thaliana columbia
ataataatcattcactaatatataaattaaaagattaaaaaaaaacgtaaaaaaaaaaattgagggtcagattttgatttgaggagaggaataatctctctgatcttcttttacaacacatcaccaaatcaaatccatgtctctccgaccaatctctcttccgatcggagcttttgaaccaccacaagtttttcaacggttgagatcgaatttttaattttttaaactttgaccattttcgcagccttgaccaccggattttctctagcgatcgcctcacgaccagcggttttgtagtcgtagctacaatcatgacgatcggagttacggtgctctgagcagaaaagctcaccgcatcggcacctgaatccggtcaacccaactttcttccgacaaccaaaacatcgggttacgatctgttgatctctcttcttc

SEQ ID NO: 154561 - DNA, 416 bp, Arabidopsis thaliana columbia
gagaaaacttcgtctctcttctctgcttcgtcctctcatttcctgtgagataaaggcggagtctgtgtccagttattttgctgagtgcatcgattcttagagttcaaaatggttgatcaagttcagcaccccactattgcgcagaaagctgccgggcagttcatgcgttcaagtgtttccaaggacgttcaagtgggttaccagaggccttctatgtatcaaagacatgcaacctacggaaactactccaatgctgcatttcaattttctccgacatcccggatgttggcaacaactgcttctcccgtgtttgtccaaaccccatgagagaaggggttcactaactatgcccttgactttctgatgggtggtgtttctgctgccgttttcaagactgctgctggttctattgaacg

SEQ ID NO: 154562 - DNA, 337 bp, Arabidopsis thaliana columbia
gccgctacacacttttctgcgatatctctgatatttgttgacagtctctaaccatgggtaaagagaagtttcacatcaacattgtggtcattggccacgtcgattctggaaagtcgaccaccactgggcacttgatctacaagttgggtggtattgacaagcgtgtcattgagaggttcgagaaggaggctgctgagatgaacaagaggtccttcaagtacgcatgggttttggacaaacttaaggctgaccgtgagcgtggtatcaccattgacattgctctctggaagttcgagaccaccaagtcctactgcactgccattgatgctcctggcca

SEQ ID NO: 154563 - DNA, 245 bp, Arabidopsis thaliana columbia
ataacaacaactgcaatgatagtgggaatatgaatttggctggtgacgagaggtttaaaaccttgcctgcttcggagactcttccgaggaatgaagttcttaggtggttacatctttgtttgcaacaatgatactatgcaggaggaaatgaaacgtcacctttttggtttacctccaagattcagagactctgttcgagctataacacctggattgccttctgtttctttactactacaccactc

SEQ ID NO: 154564 - DNA, 419 bp, Arabidopsis thaliana columbia
ctcacattttcgtagccgcaagactccttttagattcttacttgcagctatgggtaaagagaagtttcacattaacattgtggtcattggtcatgttgattctggaaaatcgaccacaactggtcacttgatctataagcttggtggtattgacaagcgtgtcatcgagaggttcgagaaggaggctgctgagatgaacaagaggtccttcaagtacgcatgggtgttggacaaacttaaggccgagcgtgagcgtggtattaccatcgatattgctctatggaagttcgagaccaccaagtactactgcacagtcattgatgccccaggacatcgtgatttcatcaagaacatgattactggtacctcccaggctgattgtgctggtcttatcattgactccaccactggaggttttg

SEQ ID NO: 154565 - DNA, 347 bp, Arabidopsis thaliana columbia
ccaaaattggctgaaattattcatgggtttaaggtatcatcaggatgttttggctaatgtaagggggctgggtatcatttttttccaaattctcaccctcccataaagaaaatttgtacctccaaactggttttggttttttgtacccattcaaagggtcttaagaaaattcatatcttgcagttcttgctttcaccacatgtctctaccttatctttcttttttgcctcaaaaaaagcttcatataatggcctccccgtgacctgaaaacggtttttaacccatactatttacccaaaatttggttacctccctttggggcaaatttgggggtggggtaacccctc

SEQ ID NO: 154566 - DNA, 165 bp, Arabidopsis thaliana columbia
cagaattacataacaaaaatggttttgcaaatgcttctctctcattgggctgcttttgctcctgaccagtcgtcgcctctgcaggagaatgcagatggacctgtttgcccgccgtcgaacaaactaagccggtcatgtttccctgaaggttttttatttggcacg

SEQ ID NO: 154567 - DNA, 436 bp, Arabidopsis thaliana columbia
ttctgagttgaaatctattatcactggtgaattacctgctggctgggagaaggctctacctacatacacaccagagggtccaggtgatgccaccagaaacctgtcacagcaatgtcttaacgcccttgctaaagttgttcccggtttccttggtggaagtgctgaccttgcatcatccaacatgacattgctgaaagcctttggcgacttccaaaaggccacacctgaagaaagaaatcttaggtttggtgttagggagcacggaatgggagccatctgcaatggcattgcccttcacagccccggtcttatcccttactgtgcgacgttctttgtcttcaccgactacatgagaggtgccatgagaatctcagctttgtctgaagctggtgttatctaggttatgacccatgattcccatggtcttggagaagat

SEQ ID NO: 154568 - DNA, 507 bp, Arabidopsis thaliana columbia
gttcgttttctccgtcgattaatcgagtattatgaatcaggaagcagctgaaacagcgagagagtcactggagctggtgttgtgggatgtcgaacatcttggagacaggtcttgatcgacatactttgtctgttcttatagctctttgcgatattggtcttaaccctgaggctctcgctactctcgtcaaggagcttcgtagggattctgctacaacaacaactacggttgattaagaagatgcctaatcaaatagtatcattcatgcttgttttctaagtttcaatttcattatgctattgatgtgtaaattaaggttggtaaggtaattgaatagagagttttagagacaaattggttataagttttttgagtcattcccactcaatccttttgagaggctttcttttaagtaaatcacatagtttccctctttaataattattatttttgatgttatttatttttgtattttttttttatttatttattatactttattttaat

SEQ ID NO: 154569 - DNA, 391 bp, Arabidopsis thaliana columbia
caaaccacttgcaaaattcgaatcagatcttctcttcaatcgaaaaaaaagaaaggatttgctctagattgttggatcgaagatgtcgacaagggaagagaatgtttacatggcgaaattagccgaacaagctgaacgttacgaagaaatggttgaattcatggagaaagttgcgaaaactgttgatgttgaggaactttcagttgaagagaggaatcttctctctgttgcttacaagaacgtgattggagcgagaagagcttcgtggagaatcatttcttcgattgagcagaaagaagagagcaaagggaacgaagatcatgttgctattatcaaggattacagaggaaagattgaatccgagcttagcaaaatctgtgatgggattttg

SEQ ID NO: 154570 - DNA, 203 bp, Arabidopsis thaliana columbia
caagaaccatcctaaacattctttcttgaatttattttttattacaaacaaaaatattttaggaaaagctttctataaagggggggcgggtactcctaaccatcaacacctcttctacaaatgcaaatggacctgtttgcccgtcctctaacaaactatgcctgacaagtttccctaaaggttttttattattcacatctact

SEQ ID NO: 154571 - DNA, 368 bp, Arabidopsis thaliana columbia
ggagagagaaaaagagttgggggatagctttttgatttctccttctccatcttcgacctcgagagaagctaaaaatggcagaagaagcggatacgaacatcgagatctggaagattaagaaactaatcaagggacttgaatcagctagaggtaatggaacgagtatgatctctcttattatgcctcctcgtgatcaagtatctcgtgtcacaaagatgcttggtgatgaatatggaactgcttcaaacattaagagtcgagtcaatcgtcaatctgttttgtctgccattacttctgctcaacaaaagttgaagctttacaacaaggttcctactaatggtcttggtctctataccggcaccattgtt

SEQ ID NO: 154572 - DNA, 327 bp, Arabidopsis thaliana columbia
cggacgcgtgggcttgaaaccgctggaggagtcatgactgtcttgatccagaggaatacaaccatccccacaaagaaggagcgagtcttctcaacttattcagacaaccaacccggtgttttgatccaagtctatgaaggcgagagagcaagaaccaaggacaacaacctgttgggtaaattcgagctttctggtatccctccagcaccaagaggtgttcctcaaatcactggctgttttgacattgatgcaaacggtattctcaacgtctcggctgatgacaagacaacggtgcagaagaacaagatcacaatcaccaacctctag

SEQ ID NO: 154573 - DNA, 497 bp, Arabidopsis thaliana columbia
ctttggacgaccatcggcgacagtgttaagtctagagtcttcttcttcttcggcgtagttggtttccccggctggaaaggggggtctatccttcggaaagttgttcagcaagctctttgcaaagaaagagatgcgtatcctcatggtgggtctcgatgcagctggtaagactacgatcttgtacaagctcaagcttggagagatcgtgactacgattccaaccattggtttcaatgtggagactgtggaatacaagaacattatctttaccgtgtgggatgtctggggtcaagacaagattctttcattgtggaggcactactttcagaacactcatggactttatctttgtggtggacagcattgatcgtgaccgtgtttttgtagccatatattagctttacatatgttgaacgaaaattagttggaagattcttttctttttcgtttttgcttaactagcataatctttccaattcttttaacgcctcttttat

SEQ ID NO: 154574 - DNA, 408 bp, Arabidopsis thaliana columbia
ctatatcggagccgtcatgaatcatcgtctgagctcgatcgtactattgatcctctgaaggttatctcccgtgacagggtcgtgtacgatacgagctactttctgggcacacgaaatgcatctcagaggagattcacgcaaacgcaatgaccatcggaaaatacagcattataaaccctcacgaggatcatcctcttccttcttcccataaagtcaccgtcagggtcacatcgccacaagggacggcttatcacgaatcggacggagtagaatcgggacaattctcgtttgtagctgtggaaacaggggattacataagttgcttctccgccgtcgatcacaaaccaaagacgacgctgatcattgactttgattggaggacgggtattcataccaaggattggtcga

SEQ ID NO: 154575 - DNA, 476 bp, Arabidopsis thaliana columbia
gttgaaaaccagtacttccttgggagttcttttgcttgggcagccgatggtattactcctgaggacatcaatgccctgcacttaatcccaaaagagttgtcgctgaagatagttagcaagattgagaaaggagagaagttcagggtctatgttgtggttccaatgtggccagaaggtctcccagagagtggatcagtgcaagctatattagactggcagaggaggaccatggagatgatgtacaaggatgtgattcaggctctcagggcccagggtcttgaggaagatccaagaaactatctgacattcttctgtcttggaaaccgtgaggtcaagaaagatggagagtatgagcctgctgagaaaccagaccccgacactgattacatgagggcgcaagaagcacgccgtttcatgatttacgtccacaccaaaatgatgatcgttgacgatgaatacattattcatgggtctgc

SEQ ID NO: 154576 - DNA, 312 bp, Arabidopsis thaliana columbia
gtaaatattttattgttaaaacccatttaataattattattttacttaaaagtaacttgagacttgcatagtgaagcataagtgatgtcttttttgggaaatattatgtaatatattctgatttggcaggacggccatgaaagactttggtaagagactggagaatcttgctgaggatttgttggatctactgtgtgagaatctagggttagagaaagggtatttgaagaaagtgtttcatggaacaaaaggcccaacctttgggacaaaagtgagcaattatccaccatgttctaaaccagagatgattca

SEQ ID NO: 154577 - DNA, 452 bp, Arabidopsis thaliana columbia
aatccaacgattcaggtcacgaaaccttaaccgataagcttatccatctcctcagagctgttccagattgggcagacgagatgaaagagcgtgggatgcatcagaaacgctctctctacacacacgagaaatgggttgaacatagaagctctcttcgccatgtgcgtcatctactctcgagcttttcttcacgagttatactctccctgattccacctgttttcttcttcacaagcgtcgcggttgtgatcgctagctacaactccgccgtggctttggattggcttcctggtatttttccaattcttcgatcctcgtcgttgccgtatcagctcacagctccggctttggctcttcttctggtctttcgtacggaggcttcggattttaggtatgaagaaggaaggaaagcctggggtgggattattgctggaactaatgatttagctagg

SEQ ID NO: 154578 - DNA, 275 bp, Arabidopsis thaliana columbia
tttggcttttatcatcgccgccggttcacttcacaaagaggggcttagatttgtgcgttggagaaatactaagatctgtgtgtccattttcacttcttatcttagatttctcttagggttttgatatttgttgagagatcgaattaaaaacttgtgaagaaatctctagtgatcgtaatcgttgttggtgttttgtattacactgattcctgttttaacctttttcgtatctatcaatctatggcatcataggatgtcaatagaactcaatcatc

SEQ ID NO: 154579 - DNA, 320 bp, Arabidopsis thaliana columbia
cagacaagctcaaagatgtctctgattccatcagatctaagtatagtcaaactcagatcttgaccgttgtgatggatggctgtggagatattgatgaaggtgtgaaacggattaaggagagtattgaaggattagatgttgggattttgattaataatgctggcatgtcttatccttatgctaagtattttcatgaggttgatgaagagttgatcaataacttgattaagatcaatgttgaaggaactactaaatgtactcaagctgtgttgcctaatatgcttaagaggaagaaaggtgcttttattaatatgggttct

SEQ ID NO: 154580 - DNA, 434 bp, Arabidopsis thaliana columbia
cgggcgacccacgcgtccgctttgtcaccaccaccggtaacaaagacattatcatggtcgaccacatgaggaagatgaagaacaacgctattgtgtgcaacattggtcactttgacaatgagattgacatgcttggacttgagacttaccctggtgtgaagcgtatcaccatcaagccacagactgacaggtgggtgttcccagagaccaaggctggaatcattgtcttggctgagggtcgtctgatgaacttgggttgtgccactggtcacccaagtttcgtgatgtcttgctctttcaccaaccaggtgattgcccagctcgagctctggaacgagaaagcaagcggaaagtacgagaagaaggtgtacgttcttcccaagcatttggatgagaaggttgcattacttcacttgggcaagcttggagccagg

SEQ ID NO: 154581 - DNA, 412 bp, Arabidopsis thaliana columbia
aagaactcagaaagagaccaacgacactgcaaatgttggatgaatctccaaagtctatctacgacttcaccgtcaaggatatcggaggtaacgatgtgagtttggaccaatacaaaggcaaaactcttttggttgtaaacgttgcttccaaatgtggtctgacggatgcgaactacaaggaactgaatgttctgtacgagaaatacaaggagcaagggttggagatattagcattcccgtgtaatcagttcttaggacaagaaccaggaaacaatgaagagattcaacaaactgtctgcaccaggttcaaagctgaattccccatctttgacaaggtggatgtgaacggttagaacacggcaccattatacaagtacttgaaagcagagaaaggaggtttgctcattgatgc

SEQ ID NO: 154582 - DNA, 419 bp, Arabidopsis thaliana columbia
cagctggtgagccaattccaacaaacaaactagctaaagctgctgagatcttcagtaacaagaaggtctctggcgaggttccatggttcggcattgaacaagagtacactttacttcagcaaaacgtcaaatggcctttaggttggcctgttggagcgttccctggtcctcagggtccttactactgtggagttggagctgacaagatttgggggcgtgacatttcagatgctcattacaaagcttgtttatatgctggaattaacattagtggtactaatggtgaagttatgcctggacagtgggagttccaagttggcccgagcgtaggaattgatgcaagtgatcatgtttggtgtgctagataccttctttgagagaatcacagaacaagctggtgttggcctaacacttgatcc

SEQ ID NO: 154583 - DNA, 425 bp, Arabidopsis thaliana columbia
ctgagattagccacaacttcacgaccaaagagaacgccatcactgtcggaactcaacacgcgcttgacccattgaccgcagggaaggcaagagtgaacaatgctggtgtggctaacgctctgatccaacatgagtggcgtccaaagtcgttcttcaccgtttctggagaggttgattctaaggcgatcgataagagtgccaaggttgggattgctctcgctctcaagccctgagaagataccaccaaatgggccctgaagtgggtagaataggtgttatttctttttcgtcttcaaatctttggacaaatcgctgtctggtttgctaaacaatctttcatttgttttttttgttcggtgttgggatttgtagaaaataaaagagaaaaatactattgaaaggatcgtctttgacgataaagaact

SEQ ID NO: 154584 - DNA, 409 bp, Arabidopsis thaliana columbia
atctttcccagtttttcaagtttagtcgtgttaactcactctcagagaggaccaaggttcgagttgtaaaggagacgacatgtggtagaggcttgcattgagaaccatacaaatgcaaacctctttatggaccaagttgattttgaacctgctaagcaatggagtgctgtaagattacagaatgaagactcaacagaagatcctccaaccagtggtcttagtggactgatacctaaaccgccagttataatccgatctggcgggggtatccacaactatctctacaagttaaacccatctgcagatgtttccgggcaaacaaaattccagggaagtaatatcctgggcaaatttcaaataacatggcgcacaaatttgggtgaacctgggcgcttacaaacacaacaaa

SEQ ID NO: 154585 - DNA, 457 bp, Arabidopsis thaliana columbia
cttagaaagaaaagaacttaaatcaaaatacttaatagcatggcgatacatttatacaaaacttctaccccgagcacacgcgggggagccgtagacagtcaagtgaaatccaatccacgaaataatttgatctgtgggcagcatcattgtggtaaaggtcgtaatgccagaggaataattaccgcaaggcatagagggggaggtcataagcgtctataccgtaaaatagattttcgacgaaatgcaaaagacatatatggtagaatcgtaaccatagaatacgaccctaatcgaattgcatacatttgtctcatacactatggggatggtgagaagagatatatttttcatcccagaggggctattattggagattccatctgtttctggtacagtatgttctattaaaatgggtaattgctctatcttgagttgcggttggactatttgttttacg

SEQ ID NO: 154586 - DNA, 438 bp, Arabidopsis thaliana columbia
aaaaatggttttgcaaaagcttcctctcattgggctgcttttgctcctgaccatcgtcgcctctgcagcaaatgcagatggagctgtttgcccgccgtcgaacaaactaagccgggcaagtttccctgaaggttttttatttggcacggttactgcggcataccaggtcgaaggtgcgattaatgaaacttgtcgtggaccagccttatgggacatctactgtagaagatatccagagaggtgcaataacgataacggcgatgttgccgttgatttctttcatcgttataaggaagatatccaactaatgtagaatctaaacacagacgcctttagaatgtctattgcatggccaagaatatttcctcatgggagaaaggagaatggagtgaggctagcttgtgtgcaattctaccacgacctttttgactaggttat

SEQ ID NO: 154587 - DNA, 404 bp, Arabidopsis thaliana columbia
atcttatcgcaggaggtaagagtaagaagaccaaaaggactgctcctaagtccgatgatggctacctaaagctgctcgtcaagctttaccggtttttggtgaggagatctaacagcaacttcaatgctgtgattctgaaaaggcttttcatgagcaaagtcaacaaagctcctctttcactctctaggcttgtagagttcatgactggcaaggatgacaagattgctgtgttggttggaactatcactgatgatttgagagttcatgagattcctgccatgaaggttactgccttgaggtttactgagagggctagggctagaattgagaaagctggtggagagtgcttaacctttgaccagcttgctctcaaagcttcattgggacagaacacaattcttttt

SEQ ID NO: 154588 - DNA, 324 bp, Arabidopsis thaliana columbia
  unsure (1)..(324): unsure at all n locations
cgcgtccgattacaaacaaaaatggtttngcaaaagcttcctctcattgggctgcttttgctggtgacgatcntctcctatgcaagaaaggcatatctacctgtttgcccgccgtctaacaaactaagccgggcaagtttccctgaaagttttttatttggcacgtctactgctttataccatgtcgtaggtgctattaatgatacttgtcttggaccatccttattggacatctactgtagtatatatccagagaggtgctttaactataacagctattgtgccgttgtttttcttccattcatttaaggattatatccatct

SEQ ID NO: 154589 - DNA, 406 bp, Arabidopsis thaliana columbia
  unsure (1)..(406): unsure at all n locations
ccgggnggaccgcacgcgtccgctccgttgtccggcgcgtgtacctcactctttacaataggatcgtctttgctggatgggggcaggttttgtacttagggagggcgacnttgaaggaaacgggttatgagaatgtctatgacgccattgagaagcctctccagcttgctcagactgccgccgttctcgagattcttcatggattagtaggtttggtcagatctcctgtttctgcaactctgccacagataggtttcaaggctatatctcacttggggcattctatacagttttccagaggtccgatctcattttcttgttacgacgctggtcataagcttttctatcacatagattattcgctactaattctttggctttaaggaagctctatgctttgcacctt

SEQ ID NO: 154590 - DNA, 366 bp, Arabidopsis thaliana columbia
gctttttcctcctcctcctctcgcttcttcttttttctttcgaatctgcttttcgcagtctatttggtcatcgtaaattcggaagcgtggcgtatttaattaagcaaatggcttcgtattactctggttttttgggttgtgaagagccacactttttggaatcgtgttctctttgccggaaacaccttggtcttaactccgatatcttcatgtacagaggagacaaggctttttgtagcaacgagttgtgagaagaacagattgaatctgatgaagctaaagagagaaagtggaaaaaatcttcaagatctctccggaaaaattcttctgaaactaaagaatccgccggcggaaacaccgtacgga

SEQ ID NO: 154591 - DNA, 481 bp, Arabidopsis thaliana columbia
  unsure (1)..(481): unsure at all n locations
tttttcttgaataaaatcagaattacaaacttaaatggttttgcaaaagcttcctgtcatggggctgcttttggtccggacgagtcgtcncctctccagcaaatgcagatggacctgtttgcccgccgtcgaacaaactaatccgggcaagtttccctgaaggttttttatttggcacggctactgcggcataccaggtcgaaagtgcgattaatgaaacttgtcgtggaccagccttatgggacatctactgtagaagatatccagagaggtgcaataacgataacggcgatgtggccgttgatttcttccatcgttataaggaagatatccaactaatgaagaatctatacacagacgcctttagaatgtttatcacatggccaagaatatttcctcatgggagaaaagagaaaaggagtagtcaagcttggtgtgcaatttctaccacgaccttattgacgacctcaaaaaaatagta

SEQ ID NO: 154592 - DNA, 114 bp, Arabidopsis thaliana columbia
cacaaaccctaaatttcgtcaactccacagcgactcgattcgatcaagagaaatggcgtacgcgttctcgttttctcgtgcagagctaagcagctacaggggggtctggtcatt

SEQ ID NO: 154593 - DNA, 330 bp, Arabidopsis thaliana columbia
caaataccacctcaacagacaactctggatctgtattatcaccaacccaacttcctcaatgggttcgtaaacatcagtggccgtcagagccctcccacatcgaccgaggtgaatcattcccaactacatagaaaccaaacgggtcacttcaggttcaacatcccctacggctattcttgtagtactggaagtcagggcatatgacatatagaatctgcgctccagccaaaccaaaagatgctgagactctttcatcatcaagggatatgtcacttaacccgcgagttcacgccttaaaacctctccagactatggaaataacccatcttg

SEQ ID NO: 154594 - DNA, 466 bp, Arabidopsis thaliana columbia
  unsure (1)..(466): unsure at all n locations
gaccaattgcgcttcctctatgcttctctttccgctactattggttagccttctccggcttcagagccacgtataggtnncgctctctttacagacggagctgtgaagtctnctccgctgccccttcccatgccatcccgcaaaggctatacaaccgaccattaccttccattcacaatagcatacggcggaaagagttaacctgcattgcaggtagtggccctccgattaggaataggaagaagtttgagacctctctcttaaccttcctgaccttatccgattccgatattggctaagagaagttgactacccttaatccgcaaccaagtggattctcttgtgttgaaattcgagtttggagccacggattttgtgtacccgtgagcaccggtaactcacnccggatactattgatggacggttactggacaattgtggatagctttcccttgttcggttgcac

SEQ ID NO: 154595 - DNA, 402 bp, Arabidopsis thaliana columbia
gcagctcttgaagctaagtatcaaaagttatatcattctttatataccaagcgatatgaggttgggaatggtgtgatcgaaggcgagggtgcatctgaagaagtaaaatccgaacaaggagaagataaatcagctgaagagaaaggagtaccagatttctggcttattgcattgaagaacaatgaaattactgcggaagagataactgagcgagatgaaagggctctcaagtatctcaaagatatcaagtggagtaaggttgaagaaccaaaaaggttcaagcttgagtttttctttgatcataatccttacttcaagaacactgtcttgaccaagacatatcacatgattgatgaagatgagcctatccttgagaaggccctcgggactgagattgagtgg

SEQ ID NO: 154596 - DNA, 265 bp, Arabidopsis thaliana columbia
caagaggccatcagacaagccccttcgtcttccacttcaggatgtctacaagattggtggtattggaacggtgccagtgggacgtgttgagactggtatgatcaagcctggtatggttgttacctttgctcccacagggttgaccactgaggttaagtctgttgagatgcaccacgagtctcttcttgaggcacttcccggtgacaatgttggattcaatgtcaagaatgttgctgtcaaggatcttaagagaggatacgttgcc

SEQ ID NO: 154597 - DNA, 345 bp, Arabidopsis thaliana columbia
cacagaggagagagttagtcttcttctctgtttttgtctctttggctatatatatgcaaacattgtgtgaacagaacggagggcaacacaacacacacaactttgtgttctttaagttttgtttcagagatcaatggccgggactggattgtttgctgagattcttgatggagaagtatacaaatactacgctgatggtgagtggaaaacttcttcctcaggtaagagtgttgccatcatgaacccggccacgaggaagacacatgtcaaggttcaagcatgcacgcaagaagaagtgaacgcggtgatggaactggcgaaatcagctcagaaatcttgggcgaa

SEQ ID NO: 154598 - DNA, 476 bp, Arabidopsis thaliana columbia
ctgaattccacacacactgagagagatagagggacacattaaaagctaattcaacggttctgcaatggctgagaaggagaagaagaagcatttacatgagtttcttgaagatgaccaagagccttttcatcttaaccattacatcggcaaccttcgttctcagatgggttgctccgatatgcgtgtcaagaagcgaaagtccgataacgtcgccacgtttcctcctggtttgttctcctgcgagaactcttgtttcttcgcagctcataaatctcctgacccgagaaagtctccactctttgagctccggtcgccgggaaagaagaagatacgtgacggtcgagttttccttcagataccggcgagaaccgccgcaattctcttggacgcagcggcgaggattcagaaacagcagtcagagaaggctaagaccaataaagctcggaccagagaaactggtttggtatgttcgggtc

SEQ ID NO: 154599 - DNA, 283 bp, Arabidopsis thaliana columbia
caatgatgctcaaaggcaagctactaaggatgctggtgttattgctgggctcaatgttgctggaatcattaatgaacgcgacggctgctgctattgcctatggtcttgataagaagggtggcgagaagaatatcctcgtgtttgatcttggtggaggcacttttgatgtcagtgtcttgaccattgataacagagtgtttgaggttctctccacaaatggtgacactcacttgggaggtgaggactttctccacacggtgatggagtacttcatcaagctgat

SEQ ID NO: 154600 - DNA, 323 bp, Arabidopsis thaliana columbia
acgcgacagaactaactaacgacgccggagatggccgccacttcaaccgccgctgctgcttcttcaatcatgggtacccgggtggtgtccgacattagctccaattcaagccggttcacagcccggttcggattcggaaccaagaaagcatctcccaaaaaggctaagacggttatctcagaccggcctctatggttcccaggcgcaaaatcacccgaatatctcgacggttcacttgtcggggactacgggttcgatccttttggtttaggcaaaccggcggagtatcttcaattcgatttggattccttggaccagaactt

SEQ ID NO: 154601 - DNA, 432 bp, Arabidopsis thaliana columbia
gatggagattgacagaggttacatctcgcctcagtttgttacaaaccctgagaaactactagctgagtttgagaatgctaggggatggatcactgatcagaagatcactgcgatcaaagacatcatccctattttggagaagaccactcagcttcgtgctccgttgttgattattgcagaggatgttactggtgaagccttagctacccttgtcgtgaacaagcttcgtggtgtcctcaatgttgttgccgttaaagcgccaggatttggagaaagaagaaaagccatgcttcaagatattgcaatcttgacaggagctgagtacctagccatggacatgagcttactggttgaaaacgcaaccatagatcaattgggtattggccgaaaagtcacgattagcaaagattcgactaccctcattgcagatgc

SEQ ID NO: 154602 - DNA, 397 bp, Arabidopsis thaliana columbia
gagtgatgctcttgatcagaaagatgggagacagctcagacaaatggctctagcatacaaggtacctgttataaccactggggctggtgcattggccactgctgagggaatcaagagcttgaagtcaagtgccattaaaatgaccgctcttcaggacttctttgaggtaaagaatgtatcttctttgctcgtctgagttagtttttttgttgtgtgttgatcgtttgtgtggaacttttttacgataaattttaacggattttgttacccataagcatttctatgaataatcttcgaaaatgcagcaaacttgtgatttatcaatcggctttgttcctttaattcagatatacacaagcctttgattgtatcatgtcatgttacgcttggcttaaac

SEQ ID NO: 154603 - DNA, 395 bp, Arabidopsis thaliana columbia
  unsure (1)..(395): unsure at all n locations
gagagattgaaaaagcttatggaggaaattagacagagcgatgagataatcttatttatcgacgaagtgcatactttgattggggctggagcatcanaaggtgcaattgacgcagctaacattttaaaaccagctctcgctagaggtgaattgcagtgcattggagcgacaacattagatgaataccgaaagcacattgagaaagaccctgccttggaaagaagattccagccagtgaaagtacctgaacctaccgtggatgaaactattcagatccttaagggtctgcgagagcgatatgaaattcaccacaagctttgttacacagacgaatctttagtagcagctgcacagttgtcataccagtatataagtggttcgttttcttctgacaa

SEQ ID NO: 154604 - DNA, 396 bp, Arabidopsis thaliana columbia
ggagaattaagatttttaactttaaacgagagtttcgtttatttactcaaaaattgactggggaaatctctatggggaggttgggggaaaaaaatcctaagtaagggaatgcagagagatggtcggagtatcgccggtgaagactaagctgtgtgatcggtttaaccgatccgtcggcggcaggaattgccaccggaaacacgtcgaggacgggtgatccagttttctaaactctcttctctcgaattcttcgaagatatcgaaaaactgtaaatcttttttttcttctacttttttacaaaattctctaatcatcgtttgaaagtaaaaaaccatggtcggagcaaaaaccgtttgagaattgatcttacggttgtagtatttcggtgcttcttt

SEQ ID NO: 154605 - DNA, 449 bp, Arabidopsis thaliana columbia
gtcgtcgtttcatgatctgactctctggtcttctcttcttcttcttcttcttctattttggcttacttcgtcactggtgtggctgaacatgccacgccctttcttccataagttgattttctcatccactatccaagaaaaacgtctgagggtcccagataagtttgtgagtaaattcaaggatgagctttcggttgctgttgcactcacagtacctgatggtcatgtttggcgtgtaggactaaggaaagctgacaacaaaatttggtttcaagatggttggcaagagtttgttgaccgttactccattcgcattggttatcttttgatttttagatatgaaggaaactctgccttcagcgtctacattttcaatttatcccactctgagatcaattaccattccaccggtctcatggattccgctcacaaccacttcaaacgccccc

SEQ ID NO: 154606 - DNA, 369 bp, Arabidopsis thaliana columbia
tctcattcgcgcgacgcaaacgatcttcattcatggccaccgccgcagatgttgacgctgggattcagcaggcgctggctagacgaagtcaagctcttcaaccgctggacctatgacgacgttacggtcacagacatcagtcttgttgactacattggagttcaggcagctaaacatgctacctttgttccccacaccgctggaagatactctgtgaagagattcatgaaggctcagtgccccattgttgagaggctcaccaactctctcatgatgcacgggaggaacaacggtaagaaattgatggctgtctggatctgtaagcacgccttggagatttttcatctcttgtctgacttgaacccaatt

SEQ ID NO: 154607 - DNA, 467 bp, Arabidopsis thaliana columbia
ctactctctttaaaagaaattcgtaagtactatcaagaagcagaagatggcccaaaaggtggaagcacaaggagggaaaggagccaacctatgggacgatggatcgacacatgacgccgtgaccaagattcagctcgcagcaggcatagacggaattcaatatgttcagtttgattatgtcaagaacggacaacccgaacaagctcctcttcgtggtaccaaaggccgtgttctcccagctgatccgtttgtgattaaccatccagacgaacatctagtttctgtagaaggttggtatagccctgaaggtatcattcaaggaattaagttcatctccaacaagaagacttctgatgtcattggatccgatgagggtactcacttcactctacaagttaaagacaagaagatcattggctttcatgggtcttgccggtggcaatttaaatttttttggggcttacttt

SEQ ID NO: 154608 - DNA, 421 bp, Arabidopsis thaliana columbia
  unsure (1)..(421): unsure at all n locations
gccaaccccacatcacctgtcgtttctttatttttttttccctaactggnctctctctctggtgtgggacactgatggctggggtcaggctccccgctcaactagttacacgtggcaatctcatccaccacaactcttcatcctcctcctccgggcgtctgtcttggcgacgttctctcacaccggaaaatacaatcccgctcttcccatcttcctcatcctcatcccttaaccgggaacgatcaatagtagttccggttacatgcagtgctgcagcggttaatcttgctccggggacaccagtccgacccacgagcatcttggtggttggagccactggaactttgggaagacaaatcgtccggagagctttagatgaaaggtatgatgttaggtgtttggtccgaccaagaccagcttc

SEQ ID NO: 154609 - DNA, 231 bp, Arabidopsis thaliana columbia
  unsure (1)..(231): unsure at all n locations
catttactgntctgtttcactttctctttctctttttactctctaaataatttctaaaggctgtggtttattcagagatggatgggtcatttcattatcttccctctttaacaaacccatcaccttcaccattcataatataccaactatgggcttgttcaccttttttgactccaactttgactcctgaaacatacatactctcaccaaatccttacttcctcaaacttt

SEQ ID NO: 154610 - DNA, 350 bp, Arabidopsis thaliana columbia
cggacgcgtgggatcgccgggaaaatgaatattccggtgactatttcctccattactgttgctaataacgctgtttccgacagtcgtggtcatgtttcccgtgaaaatcgtcagcgttaagaaaaccgtcacttatatttttttttcttttcttcttcgtttttgtgaagatgatgatccactgatttgagagtagtagcttgagaggtttttagtagatttcgattttgcgattatttttgtttcctggagagatctcattttttttgccacttctcgatgatgaagatccaagccgtttacaacgatttgcgcgcgaatagagtggaatcatcaaccaaaccagtgct

SEQ ID NO: 154611 - DNA, 436 bp, Arabidopsis thaliana columbia
gaagaagcttcgtatcaccaccgtcatacctataaggtacacctcctccgcttcctccgctgcctccaccaccaacggagccggggaatcatcggtttccgatttcgtcaaacgtcccaaaatctctcatccgaattacatatcaagttccgagatcgaatcagagttttctcatcacgatccagatttcgcaagaatcaacaacggtagttttggttgttgtccgtcatcaatcctagctttacaacgagattggcagctccggttccttcgtcaaccggatcgattctatttcgacgaactcaaaccaaaaatctccgattctagatctgtaatcaaacggttaataaacgccgagcatgacgatgaagtctcgatcgtcgattacgcaacaaccgcagttgcaatcgttctttaacaaaccgcttgggctttt

SEQ ID NO: 154612 - DNA, 393 bp, Arabidopsis thaliana columbia
ctcttgttctctccgcccatctctgctctcttttattttcccagaaagttttttttttttggttccgaattccggtaaggtgattggggtttccattgatagcaatggcgacggctttcgctcccactaagctcactgccacggttcctctgcatggatcccatgagaatcgtctcttgctcccgatccgattggctcctccttcttctttcctcggatccacccgttccctctcccttcgcagactcaattactccaacgccacccgtcgatctcccgtcagctctgtccaggaagttgtcaaggtgaagcaattcaccaataataccagcctgttgataacctaagagggaggattggagttgtatgagatatgattctaggtagatcttt

SEQ ID NO: 154613 - DNA, 398 bp, Arabidopsis thaliana columbia
cttgacattgatgatgtaccaggaactaattaatcactaccgttgattcaagagatttctatgagagatttgattggtcgcaagggagaagaaaccatgtctcacattggattcactaagctaatggtctcaatgggtcaccaagcaagtggtgcccttgaactgatgaattatccgatgtggttaagagacattgttccccacgaccccaacggccaagctcgtccagaccacgtcgacttagctgctttagagatctacagggacagggagaggagcgtcccacggtacaacgagttcaggagatctatgtttatgattccgataaccaagtgggaagatctaacggaggatgaggaagctattgaagtgttggatgacgtgtacgatggtgatgt

SEQ ID NO: 154614 - DNA, 456 bp, Arabidopsis thaliana columbia
aaatccttgggcagaggaaaaagtttatagcgactcttttcctctaaaagggtctgtctcttccttcttctctcttcagatcggcatttcacggatcaatcctgtgtttgaaacaatgggtgttgaagttgtaaactctggtggatttgaggttgctccggctcctttcgaggggaaacctgagaagaacgggaagctggaccaaggaaaaggagatgatgcccccatcaattttggttcagtcggtgagctaccaaagaatgccgaagagaataataacaaagtggtcaactctgatgcacccaaaaatgcagcagaagagtggcctgtggctaagcagatccactctttctaccttgttaaataccgttcttacgctgaccccaatattaaagctaagctagatctagctgataaagagcttgaaaagttgaacatagctcggactggagtttt

SEQ ID NO: 154615 - DNA, 447 bp, Arabidopsis thaliana columbia
gtaatagacgagctctggcaactgatgaatggcttcgcgtagaaagaactgataatatatatgcccttggtgattgcgcaacgattaaccagcgcaaagtcatggaagatgtttctgctatttttagcaaagcagacaaagacaagtctgggacactgactctcaaagagttccaagaagcaatggatgacatttgtgttagataccctcaagtggagctctacttgaagagtaaacgtatgcgtggcattgcagatcttcttaaagaagccgaaactgatgatgtatctaagaataacattgaactgaagatcgaagagttcaaatcggctctatctcaggttgactcacaagtgaagtttcttccagctactgcacaggttgctgcgcagcaaggtgcttacctagctaaatgctttgaccgtatggaagagtgtgagaagagtc

SEQ ID NO: 154616 - DNA, 436 bp, Arabidopsis thaliana columbia
atgctttcgaggagaacgttgggcactgatatgcccgtcatggctcagattcggagtttgatggcggaattgacgaaccccatgtctctcgcccagggagtggtgcattggcagcctcctcaaaaggccttagagaaggtcaaggagcttgtctgggatcctatcattagttcttatggccccgatgaaggtcttcccgagttgagacaggctcttctcaaaaagctgcgtgaagaaaacaagctaaccaattcacaagtgatggttactgcaggtgccaatcagagcgttgtgaaccttgttattacattatgtgatgctggtgattcggttgtcatgtttgagccatactacttcaactcctacatggcctttcagatgacaggagtcaccaacataattggtggtcctggccagtcagacactctctatcctg

SEQ ID NO: 154617 - DNA, 450 bp, Arabidopsis thaliana columbia
aagaaaagctagagaaaaacaacttgaggaagctagaatgcttgcttctctgcaaaaaagaagagaactaaaagcagctgggattgatggaaggcataggaaaagaaagagaaagggaatcgactataatgcagaaattccttttgaaaagagggcacctgcgggattttatgatactgcggatgaagatcgtcctgctgatcaagtaaaatttccaactaccattgaagaacttgaaggaaaaagaagagctgatgtagaagcacatttacgcaaacaagatgttgcaaggaataaaattgctcagagacaggatgctccagcagctatattgcaagcaaacaagctgaatgatccggaagttgttaggaagaggtcaaagctgatgttaccaccaccgcaaatttcagaccacgagctagaagaaattgctaagatgggctatgccag

SEQ ID NO: 154618 - DNA, 416 bp, Arabidopsis thaliana columbia
  unsure (1)..(416): unsure at all n locations
gctgagttaggagctgttactgatgaagtctttaaaccttcaagtatgttggaccatattgaacttgagttcgaagcacatatcaatgaacttaaagaagctggatctgatggtatcaacaaagttgaggaatctaaagatgatgaagaagctgcaaggagacataaaatgttggaagccattgaacgtgaatttgaagctgctcatgctggatttgaacaactaaagactgatgattccgcccaaggattagatgatgaacaatctgcaaagagacaaagcatgttggacgagattgaacgtgattttgaagctgctacaaaaggtcttgagcaactaaaggctgatgatttaactggaatcaacgatgaagaacacgctgcaaagagacaaaagatgctngaagagatcgaaag

SEQ ID NO: 154619 - DNA, 437 bp, Arabidopsis thaliana columbia
attaccagaaaaactaaagtgccctttctttcaagtacacatgcatacaagctagttcaaggccaagatcttctaatcatagaccttagacatttggtaaagaaaattgatacatacatattgtgaacatcatgtctccctcaagggactctttggtggacgctcttaaaatgaaaggaggaacaggagaccatagttatgctactaattcacattatcagagaagtgttttctatgagatacaacctttggtcatagagaacgtaagagaaatgctactgaaaaatgggtttcctggttgcatcaaagtggcagacttgggttgttctactggacaaaacacggtgttggccatgtccgcaatcgcctacacgatcatggagtcataccaacaaatgagtaaaaacccaccagaaatcgattgttatttgaacgac

SEQ ID NO: 154620 - DNA, 433 bp, Arabidopsis thaliana columbia
caaaacacaaacccggaaagcttcgtctgccatttttcattcttctaagccctagctcaaagctttctctctcaaatccgccatgactaaacagcacgcgaactggtctccttacgataacaatggaggaacatgtgtggccatcgctggatcggattactgtgttatcgccgccgatactcggatgtctactggttacagtattcttagtcgcgattactccaaaatccataaactagcggacagagctgttttgtcttcctctggcttccaggctgatgtgaaagctttgcagaaggttctcaaatccagacacttgatctatcaacatcagcataacaagcagatgagctgtcctgcaatggcccagcttctctccaacacgctttatttcaagcggtttttcccctactatgcctttaatgttctagga

SEQ ID NO: 154621 - DNA, 460 bp, Arabidopsis thaliana columbia
atcgatttctctcttccaaatctcccaaaagatgtcgaaccctagagttttcttcgacatgagtctcagcggtactcccatcggacggatcgagatggagcttttcgctgatacaaccccaaacacggcggagaatttccgtgctctctgtaccggcgagaaaggaatgggaaagctaggtaagccacttcacttcaaaggatcgatcttccaccgtgtgattcccggattcatgtgtcaaggaggtgatttcaccgccaagaacggaaccggtggtgaatcgatctacggtgctaagttcaaggacgagaactttatcaagaagcatacaggagctgggatgctctcaatggctaactctggtcctaacactaacggatctcagttcttcatctgtaccgataagacgtagtggttagatggtaagcacgttgtgtttggacaagttgttaaaggcttg

SEQ ID NO: 154622 - DNA, 471 bp, Arabidopsis thaliana columbia
atcagatctaaagaagagcgtcttcataaacgcccttcgtcttcttccctgcaaatctattgtctagatctttctttcttccgcgaaacgacaatgagagagtgcatttcgatccacattggtcaggctggtattcaagtcggaaatgcttgctgggagctttactgtcttgaacatggcattcagcctgatggccagatgcctggtgacaagactgttggtggaggtgatgatgctttcaacaccttcttcagtgaaaccggtgcaggtaagcacgtcccacgtgctgtctttgttgatcttgagccaactgtgatcgacgaggtcaggactggtacttaccgtcagcttttccaccctgaacaactcatcagtggtaaagaagacgctgctaacaatttcgcccgtggtcattacaccattgggaaagagattgttgatctctgcttggaccggatcagaaagctcgct

SEQ ID NO: 154623 - DNA, 466 bp, Arabidopsis thaliana columbia
gcgtctctctcccgcaaccttcgattttcgtttattcgcatccatcggagagagaaaacaggcaataagcgaccatgttggggtaccaagatcttctcaccggtgatgagcttctgtctgactctttcccttacaaggagattgagaatggaatcctctgggaagtagaaggaaagtgggttactgtgggagctgtagatgttaacattggtgccaatccatctgctgaagaaggtggtgaggatgaaggtgttgatgactctactcaaaaggttgttgacattgtcgacaccttcagacttcaggagcaaccaacttatgacaagaagggattcatcgcttacattaagaaatacattaagcttttgacacccaagctcagcgaagaagatcaagctgtcttcaagaagggtattgagggagctaccaagtttttgctccccaggctcagtgactttcaattctt

SEQ ID NO: 154624 - DNA, 389 bp, Arabidopsis thaliana columbia
  unsure (1)..(389): unsure at all n locations
aacgaacttgaacacttatgaggtcagcatctatcctttcgaacctagtactgatactaaggttactcttcaagttggagacgggaagatcattggatttcacggtttcgcgggcaaccatgttaattccattggagcttacttcgttccaaaatcctccaccactcctgttccttcaacccctttgaagctgaccgcagaaggtggtgagacaggagctgtatgggacgatggttctcacgatgatgttaagaaagtttatgtaggacaaggccaagatggtgttgcagctgtcaaagttgaatacataaatggttctcaggttgtttttggagatgaacgtggaacgagaacatngctaggattcgaagagttcgagcttgaatcag

SEQ ID NO: 154625 - DNA, 436 bp, Arabidopsis thaliana columbia
ctttccctcttctcccctaaaattcatttcttttccgatcgcacttcttctcaagtgaatggaatagacgttggtggggggagttaagaagatgggtcagatccagtactccgacaaatatttcgatgatactttcgaatacaggcacgttgtacttcctccggaagttgctaagcttttacctaagaatcgtattctttcggaaagtgaatggagagccatcggagtgcagcatagtcgtggatgggttcattacgcgattcatcgtcctgagccacatatcatgctctttaggaggcctcttaactaccagcaggagcaccaagctcagattgctaagtagaaaaattatgcataattcttcctaatctctgtttatgtctcttgtaaacgaagtttttaaatactactctgattttttgtcctgaattttttt

SEQ ID NO: 154626 - DNA, 412 bp, Arabidopsis thaliana columbia
aagtatttggtccagatcaacccattgcattgaaactgctaggatcagagagatcaattcaagctcttgaaggtgttgcaatggaactggaggattcattgttcccattgttgagagaagttgatataggaacagatccaaatgaagtgttccaagatgtggagtgggctattctgattggagcaaaacctcgaggccctggaatggaacgtgctgacttgttggacatcaatggccaaatctttgctgagcagggcaaagctctgaacaaagctgcctctcctaacgtcaaggttcttgtagtgggaaacccttgcaacaccaatgccttgatttgtcttaaaaatgctcccaacattcctgcaaagaacttccatgccctcacgaggttagacgtaaatcgtgccaaatg

SEQ ID NO: 154627 - DNA, 469 bp, Arabidopsis thaliana columbia
aatctgatgaagctctaaaagcatttaagagagggagggaacttgagagagaggccgacgcattagagatatctttaagaaggaaccggaaaagggaactgtctatgcgaaatgttgctgagacgcagaacaaggctgctaccaaagaatctagcaaatcacaaaagcctctacgtcaagggggtaaaggaaatgatgatttggcagctgacctgagggagcttgggtggtctgacgatgaagataagaaaccagcaactataagtttggagggcgaattttcgtctcttctccgtgaaattccgcgaagtgctaatcctcagaagactgggggtattgacaagagtcaggtaattgcccttaagagaaaagcccttacgctgaaacgtgaagggaagcttgcggaagctaaagatgaactgaaaaaggctaaaattttgaaagggactggaagagcagaacttttggt

SEQ ID NO: 154628 - DNA, 417 bp, Arabidopsis thaliana columbia
gttccggcttgggccactaaaggatggttgagagtattatcaaaggaatatccaactctagcattccatgcaagtgttaacaagtcttgcggaaaggggtcacttctctcagttttgaggcagtttgctcgtctaaagagtgacaagcaagccatatctgtgggatttgttgggtatccgaatgttgggaaatcatcagttatcaacacgctgcgtactaaaaatgtttgcaaggttgctccaattccaggagagactaatgtctggcaatacatcacactcactaagaggattttcttgattgattgtcctggagttgtttaccagagccgtgataccgagacagatattgttctcaagggagtggtaagagttacaaacctggaagatgcatctgagcacattggtgaagtactg

SEQ ID NO: 154629 - DNA, 415 bp, Arabidopsis thaliana columbia
tgttattgaaggctttgtggcatgtttccttatcaataaagatgggtcaaagtcaggtcatggtcggaggggatgcctggaggaaggagcgtgggatgccatacatgttatacaggttggttcagaggaggaggaaatggcacaatattgcttaacaagtaccatcatgctttctctgacaactgatgatgagtcttcgggcaaattcggcttatctggatcaattagaagacaaatgaaaatggagctagcagtagctgacggacacctgtgcaatatggggagaatgattgaagaattggaaggcaaactgaggaactcacttgatcagcgcaagtttactttgggaagacaagagaaatggtttgcacattgcgtccaccagctgagattgtacaaatgagattgcctgaca

SEQ ID NO: 154630 - DNA, 306 bp, Arabidopsis thaliana columbia
gttacacaattttcagaaagggtatgaaatcaatgaaaaggagcccaaaggttgaatttcaaaacttatacaaagcttttaaaattaaacttgattttgggtctagcttaactttgagttcatgatccgatcatcatttgtttgaccggtaccaaaacaagacacatttttttttccaaacggtatatcttacatacaaatgtattcttcaatcttaaaatttttttttatcaggggtcaagaacatttgctatgagaataatactcttccccggatgagtcaatttctgaaacttggcttatacc

SEQ ID NO: 154631 - DNA, 474 bp, Arabidopsis thaliana columbia
cgattcgcttaaaaagcctcgtctagatcagtgaccacagattgccttcctcttcattgcccggaatcgactccctctcgaggttgtctgggatgctttctttaagggtgaggatggaaagttctcaatatatgttcattctagacctggatttgttctcaacgaggctacaacgcgatccaagtactttttggatcggcaacttaatgacagtatacaggtagattggggtgaatcaaccatgattgaagcagaacgtgtattgcttagacatgcacttagagattcatttaatcaccgctttgtttttctttctgatagctgcatacctctgtacagtttcagctacacgtataactacatcatgtcaacaccaactagtttcgttgataagcttgcagatacaaaagatagccgttataatcctagaatgaatcccattattcctgttcgtaactggagaaaaggatcaca

SEQ ID NO: 154632 - DNA, 475 bp, Arabidopsis thaliana columbia
agcgaattcaaacccgatccatcgagattctggatcaacccgattacccaagatccaatcgtgctaattgatgaatcaatcggtcccttctaccgtatcttcttctccgacgactgatacgatggacgcttcgccgcttcttggccggaacagacgtaaccgcccacggtcctctcagccgattcgtggcgcggcgtcgagacttctccgccgtgctagcaaccgccggatgatgctccgtgagccctccgttcgagtccgtgaggtggcggctgagcagcttgaggaacggcagagtcaatgggcttactctaaacccattatagttctcgatatactttggaatttcctatttgtgattgtttcaatcgcgattctagggtttagttctgatgaagatcctgatgttcctcttaggttgtggatcattgggtataatggtcagtgtttgtttcatgttggatgtgtcattgct

SEQ ID NO: 154633 - DNA, 456 bp, Arabidopsis thaliana columbia
aaagtgagcgtgttgatgcataactaacgtttccattttccgcatcaatctcatcgccttggtcttctgtcgcgctggttcaggcgcctctctctttcttcatcttcactcccaaaaccctaatcttcaccagaaccaggatctctggtttcccttatcttgcttcccggcgatcccgcgatttcatcaacgggagggatgatttcgctgacgatacgaggagctggaaccggaagatcaaaccggagtatgggttcgatgaggattacgatggagaagaagatgatgatgatcacgaggaagaagatagaagcttggatctgttacttagatttgtagaaaatgttttcagaaagatttctaagagagcaaggaaagctgtccgatcaattttgcctagttcgatctctacgaagctcgtggggtttcagtgtatggagtcctattcttgctttt

SEQ ID NO: 154634 - DNA, 456 bp, Arabidopsis thaliana columbia
ctctcactcagactaagacagagtcagaaacaatggcgaaatctccagaaacagagcatccgaacaaagtctttggttggggtgctagagacaaatccggtgttctctctccttttcacttctctagaagagacaatggtgaaaatgatgtgacagtgaagatcttgttctgtggagtttgccacactgatttacacaccatcaaaaacgactggggatactcgtattacccagtagttccagggcatgaaatcgttgggatcgctacaaaagttggtaagaacgtgactaaattcaaagaaggagatcgtgtcggagtaggagtgatcagtggctcgtgccaatcttgcgaatcttgtgaccaagatcttgaaaactactgtcctcaaatgtctttcacatacaatgcgattggatccgatggaaccaagaattacggtggctattcggagaaca

SEQ ID NO: 154635 - DNA, 280 bp, Arabidopsis thaliana columbia
gtctgggttagagaagaatggggcaaggttgattcaaacatcccatacttattgcttatgctctgtttactgagttcaccggggataaatcaaaacccggaatgtgtttgtatcctgaacaactgtttcttgtttttattgtatgggtaagaaaagaaaagaaaaacccatgtgatttgttttcaaaagacatgaagaagagggtttttattgtcaccatttatccacttttcaaaactactattgtaagaaacaatttctctaatataatgaaaccata

SEQ ID NO: 154636 - DNA, 157 bp, Arabidopsis thaliana columbia
agctcctccactgaatcgctctcatccttcgcttcttcgaattccaaaggtagaacagtagaagaaatcatggatccagctgaaatgagatatttggaagaagaggatggtccgttgatgaagacaatcaaaggtagtatcactggttttggtgctg

SEQ ID NO: 154637 - DNA, 448 bp, Arabidopsis thaliana columbia
ccagaaccctagaattcgaaatcttcaaagtttcccgacaaagcgccatgtcgctcactatgccggcgaatctggtggggaacgcgagatctaacaaatctctcactcaatccgtacctaaatcctccgcaagattcgtctgctccgatgacaaatcctcctcctccacacctcaatccatgaaagctttctccgccgccgtcgccctctcttccatcctcctctctgctcctatgccagctgtcgctgatatctcaagtttgactccttgcaaggactcaaaacagttcctaaaagagagaagcaacagatcaagaagcttgaatcttctcttaagctctacgctcctgaatctgcccctgctcttgctctcaatgctcagatcgagaaaaccaaacgcaggttcgacaactacgggaagtacggattgttatgcgggtcaaacggt

SEQ ID NO: 154638 - DNA, 432 bp, Arabidopsis thaliana columbia
aatactgccaagaaacctgccaacaaagggatttctgtgatgccaaggactgaaaccaagcacccattggatcctctttctgctgcagaaatatcagttgctgtggcgactgttcgcgcagctggtgccaatcctgaggttagggatggcatgcgtttcattgaggtggcatcagtggaaccagataaacaagttgtggcgctcgctgatgcttactttttcccaccgttccagccatcactacttccaagaactaaatctggacctgtgattccgatgaagctccctccaaggcgagctagacttgttgtttacaaccaaaagtctaatgagacaagtgtatggattgtggcattgtctgaagttcatgctgtcactcggggtggacatcacaggggaagagttgtttcctcacaagttatacctgatgtt

SEQ ID NO: 154639 - DNA, 435 bp, Arabidopsis thaliana columbia
  unsure (1)..(435): unsure at all n locations
gaccatattaaaaacggacaaattgggattgcgcataatccactttggtacgagccatatgatccgagtgatccagatgatggcgaaggatgtaatcgagctatggacttcatgcttggttggcatcagcatccgactgcttgtggagactatccagaaacgatgaagaaatcagttggagatagattaccgagttttacaccagaacaatctaagaaacttataggctcttgcgattacgttggtataaactactatagctcgcttttcgtgaagagtatcaaacacgtggatcctacgcaacctacttggagaactgaccaaggcgttgattggatgaaaaccaacatagatgggaaacaaatagcaaaacaaggaggatcagagtggagtttcacatatccaacaagactcagaaacantttgaagtatgtg

SEQ ID NO: 154640 - DNA, 383 bp, Arabidopsis thaliana columbia
  unsure (1)..(383): unsure at all n locations
cttctctcaaccttttggtggaaaaaaccataaaatggggttgcatccaatttccgacgccggtgaacacaatcccttcgggggtctgaccgccnacgaattctacgccaaacattccgttagccactcctccgctttcatcaccaaccctcgcggtctcaaactcttcactcaatggtggtcaccactccctccaactaaaccaatcggtatcatcgctgtcgttcatggcttcaccggcgaatccagttggttccttcagctcacatcaatcctcttcgctaaatccggtttcataacctgcgcaattgatcaccaaggccatggattctccgatggactcatcgctcatatccctgacatcaatcccgtcgtcgatgact

SEQ ID NO: 154641 - DNA, 428 bp, Arabidopsis thaliana columbia
gcgtttcactgctgttgagctcttaaataatggtgctaaggtttaccaatgtgaaagatgcaagcagaaagttaaggctaagggacaggtaactgtttctaaagcaccttacgttctaaccgtacatctgaagcggtttgaagcacacagatccgaaaaaatcgataggaaagtagattttacctctgcaattgacatgaaacctttcgtcagaggtcctcatgaaggtaatttgaagtatactctatatggcgtgttagttcattatggtcgaagcagccattctggtcactacgcctgctttgttcgcacatcaagtggcatgtggtattcccttgatgacaacagggttgtccaagttagtgagaagactgtgttcaatcaaaaggcatatatgctattctatgttcgggatagacaaaatgctg

SEQ ID NO: 154642 - DNA, 430 bp, Arabidopsis thaliana columbia
aaaaaaactcaagagacaaaaaaaaaaaggttggcgcgtcagtgatggagaagattattgacgtagcttatggcgcatcagtgaaggtgggtttgacgttgttggagatgaatctgttgccggatattgtcattaggcggctcacacgtctgcttctggccggtcgtctccgttccggttacaaacccacggcggagatgcaactctccgatctcctccgttttagtgactctataaagaagatgcctatagctatccataccgagaagccaaagactcaacactatgaattaccgacagctttcttcgaacttgtccttggaagaaacatgaagtacagctcttgttacttctcaaacgattcaagtagcttagaagatgcagaggaagcaaatttggctctttattgtgaaagagctaaagtggaaga

SEQ ID NO: 154643 - DNA, 461 bp, Arabidopsis thaliana columbia
caagactcctttcagattcttacttgcagctatgggtaaagagaagtttcacatgaacattgtggtcattggtcatgttgatgtctggaaaatcgaccacaactggtcacttgatctataagcttggtggtattgacaagcgtgtcatcgagaggttcgagaaggaggctgctgagatgaacaagaggtccttcaagtacgcatgggtgttggacaaacttaaggccgagcgtgagcgtggtattaccatcgatattgctctatggaagttcgagaccaccaagtactactgcacagtcattgatgccccaggacatcgtgatttcatcaagaacatgattactggtacctcccatgctgattgtgctgttcttatcattgactccaccactggaggttttgaggctggtatctctaaagatggtcagacccgtgagcacgctcttcttgctttcaccctt

SEQ ID NO: 154644 - DNA, 428 bp, Arabidopsis thaliana columbia
gtccgatatatcgttaccagagaaagagagttcagagatttagttagcttaatttttcttggcgttttgaaattaaggaagggattgttatcaccggaggagagagagaaaatgttgggaattttcagtggagctatagtatcgccgccggaagagttagtggctgccggaagcagaactccgtcgccgaaaacaaccggatcaactttagtaaaccggttcgtcgagaaaaatccatccgctgtttctgtacaagtcggcgactatgttcagcttgcttacagccatcacaacgagagtcctctccggcctagatcatttggagctaaagatgaaatattctgcttgttccaaggctcacttgacaacctaagaagcttgaaacatcattacgggcttgcataatacgcatacgaggttctcttggt

SEQ ID NO: 154645 - DNA, 414 bp, Arabidopsis thaliana columbia
atctcctcttgcaaaccaacgtattacactttctaagagatcaatatggctggagtgatgaagttggcatgcatgggcttggcttgcatgattgtggccggtccaatcacagcgaacgcgcttatgagttgtggcaccgtcaacggcaacctggcagggtgcattgcctacttgacccgaggtgctccacttacccaagggtgctgcaacggcgttactaaccttaaaaacatggccagtacaaccccagaccgtcagcaagcttgccgttgccttcaatctgccgctaaagccgttggtcccggtctcaacactgcccgtgcagctggacttcctagcgcatgcaaagtcaatattccttacataatcagcgccagcaccaactgcaacaccgtgaggtgatgagcgacggtc

SEQ ID NO: 154646 - DNA, 441 bp, Arabidopsis thaliana columbia
  unsure (1)..(441): unsure at all n locations
aacaaataataaaaacgaaacacacaaaatttaaaaaaaaaaaagangggacatggacgccattgattccgtcgaggatcctggtagagactttgccaaggacagcattcgcctcgttaagcgttgtcataagccagatcgcaaagaattcacgaaagttgcagtccgtacagcaatcgggttcgtagtaatgggattcgtgggattctttgagaagctcatctttattccaatcaacaacatcatcgtcggtgctacttagataacaaagggaagataaaagatggagaagggtagttacagctttgttgttttcatgaagacacttcacagtttttttcttttttcttagtcagatactcaaaaagaggaaacattttgtgaacctagtttaaccacacatttgggatcaatctctagtaattttctttctggttaatg

SEQ ID NO: 154647 - DNA, 454 bp, Arabidopsis thaliana columbia
  unsure (1)..(454): unsure at all n locations
agagaaagaaaagaagaagcaaaacagagagaaaatgtcaggattgtttgataaacaagccgatctataccttgacgccagacgctaaggacccctctgagtggttctcgaagctcgctgatctcaccgatcaccacggtttagcctgggatgctgccaccggaaatggccaagcagctctcgccgttgcagagcattacgagagtgtcgtagcaacggacgtgagtgaatcgcagctgaagctagcaacgccacatccgaaaatcaattatcgccatacgccgacgtcaatgaccgacgacgagctagtggaattaatcggaggagaaaactcagtggatctaatcacggtcgcccaaggcgtacactggttcgatctccctaggttctactcagtggccacacgactcctncgtaaaccaggcggaatcatcgctgtctggggatacaacga

SEQ ID NO: 154648 - DNA, 435 bp, Arabidopsis thaliana columbia
gtcgctgtaaagtttgatttgcttctttttatatactcacatacttctcctccatacactgtcctctgcaatcctcagttgggtttctaagccctaataccatctcaaagaagagatcaagatttgaaatcaagaagacaccattactcagatcaacatgcttgccgttcaccgtccttcttccgccgtatcagacggagattccgttcagattccgatgatgatcgcgtcgtttcaaaaacgttttccttctctctcacgcgactccacggccgctcgttttcacacacacgaggttggtcctaatcagtgttgctccgccgttattcaagagatctccgctccaatctccaccgtttggtccgtcgtacgccgctttgataacccacaagcttacaaacactttctcaaaagctgtagcgtcatcggcggaga

SEQ ID NO: 154649 - DNA, 331 bp, Arabidopsis thaliana columbia
cggattgaatcaagaactgaatttgaattcaaactttgatggaaacactcttgggtatagccggatccctggcaaccaatagttcaacagtgcttcaccaaaccgttacaactctccaattgggtacaacagaggagactctgcttacaacccgagcaacagagacttgtggggaaacagaagcgattcctctggtccaggttggaacttgagagtttcggttggtaacaacagaggaaactggggactttcttctgaggtgagcgataacaatggctatggaagaagctatggggctggttctggacttgcggggttatcattcgcgggt

SEQ ID NO: 154650 - DNA, 401 bp, Arabidopsis thaliana columbia
acccacgcgtccgttatgctccttaattcgcttcttcaaagaatgctgttttgacattggtggagaagggagtgtcatgggaaactgtcaatggggatcggatgaaaggagaacagagacagcctgagtatctcgcgattcagcctttcggtaaaatcccactcctagccgacagagactacaaaactttcgactcgcgtgcgatcatgaggtatatagcagagaagtatagatcacaaggacctgatcttttggggaagactattgaagagagaggacacgtagagcattgcttagacgttgaggctacaagttaccatccaccactattggctttaacgctcaacattgtctttgcaccacttatgggtttccctgctgatgagaaaggtattaaggag

SEQ ID NO: 154651 - DNA, 469 bp, Arabidopsis thaliana columbia
ataactttcaatttttattttcagctcaagctcctgccgcaccacaaccagtgacactctgggaaccaccatgttcaaccaggagtgatttagaaattctgcctcctctctctcagcaacaagttccacttgaaagcttgtaccagtcaagtattgatcttaacggaaagaaacataatccactagcaaagattggtggccttcaagtgcagttcttacgccttgttcaaaggtttgggcagtcacagaataatattctagtctccaaggttttgtatcgggtacatcttgcgatgctgatacgagctgaggaatcagaacttaagaatgtaaaacttaggcaagatagggccaaagctttagcaagggagcaagaatcatctggcataccggagcttgatttctcacttagaatccttgtcctggggaaaacaggtgtcggcaagagtgcaaccataaactctatttt

SEQ ID NO: 154652 - DNA, 476 bp, Arabidopsis thaliana columbia
tacagtccatctccaaaggttgactacatgttttcaccacccccatacgtctacagctctgcacccccaccatactagtctggttcaccaaaggttaactataagtctccaccaccaccatacgtctacagttctccaccaccaccgtactactctccttctccaaaagttgaatacaagtccccaccacccccatacatctatagttccccacctccaccatactacgctccttcaccaaaggttgactacaagtctccaccaccaccatacgtctatagctccccacccccaccataccactctccttctcctaaagtcacttacaagtctcccccaccaccatatgtttactagatgccatactatcgaatttgaattgtttcattaacaggaaacatgatcgtaatattttcaatttatgattttttttcatttgattcttctggtttagttcttttagtcaactatcttct

SEQ ID NO: 154653 - DNA, 389 bp, Arabidopsis thaliana columbia
cttacaacaacaaatcttaaacgttttactttgtgctgcactactcaacctcaatggccgggtcaacaatggctcggggctgggctgccttcgccggttaggccgtcaagctttcccccgcggcatctgaagtccttggaagcggccgtgtgacaatgaggaagactgttgccaagccaaagggcccatcaggcagcccatggtacggatctgaccgtgtcaagtacttgggtccattctctggcgaatcaccgagctaccttaccggagagttccccggagactacggatgggacaccgccggactttcagctgaccccgagacattcgcaaggaaccgtgaactagaagttatccacagcaggtgggccatgctcggagccctatgc

SEQ ID NO: 154654 - DNA, 388 bp, Arabidopsis thaliana columbia
aagacgtcaatctcaagctgctcacaatgttgtaaatctgacagttgaagacgatgctgacatgacgaaaaatattgcagacgactgaggtccttggatatgacagtctctctgctcgtgctgttgtgaaaagtcttttggtgaatgggaagcctgtgataagggtttctgaaggcagtgaagtagaggttctgctggacagaactccgttctatgctgaatcaggaggtcaaattgcagatcatggttttctttatgttagcagtgatgggaaccaagagaaagctgttgttgaggtaagtgatgtgcagaagtctcttaaaatttttgttcacaagggcactgtaaaaagtggagctctagaagttggcaaggaggtggaagcagc

SEQ ID NO: 154655 - DNA, 435 bp, Arabidopsis thaliana columbia
ctgggttttagttagatggatctctgttgcgaccttctgttgatgattctacttttcgaatgtggagtagatgcaatagtatggggaaatcgtggattcttaatgttgtgaacaaggagatttatgacagtatactttattatgaagatgctgttgagatgtggactgatctatttactcggtttagggtgaataatttgcctaggaagtatcagctggaacaagctgtgatgacactgaagcagggatctcttaatctatccacttactttacaaagaagaaaactctatgggaacagttgttgaatactaaaactcgtagtgtgaagaagtgtgactgtgatcaagtgaaggagctgcttgaagatgctgaaacaagtagagtcattcagtttttgatgggtttaaatgatgaccttaatactatcatgagtc

SEQ ID NO: 154656 - DNA, 455 bp, Arabidopsis thaliana columbia
agagaacaacaaccaaacactcatttctccacatcttgagagaaaaaaacagagcaagtatattagagatctcatggcgatggcggtctccggagctgtcctcagtgggcttggttcttcgttcctcaccggaggcaagagaggtgccaccgcattggcaagcggcgtaggcactggagctcagagagttggcaggaaaactcttattgtcgctgctgcggctgctcagcctaagaaatcttggatccctgccgttaaaggtggtggcaacttccttgaccctgaatggctcgatggctcgctaccaggagatttcgggttcgacccattgggtttggggaaagacccggcttttctgaaatggtacagagaggctgagctgatccatggccgatgggcgatggcagcggttcttgtgatctttgtcggccaggcctggagcggtgtggcatggt

SEQ ID NO: 154657 - DNA, 212 bp, Arabidopsis thaliana columbia
cttcaccacataaccacttctgtctctgcgtatctccataagactctttgagaagctttcgtctgtttctccgctgttatgggtagctccggcgaccttaactggaaacttgcggaccaccccaagcttcccaaaggcaaaactatcggtttgattgttctcgatggatggggtgaatctgatcccgatcaatacaattgcatccataaagc

SEQ ID NO: 154658 - DNA, 427 bp, Arabidopsis thaliana columbia
cacttttgaagtaactatagtaagattgatcagcaagcaaaatatggctcaaaaggttgaagcaaaaggagggaaaggaggcaaccaatgggacgatggatccgatcatgacgccgtgaccaagattcaggttgcagtaggcggaatgggaattcaatacattcagttcgattacgtcaagaacggacaaaccgaacaaactcctcttcgtggtatcaaaggcagtaccattccaactgatccgtttgtgattaaccatcctgaggagcatctagtttctattgaaatttggtataaacctgatggtcttattcaagggcttaggttcatatccaacaaaaagacttctcgtttcattggatacgatcgtggtactagatcatttctccaagttcaagacaagaagatcattggctttcatgggtct

SEQ ID NO: 154659 - DNA, 448 bp, Arabidopsis thaliana columbia
agtaatcctaactatacaaaacacataacattttggttccttcaacaaaagttctctcttgacttcggttatatgtcggcggggatgagcctccggtgatgagtccatcatcaacgaccatctccaacttccatcggacggcaagtggagaaccgatgaagaagtgaggtccatctacttacaatggtccgcagaacacgggaaaactaacaacaacaacaacggtatcatcaacgaccaagacaaaagattcaatattttcaaagacaacttaagattcatcgatctacacaacgaaaacaacaagaacgctacttacaagcttggtctcaccaaatttaccgatctcactaacgatgagtaccgcaagttgtacctcggggcaagaactgagcccgcccgccgcatcgctaatgccaagaatgtcaaccagatatactcatccgct

SEQ ID NO: 154660 - DNA, 438 bp, Arabidopsis thaliana columbia
cttcgatattgttctactcataggtctttgcctcataatctctgtctttcccgatacaaccaccgcacaactaagccgcgggtgctggtccaaaacttgccccaatgtcgaacaaatcgtgagaaatgctgtccaaaagaaaataaagaagacattcgtcgccgtccctgccactctccgtctcttcttccacgactgctttgtcaatggttgtgatgcatctgtcatgatccaatcaacgcctaagaacaaggcagagaaggatcatccagataacatttcgctagctggagatggatttgatgtggtgatccaagctaagaaagcccttgactctaaccctagttgccggaacaaggtctcatgtgccgatattcttactttggccacccgagatgttgttgttgcggctggaggaccgtcctatgaagttgaact

SEQ ID NO: 154661 - DNA, 464 bp, Arabidopsis thaliana columbia
  unsure (1)..(464): unsure at all n locations
tacaaaacaaaaacaagaatgggttgatccatcgagcaagatctgctctctaccgagatcggtaatcgtgggatcgaaccaggcggtcctaacgccggctcaccaacgttctcggttagggtcaggagacgtttgcctgattttcttcagtcggtgaacttgaagtacgtgaaacttggttaccactacctcataaaccatgcggtttatttggcgaccataccggttcttgtgctggtttttagtgctgaggttgggagtttaagcagagaagagatttggaagaagctttgggactatgatcttgcaactgttatcggattcttcggtgtcnttgttttaaccgcttgtgtctacttcatgtctcgtcctcgctctggttatcttattgatttcgcttgttacaagcccttcgatgaacactaggtgacataagaagatttcttagaactagcgagaaaatc

SEQ ID NO: 154662 - DNA, 425 bp, Arabidopsis thaliana columbia
aaaaagatgaagcaaaaaaaaaaatgagagagagaaaaagacaattcagagataatacaaaggaatggttttgtttgaagagagaaagagaaagagagaactcgacgaagaatgatggtgggaggttaaattccccaaacccccagagctcttcattttcttcatatcgacgatatgctaaatggctgctgctaccattactgatctcttctcttaagctctctttgtttggggcatggaagaagagcttgccatgcttagacagctcatcggtcagcttcaagagctcttgcacaacggctctcctcctcctccttcttcttcttcatctctgtcgtcttcttctccgtcatttttggttctccaccatcctcagtatcagaacggatggtgtttgccctgtattgaggatacttctgctgatg

SEQ ID NO: 154663 - DNA, 299 bp, Arabidopsis thaliana columbia
caaaaaaacagtgccctttcgctcactctttgagtcgtatctgctctcttcttaatccgacgtctctcactttttcgggggagtggttagatcgtacaaagctcaaaaagaatgttgggaattttgaagcaaaaaaccatcgatagaacctcgaattttaagagggccccatttccaattgttttttgttaggacctatccagctggtgcaaaaaagatgacagtcagagatgctctaaatactgcatttgatgaggaaatgtctgctgatcctaaagtatttgtcatgggtgaagagg

SEQ ID NO: 154664 - DNA, 306 bp, Arabidopsis thaliana columbia
ggcgttcgtgaaggtttcaatggacggagcaccgtacttgaggaaaatcgatttgaggatgtataaaagctacgatgagctttctaatgctttgtccaacatgttcagctcttttaccatgggcaaacatggaggagaagaaggaatgatagacttcatgaatgagaggaaattgatggatttggtgaatagctgggactatgttccctcttatgaagacaaagacggtgattggatgctcgtcggcgacgttccttggccaatgttcgtcgatacatgcaagcgtttacgtctcatgaaaggatc

SEQ ID NO: 154665 - DNA, 447 bp, Arabidopsis thaliana columbia
aaaatcgaaaatggttgcctcagccgccgcacgacctcttgtcaccgtccaaggacttgacggtgacatgagcaccgatcaggccaccaccgtcactttaccagacgtcatgactgctccagttcgacctgacattgtcaacttcgtccacgcccaaatctccaacaacagccgtcagccttacgcagtctccaaaaaggccggtcaccaaacctccgccgagtcctggggaaccggaagagccgtgtcacgtatccctcgtgttcctggtggtggaactcaccgtgccggtcaagcagcgttcggaaacatgtgtcgtggtggtcgtatgtttgctccgactaagatctggagacgctggcaccgtcgtgtcaatgtcaacatgaagaggcacgcgattgtttctgcaatcgctgctactgctgttccagctcttgtgatggctcg

SEQ ID NO: 154666 - DNA, 423 bp, Arabidopsis thaliana columbia
  unsure (1)..(423): unsure at all n locations
aaatcgtccattgaagtgaacagtcagcatcgttttgcttgcttgtgcgtttctctcgaacgtctctccatggctgtggcgcgccaattcagccgattatgcgttcgaccggatactttcgtgcgggagaatcatctctctggatccggatctctccgccgccggaaagctttatcagtccggtgctcgtctggcgatgagaacgctccttcgccatcggtggtgatggactccgatttcgacgccaaggtgttccgtaagaacttgacgagaagcgataattacaatcgtaaagggttcggtcataaggaggagacactcaagctcatgaatcgagagtacaccagtgatatattggagacactgaaaacaaatgggtatacttattcttggggagatgntactgtgaaactcgcttaagca

SEQ ID NO: 154667 - DNA, 472 bp, Arabidopsis thaliana columbia
gctccattggctaatgctactgctattagttcctgttcaagaaagggaatattgctgaaaggtgcagaggttctagaagctgtagcggtgttgccatactattgcttttgacaaaactggtaccttaacaaccggcggccttacttgtaaagcaattgaacccatttatgggcaccaaggaggaactaattcaagtgtaataacttgctgcattccaaattgtgaaaaagaagctcttgcagttgcggctgccatggagaagggcaccacgcatcctattggaagagctgttgtagatcacagtgtgggtaaggatcttccttctatttttgttgaaagcttcgaatattttcctggtagaggccttactgctactgtcaacggtgttaagacaagagctgaagagagtagatttcgaaaagcatcacttggttctatagaggtcattaccctactttcaaatctgaagatg

SEQ ID NO: 154668 - DNA, 445 bp, Arabidopsis thaliana columbia
cttaccgattccgaattggctaaggaagttgactactttatccgcaacaagtggattccttgtgttgaattcgagtaggagcacggatgtgtgtaccgtgagcacggttactcacccggatactatgatggacggtactggacaatgtggaagcttcccttgttcggttgcaccgactccgctcaagtgttgaaggaagtggaagagtgcaagaaggagtaccccaatgccttcattaggatcatcggattcgacaacacccgtcaagtccagtgcatcagtttcattgcctacaagccaccaagcttcaccggttaatttccctttgcttttgtgtaaacctcataactttatcccccatctttgatttatcccttgttttctgctttttcttctttttgggtttaatctcggactaacgtttgtttccggttgcgaacatatt

SEQ ID NO: 154669 - DNA, 425 bp, Arabidopsis thaliana columbia
aagaaaagaaaaaagaacttgttttcctcttcatcaagacacataaatcgtaatccatttgctctcaactttaggaatctcaggtctgcgatttggaaatccggcgacaatggtgagagatattgaagatgagattagagacgagaagaatcctcgtcctcttgatgaagatgatatcgctctcctcaagacttatgggttagggccttactctgcacctatcaagaaagtggagaaagaaattaaggatctcgccaagaagatcaacgatctatgtggtatcaaggagtctgatactggtttagctcctcccagtcaatgggatcttgtatctgataagcaaatgatgcaagaagagcaacctctgcaggttgcgagatgcacaaagattataagtccaaacactgaagacgccaaatacgtca

SEQ ID NO: 154670 - DNA, 408 bp, Arabidopsis thaliana columbia
gcgatagctatggcggttgtttctttcccatctctgctcaacaaaacaaccttatcctcttgactctgcactcccactttccggccggggaaatcctcttcacttctcatcaaatcatcaccaaaaaccagattcgtggtttcatcatccatggaagctggaatcggagtaatggggtcaaaactcgggatgatgagtttcttcgaagaagacggcacagtagttccagtaacagtcgtcggattccgcgaaggtaacatcgtaacccaaatcaaaaccctagccacagacggttacgacgcggttcaaatcggttaccgtcgtgtacgcgacaaaaagctaactaaaccggaaaccggtcatctccaaaaagccggtacaatcccaatgagacatctccaagagttc

SEQ ID NO: 154671 - DNA, 464 bp, Arabidopsis thaliana columbia
gaagttcaacgttgcgaatccaactactggatgccagtagaagctcgagatcgacgatgacgagaaactacgtgcgttttacgacaagagaatctctcaagaagtcagtggagatgctttgggcgaggagttcaaaggatacgttttcaagatcaagggtggttgcgataagcaaggtttcccaatgaagcagggagttttgactccaggccgtgttcgccttttgcttcaccgaggaactccttgcttcagaggacatggaaggagaactggtgagaggagaagaaagtctgttcgtggttgcattgagagccctgatctctctgttctgaaccttgtcattgtgaagaagggtgagaacgatcttcctgggcttaccgatactgagaagccaagaatgagaggaccaaagagagccttcaagatccgtaaacttgttaacctcaagaaggaagatgatgtca

SEQ ID NO: 154672 - DNA, 460 bp, Arabidopsis thaliana columbia
gagaaaatgtctgcctgtttgtgtcttgttttcctgttcttctctattgttgcagaagcaacgtattctccaggaggtttggaccatctttcttctctaagactaaagaagaaggtgtccaagtcaaaacatgagttaccttttgaaactcgttacttccctcaaaatcttgaccacttcagtttcacaccagacagctacaaagtcttccaccagaagtacctcatcaacaaccgtttctggcgaaaaggtggtcccatctttgtttacactggaaatgaaggagacatcgactggtttgcttccaacaccggtttcatgctggatattgctcccaagttccgggctcttcttgttttcattgaacaccggttctatggagaatcaacgccatttgggaagaagtcgcataagtcagctgagacattgggttacctaaactctcagcaagcgttggctg

SEQ ID NO: 154673 - DNA, 450 bp, Arabidopsis thaliana columbia
gattggtcaacccgttatgagatatgcctgtgagtagccagaggtctagtctatctccatgaggaggcaaggcttcgcataggacacagggatgtgaaggccagcaacattttgcttgactctaaattagtaccaaaagtttctgattttgggcttgcaaaactgtacgatgacaagaaaacccacataagtacccgggttgcagggacaattgggtatcttgcgccagagtatgccatgcgtggacatctaacagagaaaacggatgtatatgcctttggtgttgtggctcttgagctagtgagtggaaggccaaactctgatgagaacttggaggatgaaaaaagatatcttcttgaatgggcatggaatctacacgagaaaggccgtgaagttgaacttattgatcatcagctgactgaattcaacatggaagaagggaacgcatga

SEQ ID NO: 154674 - DNA, 442 bp, Arabidopsis thaliana columbia
ggaagaagaagaagaagaagaagaaaaacctttggagattgagagggaaaagcaggtttacttggctaagctctccgagcaaaccgaaagatacgatgaaatggtggaggcgatgaagaaagttgctcagcttgatgtggagctaactgtggaagagaggaatcttgtattctgtagggtacaagaatgtgattggtgcaaggagagcatcatggagaatactatcttccattgagcagaaggaagagtccaagggaaatgatgaaaatgtcaagaggcttaagaattatcgtaagagagttgaagatgagcttgctaaagtttgtaatgacatcttgtctgtcattgataagcatctcattccatcgtctaacgctgtggagtcaactgtctttttctacaaaatgaaaggagattactatcgctatcttgcggagttcag

SEQ ID NO: 154675 - DNA, 469 bp, Arabidopsis thaliana columbia
atctggtgttcttctcgtacttgcggattcctccgaattgtttcttcacagtttcttaacgcttggaagtatggtgagtgagagaagagtgcatccggattgtataaacgcttcaaatccttatcacgagtgtgtcgagtattgctttaagaaaatcgctgaagcaaaggccagattcgagaagcagaacactggattagctaaagttcacgagcagacgagggagccgctcgatgataaaagaatagaggaagatagttcagaagaagaagaggaggaagaggataaccaagaacctcaagtagatgtaactcaacttacagggagacaaaagaagttgtttgagttgagacttaagatgaatgaagcaagaaaatccaatcagacggatgtcgggagtgaaaagaagaaaatggaagcaccaacagagacattaagaatctcataacagaaatggttggaggggagg

SEQ ID NO: 154676 - DNA, 423 bp, Arabidopsis thaliana columbia
cgaacaggaagacaaagaaggacacgttggcatcaacttgtccaaagatctcatggccatcgccggtgaagccctcaaggcagacatcaccacaataggtcctttggtcctaccggcgtcagaacaacttctcttcctcacgtccctaatcggacgtaaaatcttcaacccgaaatggaaaccatacataccggatttcaagctggccttcgaacacttttgcattcacgcaggaggcagagcggtgatcgacgagctccaaaagaatctacaactatcaggagaacacgttgaggcctcaagaatgacactacatcgttttggtaacacgtcatcttcatcgttatggtacgagcttagctacatcgagtctaaagggagaatgaggagaggcgatcgcgttttgcaaatcgcgtttgggag

SEQ ID NO: 154677 - DNA, 457 bp, Arabidopsis thaliana columbia
gcctcatgttaggtatgggcagtgcagtcgtaacactatgtggacaagcctatggagcccatcgttacgagatgcttgggagctatctccaaagagcaacaatagtcctcgctctagttggcttgcccatgacattactatacaccttctcgtaccctattctaatcctactaggggaacccaaaacggtgtcgtacatgggatccaaatacatcgccgggctcatccctcaaatcttcgcttacgccgtcaacttcacggcccaaaagttcctccaggcccaaagcgtggttgccccgagcgccttcatctcagccgtcgccctcatcctccagatattggtgacgtggatcaccgtttatgtaatggacatgggctttatgggcatagcttattgtcttacaatttctaggtgggtcattgttggatcccagtgtttttacattgcggttaggcc

SEQ ID NO: 154678 - DNA, 436 bp, Arabidopsis thaliana columbia
ttcgtttttatctttttcctccgaagaagatgttaagaggttgaagaagaagaagatgccaggtccagtttttgaggaagtgaatgaggaggctcttatggatgccattaaagagcagatgaagctccagaaggagaacgatgttgttgttgaggatgtgaaagatggagacgaagacgatgatgatgttgatgacgacgacgatgagattgctgatggagctggtgagaatgaggcttccaagcaaagtagaagcgagaagaaaagccgaaaggcgatgctgaaactcggaatgaaacctgttactgatgttagcagagtgactatcaagagatcaaagaatgtgttgtttgtcatctcgaagccggatgtgttcaagagtccgaactctgagacctatgtgatattcggtgaggctaagattgatgacatgagc

SEQ ID NO: 154679 - DNA, 459 bp, Arabidopsis thaliana columbia
gtcaagagattaatggttaggagatcaactcttatgaggctatctcgaggcagggatttaagagctgatcttgtttcatgtgccaaagctatgtcggaaaatgatcttatgatggctcattcaatgatggagaagttgcggcagatggtttcggtttctggtgagcctattcaacggttgggagcttacttattggaaggtctagtggcgcagctagcttcgtcgggcagttctatatacaaagcacttaataggtgtcctgaaccggctagcacagagcttctctcttacatgcacattctctatgaggtttgtccttacttcaagtttggatacatgtcagcaaatggtgctattgctgaggcaatgaaggaagaaaacagagttcacattattgatttccaaatcggtcaagggagtcaatgggtcactcttatccaggcttttgcagctaggcct

SEQ ID NO: 154680 - DNA, 391 bp, Arabidopsis thaliana columbia
gtttgttgtatatctagaaatggcggagactttgaaagaagattcgattatgattcgagaggtttgggattacaatttgggggaagaattcgcgttgatccgtgagattgttgacaaattcagctatatcgctatggatactgagtttccaggtgtggttttgaagcctgttgctactttcaagtacaataacgatcttaactacaggactctcaaggaaaatgtcgatttgttgaaattgattcaagttgggttaactttttctgatgagaatgggaatcttccgacttgtgggacggataagttctgcatctggcaattcaatttccgtgagttcaacatcggggaggatatctacgcgagtgagtctattgagctgttgcgtcagtgt

SEQ ID NO: 154681 - DNA, 433 bp, Arabidopsis thaliana columbia
  unsure (1)..(433): unsure at all n locations
ccacgcagtccagctcgaatgccgcataggccagcaaccatgatttctgatgagctctctttagtcctctcaatctgatcgaggtggcgtgcacatgtggaagacggtctgtgtaccatcgtccacagtgacttctggtngaagagatatgatagtatagcatctcgtttaggggcacatagcacataggcacatatccacatgaattagtgagtctttctcaacatcttagaagacgaagatgttgttcagatcgtcaagaaaaaggagagagacgaaggaggaagaggccggttcaagtcacactcaaacgcccctgctagaattgcagacagagagaaaaaagctcctcttaagcaataaagctttagctgattagtcatctccatacattcatctccaccatcatagtcgtggaaggtttcacctgagt

SEQ ID NO: 154682 - DNA, 214 bp, Arabidopsis thaliana columbia
  unsure (1)..(214): unsure at all n locations
gacaaatcttcattatctgctatttattcatttgtggctcatttgtttntaatcgtataagttctcatcaaacttagaccagggatttcttctctaacctttgcatcctattacttatcgtctacaggaagtacacacgttcatatagacttcgagttcctagtaaattctactggtcagtcttacactatccacaccaacttttattctcaat

SEQ ID NO: 154683 - DNA, 372 bp, Arabidopsis thaliana columbia
  unsure (1)..(372): unsure at all n locations
gagaaaatgtctgcctgtttgtgtcttgttttcctgttcttctctattgttgcagaagcagcgtattctccaggagggtgcgccatctttcttctctaanactaaagaagaaggtgtccaagtcaaaacatgagttaccttttgaaactcgttacttccctcaaaatcttgaccacttcagtttcacaccagacagctacaaagtcttccaccagaagtacctcatcaacaaccgtttctggcgaaaaggtggtcccatctttgtttacactggaaatgaaggagacatcgactggtttgcttccaacaccgagttcatgctggatattgctcccaagttccgggctcttcttgttttcattgaacaccggt

SEQ ID NO: 154684 - DNA, 442 bp, Arabidopsis thaliana columbia
  unsure (1)..(442): unsure at all n locations
ctattcttctctattgttacagaaccaaggtattctccaagaggatgaagaccatctttcttctctaanactaaataataatttatccaattcaaaacattaattaccttttaaaactcattacttccctctaaatctttaccacttcattttcacaccattcatcttcatattcttccaccatatttaccttatcaacaaccttttctttctaaattattttcccatctttttttacactctttaatnattcatacatctactcttttttctttcaacacctaatttcattcctttttttattttctcaaattccctctctctttctttcctcattttatcaccttttttttttcttttatctatcctcctttttattaatatatctcattatattacctttatacttttcatttcccttattctcttatcatatcttatt

SEQ ID NO: 154685 - DNA, 425 bp, Arabidopsis thaliana columbia
gtcgccgggaggaatgaaccggttgaaggagcaaatggggccgaagttcgacggcgaaaaatcacctccacctgattttgatgaagatcgaagtgtgggtgaggtagacggaggagatcacacgccattcgctggaggtaaagtcagaaggaaagcgtctcgctatagagagcatcgtggtgactatcttcacgtttcttctcgtcctggattgatgcgaattctggagaaacaaggtgatacatcgattctttttgctgataaagttttgaagttcaccggctcggagaagatgaaacggcgtatttttatcctcactgattttgcgatctatctaattgatcccgagactgaagctatgaccaggagaattgctttgtcatcagtagagaagatgtgtttaagcaaattgagtgataacttct

SEQ ID NO: 154686 - DNA, 427 bp, Arabidopsis thaliana columbia
ataacactcacacacacactttctcttctcttattttctcagttcttttaactcttttctcgacatatattcaaatggccaggatcgaggttgaacaagtgactccagtagcagctgagaacatcgaggtgccaccaccaaaggctgtggagtcggaggaagtcaccaccgtctccgagtctcttccagctccggtaacagaatctcaagcgcctgtcgaagtaacaactaaagatttggtcgtggaagagacagagaaaccaatcgaagaaacagaggaagctcaagttgaaactccggaggttgtggagatcaagaaagatgaagaagctccggttgaaactccagtggttgtggaggatgagagcaaaacagaggaagttgtagaggcgaagaaagagggagaagttgaagaaaaagagacaga

SEQ ID NO: 154687 - DNA, 406 bp, Arabidopsis thaliana columbia
gacgaagaaggattttagcaccgcgattctggagaaaaagaaggcagcgaatcgtttggttgtggatgaagccattaacgatgataactccgtcgtttctcttcaccctgataccatggagaagctacagctttttcgtggtgatactatcttaatcaagggaaagaagaggaaggatactgtgtgtattgctttagctgatgagacatgtgatgaaccaaaaattagaatgaacaaggttgttaggtctaatctcagagttaggcttggggatgttatttctgttcatcaatgtcctgatgtcaagtatgggaaccgtgttcacatcttacctttagatgataccattgaaggagtaagtggcaatatatttgatgcataccttaaaccttatttcttagaggca

SEQ ID NO: 154688 - DNA, 409 bp, Arabidopsis thaliana columbia
ttcgtgaaaaccctaacggggaagaccatatcccttgtggttgaatcatccgacaccatcgacaatgggaaggcgaagatccgagacagggaaggaatcccaccggaccagcagcgattgattttcgccgggaaacagcttgaagacggccgtaccctcgccgactacaacatccagaaggaatcgacgcttcatctcgtcctccgtctccgtggtggtgctaagaagaggaagaagaagacttacaccaagccgaagaagatcaagcacaagcataagaaggttaagctcgctgttcttcagttttacataatcgatggatctggaaaggttcagccgtttgaggaaggagtgcccttaacgcaacctgtggagctgggacttttatggcgagtcattttgatcgcca

SEQ ID NO: 154689 - DNA, 412 bp, Arabidopsis thaliana columbia
  unsure (1)..(412): unsure at all n locations
cnntttttccttccttcctcttccagatttcttcctctcgttcatgtataaaggaaatatcaataataggctttcacgacattagtgtggataccccacgtgagtgggcggctatanatgagatgctcatagtttagcattttaggatatctttctagggataggtaaagagcatctagctagagagatcttcaagaagagtgtctagctagtatctcatgagtcatccatctaggaaacaagatgtctagccgcttgggactatagttcaatccctagcaacatcctttgctcactacgaccaggttcttgacaccaccgccatgctcggtgctgttccacctaggtatggatacactggtggtgagatcggccttgatgtttacttctncatggctagaggaaatgcctc

SEQ ID NO: 154690 - DNA, 495 bp, Arabidopsis thaliana columbia
cgggcgacccacgcgtccgctcagaaagatcaatctagagagaccaaaaagagatcgtttagagatggcttctacctccgcgatgtcgttggtcacaccactggaccagacccgttcgtctcctttccttaagccattacctctgaaaccatccaaggctttggttgcaactggaggcagagcacagaggcttcaagttaaggccctcaagatggacaaggctttgaccggtatctccgcggctgctcttactgcttcgatggtgattccggagatagctgaagctgctggttctggaatctctccttccctcaagaatttcttgctcagcattgcttctggtggcctcgtcctcactgtcatcattggtgtcgtcgtcggcgtctccaactttgaccctgtcaagagaacctaagacctatatatctttcttacatcattattgtaatctgttctccttctgtgtattcggttcaatgttgcagcaatgaactt

SEQ ID NO: 154691 - DNA, 362 bp, Arabidopsis thaliana columbia
tcgccggacgcgtccgcgctcttcttcttctcttcatcctccttctggagcagtgcttagagctccatcatcaaatggttatcaatggcttcctcactcgtctcatcttttcaacccaggtcagcatttttgggagatagaaatgtgttcaaggtctcaagcacaccttttgctcaagtgggttactccagtaagaccattgagtgcaaagaatcaaggataggaaagcaaccgatcgctgtaccttccaatgtaaccattgcattggaaggtcaagacttgaaagtgaagggtccattaggagagctggctttaacttacccacgcgaagttgagcttacaaaggaagaatccggtttctt

SEQ ID NO: 154692 - DNA, 466 bp, Arabidopsis thaliana columbia
gtcgaagttccaaaggaagcaccaaaagaattacctctagatcctatagcggagaaacttcgccagcagaggcttgttgaggaagccgactaccgggcaactgctgagctctttggagtgaaggatgatgacaaaaaccttgatatgtttatccccaagtctgaaagcgattttttggaatatgctgaaatgatttctcataggattaaaccatatgagaaaagttatcactatatagcgctgctcaaaacaatcatgagactttcattgaccaacatgaaagcagctgatgttaaagatgttgcttcgtccattacaacgatagcaaatgaaaaactaaaggcagagaaagaagctgctgcgggaaaaaagaaaggtggaaagaagaaacaacttattgtagataaggccaatgacgatctagtggctggtccttatgatgccatggatgacttcgacttcatgt

SEQ ID NO: 154693 - DNA, 409 bp, Arabidopsis thaliana columbia
caattcagcaatggcttcttctatagttacctctagcttgaagcctttagccatggccgatgcttcctcttctaccgatgtggggccatccttccatctcctctaccatctcttcctccagaattcgcagctccagtgtttccctccttaccggacgcattaacctgcccctctctttctctcgcgtctctctatctcttaaaaccaaaacccaccttaaaaaatccccctttgtctccttcgttgcccagacttcggattgggctgaagaaggtggagaaggaagcgtcgctgttgaggagaccgagaacagtttagagtcacaagatgtgagcgaaggagatgagagcgaatgagatgcgagcgaaggagatgtgagcgaaggagatgagagcgaaggagatgtgag

SEQ ID NO: 154694 - DNA, 417 bp, Arabidopsis thaliana columbia
aaactccagaaccctagaattcgttatctcctaagaacccgacaaagcgccatgtcgctcagtatcccggcgaatctgcggggggacccgagatctaacaaatctctcactcaatccgtacctaaatcctccgcaagattcgtctgctccgatgacaaatcctccttctccacacctcaatccatgaaagctttctccgccgccgtcgccctctcttccatcctcctctctgctcctatgccagctgtcgctgatatctcaggtttgactccttgcaaggactcataacagttcgctaaaagagagaagcaacagatcaagaagcttgaatcttctcttaagctctacgctcctgaatctgcccctgctcttgccttcaatgctcatatcgagaaaaccaaacgcaggttcgacaac

SEQ ID NO: 154695 - DNA, 441 bp, Arabidopsis thaliana columbia
ctcttttacttgttcgttcccaaactcttcttcctcgatcgtctccgtcgccgatctcgtttgttcattttccgcgtgttgattggtacaaaggtttaatcaaatggttggaggaggagttatccagcaaattcttaggaggaagcttcactcccaatcacttgcaactccggttttgtcttggttttcttcgaagaaagctcatgaggatgctggttcttctggtgtaagagcacttgccttgttgggtgctggtgttacaggactgttgagtttttctacagtagcatctgctgatgaggctgaacatggattggagagtacagagtacccttggcctcatgatggcattcttagctcatatgaccatgcttcgatccgtcgtgggcatcaagtttatcagcaagtctgtgcataatgccaattaaatgctctgatcct

SEQ ID NO: 154696 - DNA, 455 bp, Arabidopsis thaliana columbia
  unsure (1)..(455): unsure at all n locations
cgggtccagcccacgcgtaccggggaattgtattctggcacaaaagtttgatattcatagtaaggaagcgttacaacgatcanctgngttcgggcggacctagctaggtgaggggtgggttaatgctatatggagcccttatttagctccatcaggctaccaacccctttgactcctgcaacacanatcccaaaagctagaaggagctggtagtgaggcaggaactttatgggatgatggtgctttcgacggtgtaaggaaagtgtctgttggacaagcccaagatggtattggagcggtctcatttgtgtacgacaaagcaagtcatgttgtataaagaaaagaacatggaaaacccacattgcttggatttgaagagtttgagctttactattcaagtgaatacatcacggcagttgatggcacctactatgcaatctttggtaatgaaccaa

SEQ ID NO: 154697 - DNA, 449 bp, Arabidopsis thaliana columbia
gcgtccgggaaaagtgaaacattggatcactttcaatgttccatgggttttctcgcacgctgtctatgacggaggcaaaaaggcaccggggggttgctcttcttacgtcaatgctaaatgccaagacggacgatcaggatacgaggcttaccttgtcactcacaatctccttatctctcacgcagaagcaggtgaagcttaccggaaatgcgaaaagtgtaaaggtgggaagatcggaattgcacatagtcctgcttggttcgaagcacatgaccttgctgattcacaagacggtgcgtccatcgaccgtgcacttgactttattttgggatggcatctagacacaactacatttggagattatccacagatcatgaaagacattgttggacatagattgcctaaatttacaactgagcagaatgcaaaactgaaagcttttaccgatt

SEQ ID NO: 154698 - DNA, 468 bp, Arabidopsis thaliana columbia
  unsure (1)..(468): unsure at all n locations
ggaanncccggggcggccggcgcgtccgataaaatcagaattacaaacaaaaatggttttgcaaaagcttcctctcattgggctgctgggggtcctgaccatcgtcgcctctgcagcaaatgcagatggacctgtttgcccgccgtcgaacaaactaagccgggcaagtttccctgaaggttttttatttggcacggctactgcggcataccaggtcgaaggtgcgattaatgaaacttgtcgtggaccagccttatgggacatctactgtagaagatatccagagaggtgcaataacgataacggcgatgtggccgttgatttcttccatcgttatgaggaagatatccaactaatgaagaatctaaacacagacgcctttagaatgtctatcgcatggccaagaatatttcctcatgggagaaaggagaaaggagtgagtcaagctggtgtgcaattctaccacga

SEQ ID NO: 154699 - DNA, 435 bp, Arabidopsis thaliana columbia
gacgcgtccgatctatgcctcctttcggattcaaatctcatatctagctcaaccatggcgttgctcgtcgagaggacctcaagtggccgtggaggcaaggtcaaagacatgtcctcaagccgatttcggtcgtctagaactcgagctcgccgaagttgagatgcctggactcatggcttgttgcaccgaattcggaccttctcagccattcaaaggcgcttgaatcaccggatctcttcacatgaccatacaaaccgccgtactcatcgaaaccctaactgctctccgtgctgaagtcagatggtgttcctgcaacatcttttgcactcaagaccacgccgacgcagccatcgatcgtgacttcgccgatgtttttgcctggaaaggtgagactttttaagagtactgggggtgtaccgagcgtgctctatattg

SEQ ID NO: 154700 - DNA, 409 bp, Arabidopsis thaliana columbia
gccgtttagctgccggagctgccgtaattgttttttcatccggtggcgctgtctacctgtctcggtcgtttgcctacagcgacagaggatgttatccgattctagattcgttgaggcgtaggcttggtgatcccaccgcttctgtaccgtctcgatctgctcaagagtctgctctgattgcagccaccgcttctgatccgctcgatgttctcgtcattggcggtggagccaccggttctggagttgctctttacgctgatacacgtggcctccgtgttgttttggtggatcgcgaggatttctactctgggacttctttacgatctacaaagctgaatcattgaggggttcgttacttggttaaaactgtttttaattttttttatgtactagttaatgtttatatttt

SEQ ID NO: 154701 - DNA, 424 bp, Arabidopsis thaliana columbia
gttttctagggcaatctcggccacttttacttacagaaaaccttctctctaaacttgtgggaaaatctcacagagctggttgttcttcgcttttagggtttttgctctattgtttcgagtgacccaacttcgaagcttatagatcgttaccttagaaaatggtgggtatgtcgatgcagccatatggtattcaatcgatgcttaaagaaggttacaggcatctctctggtctcgacgaagccgtcattaagaacattgaagcttgcaaggagctctccaccattactcgcacctctctcggtcccaatggaatgaataaaatggttatcaatcatttggacaaactgtttgtcacaaatgacgctgctactatagtgaatgagctcgagattcagcacccggctgctaaacttctggttttagc

SEQ ID NO: 154702 - DNA, 424 bp, Arabidopsis thaliana columbia
gatgcattgcaggtttaagcataaactttctattccctggacagcgataacaccgtgggtgttagttctggttattacgttggttgttggttatattttatatgaagccatcaaccgaattgcgacagttgaagaggattgtcagaagatgagggaactcaaagctcgtgctgaggccgctgacattgcaaagtcacagttcctagcaactgtttctcatgagatacggactccgatgaatggagttttaggaatgctgaaaatgctgatggacaccgatcttgatgcgaagcatattgactatgcgcaaactgctcatggcagtgggaaggatcttacatcactaataaatgaggttcttgatcaggcaaagatagaatccggaaggcttgagcttgaaaatttgccttttgatattgcgttt

SEQ ID NO: 154703 - DNA, 389 bp, Arabidopsis thaliana columbia
ctcgtcttctaggttaatccaatttcgtcgattcatgaagttcacaattctcccatcggaaaagtgcttcgtaatcgacgacgaagagatcatgagtaccgtcggaggtatagagcagttgatacctgattccgtttcaacgtcgttcatcgaaacggtgaacggttcgcaccagttcacgattcaaggttactctctagccaaaggcatgagccctgggaagtttatacagagcgatatcttctccgttggtggatacgattgggcgatttacttctatcctgatgggaagaacccggaggaccagtcgctgtatatctctttgttcatcgctttagcgagtgattctaattgatatagggttctgtttgagcttacgcttatggttc

SEQ ID NO: 154704 - DNA, 406 bp, Arabidopsis thaliana columbia
  unsure (1)..(406): unsure at all n locations
attcgtcgtcgacctattttccttatttatggccgtcgggaaaaacaaaanaatgtgtgagggtaggaagggaggaggggagagaatgctgtttatcctttctccaagaaagattggtatgatgttaaggctccttcaatcttcactcacaggaatgttggaaagacacttgtttccagaactcagggtaccaaaattgcctcagaaggcttgaaacacagagtttttgaggtttctcttgctgatcttcaaggtgatgaggataacgcttacaggaagatccgtctcaaagctgaagatgtccagggcaggaacgttctgtgccaattctggggcatggacttcaccaccgataaacttatgtcattggttaagaagtggcagactttgattgaggctcatgttg

SEQ ID NO: 154705 - DNA, 306 bp, Arabidopsis thaliana columbia
  unsure (1)..(306): unsure at all n locations
ggcgaccgacgcgtccgtaaaacctaaacctcaggagtctactgcttttttttagacttacaacaggatactcacaacgcggtccctttttaaacataccgaggtaactnatctatttaataacaaaaccaactataacatatgccgcctatccctatatatcaataggccaacctacacaaacttcaacaacatgatattacagatcatttcaatcttcacaacaatcctcacagataatggtcccataaaccctaatatcacttacttccataccaaactttcactatatcctcgtatacattt

SEQ ID NO: 154706 - DNA, 369 bp, Arabidopsis thaliana columbia
aaagaagaagagaaacaacatgaagtattattggcttcctctatgctctcctccgccggtggggttacatccccggctgaggccaccatggtcgctccattcaccggcttgaagtcatccgctgcattcccggtcacccgcaagaccaacaaggacatcacttccatcgcaagcaacgggggaagagttagctgcatgaaggtgtggccaccaattggaaagaagaagtttgagactctatcttacctccctgaccttagtgacgtcgaattggctaaggaagttgactaccttctccgcaacaagtggattccttgtgttgaattccagttagagcacggatttgtgtaccgtgagcacggaaacact

SEQ ID NO: 154707 - DNA, 432 bp, Arabidopsis thaliana columbia
atcaaatccctaattctcgagctcgaattattagacgaaaatggcactgacaaatgcaagtgggttcgtcacctgagggtggcggggcaaaccctacgattgaatcagtctaaaattgggttccttggtacgatccggtcattttcttcgcacgatgatcatcttagcacagaagctgtctgtcgatagagtactctatgttgtcaagagcttccccaaagtcgaaccctctaaggtgactcctgaggttcattttcaaaacgatttgggattagatagtttggacacagtggatatagtgatggctattgaagaggaatttaagcttgaaatttcagacaaagaagctgacaagatccattcttgctcttttgccattgaatacgtttacaatcattcaatgtctagctcattgctgtgagctctttcatg

SEQ ID NO: 154708 - DNA, 437 bp, Arabidopsis thaliana columbia
gtgctggataagccttttgcttcattctcactttcttcctcatccaaaaaagctcctccatggcaatggcgacagcatcaggtctctcatcactctcttcactctcactccacacccgaacctcttctctcatctcctcttcctccacaaaatccatcgtctctttctcctccttcctcaaccgccgcttctcatctctcactctcgtcaaagcctcatcgaccgataccgaaaccatcttcttcgaagacgaaacaccagaaataaccgcaaatgtcgtcttcgacccaccaattgctcccgaaggattcgtctctcctccgtatttcgacgaaggaagcgacgagacagaggaagagatcgctaccgcttttgaagagctctatggacctgcgtatagtggtgagagtatgcttgggaaagatatttatgtgatg

SEQ ID NO: 154709 - DNA, 450 bp, Arabidopsis thaliana columbia
cgcgtccgccttactccctcaaactttctggccgtatggaaaatcccgagatgatcccaacggcaaattctgcgacggcctcatcgctgcagacttcctcgctaaattcatgaggattccgatcgtgatcccgccggcccttcaaccgaacgtcaatgtctcacgtggagctagtttcgccgtcgctgatgctactctactcggagctccggtggaatctttgactctgaatcaacaagtgagaaagttcaatcaaatgaaagcagcaaattggaatgatgatttcgtgaagaagtcagtgtttatgatatacattggtgcaaacgattacttgaatttcaccaagaacaaccctaacgccgatgcatctactcaacaagcttttgtcacttccgtgaccaacaagttaaagaacgatatcagcttgttgtattcatcaggagcgagtaa

SEQ ID NO: 154710 - DNA, 445 bp, Arabidopsis thaliana columbia
ggcggccttcatgtcactgatgtcaccaatgctttacggacaatgctcatgaacctcaaaacgtgtgagctgggaccaggacactgtgaagacacttggcataccggctgaaatcttgcccaagattgtcagcaattcagaagtgattggagagatctgcaaaggctggcctattcccggtatcaagattgctggatgtcttggtgatcagcatgctgcgatgttggggcaagcttgcagaaaaggcgaggcgaagagtacttatggcacaggtgctttcattcttctcaacaccggagaagtgccaatcaaatcaggtcatggtcttctgaccacgttggcctacaagctcggtcctcaagcacagacaaactatgcattggagggttcgattgccatagcaagagctgctgttcagtggcttagagacagccttgggataatc

SEQ ID NO: 154711 - DNA, 419 bp, Arabidopsis thaliana columbia
aacaattggtgtctcgattccaatgaaagctttcttctttataacatacataatggtggatggatgggctggtgttgctggtgagatattcaggttgaatccactcataatctatcatctaaagaactccttcctcgtgagaaccgaaaaagatagggaagaagcaacttatcctggaaccataggattcaacactggtgagcctcaaatacaactctactttcttcttggtcttgtttacgcagcagttagccccatccttctcccttttatcctcgtcttcttccgcctggcttttgtagtgtaccgtcatcaggttataaatgtgtataaccaaaacgatgagagcgcatggaagtttttgccctacgttcacaggcgtgttgcgaccgcattggttggttcacaactgctcttga

SEQ ID NO: 154712 - DNA, 398 bp, Arabidopsis thaliana columbia
  unsure (1)..(398): unsure at all n locations
ccctaaccctaagaaggttttggtcattgtattatgagatggaggtgtcctgccnnaaggggcgcgccatgcttctattgagcgggttgacatgtgtgaaattgataaaatggtggtcgacgtgtctaagcaatttttccctgatgtagcaattggatatgaggatcctcgcgtgaaccttgtcattggcgatggtgttgctttcttgaagaatgctgctgaaggatcataccatgcagttattgttgactcttcagatccaatcggtcctgcaaaggagctgtttgagaaacccttctttgaatgggggggtagggcttttttttctttttgagttttgttcacttcatctgaatagtttgtggttttacatttacattaatctaatacattgtttt

SEQ ID NO: 154713 - DNA, 440 bp, Arabidopsis thaliana columbia
caactttatctcccaaaacacaaaacaaaaaatattggcttccactgctctctcaagcgccgggggcggaacttcattcatgcggggttccccagctccaatcagtctccgttcccttccatcagccaacacacaatccctcttcggtctcaaatcaggcaccgctcgtggtggacgtgtcacagccatggctacatacaaggtcaagttcatcacaccagaaggtgagctagaggttgagtgtgacgacgacgtctacgttcttgatgctgctgaggaagctggaatcgatttgccttactcttgccgtgctggttcttgttcgagctgtgctggtaaagttgtgtctggatctgttgatcagtctgaccagagttttcttgatgatgaacagattggtgaagggtttggtctcacttgggctggttaccctacctctg

SEQ ID NO: 154714 - DNA, 436 bp, Arabidopsis thaliana columbia
agcaaaaacaaaaatgggtgagaaagatatttcaaggaacttgaaggaagaagaagaggaggaagaagaaaaccaaagtggagaaaccaaaagtttgatctcttcacttccttcagacatagattgctcagggaccaagttgtacaagtaccaaggatgttggtacgacaaagatattctccaagcaatcctcaatttcaacaaaaactttcagccacaagaaacggatataattgttgcttctttccccaaatcgggtacgacttggctcaaggcactcacattcgcactcgcgcaaagatcaaaacacacttcagacaatcatcctttgctaactcataatcctcatgagctagtgccgtacctcgagctcgatctttatctcaaaagctcgaaaccggatttgaccaagttgccatcatcatcttcgagattg

SEQ ID NO: 154715 - DNA, 439 bp, Arabidopsis thaliana columbia
cttctcattcgtcatctagtcccattctctgtccataacaatgaatatcaattgttctccggtagggtttctaatttcactgttcttcattgttacttttcttgcaccacaagtcaaatctagggctttctttgtctttggtgactctctcgtcgacaatggaaacaacgactacctcgtcaccactgcccgtgccgacaattacccgtatggtatcgactacccgacccgtagacccaccggacgtttctctaacggccttaacattcccgacattatcagtgaggctataggcatgccgtcgactttgccgtaccttagcccgcatctcaccggagaaaatcttctagtcggtgctaattttgcctccgcaggaattggaatcctcaacgacactggaattcaattcgtaaacatatttagaatttctaaacagatg

SEQ ID NO: 154716 - DNA, 416 bp, Arabidopsis thaliana columbia
atcattttctcttcttcttctccaagaaaacactgaagaagaaatggggttccttaagcggccatggcgattctttttctggcgatggtcgccgtttcatcagccgtggacatgtcaatcatctcctacgacgagaaacatggcgtctccaccaccggtggccgtagcgaagccgaggttatgagtatctacgaggcatggttggtgaaacacggcaaggctcagagccagaactctcttgttgagaaagatcgacggttcgagatctttaaagacaatcttcgtttcgtcgatgaacataacgagaagaatcttagttatagattgggtttgactcgttttgcggatcttactaacgatgagtatagatccaagtattttggagctaatatggagaagaaaggtgagagaaggac

SEQ ID NO: 154717 - DNA, 438 bp, Arabidopsis thaliana columbia
gttcttagctgtcttcaatctctttgtctgtatcattctttacggaagccatgaaaatgggatcaagaaaaacaacatccgggcttaatcatcttcttcttcttggagctttgactcttttgagcagtttggtgatagtgaaaggagaaagcccttacaagttttacacttggactgtgacttatggcattatctctcctcttggtgttcctcaacaggttattctcatcaatggtcagtttcctggtccaaaacttgaagttgtgaccaacgacaacatcatcctcaacctcatcaacaaacttgaccagcctttcctcttgacctggaatgggattaagcagaggaagaactcatggcaagatggtgttttgggaacaaactgtccgatccaaccaaactcaaacttcacttacaaattccaaacccaagatcaga

SEQ ID NO: 154718 - DNA, 288 bp, Arabidopsis thaliana columbia
  unsure (1)..(288): unsure at all n locations
cggggcgccgacgcgtacgcctagccgccttattcgtcttcttcgttctttagttttttcctcagactctgatcttagagccggtgtagttaccaaatcgtgggcgataaaaatatctgntaaaggagaaggaccagctatcggtatcgatcttggtaccacttactcttgcgtcggagtatggcaacaccactcgtttgagatcattgctaatgatcaaggaaacagaaccacgccatcttacgttgctttcaccgactcctagaggttgatcggtgacgcatctaa

SEQ ID NO: 154719 - DNA, 381 bp, Arabidopsis thaliana columbia
cgtacggtttttgaaatttctatcttccatttccattttatgaatctctgacgatgtctttgagaaggcgagcatcgacatggcctgggcttctacttcgccggaaccctagatcttcattttctcgtcagatatctactctcgattcctcaacatcaacatttcccagaagaatctccggttactactcctcctccttctttcccgtaaatcaaacgccatggatctcatctcagaggtaccgtttcttctcctcaagcacaatgtcaccatcggaagctgatagagtagtgagagaacttatagcagaggttgagaaagagaagcagcgtgagagagaggagagacaaagacaaggacttgattacaaagacattgatg

SEQ ID NO: 154720 - DNA, 316 bp, Arabidopsis thaliana columbia
gcgtccgattttgatctttgtgataacaatcttccaccattttaacaaaggtcttagctctcctttaagccggctcttctagttctctgagggttctatcaagtttcttgccaggatgaaagaactggaagtttgagtactttagatctaattgagcatgaatatcaaactagtgttaattctctccaaggcaatgaagctgcttagcaaacttggaccagcacgcagaagaacagaaccgggactgataacaacactatttctttggctctatttgaaaaacctgcattttgaaactcttaaaaaatttgttggt

SEQ ID NO: 154721 - DNA, 371 bp, Arabidopsis thaliana columbia
gtcaatctagggttcttcttcgtacttgcagatttcgcctccgttttcactacgagctgtgaagatgttctccggtgggaacaagatcaagaaggacaagaatgctgagccaacagaatgcgaggagcaagttgctcaggctttgtttgatttggagaacactaaccaggagttgaaaagcgagttgaaagatctctacatcaaccaagctgttcacatggatatctctggaaaccgcaaagctgttgtgatttacgttccattcagattgaggaaagctttccgcatgattcattcgcgcgtcgtcagagagcttgagaagaagttcagtggaaaggatgttatctttgttaccacatgaaggatcatgc

SEQ ID NO: 154722 - DNA, 437 bp, Arabidopsis thaliana columbia
gatgattgagaggtgtttaggagcttacctgttgccggagaatccaaagagctttacgcggggtaaaggtaacgattgtgtggcttcttcttaccgctgttgtcctacgtagcacaatcggcgccggtaaattcggaactccggagcaagatcttgacgagatccgtcaacatttccacgcacgcaaacgaggtgagcctcaccgtgtcctcgaagaaattcagaccggaggagattcttcttccggtgacggtggaggtaattccggtgggagtaataactacgagacgtttgacatcaacaagattgttgttgacgaaggtcaagaaaagaaacccgaccctaataaaccttacactctcggacccaagatatcagattgggatgagcagagatctgattggttagctaagaaccctagctttcctaattttatc

SEQ ID NO: 154723 - DNA, 409 bp, Arabidopsis thaliana columbia
ggttgctccaaaactttctaaaaggattgactaaattcatgctctatcttctcacaggggggaagaaagctttggctgatggtggggttactgatgaagtaatggcagagtttgacaaaaccaaatgtggagttttgattggctcggcaatgggaggaatgaaggtcttttacgatgctattgaagctctgagaatctcttacaagaagatgaatcctttttgtgtaccttttgcgacaacaaacatgggttctgctatgcttgccatggatctgggatggatggggccaaactattctatttcaactgcttgtgccacaagcaacttttgcattctgaattcagcaaaccacattattaaaggtgaagctgatgtaatgctctgtggtggctcagatgcaattattat

SEQ ID NO: 154724 - DNA, 149 bp, Arabidopsis thaliana columbia
gtccaggactctacactgaaatcggcaaaaaggtcagagatcttctgtacagggattaccaaggagaccagaaattcagtgtgaccacttactcttcaactggtgttgcgatcactacaacgggaacaaacaaaggaagcttggttttg

SEQ ID NO: 154725 - DNA, 420 bp, Arabidopsis thaliana columbia
acattttccaaggcttcagtttcacttcatttcactctctgcaaaaaaacaaaaatgagcgctcaaatctgcagatctgggtgcaaagcaaccaaatctcttctctcttcagctaaaaatgctcgcttcttctctgaaggacgagccattggtgctgcggcagcggtttcggcgtcaggaaaaattcctttgtatgcatctaactttgcaagatcatcaggttctggtgttgcttctaagagttggatcactggactcttagctcttcctgctgcagcttatatgattcaagatcaagaggctcttgctgctgagatggaaccaacttttattgctatcaagcctgatggtgtgcaaagaggactgatatcagcgatcatttctcgattctaacgcaagggattcaagctagttggtatc

SEQ ID NO: 154726 - DNA, 361 bp, Arabidopsis thaliana columbia
agacgagagaccctctcaaatctcaagctcctttccttccttccttcgatctacactctcggattctctctctctctcttgcctctctctttgtcttctctcaggttttgtaatggcggaatcttccaaagtcgttcatgttcgtaatgttggtcatgagatttctgaaaatgatttgcttcagctttttcaaccatttggtgttataactaagcttgtgatgctcagggcaaagaatcaggctcttctccaaatgcaagatgtttcttctgcagttagtgctcttcagttttttactaatgttcagccaactataagaggtaggaatgtgtatgtccaattctcttctcaccaagaattg

SEQ ID NO: 154727 - DNA, 437 bp, Arabidopsis thaliana columbia
  unsure (1)..(437): unsure at all n locations
cgaatacttcgtaagtatttatctaacacaagtcaaataatagatggcccaaannagctagaagcaaangggtggtgtagatgggagtatgtatgtggattgatggttgtttacgaaaatgttagtaaaggtattatgtagggcatagcacaatactggtataagccttcgtcaagttttgagtatgtcaatcggttctcaagtggttgttggagatgaacatggaaagaagacagagctaggagttgaagagtttgagattgatgcggatgtctacattgtatacttgttaggtttaccgtgagatagttaacgattttacgtaagaaatgatcacgtttatatttattaatacttttaatggcataatcttttttcctattaaataaatacctgttgtttattttgtactttatggtttataaatctttttgttt

SEQ ID NO: 154728 - DNA, 302 bp, Arabidopsis thaliana columbia
gcgtccgcggacgcgtgggtggttttactcgtcagttttttacatggaaccattgatccaagcatcgcaggtgttgctgagacatatggacgtaacttcaatggacctctatcacgatggatacttagctttcgtaagcttgaaaacaaaataatcttaatcgaaaggatttatcagtacagtcagattgtaggagaggccccagcaattatagaagatttccgcccgccttccttgtggcctgcaacgggaacaattgagctagttgatgttaaggttcgttatgcttagaatcttacaac

SEQ ID NO: 154729 - DNA, 425 bp, Arabidopsis thaliana columbia
  unsure (1)..(425): unsure at all n locations
ctaatttcatagctcctaacaaagcaatatcatttccaatttataaaagttaaagccatggctggatctttctctgtcccgtctatgataatggaagaagaagggagattcgaagcggaggttgcggaagtgcagacttggtggagctcagagaggttcaagctaacaaggcgcccttacactgcccgtgacgtggtggctctacgtggccatctcaagcaaggctatgcttcgaacgagatggctaagaagctgtggagaacgctcaaaagccatcaagccaacggtacggcctctcgcaccttcggagcgttggaccctgttcaggtgaccatgatggctaaacatttggacaccatctatgtctctggttggcagtgctcgtccactcacacatncactaatgagcctggtcctgatcttgc

SEQ ID NO: 154730 - DNA, 394 bp, Arabidopsis thaliana columbia
gcgtccgaaaaaaaaaacacaaaagcggcgttgatttttttttattttccgacaagatttctcgtgaggagagttgtctgaatctttctgtcgaagaggttttgagttaatttcaaaatggttttggagaaaaaatctgcattgttggaagatttgataaagaaatgcggcggttgtgcggtggtccactgtggtttcgctacccagcttgagattcacggcgccgccattaacgaccctttgtggagtgctgtttctctcatcaaaaatcctgagctcatcaaaagggttcacatggaatatttggaagctggtgcagacattgtggttacttcatcttatcaggctacgatcccggggtttctttctagaggtttatcaatagaagagagcg

SEQ ID NO: 154731 - DNA, 437 bp, Arabidopsis thaliana columbia
cttgaatcagacgaatatataacatccgtttaaggatactacgaaaaaaactttggagttgatactgtagtgacaacgctgattttcaagactagcaagaacaaaacagctggaccgtttgggattgtatctggcacaaagtttgaattcaagaaggaaggttacaagatcactgggttccacggacgagctggtgagtatgttaatgctattggagcttatttagctccatcaggcaccacccctttgactcctgcaacacaatcccaaaagctagaaggagctggtagtgaggcaagaactttatgggatgatggtgctttcgacggtgtaaggaaagtgtctgtaggacaagcccaagatggtattggagcggtctcgtttgtgtacgacaaagcaggtcaggttgtagaaggaaatgaacatggaaaacccac

SEQ ID NO: 154732 - DNA, 435 bp, Arabidopsis thaliana columbia
caaaaacagtaataaaagatcaactgcatgtaaatggctcttcctctcgagctcgaaagccgcactgaagccatctcagctgggatgggaatgggagttgatgagaatgcattgataagcacactggggaaatcgcaaaaggaacatagaaaattgtttaggaaagcaagcaaaagtttctttgttgaagatgaggaaagagcttttgagaaatgtcatgatcacttcgtcagacacctcaagcttgagttctcccgcttcaatactgcggtggtgatgtgggcaatgcatccatgggagagagatgcagggttggtgaataaagctttgaagaaaggagaagaagcttacaacctcatcgttgaggtctcatgcacacgctctgctgaggatctccttggtgcacgtaaagcttaccactctttctttgaccaa

SEQ ID NO: 154733 - DNA, 230 bp, Arabidopsis thaliana columbia
ccacgcgtccgaaaaaacaacagatccgaattttatctttttttatccggaaaaaatggaaaaagctatccggagacaacgcgttcttgtgtgtcatctccaaccttcttcttcttcttcgcacaattacgaggcttctctatctgcttctgcttgcttggctggggacagtgctgcatatcataggacctctctttatggagatgattttgttatttgtcttgtctcat

SEQ ID NO: 154734 - DNA, 435 bp, Arabidopsis thaliana columbia
ctttgaagcaacaaatttttgctgatctggagaaatactgtcctcagcattgtatccttgctggcaacacatcgaccattgagcttgaacaaaattggggagcggaccaagtctcaggatcgaattgttggagcacattttttcagtccagcacatatcatgccgctacttgaaatagttcggaccaatcatacctctgcccaagtaattgttgacctgttagatgttgggaagaagattaagaaaacaccagttgtggtgggaaactgcacagggtttgcagtgaataggatgttctttccttacacacaggcagctatgttccttgttgagtgtggagcagatccatatctaatcgacagggcaatcagcaagtttggaatgccaatgggtcccttcaaactgtgtgaccctggttggatttggtgtggcgat

SEQ ID NO: 154735 - DNA, 420 bp, Arabidopsis thaliana columbia
cgaagcccgagtttcagacacgagatttgtgattagagtccattgtgagaagaacaaagggggtatgattaagatcttaaggtccttggagaagtttcgtcttgaagtagtcaatagcttcactttaccatttggaaattcaactctcgttataaccattctcactaagatggacaacaaattttctcgaccagttgaagaagtggtgaagaacataagagttgcgttagctgaataatattttaaaaaacgtttatgtgaatttctcagtggttaaacgtgttagatatggtcttcaattttgaccggatcactcggtttagttgaataatgagcagttggattatttaaccatgatttatgcaccataatatgggtattttgactttttgttgagttctataactttgtttggtgttt

SEQ ID NO: 154736 - DNA, 438 bp, Arabidopsis thaliana columbia
cttcatagtaacatgtcaatacgcttggcctactgttttcttcataattccgcttggatggcttaacatttggtaccggggatattacctcgcatcatctcgggaactaactcgtcttgactcaatcaccaaggctccagtaatccaccatttctccgagagcatagccggagtgatgacaatcagagctttcaagaaacagccaatgtttaggcaagagaatgtgaagcgagtgaacgccaatctcaggatggacttccacaacaatggttcaaacgaatggctcgggtttcggttagagctgattgggagctgggtactctgcatctcggctctgttcatggtcatgttaccaagcaacattatcaaaccagagaatgttgggctatcactttcttacggactatcgctgaacggtgttctgttttgggcaatata

SEQ ID NO: 154737 - DNA, 438 bp, Arabidopsis thaliana columbia
aagagataacacacacaaaaaaaaatggcattaacctcactcctcaaggcttctccggtgttggacaaatccgaatgggtcaagggacaaagcgttctcttccgtcagccttcttccgcttctgtcgtcctccgcaaccgtgccacctccctcaccgtccgtgccgcttcctcctacgccgatgagcttgttaagacagcgaaaactattgcgtctcccggacgtggaatcttggcgatggacgagtcaaacgcgacttgcgggaaacgtttggattcgatagggctagagaacactgaggcaaatcgtcaagctttccggactttgctggtctctgcaccgggactcggacagtacgtctccggcgcaattctatttgaggagactctgtaccagtctaccaccgaaggcaagaaaatggtcgacgtcctcgtcgag

SEQ ID NO: 154738 - DNA, 73 bp, Arabidopsis thaliana columbia
tcagctgttggaggtggtccaggtgctggctcagctcttggtggtggtgcgggtgccggtccagctcttggtg

SEQ ID NO: 154739 - DNA, 448 bp, Arabidopsis thaliana columbia
cgcgtccgattctctcttatctcgacgagaaaaccctactgctaaaaaactccgatctctctggcgagaaggaaatttttatctctgagcttggtttcaccatttctctatctctatctcctcgctgggttacggtttggtaaggtcagtgttctctaaggctgaaatttgggggtttctcagtctcgatgtggtcgtgctccgttaggattcttcacaatcattagggttatatttcttacaaactgatgctcattttctcttccctgtctatggctttatctgtgatccttcaaaagcttagtgtcttcggccctggtttgaatccttctttcccttactgcatcgccaatcactcctttgcctcccgttaattgagttgctctctttcaacttaattacattagtctgcttcctttgctgtctagtctggatagtgttgcaaatc

SEQ ID NO: 154740 - DNA, 425 bp, Arabidopsis thaliana columbia
atacggtatagccttcgtcaagtttgagtatttttaatggttctcaagtggttgttggagatgaacatggaaagaagacagagctaggagttgaagagtttgagattgatgcggatgactacatcgtatacgtggaaggttaccgtgagaaagttaacgatatgacgtcagaaatgatcacgtttctttctattaagacttttaaaggcaaaacctctcatcctatcgaaaaaagacctggggttaagtttgtgctacatggtggaaaaatcgttgggtttcacggacgttcaacagatgttttacactcccttggggcctatgtttctttgtcatccactatcaaattgcttgggaagtggattaaggtggagcaaaaaggagaaggtccagggctaagatgctcacatggcatagcacaagta

SEQ ID NO: 154741 - DNA, 211 bp, Arabidopsis thaliana columbia
cttctccaacccaaattcctctcttctcaatctcgtcctctccgttctcctcctccaacagttctccgatcagtgatgggtgcgtcttcttctttctcctcttcttcctcgaagcttctctttcgtcaactctttgagaacgaatcttccacctttacttatcttctcgccgacgtttctcatcctgataaacctgctttgttgattgatc

SEQ ID NO: 154742 - DNA, 287 bp, Arabidopsis thaliana columbia
acccacgcgtccgaaactcaacatggctagatccttgttgttttttctaaccctcacattcctcttcgccggagattgtcttatctcgtgacgtgaacattctgagccagctcaaaggaaccacaaccaccacgaagactagccaaaccggcgtcacatctttgaaagctcccaacctaaacggatactgtgagagctggagagtcaacgtggagcttaacaacataagggactttaaggtggtttcacaggaatgtgtatggttccgtcataagtacattacctca

SEQ ID NO: 154743 - DNA, 444 bp, Arabidopsis thaliana columbia
cgcgtccgcaatggcttcctctatgctctcttccgctactatggttgcctctccggctcaggccactatggtcgctcctttcaacggacggaagtcctccgctgccttcccagccacccgcaaggctaacaacgacattacttccatcacaagcaacggcggaagagttaactgcatgcaggtgtggcctccgattggaaagaagaagtttgagactctctcttaccttcctgaccttaccgattccgaattggctaaggaagttgactaccttatccgcaacaagtggattccttgtgttgaattcgagttggagcacggatttgtgtaccgtgagcacggtaactcacccggatactatgatggacggtactggacaatgtggaagcttcccttgttcggttgcaccgactccgctcaagtgttgaaagaagtggaagagtg

SEQ ID NO: 154744 - DNA, 436 bp, Arabidopsis thaliana columbia
tcggacgaagcaaatcctcccacaaagaatcattcatgggtcgtgttatcagagcacaacgtgggggagctggttccgtctgcgggagtcccacactcaccaccgtaaaggtccggccaaattcaggagtctcgatttcggggagagaaatggttatctgaaaggtgttgtgacggagatcattcacgatccaggacgtggtgctccattggctcgtgtagctttccgtcatcctttccgattcaagaagcagaaggagcttttcgttgctgctgaaggtatgtataccggtcagtttctttactgtgggaagaaagctactctcgtcgtcggaaatgttctttctctcagatctattcctgaaagagcttgtatttgtaacgttgaacatcatgtttggtgatcgtggtggttttgcttgagcttcttgtgatta

SEQ ID NO: 154745 - DNA, 419 bp, Arabidopsis thaliana columbia
cgcacttcgtcttcgtctcctttcttgtcgtttcatcatcattcttcgctgatcaatgtgggtgacccacgccgctcacgtcggcttccactacgcttctcctcaggggcttaatctagctgagctctgtgttgttagatcgcagaggaggtccgttcagagttctgttgtcgtgcaagatggatcagtagccaccgagtcaagctcgtccgaggaggcgaaagatgtaggggtgttaacgattccttcacttgaagctgacaaggttgtagcagagtctgatggcggtgaacaacttttaacagttagtatcacggtggtgggagcttctggtgatcttgccaagaagaaaatattcccagctcttttcgcactttactattaaggcttgtcttcctgagcattttaccatttttggc

SEQ ID NO: 154746 - DNA, 282 bp, Arabidopsis thaliana columbia
  unsure (1)..(282): unsure at all n locations
ggaatctgagtacggatctggctatggtggacaaacggaggtggagtatggtcggagaccggagcagagttatggatctgggtatggtggaaggacngagactgaatcggagtatggatctggtggtggtggaagaactgaggttgagtatggtaggagacctgaatcagggcttggatctggttatggtgggagatcggagtctgagtatgagcgtaagcctagctatggaaggtctgaggaacaagaagaaggttattggaagcctagctatggaagatt

SEQ ID NO: 154747 - DNA, 435 bp, Arabidopsis thaliana columbia
gattctttagaatatctgatccgatatcagttgctcccaagttcgcttgaattccgtctgagcaatggctttggtcttgcacacggacaagggaaacaaaagtgctgagaaggcactcattgcagcagagtacgttggtgtgcagatcgatgtgccctctgactttcagatgggtgtcactaacaaaacccctgcgttcctcaagatgaaccctattggaaaggttcctgtacttgagactcccgagggttcagtatttgaaagcaacgcaattgcccgttatgtaagccgattgaatggtgacaactctttgaacggatcctccctgatcgaatatgcacaaattgagcaatggattgatttctcttcattggagatctatgcaagtatcttgaggtggttcggcccaagaatgggctttatgccatacagtgc

SEQ ID NO: 154748 - DNA, 461 bp, Arabidopsis thaliana columbia
  unsure (1)..(461): unsure at all n locations
ccgggagtaggaaggatgttatgttcccaagaacgttttttanttttacaagtgctcaagcttctgnccttgggagaagcatgcttgcaccaaacgtgcgagggttctggttgttgcaaacccctgcaaacaccaatgcattgatcctgaaggaatttgcaccatcgatcccagagaagaacattacttgcttgaccaggcttgaccacaacagggcattgggacaagtgtctgagaggttaagcgtaccagtgtctgatgtgaagaacgtgattatctggggaaaccactcatcaacccaatacccagatgtcaaccacgctaccgttaagacttccgttggagagaagccagtgcgtgagctagtcaagaatgacgagtggttgaatggagagttcatctctaccgttcaacaacgtggtgctgccattatcaaggccaggaagctgtctagtgcactt

SEQ ID NO: 154749 - DNA, 493 bp, Arabidopsis thaliana columbia
  unsure (1)..(493): unsure at all n locations
ccgggtgcgacccacgcngtccgaataggggattattttnncttctcgggagtcttctacttttttttttcatcatgtgnnggaattagaattgaatgtggccgtttattctacgttttatggcgagtgtggggtggaaaagannaacgtctgtattcggctacaataatttatttntgtacancggcaggaagattctatttnttttanttaataggagttttaggtataagtttatatggttcgaacgaaccaacattaaatttagaactcttagctaataaatcctatcctgttacacttgaaatactattttatattggatttcttattgcttttgccgtcaaattaccgattatacctttacatacttggttacctgacacccacggtgaggcacattacagtacctgtatgcttctcgctggaatcttattaaaaatgggagcctatgggttgtgtcgaaatcaatatggaattattaccccacgct

SEQ ID NO: 154750 - DNA, 357 bp, Arabidopsis thaliana columbia
  unsure (1)..(357): unsure at all n locations
gactgggtgcttcttgtgattggagtatttagcgctttactcttgacgagcaattgagtggagctgtggtcgaagctgtggtgaancttcatgacaaggggttgatatatcaaggatcttacatggtcaactggtccccaaatttacagactgctgtttcagacttggaagtagaatattcggaggaacctgggtttctataccatattaaataccgtgtagctggaagtcctgattttcttactatagcaacgactcgtccagagacattgtttggtgacgtggcccttgccgtgcattctgaggatgatcgttactcaaaatatgttggtcagacagcaattgtccctatgacat

SEQ ID NO: 154751 - DNA, 351 bp, Arabidopsis thaliana columbia
tgaacatgtccgatctcttcatcgctcttaacgaggaggatcgtgccggggttgttaatgctcttaagaacgggttgcacaatttggctggacaacactctgatgtccttgaaaacttgactccaccagtcaggaagcgtgtcgagtttctaagagagattcagaaccaatatgatgagatggaagcaaaattctttgaggagagagcagctcttgaagctaagtatcaaaagttatatcagcctttatataccaagcgatatgagattgtgaatggtgtggtcgaagttgaaggtgcagctgaagaagtaaaatccgaacaaggagaagataaatcagctgaagagaaag

SEQ ID NO: 154752 - DNA, 232 bp, Arabidopsis thaliana columbia
  unsure (1)..(232): unsure at all n locations
cacaaccaatgtttgcctgagtcttgtttttatcttcaccaggtcatgtgtttantatttgttttaactgaaggggggtaggctttaaatcttttatatctaagaatattgttcttctcgaatttcatcagttgttgcttctagaaattttagattttttgggtgtcatccatttctatatttcgatggataagtcaaacgttcataaagtcaagggttcttccttttgttt

SEQ ID NO: 154753 - DNA, 342 bp, Arabidopsis thaliana columbia
gaatataacctacaaattttaatatttaattacacgttctaaagaataagatcgccggttgaaaacaattacctggtggtgggtttatattaaactcattaggcattcattatataattgcaccaaacaagaaggggatcaagaaaatcacgaatcaccggagcaaaaaaatggcgggaggaggaacgaccttagagtacacaccaacttgggtggttgctctcgtctgctccgtcattgtctctatctcttttgccgtcgagcgtcttattcaccgtgccggaaagcactttaagaacaacgatcagaagcagcttttttgggcattacaaaagatcaaag

SEQ ID NO: 154754 - DNA, 324 bp, Arabidopsis thaliana columbia
cttgcatcccaaatacaagtcgtctcgttcaagcacatatgagaagaatggaaaagctggcgcaattcattacggcactggagcaattgctggtttttttagtaatgatgctgtcacagttggcgatttagttgtcaaggatcaggagtttatcgaggcaaccaaggagcctggtataacatttgttgtagctaaatttgatggtatccttggtcttggattccaagagatctctgttggaaaagctgctcctgtttggtacaacatgctcaagcaaggccttatcaaggagccggttttttcattttggcttaaccgtaatgc

SEQ ID NO: 154755 - DNA, 350 bp, Arabidopsis thaliana columbia
gcgtcgtttgtccaagtttggcggtgcattttatttcaaaggttgacttggagaatgtagaatcaggggcgtaacgatctttaagagttgacaatgctggaagagagggaagaggcaagtatgatcaggccttctctaaagtgacatcaagtttttatcgcatgcagaaacacggttacattggtgagttggtacgttgatgaccacaggtctggaaagagcgtgtcgagcttaatggcgactaacaaatgggggtatgatgcctctttcgatgttgggggaaggagattgaagctgaccggtcgtattttacttgcagacaggagggacattgtacttcgacctatggt

SEQ ID NO: 154756 - DNA, 433 bp, Arabidopsis thaliana columbia
aattaatctcagatttagatcgagagagaccaatttgagagcaagatctttgcattgttcatgtcttgctttgtaatgccgggggtcttcatcgtaaccgactcggtggacgcgatcaattgactcgttctcttttggatccttgttgactcggcgagcttggcttaggagacatgggaggtgtgccttcaacgccgcgaaaaaccggtggtgatgatgtttcggtggccgagtacctcattgccacttttgttggggagaaatcgtttcctttagcgtctgatttctggaacaagctacttgagcttccgttgagttctcgctggcctagtgatcgggttcaacaagcctgtgaacttttcgcacaaagtaatggctacactaggcaccttgcaaaactattgattcatctgtcctggtgtttgcaagagct

SEQ ID NO: 154757 - DNA, 413 bp, Arabidopsis thaliana columbia
cgctttgttgcagaggatcacaatctaatggctattccaatgtccatggcaatggcgactgctgcagattccgtgagcagagtggggagtatgtcttctctcaaatcagctcttccctccaccgcatcactccgattaccttcctcgtcttctcgccgtccggttactcttcgtctcccaatctcttctccttcactcccatctttctccggtctctctccggtcaatcctctcctctcaatcggacttccagattggcaaagctttgagaatggattcaaaattgttgacggtggtggtcgtatctacgcgatgagacacggacgacgtgtttcgaagctgaacagaccaccggaccagcgcaaagctcttttgcgaggactcacgactcaacttcttaaagcatggagaat

SEQ ID NO: 154758 - DNA, 349 bp, Arabidopsis thaliana columbia
cggacgcgtgggctaaaatcgatggcgactgatataccgattactacggagactgttgctgtgagtgagaagaaaatggacgtgggtttagatgagattatcaagatggaaaagagcaataccaatgtgaataagggcaagaaacagagagtattgaataaaaaggagaaatttagtggtgctgcgaagaatagtgcggtgaaagcacagcgttatatggactctcggtctgatgttagacagggtgcttttgctaagaagaggtctaatttccaaggaaaccagttttctgtaacaacaaccgttgctcgtaaagccgcttctgctactccgcgtggtagaccttata

SEQ ID NO: 154759 - DNA, 365 bp, Arabidopsis thaliana columbia
  unsure (1)..(365): unsure at all n locations
tcgtgaagaacaacaactgtttcttggtttattttttcggtagaggaaactctaangttggagtcaacaaggagactaacgggcgcaccaactttcactcttacaagcactctggtcttgcaaacaaaaagactgtgaccatccaggccgctgacaaggaccaagctgttgtgctcgccaccaccaagaccaagaagcataacaagcctaagctctctgtcaacaagtctattctcaagaaggaattccccaggatgtcaaaggctgttgctaaccaggtggtggacaactactacacgccggacttgaagaaagctgcacttgctagactcagcgccatcagcaaaggtctcaggtttgccaag

SEQ ID NO: 154760 - DNA, 383 bp, Arabidopsis thaliana columbia
attaatacaaacttgaattcttcttcttcttaactttgtctgtcaattcacatatatatagggccaccatcacataagtggcgtcataacacatcatggtgaacgaagaaatggagtcatcacttaaagtcatcgacgtggcacgagtcacaccatcaaactccgactcgtccgagtcactcactctcccactcaccttattcgacctcctctggtacaaacttcacgccgtcgaacgagtcatcttctacaaactcaccgacgcaagtcgtcctttctttgactcagtcatcgtcccaaacctcaaaacatctctctcctaatccctctctcactacctcccactcgccggaaaactcgtgtgggaaccacttgatcccaaa

SEQ ID NO: 154761 - DNA, 234 bp, Arabidopsis thaliana columbia
  unsure (1)..(234): unsure at all n locations
gaanacccgggggggccgcacgcgtccggtaactcttgtccggtttgccgtcattatttttcttctgaggatctcacctacataagcgggggcttttttgactggtgtgagcgctactccatattaagaggaagactcacctgccgggttaacgatttggaggttaccaggtggaggattctttttatggagaatccctgtttgttggagaggtggagatagaatgattccgtt

SEQ ID NO: 154762 - DNA, 424 bp, Arabidopsis thaliana columbia
  unsure (1)..(424): unsure at all n locations
gctctctcaaaagtcgaatatcccaaattctatccgttttccggcgataatctccnatctagatcctatggcgaaagagccaggtcgtgttctcgttactggagctgcaggacaaatcggatatgctcttgtacctatgattgcaaggggtatcatgcttggtgctgaccaacctgttatcctccacatgttggatattcctccagctgctgaagctttgaacggtgttaagatggagttgatcgatgctgctttccctcttcttaaaggtgttgttgctacaactgatgcctttgagggatgtgctggagtcaatgtttcttttatagtagttggttttttttttttgtatttttttgaatttatccttttattattaattttttgtctttcttttttttttttttattctttattttctttt

SEQ ID NO: 154763 - DNA, 393 bp, Arabidopsis thaliana columbia
ttcagcatcagcgacagctactcttctcaaacccaatcttccgccgcataaaccggccatgggcgcctcctccgtatgtccgcctcttcctcctccacgtcgcaaccacctcctccgccgcgatttcctctccctggcggcaacatccacgcttctaacacaatcgattcagtttctagctccggcgccggtctccgccgctgaagatgaagagtatatcaaagatacgtcggcagtgatcagtaaagtaaggagtacgctttcgatgcagaagacagatccgaatgtggctgatgcggtggcggagctgagagaagcgtcgaattcttgggttgccaagtaccggaaagagaaagctcttttcggaaaagcttctttccgggatatatactc

SEQ ID NO: 154764 - DNA, 232 bp, Arabidopsis thaliana columbia
  unsure (1)..(232): unsure at all n locations
ctattaacacacatacctacacggggaatggatatattaaaggtgtgattcaaaccacanaaattatatttttaccccacaagcccaccaacctagaaagcttctccaaccctcacataccttaaaacaaatactattcaccacaaacttacctgccttgtccttatcctctaatggtcacaagaaatttaaagcctttcagcaaatcccacttgggatttctttttcccac

SEQ ID NO: 154765 - DNA, 368 bp, Arabidopsis thaliana columbia
  unsure (1)..(368): unsure at all n locations
gttttgttttgcatcggccgtcccaaacctgaggatttctctgttcagctagagcgaaacgctagattcacatttgagctgagagatgctgcntgtancanggaggaggcttttctctgtctcgcagagatcttcgactgcgacctccttcgtcgtctcccgtgaccataccctttccgatggtggcggcgactcctcttcagctcccagatccctcccctctgcagatctctcatcttaccaccgtagccttatcagaggcttctcttctcaagtccttgctcaaggaaatgagataggttttggttcagaagtcccagccacagtcgaagctgtcaaaacgcctaactcaaagattgctatgatga

SEQ ID NO: 154766 - DNA, 405 bp, Arabidopsis thaliana columbia
attacacatggtctattcttcacttttttttctctacacacacacacacacacacggacgggatgaattcttcgagggttggaaaaaacctaaacccacaaacaaaatccgcacaagaacaaaacccacttgccattttccattcttctctaccaaacagatctttttctgtgaccttgttcccatgcttgactcaatttgtgaaattgttagctcataatccaaacaaggctaagatccatacgcaccgcttcttctatgactcatatattggatcattataacttactattaccttttatggaaaagttggtaaaaccgaaaccgaattctatacatttactagcgaatgtgttcgatgtatgtcggtgtaccgctgttctctgttcttccgggctttttctg

SEQ ID NO: 154767 - DNA, 256 bp, Arabidopsis thaliana columbia
acgatctactctctttaaaagaaattctttatttctatcaagaaacagaagatgcccgggaaggtgtaaatacaaggaggggaaggaaccaacctatttgaccattgttcgacacatgacgcccagaccaagattcgattcgcaacacgcatatacggtattcaatatgttcattatgattatgttaagatccgacaaccaaaacatgctcctcttcgacggaccaaaggacgtgtaatctcacctgaatcggttc

SEQ ID NO: 154768 - DNA, 372 bp, Arabidopsis thaliana columbia
atcctctaaaaaaaaatctttctggtgagtaacgaaaaaaatgtgtccggtggagaacaagtggttataggtgggtgaaaaaggagctggtcctggggctagaagctcacatgccatgaccgtcgttgggaacaaagtttactgttttggtggtgagcttaagccaacgatccatattgataacgatctttacgttttcgatcttgagactcaagaatggtcgatagctcctgcgaccggagaggctcctttcccctgttttggtgtctcgatggtaacgatcggttcaacgatctatgtctacggtggccgtgacgataaacggagatacaacggtcttcattcgtatgatactgagaccaatgagtggaa

SEQ ID NO: 154769 - DNA, 348 bp, Arabidopsis thaliana columbia
gagcaagcagcggcgcaaaagttgaacacatgtgaattctcacaatggcgaggattaacggggacgaattgaagtagaagtcgaagagcgatcttcaaaaccagctgaaggaactcaaagctgaactcgctctcctccgggtcgctaaaatcaccggaggtgcttcaaacaagctctttaaaatcaatgtcgggcgtaaattcatagctcaagttttgacagtgtcttctcagaaacagaaatcttctctaaaagaagcataccccaacaagaagttgctttctcttgatctccggcccaagaagacccgtgctatttgtagactccttaccaaacaccaggccttgt

SEQ ID NO: 154770 - DNA, 409 bp, Arabidopsis thaliana columbia
  unsure (1)..(409): unsure at all n locations
cggaannacccgggtgcgagccgcgacgcgtccgcttaagaaatcttcagcccaccctcgactgtttgccaatgtgaggagcncnnttggtattgggaattggagcaatggagatacaanctttgattgcgagaagggggtgtgaacctggaccaatatggtatggccctcgttggtgtgctactccttggcccttcagggacccttatcttacttgtggtangtgggagcctgacccaaagccactttggtgcgtgacaattgtaggattgctcacttacaaagagcctgtactttaccgccggtatttggtattttcttggtattcaatggaagaagtcatgccaggccaagtgggagttccaaagtcggcccttgtgagggtattagttctggtgatcaagtctgg

SEQ ID NO: 154771 - DNA, 424 bp, Arabidopsis thaliana columbia
  unsure (1)..(424): unsure at all n locations
gactggcttgcttagccgcggagaactcattactcattcgctgcaaacatggcaagaggggtgaagaagcatttgaagaggctgcaatgctcctaagcattggatgcttgataaacttggtggtgcctttgcccccaagccgtcttctgggccacacaagtctagggagtgtttacccttggtccttatcatcaggaacaggttgaagtatgctctgacatacagagaagtgatttcgatcttgatgcaaaggcatattcaggttgatgggaaagtgaggactgacaagacttaccctgctggtttcatggatgttgtgtctatccccaaaacaaatgagaacttccgtcttttgtatgacaccaagggacgtttncgtctncactccatcaaggatgaggaggctaagttcaagctttgcaaa

SEQ ID NO: 154772 - DNA, 394 bp, Arabidopsis thaliana columbia
caaaaatccgatggggaggaagaagggattgtcggagttcgaagagtcggcgccggatggggtcgatcctgagaatgcgtacaaggatccggttgcgatggtggagatgagagaacacattgttcgtgagaaatggatccatatcgagaaggctaagatcttacgtgagaaggtcaaatggtgttaccgcgtcgaaggcgttaaccattaccagaagtgtcgtcatcttgttcagcagtatctcgatgccactcgcggcgttggttggggcaaagaccaccgtcctatctctcttcacggtcctaagccagtagctgttgaagaagctgaatgatgttgtgtgcgtgattgatctttggtgagtgagaactttgattaccatacatgaatggag

SEQ ID NO: 154773 - DNA, 298 bp, Arabidopsis thaliana columbia
  unsure (1)..(298): unsure at all n locations
aaaaactcactctttactatccataaaattctctaaacaaaacaaaaacaaacggaacccgtctattttaaaacgcgcttgaaccancaaaaaacaaaccattatactacataacttatacttcttctcctaccccaaccttaaaatatccatccttccttcctccataagaataaatcatcctcttgctctcctcattaaacttaatcctctaaacctcttccctctccctctacaatatctctaacactcctttaatttcttctaatttaattcacaataacaccatatctgaatt

SEQ ID NO: 154774 - DNA, 428 bp, Arabidopsis thaliana columbia
  unsure (1)..(428): unsure at all n locations
ggtgattgctgcaatcacaagctgtactaatacatcaaatcccagcatgcttggtgctggggttgttgcaaagaaggcttgtgaccttgggctacaggttaagccttggataaagacaagtcttgctccaggctcaggagttgttacaaaatacttattaaagagtggattgcaagaatatctgaatgaacagggtttcaatattgtcggctacgggtgcactacatgcatcgggaattctggggaaattaatgaatcagtgggagctgctattaccgaaaatgacattgtggcggctgctgtgctatccggtaacaggaactttgaggggcgtgttcatccactaacaagagccaattaccttgcatctcctccgttggtggttgcctatgctcttgctggcacggntaacattgactttgaaacgg

SEQ ID NO: 154775 - DNA, 442 bp, Arabidopsis thaliana columbia
cacgcggcgcacattaaaaagctaaacaaaaaccattgttttctctatctttcttctccaaaaatggcggaggcaacaacagtaacatgggtcattgaagcgtcaaagagatgagcaagaacaagaaatcatcaaaacacaagaagaaacgaaaagaccaaaagccttcttcatcttcttcctcgtacaaccaagttctaactctcttaaaagatgaagccgagaatgacataacttccctaatcaccacgcttcagcaagaaatttctaatgaagagcaaaacgctgccgttttcgaagaaaatccttctctctcttcttcttgctcctcttcctcttcttcatgcacttcgaaagaagatgagtacgacggagataaagagaaagtgatgaagcatcttcttgagcaactgacgacgaactaggaatccctaacactgaa

SEQ ID NO: 154776 - DNA, 399 bp, Arabidopsis thaliana columbia
acgcgataaatctatacactctttggagaaagagcaagctgttctttgtattactattgcattggtttggctgcaaagatctccggttaagaaaccaacgatgaaagagattgtttagatgctttcgggtgtgtctgaaccaccgcatttgcccgttgagttctcaccctcgccgcctatgggttttccgtttaagtcaaggaagaaagcacggtgaaattcgggtttggttatgacttatgagctcagtcatcaagtgtaggatttttccggtccaaagctaaaccaattgcgagttgtaggaactatttgattccgtaagattagctttttgcaaatatttatgaatatttaagttgcttaacaaattaagttaaaacaataaagaagtttccaatt

SEQ ID NO: 154777 - DNA, 412 bp, Arabidopsis thaliana columbia
  unsure (1)..(412): unsure at all n locations
gcgcaattacacttattttgctatcgtttgagcatctcaaaaatttctccggggagatttgttgggatatggactcttccacagagaagatgctcaangtccctgaacaccaagttgctggtcacattgctagtgatgggaagctcggtccactcgtagatgaccaaggccggttcttcaagccacttcagggagattctcgtggcgaacacgaggctaagttctatgagtctttcacatcgaacatgaaggttccagatcacatccatagatacttcccggtgtatcacggcactcagctagttgaagcatctgatggatctggcaagcttcctcatctngttcttgatgatgttgtttcagggtacgcaaacccgtcggtaatggatgttaagattggatctaggacatg

SEQ ID NO: 154778 - DNA, 370 bp, Arabidopsis thaliana columbia
  unsure (1)..(370): unsure at all n locations
ccgaaaancgggacgacgcacgcgtgcgcgatgctctcgtttggtcttctcttcacggactcgtttttggtgacaaaagttatcanaaggcaggtgttgtttcaggggttggattgatgcacncacctattgcattgctaccaactgcattcccagaagcttattggaagcaagcttgtaatgttactcctcttttcaatgaattgattgatcgtgttagcttggatggcaaattcttacaggatagtctctctagaacgaagaaagttgatgtctttacatctagacttcttgacatttacttcaagatgcttgaaagaaattagaaagaggacattcgttgtgttttacaaccttttcattattttct

SEQ ID NO: 154779 - DNA, 301 bp, Arabidopsis thaliana columbia
cggagatggccgcaacatccgccgtttctgtagctgcttcttccatcatggatacgtggggtgctcccggtatccaggccgggtcaggtcggttcacagccgtgttcggtttcggaaagaagaaggcagctcccaaaaagagtgccaaaaagacggtgactacggaccggcctctttggtacccaggcgccatttctcctgactggcttgatggttccttggttggagattacggttttgatcccttcggtttaggcaaaccgtccgagtatcttcaaattcatatcgattcactagacca

SEQ ID NO: 154780 - DNA, 428 bp, Arabidopsis thaliana columbia
gaaacttttcatcgatcttcaaattccagataaaactcgatgaatcttcaagctggttctggtagcttcggattcctttcgagtccacttggtgtcactcccagaacttcgtttcgtcgcttcgtaatccgagcgaaaacggaaccgtcggagaaatcagtagagattatgaggaaattctccgagcaatatgctcgtcgctctgggacttacttctgtgttgataaaggagttacttcagtcgttattaagggtttggctgagcataaagattcatatggtgcaccgctttgcccttgcagacactatgatgataaagctgctgaggttggacaaggcttttggaattgtccgtgtgttccaatgagagagaggaaggagtgccattgtatgcttttcttaacttctgataatgatttcgctggaaa

SEQ ID NO: 154781 - DNA, 434 bp, Arabidopsis thaliana columbia
ctcttttctctccagatttcgattcccgaggctcgagagaaaaccgtaaatctcttctccgttcactcaatcaaccaaagatgcgtgagattcttcacatccagggtggtcaatgcggtaaccagatcggagccaagttctgggaagtggtttgcgccgagcacggcatcgatccaaccggaaggtacaccggagactcagatctgcaacttgagcgcatcaacgtttactacaatgaagcgagttgcggtagattcgttcctcgtgcagtgctcatggatttggagcctgggactatggatagtctcagatctggaccgtacggtcagacctttcgacctgataacttcgtctttggtcaatccggtgcgggtaacaactgggccaagggacactacacttgaagagctgaactaatcgattccgttctcgat

SEQ ID NO: 154782 - DNA, 382 bp, Arabidopsis thaliana columbia
cggattctacagtcaaaattgccaaaacgtttaaaacatcgtatctaaagttgttggagaggcattcatcaaggattcatcgattgcacccgcaatgatccgcctttattttcacgattgttttagcaacgggtgtgatgcatcgcttcttctagatggttcgaacagtgagaaaaaggcgtcaccaaatctaagtgtacgcggatacgaagtgatagatgacattaagtctgcggtcgaaaaagaatgtgacagggtcgtttcttgtgctgatatcatagctctcgcgactagagatcttgttactcttgcaagcggagggaaaacacgatatgagataccaacaggacgattggacggttaaatctctttggctttgctt

SEQ ID NO: 154783 - DNA, 304 bp, Arabidopsis thaliana columbia
tttagctcaaccttcattactaattttcttttaaggtttctttcgtgaatcaaatgcggcgtattaaatcttttttggtcgcatctaaatccgacaacgagggacatcccgacaagctttgtgatcagatctccgacgctatcctcgatgcttgccttgaacaagaccctgagagcaaagttgcttgtgagacttgtaccaagactaacattgtcattgtttttggagaaaacaccaccaaggctaactgttattactagcacatttttcgtaaaacataccttttatattttattttctcttt

SEQ ID NO: 154784 - DNA, 333 bp, Arabidopsis thaliana columbia
  unsure (1)..(333): unsure at all n locations
tcattactgttctgtttcactttctctctctctttatactctctaaatgatnncaaacgactgtgatttattcagcgctggatgtgtatttttggtattgaccctctttaacaaacccatcaccgtcgccgggcagaatattccggcggtgggcttgttcacctttggtgactccaacttcgacgccggaaacaaacagactctcaccaaaaccttactccctcaaactttctggccgtatggaaaatcccgagatgatcccaacggcaaattctccgacggcctcatcgctccagactttctcgctaaattcatgaggattccgatcgtgat

SEQ ID NO: 154785 - DNA, 419 bp, Arabidopsis thaliana columbia
gtattttctatataccaaaaatggcttcaagttccatagctcttttcttggctctggatcgtctctttttcacaacggtcggcgcctgtggtagctgtactccgtgcggcggaggttgcccctctcccaagccaaagccaactcctaaaccaaccccaagccctagctctggctcgagcaagtgccctaaagacaccctcaagctcggtgtctgcgctaatgtgctcaacggcctcctggacttgacccttggcaagccaccggtcgagccatgctgcagcctcatccaaggactcgctgatgttgaggcagccgtttgtctctgcaccgctcttaaggctaacattcttggaatcaacttgaaccttccaatatctgtaagtctactccttaatgtttgcagcaaacaactttcttct

SEQ ID NO: 154786 - DNA, 285 bp, Arabidopsis thaliana columbia
gaaaacccgggccggccgacgcgtccgcaaatctccagagccgttttctctttttctttttcctcctcgcgccaactctgagactctgtcatttttatcaatctgggtggttcctcctccaaattgaaaaacaatggaattggattcggagaacaaattgttgaagacttgtttgtttatagtggcaacacttgttatagccaaactcatcttctctttcttcacttctgactctaagaataagcttctttcttctactcttaaagccttttactttattttttt

SEQ ID NO: 154787 - DNA, 430 bp, Arabidopsis thaliana columbia
gttgatttctactctggattaatctataggttcaatgggattcccaccagaattggtcacggtcctgttcgcagtcccgcgtatggctggatacttgtcacactggcgtgagtcgttagatgatcctgacactaggatcatgagaccccaacaggcctatactggagtgtggatgaggcattacgagccagtgagagaacgaacgttatcaagtgattcggataaggataagtttggtcaagtttccatttcgaatgcatcaagaaggcgtttagctggatcatctgccctttagtctcaatcctaatactcaccaataaagaagaaaacattgggatacctctgggaaaacaagagagtcttctcaacaacatgtgttgttttctttctcttattcttaaacacttaatataccacccctattcttatt

SEQ ID NO: 154788 - DNA, 293 bp, Arabidopsis thaliana columbia
gcgcggacgcatgggcggacgcgtggactccaatcactgttaaaagtcccatcaatctcacagcggttcgtgaaactggtcaccgggttaccacattaatacaactcctcaacacaactcaagtcgggtttcaggtaagtgtacaactcaatagctctgaccaagggatgactatatttgccccaacagataacgcattcaacaagcttaaacccggaaccctaaacagtctgacatatcaacaacaaatccagctcatgctctaccatattattccaaaatactactctcta

SEQ ID NO: 154789 - DNA, 166 bp, Arabidopsis thaliana columbia
tactgacactaggatcataaaaccccaacacccctatactggaatgtggatgacgcattaccagccagtgagagaacgaaccttatcaactcattccgataacgataagattcctcaacttaccatttctaatgcatcaagaaagcacataccttcatcatctccc

SEQ ID NO: 154790 - DNA, 448 bp, Arabidopsis thaliana columbia
tttagattcacattaatgcttttcaactaaatcctcttcgtttgattctccgatgacgtgcatcagttcctccgatcacccccttccggtgagcaagaaacgattaaagccattgatattacgagatttccttctcgatgatctcagctcttgctcatccaacggcttcaaatctttccctcgtctcctcaacgctgagatccaacggtcaggaatgttccaccacaatcgccgtattacctgcggattagcgtttagtcacgccgttcataaagcttcgacggcgttactcaccgccgttaaactcttgcccttcccttcctccgttaaatctcagtctcgtgatagagataacaagaaaggacttttctcaagaagcttctggaagaaactttcccgacgtgaacttaacgtcgacgtcggagagaaggaacggagaacggatgat

SEQ ID NO: 154791 - DNA, 98 bp, Arabidopsis thaliana columbia
taacaaagcaatatcatttccaatttatattttttaaagccatggctgcatctttctctgtgccctgtatgataatggaaggagaagggaaattccaa

SEQ ID NO: 154792 - DNA, 300 bp, Arabidopsis thaliana columbia
aaataaaatcaagagggaaactattccaaattctaatttaagtttcatgaaaagtgtgggtggcaaattcaaccttgggaagccaataacccttattaatactgatatttggtcaacttcatcagaagaccaatatctcaaactgttccactctcccaccacaacccaacacaaaaccacaagtagatccgaacctgaaccgctttgtcgactctctctctctctcaatacctgtagtgaggaggcttgtatggtccctcaattgtaatgctgacgtattcatattgttcctttgacagc

SEQ ID NO: 154793 - DNA, 435 bp, Arabidopsis thaliana columbia
ggagcaagccactacactcttcatattgctttccactctcctcctcgccgtctgcgttgagtctcctcagccaccgctatttcccgatgaagctctccccactaaatctggctacctcccggttaaacccgcacccggctcgtccatgttctatgccttctacgaagcccaagagccaaccacacctcttcctgacactccgctcctcgtttggctccaaggtgggccaggctgctcttcaatgattggcaacttttacgagctcggtccctggcgtgtagtttcacgcgccacagacctcgagcgcaaccccggcgcatggaaccgtctattcggactactttttgtggataacccaataggagtcggattcagcatcgcagcctcacaacatgacatacccacaaatcagagacaggtcgctgagcatcttta

SEQ ID NO: 154794 - DNA, 319 bp, Arabidopsis thaliana columbia
  unsure (1)..(319): unsure at all n locations
tcacgaagaagaagacgaagcccatttaattatacaagaaaaattccatttncctcgattgggtgtgagtgagaacagacatttaaagcttcttactcaaagtttctttctttatagatctcaaaaaattcgatatttttctcgattcatccgccattaaggttttattgcgagatcgaagagagaaggagaaaatgacgcatagagtagatcaggaatatgattatttgtttaagattgtgttgattggtgattctggtgttgggaaatcgaatttcttgtctagattcaccaggaatgtgttttgcttggattctaa

SEQ ID NO: 154795 - DNA, 442 bp, Arabidopsis thaliana columbia
  unsure (1)..(442): unsure at all n locations
cccgggncgggcgacgcgtgcgattagccgccatggtgaagtactcgcaagatcccgacaatcagaccaagtcttgcaaggcgagaggatccgatcttagggtgcacttcaagaatactagggaaacagcgcacgcaatcaggaagctaccattgatcaaggcgaagaggtaccttgaggatgtgatagctcacaagcaagcaattcccttcacacgtttctgcagaggtgttgggagaactgctcaagctaagaacaggcactctaatggtcaaggacgttggccagccaagtctgctcagtttgttcttgatttgctcaagaacgctgagagcaatgctgaggtgaaaggtttggatgttgatgccctcttcatatcacacatncaagtgaaccaggccgcanagcaaaagagaaggacttaccgtgctcacgggaagaa

SEQ ID NO: 154796 - DNA, 309 bp, Arabidopsis thaliana columbia
  unsure (1)..(309): unsure at all n locations
aacggaattcgagcgacgcgccaggcctgagcangangaagaagacgaagaagtattggtttatctactaccatggttctcaagtgccgaggtttaaaattacaggggcgccgaccactacccannaagaggaattaggtttatactatctgattatcatgattcatactatacttaaatcaaaatgtaagaggtactatcataacatgtagaagccatccaagcttgtatggactgctatgaacagaaagcaacacaagcaagtattcaataaaattaatctaattattaaaatctaaacatttcttt

SEQ ID NO: 154797 - DNA, 342 bp, Arabidopsis thaliana columbia
  unsure (1)..(342): unsure at all n locations
tgactctctctctctctctcgctctggaattatcctttatttctgtgactgtgtgcacttgcagagaggagagagaggcccgaaaccaaaagaaaagaaaaggttgtggcttgcagctgaatcaataccatctccatatatacaatacaccttcactattcccccttttgtatttttattatatttttcccatcaaagtctgtttttttagactccggtttgccgctttgtgtgtgtgtgagagagagaaagagagctatctatcctctgatttatggtctctggatctctgacaatcgagttgagttaattacaacacattcctntctttttcaatcgatc

SEQ ID NO: 154798 - DNA, 199 bp, Arabidopsis thaliana columbia
  unsure (1)..(199): unsure at all n locations
ctcgtggcggctggtcatatcaagcttatatatcagatctatcttcattcactcccggttggtgagtaccagatcagggatgatgctcatcggnccaacattgaaggatgaggtaatgaaaatcatgccggttcagaaacaaaccagggctggtcaaaggactagattcaaggcctttgttgtcgttggagatggtaat

SEQ ID NO: 154799 - DNA, 77 bp, Arabidopsis thaliana columbia
gttttggttctctatggagaggaaacactgtcaatgttatccgttatttccccactcaagcgttggactttgccttc

SEQ ID NO: 154800 - DNA, 408 bp, Arabidopsis thaliana columbia
ggaatagtggagatttgcattcttttgggataaggatcaaaaatggaggaagcagaggggcgctgtgaagcacgtattgcttgctaatttcaaagatggggttagtcctgagaaaatcgaagagctcatcaaaggttacgccaatctcgtcaatctcatcgaacctatgaaagctttccactggggaaaagatgtgagcattgagaatctgcatcaaggttacacacacatctttgaatccacatttgagagtaaagaagctgttgcagagtacattgctcatcctgctcacgttgaattcgccaccatcttccttggcagcttggataaaagtttggttattgactacaagcctacctctgtctctctctaattatcttgtagcaacattttaatcattgatctttt

SEQ ID NO: 154801 - DNA, 408 bp, Arabidopsis thaliana columbia
  unsure (1)..(408): unsure at all n locations
aacaagtggaagctttaaaacgagagggagtgagcaaaaatggcgacgtcgggaacgtacgtgacggaagttccgctaaaaggatcggccganaaatactacaagaggtggaagaacgagaaccatgtcttccctgatgctatcggccaccacatccaaaatgttaccgttcacgaaggcgaacatgactctcacgggtctatcaggagttggaactacacatgggatggaaaggaggaggtgttcaaggagagaagagagatagacgatgagaccaaaacgttgacgttaagaagacttgagggtcacgtgatggagcagctcaaagtgtacgacgtcgtctaccaattcattcccaaatctgaggatacctgcatcggcaaaatcactttaatatgggagaagcgc

SEQ ID NO: 154802 - DNA, 374 bp, Arabidopsis thaliana columbia
  unsure (1)..(374): unsure at all n locations
gtttctttgataatcttcttgctaagtgttcttgttgagttttgctatggagggttcacagttgagtatgtcagaggaagtgatttaccanatnacatgccactagacagcgatgtttttgaagttcctcctggtcctaattcacctcaacaggttcatgtaacgcaagggaaccatgaaggtaatggagtgatcatttcttgggtgactccggttaagcccggttctaagactgttcaatattggtgtgagaatgagaaatcgaggaaacaagcagaagcaacagttaatacttaccggttctttaattacacgtctggttatattcaccattgccttatcgatgatttggaatttgatacgaaatactacta

SEQ ID NO: 154803 - DNA, 251 bp, Arabidopsis thaliana columbia
  unsure (1)..(251): unsure at all n locations
acgacgccacgcgtgcgattacgaagagccgncgtctgtgaaacttttgtaactactaccgatattcaaatnntcactgactcgtcataatactctctaggtcttaaagcaactaggcctgaaattgtcgacttttgggcaccatggtgtgtaccttgcaagatgattgatccgcttgtaaacgatctagcacagcattacactgtgaagatcaagttctacaaattaaacactgttgaatctcctaatac

SEQ ID NO: 154804 - DNA, 349 bp, Arabidopsis thaliana columbia
atcacaacactctttacgtgtttcgaatttatggcttctatttcaaccccttttccgatgtctctggacccaaaaaccgtgcgatcaaagccgttgaaattccgagttttgacccgtccgatcaaagcttccgggtcagaaactcctgatctaaccgtagcgacacgaaccggatccaaagatctcccgatccgaaacataccgggaaactacggtttaccaatcgtaggaccaatcaaagaccgttgggattacttttacgaccaaggagctgaagagttcttcaaatcacgaatccgtaaatacaactccacggtgtacagagtcaacatgccaccgggagctttta

SEQ ID NO: 154805 - DNA, 355 bp, Arabidopsis thaliana columbia
attgagaatcgccgacctgaatcgatcggataactttctctgattaccggcggtcaacacgtctgaacacatatgtggggtgggacgacctcttctctccgcgatctttacctcaacaacgagatctgtttccacgattgatagaggttcgagaccttaaaaggtgatgaatatttggtgggttttgtttattagaaagaaaggaggatgtcgacgccagcaaggaagaggttaatgagggatttcaagaggttgcagcaagacccacctgcgggtattagtggtgctccacaggacaacaacattatgctctggaatgctgtcatattggggcctgatgacacaccatgggatg

SEQ ID NO: 154806 - DNA, 265 bp, Arabidopsis thaliana columbia
gagcgagtcacgcgccgagttttcctcacttgttctcaataaatctctctctctttcttctctatcgctttcatttttctcctccagatctcgattccaatctctctccctctctacttccttcaacagaaatggaaacgttcctatttacctctgaatccgtcaatgaaggacacccagacaagctttgtgaccagatttctgatgcgatccttgatgcttgcttagagcaagatcctgaaagcaaagtggcgtgtgagacatg

SEQ ID NO: 154807 - DNA, 394 bp, Arabidopsis thaliana columbia
  unsure (1)..(394): unsure at all n locations
acggaaactactccaatgctgcatttcaatttcctccgacatcccggatgttggcaacaactgcttctcccgtgtttgtccaaaccccaggagagaaggggttcactaactttgcccttgactttctgatgggtggtgtttctgctgccgtctccaagactgctgctgctcctattgaacgtgttaagcttttgatccagaaccaggatgagatgattaaagctggcaggctttctgaaccctacaagggtattggtgactgtttcggcaggacgattaaggatgaaggttttggttctctatggagaggaaacactgccaatgttatccgttatttccccactcaagccttgaactntgccttcaaagattacttcaaaagactttcaacttt

SEQ ID NO: 154808 - DNA, 384 bp, Arabidopsis thaliana columbia
taacgctttcatcggaagatctcgccggaaaaaaacttctctctgagatcagatctggtacgattctcagctcaatcggatcttttcctttgttgtgctgcttttcactctcttctgcgcgacgaatttggccttgttttttgtttgtttgtcgtatccgacgcggaggtattgagaaaccgtggcttaagacggaggaagaagatggaagctaacgggattgagaacttgacgaatccgaatcaggaaagagagtttataaggagacatcataagcatgagcttgtggataatcagtgtagctctacgcttgttaaacatatcaacgctcctgttcatattgtgtggtcacttgtgagaagatttgatcagccacagaagtat

SEQ ID NO: 154809 - DNA, 449 bp, Arabidopsis thaliana columbia
ttaacatttggtttaagtaaacaaacaaaaatggttttagaaccaaacttcgttctctggtgggtcttcttatgcatgggtgcaacaatctccagcacacttttcttcttccgcaagaaacatcaccgattcataacaaagaagattcagaagaaaaagaagcttcttcctggagaaatggggcttccatggattggtgaaacaatggatttctacaaagctcagaaaagcaacagagtttttgaggattttgtaaatccaaggatcatcaaacatgggaacatcttcaagacaagaatcatgggatcaccaacaatagtagtcaatggagctgaagccaataggctcatattatccaacgagtttagcttggtggtgagctcgtggccttcatcttctgttcaactaatgggcatgaactgcatcatggctaaacaaggcgaggagca

SEQ ID NO: 154810 - DNA, 396 bp, Arabidopsis thaliana columbia
accggaacggaccggccggaccgacccatccgcccagagcgagtcaccttatcgactctctatctcctccttcctatatccccttgctctctggggttttgctcagagtgctacgtgagagatagagagatggaaggtctgattcaaaccagaggaattctctctttacccgcgaagcccatcggagtgagaaggcttctccaaccctcacatggcttaaagcaaagacttttcaccacaaacttacctgccttgtccttatcctctaatggtcacaagaaatttcaagcctttcagcaaatcccacttgggatttcggtttcccacaaggagagaagcagaggattcatctgcaaggcggaagctgcggcggccggaagcggaaatgtgttcgac

SEQ ID NO: 154811 - DNA, 403 bp, Arabidopsis thaliana columbia
  unsure (1)..(403): unsure at all n locations
tccgttattcctctgcttctctctttctccctgtgaaaaaatggactcggtggctctctactgcgcggctggtctaattgccggggccggctactggttcatatgcgtcctaggtccagcagaacgaaaaggcaaacgagcctttgatctctccggcggctcaatctccgcagaaaaagtcaaagacaactataaccaatactggtctttcttccgcaaaccaaaagagatcgaatcagccgagaaagtacctgacttcgtcgacacgttctacaatcttgtcactgatatctacgagtggggatggggacaatctttccatttctctcctcatgtccctggaaaatccgacaaagacgccacangaatccacgaagaaatggccgtcgatctcatcaaagtg

SEQ ID NO: 154812 - DNA, 447 bp, Arabidopsis thaliana columbia
cagcagcttagtctctctgatctctctaccttcctcacaccctaaaactcagcaacaatgggcgttaccttttcagatctacacacagaggagggtgtcaaatccgtggaggagcacctcgccggaaaaacctacatctccggagatcaattgtctgtggatgatgtcaaggtttacgctgccgttccagtgaaacccagcgatgccttccccaatgctagcaagtggtacgagtccgtggcttcccaacttgctaaaagtttccctggaaaggccgttggagtacaattcggtggctctgctgctgctgctccagctgttgaagctgaggcacctgcagctgcagctgatgatgatgatgacatggatctctttggtgacgagaccgaagaagaaaagaaagctgcagaggagagggaggctgctaagaaggacaccaagaagcct

SEQ ID NO: 154813 - DNA, 427 bp, Arabidopsis thaliana columbia
aacgcgcatcatttcttctatgcgggcatcttcaacaccaaactcttcgcaagcttgttgaagctcgtccggggtgataaaggcactctcgtccttgtcaaagtaagagaaggcggcgaacaaatggtcctctctctctattttgtttagatgcaatgtggcggctatgaactctttgtagtctatcgttccgctattgtccacatcagcagcttgcattagatcaagaatctctgactctttgagattggcaccaactcgttttagtcctgctttcagttcttcaaaagtgatctgaccactattgtctgcgtctatcatcttgaacatttgttttaaaccggctatttcttcttcagataagctctcagctatgactctaagagcccatttcttgaacttgttcattgcagaaaattgcttcata

SEQ ID NO: 154814 - DNA, 314 bp, Arabidopsis thaliana columbia
atctctctctggattgagaagaccattgagtaagagatctctgatgatgaagaggaggaagagaagaaggatgaggaaggcaaggttgaagaagttgatgaggagaaagaaaaggaggagaagaaaaagaagaagattaaggaggtttctcatgagtgggatttggtgaacaagcagaagcctatctggatgaggaagccagaggagatcaacaaggagggggtcgcttctttctacaagagtctcaacaatgattgggaggagcatttggctgtgaagcatttcttttttgaaagacagcttgagttcaaagc

SEQ ID NO: 154815 - DNA, 214 bp, Arabidopsis thaliana columbia
catgggtaaaccaaatcagacgacatggaaaaaaacgagatcctcgtttagaaacagaccagggacaatactcatcaaagagaccaaagaggttataaaacagtgtttggagatctttcaaacacacttcttattcggacaaagccctgaaaggctttaactgatctcacaccttatagatgaaaattttgctccagaagggtttaagagagac

SEQ ID NO: 154816 - DNA, 199 bp, Arabidopsis thaliana columbia
ccggactaatggccggaccgaccacgcgtttttggaagaaacaatatagaaccagtggccaagctctggagttcaaacagataaacatggattcatgtgaagcatttgacaggggacatgacatgcatatgcaagcggctccatcccaagctgaattgctctataagaactttaaagttgcaaaggaaaaactgaaaac

SEQ ID NO: 154817 - DNA, 370 bp, Arabidopsis thaliana columbia
  unsure (1)..(370): unsure at all n locations
agccactattaaagaaggaaagaaatctgtttgtattaaaggagaagcagaccantcatggggcgaacattttgagagcttgtaggagcttaaggagaaggattgggatcacaaagagaagcaaagcaatcagatacttgaaagtctctttagtgacttaagtgtcagaagttttctctctcttaactctctcaaatcttttagagagaaaaaactttgaatcttgttcatatcttttgctaatccgattaacatcggatctctttagatttcgttttatgttttagctttctgactatttttcagatctatctcaaacttcttgtcggtttttcttctatactttgtttcgatttgtagttttttttgt

SEQ ID NO: 154818 - DNA, 354 bp, Arabidopsis thaliana columbia
ggaaaaaccgggccgacccacgcgtacgtgggttctgggttttgattatttctacaatttaaccacatttttcactttccggagatgtgcctgcaaacgatgaaggttgctaaagattgaataattgaagtcagttctgaagaggaagggttcgaaggagcttggttcagagctgttttagaggaaaacccatgtttcttatctcgcagaaagcttcgtgttcgttactcgacgttgctggacatggacggttcgtctcccttaatcgaacacatcgaacagagattcattagacctgtacctccggaggagaattaacaaaaagacgtcgttttggaggaaggttttgctggt

SEQ ID NO: 154819 - DNA, 438 bp, Arabidopsis thaliana columbia
ggagaagaagagagaagaagtagaagatttgatgaagaaaaagaagattactactactgtcttctcaactctccatgttgtggttgtaacaaatttgttcaagccatattgaagtgtcttggtcttgagtcatcatcaataccaccatcttcatcatcatcatcaccatccttagtagaagaagaagattcaggaactgaaactgttgaagaaacaggatttatggcgaggataacagcagtgttaagaaggagaccaagaccaccaccttatagctcaggacgacctggtcaaaacaattgattctgattaacactcctgaagacaagcttgtgtctctccgtgtggatcttcttgttgtttaaaattcacttatgatctttatttttttttacccattttttgggtatgtgagcgggttgcttttttttttcttct

SEQ ID NO: 154820 - DNA, 319 bp, Arabidopsis thaliana columbia
  unsure (1)..(319): unsure at all n locations
gtccggcaaaagacaaagttgatgccatgagaccttttttccacaaataattctgctgcattatgtgagcgatcacattaggcgcgcggcggtccacacnacacaaattctatacactngactccaggcgctgcatctactangtaacttttacgatggggctcaaatcgggcaccgcctttaaatgaaatgtcagctgcgggaacttgctcacgttaaatccgcgagtgaaactaaaacagtactctattggtactccttctggtttgactcttttcaactcaacaaggtagcgtgcgagccctgtaaccacctgttt

SEQ ID NO: 154821 - DNA, 417 bp, Arabidopsis thaliana columbia
caatcccagagtagcagaatctgatccatcccacctttttcaattctcaggcaaagtgtttgagctcatattcagataagtgggggttgaaaaaatggaagggactgtgttcacgccttgtttggaaggaatgaagcatgtcaaatctgatcaaggcgagatgcttactaagccatttttagagctttgcaagaccatcttgcctgttatagataaatttggagctgctatgactctcgtgaaatctgacattggtggcaacataacgaggttggagaagaactacttatctgatcccgacaagttcaagtacttgtacacctttgttcaagtcgaaattgagtctaagatagcaaaaggatcgtctagctgtacaaacggtcttctctggttaaccagagcaatggatttcttagt

SEQ ID NO: 154822 - DNA, 435 bp, Arabidopsis thaliana columbia
cacagaataccttgaaccctaataacaatggcgacgctgttgaaactcgacatagccacgactgtccttgctttcatcggtccccgagctaatacctccttgaaccatcggttcgcttctgctaggctcagtacagccacagtttccctcagaacgaagtcgtcatcgttctattccgcggcgctttactctgacagccgtcggagattccactccgccgttgcctctgattcctcgctcgccgttgtagatgatgaagatatcttcgatgttgccagtgagattttgcccgacaatcgaattccggccactataatcaccgggttcctgggctctggtaagacaacattgctaaaccatatattgacgggagatcatgggaagcgcatagccgtgattgagaacgaagttggtgaagtcgacattgatggatca

SEQ ID NO: 154823 - DNA, 423 bp, Arabidopsis thaliana columbia
  unsure (1)..(423): unsure at all n locations
cttgaataaaatcagaattacaaacaaaaatttttttgcaaaagcttcctctcattgggctgctgttgctcctgaccatcgtggcgtctccagcaaatgcagatggacctgtttgcccgccgtcgaacaaactaagccgggcaagtttccctgaaggttttttatttggcacggctactgcggcataccaggtcgaaggtgcgattaatgaaacttgtcgtggaccagccttatgggacatctactgtagaagatatccagagaggtgcaataacgataacggcgatgtggccgttgatttcttccatcgttataaggaagatatccaactaatgaagaatctaaacacagacgcctntagaatgtctatcgcatggccaagaatatttcctcatgggagaaaggagaaaggagtgagtcaag

SEQ ID NO: 154824 - DNA, 254 bp, Arabidopsis thaliana columbia
atcttttcagctctctccatcgtcgttttttctgtgactctcgtgatcatcgcctgaaagaaatttgagataatggccacgcacttcttcatcggaggcaactggaaatgtaacggaactgctgaggaggtgaagaagattgtgaacactcttaatgaagctcatgttccttcacaggatgttgtagaggttgtggatagccctctcatattataaccttcccctggttaagaccacatttagtgtccgacttt

SEQ ID NO: 154825 - DNA, 373 bp, Arabidopsis thaliana columbia
  unsure (1)..(373): unsure at all n locations
cgaaaacactccaatgccattttctttgtactaccatcggcgttaaggaaaaaacttagatctgttaccatcatgcggggttggtttccnacttaatcaaaatggggttgtcattcggaaagttgttcagcaggctctttgcgaagaaagagatgcgtattctgatggttggtctcgatgctgctggtaagacgactatcctctacaagctcaaacttggagagatcgtcaccactattccaaccattgggttcaacgttgagactgttgaatacaagaacatcagcttcaccgtgtgtgatgttggggtcaagacaagatccgtccattgttgagacattacttccaaaacacacagggacttatctttttt

SEQ ID NO: 154826 - DNA, 417 bp, Arabidopsis thaliana columbia
gctctaatggattccagagacatccttccgtcacataaccagcttcaaccaccaccgggaatgttaatgtctcattgcgttggccctaacgccgccgcttcaccattaatggttcccacttccacatctcaaccgattcaacaccctcgtcttccttttggcaatcaacaacaatctcaaacgtttcatcagcagcaacaacaacaaatggatcagaagactcttgaatctcttggatttggtgatggatcaccttcttctcaaccgatgcgattcgggatcgatgatcagaatcagcaactgcaagtgaagaagaagcgaggaaggccgagaaagtatactcctgatggtagcattgctttaagtttaacttctacgtctacctttctttctgcagcttctaattcttaccgtgag

SEQ ID NO: 154827 - DNA, 396 bp, Arabidopsis thaliana columbia
cacacttaagcttggtgtttgcgcagacttattgggcctagttaacgttgttgttgggggtgcaccaaagactccttggggtgcacttcttcaaggtcttgctaatcttgaagctgcggtttgtctctgcaccgctcttaaagccaatgtcttggggattaatctcaatgttcctattgatctaaccttgctgttgaactattgtggcaagaaagttcctcatggtttccaatgttcttgaagatttgagactttaaaagagaaaaatctctttggtttgctatgtttttatatgtttgtttctactgttatctattgtttttgtgagaaaaagctttgttctgtcactgttgagtttgatgtaatgcttgagcttgttcatgatagaacctttgt

SEQ ID NO: 154828 - DNA, 389 bp, Arabidopsis thaliana columbia
cggtttgcacaaaattggggttttgttcctagagtggtcataaatattgaaggcaacaagtaccgctgcactgaactgcactgctgttaaagtacatctcaaggcttcttttaggtttcactgtattgtggtagtagtttatgaattcatgttaagacaatcagcagaacttttttttccttgctcacaattacaagcatttccatttcgttttaaaacaaaaaacaaaaagaagaaacaacaaaaacatcacaaacaaatacaatcaacaaactaaaaaagatgatcaacataaacatataaagggtgttttgccttaaaaacaacaaagcctaccataaacactgggccggcctttttaagggtcccaacttttactccccgtcctt

SEQ ID NO: 154829 - DNA, 468 bp, Arabidopsis thaliana columbia
  unsure (1)..(468): unsure at all n locations
ggcggccgacgcgtccggaatgattgtcggcaaatcgggattaattgtccttttgttcctggaattatgcctatttccagcgtacaaggggttcttgcggatggctgntttctgtaagaccaagatacccgctgagctcactgctgccttagagcctattaaggataatgacgaggctgttaaagcctatggaattcactttgcaacagaaatgtgcaaaaagattttggcccatggaatcacttcccttcatctctacacattgaacgtggacaaatcagctattgggatattaatgaaccttggtctgattgatgagtcaaaaatttctcgttctctaccttggagacgccctgcaaatgttttccgtactaaggaagatgttcgcccaattttctgggcaaaccgtccaaagagctacatatctagaacaaagggctggaatgacttcccacatggaccgtgggg

SEQ ID NO: 154830 - DNA, 323 bp, Arabidopsis thaliana columbia
  unsure (1)..(323): unsure at all n locations
aaaaaaagggncgggccgacgcgtccgccccgagaacggtgcctcgtttgttgcgcttttcacaccattgaagctcgcccattacttgaggattccccaagttatgatgctgggaagcatcccaacgagacccttttgtgaaaaccgagggtatctttaaagctctattatcgccgctaactttacagaattcatctacgttgtttaccaaaactgagaaaattcagaacactcttggcacacctgcaattactctatctttgtctacacaatggacggaggacaatgaactctcgggatgccaacaaacctcaacctgcttg

SEQ ID NO: 154831 - DNA, 387 bp, Arabidopsis thaliana columbia
cgcgtccggcaaggtatgagaactgcctgtcaaatgagcaaggccgagtgttagcagcaaaacttggtgtgacagatcttttctgggagtgtgacttgccgagaaccagagaaggattctaccggttccaaggctcggtcgcagcggccgtggtccgtggctgggcctttgcacagatcgcagacatcatctggatggaaacggcaagccctgatctcaatgaatgcacccaattcgccgaaggtatcaagtccaagacaccggaggtcatgctcgcctacaatctctcgccgtccttcaactgggacgcttccggtatgacggatcagcaaatggttgagttcattccgcggattgctaggctcggatattgttgccagttcataa

SEQ ID NO: 154832 - DNA, 412 bp, Arabidopsis thaliana columbia
  unsure (1)..(412): unsure at all n locations
gaagaggaagagagaggatggaatgggcttttgagaagaagcagaatgttgaagccggggggaagaagaacgccgagaacgaggaagcttatcttcaaaagagccgagcaatactccaaggaatatgccgagaaggagaaggagttgatctcgttgaaacgcgaggccaagcttaagggaggtttctatgttgaccctgaagctaagctcttgttcatcatccgtatccgtggtatcaatgccattgaccctaagactaagaagattctccagctcttgcgtttgagacagattttcaatggtgttttccttaaagtcaacaaggctacgatgaacatgcttcgccgtgttgagccctatgtcacttacggattccctaacttgaagagtgtcaaggaatngatctacaaga

SEQ ID NO: 154833 - DNA, 341 bp, Arabidopsis thaliana columbia
  unsure (1)..(341): unsure at all n locations
atttcattgcaaagcataactaaaaataaataagaagactttttggagatcgaatctggtgatgttgatgggttttggcttgcctttctaaanatagagctagagagtactgggtctgtgtaaagttgataactttttttggtttagagagagaaaggacagagctttacagagatggagatgaagcaaatgaagtttcttactcaccaagctttcttttcctctgttcgatcaggagatcttagtcaacttcaacagttagttgacaatttaaccggagatgagctaatcgatgagtcatcgccgtgttctgctgtggctgaccttatgtctgtgcaaaa

SEQ ID NO: 154834 - DNA, 201 bp, Arabidopsis thaliana columbia
tttaaatcagatagagagagaggaaaaagcatcaaccaaaccatggctgcgagaaatttggagaagatggcttctattgatgctcagctcaagcttcttgctcctggcaaggtttctgaagacgacaagcttatcgagtacgatgctctgttactggatcgatttctcgatattcttcaagatttgcatggcgaggatgtc

SEQ ID NO: 154835 - DNA, 410 bp, Arabidopsis thaliana columbia
gacgattctctctcttgagttgaagaaatgtatgcacaacaatgttatccccaatggtgggtgcaaaaagcactggcggggggatgtcaagacatggttcaaccagcctgccaggaaaaccagaagaagaattgcgaggcaaaagaaggctgtgaagatcttccctcgtccaacttctggacctctccgccctgttgtgcatggtcagactcttaagtacaacatgaaggtcagaaccggtaaaggattcactcttgaagagctcaaggctgctggtatcccaaagaagttggcgcctacaattggtattgctgttgaccatcgtcgcaagaaccgatctttggagggtcttcaaacaaatgtccagaggcttgaaacctacaagaccaagttagtcattttcccgcgtc

SEQ ID NO: 154836 - DNA, 445 bp, Arabidopsis thaliana columbia
ctaatcgctaaagtcatcgtcgtcgtctcttctctcaaaatcaaaaaggttgttatagaagtggctgaggcaacgtctggtggggaggaagcctgtgttcacaaaggttaatgagttgagaccaggaaccaatggccactctctgaatgtgaaagttgtcaacacgaagatggtgatgcagagaggaggaggtcgtcccatgggtcctcagtcacgtcagatgcggattgccgaatgcttagttggtgatgagactggaatcataatctttactgcaagaaatgaccaagtggatatgatgaaagaaggcagtgtagtgactctgcgtaatgcgaagatcgacatgtacaagggttctatgaggcttgcagttgatagatggggacgtgttgaaagtgcagaggaacccacagaacataccgtggaggatgataaccatctttcg

SEQ ID NO: 154837 - DNA, 405 bp, Arabidopsis thaliana columbia
gtaaacccccacacagttattggccgtcggattcaatggaaggattagctatcagagcgtgtcgaccgtcggttttctgtgctattccaggtctcggcggcgattcccaccgaaaacctccaagtgacggtttcctcaagctgcctgcgtcgtctattccggcggacagccgaaaattagtagcgaattctacttcctttcatccaatctcagccgttaacgtctctgctcaagcttccctcaccgctgattttcccgccctttcagaaactatactgaaagagggaagaaataacggaaaagagaaagcagagaacatcgtgtggcacgagagttcgatatgcagatgcgacagacaacaacttcttcaacaaaagggttgtgtcgtttggatcactggtctca

SEQ ID NO: 154838 - DNA, 453 bp, Arabidopsis thaliana columbia
ccgggccgcccgacgcgtccggtttcaatggcgatcattaaaccaaaccgatatctcaaaccggacggtgtcacagtcgtgactggtgaagtctgggcggagagtgtcgaatcagaatttgaactaatcagcgaaatcatcgacgattatccatttatctcaatggacacagaatttcccggcgtgattttcaaatccgatctccggtttacgaatcccgacgatctttatactcttcttaaagctaacgtcgacgctctcagcttaatccaagtcggtctcactctctctgatgttaacggtaacctcccagacctcggtgacgatcttcaccgaggattcatctgggagtttaatttccgtgacttcgacgtggcgcgtgacgcacacgcgcctgattcgatcgagttgcttcgtcggcaaggtatcgattttgagcggaattgtcgcgac

SEQ ID NO: 154839 - DNA, 320 bp, Arabidopsis thaliana columbia
  unsure (1)..(320): unsure at all n locations
aaaacctttcttctctcaaatttctgtggggacatctctgaccgcgcgcgcgccttanatccatcgaatactcatcttccaaaccctattctaaatcattcaatcacatctgtaaaggcggacactttcccatcaataaccgaccctgcaaacataatactgtttcgacttacaccactaacattcacggccaccctacataacactatgctgctcttgatatcctcactgataagaagcttgcttaccttcaaacatctttctacatttgacataccccacatacctaccttgtttattaccagggactttatattact

SEQ ID NO: 154840 - DNA, 383 bp, Arabidopsis thaliana columbia
  unsure (1)..(383): unsure at all n locations
ctatttacacattctcttctctctcgtttttatctaaatctctctcgatctcaatggcgcaaaatggctgccaggaggggcacaatcggaatcaacggtttcggaagaatcggtcgtttggttgctagagttgttcttcagagggatgatgttgagctcgtcgctgttaacgatcctttcatcaccaccgagtacatgacatacatgtttaagtatgacagtgttcacggtcagtggaagcaccatgagcttaaggtgaaggatgacaaaactcttctcttcggtgagaagccagtcactgttttcggcatcaggaaccctgaggacatcccatggngtgaggctggagctgactttgttgttgagtctactggtgtcttcac

SEQ ID NO: 154841 - DNA, 453 bp, Arabidopsis thaliana columbia
gcgtccgatcaccagctatcatgcgcccacctctccaccgtgctctccatcatcatcattccatatatgaggcattcacttgtagaagcgtcgtctctttcacactaaaattcatcgatgacggatcctcccagacccgacccgtttcctgttacccgactcgattccgacgccggtgctctcttcgtcctccaatcaaaaggcgagtggtggcacgccggatttcatctaacgacggcgattgttggtccgacgatattgacattaccatatgcgtttagaggattaggatggtggttagggtttgtttgtttaacgacgatgggactcgttactttctacgcttattacctcatgtctaaggttcttgatcactgtgaaaaatccggccgccgtcacatccgtttccgggaactcgccgccgatgttcttggatctggattgatgttttat

SEQ ID NO: 154842 - DNA, 408 bp, Arabidopsis thaliana columbia
  unsure (1)..(408): unsure at all n locations
cgtacgaaaaaaaaacctaacaacctctcttctctcttccttgttcaacaacaatgganttctgggtgtgggcggtgacaccaaaaaacgcntctaangtgactcctgaagaagacagccttgtccacatttctcaggcttcacttgactgcacagtgaaatctggagaatctgtgtttttgagtgtgactgttggtggggctaaacttgttattggaacactttcacaagacaagttccctcagattagctttgatttggtttttgataaagagtttgagctttcacacatcggtaccaaagcaaatgtgcatttgattggcttcaaatcccctcacatccatcattgataccttcactagtttcggtttttgaggattttttactaaatcttgtttctactttctg

SEQ ID NO: 154843 - DNA, 406 bp, Arabidopsis thaliana columbia
ggagactttgacttcttctgatgaactttcttctgcacttcttctcattaagcctccttggtaaaataatttgagatggcggtaggaaacccagaagtagcaactatggggaaggagaacactgaagccgagtcctctaatggaaacgagtctcagttaagttctgacttaacgaagagtcttgatctggctgaagtgaaggaagacgaaaaggataataaccaagaagaagaagatggactgaaagctgaggcttcaacgaagaagaagaagaagaaaagtaaaagcaagaagaagaagagttctcttcaacagactgatcctccttcaattcctgttcttgagctcttcccttctggagattttcctcaaggtgaaatccaacagtacaatgatgataatttgt

SEQ ID NO: 154844 - DNA, 422 bp, Arabidopsis thaliana columbia
ctgaatttaggagttggtgcttaccgaactgaggagggaaaacctttggttcttaatggggggaggaaagctgagcggcgggttatcaatgacagaacaagaatcaaggagtatcttcccattgttggattggttgagttcaacaagttaagcgctaagctcatactaggcgctgacagtcctgctattcgggagaatcggattaccaccgtggagtgtttgtctggtactggttctctgagagttggaggagagtttttggctaaacattatcatcagaaaacaatttacatcactcagccaacatggggaaatcatccaaagattttcacgctcgctggtttgacagtgaaaacttaccgatactacgatccagcgacgcgtgggttgaactttcaaggtttattagaagaccttggtgc

SEQ ID NO: 154845 - DNA, 452 bp, Arabidopsis thaliana columbia
  unsure (1)..(452): unsure at all n locations
gtcgctgtagctaagcttctgatctccgccatggcggttttcatgcttgtttctgcttcggtcgcgacctcggaagtgccggtcatggtggttcacaagaaagccactctcaacaggctcaaatctggcgccgaacgcgtctccgtttcctacgacatctataaccaaggatcctcgtcggcgtatgatgtgactctgacagataatagctgggataaaaagacttttgaagttgttaatggaaacacttcaaaatcatgggaaagacttgatgcaggaggtattctgtctcattctatcgaattggaggccaaggttaaaggagtcttctacggtgctcctgctgtcgttactttccgcatccccactaagccagctcttcangaagcatactcaactccactactacctctagatatcctcgcagacaaacctccaacgaaacctttgga

SEQ ID NO: 154846 - DNA, 417 bp, Arabidopsis thaliana columbia
atctttaatcattcaatggcttcttcgtcttctatgcagatggttcacacttcccgctccattgcccagattgggttcggtgttaagtcgcaattagtttctgcaaatcgaacaactcaatcagtttgctttggagctcgttcctctggaattgcattatcttcgagattgcactatgcatcacccattaagcaattttctggggtttatgcgaccaccaagcatcagagaaccgcttgtgttaaatccatggctgctgaggaagaagaagtaatcgaacctcaagctaaagtgacaaacaaggtttactttgatgtggaaattggaggtgaagttgctggcagaattgtgatgggtctctttggagaagttgtgcctaaaacccgtgaaaacttccgtgccttgtgtactggtgag

SEQ ID NO: 154847 - DNA, 426 bp, Arabidopsis thaliana columbia
ctcgccggccgatatggccgcctccgtagcaaactgctgcttctccgtcctcaatgcctccgttaaaattcaatcttcgtccatctcctcaccgtggtgtttcgtgtccgcatcgtcgttgactccccgagcttcctccaatattaagaggaaatcgtcgaggtctgattcaccatctcctatattaaacccagagaagaattacccaggtagagttcgagatgaaagttccaatcctcctcaaaaaatggctttcaaggcttttgggtcacccaaaaaggagaaaaaagagtctctttctgattttagtcgagaccaacagactgatcctgccaagattcacgatgcatcctttctcaacgctgttgtcaaggtttattgcactcatactgctcctgattactccctcccatggcagaagcaaag

SEQ ID NO: 154848 - DNA, 438 bp, Arabidopsis thaliana columbia
agcgccggaaatggatctgctttcttccattttccggaccttctctagttcacgaaccaacttgttccactttattctgatgcggtggagaaatggactctctcgcaaccgatccagctttcattgattcggatgtatacctcaggttaggacttattattgagggcaaacgattgaaaaagccaccgactgttctctcacgcctctcttcttctctggagagatctctgttactcaatcatgatgacaagattctgcttggatcgccagactctgttaccgtgtttgacgggagatctccccctgagatcagtattgcacactacttggatcgcattttcaagtactcttgcttgcagccctcctgcttcgtcattgcgcatatctacattgatcactttctccataagacccgagcccttctcaaaccccttaatg

SEQ ID NO: 154849 - DNA, 436 bp, Arabidopsis thaliana columbia
ccacgcgtccggtccaggactttacactgaaatcggcaaaatggccagagatcttctgtacagggattaccagggagaccagaaattcagtgtgaccacttactcttcaactggtgttgcgatcactacaacgggaacaaacaaaggaagcttgtttttgggtgatgttgctacccaagtgaagaacaacaacttcactgctgatgtcaaagtttccactgattcttctcttttgaccactcttacctttgatgagcctgcccctggactgaaagttattgttcaggctaagttgcccgatcacaaatctggaaaggctgaggttcagtatttccatgactatgctggtatctctaccagcgttggattcacagctaccccgattgtcaacttctccggtgtggttggaaccaatggtttgtctcttggtactgat

SEQ ID NO: 154850 - DNA, 409 bp, Arabidopsis thaliana columbia
agaatctggcccaatctaacagcactacggttggtggtacaggccctgcagataggaaactctgtgtgggtaacctggattggggcatgtcggaactgcagcttagacagatttttgaggcatttggtcccgttgagcttgttcagctaccacttgatcctgaaactgggcagtgcaaaggatttggatttattcagtttgttcaacttgaacattcaaaggcagcacaaattgccttaaatggaaagctggagattgctggtaggacaatcaaggtttcttccgtctctgatcatattggtacacaagattctgctccaaaatctgctgattttgatgatgatgatggaggtggactggctttaaatgcacaatctagggctatgcttatgcagaaactggatcgttc

SEQ ID NO: 154851 - DNA, 150 bp, Arabidopsis thaliana columbia
gaaggatttgatctggacacttgttgtaacgcttattttaagcgtgcccttctgttttagcgtcctgcttttgctcaaacactacactaagcagattgtttatgcttgtttacctctctttgtcctttttcccatctttttcaatgtcta

SEQ ID NO: 154852 - DNA, 405 bp, Arabidopsis thaliana columbia
cagaaatctcagagggtgagaatcccaatgaggatcttacccgaacctcgaggttcgggggcgtgtcttctccttctggtgtgggttctcttatcagcgactctctcactcgctcgtgtcgtcgaagttgtcggttacgccgagagcaagatcaaaaccccccatgcattttcaggacttcgagtgacgatcgactgtaaggtgaataaaggccattttgttacaaaaggttcgggaaacattgacgacaaaggaaagtttggtcttaatattcctcatgacattgtctccgacaacggagcgttaaaggaggagtgttacgctcatcttcacagcgcggcgggaacaccttgtccggctcacgacggctcttgagtccaccaagatcgtgtgtttattcaattc

SEQ ID NO: 154853 - DNA, 452 bp, Arabidopsis thaliana columbia
aaaaattaaaacaaaaaaataaatatggagctcgagacctcagtttatcgaccaaacgtcgccgtttatgattctccggatggtgtggaggttcgaggacggtacgaccaaatcttcgccaagattttgacgagagaagctcttagctttgtggctgagttacagagagagtttcgtggccatgtgaagtatgccatggagtgccggagagaggcaagacggcgttataactccggtgccgttcctgggtttgatccttccactaagttcatcagagacggtgattggagctgtgcctccgtccctcctgccgttgctgaccggagagttgagatcaccggtccggtcgagaggaagatgatcatcaacgctcttaactccggagctaaagtctttatggctgatttcgaggacgctttgtcttcaagctgggagaatctgatgagagggca

SEQ ID NO: 154854 - DNA, 375 bp, Arabidopsis thaliana columbia
catagctcctaacaaagcaatatcatttccaatttataaaagttaaagccatggctgcgatctttctctgtcccctctatgagaatggaagaagaagggagattcgaagcggaggttgcggaagtgcagacttggtggagctcagagaggttcaagctaacaaggcgcccttacactgcccgtgacgtggtggctctacgtggccatctcaagcaaggctatgcttcgaacgagatggctaagaagctgtggagaacgctcaaaagccatcaagccaacggtacggcctctcgcaccttcggagcgttggaccctgttcaggtgaccatgatggctaaacatttggacaccatctatgtctctggttggcaaggc

SEQ ID NO: 154855 - DNA, 441 bp, Arabidopsis thaliana columbia
gcgaactcctaaaatggctcgtaccaagcaaacagctcgtaaatccaccggaggaaaggcaccaaggaagcaactcgcgaccaaagctgcgaggaaatcagctccagccaccggaggagtgaagaagccacacagattccgtccaggaacggtggcgttgagagaaatcaggaagtatcagaagagtactgagcttttgatccgtaagcttccgttccagagattggttcgtgagattgctcaagatttcaagacggatctgaggttccagagcagtgccgtcgcagctcttcaagaagcagctgaggcttatcttgttgggctctttgaagatactaatctctgtgcgattcatgctaagagggttacgattatgcctaaggatatccagcttgcgaggagaatcaaaggagagagggcttaagtgaacgaagatgatga

SEQ ID NO: 154856 - DNA, 387 bp, Arabidopsis thaliana columbia
  unsure (1)..(387): unsure at all n locations
agaattattcattcaggcatcttctcatatttttgtttgtgaaaaaaaacccacatcaggggatctctcatttattcgtggcgtttctgctgttttgagtgtcgggttcgttttagctgtaatctttttttccggcgttcgatttgaaaaaatccggggaacaggtgatcggaatcacggctatacacgggatatcacggggtgttagctcacatgtccatattgtccgacagaagggttgtttaatcgaaactaatcctttgccgcacggaggacgtggagctctgccgtctgaaggcggcagcccttccgatctcctctttctcgccggtggcggntccagctttaacttcttttcctttaagttttaagagttagggtttgtta

SEQ ID NO: 154857 - DNA, 398 bp, Arabidopsis thaliana columbia
aaagattctttgtctctttctctgtcgcattgatttgtaaaaaagtgtggcagagagaaaccatggctatggcggaaatggcaacgaagtcttcactatctgcaaaactcactcttccttcttcttctactaagaagacactgagtctgagacaagtctctgtttcacttccaacatcaacttcaatctctctgttatctctctttgcatctcctcctcatgaagctaaagctgctgtttccattcccaaggaccaaatcgtctcctctctcactgaagtggagaaaacaatcaaccaagttcaagaaactggttctagtgtatttgatgcaacgcagcgtgtgttccaagtagtaagagatgctcttaaaccagctttggacactgctttacccatt

SEQ ID NO: 154858 - DNA, 376 bp, Arabidopsis thaliana columbia
tgcgaagaaaatttctagaatgttgacgagagcgcttcggattttgaaacccaggttatttctgggaagtttgctacagcgtcgagcggtttgtttctcagctccgtcgccggcgttttctaccggagctatttcccgtacgacggctgagattgacgccgatgaagttactgcgtgcttggatccagctgaatcggtgactaagattccggtgataatgcctggtaaccttcagccacgtgtcgtcgtgtacgacggagtctgtcatctttgccatggaggtgtgaagtggataatcaaagctgataagtacagaaaggataaagttctgttgtctttcagtctaaaagcagcttggagccttaatctaagaaag

SEQ ID NO: 154859 - DNA, 334 bp, Arabidopsis thaliana columbia
acgcgtccgtttacagttgcgatcagaaaccttgggttttactatctgcgacgaagacgtctaccattacatctctgcgtgagaaaaggtgggcgtcgtgtggtttgttgttgcattatattatccaaaaatcgtcattgtacgatttctttaaataaaagttattaaataagaacatgatgagatccatgatccatcgttgtttaaggttttaagtaagaagatccgcattatgaaagccttttgcgaaattcggatcttcttatatttatttcccccttcaaatgtagccgctcccgctttatttataataataataataaaaaagtttgac

SEQ ID NO: 154860 - DNA, 446 bp, Arabidopsis thaliana columbia
gcaatcgaatggagagtgtggtggcaacatggtgcagagaagaagagaaagcattcgagaacgcaattgcgttgcattgtgtagaggaagagataacagaggatcaatggaacaaaatgtcgtcaatggtaccaagcaaagccttagaagaagtaaagaaacattaccaaatccttttagaagatgtcaaagcaatcgagaatggtcaagttcctttacctcgttatcatcaccgcaaaggtctcatcgtagatgaagcagcagcagcagctacttctcctgccaacagagactctcattcctctggatcatctgagaagaaaccaaatcctggcacctccgggataagtagctccaatggaggaagaagtggtggctcgagagctgagcaagagagaagaaaagggattccatggactgaagaagaacattggttgtttcttttg

SEQ ID NO: 154861 - DNA, 393 bp, Arabidopsis thaliana columbia
gcgtccgttgtatctgattcccttttttacgggagcttttgatttgagtagtgtaagcgtcgatgaggaaggttacatcgtctaagatggcggccaaggatgattgggtggctgtagcgataactgacgacgatttggtcgttgagcttcttttacggctgaagcatgccggaacggtagtgtcggataatccggcggtgattctccctccgttgcggtggggaatccgtcaacgacggtctcgttcctcaagatttggtggcggcggcggcgttctcgtttccttgaagaaagatgtcgattccgttagagccagtccgaagactcctctctcgtggagcggcggatctggaagtggtggccgctctgcttcttcttccgccgatggattcg

SEQ ID NO: 154862 - DNA, 447 bp, Arabidopsis thaliana columbia
atcaccagctatcatgcgcccacctctccaccgtgctctccatcatcatcattccatatagaaatcattcacttgtagaatcgtcttctctttcacactaaaattcatcgatgacggatcctcccagacccgacccgtttcctgttacccgactcgattccgacgccggtgctctcttcgtcctccaatcaaaaggcgagtggtggcacgccggatttcatctaacgacggcgattgttggtccgacgatattgacattaccatatgcgtttagaggattaggatggtggttagggtttgtttgtttaacgacgatgggactcgttactttctacgcttattacctcatgtctaaggttcttgatcactgtgaaaaatccggccgccgtcacatccgtttccgggaactcgccgccgatgttcttggatctggattgatgttttatg

SEQ ID NO: 154863 - DNA, 366 bp, Arabidopsis thaliana columbia
ggcataacttctaggcagatgcaagatactctgcttatcgataaatacatcatggataaggatatacagcaaggcagtgcatgtgccagtttcctatccaagaaatcatcaagaattgaagatcagttgaggttctgcacagatcagtttcagaaactagcggaagataaatatcaaaagtctgtttctcttgaaaatctgcaaaagaaacgtgcagacatcgggaatggcttggaacaagctaggtcaaggctggaggagtcccattctaaagttgagcaaagtcggctggattatggggcattagaactggaactggagattgaaaggttcaataggagaaggatagaggaggaaatggaaata

SEQ ID NO: 154864 - DNA, 287 bp, Arabidopsis thaliana columbia
ggaggataaaaaccctagggtgagtgagacatagagaagcgaaaatggtgcagcgccttgggtaccgatcacgacacagttgggccaccaaatccaaccagcacaggatcgtcaaaactccaggaggtaaattgacgtaccagaccactaagaagagagctagtggacctaaatgtcccgttaccggcaagcgtattcagggtattcctcacttgaggccaactgagtacaagaggtcacgtttatcaagaaacaggaggaccgtgaaccgtgcttatggtggggtt

SEQ ID NO: 154865 - DNA, 357 bp, Arabidopsis thaliana columbia
actcaatcctaattcctttggtttcgcctttttggatttcgaaaagctgaaagattagggtttgtcgattttcgagattagaggcgaatccccaccaccagcatagctgatatcctggaggagagaatgacggattcgggtctaatgatgccggcggagattgctggaattctaaccacggcgattacgagttggtgggatgatgttaatgagtcaactcagtggcaagatgggatctttttcgctctttgtggtgcttatgctcttgtttccgccgttgctcttgttcaactgataaggatccaaatgagagtgcctgagtatggttggactactcagaaggtgtttcatcttatg

SEQ ID NO: 154866 - DNA, 287 bp, Arabidopsis thaliana columbia
caggtttcacgaaaaggagaagaaaaaaacaatggcggatcagctcaccgaccatcagatcgctgagtttaaggaagcgtgtgggcttattcgacaaggatggtgatggttgcattaccaccaaggagctgggtactgtgatgcgttcccttggacaaaacccaaccgaagcagagcttcaagacatgatcaacgaagtggatgctgatggtaacggtaccattgatttcccagagttcttgaaccttatggctcgtaagatgaaggacaccgactctgaggaagag

SEQ ID NO: 154867 - DNA, 372 bp, Arabidopsis thaliana columbia
  unsure (1)..(372): unsure at all n locations
attcgaaaccctaacaaaagccctaatttactaaatacgccgaatcgttgacgagaatggagtttgacgaatacgagtacctggagaagacggttgaggaaggagctgggtcgaataagaaaaaggaagagagtgggaacgagaggagcgagaggagttacagaaagagagaaggaggagagaggcagggggaagaaggaggtgaagaagagcgggttagcagtcggagtaagaagtctcgcggagacggcgaagagaacggtggtggtaagagggatcgggagagagagaggcataggagcagcagagacaaggatagggagagggatnaggttagagaaggatcgagagataaagagagcgatcgaaaga

SEQ ID NO: 154868 - DNA, 369 bp, Arabidopsis thaliana columbia
cttaaataaaaacctttacttatcttctttcttctcacttctcagacctcaatttccaagcagagatgacggtgaagataaggctcgcgcgtcttggttgtaaacaccgacccttctatcgtgtagttgtcgccgatgaaaaatcgcgcagggacggtaaacaaatcgaggtgttaggcttttatgatccactccaaggcaaagaagatgcggatagagtgagcctcaaattcgacagaatcaagtactggttatctgttggagctcaaccaacagacacagtggaaagcatgcttttcagggcccgtttgataccaccaaagcctatggtagtggtcggttcgaaaaatgggcagaagctacgagcaa

SEQ ID NO: 154869 - DNA, 447 bp, Arabidopsis thaliana columbia
ggcggtggttatggaagtggttctgggtttggcatgatttcagatgtcgaccctatcaataccaaaccaaaagatcgatcacggggttctgttactgctcctcctaagagttctggcatgaaacttggcaagtcgggaaagaaccagttaatggagtcccttaaagcagaaggtgaagacgtcattgaagatgttaagcctactggccaatccaaagcagctgccccacctccaactgatcctttcacattaactgttgaagagaagctcaatgttgcattgagacgagatggtggacttagtagctttgatatgcagggaaccctgtcacttcaaattcttaaccaagaagatggatttgtccaagtccagattgcaaccggtgaaaattccgaaattcttttcaagacccatcccaacatcaaccgagatattgttcaataatga

SEQ ID NO: 154870 - DNA, 423 bp, Arabidopsis thaliana columbia
cgttgaccagagagcaagaaacattgttgccgttggtgcagagggatttctgagacaacgcctatctggacaaggtcttggggtcatcctcgcaggtggctctgttgtacaaaaagttctggaggtaggagaagttttctccattgacgtttcctgtattgctgctctcacaccctctatcgatgtccgaatcaaaaacaatgctccttttagacgagcactattcgggggtgataacgtagtaatggcgactctaacggggcctggcattgtcttcattcaaagcttaccgtttcatcggctctcgcagcgtattgcaaggtcggtaacgtcgccaaacatgagagagaatccaaaattgctgatacagatagctatatttgcgttcctagcatacgctgtgattttgtcatcgttgatctt

SEQ ID NO: 154871 - DNA, 460 bp, Arabidopsis thaliana columbia
  unsure (1)..(460): unsure at all n locations
ccggaacggaangggccgggccgacgccatgcgcggcaaagatgtactgcgacaacaacaccatcttttattttctttcaaattgtcagacccaagattggaagcgtccagttaaagggccacgatgatgatctaccactctcttggtnctgtttcaagaaagaaagatcttgtncttttagcggttcttcgtcttcaccaagaaaaaacccaactatggagagtctctgcaactccggaagaaatttcccaagagatcgtttcttctgattcatcttcttcttctggagcagttgtgtctagtggtggacaagatggtgttgctttgattatacaagtgcttctctttgntgcatttcttgctctcacggttctcaccattggtgttgtgtacattggagtgactgagtttcttgggaagagggagagagagaagtttgagaaagacgaggcagcaaag

SEQ ID NO: 154872 - DNA, 404 bp, Arabidopsis thaliana columbia
  unsure (1)..(404): unsure at all n locations
aagtaatcctaactatacaaaacacataacaatatggctccttcaacaaaagttctctctttactgctcttatatgtcggcgtgtcattagcctccggtgatgagtccatcatcaacgaccatctccaacttccatcggacggcaagtggagaaccgatgaagaagtgaggtccatctacttacaatggtccgcagaacacgggaaaactaacaacaacaacaacggtatcatcaacgaccaagacaaaagattcaatattttcaaagacaacttaagattcatcgatctacacaacgaaaacaacaagaacgctacttacaagcttggtctcaccaaatttaccgatctcactaacgatgagtaccgcaagttgtacctcggngcaagaactgaacccgcccg

SEQ ID NO: 154873 - DNA, 423 bp, Arabidopsis thaliana columbia
ggagaagtaaaaactgggtggtgattgtcttttggcttggctgggacgactttggctggggtcgaacgctctgactgagacgagcgtatcaggatctgcatacagagagtgatgatacctagaccaagcgccgatatcgtgatacctttccatgaagaaaagagttgtgcccagtgtaggaactttattgctccaagagttagtacgcatgcccatgatagaaccaccgcaagggactttatgggacggccaatgttctgttcttgttgaccggggaaagtgtctgcagctatgtgtttgtctaacagagcatccttagccacaaactgatctctgcaccactgtgcaattgcgtcatctgattcaggtaagtctttcatcgagtgacacttgatgtgaacatgcacccttctatgaattgct

SEQ ID NO: 154874 - DNA, 442 bp, Arabidopsis thaliana columbia
  unsure (1)..(442): unsure at all n locations
aaaatcctccgacgatgacaaccatagctgctgctggcctcaacgtcgcgactccacgagtggtcgttcgacctgtggctcgtgtattaggtccggtccggttgaattacccgtggaaattcggttcgatgaagcggatggttgtggttaagtctacatcggaaggagagatatcggagaaggtggagaagagtatacaagaagctaaggagacatgcgctgatgatccggtgagcggggagtgtgtagcggcttgggacgaggtggaggagctgagtgcggcggcgagtcatgctagggacaagaagaaagctggtggctccgatcctttggaagagtattgcaatgataatcctgagactgatgagtgtcgtacttatgataattaaaaaatatgtttttgatgttcgaattatgaaactntaagtatggatcaatgttt

SEQ ID NO: 154875 - DNA, 431 bp, Arabidopsis thaliana columbia
gggagagaaagccagagcgagcgatagagcaaagacatggagagagaggaggagaagacgaaagagggctcatcgtataggtactgggtgagagaagccacctcagacgcagctcctcctcctctgccccaaaagctcagcaacaacgacgtctctctcaatactgctcctgcgtcccttggctctctctggaatcgggctggcacttgggaggagaagagtctcaccaaatgggctactgaccgattaaaggagctgttgggatcagtgggttcattgcagttctcttctggaaaagctgagattatagatgttaacagatgtgttggagatgctttcttagtcacagttcggaacaagaaaagagttggctatacttacgagctttcccttaaagttgagggagagtggtcatttgaagagaatatgaa

SEQ ID NO: 154876 - DNA, 376 bp, Arabidopsis thaliana columbia
cgacgctgctcctctttatcggagctctcatcttctccggcgccggtactgtcagaggcgatgcctccgaccaccgtgacaaggacggtgactccgttcctctctacgccaacaaggtcggcccctttcacaatcccagtgagacgtatcgctatttcgatctccccttttgtattccagagggtgtgaaagataagaaggaagctcttggtgaggttttgaatggggataggcttgttagtgctccatacaagcttaactttagagatgagaaagactcagaggtgtactgtaaaaagaagcttagtagagaagaagttgaacactttcgaagagctgttgaaaaagaatattactttcagatggattatgatga

SEQ ID NO: 154877 - DNA, 411 bp, Arabidopsis thaliana columbia
accagattgtagagatatgattgaaaatgcatttattctcattggagaaattggagggagtgattacaacttcccatggtgggatcgcaagaacattgaggaagtcaaagagctggttccccttgtgatcactactatttcttcggcgatctcggacttggttgatatgggagcaagaacattcctagttcctggaaattttccacttgcatgctctgtagcctatttgacgttatacgaaacaccaaacaaagaagaatacaatcctctaacaggatgtttgacatggctgaacgacttttcagtataccacaacgagcagcttcaagcagaactcaaaagacttaggaatctttaccctcatgtcaacatcatatatggtgactactacaatactctgttgcgccttat

SEQ ID NO: 154878 - DNA, 198 bp, Arabidopsis thaliana columbia
  unsure (1)..(198): unsure at all n locations
accggaacggaataccgggccgcgcacccgtcttaaagggagcaatttgtctcttaagtgcaggaagcagtgattttgttcaaaactactatgtgaatcctctgctttacagagtgtacactgttgatgcatacggatctttccttatcgataacttctctacatttatcaagcaagtgtatgcggntggagcaagga

SEQ ID NO: 154879 - DNA, 400 bp, Arabidopsis thaliana columbia
  unsure (1)..(400): unsure at all n locations
gagaaagcggcgcanagcgtggcggtgaccgtggtgacttcgggcgtggattcagcggtggacgtggaggtggccgtggccgtgatcgtggtccaagaggccgtggaagacgtggaggccgtgcctcggaagaaacgaaatgggttccagtgaccaaactaggtcgtctagtggctgacaataaaataacgaagctagagcagatctatcttcattctctcccagtaaaggagtaccaaatcatagatcatcttgttggtcctacgttgaaagacgaggttatgaagatcatgcctgttcagaaacaaaccagagctggtcaaaggactagattcaaggcctttgttgttgttggtgatggaaatggtcatgttggtttgggtgtcaagtgttctaagga

SEQ ID NO: 154880 - DNA, 378 bp, Arabidopsis thaliana columbia
caacaatggccgtctcatcattccagtgccctaccatcttctcctcctcctcaatctccgggtttcaatgccgttctgacccggagctcgtcggttctcccgtcggtggatcatctcgccgtcgtgtccatgcctccgccgggatttcttcctcattcaccggggacgctggattatcctccaggatcttaagatttcctcctaatttcgtccgtcagctgagcattaaagcccgtagaaactgtagcaacatcggtgttgcacagatcgtggcggctaagtggtccaacaacccatcctccgcgttaccttcggcggcggcggctgctgctacctcgtctgcatctgcggtttcttccgccgcatctgcagccgcag

SEQ ID NO: 154881 - DNA, 403 bp, Arabidopsis thaliana columbia
  unsure (1)..(403): unsure at all n locations
gtcaacatgagagctcttgatgggcttatggttctggtttatgtcggaaccggttgtctgttgcgaagaatcgcgctttatggattcaatccgcctcgaagcaaggacttttccccaagttgctggagttgttgtttccctcgtagcaagaagaagaatattcctgaagaaaaccgagctctgcgtatgagtgattatgatgacgaagagatgaatctctctctagtcccgaagaagttcggtaactcaacattcctcattgattcaattcccgttgctgagttccaaggccggcctctcgcggaccaccctgcggttaaaaacgggcgtgcaccgggtgcactcaccattcctcgagaacttcttgatgcatcgactgtagcagaagccattgctgntatct

SEQ ID NO: 154882 - DNA, 406 bp, Arabidopsis thaliana columbia
acgcgtctgctaagggagcaatttgcatttatatgtcatttctcgatctctccgtccaactatgtgtggcttcacaagcaaattcggcggtgagttgatcgccaacgctgcctacatcggcacacctggaaaaggtattttggctgctgatgagtccactggtaccattggaaagcgtcttgcgagcatcaacgtcgagaacgttgagaccaacagacgtaacctccgtgagcttctcttcaccgcccctggtgctcttccatgcctcagtggtgtcatccttttcgaagagactctgtaccaaaagagttccgatggtaagcttttcgttgatatcttgaacgaaggaggagttcttcccggtatcaaggttgacacgggtaccgttgagctagctggaaccgac

SEQ ID NO: 154883 - DNA, 413 bp, Arabidopsis thaliana columbia
  unsure (1)..(413): unsure at all n locations
cttcttcatcgatttctctcttccaaatcttccaaaagatgtcgaaccctanagtttggtgggacatgagtctcagggggacgtgccatcggacggatcgagatggagcttttcgctgatacaaccccaaacacggcggagaatttccgtgctctctgtaccggcgagaaaggaatgggaaagctaggtaagccacttcacttcaaaggatcgatcttccaccgtgtgattcccggattcatgtgtcaaggaggtgatttcaccgccaagaacggaaccggtggtgaatcgatctacggtgctaagttcaaggacgagaactttatcaagaagcatacaggagctgggattctctcaatggcttactctgggcctaacactaacggatctcagttcttcatctgtaccgataa

SEQ ID NO: 154884 - DNA, 383 bp, Arabidopsis thaliana columbia
gaaactttactctctactttccgttttcttggtcatcctcttggcaacaagcgacagtgatgcctttaccagaaacagggtggcaaaggatttcctctttggagccgccacttctgcttatcagtgggaaggagctgttgctgaagatggaagaactcctagcgtctgggatactttctcacacacttacaatagaggtaatttaggtaatggagatataacatccgatgggtatcacaaatacaaggaagatgttaagctgatggcagaaatgggcttagaatcattcagattctctatctcctggtcaagacttatacctaatggaaggggactcattaacccaaaaggtctactgttttacaagaacctcatcaaagaac

SEQ ID NO: 154885 - DNA, 372 bp, Arabidopsis thaliana columbia
gttcccgccgcgagcggggttccttattattttccaccgatgggacaaccggcggttcctggagggatgatgattggaagaccggcgatggatcctagcggtgtttatgctcagcctccttctcaggcatggcaaagcgtttggcagaattcagctggtggtggtgatgatgtgtcttatggaagtggaggaagtagcggccatggtaatctcgatagccaaggttgagctatggaaccagaagcttagagatttaatcatcatttcgaccctgcaagtgtctgattcttatatgtctatgattcgaatgacttactcgagagagagagagagatcaaacaaaacaaaacaaaaaagctctttttcattttt

SEQ ID NO: 154886 - DNA, 451 bp, Arabidopsis thaliana columbia
gctattgcacaggttctgctggaatttaagctgcagaggcgtccattgatctgatgaagggggatattgctcgcaagggggcttctaaagagagtccgaagaaggttgaagagaagaaaatggcgacatggggaactgatattcctgaagatttggaattgaacgaggaggcacttgcaaatgctcttaaaaaggaggatctaagtaggagggaagaaaaagatgagaggaaacgcaaatacaatgtcaattacaccaacgatgtgacctccgaggagatggaagcttacagaatgaagagagttcaccacgaggacccaatgagaaatttccccggctgataaatgtcttttccctttcaccatattaagctgaaaaaaccttgtttttaagtttcatgtctttaaataagacccttgttattcatgtcattatttggtaactgcttaaa

SEQ ID NO: 154887 - DNA, 438 bp, Arabidopsis thaliana columbia
tgctttgagattctccgattgcatctcaaaaaatctcagctatggctacctcctccgctgggaagctcgatgaccacggcaggctccccaagggtaagaccatcgccgtaatcgtcttagatggttggggtgaatctgcccctgatcagtacaactgtatccacaacgctccaactccagccatggattctcttaaacatggagctcctgatacttggactttgatcaaagctcacggtactgctgtaggacttcctagtgaagatgatatgggaaacagtgaggttggtcataatgctcttggtgctggtcgtatctttgctcaaggtgctaagctttgtgaccaagctcttgcttctggcaaaatctttgaaggtgaaggttttaaatacgtttctgaatctttcgagacgaatactttgcatcttgttggacttc

SEQ ID NO: 154888 - DNA, 423 bp, Arabidopsis thaliana columbia
acggcggcggagcatttaaagatcaccattggtttacaagccggcgaggtgtttacccgcgagcgcccgcaattggtgttgatggacgcccttatgccggtgatggacggttttgaagcggcgcggcggatcaaacagttggcgggtgaggcgctggtgccgatcatcttactcacctcgctgcgcgaaagcgaagccctggcccaatgcctggatgccggtggcgatgatttcctgcccaaaccctacaacccgctgatcctggccgccaagatcaatgccatggaccgtctgcggcgcctgcaggccacggtgctgcgccagcgcgaccagatcgcccggcaccacgattacctgttgcatgagcaacgcgcggccaaagcggtgttcgacaaggtagcgcattcgggttgcatcaatgcg

SEQ ID NO: 154889 - DNA, 279 bp, Arabidopsis thaliana columbia
taacaaaagcccaaaatcaatttcacaagggcccaaaatggtaatacagagggaaaaaaaaacacaaagatgatcatggttcatgcatggatcataagcatttgaattggttatataaaccagaaatgaaaagagggagagagaaaaaaaagactcaagaatcagaatgaaactctgatcttattgttttgttagtaaataagatttaatcaggcgacatagtagatggagttagggagcttgaaggttctcttgggaactggacaaccagagaagctg

SEQ ID NO: 154890 - DNA, 427 bp, Arabidopsis thaliana columbia
gtggcggcgcattcagagattcaaactcagataaaatggtggcgacaggcttattcgtggggctaaacaaaggacacgttgttaccaaacgcgagcaacctcctcgccctaacaacagaaaagggaaaacaagcaaaaggactatttttatcaggaatctcatcaaggaagttgcgggtcaagctccctatgagaagaggatcactgagcttttgaaggttggtaaagacaagagagctcttaaagttgccaagcgaaagttgggaactcacaagagagctaaacgaaagagagaggagatgtccagtgttctccgcaagatgaggtctggtggtgctggtgcatccgagaagaagaagtgatgcgctgactctggttcaacgctctgtttcttctaaaccaagtttctgttttttgaattttttgc

SEQ ID NO: 154891 - DNA, 421 bp, Arabidopsis thaliana columbia
gatcattcgaaatcaactcgaagatcttcaattccatcaaactcaaggagtttcgtgtctgtgatttcttcgattgaggtagggagtaaatggcgacagatgatttttttagcttgcagagagaatattggcgacaagtggcggaatccgatggtttcgatattgagagtgttcaaataccaccatctatgtatggaaggatcaatggactgattccccacaactgtgaaatcaatacgccgcttccttaccgtgtcttgggcaagcactatgctaagcttgggcttcatcgttacaatatgttgaaggggactaaattcgagttcggtcgcctaatgaaattcaacatgttacaaaactgtgtggcctctttctacataactttggaagcatacgattacggtgttcctggcacataaca

SEQ ID NO: 154892 - DNA, 398 bp, Arabidopsis thaliana columbia
ggcttgactttagtgtcactgatgaaaacttaaagcaacctttctctgaattcggggaaatagtgggtgtcaagattcctggtgggaaaggatgcggatttgttcagtttgttaacagaccaaatgcagaggaggctttggaaaaactcaatgggactgtaattggcaaacaaacagtccggctttcttggggccgtaatccagccaataagcagcctagagataagtatggaaaccaatgggttgatccgtactatggaggacagttttacaatgggtatggatacatggtacctcaacctgacccgagaatgtattctgctgcaccttactatccaatgtacggtggtcatcagcaacaaagtagctgaggaaactaaaagcttaatctgagcatc

SEQ ID NO: 154893 - DNA, 431 bp, Arabidopsis thaliana columbia
atctactctctttaaaagaaattcgtaagttctatcaagaagcagaagatggcccaaaggggggaagcacaaggagggaggggggccaacctatgggacgatggatcgacacatgacgccgtgaccaagattcagctcgcagcaggcatagacggaattcaatatgttcagtttgattatgtcaagaacggacaacccgaacaagctcctcttcgtggtaccaaaggccgtgttctcccagctgatccgtttgtgattaaccatccagacgaacatctagtttctgtagaaggttggtatagccctgaaggtatcattcaaggaattaagttcatctccaacaagaagacttctgatgtcattggatccgatgagggtactcacttcactctacaagttaaagacaagaagatcattggctttcatgggtc

SEQ ID NO: 154894 - DNA, 390 bp, Arabidopsis thaliana columbia
tcacgacttcaagatgccgtcgcacaagtcgtttatgattaagaagaagttgggaaagaagatgagacagaacaggcctattgctgactggattcgtcttcgtaccgacaacaccatcacgtacaatgccaagcgcaggcactggcgtagaaccaagctcggattctaagtgataagccttctaaaagagtcttctttatctgtttggtttagcatttcctcaagtcttctttttgttttaagttatgacattttcatatttctgtaagacttttactctattatgattcatgttaccaaattttcttcgtattgggagttgattcttaacatttgcgtgatttgactattgaagtatctcttggtttgcttccatgtaaagttgtttct

SEQ ID NO: 154895 - DNA, 425 bp, Arabidopsis thaliana columbia
aaaagatccacctcgaacctctctcctccgtcttccttcgcagccgccgtcactatcaccgcagctggaatgagagaagatgggccagggtggttccttagatgggaagaagagcttccatctccagaagaactcatccctatctctcaaaccttaatcactcctcatctagctctcgctttccaaatcggaagtcctaatcatcatctcggatcaaagagaaccaccgcgatttatcaccagaagcttcaatcctgcaccactccaacaactccaactccaactcctccaccgatgatgatgaattctgatttcggcggtggcgattccacggatcttggttcaggatcaataggaggagagccagcaagaacgttgaaacggccgcgtctagtgtggacgcctcagctacacaaacgtttcgt

SEQ ID NO: 154896 - DNA, 421 bp, Arabidopsis thaliana columbia
  unsure (1)..(421): unsure at all n locations
aacaaaggcgacagatgtctagtttttggaaatagtagtctcaggactggcgggactttaggttctaggtgggggacacaagcccaagattcttataagaagacgagtatgcaatccgtatccagaggcggatctcggtgatccgcaatnctattgccaggaatgggagcttcatatgatagtctcacgtccgaggacatcgatgacttgccgtggatcatcaaatgaagacgaagttttgagctgcacctcccaaactagcagctacgtacctagaaaagctctattcacaactggaaggacgaacaactgacaagttcttgacctaatgctcgttcaagatgcagccactgcgtttcgaagaagcaaatcttgcggcgaaagacgtgcttgcacaccatcgctcgatttcgacatgcta

SEQ ID NO: 154897 - DNA, 382 bp, Arabidopsis thaliana columbia
gctgtggtggcgcctccagagtctgttaaattagcttaatcctcctctcgcgatctgtctgggcatccaaaaatgtctgtgggtgcgaacgaggagtttcagcatattctgcgtgtgctcaatactaatgtcgatgggaagcaaaaaattatgtttgctttgacctcaatcaagggtattggaaggcgattggctaacattgtgtgcaagaaggctgatgttgacatgaacaagagggctggagaactaagtgctgctgagattgataacctcatgacaatcgttgctaaccctcgccagttcaagatcccagactggcttcttaacagacataaggattacaaggatgggaaatactcccaagttgtttccaatgctcttg

SEQ ID NO: 154898 - DNA, 413 bp, Arabidopsis thaliana columbia
gaacaaggctcaagtgatggtggaaacaaatttgatgggttgaatttatatgttaagaacggggatgataccgtgaggggtgggaagttgcgcgagttgtttgccgaatttggtacaatcacctcttgcaaggttatgcgggaccctagtggtactagcaaaggatcaggatttgttgccttctctgctgccagtgaagcttcaagagtgctgaatgaaatgaatggtaaaatggttggtggcaaaccgttgtatgttgctcttgcacagaggaaagaagaaaggagggctaagctgcaggcacagttttctcaaatgagacctgcttttatccccggtgtgggtcctcgaatgccaatatttacaggtggtgctccaagtcttggacaacagattttttacggtcaaggacc

SEQ ID NO: 154899 - DNA, 399 bp, Arabidopsis thaliana columbia
  unsure (1)..(399): unsure at all n locations
ggatcaagaaacaatgcaaatgcaatgcggaaccctaacttttgcagttgcttcnattccttgtaacccaaagctaccattcccatcttccctcactttacggtcatggaatccttcattcccgagtttcaagagctccgctgtttccggaccaaagtcatcactgaagctgaacaggtttttaagaaactgtgcaagtacgaatcacgagcttgttgttgatggagaaaccggaaatgggtcgatttcggagctccaaggagatacaccaaatggttcgatttcgacggccgaagtggaagcagaagtagaataagtgaaggtagatgatttggcgactcaaaacatttggggacagatgaaagagatcctcatgtttaccggacctgccgcgggatt

SEQ ID NO: 154900 - DNA, 450 bp, Arabidopsis thaliana columbia
  unsure (1)..(450): unsure at all n locations
gaaagactatgttggctaaggctgttgccaatcacacaactgctgccttcattagggttgggggatccgagtttgtgcaaaggtatctcggcaagggacctcgtatggttcgtgatgtcttccgtcttgccaaggaaaatgctccagctatcatcttcattgatgaggtagatgccatcgctactgctaggtttgatgctcaaacaggagccgatagggaagttcagcgtattctcatggagcttcttaatcagatggatggatttgaccagaccgtgaatgtcaaggtcataatggcaacaaacagggcagacactctagatcctgctctcttacgtcctggaagacttgatcgtaagattgagttcccccttcctgatagacgtcaaaagaggcttgttttccaggtatgcacctncaaaatgaaccttagcgatgaggttgacttgg

SEQ ID NO: 154901 - DNA, 440 bp, Arabidopsis thaliana columbia
gctttgttagatttggtaatggggattcgatgaagaacagtcaaattcagccgcttgatggagattctgcgttttctccttcgactcgtaaatgcaggtcaaggaagttgagagacaggccaagtccacttggtccacttgggaagcctcatagtttaactacgacgaatgaggagtcaatgtcaaaggcacaaagtgctactgaattgttgtctctaggaagtagacctcccgtggaagttgtgtctgtggaggaaggagaagaagttgaacaaatagcaggaggaagtccaagtgttcagagccggtgtcctctcactgctccgcttggtgtttctatgagtcttaggaatggagctactagaaagtctgtttccaatgtgtctatgtgtagcagaagtttcaaccgcgagacttgtagaacaacggtgagctacctg

SEQ ID NO: 154902 - DNA, 210 bp, Arabidopsis thaliana columbia
gccaaagacacttctggtgactatgatgacatgcttgttgctcttctcggacatggcgatgcttgaaactgtttcagggttggagttcctcctttctcttactgcatggtttgttttaaataaaagagttgtgaaactggttctgcaactatttatcaatgatcgtttgagtttgttaaatttgaatcaaaatctgtttttctttctttt

SEQ ID NO: 154903 - DNA, 433 bp, Arabidopsis thaliana columbia
  unsure (1)..(433): unsure at all n locations
gcctctcgttgctagaggaatcaaacaatggtgtttgtgaagtccaccaagtcgaatgctgactgcaagaggtaccaagtggggttganganaagaagagatggaaagactgactacagggcaaggatccgtcttatcaaccaagacaagaacaagtacaatactcctaagtatcgttttgttgtccggtttaccaacaaagacatagtggcacagattgtatctgcaagcattgctggtgacattgttaaagcttctgcttacgcacatgaactgcctcagtatggtctcactgttggtcttacaaactatgctgcagcttactgtactggccttcttttggctcgccgtgttttaaagatgttggaaatggatgacgagtatgagggaaacgttgaggccactggagaagacttttccgttgagccaactg

SEQ ID NO: 154904 - DNA, 442 bp, Arabidopsis thaliana columbia
ttttctctctcccctgaagctcccctcactcactcttctccgaggaagaacaacagagacgggggcggttcccaaagccattgttctacctatcttgctactcatctgtggtgctgctctcggagctcctgcttctgaaggttatcttcgtaatggaaacttcgaagagtcaccaaagaaaaccgacatgaagaaaacagttctactaggcaaaaacgccttgcccgaatgggaaaccaccggtttcgtcgagtacatcgccggcggtcctcagccaggaggcatgtacttcccagtggctcatggagtccacgccgtgaggctcggaaacgaagctacaatctctcagaagttagaagtgaagccaggttctctctacgcactcacgtttggtgcgtcgagaacttgtgcacaagacgaagttcttagagtctctgtacct

SEQ ID NO: 154905 - DNA, 424 bp, Arabidopsis thaliana columbia
  unsure (1)..(424): unsure at all n locations
catggaacagggaccatcgggaggatggaatcggtaaggagatcggaaacctgatggtggggataagaaagagaagaagtttgagccggcggcaccaccggctcgtgtagggaggaagcaaaggaagcagaaagggccagaggcggcggcgagacttccgacggtgactccgtctactaagtgtaagctccggttactgaaattggaacggatcaaggattatttgttgatggaggaagagtttgtggcgaatcaagagaggttgaaacctcangaagagaaagctgaggaagatagatctaaggttgatgatcttcgtggtacacctatgagtgttgggaatttggaagagttgattgatgagaatcacgctattgtttcttcttctgttggacctgagtactacgttgggattttgtccttc

SEQ ID NO: 154906 - DNA, 418 bp, Arabidopsis thaliana columbia
cccacgcgtccgaaagctgttgaatgggcttttttcggttgcttctggacaaatggtcagggctgcaatgcaacttcccggcgtggtgttcacgaaagcatcgcatctgagttcatagagaagcttgtaaaatggagcaagaacattaaaatttcagaccccatggaagaaggatgcaggcttggtcctgtagttagcaaaggacagtacgagaagatattgaagtttatctcaacggccaagagtgaaggagcaacgatcttgcatggtggttcccgacctgagcatctggaaaagggcttcttcattgaaccaaccatcataactgatgtaaccacttcaatgcaaatatggagagaagaagttttcgggcctgttctttgcgtgaaaacatttgccagtgaggacgaggcaattg

SEQ ID NO: 154907 - DNA, 449 bp, Arabidopsis thaliana columbia
ggaaaaaaaaaaaatagaaagagaaaacgcttagtatctccggcgacttgaacccaaacctgaggatcaaattagggcacaaagccctctcggagagaagccatgggaagaaaaaaactagaaatcaagcgaattgagaacaaaagtagccgacaagtcaccttctccaaacgtcgcaacggtctcatcgagaaagctcgtcagctttctgttctctgtgacgcatccgtcgctcttctcgtcgtctccgcctccggcaagctctacagcttctcctccggcgataacctggtcaagatccttgatcgatatgggaaacagcatgctgatgatcttaaagccttggatcatcagtcaaaagctctgaactatggttcacactatgagctacttgaacttgtggatagcaagcttgtgggatcaaatgtcaaaaatgtgagtatcgatgc

SEQ ID NO: 154908 - DNA, 451 bp, Arabidopsis thaliana columbia
aatgacgacaatggcgacacaaggcgcttgtctacgaatgacctcatcagccaagggcgtgaccaagtcaaccgtggggtcgaaggagcttggattcctcacctcccagctcagcggcttaagaatctcatatactcccagtgacgtcatcaaccgtatctcccttccttcgttccccgggattcagccaatcgtcgcacgtagaatctgcccttttactgggaagaaagcaaacagagcaaacaaagtttcattctctaaccacaagaccaagaagttgcaattcgtcaacttacaatacaagagagtttggtgggaagctggcaaacgttttgtcaaacttcgtttatcaactaaggctttgaagaccattgagaagaacggactcgacgctgttgccaagaaagccggcattgatcttcgcaagaaatagatatgatgatcgcaaagt

SEQ ID NO: 154909 - DNA, 481 bp, Arabidopsis thaliana columbia
  unsure (1)..(481): unsure at all n locations
ccgggtgcgagcccacgacgtcacgnnatgagccccatgggttgacgtattttgtcccaacactctaagttctacccagggcgaaccagagatggaggtgcgagaacagtgattgggttgtcctggggagnagtgcccttgaagttggtggtcatnggaccaacgaacttagggagtctaatgcaacgctttggaaggcaagtacgtcgagcctgtccccggaggtgatcccatcagaaacccaaaggtcttaccaaccggtaaaaacatccatgccttagatcctcaggctattcccacaacagcagcaatggcaagtgccaagattgtggttgagaggttggtagagagacagaagctcgaaaacgaaaggaaatatcccgagacaatcgcgcttgttctttggggaactgacaacatcaaaacatatggtgagtctcttggcaggttctttggatgattggtgtgagaccaattgctg

SEQ ID NO: 154910 - DNA, 453 bp, Arabidopsis thaliana columbia
  unsure (1)..(453): unsure at all n locations
gtaaataaaaaagagatggttttgatcaaatagagagagatggagattccagttattgatgttgcagagttggatggagggaggggaaccaagaccatgtcacttcttgatcatgcatgtgataagtggggattcttcatggttgataatcatggaattgataaagagttgatggagaaagtgaagaagatgattaactctcactatgaggagcatttgaaagagaagttttaccagtcagagatggtcaaggctttgagtgaaggcaaaacctcagatgcagattgngaaagcagtttcttcatctcacataaaccaacttcaaatatctgtcagatcccaaacatttcagaggaactcagcaagacgatggatgaatatgtttgtcaactgcacaagtttgcagagagactcttcaagctcatgtgtgagaatcttggtcttgatcaggaa

SEQ ID NO: 154911 - DNA, 445 bp, Arabidopsis thaliana columbia
aatccgctttgttgcagaggatcacaatctatatggcgattccaatgtccatggcagtggcgactcctacagattgcgtgaggagagtctggagtatgtcttctctcaaatcagctcttccctccaccgcatcactccgattaccttcctcgtcttctcgccgtccggttactcttcgtctcccaatctcttctccttcactcccatctttctccggtctctctccggtcaatcctctcctctcaatcggacttccagattggcaaagctttgagaatggattcaaaattgttgacggtggtggtcgtatctacgcgatgagacacggacgacgtgttccgaagctgaacagaccaccggaccagcgcaaagctcttctgcgaggactcacgactcagcttcttaagcatgggagaatcaagacgactcgagctagagctagtgc

SEQ ID NO: 154912 - DNA, 441 bp, Arabidopsis thaliana columbia
ctcggggatctgaaaaatgtcaatccttcaagtctctacttcgtctctttcttcttcgacggttctctccatatctccgaggggatctctctcatctaccaagtcatgccggatagttcgatgttccgtcgagggaactactgtaaccgagagaaaagtctcggcaaccagcgagccacttcttctgagagctgttaaaggtgaagttgttgatagacctccggtttggcttatgaggcaagctgggaggtacatgaagagttatcaaactctctgtgagaagtatccttctttcagagatagatcagagaatgcagatcttgtggtggaaatttctttgcagccatggaaggtgtttaagccagatggggtgattctgttctcagacattctcactccattgtctggaatgaacatacctttcgacattgttaaaggaaa

SEQ ID NO: 154913 - DNA, 259 bp, Arabidopsis thaliana columbia
  unsure (1)..(259): unsure at all n locations
gacccgcgcgtccgcggnggaaaagtgaaacattggatcacttttatttttccatgggttttctcgcacacttgctttgacataaacaaaaaggcgcctgggtcattactcttcttacgtcaatgctaaatgccaagacggacgatcaggatacgaggcttaccttgtcactcacaatcttcttatctctcacgcacaagcagttgaagcttaccggaaatgcgaaaagtgtaaaggtgggaagatcgtaattgcacat

SEQ ID NO: 154914 - DNA, 429 bp, Arabidopsis thaliana columbia
aaactttatcaaaaaaaaaaaaaaagctcccatacccgactcccgaggaaacctaagcttcgtcttgctatggccttcgtgggcgccggcaaggaccctcccttgccagaaccccctgacccgcctgatcctccctccatcttcgcccaaaccttcatacccgatccaccttctacttcttctctctttccaccttcatcgagtctagatctagatctatgttctaccgtttcttcctatggtgttactcctttcgtttttttgcgattctttactgctgtgtgcagtcccttctatcagatccgtacccgttccgtgtctttgcgggtctttactgctctatgcagtccatggaaactagcctattcccagatcttgggatatcctctcgtttcaagtggatattgtttacaagccataacctttgat

SEQ ID NO: 154915 - DNA, 437 bp, Arabidopsis thaliana columbia
gctattttccagagaatgaaaaactatactttttttgcagtctcaatcaccatccgaatggggtggggtttcatgctgatggcttggatatgggaatttgacttctcagccttcatggttctgatcattgccattcttaacgacggtaccatcatgacaatctcaaaggacagagttaagccatctcccacacctgatagctggaaacttaaagaaatttttgctactggagtcgttctaggaggctaccaggccatcatgactgttattttcttctgggcggcgcacaagactgactttttctcggacacattcggtgtgaggtccattagggacaataaccacgagctaatgggtgcggtgtacttacaagttagtatcattagtcaagctctgatcttcgtcacaagatcaaagagttggtcttttgttgaacg

SEQ ID NO: 154916 - DNA, 440 bp, Arabidopsis thaliana columbia
cgtccaaggtccactccgtgcgcggaaaggttgccaggggagtgattacgatggcgaaaaggagtgttggagatctgaattgtgtgggatttgaaggggaagaaggtgtttgttagagctgatctcaatgtacctctcgatgacaaccagaatatcactgacgacactagaatcagagccgccattcccaccatcaagtttttgattgagaatggtgctaaggtcatcctctccactcatttgggaaggccaaagggtgtcactccaaagttcagcttggctcctcttgttcccagattatcagagctccttggtattgaggtcgtgaaagctgatgattgtattggtccagaagtggaaaccttggtggcttcccttcctgaaagtggagttttgcttcttgagaacgtgaggttttacaaggaggaagagaagaacga

SEQ ID NO: 154917 - DNA, 458 bp, Arabidopsis thaliana columbia
gtggctacaggtttcagaggcaaaagaatgtccggtttgtaaaggggaggtatctgtgaaggcagggactccaatctatgggcgtgggatacagaaaagagaatctgaggaggtttcaaacaccaagatcccttcgagaccccaagcacgacgcacagagagtttgaggactacacttaacaggtcaggtcatataccaacggaaatatttagacatttgcaggataggcttgaaagggaatctagtacaggagaaagacgcgccagaccatctcttaaccggtttatgacttcgaggggagttagagcagaggagaaccagtctagtgaagcactggttgaaccttcatcagatgagattaacgatattgatctgatcttaaataatgcccctgaaaatgaagaggaaaacgaaaacctaagctcgtcacgtgctttggcaacccagagacgatggg

SEQ ID NO: 154918 - DNA, 405 bp, Arabidopsis thaliana columbia
  unsure (1)..(405): unsure at all n locations
ggagaagcaaaaatggtttctctgaagctccagaagcggctcgccgcatcagtgatgaagggcggnaagggcaaagggtgggtcgatcccaacgaaagctccgacatctccatggccaattcccgccaaaacatcaggaagcttgtgaaggatggtttcatcatcaggaagccaaccaagattcactctcgttccagagctcgcaaaatgaagattgccaagatgaagggtcgtcactctggatacggtaagaggaagggtacccgtgaagctaggttgccaacaaaggtactgtggatgcgtaagatgcgtgttcttaggcgtctgttgaagaaatacagagagacgaagaagattgacaagcacatgtaccatgacatgtacatgcgtgttaagggtaatgtg

SEQ ID NO: 154919 - DNA, 400 bp, Arabidopsis thaliana columbia
gcacagcgatcatggttatcatctatatatttctttttctctcctcagccattatagattgaactgggttggcaaaggcccggaagttggatgcaattggtgggaagggaggcaagcagtgggacgatggagctgaccatgacaatgtagcaaaggtttatataagaggtggtcttgaaggcatacaatacatcaaatttgattatgtcaaagatggaaaaactatagatgcatctatccatggtgtttcgggtagcggtttcacacagacgtttgagattgattatcaaaacagtgaatatattgtatctgttgatggctactacgacaaatctggtaccatgcaagcacttgaaattaaaaccaaccttaagacttttgaagtgattggatattcaaa

SEQ ID NO: 154920 - DNA, 428 bp, Arabidopsis thaliana columbia
  unsure (1)..(428): unsure at all n locations
ctagctcgctccacagcgtcacgcattaccaagcgcttaatctccacctccggagcgaccggtccttaccctggttggatcggctcccgtcgatcaaccccggtgttctcccatgccgtcggattcatctcttccttgaatcgtttcacaacgattcgaactcgaatggataggtccggtggatcgtactctcctctaaaatccggttcgaatttcagcgaccgagcacccactgagatggcgccgttgtttcctggctgcgattatgagcattggttgattgtaatggacaaacctggaggcgaaaacgctactaaacaacanatgattgattgttatgttcaaaccctaactaaaattatcggcagtgaggaagaagctaagaaaaagattataatgttatctgtgaaaggatttttgatttggtt

SEQ ID NO: 154921 - DNA, 305 bp, Arabidopsis thaliana columbia
aacaaaaaaaactaatataactctaaaacttttttttataattacaaaatctacttaacatggggctggaactaaaaacaaatgggggcggcctctactacacataacaccgtctcgttgagttctttcaagagacgacaagatcgccttcgatcaattgaagctatttctcatgtgatggaattgcaaaatgaattctatttacaaaatcttctctcatccgataatcggatctcgatcactggattctgttctcttctcttccaaaaaaacacaaggagtacatttccagatttggaaaattt

SEQ ID NO: 154922 - DNA, 442 bp, Arabidopsis thaliana columbia
gactccctgaaggttttttatttggcacggttactgcggcataccaggtcgaaggtgcggtggatgaaacttggcggggacgagccttatgggacatctactgtagaagatatccagagaggtgcaataacgataacggcgatgtggccgttgatttcttccatcgttataaggaagatatccaactaatgaagaatctaaacacagacgcctttagaatgtctatcgcatggccaagaatatttcctcatgggagaaaggagaaaggagtgagtcaagctggtgtgcaattctaccacgacctcatcgacgagctcataaaaaatggtataactccattcgttactgtttttcactgggacactccacaagatttagaagatgaatatggccgctttttaagcgaaaggattgtgaaagatttccgagagtatgcagattt

SEQ ID NO: 154923 - DNA, 451 bp, Arabidopsis thaliana columbia
attcttgcaaaaaggatggttgttcgtatgtagcacattcaaaatgtgccacacagagcagtgtgtgggatggtaaagggcttgagggtgagccagaagaagacatcaatgaaattgagccgtttgtgacgctaagagatggaagcatacgacatttcagtcatgaacatcatcgtttgaaacttgatgagaacacgagtagagattacaacgagaataagttgtgccaagcatgcatcactccgatatattttggtaacgtctactcatgtatgcaatgtgatttcagtcttcacgaagaatgtgcaaaactgtctcgcaaaacacatcacccagtacatccacatctacttactctagtgggaaaatctgacattatggatgctacgaaatcatgttcagtttgtccttggaagtgcacaactggtttcttctatgagtgcagggaaag

SEQ ID NO: 154924 - DNA, 450 bp, Arabidopsis thaliana columbia
aagaaaacgatcatttaaccgcttgggtatacaacatggttaagaactcgggctctggcgatttccggttcatgactgggcattactgtggaaatgcaatcaagaagcttatgttcgggacgagaacgttctctaagaacactgcacctgacggtggacccaccgtagaagatgtagagcacatggaagcaatgtttgaagcattagggtttaccttcgctttttgcatctctgattatctgccgatgctcactggacttgatcttaacggtcacgagaagattatgagagaatcaagtgcgattatggacaagtatcatgacccaatcatcgacgagaggatcaagatgtggagagaaggaaagagaactcaaatcgaagattttcttgatattttcatctctatcaaagacgaacaaggcaacccattgcttaccgtcgatgaaatca

SEQ ID NO: 154925 - DNA, 447 bp, Arabidopsis thaliana columbia
aagagaatttctaaaagcaaatcggaaagcttcgttgatggcgttatcacaactttcttgacgggccaacactttcctaaaggcggcgattaccgccttgccctcctccatccgccgtcatgtttccacagactcatcaccgatcacaatcgaaaccgccgtccctttcacatcgcatctatgtgaatcaccgtcacgctccgtcgagacttcatcggaggagatcttagcctttttccgtgacatggctcggatgaggaggatggagatcgcagcagattctctttacaaggcgaagctgatccgtgggttctgtcatttgtacgatggtcaagaggctttagcggtgggaatggaagcggcgattaccaaaaaagatgcgattatcacatcgtatcgtgatcactgtactttcattggtcgtggtgggaagcttgtgatgctttc

SEQ ID NO: 154926 - DNA, 390 bp, Arabidopsis thaliana columbia
cggacgcgtggccaaaggttgaaggattttttggcgttaaaaaatccccagttcccaaatgggcgtcctcgtttgaaaccctaattcctgaatcgaagcagatcctgatcgaatcgaaggtgttcgaatgatagctacccagtaaattcagaaccctaattaacaatgggcggtacggacgcgaaggacattctcgggttgccgaagactccactgtctttaactcacgagaagacatctcgaccccagaaagagttccatagaaaacccgatggcatttctcgcgaggtttatgcgcttaccgggggcgtcgcacctgttatgccttcaattgatttaaagcgccgtactaatgcagatgagaaagctgcttggaaatggctatccttc

SEQ ID NO: 154927 - DNA, 391 bp, Arabidopsis thaliana columbia
gaagaaaatcacagaaagccttagcacagataagagagattgaagaagtcatggatgtttcaggaggcttgaattgcgttggtgtggcggtagatggaagcgaggtgagtatggaagctctgaggtgggctctagacaacctcaagctctcttcgtcttcttccgattcatcattcgtcgtgctccacgtccagccgtcgccttctgtagccgccggcgtgagtcccggcaccatacctttcggtggtcccagtggtcttgaggttcctgctttcactgctgcaatcgagcaacaccagaagcggatcaccgacaccatcctcgaacacgctagtcaaatttgtgctgaaaaatctgtgaatgtgaaaacacaagtggttattggggatcc

SEQ ID NO: 154928 - DNA, 445 bp, Arabidopsis thaliana columbia
cccaattccaccaccacacagacaaagcacttcgaaaatggcggtttcttctggaacattgggcactttcctctgcatgaaggcgacatctttccgcaacccatcaactcctctgtcctctctccggttcgcctctcacccggcggctaaactacgcttggttcgagcggtaacatctgcgacggaatcttcagagccaaccgcaaccaataagagagtgccacgcggtatcatgaaacctagaccagtttcaccagagatgcaagacatcgtcgaacttcctgaaatcgctcgcacacaagctcttaagcgtatttgggcttacatcaaagaacatgaccttcaagacccacaaaacaagagagaaatactgtgtgatgagaagctgaagaagatattcgaaggaagagatcgggttgggttcctagagattgcaaagctcatc

SEQ ID NO: 154929 - DNA, 412 bp, Arabidopsis thaliana columbia
  unsure (1)..(412): unsure at all n locations
gcggaaggatctcagcagcctcaccttattctagccaacaagctcttcctcctcactcatgcanatgttccagacatggagggagtccanctcaagtctgaggttttggatttcatcagatcccatggtatggctcctttgtacgaaaccctaattgcctcttcggtgctggatttggatcaaagcttgttagagtctatgcgggccgctaatgaagaggagcttaagaagctcgacgagaagattgcagatgcagaagaaaatttgggtgaaagtgaagttcgtgaagctcatcttgctaaagctctgtatttcatcaggaatagtgataaggagaaagctttggagcagcttaaactcacctgaaggaaaactgttgttgttggacaaaaaatggacctggggttttata

SEQ ID NO: 154930 - DNA, 451 bp, Arabidopsis thaliana columbia
ttttcaattaatgacatcttcttcttctcctttcactgcaaaaccgaaagcttgagactgtgagattatgtctatggcatcggcttcttcttccatcgatcacttcatcacctttcgtcatcttgatcttattctccactgtataaaatcagcgagattttaagggattgtgaaggtaccatcttaaacacaaaatgggtacttctactacagagagtgtggtggcgtgtgaattttgcggcgagagaacggcggttctgttttgtagagccgatacggcgaagctttgtttgccttgtgaccagcacgtgcactcggcgaaccttctctcgaggaagcatgttcgttctcagatctgtgataactgtagcaaagagccggtgtccgtacgttgcttcacagataatctcgtattgtgtcaagagtgtgattgggatgttcacggaagctg

SEQ ID NO: 154931 - DNA, 452 bp, Arabidopsis thaliana columbia
cttcttcggagaaggctttgtgtctgtatcatctgattatagcgcagagagattaggtgaggtgaaggagaaacatggggagaatctttggagcgaagaataacaaagagcctcctccgtctattcaagatgcctctgatcggatcaataaaagaggagattcagtggaagagaaagttaagaggcttgatgctgagctctgcaaatacaaagatcagatcaaaaggactagacctggtcctgctctagaagctatcaaagctcgtgctatgagagttctcaagcaaaagaagatgtatgaaggacaacgtgacatgctctataatcagacttttaaccttgatcaagtttcatttgctgctgaaggccttaaagatgctcaacaaactatgacagcgctaaaatctgctaacaaggagctgaaaggaatgatgaaaaccgtcaagattcaa

SEQ ID NO: 154932 - DNA, 448 bp, Arabidopsis thaliana columbia
agtctctcgattcccgccgcttcttggttttccggcggaaccattcctccgacgaaggtgagagtttctccgccgcatcatctccggcgacctcccaacaggaattcccatcgcttggccgccattaatgccgcttctcgctctgtgagtgagctagtggaggaggatgtgttgcaaatgttcatgaaagacagagaagaaaatggagatttcatatctaaagtttctgataggctctggttaaaggagattctcgaatctattgatgttaattccaatggagcttcttcttcagctgttgaactagatgatactcgggaaagcttgatagatggcgctgatgatgatgaaagtggtttcttgaaacttaaaccgacacaagaatggattggttgggagagtgattctgcccccatgaataagaaagctctagctaaagcactacgag

SEQ ID NO: 154933 - DNA, 433 bp, Arabidopsis thaliana columbia
gttgtctaaagcgaaccaacaaaatgtcttcatctttaatcattcaatggcttcttcggctggtatgcagatggttcacactggccgctccattgcccagattgggttcggcgttaagtcgcaattagtttctgcaaatcgaacaactcaatcagtttgctttggagctcgttcctctggaattgcattatcttcgagattgcactatgcatcacccattaagcaattttctggggtttatgcgaccaccaagcatcagagaaccgcttgtgttaaatccatggctgctgaggaagaagaagtaatggaacctcaagctaaagtgacaaacaaggtttactttgatgtggaaattggaggtgaagttgctggcagaattgtgatgggtctctatggagacgttgtgcctaaaaccgttgaaaacttccgtgcc

SEQ ID NO: 154934 - DNA, 454 bp, Arabidopsis thaliana columbia
  unsure (1)..(454): unsure at all n locations
ggaagaagaagaagcggtagagagaaaaccgatgctcacagcgtttgcaagtcacgcgcgtgctgacgttttcgcgtttgttgccgtcccaacaatcacgcgccgcctccgtataaatatcttacgccaatcacctctctcctcttctcttctcctaaacgaaaccttctccaatcgacccaattctgtttctcgtcgntgttattgttcgagctctgcgataatgggttcttcttcggtgtttggcgagcaattacagtatcctgcgactcggcgtgatgattccgtcgtcgatgactatcacggcgtcaagatcggagatccgtaccgttggttagaggatcctgatgctgaagaagtgaaagagtttgtgcagagccaagtgaaattgacagattctgtacttgaaaagtgtgaaacaaaggagaagctccgtcagaatataacgaaactt

SEQ ID NO: 154935 - DNA, 418 bp, Arabidopsis thaliana columbia
  unsure (1)..(418): unsure at all n locations
acgtttctctttcataatctccaatcttcttcggattcgacgaatccgtcatcgccgacggaggcgtggccgtgtaatattaacggatggggaanaagagaaaatcaacagccacaagcctcgatgaggtagatcggactgtttacgcttcttttcgcaccgccgctaactctttatctcagctttatactcagtctatgaatcatcagaagttatcttttcaagccggtgaacgccatggtttggaaaaactgtaccaatggatatggagacaacaagaaggagggtcaagagtgacacctatggatattgtcaattatattcagaacgagctcgaatgctgcatagacgagcctccaatatccccaagagcgccaccaccgcaaccaacaatgcatgtcacgaatcccgggctcat

SEQ ID NO: 154936 - DNA, 458 bp, Arabidopsis thaliana columbia
aacccgggccgaccacgcgtccggcttttcgttgaaagaggctccgctggggtccacatcgaggaccagtcctccgtcaccaagaagtgtggccacatggccggaaaggtcctcgtggcagtcagcgaacacatcaaccgccttgtcgcggctcggctccagttcgacgtgatgggtacagagaccgtccttgttgctagaacagatgcggtcgcagctactctgatccagtcgaacattgacgcgagggaccaccagttcatcctcggtgccactaacccgagccttagaggcaagagtttgtcctcgcttctggctgagggaatgactgtaggcaagaatggtccggcgttgcaatccattgaagatcagtggcttggctcggccggtcttatgactttctcggaagctgtcgggcatgccatcaagcgcatgaacctcaacgagaacgagatgaa

SEQ ID NO: 154937 - DNA, 438 bp, Arabidopsis thaliana columbia
ctttctacatacctgaagaaaaaaataatctacgaattcgagccaaaaagatcgaaactttgtaatctatgggtgcttcagggaaatgggtcaagtccattatcggtctcaagaagctagagaaggatgaaatcgaaaagggtaatgggaaaaacaagaaatggaagctatggaggactacttcagtagattcatggaagggttttcgaggaaaacatcggtctgattcagacggtgttgattcttctactgtttactctgctgctgttgctactgttcttagagctcctcctaaagatttcaaagctgttagagaagaatgggctgctattagaatccaaaccgcttttcgtggattcttggcgagaagagcgttgagggcattgaaagggatagtgaggttacaagctttagtgagaggaagacaagttaggaaac

SEQ ID NO: 154938 - DNA, 428 bp, Arabidopsis thaliana columbia
  unsure (1)..(428): unsure at all n locations
aaaaatggcaggaaccggagttgtggcggtgtacggcgaaggagccatgacggaggcgaaacagaaatctcccgtctgcgtgaaagttggtctcgctcagatgcttcgtggcggtgtaatcatggatgtcgtcaacgcagagcaagctcgaatcgctgaagaagctggcgcatgcgccgtgatggctcttgaacgtgttcccgccgatattcgagctcaaggcggtgttgctcgaatgagcgatccagagatgatcaaagaaatcaaaaacgccgtgacgattccggtgatggcgaaagctagaattggtcatttcgttgaagctcagatcctggaagcaatcggagttgattacgtcgacgagagtgaaggtctnactctcgccgaccaagaatatcacattaacaaacataatttcaaaaaccctt

SEQ ID NO: 154939 - DNA, 453 bp, Arabidopsis thaliana columbia
cgtccactcacacatccactaatgagcctggtcctgatcttgctgattatccgtacgacacgcgttcctaacaaggttggacacctcttcttcgctcagcagtaccatgacagaaagcagagggaggcaagaatgagcatgagcagagaagagaggacaaaaactccgttcgtggactacctaaagcccatcatcgccgacggagacaccggctttggcggcaccaccgccaccgtcaaactctgcaagcttttcgttgaaagaggcgccgctggggtccacatcgaggaccagtcctccgtcaccaagaagtgtggccacatggccggaaaggtcctcgtggcagtcagcgaacacatcaaccgccttgtcgcggctcggctccagttcgacgtgatgggtacagagaccgtccttgttgctagaacagatgcggtcgcagctactctgatc

SEQ ID NO: 154940 - DNA, 450 bp, Arabidopsis thaliana columbia
aaaaatggcagagcgtgtgtctctcacactcaacggaaccctcctttctcctcctggcacagcaacaacaacaacaatggcttcttctctccgatctaccaccgccgcttctcttctcctccgctcctcctcctcctcctccagatccactctcactctctccgcttcctcctctctctccttcgtcagatctctcgtctcttctccacgtctctcttcttcttcatccctctctcagaagaaatatcgaattgcgtcggtgaatcggagtttcaactccaccaccgccgctactaaatcttcatcttcagatcctgatcagttgaagaacgctagagaagatatcaaagagcttctcagcaccaaattctgccatccgattttggttagattaggttggcatgatgctggtacgtataacaagaacattaaggaatggccacaaagagg

SEQ ID NO: 154941 - DNA, 428 bp, Arabidopsis thaliana columbia
aaaaacggcagagcgtgagcatctgacacttaacggaaccctcttttgtgctcctacgacggcatcaacaccaacaaggtgggatggtatccgaactaccaccgacggtattgttatgctcagttcctacttctcctactgcacatacactatcactctctacagtaactactatctcttctgcggcagatctctaaagtgttctccacaaatgtcttgatcactatgcctgtctcagaagaaatgtggaattgcgcttcaagaatgggagggtgaactgcaccaccgacgctactaaaagttgatcttgagatcctgatcaggcgaagaacgctggagaagatatcaacgagcttatcagcaccgaattatgccctcccattgtggatagattacgttgggatcatgctggtacgcataacatgaac

SEQ ID NO: 154942 - DNA, 441 bp, Arabidopsis thaliana columbia
gcgccacagaattgtgcgatttacgaaaatctctgaaacctccgatcgttaacggcgaccggcgatgtttcccggtaaaaatgaacgacggagatgtatcgaggcagatccagcagatggtgagatttatccgccaagaagcggaagagaaagcaaacgagatctcggtttctgctgaagaagaattcaacattgagaaactccagcttgttgaggcggagaagaagaagatcaggcaagattatgagaagaaggagaagcaagctgatgttcgcaagaagatggattactctatgcagctaaatgcatcaaggatcaaagttcttcaagcgcaagacgatattgtcaatgccatgaaagaccaagcagctaacgatcttctgaacgttagtcgcgatgagtatgcctacaaacagctcctcaaggatctaattgttcagt

SEQ ID NO: 154943 - DNA, 455 bp, Arabidopsis thaliana columbia
agaaaaaaggtggtttacgggtctggcggaaggaaattcgcattccagaacttggcaccgttaggttgcttaccggccgtgaaacaagcaagcggaaatgttcaagaatgtgtgaaattgccttcggaaatggctgctttgcataacaagaaacttttgcagctcttggttgaactatcaagagaactaaatggtttccagtactcgttttacgacttctttagctcgatccaaaacagagttatcaagtctaagacttatacattcgagacaggaaacgctgcttgttgtggaactggctctatcaacgggagtaattgctcagctaaaaatgtatgcgccaagcctgaagagtatatcttctttgatggtaagcatttgacgcaagaagccaaccttcaggtcgggcatttgatgtggggagcagatccggaagtgattggaccgaacaatat

SEQ ID NO: 154944 - DNA, 396 bp, Arabidopsis thaliana columbia
ggaaaagagtttgggaagcaccatcatagttgttgaaaagcgtcttaccaactcaacaacataaaatcccagataaatccaatacaaacgaagaacataaatcagaaaaccaaaatctttgcctagatataagagactttgcgatgacgagagcatcattactgactagcgccaagccacttggtgaagttatcgaactcggtgtagtcactgtctgaaatcatagtctgataccaagccttgcctgctgctttgatcgcttgggcctcctccttagtgacgactttcctcttcttctcgagcttctccttcttagccttaacccttgaagcttcagccaacagaaacattctctttgcggtcttagcataaggattcaacttgaacatcacatta

SEQ ID NO: 154945 - DNA, 390 bp, Arabidopsis thaliana columbia
gttttaactttggctgctctgtctcaatccctcgagacttaaacccacttagtacaatctggatataatttgagtagaacctaaaagatcgaagcttgaggaaaatggtcccttccaatggcgcaaaggttcttcgcttgttgagtcgtcgatgtctctcttcatcgcttattcaagatttagccaatcagaaactgagaggagtatgtattgggagttataggagattgaatacgagtgttggcaatcatgctaacgtgattggagattacgcttcaaaatctggacatgatcggaaatggatcaactttggaggttttaatactaattttggttctacaaggtcttttcattggaacaggttcttcggttatgtttgctaaggactac

SEQ ID NO: 154946 - DNA, 215 bp, Arabidopsis thaliana columbia
cacaatcgtttaatctcacccaagtaagacattttcttcatagagagaaagagagagaaatggcgacggcatcaacagaagcagcgaaggcatcatcgaccaatggagaagatcagaagcagttctcagaatcttcgacatctagaagtggtttacatgagtctcttactgtgttttgttctatacaacttattactgactgcaagtggtttttt

SEQ ID NO: 154947 - DNA, 375 bp, Arabidopsis thaliana columbia
agccaagcaaggtatgtaactttttcttgccttcgtagttccattttcaacgaaacgtctggtatttgaaccctgtggattgtaggctactacaatcagctgaaaaaaaccctaattcagtctctctttctcgtcgtgcaaaaaccctaaaccctgggaattgtgagatcgatctcatgtttcagtaacttgttaaatctgtacctctttctgttgatttagatttagatttctgttttcaattccgtttctgttccgaaattgttcaaggtgaaaaattcaacctcaaaggaaagtgtaaaattcaagtcttaaagaagagaaaaatggtggaggtgtggtggccactgataggagcagcagtgcctgcactaa

SEQ ID NO: 154948 - DNA, 396 bp, Arabidopsis thaliana columbia
cttagctcccattatacgccgtttatgactttctttataccgaactagcggggatgactcgatcttgtatgatcatgagctggagagttatggactttttgacatgcatgggaataaaattccgccgcagttggttactaaagttggagatgcattcaagagaattctcgaagagacggagaaaataagggatgaaactgccaatgacatgtctgttcttcaaggaatatctatcgtcttggatagaaatccagaactaaggcaagaagggatggcgtacgaagttttacagtggtacttatgtaggatggaggcgtggtttgctgtagatgcgaatttaatttcactaaaatgttgggatcaggatgaatgtctttcaggtggtcatggtctaat

SEQ ID NO: 154949 - DNA, 360 bp, Arabidopsis thaliana columbia
tgataacccaactccttaagaaagctcacttctttttcccctgattccctttgtgggatcatctttcatcatcgtcgggttgtaagaatcaacaacaatgcagagcagcttcaaaaccgttcctttcactcctgatttctactctcagtcttcttacttcttcagaggagatagttgtcttgaggagtttcatcaaccagtcaatggttttcaccatgaagaagctatcgatttaagtccaaatgtcactattgcttcagctaacttacactacacgacgtttgatacggttatggattgtggtggtggttggtggtggtggcttggggagcgacttgaatgaggagaagaggagtgttt

SEQ ID NO: 154950 - DNA, 482 bp, Arabidopsis thaliana columbia
accgaaccgcaatgcccgcctccgacccacgcgttcggcgaactcctaaaatggctcgtaccaagcaaacagctcgtaaatccaccggaggaaaggcaccaaggaagcaactcgcgaccaaagctgcgaggaaatcagctccagccaccggaggagtgaagaagccacacagattccgtccaggaacggtggcgttgagagaaatcaggaagtatcagaagagtactgagcttttgatccgtaagcttccgttccagagattggttcgtgagattgctcaagatttcaagacggatctgaggttccagagcagtgccgtcgcagctcttcaagaagcagctgaggcttatcttgttgggctctttgaagatactaatctctgtgcgattcatgctaagaaggttacgattatgcctaaggatatccagcttgcgaggagaatcaaaggagagagggcttaagtgaacgaagatgatgaaaat

SEQ ID NO: 154951 - DNA, 445 bp, Arabidopsis thaliana columbia
ttttctttctctcgttctcatctttttttttaaaaaatttggaaggggacaatcaaaagtttgacgaaatggtgaagtttacagctgatgagcttcgaaggattatggactacaaacacaacatccgaaatatgtctgttattgctcatgtcgaccacgggaaatccactcttactgattctttggttgctgctgctggtatcattgcccaagaggttgctggtgatgttcgtatgactgataccagagctgatgaggctgaacgtggtatcactatcaagtccactggtatttctctctactacgagatgactgatgaatccttgaagagtttcactggagccagagacggaaacgagtacctcatcaatcttattgattcacctgggcacgttgacttttcttctgaggttactgctgctctccgtatactgatggtgctctt

SEQ ID NO: 154952 - DNA, 448 bp, Arabidopsis thaliana columbia
aagagaatttctaaaagcaaatcggagagcttcggcgatggcgttatcacgactttcttcacgatccaacactttcctaaaggcggcgattaccgccttgccctcctccatccgccgtcatgtttccacagactcatcaccgatcacaatcgaaaccgccgtccctttcacatcgcatctatgtgaatcaccgtcacgctccgtcgagacttcatcggaggagatcttagcctttttccgtgacatggctcggatgaggaggatggagatcgcagcagattctctttacaaggcgaagctgatccgtgggttctgtcatttgtacgatggtcaagaggctttagcggtgggaatggaagcggcgattaccaaaaaagatgcgattatcacatcgtatcgtgatcactgtactttcattggtcgtggtgggaagcttgttgatgctttc

SEQ ID NO: 154953 - DNA, 455 bp, Arabidopsis thaliana columbia
ccgaaccgcagggtcggcccacgcgtacgcgctggtgattcggttgtcatgtttgagccatactacttcaactcctacatggcctttcagatgacaggagtcaccaacatagttgttggtcctggccagtcagacactctctatcctgacgctgactggttagagaggacactgtctgagtctaaaccgactccgaaagttgtaactgttgtgaatcctggtaacccaagtggcacctatgtccctgaaccgctgcttaagaggattgctcaaatatgcaaagatgcagggtgctggctgattgtagataacacatacgagtatttcatgtatgacgggttaaaacattgttgcgttgagggagaccacattgttaatgtcttctctttctctaaaacctatggcatgatgggttggaggcttggatatatagcttactcagagagattagatgg

SEQ ID NO: 154954 - DNA, 454 bp, Arabidopsis thaliana columbia
  unsure (1)..(454): unsure at all n locations
aacaaacaccgtttctccggcgaaaagctctctgttactaaaaactcacagaacctaaaaatggcggatcaagctatgacggatcaagatcaaggagctgttactctctacagcggcacagccattaccgacgcgaagaaaaaccatccgttctctgttaaggtcggattagctcaggtacttcgtggcggcgccattgttgaagtttcctcggttaaccaagctaagctcgctgaatccgccggcgcatgttctgtaatcgtctcagatccggttcgatctcgcggcggtgttcgtcgtatgccggatccggttctcatcaaagaggtaaaacgagctgtgtctgtacctgtgatggcacgagctcgcgttggtcattttgttgaggctcagatcttggaatctcttgcggttgattacattgacgagagcgagattatctctgntgcggatg

SEQ ID NO: 154955 - DNA, 443 bp, Arabidopsis thaliana columbia
atttcgagatcctctcggcttgttcgttcttcgtgaacgatcccatctattgtttctcgcgggtctcagattcgactgactgggatatctccgatactgaagaagcctccttcttctttttccgctcttcccgatgccgatcgataagatcttcaaagatgatgctagtgaagagaagggagaacgtgcgaggatggcatcatttgttggtgcaatggctatcagtgatctggttaagtctactttagggccaaagggcatggataaaatcttgcaatctactggtagaggtcatgcggtcactgttactaacgatggtgctactattctcaagtcacttcacatagacaaccctgcagctaaagttcttgttgacatctcgaaagttcaagatgatgaggttggtgatggaactacctcttgttgtgtcttggccggcgagc

SEQ ID NO: 154956 - DNA, 420 bp, Arabidopsis thaliana columbia
  unsure (1)..(420): unsure at all n locations
ggcacggttaggattgattctttatggaccaggactaaagtcagcagcagtgttttctgcactgaccctgttgcggtgtgccaggtgaaccgcgtgcttctacccgaagcaatctttggtactgatgtccctccaatgcctgctccagctactgctcctatcgttagtgctccttcggattctccttcagttgctgattctgaaggagcttcttcaccaaagtcctcacacaagaactccggacaaaagctgctacttgcaccaatctccatggttatttccggtttggtggcattgttcttgtgatcagatggntttgcagattgagttatgtttttaagttacaatgtgaaagattgtattacatcatttgaattgtctttttgatttttgaaacccattttttattatacattttta

SEQ ID NO: 154957 - DNA, 418 bp, Arabidopsis thaliana columbia
ggcacggttaggattgattctttatggaccaggactaaagtcagcagcagtgttttctgcagtgaccctgttgcgggggggcgagtgaaccgcgtgcttctacccgaagcaatctttggtactgatgtccctccaatgcctgctccagctactgctcctatcgttagtgctccttcggattctccttcagttgctgattctgaaggagcttcttcaccaaagtcctcacacaagaactccggacaaaagctgctacttgcaccaatctccatggttatttccggtttggtggcattggtcttgtgatcagatggttttgcagattgagttatgtttttaagttacaatgtgaaagattgtattacatcatttgaattgtctttttgattttgaaacccatttttattatacattttat

SEQ ID NO: 154958 - DNA, 419 bp, Arabidopsis thaliana columbia
ggcacggttaggattgattctttatggaccatgactaaagtcagcagcagtgttttctgcactgaccctgttgcggggtgccaagtgaaccgcgtgcttctacccgaagcaatctttggtactgatgtccctccaatgcctgctccagctcctgctcctatcgttagtgctccttcggattctccttcagttgctgattctgaaggagcttcttcaccaaagtcctcacacaagaactccggacaaaagctgctacttgcaccaatctccatggttatttccggtttggaggcattgttcttgtgatcagatggttttgcagattgagttatgtttttaagttacaatgtgaaagattgtattacatcatttgaattgtcttttcgaattttgaaacccattgtatattatacattttt

SEQ ID NO: 154959 - DNA, 431 bp, Arabidopsis thaliana columbia
tgaatggccggggcgacgcgtccggaagaacaacaacactaagcaaaaaagaaaagctcatgccgagagagacaatggcatcaacattcacgagctcaagcagtggtcttaccccaacaacattccttggccagactaaagcctcaagctttaacccccttcgtgatgttgtctctctcggatctcccaagtacactatgggaaatgatctttggtatggacctgacagagtgaagtacttaggacccttttccgttcaaactccgtcttacctcaccggagaattccctggcgattatggttgggacaccgccggtttatccgcagaccctgaagcctttgccaaaaacagagctcttgaggtgatccatgggagatgggcaatgttgggagcttttggttgcataacccctgaagttcttcaaaagtgg

SEQ ID NO: 154960 - DNA, 468 bp, Arabidopsis thaliana columbia
cgtcgattttcaaaaccggagctcagagactgatctcggaaagtaaatcgcagccatggcggaaaaagctgtcactatcaggaccagaaacttcatgaccaacaggcttctcgccagaaagcaattcgttattgatgttcttcatcctggaagagccaatgtttcaaaggctgagcttaaggagaaattggcgaggatgtatgaggttaaggacccaaatgctatcttctgtttcaagttcagaactcactttggaggtggtaaatcttctggatatggtttgatctatgatactgtcgagaacgctaagaagtttgagcctaagtacagacttatcaggaatggacttgacaccaagattgagaaatcaaggaaacagatcaaggagaggaagaacagggcgaagaagatccgtggtgttaagaagaccaaggctggtgataccaagaagaaagtagacgtttgaag

SEQ ID NO: 154961 - DNA, 459 bp, Arabidopsis thaliana columbia
  unsure (1)..(459): unsure at all n locations
gctttcacaagatctttccatagaccctttcagtctcatgttgaatgaaatgcaagaaaacatatctcttgtctcattttcaaggcgacttgctacacagatttggtcagagatgcagagtgatttcctaccaaacttcattctttgcaataccactcagcgatttgtccgttcatcgaaagttcctcctactcagaaaccatcagtgccttctgctaagcctagtttctattgtggcactcaagacttaaatgcagcgcatcaaagntttgcacgattgcatagtggatttttcgggataccacatttattttccatagttaaacttcttgggtccagatcattgccttggctaataagagctntactggaccatatatcaaataagataacaacacttgagccaatgatctctggattgcaagaagcattgcccaagtccattggattgctttcttt

SEQ ID NO: 154962 - DNA, 465 bp, Arabidopsis thaliana columbia
aaaatgagctctcaaatctgcagatctgctttcaaagcagccaaatctcttctctcttcagctaaaaatgctcgcttcttctctgaaggacgagccattggtgctgcggcagcggtttcggcgtcaggaaaaattcctttgtatgcatctaactttgcaagatcatcaggttctggtgttgcttctaagagttggatcactggactcttagctcttcctgctgcagcttatatgattcaagatcaagaggttcttgctgctgagatggaacgaacttttattgctatcaagcctgatggtgtgcaaagaggactgatatcagagatcatttctcgattcgaacgcaagggattcaagctagttggtatcaaagtcattgttccttctaaagatttcgcacaaaagcattaccatgatcttaaagaaagacctttcttcaatggtttgtgtgacttccttagctct

SEQ ID NO: 154963 - DNA, 422 bp, Arabidopsis thaliana columbia
ggcacggttaggattgattctttatggaccaggactaaagtcagcagcagtgttttctccactgaccctgttgcgggttaccgagtgaaccgcgtgcttttacccgaagcaatctttggtactgatgtccctccaatgcctgctccagctactgctcctatcgttagtgctccttcggattctccttcagttgctgattctgaaggagcttcttcaccaaagtcctcacacaagaactccggacaaaagctggtacttgcaccaatctccatggttatttccggtttggaggcattgttcttgtgatcaagagggtttgcagattgagttatgtttttaagttacaatgtgaaaagattgtattacaaccattggattggcttttcgattttatgaaacccattttttattatacatttttt

SEQ ID NO: 154964 - DNA, 398 bp, Arabidopsis thaliana columbia
atcaaaaatccgatggggaggaagaagggattgccggagttcgaagagtcggcgccggatggattcgatcctgagaatccgtacaaggatccggttgcgatggtggagatgagagaacacattgttcgtgagaaatggatccatatcgagaaggctaagatcttacgtgagaaggtcaaatggtgttaccgcgtcgaaggcgttaaccattaccagaagtgtcgtcatcttgttcagcagtatctcgatgccactcgcggcgttggttggggcaaagaccaccgttctatctctcttcacggtcctaagccagtagctgttgaagaagctgaatgatgttgtgtgcgtgattgatctttggtgagtgagagctttgattaccatacatgaatggagtc

SEQ ID NO: 154965 - DNA, 443 bp, Arabidopsis thaliana columbia
  unsure (1)..(443): unsure at all n locations
ggcacggttaggattgattctttatggaccaggactaaagtcagcagcagtgttttctgcactgaccctgttgcgggttgagcaagtgaaccgcgtgcttctacccgaagcaatctttggtactgatgtccctccaatgcctgctccagctcctgctcctatcgttagtgctccttcggattctccttcagttgctgattctgaaggagcttcttcaccaaagtcctcacacaagaactccggacaaaagctgctacttgcaccaatctccatggttatttccggtttggtggcattgttcttgtgatcagatggttttgcagattgagttatgtttttaagttacaatgtgaaagattgtattacatcatttgaattgtctttttgatttttgaaacccattttttattatacaattttatctaagngaaaaatatatatgc

SEQ ID NO: 154966 - DNA, 420 bp, Arabidopsis thaliana columbia
ggcacggttaggattgattctttatggaccattactaaagtcagcagcagtgttttctgcactgaccctgttgcgggttaccaagtgaaccgcgtgcttctacccgaagcaatctttggtactgatgtccctccaatgcctgctccagctcctgctcctatcgttagtgctccttcggattctccttcagttgctgattctgaaggagcttcttcaccaaagtcctcacacaagaactccggacaaaagctgctacttgcaccaatctccatggttatttccggtttggtggcattgttcttgtgatcagatggttttgcagattgagttatgtttttaagttacaatgtgaaagattgtattacatcatttgaattgtctttttgatttttgaaacccattttttattatacattttta

SEQ ID NO: 154967 - DNA, 422 bp, Arabidopsis thaliana columbia
ggcacggttaggattgattctttatggaccaggactaaagtcagcagcagtgttttctccactgaccctgttgcggtttaccaagtgaaccgcgtgcttctacccgaagcaatctttggtactgatgtccctccaatgcctgctccagctcctgctcctatcgttagtgctccttcggattctccttcagttgctgattctgaaggagcttcttcaccaaagtcctcacacaagaactccggacaaaagctgctacttgcaccaatctccatggttatttccggtttggtggcattgttcttgtgatcagatggttttgcagattgagttatgtttttaagttacaatgtgaaagattgtattacatcatttgaattgtctttttgatttttgaaacccattttttattatacatttttatc

SEQ ID NO: 154968 - DNA, 455 bp, Arabidopsis thaliana columbia
gagagttctgaaatctgaaacccagtatcatcttcatcatcatcatgctcaccatgagaactgaagcacaagattcagtacctaaatgaaaccctaatccggaactaatcaaagaaaccccaaaggtctctctttacgaacaatgcagggaagagaggatcaaagagaatcttcagaggatgaacaatctgggtctcttaaatctctctcgcaaactcaaacccaagacccgacccgttaaaagatcttacggtaaccgtaattctgttcagaatccgactcctcctcttcagccttctcgccgatcttctcgattggagaacacaactccagttatctacactgatgggatcaatgagaagggcaagaaagcatctaaacgagagagtgttgtgattggtgaagggataagagctgagatttacacagaggaacatgagaagcttcttgggaat

SEQ ID NO: 154969 - DNA, 453 bp, Arabidopsis thaliana columbia
gttggaaaattaatggacaaaagcgttggattggaaacagcacctttgcagatctgttgatcgtctttgcgaggaatacaacaactaaccaaatcaacggattcatagtcaagaaagatgcgcctggcctaaaggctactaagatcccaaataaaataggtttacgtatggttcaaaatggagatattctactacagaatgtctttgttccagatgaggatcggttacctggggtaaattcttttcaggacaccagcaaggttctggctgtctcacgtgtaatggtggcctggcaaccaatcggcatatcaatgggaatctacgatatgtgccacaggtatctgaaggagaggaaacagtttggagcaccgttggctgctttccagttaaaccaacagaagcttgtgcagatgctgggtaacgttcaagcgatgtttctaatgggttggcgtc

SEQ ID NO: 154970 - DNA, 434 bp, Arabidopsis thaliana columbia
attttgactcgcaaaatctcaacgaagctcgaaaatggattcacgaaccaaggggaagacggtgatggaagttggtggcgatggcgttgccgtcataacactcatcaatcctcccgtcaattctctatccttcgacgtgctatacaatctcaaaagtaattacgaggaggccttgagcaggaatgatgttaaagctattgttattactggtgcaaaggggaggttctctggtggctttgatatatctggttttggtgaaatgcagaaggggaatgtcaaagagccaaaggctggttacatttcgattgacatcataaccgacttgcttgaagctgctaggaaaccgtctgtcgctgccattgatggacttgccttgggaggaggattagaacttgctatggcttgtcatgctaggatatcagcttctgctgcac

SEQ ID NO: 154971 - DNA, 464 bp, Arabidopsis thaliana columbia
  unsure (1)..(464): unsure at all n locations
atcggattttggaaaccattgatgcagacctcaatccatctctaacaccactgatctatctgcttaggtcttctctaacaatacttgtaattttctttctttttgcttcttccgtcactacatctatggccgctgagtcttctaaccctcgcaccgtcgaagagatcttcaaggattttagcggtcgtcgctccggttttcttcgagctctctccgtagatgttgacaagttctactctttatgcgatccggaaatggagaatctgtgtttgtacggacacccgaatgggacatgggaagtgaatcttccagctgaggaagtgccttcggagctacctgagccagctcttggaatcaatttcgctagagatggtatgcagcgtaaagattggctctctttagttgctggccacagtgattggtggntactctcttgttcttcttacttcggcgctcgtcttaat

SEQ ID NO: 154972 - DNA, 430 bp, Arabidopsis thaliana columbia
aagaaagtgaaaatcagaacccgaacttagccacacctccaagctaccaagcaaaatcatggagagcagcaattaaatcaactggtgtcaagaagatgaataaagaagttccaagactaaagagcacacaatcagctagaaatctgttttcagggagagacatatttggtcatatctcagatttctgctatgaattgaagagattagccacaagggttactgagagagaagatactgggaaatctgaagtgaaggagagtcatcaagtgggtgaaatagtaaatcagccttactctgttcatgacttggaattgaaaaaggaaagaaagccactgcttgaagtaagcaaagataagctccctgagtccacggatgttaaaggaagcacatttaaagagaaccgtagaagaaagaagagagtggatgatgc

SEQ ID NO: 154973 - DNA, 283 bp, Arabidopsis thaliana columbia
gacacggttaggattgattctttatggaccattactaaagaacaccatcagagttttctgcactgaccctgttgcgggttaccaagagaaccgacagctattaccgcaagcaatgatgtggaactgatgtcccaccaatgccagatggagcagctgctagtatcgatcgagctccttctgatactgcgtcagatgctgattatgaaagagcttcttcaccaaaatcctcacacaataacttcggacaaaagctggaacgtgcaccaatatccatggataatta

SEQ ID NO: 154974 - DNA, 154 bp, Arabidopsis thaliana columbia
cgagattttattatccttcctcgaaacaagagcttagctaagatgacgaagaactacccaaccgggagcgaagatacaagaggctgttgagaatgcagaggaagctagaggtgatcgtgagagactggcaccataggccgactgaggacttgtg

SEQ ID NO: 154975 - DNA, 436 bp, Arabidopsis thaliana columbia
cgaggatgcaaagaacgcaacatttgctgctatcgaggaaggcatagttccaggtggtggtgctgctttggtgcatctctccactgttattcccgccattaaggagacttttgaggatgctgatgaacgtttgggagctgacatagtacaaaaggcattgctgtcaccagctgctcttattgctcagaacgctggagttgaaggagaagttgttgtggaaaagattatgttcagcgattgggagaatgggtacaacgcaatgactgatacatatgagaatctgttcgaagctggagtgattgatccggctaaagtgacaagatgtgcgctacagaacgctgcttccgtagcaagaatggtactgaccactcaagccattgttgttgacaaaccgaaacccaaggctcctgctgctgctgctcctgagggtctcatg

SEQ ID NO: 154976 - DNA, 420 bp, Arabidopsis thaliana columbia
ggcacggttaggattgattctttatggaccattactaaagtcagcagcagtgttttctccactgaccctgttgcggtttaccaagtgaaccgcgtgcttctacccgaagcaatctttggtactgatgtccctccaatgcctgcttccagctcctgctcctatcgttagtgctccttcggattctccttcagttgctgattctgaaggagcttcttcaccaaagtcctcacacaagaactccggacaaaagctgctacttgcaccaatctccatggttatttccggtttggtggcattgttcttgtgatcagatggttttgcagattgagttatgtttttaagttacaatgtgaaagattgtattacatcaattggaattgtctttttgatttttgaaacccattttttattatacatttt

SEQ ID NO: 154977 - DNA, 419 bp, Arabidopsis thaliana columbia
ggcacggttaggattgattctttatggaccaggactaaagtcagcagcagtgttttctccactgaccctgttgcggtttaccaagtgaaccgcgtgcttctacccgaagcaatctttggtactgatgtccctccaatgcctgctccagctcctgctcctatcgttagtgctccttcggattctccttcagttgctgattctgaaggagcttcttcaccaaagtcctcacacaagaactccggacaaaagctgctacttgcaccaatctccatggttatttccggtttggtggcattgttcttgtgatcagatggttttgcagattgagttatgtttttaagttacaatgtgaaagattgtattacatcatttgaattgtctttttgatttttgaaacccattttttattatacattttt

SEQ ID NO: 154978 - DNA, 443 bp, Arabidopsis thaliana columbia
ggatacactggtggtgagatcggccttgatgtttacttctccatggctagaggaaatgcctgtgtgcctgccatggaaatgaccaagtggttcgacaccaactaccattacatcgtccctgagttgggccctgaggttaacttctcttacgcatcccacaaggcggtgaatgagtacaaggaggccaaggctcttggtgttgacaccgtccctgtacttgttggcccagtctcttacttgctgctttccaaggctgccaagggtgttgacaagtcattcgaacttctttctcttctccctaagattctcccgaactacaaggaagtgattaccgagcttaaagctgctggtgccacctggattcagcttgacgagcctgtccttgttatggatcttgagggtcagaaactccaggcctttactggtgcctatgctgaacttga

SEQ ID NO: 154979 - DNA, 422 bp, Arabidopsis thaliana columbia
gtatccctcttctctattccttcaagccaactaaaactacattgcgtgacttcttctgtaacgcatttttctattccgagcagaccatggcgtatttagctccgatttcttcatccttatccatattcaagaatccccaactctcaagattccaattttcttcttcctcaccgaacccacttttccttcgacctaggattcagattctgagtatgaccatgaacaagtcgccgtctttagtggtggttgcggctactactgcggcagagaagcagaagaagaggtatcctggagaatcaaagggttttgtggaggagatgaggtttgtggctatgagacttcatactaaagatcaagctaaggaaggtgagaaagagactaaatctattgaggaacgttctgttgctaaatgggaacctact

SEQ ID NO: 154980 - DNA, 449 bp, Arabidopsis thaliana columbia
gaattctgatttgaatctctttggatggatcacacaaaaaaaggagaccagttcattattgatctgtttgaggaaatgatatgcgcaagaaagtgtaaattgggcgtcaaccacaaaacaattaacaaaccggcttttggtatatatagagagattagtgagctaaagctttaaccgctttctcagctgcatcatccaaatcatcagctgttatgagtttcattccactttccttgaggattctctttccctgctcaacattcgttccttctagacgaaccaccactggcactttcaatgcgacctcttttgcagcgttcacgattccactagcaatcacatcacatttcattatcccaccaaatatgttcaccaagattgctttcactttatcgtccgatgtcagtatcttaaacgcttccaccacctggtgctcagaagcattttca

SEQ ID NO: 154981 - DNA, 468 bp, Arabidopsis thaliana columbia
  unsure (1)..(468): unsure at all n locations
aacagaagctagctttggctaagaagctgaacttgacggcaagacaagtggaagtgtggttggaaaacagaagagctagaacgagagttaaagcaaacggaggtagattgcgaatacttgaaacggtgcgtagagaagctaaccggaagagaaccggagacttcagaaagaggctatggagcttcgaactctcaagctgtctccacaattctacggtcagatgactccaccaactacactcatcatgtgtccttcgtgcgagcgtgtgggtggcccatcatcatcgaaccatcaccacaatcacaggcccgtttctatcaatccgtgggttgcttgtgctggtcaggtggctcatgggctgaattttgaagccttgggttcacgatcgtgattntttattttagtggtgggaaaaaggtggttttggtatttttcggtatcgttatatatgtcatatttggggggggt

SEQ ID NO: 154982 - DNA, 167 bp, Arabidopsis thaliana columbia
  unsure (1)..(167): unsure at all n locations
cttttagagatcttgtaatctcctcttagttaatcttctattgtaaaactaagatcaaaagggtaaatggagattaacgggggacacaagagcaacggaggaggagtggacgctatgttatgcggcggagacatcaagacttctaaaattgagtcaatcctttgntg

SEQ ID NO: 154983 - DNA, 359 bp, Arabidopsis thaliana columbia
cgaccgaggaaaagtagccaccgcttgaccaatcattcatcaacacacgcagagagctctggatctccaggaagaagagggcgaggatcattcctatggctgcttcctacattcgaccttccctggcctgcttctctgattctcctcgcttccccatcttcctcctctccagaaatctctttcgcactctccatgttcctcaatcacagctttttggcttaacttctcataagcttttgagaagaagtgtcaactgcttaagagttgctgaatctggttaagcagcttaagctactacacaagatgatcttctcacctgggttatagaatgataagagaagaatgcttcattgttgtta

SEQ ID NO: 154984 - DNA, 224 bp, Arabidopsis thaliana columbia
atttcctaaatccacacatcacgaagccgaagcagccatgagtaatcttcactgatctctctacacattcaccgtcggcttttcaaatgcaggatattctcggacggttcgcgaccttggtttccgccgcttggcgggacatgactagcgggagctagggatcgcggagatacttgatcgagcttcgatgggctttttaagcgctcagccttctgtctaaagag

SEQ ID NO: 154985 - DNA, 458 bp, Arabidopsis thaliana columbia
aagaaatcgaatctatcgtgtgtgtagattgcttctctctatctcttctctcgctacacaacaatggctgcttacacgtgtacttcccgtccgccgatttctatccggtcagagatgagaatcgcttcctcgccgacgggttccttctctactcgacagatgttctctgtgttgccggaatcgagcggattgaggactcgcgtttctctatcttcactctcgaagaattctagggtttcccgattacgacgaggcgttatctgtgaagctcaggacactgctacaggaattccagtggtcaacgattcaacatgggactctctagttctcaaggctgatgagcctgtgtttgtcgacttttgggcaccatggtgtggaccctgcaaaatgattgatcccattgtcaacgaactcgcgcaaaagtacgccggccagttcaagttctacaaacttaacac

SEQ ID NO: 154986 - DNA, 405 bp, Arabidopsis thaliana columbia
caaaaacccttttaatctctctctcgtgtagatctatcactctccatttcccttcttctctgtaaaccctttataaatctcacttccttcttcttcatcaatccttcctcagatctcttcttattcaaattcaattgagagatactctcttcttcttctttttctctatccagttccttctgtgcgaagttcttctgattaatttgagtttcttggaagcttttactcgatcttcatcggatcttagggttttgtttaaatccagatcttgggttttgttaaataatggcgactccttatcctggagcgacgcaggtgggttcgtactttgtggggcagtattatcaagtgttgcagcagcagccagatcttattcatcaggtttattctgagcctagtagagct

SEQ ID NO: 154987 - DNA, 260 bp, Arabidopsis thaliana columbia
caaaaatcagaagcacaccacagataattacttctttgagagcgctgagaaaatctccttcttctttgaagaaaaagcttttggtgatgatgggaaattgaagcaacccaaacaactctctataaacaaagttgggcatgcactgcatgagcttgacccattgtataaggatttcacatattcgtcaaagttttcaagtttggcatcatccttaggttacaggagaccagttgtcatgcagtctatgtatattttcaagc

SEQ ID NO: 154988 - DNA, 431 bp, Arabidopsis thaliana columbia
ctctctctcatttctcggagatattcaccagagcaataaccatggacgctaaagaaacctctgccaccgatttgaaaagaccgagagaagaggatgataacggcggcgccgctaccatggagacggagaacggagatcagaaaaaggaacctgcttgtttctccactgttattcctgggtggttctctgaaatgagtcctatgtggccaggagaggcacactcattgaaggttgagaaagttttgtttcaagggaaatcagattatcaggatgttattgttttccagtctgcaacatatggaaaagttttggttttggatggagtaatccaacttacggagagagatgaatgtgcttatcaggaaatgatcactcatcttcctttgtgttctatccctaaccctaagaagggtttggtcattggaggagga

SEQ ID NO: 154989 - DNA, 448 bp, Arabidopsis thaliana columbia
cataaaacaaaaacaatttaatacttcttagtgtgtaaatgtgtgattctttcatcaataacaaaatgacatcgatattattgatgctcgtgagtctaacaattctttccatgaatctaaaagtctctcaagccacatctcgtgtcaccttccacgagccgatcgttgctgaacaccatcagcaatggatgactcggttctctcgagtttacagtgacgagctcgagaaacaaatgagattcgatgtgttcaagaaaaacttgaagttcattgagaaatttaataagaaaggggatagaacctacaagcttggtgtcaacgagtttgcggattggaccagagaggaattcattgccactcacaccggcctcaagggggttaacgggattccatcctctgaatttgtcgatgaaatgataccttcttggaattggaatgtaagtgatgt

SEQ ID NO: 154990 - DNA, 463 bp, Arabidopsis thaliana columbia
taactcgattagagagaagaaaaaacttgttcgaggcttcgaagaatgtcgatgttaatggctgtcaaaacaacttcactctgttgtagcagcttaaaccttacagcttcaccaacattccgacggaacccacgcgcggcgagattggtgaatccgacagcgagaatccaaacacgttttcatcgcctgattgaagaacaaggcattgtgcttatgcctggatgctacgatgccttatccgcggctattgtgcagcaaaccggattctccgctggttttatatccggttacgccttatccgcttctctcctgggaaaacccgatttcggtttgctaacaccaccggagatggctgcgacggcaaggtcggtgtgtgcgtcagctcctaatatacccatcattgcagatgctgataccggtggaggaaatgcgctaaacattcaaagaaccgtaaaggatttga

SEQ ID NO: 154991 - DNA, 444 bp, Arabidopsis thaliana columbia
ataaccaatagttggtatatttcaattattccatcatttaccatttagtcgtctccttggtgaggcaaatacttcatcacgcttccttcatagcaaattcttttcgtctatctcatacatttaaacaaacatagacatacactaatcaatcttccttaatttaaaaaaaaaacatggagaaaacccaagaatcagtggttagatatggaaaaaagatcgagaaaatgccatatcttatgcccgccggccgagttgtctttgcatctgcgttcctcgtgtctgcttggagagagtattatggtttcggattagctggcgatgagttaagaccaaaacttggtttctttgagaaccaggcaaaagccatagttgctcttggtatattgatgaagtttggtggagggatcttattcatcttcaatacgtacgtaggagctgcgcttt

SEQ ID NO: 154992 - DNA, 371 bp, Arabidopsis thaliana columbia
aatggccccgaagaaaggagtgaaggtagcttctaagaagaagaccgcggagaaagtttcagaccctctattcgagaggagggctaagcaattcggtattggtggagctttacctcctaagaaggatctctctcgctacatcaaatggcccaaatccatccgtcttcaaaggcaaaagaggatcctgaagcagaggttgaaggtccctccagctcttaaccaattcaccaagactcttgacaagaatcttgctaccagcctcttcaaggtccttctgaagtacaggccagaagacaaagctgccaagaaggagcgtcttgtaaagaaggcccaagctgaagctgagggaaagccttctgagtctaagaagc

SEQ ID NO: 154993 - DNA, 427 bp, Arabidopsis thaliana columbia
ctcgagccaattatgaggatctttatgctgctgtgatgcgtggagaccacgaaagctgccttctttatgtcgatcagctgaagcagaggtgtgttgaaggtttcaaagaaggtgttttgagcatcgagcagttagcttctgttgatggtttatgcgagtgggtgttgaaggctataggcgcatcggatccggttcatacttacaatatcaatctatcagttttcacttcgattcctgatctctgggggattgatcagctgttccctatagttcctatccataagctcgatcaaaggcccggggctcgcggaatcctttcagatttaacgtgtgatagtgacgggaagatcaacaagttcataggcggtgaatccagcttgccgttgcacgagctggacaagaatggcagtggaggaaggtacttttt

SEQ ID NO: 154994 - DNA, 461 bp, Arabidopsis thaliana columbia
attactaatctccttttaaggtttctttcgtgaatcagatcggaaaaatggaatcttttttgttcacatctgaatccgtgaacgagggacatcccgacaagctttgtgatcagatctccgacgctatcctcgatgcttgccttgaacaagaccctgagagcaaagttgcttgtgagacttgtaccaagactaacatggtcatggtttttggagaaatcaccaccaaggctaacgttgattacgagcagattgttcgtaaaacatgccgtgagattggattcgtctctgctgacgttggtctagatgctgacaattgcaaggttctggttaacattgagcaacagagtcctgacattgcacaaggtgttcatggtcatctcaccaagaagccagaggaggttggagctggtgaccaaagtcacatgtttgggtatgctactgatgagacttctgagctcatg

SEQ ID NO: 154995 - DNA, 437 bp, Arabidopsis thaliana columbia
  unsure (1)..(437): unsure at all n locations
gagaaactataggtacttctttatgtttgtttcttcggcaactattctctgcatctacattttttcgatgtcggcattatacatcaaggttctgatggataaccatcaaggtactgtgtggagggcaatgcgagaatcaccctgggcggttatgctgatgatatattgctttatttccctgtggtttgttggagggcttactgggtttcacttgtacctcattagcacaaaccagacgacctatgagaatttccggtacagatcagacaatagaatcaacgtttataaccgtgggtgttcaaacaatttttttgagacattttgctcaaaagttaaaccctcaaggaatgacttcagagcgttcatcanagaagaacctccaaggaatattacatttggtaccacatgggaacgaccagaagaagcagatgaagaaa

SEQ ID NO: 154996 - DNA, 453 bp, Arabidopsis thaliana columbia
acaagaggtccttcaagtacgcatgggtgttggacaaacttaaggccgagcgtgagcgtgggattaccatcgatattgctctatggaagttcgagaccaccaagtactactgcacagtcattgatgccccaggacatcgtgatttcatcaagaacatgattactggtacctcccaggctgattgtgctgttcttatcattgactccaccactggaggttttgaggctggtatctctaaggatggtcagacccgtgagcacgctcttcttgctttcacccttggtgtcaagcagatgatttgctgttgtaacaagatggatgccaccacccccaaatactccaaggctaggtacgatgaaatcatcaaagaggtgtcttcatacctgaagaaggtcggatacaaccctgacaaaatcccatttgtgccaatctctggattcgagggagacaaca

SEQ ID NO: 154997 - DNA, 386 bp, Arabidopsis thaliana columbia
aataaatctatctgcctcttaaaagttccaaatttcaccacgtcactgctttgataatgcaggtcctcgtcgtctctcctccgctcatcgccgccgcatctctctctaaacctctcaattctctctctaaagccgcactctctttctccagagccaaacccatttgtcctttccctcaaacctctcgacgaccaatctccgtatacaaatccccaatgaacaaccttttcaacagactcggattcgggtctcgtcctcaagcccaagctgacccatcttccgccgcaatcgcccaaggacccgacgatgatgttccgtcttcaggtcagcaattcgcgcaatttggcgccggttgtttctggggagtggagctagcttaccagaga

SEQ ID NO: 154998 - DNA, 385 bp, Arabidopsis thaliana columbia
ctttaagacagctaaaactaaatacaaagaaacatagatgggtttggttacagaggaggtgagagctaatgcagagatgtacgccggagatgagatatgtagagagaagacaaagtgtttcctcaaggaaatatctatgcccaatggtttattaccattgaaggatatagaagaggttgggtatgacagagagtcaggtgttgtatggctgaagcagaagaagagcatcactcacaagttcacagagatagataagcttgtctcctatggaaccgaagtcacagccattgttgagaccgggaaaatcaagaagctcactggagtcaaagccaaggaacttcttatttgggtcactatcaatgagatctataccgaggaaccccct

SEQ ID NO: 154999 - DNA, 333 bp, Arabidopsis thaliana columbia
ctctctgcctcctttcggattcaaatctcatatctagctcaaccatggcgttgctcgtcgagaagacctcaagtggccgtgggtacaaggtcaaagacatgtctcaagccgatttcggtcgtctcgaactcgagctcgccgaagttgagatgcctggactcatggcttgtcgtaccgaattcggaccttctcagccattcaaaggcgctagaatcaccggatctcttcacatgaccatccaaaccggcgtactcatcgaaaccctaactgctctcggtgctgaagtcagatggtgtttctgcaacatcttttccactcaagaccacgcccccg

SEQ ID NO: 155000 - DNA, 368 bp, Arabidopsis thaliana columbia
  unsure (1)..(368): unsure at all n locations
ggcggcgactcaacttacagcgtcaccagtgactatgtcagcaaggagcttagcctcgctggatggtctcagagcttcgagtgtcaagttttcatctttgaaaccagggacccttagacagagccagttccgtcgtttggttgtcaaagctgcttctgttgttgcccctaagtatacttcaattaagccattgggagatcgagttttggtgaagatcaaggaggcagaggagaagactntaggtggtatcttacttccatccactgctcaatcaaaacctcaaggaggtgaagtcgttgccgtgggtgaaggaagaactattgggaagaacaaaattgatatcacttgccctaccggagcacaaaata

SEQ ID NO: 155001 - DNA, 411 bp, Arabidopsis thaliana columbia
agccgccttattcgtcttcttcgttctctagttttttcctcagtctctgttcttagatccggggtagtttccaaatgtgggcggaaaaatgtcgggtaaaggagaaggaccagctatcggtatcgatcttggtaccacttactcttgcgtcggagtatggcaacacgaccgtgttgagatcattgctaatgatcaaggaaacagaaccacgccatcttacgttgctttcaccgactccgagaggttgatcggtgacgcagctaataatcaggtcgccatgaaccccgttaacaccgttttcgacgctaagaggttgatcggtcgttgtttttctgacagctttgttcatagtgacatgaaattgttgccattcaagattcaagcccgacctggcgataagccaatgatcta

SEQ ID NO: 155002 - DNA, 474 bp, Arabidopsis thaliana columbia
gagccgtccggttaaaagtaatggcaagccattttggcttgtttttgatcttcactttcttaactctagtgttggcgtcaaacggaccttaactggctctttccaacttttaacctcgtttccttcgctccaactttccaaacccgaaaaagcagaaatccaccagttcccggggagatcgaaaacgagtatcgatacgagactaaagttcttctcacagcaactggaccactttagcttcgccgatctttccaaattctctcaacgctacctcatcaattccgatcactggcttggtgcttttgcgcttggacctatcttcctttactgcggcaacgaaggtgatattgaatggtttgctacaaactctggattcaattgggatatcgctcccaagttcggtgccttgctttgtttccccgagcataagtattatggagagtctatgccttatggaagcagggaaagagctta

SEQ ID NO: 155003 - DNA, 402 bp, Arabidopsis thaliana columbia
aaacaaactcgtcggagaattcagtactcgccgaagaggaagaagaagaagatgtcttggcgatcatacgtcgatgatcgcgcgtgatgtgtgatgtcgaaggcaaccatctcaccgccgccgcaattctcggccaagacggcagtgtctgggctcagagcgccaaatttcctcagttgaagcctcaagaaatcgatggaatcaagaaggactttgaggagcccgggtttcttgccccaaccggactatttctcggtggcgaaaaatacatggttatccaaggtgaacaaggagctgtgatccgagggaagaagggacctggaggtgtcactatcaagaagacaaaccaagctttggtctttggcttctacgatgaaccaatgactggaggtcaatgcaact

SEQ ID NO: 155004 - DNA, 452 bp, Arabidopsis thaliana columbia
  unsure (1)..(452): unsure at all n locations
gaagttgatgcagaagcaataataacaaaacaaaaaaacattaaaaaaaaaagctcttcagttttggtttctgcagtctcgagtggctctcaagctctttctctttgctcttcttctctgtctcccgacttctctctcctccactgcctctaaaggtaaagagaagaagtcgaagtttaatccatacagatacacattcatcgataaagcaagcacattctcatcatcttcctcatcttcattttcatccaacggtcaagattcgtcctacgactacatagtcatcggaggtggaaccgcagggtgtcctctcgccgcaacgttgtcgcagaatttcagcgttcttgttttagagagaggtggcgttccgtttacaaacgcaaacgtttctttcctcaggaatnttcacatcggacttgctgacatttcagcttcttccccgtctcaagcgt

SEQ ID NO: 155005 - DNA, 444 bp, Arabidopsis thaliana columbia
ggcgaatatttatcggacgaaacagctggaaatctttcgacaatgttcgatgtaggaggtgtggttggtggaatcatggctggttacatttcagaccgaattggtgcaagagctattacggctgcgagtttcatgtactgctcaattccagctttgttcttctaccgtagctacggacatgtatcgttattagccaacgcgtctctcatgttcttgaccgggatgttggttaacggtccttacgctttgattacaacggcagtttcagctgatcttggaacacacagctcgttgaaaggaaactcgagagctttggctacggtaacggctattatcgatggaacgggatccgttggagcggcggtcggacccttactaacgggttacatatcgtcgaggggtagctggaccgcgggtttcacaatgttgatgggagctgcgttt

SEQ ID NO: 155006 - DNA, 379 bp, Arabidopsis thaliana columbia
  unsure (1)..(379): unsure at all n locations
ttcttctctaaactctcaacatgtcttgctcggccaccgatctcgctgtcctgttgggtcctaatgccacggcggcgggcaactacatctgtggccagttaggcgacgtcaacaacaaatttatcgacaccgctttcgctatagacaacacttaccttctcttctccgcctaccttgtcttctctatgcagcttggcttcgctatgctctgtgccggttccgtgagagccaagaatactatgaacatcatgcttaccaacgtccttgacgctgcagccggnggtctcttctattatctgtttggctacgcctttgcctttggatctccgtccaatggtttcatcggtaaacactactttggtctcaaagacatccccac

SEQ ID NO: 155007 - DNA, 321 bp, Arabidopsis thaliana columbia
ccttctccctaaacgatgaagattttcgtgaagactctcagtggttcgaacttcgagatcgaagtaaaacctgcagataaggtttctgatgttaaaacggctatagaaactgttaaaggtgcagaataccctgctgctaagcagatgctgatccaccaaggaaaggttctaaaggatgagaccacattggaagagaacaatgttgttgagaacagtttcattgttatcatgttgtccaagaccaaggcttctccaagtggggcatcaaccgcatctggaaccagcacctagtgctacacagccacagacagtagctacacc

SEQ ID NO: 155008 - DNA, 435 bp, Arabidopsis thaliana columbia
gtcaatgactctgtcaccaagagcaagtttgacaacttgtacggatgccgacactcgcttcccgatggtctcatgagggctgcgggtgttatgattgctggaaaggttgctgttatctgtggttatggtgatgtaggaaaaggttgtgctgcagcaatgaaaaccgcgggtgctcgtgtcatagtgactgagattgatccaatctgtgctctttaggctcttatggaaggtcttcaagttctgacccttgaggatgttgtctcagaagctgatatcttctgtaccactactggtaacaaagatattattatggttgatcacatgaggaagatgaagaacaatgccattgtctgtaacattggtcattttgacaatgaaatcgacatgcttggacttgagacctacccttgtgtgaaacgtattaccatcaaccac

SEQ ID NO: 155009 - DNA, 456 bp, Arabidopsis thaliana columbia
atcatttcttcttcttcttcctcactttgttcatcatcttcttctccgatctaaacaacagtggcgacaccaggagcttgctgagcaagagatgaattcgtatacatggcgaaactcgccgaacaagcagagcgttacgaagaaatggttgaattcatggagaaagtcgcgaaagctgttgacaaagacgaactcaccgtcgaagaacgtaatctcctctccgtcgcttacaaaaacgtcatcggagctcgtcgtgcttcgtggagaatcatttcatcgatcgaacaaaaggaggagtctcgcggtaacgatgaccacgtttcgttgatccgtgactacagaagcaaaatcgaaacggaactttctgatatctgtgacggaatccttaagcttctcgatacgattctcgttcccgctgctgcttctggagattcgaaggtgttttatctgaagatg

SEQ ID NO: 155010 - DNA, 374 bp, Arabidopsis thaliana columbia
agaagaacaggaagaagagaggtcacgtcagctccggacatggacgtatcggtaagcaccgtgagcatcccggaggtcgtggtggcgctggaagtatgcatcaccacaggatcctcttcgacaagtaccatccaggttacttcggtaaagttggtatgaggtatttccacaagctgaggaacaagttcttctgcccaatcgttaacctcgacaagctttggtcactcgtccctgaagatgtgaaggcgaaatcaaccaaggacaatgttccgttgatcgatgtgactcaacatggtttcttcaaggttttgggtaaaggtcatttgcctgagaacaaagccgtcgttgggaaagccaagcttatttcgaagact

SEQ ID NO: 155011 - DNA, 400 bp, Arabidopsis thaliana columbia
gctcaatttatgtggttagactatgataacccaacaaagcccatctacttatatataaattgacccgggacccagaatgaggagatggaaactgttggatcagaaacagaggcttatgccatagccgatactatttcttattgcaaatcagatgtatacactatcaattgtggcatggcttttggtcaagcagcaatgcttctttctctcgggaaaaaaggttatcgtgccgtacaaccacattcatcaacaaaattatatctgccaaaagtaaacagatcgagtggagctgccatagacatgtggataaaggccaaggaacttgatgcaaataccgagtactacatcgagctgttagctaatggaacagggaaatccaaagagccgatcaacgaggaca

SEQ ID NO: 155012 - DNA, 427 bp, Arabidopsis thaliana columbia
ccgtccggttaaaatggtttcgttgaagctccagaagcgtttcgcatcctcagtactcaagtgcggaaagagaaaagtatggctcgaccggagcgaaggaagtaatatcttcatggccaattcgcgtcaaaacatcaggaagcttgtgaaggatggattcatcatcaggaagccaacgaagatccactcacgatccagggcacgtcaattgaatatagccaagagaaagggacgtcactctggttatggtaagaggaagggtacccgagaggcaaggttgccaacaaaagttttgtggatgaggaggatgagagtgctgaggcgtctgttgaagaagtatagggagaccaagaagattgacagacatatgtaccatgacatgtacatgaaagtcaagggaaacgtcttcaaagacaagcgtgtgttg

SEQ ID NO: 155013 - DNA, 368 bp, Arabidopsis thaliana columbia
atctccttcactttctctctctcgataccgtttcgccgcagcttctcttcttctccctgcatctcaaaccatgttcatgcgagctcaatcctccaatcgtcggtctaactctaaccatctcggagtaatctacgagattgatatcgctgcggatcctcttgtcaataagttggaagatgctgtccaccggattatggtacgccgatccgcacctgattggctcccttttgtccccggtgcttccttttgggttccacctcctagatcccagtctcatgggatcgctaagctcgttgagaagctggccaatccgatctctgatgaagaatctatttcaatctcatcggttcgaggatggccttgctctg

SEQ ID NO: 155014 - DNA, 411 bp, Arabidopsis thaliana columbia
  unsure (1)..(411): unsure at all n locations
cgcgaagcgcgttgtcgtcgacgggcgacaccacatgcttggtcgtctagcttccaacactgcgaaggagttacttaacgggcaggaagtggttgttgtccgatgtgaagagatttgtctctcgggaggtttggttcgacaaaagatgaagtacatgagattccttaggaaacgtatgaacactaagccttctcatggtcctattcactttcgtgctccttccaagatcttctggcgcactgttcgcgggatgattccacacaagaccaagcgtggtgctgctgcacttgctcgcttgaaggttnttgagggaatcccacctccttacgacaagattaagagaatgggtattcctgatgctcttaaggttttgagacttcagagtggtcacaagtactgcttattgggacg

SEQ ID NO: 155015 - DNA, 149 bp, Arabidopsis thaliana columbia
  unsure (1)..(149): unsure at all n locations
cgtccggcgaagaacgaggcgtttaactgcaacaatgctgatatcttcaagtggaagcatctgtggaagaggctagctgagcagtgtncgatggaggagtatggatttgaggaagggaagaatttgggcgttggggagatgatgaaagg

SEQ ID NO: 155016 - DNA, 345 bp, Arabidopsis thaliana columbia
  unsure (1)..(345): unsure at all n locations
cggaanncccgggncgggccaagccgtccgttaagctccaagagctgaaggagaagatagcttgcggatcaactcaagaaatcaaagacaccatggcagttcttaaccaagaggggatgcaaattggccagtctctgtacaaccaaccccaaccaggtggtgctgattctcctcctggaggtgaagcttcctcgtcgtctgacacatcatcctcagccaaaggtggagacaacggcggtgatgtgattgacgctgacttcacagacagcaattaataccaattggattcattccagggataattaatggggtttgtccttgattttgtaggaatgataatgtgat

SEQ ID NO: 155017 - DNA, 452 bp, Arabidopsis thaliana columbia
gttgacgacgttagtggccactggcttagccatttcccagatacatacacttctttggtatgagctcaatatatcttgctgagcggtggaggtcagtttctctgctctggaaaggctggtgactaggtgtcccaatctcaagtctctcaagcttaaccgagctgttccacttgaaaaattggctactttacttcaaagagcacctcaattggaggaattgggcactggtgggtacactgcagaagtgcgaccagatgtttactctggtttatctgtagcgctctctgggtgcaaggaattgaggtgcttatctggattttgggatgctgttcctgcctatcttccagcagtttattcggtttgcagtcggcttacaactttgaatctgagttatgcaacagtccagagctatgatcttgtcaagcttctttgcaatgccctaaactgcaacg

SEQ ID NO: 155018 - DNA, 378 bp, Arabidopsis thaliana columbia
  unsure (1)..(378): unsure at all n locations
cgtccgatttttctcctctccttattgtctatatatttttcctctttagctttttcatttcnaaatggcgaccgttgaggttgaacaagtgactccagtagcagtagagaacgttgaggtaccaacaaagacagtggaggagacagtggtggagacagaggtgacccaacagccggaagaatccgtccccgccgtgacagaacaaaaatccgaagcaccaattgtagaaacaaacgaagaagtggttgtggaagaggcagagaagaaagatgaagaaaccgagaagaaaacagaggagaaagacgagaagacagaagtgatcacggaaacttcggtagttgaggaggaggagaagaaagctgaggaagtgaccgaaac

SEQ ID NO: 155019 - DNA, 427 bp, Arabidopsis thaliana columbia
ctttttccatcttctacgagaggcttcattaccggataacaacaggtctaaagaattgtgatggtatctcaattaggacgggtgaagaaatcgaaggtaaattctgcgactatatagagcgtcaataccagaggaaggttcttttgacaggtccaatgcttccagagccagataacagtagaccactcgaagatcgatggaatcactggctgaatcagttcaaacccggctcggtaatatattgtgcattgggaagtcaaatcactctagagaaggatcaattccaagaactctgtttaggaatggagctcactggtttaccgtttctcgtagcggtaaaaccaccaaaaggcgcaaagacgatccaagaagcgttgccagaaaggtttgaggagagggggaagaatcatggagtaagttgggggag

SEQ ID NO: 155020 - DNA, 387 bp, Arabidopsis thaliana columbia
ctttccgtgttccgtgaaggagtgaagtactgtgctggaatcggtccaggagtctacggcgtgcactctccaagaatacggggggtctgaggaaatcgcagacagggtcaacaagatgcttgctgtcctagagcagaacatcctttgggttaaccctgactgtggtctcaagacccgtaagtacaccgaggtcaagcctgcactcaagaacatggttgatgcggctaagctcatccgctcccagctcgccagtgcctagtgaagaaaagcttgatttgaacaaggaaacgttcttttttctctaaaatggttgtgttttatttggtttaataactctcttaaaaatatttttagtccaaggtagatttgatgcatatgggttctttc

SEQ ID NO: 155021 - DNA, 406 bp, Arabidopsis thaliana columbia
caatgttcttgtgagatcgaactttctctgtgttcgtgcagaagctttgcttttttgagtgtggcgtttaaggcacatgggaggagagagaccctaatttgatattttgagttctatcgatggcttcgctactagctcgcaggtcgttcagtgctctccgagctcgacatctcgctttttcagggcaaggtttacagggatctcatctctgtgggctacagtcccgtgctatatcttatggaagcaacaaagatgatgaaaaagctgagcagcttgctaaagagatctccaaggactggagtactgtctttgaacggagcatgaacaccctatttctcactgaaatggtcaagggtttgtcactgacccttaagtacttttttgatccaaaagttacaatcaatta

SEQ ID NO: 155022 - DNA, 378 bp, Arabidopsis thaliana columbia
cgccgtccttcaactgggacgcttccggtattacggatcagcagatggttgagttcattccgcggattgctaggctcggatattgttggcagttcataacgcttgcgggtttccatgcggatgctcttgtggttgatacatttgcaaaggattacgctaggcgcgggatgttggcttatgtggagaggatacaaagagaagagaggacccatggggttgacactttggctcaccagaaatggtccggtgctaattactatgatcgttatcttaagaccgtccaaggtggaatcttctccactgcagccatgggaaaaggtgtcactgaagaacagttcaaggagagttggacaaggccgggagctgatggaatgggtg

SEQ ID NO: 155023 - DNA, 262 bp, Arabidopsis thaliana columbia
cggacgcgtgggtgaatatcttcctgtaatctatcccagtgaaaagcaaaagcagaatgctgtgcgtctctcacagaagacgagtcatgcaattgcaacatctttgaatgtcgtccaaacatcccattcttttgcggacttgatgctactcaacaaagcaactgagttaaagctggagaacccctcaaattacatggttgaaatggcaagagttgagtcgctattccatgtaagcagcttagaggcaacgcgatttttggat

SEQ ID NO: 155024 - DNA, 445 bp, Arabidopsis thaliana columbia
cgatcttatcgcaggaggtaagagtaagaagaccaaaaggactgctcctaagtccgatgatgtctacctaaagcttctcgtcaagctgtaccggtttttggtgaggagatctaacagcaacttcaatgctgtgattctgaaaaggcttttcatgagcaaagtcaacaaagctcctctttcactctctaggcttgtagagttcatgactggcaaggatgacaagattgctgtgttggttggaactatcactgatgatttgagagttcatgagattcctgccatgaaggttactgccttgaggtttactgagagggctagggctagaattgagaaagctggtggagagtgcttaacctttgaccagcttgctctcagagctccattgggacagaacacagttcttcttagaggaccaaagaactcgcgtgaagcagtgaagcatttc

SEQ ID NO: 155025 - DNA, 85 bp, Arabidopsis thaliana columbia
taacattaaaagtctcttgaagaaagggaaaaacacatattgcaagcgtaaactgtaaggaatacagaccaatgaactaaaacca

SEQ ID NO: 155026 - DNA, 350 bp, Arabidopsis thaliana columbia
ccgggaataacgggtggaccacgcgtccgaaaatgcttctaaactaaagagacatcgtttccatgacgggatcacatttctttctatttctccaatttgtttgtttcaaattgttttcccctttgtcatttgtgcactatgtgagaaactttccggttacagcgtttggagagatgtctaaggaggagcaggtttgaaaacccgctctcgctcttacctgaggcactaatccgcgtttcaaactcagcttcattctctattcttgtccatttgtttgtttgtttgtagcctcttcaaactcggataaaaacaaaagtttttggactattgatatttgtactttatttgac

SEQ ID NO: 155027 - DNA, 395 bp, Arabidopsis thaliana columbia
  unsure (1)..(395): unsure at all n locations
gaacttttccggttccgttgtgtgaaactgatggttatgaagatgacgaagtagctgacctaattcaagaatcaatcaagcttgagtgagagttcnagcagaaagaaaaagaagcttctcctcctatttctcaaacattgtcagaagggtcaacctcaaaattcaaccttgtctaaggaaatggattcactcaaacccaaaaaacaacaggaggtggttgagagcaagcgtaagggttcaaagaatatgttcaaatcagagaaagagtttttggaatttatgctcaagtatcagcaagtcctttctgaaagagattctgctattactgttcgtgacaagcttgaatcactttgttgagagttacaacgtcagaacaaaatgttaatggaagaatg

SEQ ID NO: 155028 - DNA, 395 bp, Arabidopsis thaliana columbia
  unsure (1)..(395): unsure at all n locations
gcgacgcgtgcgtaccaccacttcctctacctatctaattccgaatctggatttggatttggatctcatttcggttcgacgattaaggtgggtggggagatcaaatccgtgacggagcaaggccaaacagctttctccttcgagtttttcccaccgaagacagaagatggcgtcgagaatctctttgaacgaatggatcgattggtctcttatggacctaccttctgcgatatcacttggggtgctggtggatccacagctgatctcactctcgagnatgcttctaggatgcagaatgttatctgcgtcgagactatgatgcatcttacttgtaccaacatgccgattgagaagattgatcacgcgcttgagacgattagatctaatggaattca

SEQ ID NO: 155029 - DNA, 446 bp, Arabidopsis thaliana columbia
ggaatcaccggcgtgatcccggccgatttcttatcgttgaagatgttgagcagagttttactgggccgtaacgaactagccgggtcaattccagagtcgatctcgggtatggaacggttagcggatctggatctatccaaaaaccatatcgaaggtccgatacccgaatggatgggtaacatgaaggtactctcacttttgaatctcgattgcaattcgttaaccggtccaatccccggttcgcttcttagcaattccggtttagatgttgccaatttgagccgaaatgcgttggaaggaactatacccgacgttttcgggtcaaaaacgtatttagtttcgcttgatctgtcacacaatagtctatcgggtcggatcccggattcgttgtcgtcagctaaggttgtgggacattttggatattaaccataacaagctttgtgggc

SEQ ID NO: 155030 - DNA, 442 bp, Arabidopsis thaliana columbia
cttctcttagcctaccctttttccttcctcctctccgattcttcctccgtcagtaaaagaagagtcaaaatggcttcacacgtgggtggatacccacgtatgggccctaagagagagctcaagtttgcattggaatctttctgggatggtaagagcactgctgaggatcttcagaaggtgtctgctgatctcaggtcatccatctggaaacagatgtctgccgctgggactaagttcatccctagcaacacctttgctcactacgaccaggttcttgacaccaccgccatgctcggtgctgttccacctaggtatggatacactggtggtgagatcggccttgatgtttacttctccatggctagaggaaatgcctctgtgcctgccatggaaatgaccaagtggttcgacaccaactaccattacatcgtccctgagttgg

SEQ ID NO: 155031 - DNA, 340 bp, Arabidopsis thaliana columbia
agagaggcggccatgggaggaggaatgggtgcgttttggggaactcgagtgatggaattagtgaagaagcacgattccggtggtcttctttggaagcggatcaagctaacccctactcgtaaagccaatgccaaaacccgcctccgtcgtgtttggcagaatgaggctgttctaagggcgtgtggtgaatcagatgcaccaaattcgccgggagctagcaacacaaaaagctctagcaatgcggtgaaaaatgcgtaaggccgaaaagaagctagtcctagtttgtgaggactcgtagatcaagtctctgtcgttacctgattttacaaaaataatattt

SEQ ID NO: 155032 - DNA, 295 bp, Arabidopsis thaliana columbia
agagaagcaaaagaaaaaaaagctattgtttgaaagaagaagaagttaactatggcaaaggatgtggaagccgttcccggagaaggatttcagacaagagactatcaagatccgccaccagctccgtttattgatggagcggagctaaagaagtggtctttctacagagcagttatcgcagagttcgtagccactctcctcttcttatacatcaccgttttgacagtcatcggttacaagattcagtccgatactgatgccggaggcgtagatcgcggcggagttggaatcctcg

SEQ ID NO: 155033 - DNA, 394 bp, Arabidopsis thaliana columbia
ctgagataaggaaagaagaagaggaagaagaaaatggcgaatcttaactcagctattgattcagtgttttgggatcagaacgtttcttcacctcaaacccttgaaggcactgctcgctctgttcccggtgagccatttcccttagacggagcacgagcaagccgctctcaccggattcaacagctctctctgcttcgcgaaggctttcctcttggaatcattccttctttggctcctgcttctgacaagagactcggctctttctctctcaattctctcttgctcagtccttcctctaacaactggtggttaggtttagttgggcagttcaaaccaaagaagctctttgctgatatcaaagcagatattagcaatgcaaaagagtgggaattgc

SEQ ID NO: 155034 - DNA, 439 bp, Arabidopsis thaliana columbia
agccgcgcgacccgagagatcttaacacaaaacagagcaaacaccaaaaaaaacagagatgggtttggctacagatgaagtgagagctagggcagagaaatacacaggagatgagatatgccgtgagaagacaaaggagtttctcaaggaagtttctatgcctaatggtttattgccattgaaggacattgaagaagttggttacgacagagagacaggtattgtctggctgaagcagaagaagagcatcacccacaagtttgaagccattggtaaacttgtcttttacgccaccgaggtcattgcacaggtggaggtcggaaagatcaagaagcttaccggtgttaaggccaaggagcttcttatttgggtcactctcaatgagcttgtcttggagcagtcgacaggttcaaggaagatcaatttcaggacaccaact

SEQ ID NO: 155035 - DNA, 454 bp, Arabidopsis thaliana columbia
cgcctgccggacccgtacggactggccggaccgacccacgcgtacggatcgaagagacaaactctcttccattaggttgggaagtgaatgttgatctcaaactctttgtccataatgggaagctacacaaatatttgactgttacagatggcttagtgaagcgatataacaatgcgaaaaaagaatggggtttcggacaattgattcctcgatcaacattctacaacgcgaacgaaggttaccttgaccaggacactggttcttttggtgctgagatctttattgttaaaccggctcaacaacaagagaaagttacattcatatcaaaccctccaaacaatgttttcacttggaagatacttcgtttctctaccttggaagataaattctattactccgatgattttctcgttgaagaccgatactggagactaggatttaacccgaaagggga

SEQ ID NO: 155036 - DNA, 457 bp, Arabidopsis thaliana columbia
cgatgaagctctttgttcatctctctatcttcttctccatcctcttcatcactctcccatcttcttacagctgcaccgaaaatgacaagaatgccctccttcaaatcaagaaagcacttggcaatcctccccttctatcctcctggaacccccgaaccgactgttgtaccggctggaccggcgtcgaatgcactaaccgtcgcgttaccggtctcagcgttacctccggcgaagtctccggtcagatctcgtaccagatcggcgacctcgttgacctccgtacactagatttcagctatctgccacacctcaccggaaacatcccacgcaccatcaccaaactcaagaacctcaacactctctacttgaagcacactagtctctccggtccgattcctgattacatcagcgagctcaagagcctcacgttcttggacctttcttttaaccaatttac

SEQ ID NO: 155037 - DNA, 462 bp, Arabidopsis thaliana columbia
catagctcctaacaaagcaatatcatttccaatttataaaagttaaagccatggctgcatctttctctgtcccctctatgataatggaagaagaagggagattcgaagcggaggttgcggaagtgcagacttggtggagctcagagaggttcaagctaacaaggcgcccttacactgcccgtgacgtggtggctctacgtggccatctcaagcaaggctatgcttcgaacgagatggctaagaagctgtggagaacgctcaaaagccatcaagccaacggtacggcctctcgcaccttcggagcgttggaccctgttcaggtgaccatgatggctaaacatttggacaccatctatgtctctggttggcagtgctcgtccactcacacatccactaatgagcctggtcctgatcttgctgattatccgtacgacaccgttcctaacaaggttgaacacctct

SEQ ID NO: 155038 - DNA, 465 bp, Arabidopsis thaliana columbia
gaagaagaagagagtgagaaacaatggcgtcgacgactctctcaatcgcaacaacaatccgttcctcttctcctctcacttccgcttccactcatcacttcctttccaaacccaccgcaatcgaattcccatttcgtctcagctcttcttctagccaccgtgcaatcaacctccgtcctatctccgccgtcgaagctccggagaaaatcgagaaaatcggatccgaaatctcctccttaaccctcgaagaagctcgtatcctcgtcgactatctccaagacaaattcggtgtctccccactctccttagcccccgcagcagcggccgttgcagctccagccgacggtggcgcggcggctgtagtggaggagcaaacagagttcgatgtggttatcaatgaagttccgagtagttctcgtattgcagtaattaaagctgttagggctttgactagcttggcgttga

SEQ ID NO: 155039 - DNA, 453 bp, Arabidopsis thaliana columbia
ggaaaagtgaaacattggatcactttcaatgagccatgggttttctcgcacgctggctatgacgtaggcaaaaaggcacctggtcgttgctcttcttacgtcaatgctaaatgccaagacggacgatcaggatacgaggcttaccttgtcactcacaatctccttatctctcacgcagaagcagttgaagcttaccggaaatgcgaaaagtgtaaaggtgggaagatcggaattgcacatagtcctgcttggttcgaagcacatgaccttgctgattcacaagacggtgcgtccatcgaccgtgcacttgactttattttgggatggcatctagacacaactacatttggggattattcacagatcatgaaagacattgttggacatagattgcctaaatttacaactgagcagaaagcaaaactgaaagcttctaccgatttcgttgggctc

SEQ ID NO: 155040 - DNA, 383 bp, Arabidopsis thaliana columbia
gcgatgatgaatcttagggttttgttcctcgctctccttctccttgcatctcctctgcttcaagttgctagatgtcaatcggatgccgaggatcattcaagtcttgttgacgatgttgtgggagaaaacactgatgatgcggttgaggaagatgaccatgatttggatatgaacttgtcctcatttccaggagttgagactgtttgtgttttccccaaaaacagtgccaaattggttccagctggagaagagactgagctccttgttggtcttaaaaatgaagggaaaactagagtaggtgtgatgggaattagggccagcgttcatcttccttatgatcataagttgttggttcagaatctaaccatgttgagacttaacaa

SEQ ID NO: 155041 - DNA, 379 bp, Arabidopsis thaliana columbia
  unsure (1)..(379): unsure at all n locations
ctcgcatctccaaatcgaaatcgctctctgcctctcttcgtctccgtctccgtctccgtctccatctctgtctccggtaaggcactgaaagatggggcgtgttagaaccaagacggtgaagaaatcttcacgtcaagtcattgagaagtactactctcgcatgactcttgactttcacactaacaagaagatccttgaagaggttgccatcatcccatcaaagagactccgcaacaagattgctggattctccacccacttgatgaaacgtatccagaagggaccagtccgtggaatctcactcaagcttcaagaagaagagcgtgaacgccgtatggactntgttcccgatgagtctgctatcaagactgatgagatc

SEQ ID NO: 155042 - DNA, 298 bp, Arabidopsis thaliana columbia
ggcagtgcgtaccaccagttgagtccggtggaagctcgaagttatagatgggtccgagtgaaccatatggtctacgattattgcactgacaaatctcgttttcctgttccacctccagaatgctcggctggaatctgatccaaacattattgtcttaaaagcaaaacaagtgcgaagtggttccataagcaacgttgcaatgtatgtgaagtgattaatgagtcttgtggtatgtggtgaattgctcataatcgatctgattgtggtcaaatgttcatatatatatgtatatctttga

SEQ ID NO: 155043 - DNA, 479 bp, Arabidopsis thaliana columbia
  unsure (1)..(479): unsure at all n locations
cgtccccgctaatanngaagcaccgaaccggcngnntcgggttatgtctcgacccggaggaaccccatgtnncctcgtcttcgttgctgtctcttccggtggtctagctgtgagtcgttctnntcgtttattcgcttcccatttctaagcncnnttctctttcgtaccgnagaattcccanngtaangaccaaatcacnntgttacccgnatttctgtaatgggtttcgaggaaagcccttcaaaacccccgtcaagtgccacccgtnntgattcttcaatatgnngaggcaatgttctccacccgttccctcggacccgagagtttgggaccccgtaccaaaccgtctaggagtttagtccatatgcctttcgaggaaagaaatctgggccctctcgtaactttcttttacagcagtacgctggacatgaaagaagcgaagagtctatagaaggagcctttgagaagcttctcatgtc

SEQ ID NO: 155044 - DNA, 539 bp, Arabidopsis thaliana columbia
  unsure (1)..(539): unsure at all n locations
ccgtccgctaacgaccctctcaaagtanatgagttttggttatgctaagaacaaacnatcaagtggaaggggtcttcatgcgatagaacaactatgaggagtgtacggtgcgaagctngnngttcctcacnnaagctcnntagagaacccagaagtaccaaannggatatgannaccatgannaactctcggcctaccacttctttaaaccgacctggtctctcagaaccgacgtnnggatggtcngnntgatatgcactcgatggatcaaaccaaaaactctctctgaatagaacccaaaacaaggagtacctaatcatgaagnaacaacanaaaccctcatgatcaattaccctatagaaaagctagggtttccgttagagctagatctgatgccactacggtaaatgacggatgtcaatggagaaaatacggtcagaaaatggcgaaagggaatccatgtcctcgcgcttattatcgttgcaccattggccgtggatgtcctgtccgtaaacaggtccaacgatgcgcggaggata

SEQ ID NO: 155045 - DNA, 419 bp, Arabidopsis thaliana columbia
aaagcagctgagcgacttttgcacatttctagggttccaatcaaaatctatctgcaacaaaaatggctaatcgtttcagatcagggatctccttcttcaagaccatcgccgtaacagattctgtctcctccgttagatccaagtcgcttttcccagcgttgagaacttatgcaactgcttctgctcaaacaaccgctaatgttaaggtgcctattgctttagttggtgaaaatgggaactttgcttcatggctatacattgcagctgtgaaaatgaattccttggaaaagattgagacggatctttctgagatgattgaggcaatgaagacagctcctatttttgctcagtttacaaaggatccctctgttcctagagggacaagattggctgctattagggatgcttgtgatcaagca

SEQ ID NO: 155046 - DNA, 331 bp, Arabidopsis thaliana columbia
gagacctcaaagttcctgatttcgggaagatgatcgtcactgctagtaacgatctaaacgaagagacagtcgatgctctaaataaacagggtcatgaagtagatgcatttggaattggaaccaacttagtgacttgctatgcgcaagctgcgttaggttgtgttttcaaacttgtggaaataaacaatcagcctcggatcaaactttctgaagatgttactaaggtatcgattccatgtaaaaagcgtacttacagattgttcggaaaagagggttaccctcttgttgatataatgactggagagaacgaaccacctccaaaggtcggtga

SEQ ID NO: 155047 - DNA, 457 bp, Arabidopsis thaliana columbia
aagatatccagagaggtgcaataacgataacggcgatgtggccgttgatttcttccatcgttataaggaagatatccaactaatgaagaatctaaacacagacgcctttagaatgtctatcgcatggccaagaatatttcctcatgggagaaaggagaaaggagtgagtcaagctggtgtgcaattctaccacgacctcatcgacgagctcataaaaaatggtataactccattcgttactgtttttcactgggacactccacaagatttagaagatgaatatggcggctttttaagcgaaaggattgtgaaggatttccgagagtatgcagattttgttttccaagaatacggtggaaaagtgaaaccatggatcactttcaatgagccatgggttttctcgcacgctggctatgacgtaggcaaaaaggcacctggtcgttgctctttttacgtc

SEQ ID NO: 155048 - DNA, 444 bp, Arabidopsis thaliana columbia
ctctctctctctctttcatcttcaaactctacaaacccagaaaccaccacacagtaattaatgtctctttctttcttcccatgtggtctttaacagacttttcttcttattctccatctctgaagttgtggggattcatcaagacttccttatctgtttcttttataaaacaagagagagataccacttttggtgttctttatttgcaactctttcaggttaaagaaatcgataggctctgttcttgattgtggtggaagagacatgatgatgtttaacgagatgggaatgtatggaaacatggatttcttctcttcctccacatctctcgatgtgtgtccattaccacaagctgaacaagaacctgtagttgaagatgtcgactacaccgatgatgagatggatgtggatgagcttcgaaagaggatgtggagagccaaaatg

SEQ ID NO: 155049 - DNA, 349 bp, Arabidopsis thaliana columbia
ctcgacggcaactgggttttgctgtacactgctttctctgagttgattcctctactagctgcgggttcgacacctttggtgaaagttaaaagcataagtcagtcaatagacacaaacaatctcattatcgacaactccactacactctccagcccttttgcagacttctccttcagtgctactgcttcatttgaagttcgaagcccttcaagaattgaggtttctttcaaagaaggcacgctaaaacccccggtgatcaaatcaagtgtagatctcccagagagtgtgggcgtctttgggcagcaaattagcctttcgttgttaaagcagtctttgaaccccttacaag

SEQ ID NO: 155050 - DNA, 395 bp, Arabidopsis thaliana columbia
ttgaaaaccataacgttaactcaatatatcaaaagccaaaaacaaagggcttgcagtaaaacatcggtctacaaactcccatcacctcacatgaatgagaattaagaaaaccaaaaaaaaaaaagttccaagttcaaagaaattttattcgaaaacgacaaattcagaccataaaaggggatgaacagatgactttccactccctatcattcgagatctgcttcttagcttaggcctttgacatgtggacgatcaagtcgaccacacgggaactgtaaccccattcgttgtcgtaccatgacaccaatttcacaaacttgtcgctcaatgcaattccagccttggcgtcaaaaatgctcgacctgtttgcgccaacgaagtcagttgagacaaca

SEQ ID NO: 155051 - DNA, 438 bp, Arabidopsis thaliana columbia
gaaggtcagaacgatatcttctatatcactggtgagagcaagaaggctgttgagaactctccattccttgagaagctcaagaagaagggtattgaagttctctacatggttgacgctatcgatgagtatgctattggtcagctcaaggaattcgaaggaaagaagcttgtctctgcaaccaaggaaggtctgaaactggatgagactgaagacgagaagaagaagaaagaagagctcaaggagaagtttgagggactctgcaaagtgatcaaggacgttttgggagacaaggttgagaaggttatcgtctctgaccgtgttgtggactcaccctgctgtcttgtaacaggcgagtatggctggactgcaaacatggagaggatcatgaaagctcaagccttgagagacagcagcatgggtggctacatgtcgagcaag

SEQ ID NO: 155052 - DNA, 418 bp, Arabidopsis thaliana columbia
ccgtcctttcgcagaaaccatttggagttggagctttggacgacgacaatggccccgaagaaaggagtgaaggtagctgctaggaagaacaccgcggagaaagtttcaaaccctctattcgagaggaggcctaagcaattcggtattggtggagctttacctcctaagaaggatctctctcgctacatcaaatggcccaaatccatccgtcttcaaaggcaaaagaggaccctgaagcataggttgaaggttccttcagctcttaaccaattcaccaagactcttgacaagaatcttgctaccagcctctacaaggtccttctgaagtacaggccataagacaaagctgccaagaaggagcgtcttgtaaagaaagaccaagcttgaagcttaggggaaagccttctgaggtttaaca

SEQ ID NO: 155053 - DNA, 409 bp, Arabidopsis thaliana columbia
gtaagtaagctaagaaagtattggccgatgacggatatcgtactagtgggacctgcgaaagagccggaaaaggagaagaaggaggagccgaagaaggaaggtggtggcgagccgccaaagaaagaaggagaagctccaaaagaagaagggaaaaaggaaggagaagcaccgaagaaggaagaagagaagaaagaaggtggcgataagaaggaaggagagaagaaagatcaaccacaagcgcagccgcaaccagttgtgccgccacctgatcatgtgttggaacttgtaaaggcgtataaagcatataatcctcacctaacaacgtattactacgcccaaagcatcgaaaaaaaccctaatgcttgcgttatatgttgaatatttatatgtgatatatttgggaaaagat

SEQ ID NO: 155054 - DNA, 446 bp, Arabidopsis thaliana columbia
gcttcggctactttctctgtggccaaaccatctcttcagggtttttctgagttctcaggacttcgaaactcctctgctcttccctttgccaagagatcttcttccgatgagtttgtttccttcgtcagtttccaaacttctgcaatgagaagcaatggtggatacaggaaaggggtgaccgaggccaagataaaggtagccatcaatgggttcggtaggattggtaggaacttcttgaggtgttggcatggtcgtaaggactctcctcttgatgtcgttgtcattaacgacactggtggtgttaaacaagcatcacatcttctcaaatacgactcaactcttggaatctttgacgctgatgtcaaaccttcaggagactcagctctctctgttgatggaaagatcatcaaggatggatctgatcgaacccatctaatcttcccttg

SEQ ID NO: 155055 - DNA, 450 bp, Arabidopsis thaliana columbia
caattttgttatttttgttctctcttctctctcgttcatgtttcaaatctgtttctagggtttcacaaaccagagatagagagaggtttagcgaaaaatggcgatggccatggctcttcgaaggctttcttcttcaattgacaaacccattcgtcctcttattcgatccacttcatgttacatgtcttctttgcccagtgaagctgttgatgagaaggaaagatctcgtgtcacttggccaaaacagcttaacgcacctttagaggaggttgatcctgagattgctgacattattgagcatgagaaagctagacaatggaagggacttgaacttattccatctgagaacttcacatctgtgtcggggatgcaagctgttgggtctgtcatgactaacaaatacaagtgaaggctatcctggtgccagatactattggaggaaatgagtat

SEQ ID NO: 155056 - DNA, 443 bp, Arabidopsis thaliana columbia
cacggcttaagatagcatatggtgcagcacaaggtttagcttatctacaccatgactgtagtccaaggatcattcacagagacgtgaagtcgtccaacattctcttggacaaagacttagaggctcgtttgacagattttggaatagcgaaaagcttgtgtgtgtcaaagtcacatacttcaacttacgtgatgggcacgataggttacatagaccccgagtatgctcgcacttcacggctcactgagaaatccgatgtctacagttatggaatagtccttcttgagttgttaacccgaaggaaagctcgtgatgacgaatccaatctccaccatctgataatgtcaaagacggggaacaatgaagtgatgggaatggcagatccagacatcacatcgacgtgtaaagatctcggtgtggtgaagaaagttttcaactggcac

SEQ ID NO: 155057 - DNA, 379 bp, Arabidopsis thaliana columbia
cggacgcgtggggtttcgctatctcttaaacacaaacagctctgtccgaataatctctcttcaagtacctcttttttctgagggtgtatatcgccatgaattactgatttccctctctataaacccatcaaagtaaaccaatttctcctgtgacttgtacctaactcgatcttaccagactggtgatggcgtctttgaaccctttcgatcttctaggagatgatgctgaggatccaagccagctcgctgtggctttgtctcagaaagtcgagaaagctgctgctgctgttcagcctcctaaggccgctaagttcccaaccaagccggctcctccttctcaagcagtgagggagtcgaggaatgctccttaaggaggtcg

SEQ ID NO: 155058 - DNA, 434 bp, Arabidopsis thaliana columbia
ttcactttctcgatacgaaaattgcttcctttcatcccaattttcaaaacccttgttcctaaaccaatctcagaacaaacccagattctcaatttcattttgtctcaagcaaagtaatcatgacgagaggcaaattcaacaagactctgccaaagaagaagaagaagaagaagaagagtattgggttgttacagcagtaagaagcagatacaatgagattgttatagtggatactgcttcttccagatatcttctccttgattcaactaagaatgtgcatagtgttatcaataaaggaggccaaaattggactggatcttattgggatgagtttgcgagtttgccgcctattatccctaatggtcccgttgcaatctacggcttgggtggtggaacagctgcaagattgatgcttgagttgtggcctacaatgc

SEQ ID NO: 155059 - DNA, 443 bp, Arabidopsis thaliana columbia
cgctaacattctctctctcagtgaacctttagaagttaaatctgtttcatcaccggaaagtttcactaactcttcttctctctctcggagtattgattcccggcgtttagcaatggaagaaagtagacaactcgaatcgtcgattgatcggctgctgaacgaagagaaacagatgaggctcgcagaaaatgtcgccggaactagaaaagcagctaccgagattcttaagctttgtttcgaagctaaggattggaaacttctcaacgaacagattttgaatctctcgaagaaacgtggtcagcttaagcaggctgtacaatccatggtgcaacaagcaatgcagtatattgatcagacactagacatagaaactcggattgagcttattaagactctaaacaatgtagctgctggaaagatatatgtcgaaatcgagagagctc

SEQ ID NO: 155060 - DNA, 394 bp, Arabidopsis thaliana columbia
cctcaacgatggtccacctaaagaaacttacgtagtcgatgacgctggtgttcttagtcgagtgacgaagtcagatcttaagaagcttttgtctgatcttgaatacagaaagaaactgagactcaatttcatcactgtccgaaagctcaccagtaaagcagatgcgtttgagtatgcagaccaggttttggaaaaatggtatccttctattgaagaaggtaacaataagggtattgttgttttgataacaagtcagaaggaaggagctattactggtggtcctgcttttattgaagctgttggtgaaaacattcttgatgctaccgtctccgaaaatcttcccgtactagcaacggacgaaaaatacaacgaggcggtatatagcagtgcgaaa

SEQ ID NO: 155061 - DNA, 456 bp, Arabidopsis thaliana columbia
aaagaattcatcaaaggagagagagatcgactatggcaccttcgtcatcaagcggtttaacgttcaagctacatcctttggtgatcgtcaacatatcggatcactacactagggtcaaaactcagctcaatcctcctgcttcaatctgcgcaagcggccatggctcaaacaacggcgaagcaatgttccagcaaaaccctagggtttacggatgtgtgatcggtgtccagagaggtcgtactgttgagatattcaacagtttcgagcttttatatgatccttctactcaaacccttgatagatctttcctcgagaagaagcaagagctctataagaaggtgttccctgatttctatattctgggatggtactctacgggaagtgatgctgaggaatctgatatgcatatccataaagctttgatggatatcaatgaatcttctgtttatgtgcttt

SEQ ID NO: 155062 - DNA, 462 bp, Arabidopsis thaliana columbia
ctgcaaccgagtcagaacgggaatgcatagctagtatatcttcaggaaacagaggaatggctgtatgaagatggtgatgatgaatctgaaaatgcgtacatcgagaagttgaatgatgtcaaaaagctcatcgatcctattgaaaaccggttcaaagatggagaagagcgagttcaagcatcaaaagatcttctgaaaactattgcagataaccgaatggctgcagagtctcttcctcctccaagaaagaatgcggttctcgatgaatgccataaagctgagaggtggctccacgagaaaaccacagaacaggaatctttacccaaagacgctaatccagagctgcaatctgctgaaatcaggagaaaagctgatgctctaaacgcgacatgcaagtacattgggaaatcaaactctccccccgcgaaaccggaacataacggatcatacggaagtagaaaa

SEQ ID NO: 155063 - DNA, 343 bp, Arabidopsis thaliana columbia
  unsure (1)..(343): unsure at all n locations
cgtncgacacgctttaatgactctcacgttttcctcctctttcgcaaccgttgccgttgctgctgcaaccggaacctcctccgctgtgggtgcggtttatccactcgcttcgtcgactcttcgtggattagtatctttcagattaaccgcgaagaagctgtttctgccgcctcttcgttctcgcggcggcgttagtgtgagagccatgtctgagcttgttcaggataaagaatcgtccgtcgcggcgagcattgctttcaatgaagccgccggtgagacgcccagtgagcttaaacattcccgtactttcttggatgcgcgaagtgaacaagatcttttatct

SEQ ID NO: 155064 - DNA, 467 bp, Arabidopsis thaliana columbia
cggacgcgtgggttaggtttttaagtcgcacctctctctctcactgccgcatcttttcttagggggcttgtttcgctatctgtgtagagcacaaacagctctgtccgaataatctctcttcaagtacctcttttttctgattctgtatatcgccatgaattactgatttccctctctataaacccatcaaagtaaaccaatttctcctgtgacttgtacctaactcgatcttaccagactggtgatggcgtctttgaaccctttcgatcttctaggagatgatgctgaggatccaagccagctcgctgtggctttgtctcagaaagtcgagaaagctgctgctgctgttcagccttctaaggccgctaagttcccaaccaagccggctcctccttcttaagcagtgagggagtcgaggaatgcttctcaagaggtcgtggtgggacctgtggacgtggtggattttc

SEQ ID NO: 155065 - DNA, 447 bp, Arabidopsis thaliana columbia
accgggcgtccggcttcatcttcttcttcttcaacaaatcgagtcctttttctgataactcatttcgatttcagaagctcgccaagaactgggtgctgtggcggaatcagagattaagaaccgagacgtggttctgaaactgtatgaagccctgagatctcgcgacgtcaaatctgtgcaccagatcttaaccccagatctggattattggttccacggtcctccgccgcaccagtttttgatgcgcgtactcaccggaggtgtctctccgtcttcttcctccttcgaattcgtacctctctccgtcgtttccttcggatctaccgtaatcgcggaaggctgcgacgccgcgacatcgatttcttggatccacgcttggactgtagcgaatgggataatcacacaggtgagggagtactctaacacttctttcaccgtaacacggat

SEQ ID NO: 155066 - DNA, 455 bp, Arabidopsis thaliana columbia
gtgaaactgatcatcaaagaggtgtaaatcaaaagaagaagattgtggatgctaagcttgcaaaggactttcaagctgtgttgaaagagtttcaaaaggctcagcgtcttgctgctgaaagagaaaccgtatatgctcctcttgtccacaagccatctcttccctcaagctacacatccagtgagatagatgtgaatggagataagcatccagagcagcgtgcccttcttgtggaatcaaaaagacaagaacttgtactgttggacaatgagattgcgttcaatgaggctgttattgaggaaagagagcaagggatacaagaaattcagcagcaaattggcgaggtgcacgagatcttcaaagacttggcagtgttggtgcacgatcaaggaaacatgatagatgatattggtactcacatcgataacttttacccttcaactgcccaaggaaaa

SEQ ID NO: 155067 - DNA, 405 bp, Arabidopsis thaliana columbia
aaaataattgtaccgactttctctctctctttttccgtaacaaaaaaatcaccaatggcgagacaatatctctgggtgcggcggtcaatctcctatctcttatcactggagctcacggcggccaccgcagcctcacagaccggagcttccaaaaaagccataaacttcatccaatcttcttgcaaaaccaccacataccctgccttatgtgtccactcactctccgtctacgcaaacgacatccaaacaagccctaaacgtttagctgagaccgctatagccgtgacactaagccgagcccaatccacgaagctcttcgtctcgcgtctaacacgtatgaagggtcttaagaagcgcgaggtcgaagccatcaaagattgcgtcgaggagatgaacgataccgtt

SEQ ID NO: 155068 - DNA, 358 bp, Arabidopsis thaliana columbia
attctttcgcgtcttttgcttcctccctctttttcgccaatgttttctttagatctagctgatatggcgacgattttgggggtctcgcttctaatcaccgtagagatcctcccgatctgcaaatccgatccgaattctcaacgaatttgtagatctgatctgtgattccatcgttgacgacggatcttcgcttacatcgtttgatctgtcgcagatctgccgttttctatagatctagatctggatcgtccttcgcggcttcttcacatgcaagattctgtgaattgttcaagttgaggcatcatttctggattactaggagacgaatctggtgcaaaccgatgtgagtgtggtggat

SEQ ID NO: 155069 - DNA, 448 bp, Arabidopsis thaliana columbia
cttagaaagaaaagaacttaaatcaaaatacttaatagcatggcgatacatttatacaaaacttctaccccgagcacacgcaatggagccgtagacagtcaagtgaaatccaatccacgaaataatttgatctgtgggcagcatcattgtggtaaaggtcgtaatgccagaggaataattaccgcaaggcatagagggggaggtcataagcgtctataccgtaaaatagattttcgacgaaatgcaaaagacatatatggtagaatcgtaaccatagaatacgaccctaatcgaaatgcatacatttgtctcatacactatggggatggtgagaagagatatattttacatcccagaggggctataattggagataccattgtttctggtacagaagttcctataaaaatgggaaatgccctaaccttgaccgatatgccctaggcac

SEQ ID NO: 155070 - DNA, 309 bp, Arabidopsis thaliana columbia
ttctcttcttttccccaaaaaaaaatgtttgtagttgagtaccggtgctttgtcggcgggcttgcctgggccaccgatgaggaagatcttcaaaggacgttctcacagttcggcgacgttatcgattctaagatcattaacgaccgcgagagtggaagatcaaggggattcggattcgtcaccttcaaggacgagaaagccatgagggatgcgattgaagagatgaacggtaaagagctcgatggacgtgtcatcaccgtgaacgaggctcactctagaggtatcggcggtggcggatgaggccgtggt

SEQ ID NO: 155071 - DNA, 465 bp, Arabidopsis thaliana columbia
  unsure (1)..(465): unsure at all n locations
ctcttagcaaaccgggagattgaagaaggtagtgagattggaatgatgagttcgaatttatggaaagaggagatggagtgtttggattggcttgatactaagactcaaaatagtgtcatttatatcaactttgggagcataacggttttgagtgtgaagcagcttgtggagtttgcttggggtttggcgggaagtgggaaagagtttttatgggtgatccggccagatttagtagcgggagaggaggctatggttccgccggactttttaatggagactaaagaccgcagtatgctagcgagttggtgtcctcaagagaaagtactntctcatcctgctattggagggtttttgacgcattgcgggtggaacctcatattggaaagtctttcgtgtggagttccgatggtgtggtggccattttttgctgaccagcatatgaaattgtagttttgttgtgactag

SEQ ID NO: 155072 - DNA, 456 bp, Arabidopsis thaliana columbia
gaaatttatctctcggtcgatccagtcttcgtgagtgacttcgacgacgacgacgagtcacactactcttgagcttctcatacttcacccaggttgatttgggaaataatggatgaatctctggagcatcaaactcaaacacatgaccaagagagcgaaatagttactgaaggaagtgccgttgtgcatagtgagccatctcaagagggtaatgttcctcctaaagttgatagtgaagctgaggtcttggatgagaaagtcagtaagcagattataaaggaaggtcacggttccaaaccatccaagtactctacatgctttttgcactacagggcatggaccaaaaactcgcagcacaaatttgaggatacatggcatgagcagcaacctattgaattggtcttggaaaagagaaaaagaactagccggtttagccatccgtgttgctagcatgaa

SEQ ID NO: 155073 - DNA, 399 bp, Arabidopsis thaliana columbia
  unsure (1)..(399): unsure at all n locations
atttttgttttgtcggacaaaaaataaaatgaagagcaacacaaacactaatctgattctcttccaccaccactctccagtgagctgcaaaatcaccctccgccgtcgccgccgcgaatcaccaccgtttcttattcatcttcttcctctctttcttcactctcctcttctctttctctctcttctcctcctcaatccactccaccacatcctctcactctctctcctcatctccctcctgctcctctcttccaccaccagtcctcgccgcacttctccactacactttctcatcaccaccaaacacatctatgtcctttcttgaactcttcaccatctncaacatcattcactctcatggcccagcttgtaacctcttaatctttggactaactcacg

SEQ ID NO: 155074 - DNA, 321 bp, Arabidopsis thaliana columbia
ggagtttgtagtggtggtggctgaagccgttcattttgttatgcggcaacacctcaaccaccgggctccacctactacggctgtgctccgccagggtcttctcccttataccgcttcttacccttctccattcctatttggatttctcccttgaatacctttttcttgttatgaaattattctgcttcttttcttcttctttttttttgttctctgtgtagatatttagatcttattcttcttaattcttgtaactctgtatactgcttaattccttcaaccagatttgcagcctctcttacaatttttaataatcaagtg

SEQ ID NO: 155075 - DNA, 447 bp, Arabidopsis thaliana columbia
attccaatacggaatgaaaagaaaaggacaacatgcaggatggggtagaagaagcggggatacttggttcaagccctgacacgaaagaatataacactcctaagaattaagaatccatgtttcgtataggatttcttgtggacacaacactacaataacaaaattgtagttgtgtttaatcttcttttttttattgaagagttttttttctatctaaatttaagtatgtatctatcaaaaaaaatagtatatacaacagataacctcggctcaatcttttttagtaaaaaaaagattgagccgagtgcaattaaactaataaaacaaacgtgaattactaaatctaattcatctactcttgggcaatctaattatcgatggttgggaagctaaatgtgaactctttccatactttacaagcagcagctagttaagacttcatttgca

SEQ ID NO: 155076 - DNA, 339 bp, Arabidopsis thaliana columbia
gtcaacatcgtccctccgatccttctaatctctctaagatggttcctaccacctatcgggctactcacaaccgtacacgtgggggcaccagatcaagtgataactacagaagtgaaaaacattcttatacgcagcttctatcaacgagctgaagaaaagttaagaccaaagagaccggctacagatcatctggcagcggagcacgtgaacaagcatttccgtgctgcgtcttcttcttcatctactcagggtttataaaaaacttaagttcaagcctataacaaatggtcatttgtatgagtacctcttattagggttttcaatgtagaaaaaaaaaga

SEQ ID NO: 155077 - DNA, 339 bp, Arabidopsis thaliana columbia
accaatgtctgcttcttctttatttaatcttttattgattcgcctcagatctctcgctctgtcgtcttctttttcttctgtgggatttgcccatcgtcctctgtcatcgatttcaccgagaaagttaccgaattttcgtgctttctctggtaccgctatgacagatactaaagatgctggtatggatgctgttcagagacgtctcatgtttgaggatgaatgcattcttgttgatgaaactgatcgtgttgtggggcatgacagcaagtataattgtcatctgatggaaaatattgaagccaagaatttgctgtacaaggcttttagggtatttttatt

SEQ ID NO: 155078 - DNA, 426 bp, Arabidopsis thaliana columbia
  unsure (1)..(426): unsure at all n locations
cggtcgaccacgcgtccggagagagagagactccattgttgaagtgtgttcactgaactcctcctcaaacaacaatggcgacgacggttacactcaaatccttcaccggacttcgtcaatcatcaacggagcaaacaaacttcgtctctcatgtaccgtcatcactttctctccctcaacgacggacctctctccgagtaaccgcagccagagccactcccaaactctccaaccgtaaactccgtgtcgccgtcatcggtggtggaccagcaggcggngcagctgcagagactctagcacaaggaggaatcgagacgattctcatcgagcgtaagatggacaattgcaagccttgcggtggcgcgattcctctctgtatggtcggagaattcaaactgccgttggatattattgatcggagagtga

SEQ ID NO: 155079 - DNA, 295 bp, Arabidopsis thaliana columbia
cggcgatggtatcggtccagaagttatatctgttgctaagaatgtgcttcagaaagctggatttctccaaggactagagggggatttccaggagatgcctttcggcggagcagctttggatttggtcggagttccattgccggaggaaacttccactgctgctaaacagtctgatgccattcttcttggagctatcggagggtacaaatgggacaagaatgagaaacatctgagacctgagatgggtctgcttaacattctaagagatctcaatgtctttgcttatttgagacct

SEQ ID NO: 155080 - DNA, 376 bp, Arabidopsis thaliana columbia
ctggaagtgatccaaaacactggcttattccactcctcttctctagggtttctctctaattctgaacttgctttctctgaatctcattatttcggtggagtaaatttggggttagctcacattttatggtctgagttgctttatgtctctgtaaaagattcgaacttgtttttggaatttagattgtgtggggttttgttcctaaagttttcacctttatggattttttcatgctctgtatataattagcaggggtttcacttagattccaacttgaatcacttcagagatcacacagcttcaatttttaacaaaatttggttgcttctttgtgtgataaacacgctgaatttgtagttgatagatggcgacactt

SEQ ID NO: 155081 - DNA, 449 bp, Arabidopsis thaliana columbia
ctcttttgagaaaagatagatcttcttcaccttcttcattgatctcagatcccgatcccgtctggttatcttccgccggcgacgtgttcatttttctcttctacctaccacctcttaatcattctctctccccccgcagatctagcgaatcgaattcgaatccttaagtagtagtggaatcatggcgctaagcatgcgaaaagcgatcggagttgttaaggatcagactagtatcggcatagcgaaggtagctagcaacatggctccagatctggaagttgcgatcgtgaaagctacaagccacgacgatgatcaatctagtgacatgtatatccgcgagatccttagcttaacttcactctcccgtggctacgttcacgcctgtgtcacctttgtttcacgccgtctaaaaagacgccgggctggatcgttgttctcaggctcttatg

SEQ ID NO: 155082 - DNA, 454 bp, Arabidopsis thaliana columbia; identical to SEQ ID NO: 131099
  unsure (1)..(454): unsure at all n locations

SEQ ID NO: 155083 - DNA, 257 bp, Arabidopsis thaliana columbia
gcgtccgagaaaacgctagaacaataactttgatcgttctttttcttctcttgaatcggaaacaatggcgtggtaacataagcatgaagggtgttcacctaatttggatccagcagtggaggttgtagagagggaatcgttgatggagaagttatcggtgaagatccatcacaaaggtgattcttcgtcttcatcatcattagatgacgaaaaccagaagaagtcttcgtcatcgtcttcaatgtttttgaaatcta

SEQ ID NO: 155084 - DNA, 364 bp, Arabidopsis thaliana columbia
ctctgctctgctcccaaatgttatcgtcctccgtatgctccctcttatggcggagccgtacacatgtgcctgcaccgccggggggggcttcgccaccgcttaaagctctctcctttcccttctcttccagtttatggtttattcacagaaccacaatttctcctctttcgtgttcagctgaaagttcctcggagattgccctggcgcagagccagcctgcccctgatttcaatccctggtcggagttcgctcaaaatgtgtctggcgaatgggacggtttcggagcagattttacatgcgaagggcaaccgctagaactacctgaatcagtggtttcagaaacctctatagaatgtgaagtgaa

SEQ ID NO: 155085 - DNA, 209 bp, Arabidopsis thaliana columbia
aaacggctttagcggcggcgaatagatcgtacgcgccgtatagtttatgtccatcgggagtttcgctggtggattgtgacgggaaagtgtacagaggttggtatatggaatcggcggcgtataatcctagtatgggaccagtacaggcggcgttggttgattatgtggctaatggtggtggaggaggatacgagaggatcgttggagcg

SEQ ID NO: 155086 - DNA, 413 bp, Arabidopsis thaliana columbia
ggatcactttcaatgagccatgggttttctcgcacgctggctatgacgtaggcaaaaaggcacctggtcgttgctcttcttacgtcaatgctaaatgccaagacggacgatcaggatacgaggcttaccttgtcactcacaatctccttatctctcacgcagaagcagttgaagcttaccggaaatgcgaaaagtgtaaaggtgggaagatcggaattgcacatagtcctgcttggttcgaagcacatgaccttgctgattcacaagacggtgcgtccatcgaccgtgcacttgactttattttgggatggcatctagacacaactacatttggagattatccacagatcattgaagacattgttggacatagattgcctaaatttacaactgagcagaaagcaaaactgaaa

SEQ ID NO: 155087 - DNA, 445 bp, Arabidopsis thaliana columbia
ctctcccctgaagctcccctcactcactcttctccgaggaagaacaacagagacaatggcgggtcccaaagccattatgggtagctatcttgctactcatctgtggtgctgctctcggagctcctgcttctgaaggttatcttcgtaatggaaacttcgaagagtcaccaaagaaaaccgacatgaagaaaacagttctactaggcaaaaacgccttgcccgaatgggaaaccaccggtttcgtcgagtacatcgccggcggtcctcagccaggaggcatgtacttcccagtggctcatggagtccacgccgtgaggctcggaaacgaagctacaatctttcataagttagaagtgaagcccggttctctctacgcactcacgtttggtgcgtctagtacttgggcacatgactaagtcttaaaggtttctttcccttctcatcc

SEQ ID NO: 155088 - DNA, 445 bp, Arabidopsis thaliana columbia
caacacctaccggaacttgcggtgtctgtgttcttggtggagaaagatcgctcattgccaatctttctgctgctaattgctacaaggttgaacacttgaagaagcctgagaactgggctctggttgagaaggccaagttttattacattgctggattcttcctcacggtatcaccagaatccattcagttggtacgtgaacatgctgctgcaaacaacaaggtgttcacgatgaacctttctgctccattcatctgtgaattcttcaaagatgttcaggagaagtgcctgccgtacatggactatatttttggcaatgagaccgaggcaagaaccttctccagggttcacggctgggagactgatgatgttgagcaaatagccatcaagatgtcccagttacccaaagcctcttgaacatacaagaggactactgtgattacaca

SEQ ID NO: 155089 - DNA, 389 bp, Arabidopsis thaliana columbia
gtgaaatattgggaacattggttaagacattcaaggcctcatttctacctttcttcgatgaactgtcctcttacttaactcctatgtggggaagagataaaacagcggaagagagaaggattgctatatgcatttttgatgatgtagcagaacaatgccgtgaagctgcctttaaatattatgatacctatcttccatttgtactggaagcttgcaatgacgagagcccagaggttcgacaggctgctgtttatgggcttggcgtttgtgctgagtttggcggctctgtattcaagcctcttattggagaggctctgtcaagattaaatgttgtgatacagctgccaaatgctcggcaatctgaaaatgtcctggggtatgataatgct

SEQ ID NO: 155090 - DNA, 418 bp, Arabidopsis thaliana columbia
agaacaaaacatcatcatatattctattgactagattaatttcttctaagtgcaaaagaggagaaatggagtcaatgaagatgaagctcatagtggtgttgatggtggctattgtggctttctccgccgtaggaaacgtggctgcgcagacagaggctccggctccaagtcctacttccgatgctgctatgtttgtcccggcattgtttgcatctgttgctgctttggcatcagggtttctcttctaaaccaatctccacatttcattgagttaggttctaaattgttttgccttttactttcgtttatgtcttatggcatgagctttttgttatttgtttctaatatttggactactatgtgttgtgtgtatatgattcataattaatactatatttatggattgatttctttctag

SEQ ID NO: 155091 - DNA, 464 bp, Arabidopsis thaliana columbia
aaatataaagtgaggtcttttctacgtctcttcaacattctcagagaagccgtcttcttcctccttcaatctctctcgttcgtatcatctgctctgcgatttcaatggcgagccgttggttgagacctgaggtgtatcctttgttcgctgctaccggagttgccgttgggatctgtgcgttttccttgatcagaaacatcaccggaaaccctgaagtcagatgcaccaaggagaacagggctgctggaattttggataaccatgcagagggagagaagtataaggaaaatttcctgaggaagtttgttcgcaacaagaaacctgaaatcatgcctggactcaacaagttcttcactgatcctacatactgaaaccatctttgcacaccgctttgtcgtattgtttctggaattgaatctctttgtgatataaaaccgcatttgtcaatttcacattgttgatgt

SEQ ID NO: 155092 - DNA, 446 bp, Arabidopsis thaliana columbia
atccccaactgctgctggcttaggattgccagttactggtgggaaggtgtcatggttccggaaatgtacttcaaagatgcttaagttgtccccaataaaaatgacagaaccctctgttacttggaatttggctgatcaagaacctcaatctactgagcaagctaacgtgggtgggccatcaactaccgttcaggcagcgacgacctattcctttgatgttcaaaaggccgaatctgaaactggcacaaaagaagtcgaagtcaccaatgtaaactcagacggtgatcaaagcgacatcaacagcaaggctcaagaagtcgctgcagattctttgtccaatctagatgttgatggccaatcacgcatgaaagggaaagggaaagccagaaccagaagaacacgctctgtcaaagatgttgtgatgatgctaaagcttatatggagaa

SEQ ID NO: 155093 - DNA, 359 bp, Arabidopsis thaliana columbia
ctttcttctgccttggaatcctgatcatggcgtcgtcttctctcacttcgaaatccattctcggatccaccaaactcggggggtggtgtcttccctcggagctccgtcgcctctcttctcccgccgttcagatctatctgcgtacccaaaccaggaagaacttccagatacaagctactggaagttcatatgggactcattttcgagtttcaacttttggagaatcacatggaggaggagttggctggatcattgatgggtgtcctcctcgaattccacttactgaatctgatctgcaactcgatctcgatagaaggaggcctggtccgagcaggatcacaacttctagaaaagagact

SEQ ID NO: 155094 - DNA, 462 bp, Arabidopsis thaliana columbia
ctcaacatggactcctccaaactctcatctctctctctttgcctcttcctcatttgcattgtgtatctcccccaacatgctggcgcatgcggctcttgcaacccacggaagggcggaaagcactcccctaaagcccctaagctaccagttcctccggtgaccgtccctaagctaccagttcctccggtgaccgtccctaagctaccagtccctccggtgaccgtccctaagctacccgttcctcctgtgaccatccctaagctacccgttccaccagtgactgtacctaagctacccgttcctcctgtgaccgtccccaagctacccgttcctccagtgaccgtccccaaactacccgttccctccagtgacagtccctaagctaccccgtcccccggtaactgtacctaaactaccccgttcctccaggacccgccccttagctaccccttcctccgattt

SEQ ID NO: 155095 - DNA, 425 bp, Arabidopsis thaliana columbia
ctgattttcacatccacaagtatggcgacttaaatcagcaagaagagaaagtttgtagcggatggtgtattctacgctgaattgaatgaggttctcacaagagagctagcagaggatggttactctggtgttgaggttagggttactccaatgaggactgagattatcatcagagctactcgtactcagaatgttcttggtgagaaggggaggagaattagggaattgacatctcttgtccagaagagattcaagtttccagttgacagtgttgagctctatgctgagaaggttaacaacagaggtctctgtgccattgctcaggctgagtctctacgttacaagcttctcggtggtcttgctgttcgcagggcctgttatggtgttttgagatttgttatggagagtggagctaagggatgtga

SEQ ID NO: 155096 - DNA, 428 bp, Arabidopsis thaliana columbia
ctctctctctctctctcacacacacacacaaacgcacatacttgagcaaagtcatcacaatgagcttcttcatcgaagattctggtctcatagtcactcagcttctctacaaaatggctgttctcatcaccgtcttgagatggatcctcgcttggatcttacgctaccgatccagatccagatccacctcttcttccacttccgcctgtccttcgatttcctcacaggcgatcaaagaaagcctctccgtgacgacgttccgtgacgcagctgagagatctccggcgatgatcaacgacacctgcgctgtgtgtctcggagatctggaagatggagatgaggttagagaactcaggaactgtagccatatgtttcaccgtgagtgtattgaccggtggttggattatgaatggtgcggtggtgatgag

SEQ ID NO: 155097 - DNA, 355 bp, Arabidopsis thaliana columbia
aaaccaaaccctaaaccatctttctcaacatggcgcttcttcacaagcaaaacatttcctttgtgatactcctcctcctcggtctccttgccgtctcttatgcttgtgattgtagtgaccctcctaaaccatcaccacaccctgttaaaccgccaaaacatcccgctaaaccacctaagccccctaccgttaaaccacctactcacaccccaaagcctccactgtgaagccttcacctccatacattccatgccctcctccgccctatactccaaaacctgcaaccgtgaagccaccaccacctccctacgtgaagccaccaccacctcccactgtgaagccaccaccaccttct

SEQ ID NO: 155098 - DNA, 508 bp, Arabidopsis thaliana columbia
  unsure (1)..(508): unsure at all n locations
cggaattggaaggnnccgggccagacccacgcgtcccgaagagaggagagagaaatacataagaaaaataattgggagaacggcaaatgcaacggagccacgacggtgaagttaccggagatcaaattcaccaagcttttcatcaacggccagttcattgatgctgcttcagggaagacgtttgagacgatagaccctaggaacggtgaagtgatcgcaacaatagccgaaggagacaaagaagacgttgacttggccgttaacgctgcacgttacgccttcgaccatggtccttggcctcgcatgaccggcttcgagagggcaaagcttatcaacaaattcgcagacttaatagaggaaaacattgaggaattggctaaacttgatgcggttgacggtggaaaattgtttcagttgggaaaatatgctgatattccggccacagccggtcattttcgatacaatgcgggtgcagcagataaaatccacggcgagactcttaaaatga

SEQ ID NO: 155099 - DNA, 434 bp, Arabidopsis thaliana columbia
ggaacttgcgataaaaaattggtggttttagatgatttagctccttggatcaaaatccctagcagttgggtacagtactacactccgttgctagcgattcaacccccttcagggcacgatgcagcggatatagtggctaagataaacgaaggtttgagctcgggtaaagtagagaatgggaagtacttgaaggtttatctcaaagaggatttacctagcaggctgcattatgtagacagtgaccgcatcccgcctattataggactagtcgatgagggcttcaaggtggagcagaagaaaagtaaagccaaggaatgcggtggagctcacgggtatgacaatgccttcttttcgatgagaactatattcatcgggcatggtcctatgttctcaaaaggaaggaaagtgccttcttttgagaatgttcagatata

SEQ ID NO: 155100 - DNA, 372 bp, Arabidopsis thaliana columbia
gcttctctaatttcatagctcctaacaaagcaatatcatttccaacttataaaagttaaagccatggctgcatctctctctgtcccctctatgataatggaagaagaagggagattcgaagcggaggttgcggaagcgcacacttggtggagctcagagaggttcaagctaacaaggcgcccttacactgcccgtgacgtggtggctctacgtggccatctcaagcaaggctatgcttcgaacgagatggctaagaagctgtggagaacgctcaaaagccatcaagccaacggtacggcctctcgcaccttcggagcgttggaccctgttcaggtgaccatgatggctaaacatttggacaccatctatgtc

SEQ ID NO: 155101 - DNA, 385 bp, Arabidopsis thaliana columbia
ccctaatcggcgacaatgggtatttctcgtgactctatccacaagaggcgtgccactggaggcaagcagaagcaatggaggaagaagcgaaagtatgagatgggaaggcagccagccaacaccaagctctcaagcaacaagacggtcagaagaataagagttcgtggtggaaatgttaagtggcgtgcgttgaggctcgatactggtaactactcgtggggaagtgaagcaactacccgcaagaccagagtccttgatgtggtctacaatgcctccaacaatgagcttgtacgtactaagacacttgtcaagagtgctattgttcaggttgatgctgctccgttcaagcagtggtacctctcgcactatggtgttgagcttgggc

SEQ ID NO: 155102 - DNA, 525 bp, Arabidopsis thaliana columbia
  unsure (1)..(525): unsure at all n locations
accggaatggaccgggtccgagcccacgcccgatccgaatctcttcnttctttttttcaaccgnngcgataattttctcgtatctcgattatanagaatggcgaagggaaccccagttcgtgttcttgttanccggagctgcaggacanaatcggatantgctcttgttcctatgattgcaagggggataatgcttggtgctgatcagcctgtgatcctccacatgcttgacatcccttttgcagcagaagctttgaacggtgtgaagatggaattggtcgatgctgctttccctcttctaaagggtgtggtggctacaactgatgctgttgaagcgtgtaccggtgttaatgttgctgtcatggttggtggtttcccgaggaaggaaggaatggagaggaaggatgttatgtccaagaacgtttccatttacaagtctcaagcttctgccttggagaagcatgctgcaccaaactgcaaggttctggtttgtgcaaaccctgcaaacaccaatgcattgatcct

SEQ ID NO: 155103 - DNA, 428 bp, Arabidopsis thaliana columbia
cgtactaggacagcgagggttttttagtcttattttttgctataaactcttacaacttcatttttatagttttatgttttgctataaactcgtacgacttcattttttttagttttattttttgctataaactcgtacgacttcattttttttagttttattttttgctataaactcttacaacttcattttgcattcattcatacgttgattaattatacttacttgtctaatatataccgaagattggatggcaagatcgcaattataacaggcggagctagtgggattggagctgaagcggttaggttgttcacggaccatggagctaaagtggtcatcgtggacatacaagaagagcttggccaaaacctcgccgtttcgatagggctagacaaagcaaggttttaccgttgtaatgtaaccga

SEQ ID NO: 155104 - DNA, 424 bp, Arabidopsis thaliana columbia
cggaatggaagggtcgaccacgcgaccgtgaactcttcctttactctcttcatctttaccttcgtcatcttcctccaatgtctaaatcccaccggagctgccacgtgtcatcctgatgatgaagcgggtcttctagctttcaaagcgggtataacccgagatccttcgggtattctcagttcttggaagaaaggtaccgcttgttgttcttggaacggtgtcacttgtctcaccactgaccgtgtctctgcactctctgtcgctggacaagccgatgttgctggaagcttcctctccggcactctctcgccgtcgttggctaaactcaagcaccttgatgggatttacttcaccgatctcaagaacatcactggttcttttcctcaattccttttccaattaccaaatcttaagtacgtataca

SEQ ID NO: 155105 - DNA, 459 bp, Arabidopsis thaliana columbia
tttaaaacgagtagagagagaacgaaatggtgacatcggcaacttacgtgacggaggttccggtgaaaggatcggcggagaaacactacaagagctggaagagcgagaaccatgtcttcgctgacgccattggccaccacatccaaaatgtcgttgttcacgaaggcgaacatgactctcacgggtctatcaggagttgggactacacatatgatggaaagaaggagatgttcaaagagaagagagagatagatgatgagaataaaacattgacgaaaagaggactggatggtcacgtgatggagcatctcaaagtatttgatatcatctacgaatttattcccaaatctgaggatagctgcgtctgcaaaatcactatgatatgggagaagcgcaacgatgactttcccgaaccaagcggctacatgaaattcgtcaagccaatggttgttgacattg

SEQ ID NO: 155106 - DNA, 379 bp, Arabidopsis thaliana columbia
ctaaacacaatccaaaagtatttttaagctttcacatacgagagaaaacttagaaaatgagggcaatcgcagcttggtttttcattttctgttaccttgttccctctgtttttgcgcagctccggcatgggttttacgagggtacatgccctcccgctgaatctatcgtgggtagagttgttttcaaccattgggaccgtaaccgaacgggtactgcagcattgcttcgtatgcagtttcatgattgtgttgtcaaaggttgtgatgcttccctcttgatcgacccaacaacccaaagaccatcagagaaaagcgtccggcgaaatgcaagggtgagagggttctagatcatatatttagctcataaagaactcgcgct

SEQ ID NO: 155107 - DNA, 418 bp, Arabidopsis thaliana columbia
cacacacccactcatggcgtctcggagagttttatcatctcttctccgttcatcttccggtagatctgccgccaaattaggcaaccgtaaccccaggcttccttctccttcacccgcgcgtcacgccgctccatgtagctacctcctcggccgcgtcgccgagtacgcgacctcttcacctgcaagctcagctgcgccatcttctgctcctgctaaggatgaggggaagaagacctatgattacggtggcaaaggtgcgatcgggcgtgtttgccaggtcattggtgccattgtcgatgtgagatttgaggatcaggaaggattgccaccaatcatgacatctctcgaggtgcaagatcaccccacaaggctagtgcttgaggtgtctcatcacttgggtcagaatgtcgtcaggacc

SEQ ID NO: 155108 - DNA, 449 bp, Arabidopsis thaliana columbia
gaaaacacaaaaatgatgtcatcaatggcactctcttctacttccctctgctcttctgtcatctctcaacatccaaaactctccatcactgcttctcctccattgttccatacccaaacaaccaaacccatctctgtaaaacggaaaatcataactctagcagctccagagacactcaccgctgaaacagtcaccggaattgatacttccgacaacactccacaacaaacaataaaggtggtgaagccagatgagaaatcaagagtggtactcaagtttgtgtggatggagaagaacataggattaggattggaccaacatgtacctggacatggcacaatcccacttagtccttacttcttctggcctaggaaagatgcttgggaagagcttaagtctactcttgaagctaaaccatggatctctcagaagaagatgatcattcttct

SEQ ID NO: 155109 - DNA, 400 bp, Arabidopsis thaliana columbia
cgatttctctactctgctctccaaatccatcttcccatggcgatttcggctccagccgctggttcttcctcctctagaattctctgttcctactcctctccttctccttgtctctgtcccgccatttccacctctggtaaactcaaaaccctaactctctcttcctccttcctcccttcttactcattaaccaccacctccgcttctcaatccactcgtcgctccttcaccgtccgcgccgctcgtcgaaagttcgagaggaagaagcctcatgtcaacatcggaaccatcggtcatgttgaccatgggaaaactactttaaccgcagctcgtggtatcacaatcaacactgctactgttgagtacgagactgagaatcgccactacgctcacgtagatt

SEQ ID NO: 155110 - DNA, 386 bp, Arabidopsis thaliana columbia
gcgctcctagttttgataaaaatctctgaatctctctatagctctcttctcatcaaaccatggatccgtacaagtatcgtccagctagttcttacaactctcccttcttcaccaccaactctggtgctcctgtatggaacaacaactcctccatgaccgttggacccagaggtcctatccttcttgaggattaccatctcgttgagaagcttgccaatttcgacagggaacggattccagagcgtgtggttcatgccagaggagccagcgctaaaggtttctttgaggtcactcatgatatctctaacctcacttgtgctgactttctccgagctcccggtgttcagactcctgtcattgtccggttcttcaccgttatccatgag

SEQ ID NO: 155111 - DNA, 346 bp, Arabidopsis thaliana columbia
gttaaatgatcttctcctccgatcattagtctctttaatctttctcagcctcttcttggtggcgatctctcttcctccggaaaaagatgtcggccggtaacggaaatgctactaacggtgacggagggtttagtttccctaaaggaccggtgatgccgaagataacgaccggagcagcaaagagaggtagcggagtctgccacgacgatagtggtccgacggtgaatgccacaaccatcgatgagcttcattcgttacagaagaaacgttctgctcctaccacaccgatcaaccaaaacgccgccgctgcttttgccgccgtcttcgaggaggagcgtcagaagat

SEQ ID NO: 155112 - DNA, 466 bp, Arabidopsis thaliana columbia
ctagaactgttcaagccaggtaactccggtgctgtgaaatggacggtgactacgaaacctgccaagaaacagcctctgacttggtataaggttgtgatagagccaccttctgggagtgagccggttgggcttgatatgatcagtatggggaaaggaatggcatggttaaatggtgaagagataggaagatattggcccaggattgctagaaagaacagcccgaacgacgagtgcgtaaaagaatgcgattacagaggcaaattcatgccggataaatgcctaactggatgtggagagccatctcagagatggtatcatgttccaagatcatggtttaagtcttccgggaatgagctggtgatcttcgaggagaaaggcggcaatcccatgaagataaagttgtccaaaaggaaagtatcggtggtgtaagcaagtagaacaagttaaagatgatgatgcaaaacgt

SEQ ID NO: 155113 - DNA, 205 bp, Arabidopsis thaliana columbia
ccggccgacccacgcgtccgttttttcttgaataaaatcagaattacaaacaaaaatggttttgcaaaagcttcctctcattgggctgcttttgctcctgaccatcgtcgcctctccagcaaatgcagatggacctggttgcccggcgtcgaacaaactaagccgggcaaggtttcctggaaggtttttatttggcaccggttct

SEQ ID NO: 155114 - DNA, 420 bp, Arabidopsis thaliana columbia
  unsure (1)..(420): unsure at all n locations
ggaatacccgggcccgacccaacgccgtccgggaaaggttgatctctaaccaaactgatgcaatgttacttacgcttgatcgatatanttagatatgatgtgtaaggtagttcgagaggaggttttattgctaagtttccntgcctgcacttattgctgccaaganagtattattgattcaagcacacactatttttggacgttcaaggatgtgggacctgaagaactttacaaatgtctgctcgtgagcttattacaaggttgcagaagattgatggagacaattatcctgagaccctccaccaaatgtttatcatcaatgcagggcccggattccgtctgctttggagcactgtcaagagttttctagaccccaaaacgacttctaagattcatgtactcggctgcaagtttcagagt

SEQ ID NO: 155115 - DNA, 308 bp, Arabidopsis thaliana columbia
gaaaaatccaagatttactaaaaaacttctatctctctgctcttcctctgtctacattgatgtaattttgatcatcggattgggtgaaagaaacattaaactcctaaaagagaagcctttaaagtttttttttaatcaaaaacaaaaggaagaaaattttcctttttgttttagatggcatgaatcatcatcatcgctttgctttcttgattctctatttgcgttgatgggatttgtttttctgggaatttattcattcacctgctgccatggctaaatgatctttcaaggattttcttaaagctctt

SEQ ID NO: 155116 - DNA, 423 bp, Arabidopsis thaliana columbia
ctctaatttcatagctcctaacaaagcaatatcatttccaatttataaaagttaaagccatggctgcatctttctctgtcccctctatgataatggaagaagaagggagattcgaagcggaggttgcggaagtgcagacttggtggagctcagagaggttcaagctaacaaggcgcccttacactgcccgtgacgtggtggctctacgtggccatctcaagcaaggctatgcttcgaacgagatggctaagaagctgtggagaacgctcaaaagccatcaagccaacggtacggtctctcgcaccttcggagcgttggaccctgttcaggtgaccatgatggctaaacatttggacaccatctatgtctctggttggcagtgcttcgtcactcacacatgcactaatgagcctggtcctgatc

SEQ ID NO: 155117 - DNA, 455 bp, Arabidopsis thaliana columbia
tggagctcgagacctcagtttatcgaccaaacgtcgccgtttatgattctccggatggtgtggaggttcgaggacggtacgaccaaatcttcgccaagattttgacgagagaagctcttagccttgtggctgagttacagagagagtttcgtggccatgtgaagtatgccatggagtgccggagagaggcaagacggcgttataactccggtgccgttcctgggtttgatccttccactaagttcatcagagacggtgattggagctgtgccttcgtccctcctgccgttgctgaccggagagttgagatcaccggtccggtcgagaggaagatgatcatcaacgctcttaacttcggagctaaagtctttatggctgatttcgaggacgctttgtcttcaaactgggagaatttgatgagagggcttgtgaacctgaaagatgcagtggatgga

SEQ ID NO: 155118 - DNA, 354 bp, Arabidopsis thaliana columbia
cttcgttgtgataggtcaggtcagggaacttcattggcttcttctgcaacagcaccaaaggcgctatctttcttctcatcggctgtctttttatcctcctctcaccaaatccctaaaacctacatttccgtttcaaaactcggctccggcagagtctcgaagccgctttctgtctcttcccagctagcgactctaccgattctatcattcgaaggagagaaggtcggagagacgtatctagacctcaaagcggcgccggaggataccgcgcgtgccgttgtgcaccgagccatcgtgacggacctgaataacaagcggcgaggtactgctttcacactgactcgcggtgaagtt

SEQ ID NO: 155119 - DNA, 384 bp, Arabidopsis thaliana columbia
caatttctcaaaatcttaaaaactttctctcaattctctctaccgcgatcaagatgcaggtctgggttaagactctcaccggaaggacaatcaccctcgaggtggaaagctccgacaccatcgacaacgttaaggccaagatccaggataaggagggcattcctccggatcagcagaggcttattttcgccggcaagcagctagaggatggccgtacgttggctgattacaatatccagaaggaatccacccttcacttggtcctcaggctccgtggtggtatgcagattttcgttaaaaccctaacgggaaagacgattactcttgaggtggagagttctgacaccatcgacaactgtcatggccaagatccaagacaaagag

SEQ ID NO: 155120 - DNA, 460 bp, Arabidopsis thaliana columbia
aaccactcatcctcacagtacccagatgtttaccatgctaaagtgcagacctcgtctggagagaagcctgtccgtgagctcgtcaaggacgatgcatggttggacggagaatttatctctacagttcaacaacgtggagctgcaatcatcaaggcgaggaagttgtctagtgcgctctctgctgctagctctgcttgtgaccacatccgtgactgggtccttggaactccagagggtacgttcgtttccatgggagtatactccgatggctcttacagcgttccatcaggacttatctactccttccctgtaacttgtcgcaatggagactggagtattgtccaaggcctttcgattgatgaagtatcaaggaagaagatggatttgacttgcaaggagctcaaggaagaaaaggacctggcgtactcatgcctctcttaaacccctctggagcaaaaat

SEQ ID NO: 155121 - DNA, 259 bp, Arabidopsis thaliana columbia
gcgtctctcttccgcaaccttcgattttcgtttattcgcatccatcggagagagaggagcggcaataagcgaccatgttggtgtaccaagatcttcttaccggtgatgagcttctgtctgactctttcccttacaaggagatcgagaatggaatcctctgggaagtagaatgtaagtgggttactgcggtagctgtactattcaacattggtgccaatgcatctgctgcagaacgtgacctggaagcaggtcttgatga

SEQ ID NO: 155122 - DNA, 238 bp, Arabidopsis thaliana columbia
acccaattagccggagatggccgcaacattctccgctgctgcagctgcttcttccgtcatgtgtactcgggtggctcgccggtgtccatcccggttcaggtcggttcacagccgtgttcggtttcggaaagaagaaggcagctcccaaaaagagtgccaaaaagactgtgactacggaccggcctctttggtacccaggcgccatttctcctgactggcttgatggctcctttgttgg

SEQ ID NO: 155123 - DNA, 424 bp, Arabidopsis thaliana columbia
gaggtgagaaggcaatgcagcttcttgagagtggcttgaaagtgaaggaatacgagctgttgaggaggaacttcagtgacactggctgcttcggattcggtatccaggagcacattgatcttggaatcaagtatgatccttctaccggtatctacggtatggatttctacgttgttcttgaacgtccaggataccgtgtggcccgtcgccgtagatgcaagactcgcgttggtattcaacatagagttaccaaggatgatgccatgaagtggttccaagttaagtatgaaggagttatcctcaacaagtctcagaacatcactggttgaagagcttttttttgtcattttggtttggttcaagttcttatttttaagattctggattgtaaggatctcgtgttgtggttacttttttgacttaa

SEQ ID NO: 155124 - DNA, 412 bp, Arabidopsis thaliana columbia
atttctctgcttttaatttccaatttgctctgattcattcacaaataacaatcctctctgcgggtttgtttttcttttgggtccaaagctctcttaaatctgtaaatcaacaatggccgtcaccactgagaatctccctcaactcaaatccgccgtcgatggccttactgagatgagtgagagtgagaagagcggattcatcagcctggtttcacgttacctgagcggtgaggcacaacacattgagtggagtaagatccagactcctaccgatgaaatcggtgttccctacgagaaaatgacccctgtctcccaagatgttgccgagaccaagaatttgttggacaaacttgttgtgctgaagcttaatggatgtcttggaacaccaattgtatgcactgtccccgaattc

SEQ ID NO: 155125 - DNA, 450 bp, Arabidopsis thaliana columbia
cttcttcttcaatgtagtttcatgtccctagaaattttcgttttcttctctttgaatcatctatcgaattgttgttgcggaacttttagattctaagaaattgagttcactcttcggcgatggagcgaaactcgtcggacgacgaagaagaccaccagcatttgattccccaaaacgacactcgaatccgtcaccgggaggattcagtttcctccaacgccaccacaatcggcgggaatcagagatcggcgtttcagatcgacgacattttacatcgagtccaacaccgtgggaagatctcgctcaacaagcgttacgtcattgtcttcgtttctctaattatctcaatcggtcttctcttcttactcactgatcctcgtgaactatttgcggcgaatttctcgagttttaagctggatccattgtcgaatcgtgtcaaagaatctgagc

SEQ ID NO: 155126 - DNA, 436 bp, Arabidopsis thaliana columbia
gcaatggcgtacaagcttatatctcttacagagttatcaccaagactaacttgccggagtgccagggacccgagaaggatgttattagacgatacagtgatttcgtctggttacgggatcggctttttgaaaagtacaagggcattttcattcctcctcttccagagaagagtgctgtagaaaaattccgctttagtgccgaatttattgaaatgaggcgagcagcattggatatatttgttaatcgaatagcattacaccctgagcttcagcagagtgaggatcttaagacctttttgcaagcagatgaagagacaatggacagaattcaggttcaggaaactagtatattcaagaagcctgcagatctaatgcaaatgtttagggatgtccagtcaaaagttagtgatgctgtccttggaaagaaaacctggtg

SEQ ID NO: 155127 - DNA, 309 bp, Arabidopsis thaliana columbia
gtctgcacaaaaccctaatctcacaatcttctactagatctatcagtctccacgaagatgaaggttgttgccgcatacttgctcgctgttttgagcggaaaagcttcaccaaccagtgccgatatcaagactatccttggatcagttggtgctgagacagaggattctcagattgagcttttgttgaaggaagtgaaaggaaaagatttggctgagttgattgctgctggaagggagaagttagcttcagtgccgtctggtggcggaggtggtgttgcggttgcttctgctacatctggtggtggagga

SEQ ID NO: 155128 - DNA, 430 bp, Arabidopsis thaliana columbia
gaagccgcttcttcttcttcctcactgtagcttgtcgtcgctacaccatctagaagacccttgaccatggctgtcgggaagaacaagaggatttcaaagggtaggaaaggaggaaagaagaaggctgttgatcccttctccaagaaggattggtatgacgtgaaggctcctggttctttcacgaacaggaatgttgggaagactcttgtttccaggactcagggtaccaagattgcctctgagggactgaaacacagggtgtttgaggtttctcttgctgatctacaaaatgatgaggataatgcctacaggaagatccgtcttagagctgaagatgttcagggaaggaatgtgttgacccagttctggggtatggattttacaaccgacaagcctaggtcattggtgatgaagtggcaaaactttgatt

SEQ ID NO: 155129 - DNA, 256 bp, Arabidopsis thaliana columbia
gagaaaacgaaaaccctagtttcagaggcatctccagacaccgaaaatggctgaaggactggttttgaagggcaccgtgcgtgcacacactgacatggtgacggcaatcgccaccccaatcgataacgcagacatcatcgtctcagcttcccgcgacaaatccatcattttgtggaaactcaccaaggacgacaaagcctacggtgtatctcataggcgtctcactggtcactctcacttcgttgaggatgatgtt

SEQ ID NO: 155130 - DNA, 429 bp, Arabidopsis thaliana columbia
ggtgttagctcatatgatattggaactggctttgggcattttgccatttcaactcgggatgtttccaaactggttgagaacgtccgtgccaagggtggaaatgtgactagggaacctggtccagtcaaaggtggaggcagtgtcattgcgtttgtgaaggaccctgatggctacacttttgagctcatccagagaggtccaactcctgaacctttctgccaagtcatgcttcgtgttggtgatctcgaccgtgccatcaaattctatgaaaaggccctcgggatgagactcttgagaaagattgagagacctgagtacaagtacaccataggcatgatggggtatgctgaagaatacgagtcgatagttttggagctgacctattactactacgtgactgagtacacaaagggcaatgcatatgcacag

SEQ ID NO: 155131 - DNA, 428 bp, Arabidopsis thaliana columbia
cggacgcgtgggttcctagtcagaggaggatatgaggagtgtggagttcaaagttatagaggcagatcctgctgagtactgggtggttgctccagacacagagattttctgtgagggtgagcctgtgaagagagaggatgaagaaaggctagatgatgtaggttatgatgatgttggtggtgtcaggaaacagattgctcagattagggaactttttgaacttcccttgaggcattcacagctatttaagtcgataggagttataccaccttaaggaattcttctttatgtactaccttggtctgggatgacttatatttcttttactgtatttaataaaactgttgtcttatttcttcttttattaatctgtatcttatatcttatgttaaatttggtttttaattattacttttctatcctttatt

SEQ ID NO: 155132 - DNA, 345 bp, Arabidopsis thaliana columbia
tttttcgtttcttcacattcacaaaacatttctctctttcttctcccattcactcactagcgtgctcctagaaaaagattgcgagaatgagtttgatgatcatgatgattatggttgctgtgaccatgattaacattgctaagagtgatcccattgcaccatgttacttcatatttggtgactctttggttgataatggcaacaataatcagcttcagtcattagctagagctaattactttccttacggtattgactttgctgccggtccaaccggtcggtttagcaactgcttaaccacttgtcgatgttatcgcttttgggttttaaggactactttcacct

SEQ ID NO: 155133 - DNA, 461 bp, Arabidopsis thaliana columbia
aaaagaaaaaaaagctattgtttgaaagaagaagaagttaactatggcaaaggatgtggaagccgttcccggagaaggatttcagacaagagactatcaagatccgccaccagctccgtttattgatggagcggagctaaagaagtggtctttctacagagcagttatcgcagagttcgtagccactctcctcttcttatacatcaccgttttgacagtcatcggttacaagattcagtccgatactgatgccggtggcgtagattgcggcggagttggaatcctcggtatcgcttgggcctttggtggtatgatcttcatcctcgtctactgcaccgccggtatctctggtggtcacattaacccagcggtgacatttgggctattcttggcacgtaaagtgtcgttacctagggccctattgtacataatcgctcagtgtttgggtgcgatttgtggag

SEQ ID NO: 155134 - DNA, 362 bp, Arabidopsis thaliana columbia
gctttgacacgggcctcctcaaacaaaaacaaataaacctagcttctctcacaaaacgcgggcggcaacatcgaaattaagaatgaatcaaagcttcttcgttcgatcacactagaaagaaagatggcaacgtctggtgcgatttcaggagctactgtctcttccttcttcaccaaaactactactacttcaaacccatctcccaaactccattcctctgcttctcttttatcacagaaaactgtgtttcaaggagtttcgttggaagattcgaagaagagtgtatcagagatcttcgctgtctccgagagaaagatcggagggttaaatgggttgagaagattctaaatcaaagtgagagc

SEQ ID NO: 155135 - DNA, 361 bp, Arabidopsis thaliana columbia
acaaatccttctctgagaaaaaacaacagatccgaattttatctttaatcagccggaaaaaatggagaaagcgggcgatagacaacgcgttgttcttgagcatctccgaccttcttcttcttcttcgcacaattacgaggcttctctatctgcttctgcttgcttggctggggacagtgctgcatatcagaggacctctctctatggagatgatgttgtcattgacgcggcacataggactccactatgcaagttcaaacgtggcaatttcaaggatacatatcccgatgaatttgctcgcacctgttttgagggcattgatagagaatactaatctaaacccaagtgaagttggttacat

SEQ ID NO: 155136 - DNA, 290 bp, Arabidopsis thaliana columbia
atactgtcaagctaaacccataactgccataattcatatcctctttaaaacatattggccgcaaataaaatgccttctggttcactaactgaaatttcaaaatgtatcgtctatcccgagaaaaagtccaccgtcttcgatctccccatctccttctccgaccttcctatgctctcatgtcattacattcaaaaaggcactctactcaccagccctcctactttcttctacttctactacctagtctcctctctttgtctttctctattcttcactcatttcctctttcc

SEQ ID NO: 155137 - DNA, 332 bp, Arabidopsis thaliana columbia
aagaatccggcggctttttaagcgaatggtttgtgaaggatttccgagagtatgcagatgttgttttccaagaatacgggggaaaagtcaaacattgtatcactttcaatgagccatgggttttctcgcacgctggctattacttatgcaaaaaggcacctgttcgatgctctttttacgtcaatgctaaatgccaagactgactatcagcatacgaggcttaccttagtactcacaattctcttatttctcacgcataatcatttgtagtttacctcaatttcttaaagtttaaaacgtttatggtacgtttttacacataattttttttg

SEQ ID NO: 155138 - DNA, 440 bp, Arabidopsis thaliana columbia
aaagctcacaactttaacctttctggagagtagattaacaaaagagggagagggagagaaagggggggcaaagaagaagatgtgcgagtgggagctaacaagttcccggagaggcaacccatcggtacatcggctcagtccaccgacaaggactacaaagagccacctcctgcgccactgttcgagcccggcgagctcagctcatggtctttctacagagccggaatagctgagtttatcgctactttcttgtttctctacatcactgttttgactgtaatgggagttaagagagcaccaaacatgtgtgcttctgttggaatccaaggtatcgcttgggcttttggtggcatgatctttgctcttgtctactgtactgctggaatttcaggtggacacatcaaccctgctgtaacatttcgtctgttcttggctcggaa

SEQ ID NO: 155139 - DNA, 412 bp, Arabidopsis thaliana columbia
acaaaatcgagcccacactttcccaattgtatctgtatctactgaaatcgattcacgagagctcagatttgttgttagcatgacgtgactaagcaagattattgagttgtaattagtatttgagatcaagatgaaggaggacgatgcattgccgactactacgacaactggtacggcgacaggaacagctatggcgaattcgaagaaggaaagctctgactcggtcttgtttggaagaggtcgatataagttctgggcgtttgctgcgattttgcttttggctttttggtcgatgtttactggcaccgtcactctccggttatctaccgggaatctgaaccggttatcggaagatctagggattcctaactacgataatctcgacgttctggaaatggaggaaagagagaaa

SEQ ID NO: 155140 - DNA, 511 bp, Arabidopsis thaliana columbia
  unsure (1)..(511): unsure at all n locations
ggaannncccgggncggacccacgccgtccgaaatcactcaccaccaccaaatcgccgccatggtttaaaccaagcttctcgtctncctctccncgatcgtgtgcgccgccgcatgcttccaaagtgcggtgacgacctcgtgctcttttcnaacggaaccttccatncgacgcnnntcgattccactttcgtcgaggcatnggaaaaaggtcgcacccgaatattggacccaccgcagacctccttctgctttcatgaaacctcgtccttccactccttcttctatcccgacgaagctcaccgtcaattttgtcctcccttacacatctgagcttaccgggaaagaggtcgacatggtcatcattcccgcatcaacaggacaaatgggtgtcttgcccggacacgttccaacaattgctgagctaaaacctggcatcatgtccgtccatgaaggcactgacgtgaagaaatacttcttgagcagtggttttgcattcctccacgcaaatt

SEQ ID NO: 155141 - DNA, 466 bp, Arabidopsis thaliana columbia
cttcctctctccttctccggccactttcctcactctctgctctccctatatcagcgcttgttagctgatcctctctccggcatggctctctctctcttttttttagccatggagaaatttgcgcctgtcgctgctctgttactgcttcttctctgttttccggtagctttctccggtcatgattatggtcaagctctttccaagagtcttctcttcttcgaagctcagagatctggtgttcttcctcgtaaccaaagagtcacttggcgctctcactccggtctcaccgacggcaaatcaagcggcgtgaatctggtcggaggttactacgacgccggagacaatgtgaaatttggattaccgatggctttcacggtgacgatgatggcgtggagtgtgattgagtacgggaatcaattacaagcccacggcgagcttggaaactccattgacgcctttaaatggg

SEQ ID NO: 155142 - DNA, 411 bp, Arabidopsis thaliana columbia
caagcaccttgcaggcacttgaaggcattgttgtgtaaagacaagcttgtggtctcaacctgcggctctcttctccacaccgctgttgatcttatcaatgagactaagcttgatgatgaaatcaagtcatggttggcgtttgctgcccagaaggtcgttgaagtgaacgctttggccaaggctttggctggtcagaaggacgaggctcttttctctgccaatgctgcggctttggcttcaaggagatcttccccaagagtcaccaacgagggtgtccagaaggctgctgctgctttgaagggatctgaccaccgtcgtgcaaccaatgttagtgctaggctagatgctcagcagaagaagctaatatttccaatcctaccaaccacaaccattggatcctttccacagact

SEQ ID NO: 155143 - DNA, 235 bp, Arabidopsis thaliana columbia
cttgttggtgtctctgaggaaactaccactggtgttaagaggctttaccagatgcagcggagatggaactcttttgttcgcctgccattaacgttaacgactctgtcaccaagagcaagttcgacaacttgtatggttgccgtcactcactccctgatggtctcatgagggccactgatgtcatgatcgctggaaaggttgctgttatctgtggatatggtgatgttggaaaggg

SEQ ID NO: 155144 - DNA, 450 bp, Arabidopsis thaliana columbia
aacagaaccaaccaaccaaccaaccaacaataagaagaatccaaagacatgaaacttttcgttattgttctcatctcttttctttccctcctccaagcatcaaaaggattcgatttcgacgaaaaagaattagaaaccgaagagaacgtatggaagctctatgagaggtggagaggccaccactctgtatccagagcctcccacgaggcaataaagcggttcaacgtttttagacacaatgtccttcatgtccacaggactaacaaaaagaacaagccttacaaactcaagatcaatagattcgccgacataacgcaccacgagtttagaagctcctacgctggctctaatgttaagcatcaccgaatgcttcgtggaccgaagcgcggatctggtggtttcatgtatgagaatgtgaccagagttccgagttctgttgattggcgagag

SEQ ID NO: 155145 - DNA, 431 bp, Arabidopsis thaliana columbia
  unsure (1)..(431): unsure at all n locations
cagacttacaaatctagtccatataatacaataagcccacttttcttcttctctcatcagagctttttcttctctcctcatttttcgtataattcgatttgcgaaaaatggtcgagggagagtccaaggcattgtggattattttggccaccgtgtttgcagtcgcggcggtggcaccagcggtgcatggacagcaaacgccgtgttacttcgtgtttggagactctgtcttcgacaacggtaacaacaatgccttgaacaccaaggccaaggtcaactatntaccttatggtatagattactttcaaggtccaaccggtcggtttagcaacggtcggaatatccagacgttatcgctgaactagcgggtttcaataaccccatttcaccatttgcccgagcattacaagcacaagctaacatcggactca

SEQ ID NO: 155146 - DNA, 438 bp, Arabidopsis thaliana columbia
agaaaatcagaaattaaagagagagcagagtgaatcaaaacttcaacttcacccaaaaaggggttcggagaacttagggatgtgctcaccggcggcggaaatgagacgacgacgaagaaggtgaaaggaacggtggttctgatgaagaagaacgtcctcgatttcaacgatttcaatgcttcgtttctcgatcgtcttcatgaatttctcggaaacaaaatcactcttcgtcttgtaagctctgatgttactgattcagaaaacggttctaaaggcaaactagggaaggctgctcacttggaggattggatcacaacaatcacgtcgttaaccgcatgcgaatccgttttcaaggtcactgttcgattactaaaccgatttcggttaccctggagcattcttgttcagaatctgtcttttcagtgtgtttcttcttta

SEQ ID NO: 155147 - DNA, 443 bp, Arabidopsis thaliana columbia
atttgaaggatgcaattcttgatggtgggattccattcaacaaggcttatggaatgagcgcgtgcgagtaccacgggactgaccctagattcaacaaggtctttaacaatggaatgtctaaccattccacaatcaccatgaagaagattcttgagacctataagggttttgaaggattgacttctttggttgatgttggtggtggcattggtgctacactcaaaatgattgtctccaagtaccctaatcttaaaggcatcaactttgatctcccacatgtcatcgaagatgctccttctcatcctggtatattaacattttcctaacatttcgcaaaatgagattttcttggaagattatgtcatcttatgactaaattaatgtaggtattgagcatgttggaggagatatgttttgaagtgtcccttaaggtgatgccatat

SEQ ID NO: 155148 - DNA, 397 bp, Arabidopsis thaliana columbia
  unsure (1)..(397): unsure at all n locations
cggacgcgtgggacttgatgacatcgacttgtttgagatcaatgaggcatttgcatctgagtgggtttattgccgtaacaaattgggacttgacccagagaaaatcaatgtcaacggaggtgcaatggccataggccatcctttgggcgctacaggagcgcgttgtgttgctacattgttgcacgagatgaaacgccgtggtaaagactgccgttttggagtagtgtcaatgtgcattgggacggngatgggtgcagcagctgtgtttgagagaggagatggagttgatgagcttcgcaacgcatggaaagttgaagcgcaagggtcttttgtcaaggacgcttcgttgagaggaccatgcaccaataaccggtttttaaccttcaccctttttttt

SEQ ID NO: 155149 - DNA, 460 bp, Arabidopsis thaliana columbia
acgacctcttgtcaccgtccaaggacttgacggtgacatgagcaccgatcaatccaccaccgtcactttaccagacgtcatgactgctccagttcgacctgacattgtcaacttcgtccacgcccaaatctccaacaacagccgtcagccttacgcagtctccaaaaaggccggtcaccaaacctccgccgagtcctggggaaccggaagagccgtgtcacgtatccctcgtgttcctggtggtggaactcaccgtgccggtcaagcagcgttcggaaacatgtgtcgtggtggtcgtatgtttgctccgactaagatcttgagacgctggcaccgtcgtgtcaatgtcaacatgaagaggcacgcgattgtttttgcaatcgctgttactgctggtccagctcttgtgatggctcgtggtcacaagatcgagaatgttcctgagatgcctcttgttgtt

SEQ ID NO: 155150 - DNA, 442 bp, Arabidopsis thaliana columbia
aaaatatggatagtcacaaatggagtctaggtttcacattacttgctttcctcttgagtcacttcctcttccgctgagctcatcattaaacaggtcacacagggcagaggaatagagtacaacaactcttacagtctcacgtcgaatcttggagtgacgacaagagagttgagagacgagcgaccatcaagtaagatagtgacaatcacaagcttctctgtgattaaggacagaggagaaccctatgaatcatctatttttgaggctgccggttacaaatggagattagttttgtacgtgaagggtaatccgaaaggcggtataaataatcatatttcactttacgcgaggatagaagagacagaaactcttccaagagggtgggaagtgaatgttgatctcaaactctttgtccacaatcggaagttaaagaaatatttgt

SEQ ID NO: 155151 - DNA, 400 bp, Arabidopsis thaliana columbia
cacttcttttcatacctcaagagactaaaactagtttgaggagatttagaggagtggtggggtctttggataacaatgtcgcaaactgaaaatggctaagtcatatggagctatcttcctcttgaccctcattgtcctcttcatgcttcaaaccatggttatggcctcaagtggatctaatgtgaagtggagccagaaacgttatggaccaggaagcctgaaacgtacccaatgcccatcggaatgtgataggaggtgtaaaaagacacagtaccacaaggcttgcattacgttctgcaacaaatgctgcaggaagtgtctctgtgtgcctccgggttactatgggaacatacaagtttgtcctgctacaacaactgtgaaacttaagagggtggaccaa

SEQ ID NO: 155152 - DNA, 448 bp, Arabidopsis thaliana columbia
cttcctcccaaatttctccacgagctcgacccctttcgtatcttccttctcatttttttggcggatttattcgatccgtcggtgagctatgtatccgatggattctgattaccatcgccgtggtctggtggcaaacgatcgttcaccagctcagtttgttaggctggataaaccgagagccgtagacgatctctatataggcaagagagaaaagatgcgtaggtggttgtgctgtgcttgccacgttgaagaaccttaccattcttctgaaaatgaacacctcagaagccctaagcaccacaatgattttgggcatcacactagaaaaccacaggcggctgtgaagcctgatgctttgaaggagcctccatctattgatgtgcctgcattgtcattggatgagttgaaagaaaagaccgattactttggtcaaagtcattgattggtg

SEQ ID NO: 155153 - DNA, 305 bp, Arabidopsis thaliana columbia
gggaagacctccaggcatcgttctcagcttcgctacttctttctggatccctgtagctggaaaacgagtgttcgatgttggcagagatgaaaactcaagaagcgagtgggatatactttccaatggaggcttggttcaagaaatggctcatatcgcaaatggtcgtgatcctgggaatagtgtctccttgcttcgagtcaatagagggaactcagggcagagcaacatgttgatcttacaagaaaagtgtacggacgcatcagggtcctatgtgatatacgcaccagttgatataatagctatga

SEQ ID NO: 155154 - DNA, 466 bp, Arabidopsis thaliana columbia
aaatattttcccggaaaaattctctcattttctcgggaaaaatgttgtctctgcgtttacaaaagtttcctctaaaaaagtagtgagagattccataagaccataaccagtagacaacaaattcttcatcattttgtgtctcttgtttgagatcccggtgaaatttagcggcgacgagaaaattttcaggtagagtgtgttaaaaaatgtctagagtgagttttgaagtgtcaggaggctatcactctgatgcagaagccggaaacagcggaccaatgagcggtggtcaattaccaccgatctataaaaaaccggggaactccagattcactgctgagaacagtcagagaacacgtacggcaccatacgtggacctcacggtagatgtacaagacgatacagtctctgtacatagcttgaaaatggaaggtggatctagcgttgaagagagttcggagcttacttt

SEQ ID NO: 155155 - DNA, 452 bp, Arabidopsis thaliana columbia
aagaaaccgaggaagaacgatctcagtgagaggacgatcacttcgccgtcgcagtcatgggtcgaatgcatagtagaggtgagggtatctcggcatctgctttgccgtacaagcgttcatctccgagctggctcaagacaacccctcaagatgttgatgagtccatctgcaaatttgcgaagaagggtttgaccccatcgcagattggtgtcattcttcgtgactctcacggaattccacaggtgaaaagtgttactggaagcaagattctcagaattttgaaagctcatggtcttgcacctgagatccctgaggatctgtatcacttgatcaagaaagctgttgctatccgcaagcatcttgagaggaacaggaaagataaggattccaaattcaggctgattcttgtagagagcagaatccatcgtcttgctcgttactacaagaagacc

SEQ ID NO: 155156 - DNA, 383 bp, Arabidopsis thaliana columbia
aacctatccaaaagcgaagaagccaagcaaacatattataaaaatgaagaaggcgtcagagttggtgaagcagataataaacatgttgacttgtctagcaaaggacaagacgaaggagcttaagaggaagacaagagccttcaagacacgtctcgtaatattttcgctgctccacaacagacacatggtggtgggttctttgtctcacaagctcaagagcaatcaaacatcaaaaaagatagatcatgataacaaggatgttcaagattatcatgataaaaacatggtggttgtgtatagccaaaacgttaacgccatgtctagcactcctgtctctcgcatgtacaatatcaaatacagaggaggaagatgattaaaagggg

SEQ ID NO: 155157 - DNA, 341 bp, Arabidopsis thaliana columbia
gtacgaagtcatagttctgggtactggtcttaaggagtgcatccttagtggtcttgtctgcgtcgatggtcttaagggactggacatctacaggaatgactactactgtggagagtcaacttctcttaatctcaatcagctgtggaagaagtttaaggtagaatataatgcttctgctcattttggttcttgcagattcttctattttttttttttttctaaattttttttttttttatcttttattttaattttattattttattttttaccatatttatatttatatatatttttctttctttatttatttattatatggtttgtttcttttttttatt

SEQ ID NO: 155158 - DNA, 419 bp, Arabidopsis thaliana columbia
ctccccttttcttatccggaaaccaaaaacttccggtgataaaacctccttcgtcatctgtgctacttcttggataaaatggcgtcaactttcactgccacatcttctattggttcaatggttgctccgaatggtcacaaatctgataagaaacttatcagcaagttgtcttcaagctcatttggaaggagacaaagtgtgtgtcctagacccagaagatccagttctgcaattgtgtgcgcagcaaaggaattacatttcaacaaagatgggactaccattaggagacttcaagctggtgtcaacaagctcgcagatcttgttggtgttacacttggacccaaaggacgaaatgttgttcttgagagcaagtatggatcaccacgaattgttaatgatggtgtgactgttgcaagaga

SEQ ID NO: 155159 - DNA, 453 bp, Arabidopsis thaliana columbia
gatttagctccgtcccggagaaccatggcgtcgctttgctctgcgaggttccttccgtgggcatcgctcgatatttggtctacgaagacgaagatatcctccgactcgcgctcgcttggttgctcttcgtcgcgtgtctttgctttctcttccgttcaccgttcttcttcgcgtcgcaatcggaatcagctgcaagttgtgtctatggctcctgaggaagaaaagctcactcgtcgtaatcctctcgatttcccaattgagtgggaaagacctaaacctgggaggaggcctgacattttccccaagtttagccctatgaagacaccattgccaccaccgatgccttatgatcctccggaagaggatgaagaagaggaagagaagaaagaagaggaagaagaaaacccagaccaagaagaagaggaacaacccgagagcagcaatagatttttg

SEQ ID NO: 155160 - DNA, 376 bp, Arabidopsis thaliana columbia
gtcttactcgtgccagccactcgcatttcttcagattttattatccttcctcgaagcaagagcttagctaagatgacgaagagactacccaaccgtgagcgaagattacaagaaggctgttgagaagtgcaggaggaagctcagaggtttgatcgctgagaagaactgtgcacccatcatggtccgactcgcatggcactctgctggaactttcgattgtcaatcaaggactggaggtccattcggaacaatgaggtttgacgctgagcaagctcatggagccaacagtggtatccacattgctcttaggttgttggaccccattagggagcaattccctaccatcttttttgctgaattccatcagcttgctggt

SEQ ID NO: 155161 - DNA, 311 bp, Arabidopsis thaliana columbia
ccacgcgttcggtcttactcgtgccagccactcgcatttcttcagattttattatccttcctcgaggcaggagcttatctaagatgacgaagaactacccaaccgtgagcgaagattacaagaaggctgttgagaagtgcaggaggaagctcagaggtttgatcgctgagaagaactgtgcacccatcatggtccgactcgcatggcactctgctggaactttcgattgtcaatcaaggactggaggtccattcggaacaatgaggtttgacgctgagcaagctcatggagccaacagtggaatccacatt

SEQ ID NO: 155162 - DNA, 461 bp, Arabidopsis thaliana columbia
cgcgtgttgtaacctaatccaaatcttacccattgatggaataacatcatcacgacgcgtgaaggttctgtatcggaggaccgagagatctccatctcctgtccagattcgattcccaccaatcccaatttcgtgaaattcgttagggttttagtttgaatctcatctcatcagatcgagtcgacccaggattaggaagaagaaaagcgatgaagatggcgacgaatggccggtttttcacaatcgggctagtcgcgtcttggtactcatcgaacattggtgtattgttgctgaacaagtacttgcttagcaattacggattcaagtacccgatctttctcaccatgtgtcacatgacggcttgttcgttactcagctacgtcgccattgcttggttgaagatggttccgatgcagacgattcgatccagatttcagttctttaagatcgcagttctaagt

SEQ ID NO: 155163 - DNA, 345 bp, Arabidopsis thaliana columbia
aaagaaactaacaaggattcccttagtaacggtgagcgaaccgggaagagcccagcttggaaatcggacgtcttcggcgttcgaagggtagtctggagaagcgtcctcagcgacggaccgggcctaagttccctggaaaggggcgccagagagggtgagagccccgtcgtgcccggaccctgtcgcaccacgaggcgctgtctacgagtcgggttgtttgggaatgcagccccaatcgggcgggaaattccgtccaaggctaaatacgggcgagagaccgatagcgaacaagtaccgcgaggtaaagatgaaaaggactttgaaaagagagtcaaagagtgcttg

SEQ ID NO: 155164 - DNA, 370 bp, Arabidopsis thaliana columbia
  unsure (1)..(370): unsure at all n locations
gagtttttgtgcggctgccattttcgatttccttaggttttgagctttgaaaaatggtgagaggcagtgtgcttaacgatgctggtaagagtatgtacaatgctgagaagagagggaagaggcaagtcatgatcaggccttcctctaaagtgatcatcaagtttcttatcgtcatgcagaaacacggttacattggtgagtttgagtacgttgatgaccacaggtctggaaagatcgtggtcgagcttaatggaagacttaacaaatgtggagtcatcagtcctcgtntcgatgttggagttaaggagattgaaagctgtaccgcttgttttcttctttcagacagttaggggacatttgttttacgacc

SEQ ID NO: 155165 - DNA, 312 bp, Arabidopsis thaliana columbia
gtcttactcgtgccagccactcgcatttctccatattttattatccttcctcgaaacaagagcgtagctaagatgacgaagagcgtgcccaaccgtgagcgaagattacaagaaggctgttgagaagtgcaggaggaagctcagaggtttgatcgctgagaagaactgtgcacccatcatggtccgactcgcatggcactctgctggaactttcgattgtcaatcaaggactggaggtccattcggaacaatgaggtttgacgctgagcaagctcatggagccaacagtggtatccacattggttttaggtt

SEQ ID NO: 155166 - DNA, 364 bp, Arabidopsis thaliana columbia
tcggtcttacttcgtgcctagccactcgcatttctttcagattttagttatccttcctcgaggcaggagcttatctaagatgacgaagagactacccaaccgtgagcgaagattacaagaaggctgttgagaagtgcaggaggaagctcagaggtttgatcgctgagaagaactgtgcacccatcatggtccgactcgcatggcactctgctggaactttcgattgtcaatcaaggactggaggtccattcggaacaatgaggtttgacgctgagcaagctcatggagccaacagtggtatccacattgctcttaggttgttggaccccatcagggagcaatttcctaccattttttttgctga

SEQ ID NO: 155167 - DNA, 444 bp, Arabidopsis thaliana columbia
aaaaaatcttcacacacatccttgaccattttcttgttcatcgctctctttcttctgcagcgagatcctaaacgagtaggagcgatggctgcaccgattgttgatgcggagtacttgaaagagatcactaaggctcgccgtgagctccgttctctcatcgcgaacaagaactgtgctcctatcatgctccgattggcatggcacgatgctggaacctatgatgctcaatcgaagaccggtggacctaatggctctatcaggaacgaagaagagcacactcatggtgccaacagtggtttgaagatcgctctcgatctctgtgagggcgtgaaagctaagcatcccaaaatcacatacgcagacctgtatcagcttgctggtgtggtagcagttgaggttactggtggacctgacatcgtgttcgttcccgggagaaaggattca

SEQ ID NO: 155168 - DNA, 464 bp, Arabidopsis thaliana columbia
ttgagaacttcctgtgagagagcgaataggactctttcttccactgctcagaccaccatcgagattgactctctatacgagggtatcgacttctactccaccatcacccgtgctagatttgaggagctcaacatggatctcttcaggaagtgtatggagccagttgagaagtgtcttcgtgatgctaagatggacaagagcactgttcatgatgttgtccttgttggtggttctacccgtatccctaaggttcagcaattgctccaggacttcttcaacggcaaagagctttgcaagtctattaaccctgatgaggctgttgcctacggtgctgctgtccagggagctattctcagcggtgaaggaaacgagaaggttcaagatcttctattgctcgatgtcactcctctctcccttggtttggaaactgtccgtggtgtcatgaccactttgatcccaaggaa

SEQ ID NO: 155169 - DNA, 380 bp, Arabidopsis thaliana columbia
caaagttctggcttttagcctcctgagtgtaaaatcaaggttgcaactttcagggtttcgaggtatcatccaacgaggggaggtgttcgcggtggtcgagatcaattcagttgggatgaagtcaaggctgataaatatagggagaactatttgggtcacagtatcaaagcccctgttggaagatggcaaaaaggtaaagatcttcattggtatgctagagataaaaagcaaaagggttccgagatggatgctatgaaagaagagattcaaagagttaatgaacaagaggagcaggccatgagggaggctcttggcttgccaccaaagttctctacatggccacaaggaaattgccttgataagcaagagtttactgaact

SEQ ID NO: 155170 - DNA, 338 bp, Arabidopsis thaliana columbia
gcaagaaaccaactgtttggattggtaagttttgacttgggcaacactgctcttagtttgtcttcattgccatctcaaagagagaaaggagatgatgttaacatgcacatcacaagactagattttgacctgaccttacacactctctttctccatctctccagttatctaatcctctaaagctgctcaaaacttacatgaaacaatggaaataaactcactcttctcacaacaatgggaaacacaggctagatccactcctttggtttgatgcaagcattcaataacttccactctttcggcccctttttcgggttatgggcataatcccatctttc

SEQ ID NO: 155171 - DNA, 442 bp, Arabidopsis thaliana columbia
ctcaacgggtatatcgtgtctgattgtgactctgtcggtgttttgtacgatacccaacgttacactggtactcctgaggaggctgccgctgattccatcaaagctggcttggatttagattgtgggccatttctaggagcccatacaatcgatgcggtgaagaaaaacttgttgcgtgagtccgatgttgataatgccttaatcaacacgctaacagtccaaatgagactaggaatgtttgatggcgatatagcggctcaaccgtacggacaccttggaccggcacacgtgtgtacaccggttcacaaaggactagctctcgaagcagctcaacaaggaatcgtcctactcaaaaatcacggctcgtctctacctctctcaagccaacgtcaccgaactgtcgccggaattggacctaattcagacgctacggtcacaatga

SEQ ID NO: 155172 - DNA, 411 bp, Arabidopsis thaliana columbia
  unsure (1)..(411): unsure at all n locations
cgtccgagaaaaatggcgtcaaagctctgcgattcgttcaaatcagcgacggcggcgttatactgggcggcagacgcagcgtttgtatggttaagctgcnattcaaaagtccacgcggcgaacaaactcgcgtcacgacacgcgcgcgtgtggatgtgtgaagtgtgcgagcaagcaccggcacacgtcacgtgcaaagcagacgcggccgcgttatgcgtcacgtgcgaccgtgatatccactcggctaatccgttagctcgccgtcacgaacgcgttcccgttactccgttttacgattccgtctctagtgacggttccgttaaacacaccgccgttaatttccttgacgactgttacttctccgatatagatggtaacggaagccgtgaagaagaggaggaagaagct

SEQ ID NO: 155173 - DNA, 408 bp, Arabidopsis thaliana columbia
ctaaaatctctctctgccaatctcatcttttactctctctctaactctcgttttcgattctgcaatggctgacaagaagatgaggatcggaatcaacggattcggaagaattggtcgtttggttgctagagttgttctccagagggacgatgttgagctcgtcgctgtcaacgaccccttcatcactactgagtacatgacctacatgttcaagtacgacagtgttcacggtcaatggaaacacaatgaactcaagatcaaggatgagaagacccttctcttcggtgagaagccagtcactgttttcggcatcaggaaccctgaggatatcccatgggccgaggctggagctgactacgttgttgagtctactggtgtcttcactgacaaagacaaggctgcagctca

SEQ ID NO: 155174 - DNA, 323 bp, Arabidopsis thaliana columbia
gatcaatatggggaagatgcactcaaggaatgaatgggtggtggaggtggtggacacgagggatttgatatcttctcttgctgctttggtagtggtggacacccattcggaagtcatagccggggaaggaggcagaggcgtggtgaagatgttgttcatcccttgaaggttttcttagaggatgtttatctcggaacaacaaagaagctctcactttctaggaaggctttgtgctcaaagtgtaacggcaagggttcaaagtctggagcttcaatgaaatgtggtggctgtcaaggttcgggaatgaagatcatgatcaggca

SEQ ID NO: 155175 - DNA, 439 bp, Arabidopsis thaliana columbia
aaaacaaaaaatggctacccgaaaagctctgatcaacgttcaccggatcattcgctccaggggcgtggttggccggagctggatcattcctgccgccgctaaccggtcatatcctattatattccggaatggagttgatttgggggcgagattcttctgtgagaacactgcgtctgcccagaatttcgatattgatctctctaacgaagagaataagagaagaacgatcaacagattgttgtataggagcaagcaaagagggtttttggaacttgatcttgttttggggaattgggttgaggagaatgttaattccatggacgaaaatggtgttaaatccctaattcatgtcctcaatttggaaaaccctgatctctggaaatggctaactgaacaggaacagcctccggaagcagtgagttcaaatccggtgttctcg

SEQ ID NO: 155176 - DNA, 430 bp, Arabidopsis thaliana columbia
cactacgtgtacaaatctcctcctcctttagttaagcactactctcctcctccggtttggcgttccccacccccaccggaggaacactacgtgtacaaatctccaccaccaccggtgaagcactactctccccctccagtttaccattccccaccaccaccaccaccaccaaagaaacattacgtatacaagtcccctcctcctccggttaagcactactctcctcctccggtttaccactctccaccaccaccaaaggaaatgtacgtgtacaaatcacctccttcttctacagtacaccattactctccaccacaccatccttacctgtacaaatctcctcctccttcataccactattagatatctctatcacggagaacacgatgttcacaagaagacaaagacatgacgaaaccagtactggtga

SEQ ID NO: 155177 - DNA, 437 bp, Arabidopsis thaliana columbia
tgcttatatttgaaccatggcgcaaccattgtacactaggatagataacaggaggccctgagcaaattattgctctacagggacagtagttgtgtttgtggccctatgcttagtcgggatctggatgatgacatcatcttctgttggaccggctcagaatgttgatgaggtttctctggacaacaaagatgggataaagaaacagatgaccccacctgcagaggagggtaatggtcagaagtttgaagacgcacctgttgaaacaccgaacgaggataaaaaaggagatggtgatgcaagcttgcccaaagaggatgagagctcaagcaaacaagataaccaggaagagaagaaagaagagaaaactaaagaagagtttactccatccagtgagacgaaaagtgagaccgaaggtggggaagatcaaaaagatgact

SEQ ID NO: 155178 - DNA, 389 bp, Arabidopsis thaliana columbia
aaacattctaaagaaaaatgaagatgattttccaaattttcttcatcatctccctcattgcaaccatctcttttggctggggtcaagacttttgtgtagctgacccaaagggtcctcaaagcccatcaggttactcttgcaagaaccctgaccaagtcaccgaaaatgactttgcatttaccggcctcggcacagctggaaacacttccaacatcattaaagccgcagtgactccagcctttgctcctgcttacgcaggcatcaatggccttggcgtatctctggctcgtcttgacttagccggtggtggtgtcatccctctccacactcatcctggtgcttctgaggtccttgtagtcattcaaggcaccatttgcgccggatttatc

SEQ ID NO: 155179 - DNA, 408 bp, Arabidopsis thaliana columbia
tttaaacctagaaacctcaaaaaaaaccggggaatggccccgaaggcagggaagaaccccgctgagaagaaaccagcttccgagaagccggtggaggagaaatcaaaagccgagaaagctccggcggagaagaaaccaaaggccggaaagaagctcccgaaggaagctggtgccggaggcgacaagaagaaaaagatgaagaagaagagtgtcgagacttacaagatctacatcttcaaggtgcttaagcaagttcatcccgatatcggaatctccagcaaagcgatggggatcatgaacagtttcattaacgatatcttcgagaagcttgctcaagaggcgtcgaagcttgcgaggtacaataagaaacctacgatcacttctcgggagattcagactgctgtgaga

SEQ ID NO: 155180 - DNA, 430 bp, Arabidopsis thaliana columbia
  unsure (1)..(430): unsure at all n locations
aaaaaaaaagagtcgcccattttcttctcattttttttttttgctcttgacgaanaagcgaaaaaaaaaaaaaatgagagggatccttcatatccaaggcggtcaatgtggaaaccagatcggagcaaagttctgggaagtgatctgcgacgaacacggcattgatcacaccggtcaatacgtcggcgattctccgttacagcttgaacgtatcgatgtctatttcaacgaagctagcggtggaaagtacgttcctcgcgctgttcttatggatctggagcctggtaccatggattctctcagatctggtccgttcggtcagattttccgtcctgataacttcgtctttggtcaatctggtgccggaaataactgggcgaaaggtcattacaccgaaggtgctgagttgattgattctgttctcgatgtt

SEQ ID NO: 155181 - DNA, 436 bp, Arabidopsis thaliana columbia
  unsure (1)..(436): unsure at all n locations
ntccgtaagaaagataaccttgacagaaggtagactttaactacatcaaccatactaatctagttatagcgggaactgaaatcagacggagcgggctcccacaagatcaatctcatactctttctcatcaccaatgatcccaccaccggacaaagctcgtgatcagactgccatagacctgaacctgtgatctacaagactctagaggaatttccagaggaggtgaagctcattcgtgcttacgccagagacagaccgacgtggcggactacggcgcatccttggagagatgattctcggtttaaactaaccggagtaccaactcttgtgcggtcggatggagactcttttaaacgacctcttgaagatcatcaagcccaccttccttacttgatacttcctcttcttgcaccatccacttgatttgatcgatatc

SEQ ID NO: 155182 - DNA, 433 bp, Arabidopsis thaliana columbia
cggacgcgtgggaaaaatggttttgcaaaagcttcctctcattgggctgcttttgctcgtggcatcgtcgcctctccaggggatgcagatggacctgtttgcccgccgtcgaacaaactaagccgggcaagtttccctgaaggttttttatttggcacggctactgcggcataccaggtcgaaggtgcgattaatgaaacttgtcgtggaccagccttatgggacatctactgtagaagatatccagagaggtgcaataacgataacggcgatgtggccgttgatttcttccatcgttataaggaagatatccaactaatgaagaatctaaacacagacgcctttagaatgtctatcgcatggccaagaatatttcctcatgggagaaaggagaaaggagtgagtcaagctggtgtgcaattctaccacgacc

SEQ ID NO: 155183 - DNA, 364 bp, Arabidopsis thaliana columbia
ttcgaaacacacttgcggtcttatctaaatcacaaaccaacaaaaagaaaaaatgggcttggtgccgatcatttgctttgggcatagtcttccttagttgtctcatcgccgtttatggccaaggtacgaggatcgggttctactcgactacgtgccctaatgccgagacaattgttcggaccactgtggcatctcactttggttcagatccaaaggttgcacccgggttactgagaatgcacaaccatgactgctttgtccaaggttgtgatggttcggtgcttttatcgggacctaactctgaaagaaccgcttgctcaaacgttaacctccatggttttgaggtcattgacgatgccaagag

SEQ ID NO: 155184 - DNA, 330 bp, Arabidopsis thaliana columbia
  unsure (1)..(330): unsure at all n locations
cgtttaccgatcttctcgattctccaatttcaaaccctaacattttgattantccttcgtggttttcacaggcttgagagattcncaaccaattattattcctgcttttataaagagagctgccagtaatggctcttctccttctttattcacaaaaccacttctgtcttctcgtgttgctgcatcttcccctaactatctattagtttcacaaacatgttcatatctaacatctttaaaataatcctcaatgctatcaaacacctcctctatctgcaccttatttctttcatcgttataagggttatttctttcataccctattttttt

SEQ ID NO: 155185 - DNA, 383 bp, Arabidopsis thaliana columbia
  unsure (1)..(383): unsure at all n locations
aaacgagcaaaagaagaagagaaacaacattaagtagtaatggcttcctctatgctctcgtccgccgctgaggtgtagcgagtcgccggctcangccaccatggtcgctccattcaccggcttgaagtcatccgctgcattcccggtcacccgcaagaccaacaaggacatcacttccatcgcaagcaacgggggaagagttagctgcatgaaggtgtggccaccaattggaaagaagaagtttgagactctatcttacctccctgaccttagtgacgtcgaattggctaaagaagttgactaccttcttcgcaacaagtggattccttgtgttgaattcaaggttcagcacggatttgtgtaccgtgagcacggaaaacact

SEQ ID NO: 155186 - DNA, 397 bp, Arabidopsis thaliana columbia
gccggtggaacacggcctgaaaaagggttcaggctttacacagagaggagttttaataatgacttgcagccgcagacgtatcctgaaatattgagatcaaaccttgcaaatacagttctgaccttgaaaaaactgggtattgatgacttggtgcactttgattttatggatccccctgctcccgaaacactgatgcgagccttagaagttttgaattacttgggagcactggatgatgatggtaacttgacaaagacaggtgagatcatgagtgagttccccttggatccacagatggcaaagatgctcatagtcagtcctgaattcaactgctcaaacgagattctctcagtttcagctatgctatcagtaccgaattgctttattcggcctagag

SEQ ID NO: 155187 - DNA, 279 bp, Arabidopsis thaliana columbia
cggacgcgtgggtgggtcctctcgcaatcatgaggatttggagtttctgtttgttctaggtcatggctgagctttgggggagtgttgtcgtttcagttctcttctggggatttgccaaccagattacaactgttgacgaatccaaaaagttctatcctctgtttggacttgtggccaatgttgcacttatcttctcaggaagaactgtgaaatatttctctaatatgagaaagaatcttcgtcctggagttgatggctggtctttttcattaaaagcta

SEQ ID NO: 155188 - DNA, 469 bp, Arabidopsis thaliana columbia
  unsure (1)..(469): unsure at all n locations
cttaatcttattcttctttatctctctctttttctcaagaacatattgagcttctttctttgttccttattctgttagggtgggctcttacaaaaatgtcnttcgcangaacaacccataaatgcatggcatgtgacaaaacattttatcgtgtccacaagttaactttttataaccgtgtctaccacaaatcttgttttctatttcaccattttaaattaactcttaatcttacctttttctactttcatttaattagttctcttctgtatttcttcatcatctttacaaacttttattttaactttgtgttttatttatatttttttttttatatactttttattttttcttaaaacattatttttttaaattcaattttttttatacttattattattctttttttttaaaattttattatttttataccttaatataattttttttcacacccaatatattattt

SEQ ID NO: 155189 - DNA, 435 bp, Arabidopsis thaliana columbia
ggtttacttcttcttcgtgtgcgagtagctttttcctgcgattctcatcgagttttgggggtgctttgttatcaaggtggagaatcgatttgaagatggcgagcgaaagtcctgatgttgctgttgtagctccggtggtggagaatggcggcgctgagtcctctaatggtaaagaggaacaattggaatctgagctttcgaagaagcttgagattgcagaagatggtcaagaggagaacgatggagaagaaggaagcaaagctgagacttcaacgaagaagaagaagaagaaaaataaaagcaagaagaagaaggaactccctcaacagactgatccaccttcaattcctgtcgttgagctcttcccatcaggagagtttcctgaaggtgaaatccaagagtataaggatgataatctttggagaacaacatctg

SEQ ID NO: 155190 - DNA, 439 bp, Arabidopsis thaliana columbia
taattcttcaccattgacctttggtccttcttctcttttctctctctcttaaacccaattggagattgttcgatttcgatggacgagattcttacaagaacataagcagcttcggttttttgggattatcttatttggtcggatgatgatcttctcgatgtctgtgctaggctttgggaattagatatatttggggttaagctcgagtctctccggttttgagtttacttgagtttgttagtatttatggctgaggtgggaaaagttctggctagtgatatggagttagaccattcaaatgagactaaagcagtggatgatgttgttgccactactgataaagcggaggtcataccagtggctgtaactagaactgaaaccgttgttgaaaggttggaatctactgactgtaaggagcttgaaaaacttgttccacata

SEQ ID NO: 155191 - DNA, 442 bp, Arabidopsis thaliana columbia
  unsure (1)..(442): unsure at all n locations
gcgtacggtttacttataacacaatcattanaggaatttgtaaagaagggatggtggaccgcccgtgtgagatggttcggaatggggggttgaaaggttgtgagcctgatgtgatctcttataacatcttgcttcgtgctcttttgaatcaagggaaatgggaagaaggtgagaagctaatgactaagatgttttcagagaagtgtgatcctaatgttgtgacttatagcattttgattactactctatgtcgcgatggaaagatcgaagatgcgatgaatcttcttaagcttatgaaggaaaaagggttaactcctgatgcttatagctatgatcctttgatagctgcgttttgtagagaaggtaggttagatgttgctattgagttcttggaaactatgatctctgactgatgtttaccggacataagtaacttcaacac

SEQ ID NO: 155192 - DNA, 430 bp, Arabidopsis thaliana columbia
gtgagatctagaagaagaagaagaagaagattctaagacaatggcatccatggcaggaccggatcatctcttcaatttgagggaccatttctacttgggtgcttatcaagctgcgatcaacaacagcgagatccctaatctttcgcaggaagatatcgtcgagcgagactgtctcgtccatcgcgcttacatcgctctcggaagttaccagcttgtcatcagtgagatcgatgaagccgctgctactcctctacaggcagtgaaactccttgctatgtatctatcgagtcctgaaaacaaggaatcaaccatttcgagcttgagggaatggttggcagatccaactgtaggaaacaatgctattatcaggttgattgctggtactatattcatgcatgaggaagactataatgaggctctgaagcacact

SEQ ID NO: 155193 - DNA, 313 bp, Arabidopsis thaliana columbia
  unsure (1)..(313): unsure at all n locations
caacctanctagctagtaaacagtattttttatataccaaaaatcgctccaanttccatggctcttttcttagctctgaggttcacttttacacaacaatctcctcctcttgtagctatactccttgcggcctaagtttcccctctcccaagccaaagccaacttctaaaccaaccccaagccctaactcttgctctagcaatttccctaaatacacccttttactctatttcttctctaattttctcaactccctcctttactttaccctttacaagccacccgaccaaccattcttcagcctcatccaatt

SEQ ID NO: 155194 - DNA, 444 bp, Arabidopsis thaliana columbia
cttccgttcaatttccaagcaaagataacggtgatattaaggctcgcccgtcttggttgtaaacagggacccttctatcgggtagggggcgccaataaaaaatcgcgcagggacggtaaacaaatcgaggtgttaggcttttatgatccactccaaggcaaagaagatgcggatagagtgagcctcaaattcgacagaatcaagtactggttatctgttggagctcaaccaacagacacagtggaaagcatgcttttcagggccggtttgataccaccaaagcctatggtagtggtcggttcgaaaaatgggcagaagtctacgagccaacatgtttcacccattacaggtgaaatcttgaactaagagtgttgatgcgttgagcaagaaagagccttttgtgtctgtgtgaaaggagtttatgtaatgttgtttaagactttt

SEQ ID NO: 155195 - DNA, 326 bp, Arabidopsis thaliana columbia
ctggcgattactactagggaggtacacaatttattgggtggaacatgaaacgtgaaacaaacatgtagaaagaaaaacatattaaaaaaaaaacaatggtcaagctggggaaggatcatatggtggtatacccctcccttattacacacacaaacacagacccacacacacacacacacattcacaaacgttcatgatcaccaaatctgccttaattaggcagagtcaatcccttaaaagaagagatcatcaaaccggtcattggttggagctttaccaccatgcatcacaagtcctttcttaccatcaatggtagcaatcttgga

SEQ ID NO: 155196 - DNA, 439 bp, Arabidopsis thaliana columbia
atcatttccaattaataaaagttaaagccatggctgcatctttctctgtcccctctatgagaatggaagaagaagggaggggggaagcggaggttgcggaagtgcagacttggtggagctcagagaggttcaagctaacaaggcgcccttacactgcccgtgacgtggtggctctacgtggccatctcaagcaaggctatgcttcgaacgagatggctaagaagctgtggagaacgctcaaaagccatcaagccaacggtacggcctctcgcaccttcggagcgttggaccctgttcaggtgaccatgatggctaaacatttggacaccatctatgtctctggttggcagtgctcgtccactcacacatccactaatgagcctggtcctgatcttgctgattatccgtacgacaccgttcctaacaaggttgaacacct

SEQ ID NO: 155197 - DNA, 439 bp, Arabidopsis thaliana columbia
gtggactttaaaaatctgtaaaaaagcaaatccgaagaaagagagagagagaaggtgattgtgaaatttcagatgacgcaggagttttttattctcgccggagttttctcctcccaccgtctctgattctcgtcgccgccgtacacagttgttgttctctgccggatggtgttgggctatgcttaccctgcgtatgaatgttacaagactgttgaaaagaataggcctgaaatcgagcaacttcgcttttggtgtcagtactggatattggttgcttgcttgacagtttttgagagagttggtgatgcgtttgtttcatgggttccgatgtacagtgaagctaagttggcattcttcatatacctgtggtatcctaaaaccaggggtactacatatgtctacgagtccttctttaagccatatctctcacagcatgaga

SEQ ID NO: 155198 - DNA, 451 bp, Arabidopsis thaliana columbia
  unsure (1)..(451): unsure at all n locations
acgcttaagngggccttgttttctctctgccagttattctgtcagatcaatgcctgtgatgatgtgggcgttatgccacgacaatgcgggggattctagtcatgagccagaaccatccccagctgactcatttgggaaactaggcacaagtgatcattctagagctttgattcctgttgcctcagcagcaatgctggctcctcggcctcctaaccgtaagtttaaaaggactgagcagcagctagctgcacaacgcagaattcgtcgacctttctcagttactgaagtagaagcactggtccaagccgttgagaaactcggaaccggaaggtacaaaacaaagaaatagcactttctcttcttcatgttgctgacaaaatgtgtttgaaaactacaagtggagagatgtgaaggttcgtgctttcgaggacgcagaccatcgtacctatgt

SEQ ID NO: 155199 - DNA, 281 bp, Arabidopsis thaliana columbia
  unsure (1)..(281): unsure at all n locations
gtctccatttacaacaagtatattaccgatatacttgacttgcctgaaggttgttgttttccaagggcggagtgtcgaanaaaggactaggaaccaacgcctttttctggtcctgtaccaagactaggctctgtcaagaacgcgtcatcgatgagaggaggatcagtcagagtccctatgattgatattaagcctctcgatctgttgaatgagctctttgtggaatgtagaatatatggagaagttttagcgacataaggactgattttctctaaagatat

SEQ ID NO: 155200 - DNA, 311 bp, Arabidopsis thaliana columbia
  unsure (1)..(311): unsure at all n locations
ccggagttgtggcggtgtacggcgaatgttccatgacggagacgaaacanaaatctccgttctccttgaaaggtgggctgtgtcanatgcttcntggcggtgtaatcatggatgtcatcaacgcatagcaagctcgaatcgctgaagaagctggcgcatgcgccgtgatggctcttgaacgtgttcccgccgatattcgagctcaatgcggtgttgctcgaatgagcgatccagaaattatcaaagaaatcaaaaacgccgtgacgattcctgtgatggcgaaagctagaattggtcatttcgttgaagct

SEQ ID NO: 155201 - DNA, 366 bp, Arabidopsis thaliana columbia
  unsure (1)..(366): unsure at all n locations
atttctcacattttcgtagccgcaagacttctttcagattcttacttncanctatngcggaagagaagtttgacagttacgttgtnatcattggtcatgttgattctggaaaatcgaccacaactggtcacttgatctataagcttggtggtattgacaagcgtgtcatcgagaggttcgagaaggaggctgcttagatgaacaagaggtccttcaagtacgcatgggtgttggacaaacttaaggcctagcgtgagtgtggtattaccatcgatattgctctatggaagttcgagaccaccaagtactactgcacattcattgatgccccaagacatcttgatttcattaaaaaccattattact

SEQ ID NO: 155202 - DNA, 434 bp, Arabidopsis thaliana columbia
gcagttgcaaccatggcaggaggatttatgaaccatctaaagaggctcaatgctccgaggcattggatgctggacagagttggtggtcccttcgctcccaaaccatcttctggacctcacaagtcgagggagtgtcttcctcttgtcctgatcatcaggaacaggttgaagtatgctttgacttaccgtgaagttatctctatcttgatgcaaaggcatatccaagttgatggcaaagtcaggactgacaagacttaccctgctggtttcatggatgttgtatccatccccaagaccaatgagaacttccgtcttctctacgacaccaagggacgtttccgtctccactccatcaaggatgaggaagcaaagttcaagctttgcaaggttagatctatccagttttgtcagaagggaattccataccttaacac

SEQ ID NO: 155203 - DNA, 432 bp, Arabidopsis thaliana columbia
caccattcaggatcagagattcgtgacctgtgaagacactcaatatgagtaagcttgggagtgaggctgttagagaaggcataacgactatcaagggaaaatctgaggagaagaagcgtaactttgttgagacagtggagcttcagattggtctgaagaactatgacccacaaaaggataagcgtttcagtggatctgtgaagctcccacatattcctcgcccaaaaatgaagatctgtatgcttggagatgctcagcatgttgaggaggcagagaaaatgggacttagtaacatggatgtggaggctttgaaaaagcttaacaagaacaagaagcttgttaagaagcttgctaagtcttaccatgctttcttggcttctgagtctgtcattaagcagattcctcggcttcttggtcctgggcttaacaagg

SEQ ID NO: 155204 - DNA, 430 bp, Arabidopsis thaliana columbia
cttcatcatcttcttctatatatacctctttaagcttgcttctctttgtctttatcggggccgatggttcaaacagagagccgatcaaaggatgggtcttaatctgaatttgtctatctactctttaccaaaacccttatctcaatttctcgatgaagtgtcgaggatcaaagacaatcattccaaactgtctgaaatcgatggttatgtcggaaaattagaggaagaaaggaacaaaatcgatgtttttaaacgagaactccctttatgcatgctcttattgaacgaagagattgtttttctctgtgtagcgattggggcgttgaaagatgaggctagaaaagggttatcactgatggcatctaatgggaaattcgatgatgttgaaagggcaaaaccggaaactgataagaagagctggatgagctct

SEQ ID NO: 155205 - DNA, 343 bp, Arabidopsis thaliana columbia
gaaagtttatctcacggatgagaaagagttgattatggaaccatgcttgaaatggggcgcaaattccaatatctggggggccatcaaggcatttgggttgaaggcaacagttcatgtggtcgatctgcaagtttttgctcatcctcgtatcactctcaagccattagttccaagtttcccttgttttgccaatatctatgtgtctcttatggagaagccacatgttgattttggactgaagcttggtggagcagatcttatgtcaatccctggcctttacagatttgatcaggtgcagatcaaggatcaagttgcgaacatgtatctcttgcctatgaccctt

SEQ ID NO: 155206 - DNA, 456 bp, Arabidopsis thaliana columbia
  unsure (1)..(456): unsure at all n locations
gacgccgtnccgaccctcctgctttttttttccacaccgctgttggatcttatcaatgagacttaagcttgatgagtgaaatcaagtcatggttggcgtttgctgcccagaaggtcgttgaagtgaacgctttggccaaggctttggctggtcagaaggacgaggctcttttctctgccaatgctgcggctttggcttcaaggagatcttccccaagagtcaccaacgagggtgtccagaaggctgctgctgctttgaagggatctgaccaccgtcgtgcaaccaatgttagtgctaggctagatgctcagcagaagaagctcaatctcccaatcctaccaaccacaaccattggatccttcccacagactgtagagctcaggagagttcgtcgtgagtacaaggccaaaaaggtctcagaggaggactacgtttaagccatcaaggaagagatca

SEQ ID NO: 155207 - DNA, 413 bp, Arabidopsis thaliana columbia
  unsure (1)..(413): unsure at all n locations
gcaagctcttcaagctttcgtctccgttcgcccatggctccactcctctctcatctctctcgaagcccaattccttcccgaaccacagaatgcccgctttagttccggtcatcagagccatgaaaacgatgcaggggcgcgtggtgtgcgcaaccagtgacaagactgtggcggtggaggtggtgaggctggctccccaccccaagtacaagaggcgcgtgaggatgaagaagaagtaccaagctcacgaccccgataatcagttcaaggttggcgacgtggttagactggaaaagagcagacccaggagtaagactaaatcattcgtggcgcttcctgtcatcgcaagggccgccaggaaagccgaagccggaggagatgaactncttggccttccctgggagtctcagcag

SEQ ID NO: 155208 - DNA, 427 bp, Arabidopsis thaliana columbia
gacacaaagggacctgagttcggccctttttacgactacaaagactacatctagacttggtgcggtgccattcgtagagagaatatatcttacttaaaatcaagctttgcctgttctactacaatgcgctcaacaattccctcataagattcctttgcatgggactctgattggttagctgaacttgccaaatgcatattcatgccataacctaatacaacgagtccacactaatttccagtgtcgatttagattctatcaaccgcaacacattccgtatattgcttcacttaatcacttctctgttgagcagtaaggtaattcaacctgatcttttgattgctgtgtatcgacatagctatatccggtccactactgtcgatgtacacaaaggatgtccattatagccaacacacgctggctttta

SEQ ID NO: 155209 - DNA, 433 bp, Arabidopsis thaliana columbia
ctcaccaagtcctctgttgaacatgacgattaagcctaaatcgccggcgagattcaagggaggtaggcagtcttcgcttgcgccggaatcaagaaccccgattgatacgttaacggaagatgaggacgacgacttggctgcggcggctacagctgggatcggggatccgacgattcgtttaatgtatttagccaacgaaggtgatatcgatggcatcaataagatgcttgattcgggtactaatgttgattaccgtgacatcgatgcccgtactgctcttcacgtcgccgcttgtcaaggacgaaccgatgtcgttgagctgctgcttagccgtggtgctaaggttgatacgaaggaccgatggggtagtacgcctcttgcagatgcagtgtattacaagaatcatgatgtgattaaacttttggagaaacat

SEQ ID NO: 155210 - DNA, 394 bp, Arabidopsis thaliana columbia
cccttctcccaatctcattttctccgaaaacctttcttctctcaaattggtgtgaaaacatggctggcggcgagcaccactttgaggccagcgaatccggagcttccaagacctatcctcaatcagccggtaacatccgtaaaggtggtcacatcgtcatcaaaaaccgtccctgcaaggttgttgaggtttcgacttccaaaactgacaagcacggtcacgccaaatgtcactttgttgctattgatatcttcactgctaagaagcttgaagacattgttccatcttcccacaattgtgatgttccacatgtgaaccgtgttgattaccagttgattgatatcactgaagatggctttgtgagccttctcactgacagtggtggcaccaagga

SEQ ID NO: 155211 - DNA, 443 bp, Arabidopsis thaliana columbia
  unsure (1)..(443): unsure at all n locations
ccttccaaccaaatcttaaccgtttaactttgtgctgtactactcaacctaaatggccgcctaaacgagggctctctcctcccgtgcgttccccnntaaggccgtcaagctttcccccgcggcatctgaagtccttggaagcggccgtgtgacaatgaggaagactgttgccaagccaaagggcccatcaggcagcccatggtacggatctgaccgtgtcaagtacttgggtccattctctggcgaatcaccgagctaccttaccggagagttccccggagactacggatgggacaccgccggactttcagctgaccccgagacattcgcaaggaaccgtgaactagaagttatccacagcaggtgggccatgctcggagccctaggctgcgtcttccctgagcttttggctagaaacggagtcaagttcggagaggcggttt

SEQ ID NO: 155212 - DNA, 407 bp, Arabidopsis thaliana columbia
ctcctcttgcaaaccaacgtaaaacacttactaagagatcaatatggctggagtgatggagttggcatgcatgggctgggcttgcatgattgtggccggtccaatcacagcgaacgcgcttatgagttgtggcaccgtcaacggcaacctggcagggtgcattgcctacttgacccgaggtgctccacttacccaagggtgctgcaacggcgttactaaccttaaaaacatggccagtacaaccccagaccgtcagcaagcttgccgttgccttcaatctgccgctaaagccgttggtcccggtctcaacactgcccgtgcagctggacttcctagcgcatgcaaagtcaatattccttacaaaatcagcgccagcaccaactgcaacaccgtgaggtgatgagcga

SEQ ID NO: 155213 - DNA, 435 bp, Arabidopsis thaliana columbia
  unsure (1)..(435): unsure at all n locations
ggaaaanccgccggggccgacgcgtccgctgaattcgtctctgagctcatgaagttttttttacctgcgttaatatctttctcttgacatattgttcggacttagggggctctctattttactttcttgtgttgtctttcttaaataatgcaaatcatctgttatgttgtttgagtgtatagaatgtatttctttgatgtagcatattcctgtgctttctttatttaatggcttgtcctattttttatgcattgtaactatcagtttaattaatgatcgctaatctaaaaaaaaaattaatattgtctccccttctataagatccaagcttacttactcattcatgctacttcatatctcttctattgtgccacctaaatttaaatcacttggccgtttttttacaacctttttacttgaaaaacccttattttt

SEQ ID NO: 155214 - DNA, 452 bp, Arabidopsis thaliana columbia
ccggccgcgccgtccgaccaaggatcactgtggactttgaaacctgtttaatcttcctcctctaatgccttttctgaggcctctcttacgatcttggcttcaggaaaacaaaagactcacgagctggctgtgctcttcctccgagccctccttcattaccaatcattggtcatcttcaccttatactctttgtcccaatccaccagtctttcaagaacatctcatctaaatatggacctctcctccacctccgcttctttaacttccccatagtcctcgtctcctcggcctcaacggcctacgagatcttcaaggcccaagacgtgaatgtctcctctcgccctccccctcctatcgaggagtctctcattttaggatcttccagcttcatcaacactccctatggagattactcgaagttcatgaagaaagtcatggtccaaaagctgctt

SEQ ID NO: 155215 - DNA, 390 bp, Arabidopsis thaliana columbia
ttgtaattcgtggtttaattagacaacacctggcttcgaacataggagttgctaagaggggggttcgtgaaaaaaagccgggggtctgggaaatccttcaagaagtcatgcaggggcatcccgtattactgaatagagcacctaccctacatagattaggcatacagtcattccaacctattttagtggaaggacgcactatttgtttacatccattagtttgtaaggggttcaatgcagactttgatggggatcaaatggctgttcatgtgcctttatctttagaggctcaagcagaggctcggttacttatgttttctcatatgaatctcttatctccagctattggagatcccatttcggtaccgactcaagatatgcttattggac

SEQ ID NO: 155216 - DNA, 436 bp, Arabidopsis thaliana columbia
gacattataagcccactttctcctcataagtcgcctgctgctaagacaaatggtatgagcggtgctaccaagttggcaggaacaccagtgagcacagcaatgacaactgccaagtggctcaggactgtcatatccccgcttctgccaaaaccttctcctgggttggaacatttccttaaatcatgtgatagggatataacaaatgacgtcacacgaagagcacacataatattggaagctattttcccaaatagttcccttggtgcccaatgtggaggtggaagtttgcaagctgttgacctgatggatgacatatgggcagagcagcgcagattagaagcttgtaagttatactacagagttcttgaggcaatgtgtaaagcagaagctcagattttgcatgcaaataatctgaactctttattgacaaatgaga

SEQ ID NO: 155217 - DNA, 426 bp, Arabidopsis thaliana columbia
gttctgaagcaacaaaacagggttttggctagggttttaactttggctgctctgtctcgagccctcgagacttaaacccacttagtacaatctccatataatttgagtagaacctaaaagatcgaagcttgaggaaaatggtcccttccaatggcgcaaaggttcttcgcttgttgagtcgtcgatgtctctcttcatcgcttattcaagatttagccaatcagaaactgagaggagtatgtattgggagttataggagattgaatacgagtgttggcaatcatgctaacgtgattggagattacgcttcaaaatctggacatgatcggaaatggatcaactttggaggttttaatactaattttggttctacaagggcttttcatggaacaggttcttcgttatgtctgctaaggactactatag

SEQ ID NO: 155218 - DNA, 155 bp, Arabidopsis thaliana columbia
cctttccaatggatctgctcaaggaagatattctgaagaaacttaagagtctatcttagtaatcttttggtaagaaggtgttcaaaccatcttatatctatcataataaaatccataagcttctataggaataactactctttcactatcttaac

SEQ ID NO: 155219 - DNA, 294 bp, Arabidopsis thaliana columbia
gcaaaaacaaaaccaacaaggaacttgtctttctctctggctctctttctcttaacgttgtcatatcttgaggcgggaatgtgatatatataggtttcttgttggatcttgatccctctggaaaaggaggggagaatatcacttcatgatgggattttgtatcttctctcttttagttacctcccacattactacttagtccaagctttttttttcataatatcattatctcttaattttttctacttcttcccatttttttaatcatctttctactatatctgctttctcttt

SEQ ID NO: 155220 - DNA, 431 bp, Arabidopsis thaliana columbia
gttaaccgcatttctgacaagtattgggacttttactcaagtgagtcactcgaacatgagcttcctggtcacttgctccggtacccgatcggtgtagccagcgaaggcgacatcactgagcttccaggatttgaattcttcccggacacaaaggcccgtatcctcggcaccaaatcagactacctgcctccaatccttacaacctaatctcactaagcatgtcaagtaatgatctctctctccctctctgctttgctgctgttgtagctttgaataaaacttgagtgtctacctttagaattaagaagtcaaatggttgttatgatgatgcacttctttacccctttggtttttatattcgtacaatgacgtggtgagagaatgtagctttgtgatcttgttttgtgttggtatgtaccttaggacttatg

SEQ ID NO: 155221 - DNA, 345 bp, Arabidopsis thaliana columbia
ttctcgatttctctcctctgctctccaatttcatcttcccatggcgatttctactccggccgctttttcttcctcgtctagaattctctattcctactcctctccttctccttctctctgtcccgccatttccacctctggtaaactcaaaaccctaactctctcttcctccttcctcccttcttactcattaaccaccacctccgcttctcaatccactcgtcgctccttcaccgtccgcgccgctcgtggaaagttcgagaggaagaagcctcatgtcaacatctgaaccatcggtcatgttgaccattggaaaactactttaaccgcaactctaaccattgc

SEQ ID NO: 155222 - DNA, 441 bp, Arabidopsis thaliana columbia
  unsure (1)..(441): unsure at all n locations
tccaccagccaatccccggaggttcttttcaagttacataaggaccaatggaaatatatcaaaggttccccctagtagctggatgggatttttctttggttctacaccaccagacagtcatggccctaggctttcgaaattgagttcatctccacaatgtacactttctggaagcagtccacctgtgggctctttgccaaaatcatttccaccttttcaacatccgagccaccaactgttggaagagaatgggtttaaacaagaaaagtacttgaagtatcgcaagcgctgcttaaacgaaagaaagaagctaggtagcggatgcagtgaggaaatgaaccatttgtaccgattntggtcgtatttcctcagagacacatttgttctctctatgtatgatgactttcagaagtttgctcttgaggatgcagcttgcaatta

SEQ ID NO: 155223 - DNA, 440 bp, Arabidopsis thaliana columbia
  unsure (1)..(440): unsure at all n locations
ccgaaaacctcaaaccatggccgagggactcgtattgaagggcattatgcgcgcccggaccgacattgtcacgggcggggctacnccnatcgacaattccgacatcatcgtcacagcgtcgcgtgacaaatccatcatcctctggaaactcacaaaggacgataagtcttacggtgttgctcagcgtaggctcacaggtcactctcacttcgtggaagatgttgttctctcatcggacggtcagtttgcactctccggaagctgggacggtgagctccgtctctgggatcttgccacgggagaaacaactcgtcgattcgttggtcatacgaaagatgtgctctctgttgcattctctactgataaccggcagatcgtgtctgcttctcgtgatcgtacgattaagctttggaacacacttggtgagtgtaagtatacca

SEQ ID NO: 155224 - DNA, 429 bp, Arabidopsis thaliana columbia
acgacttccttctgccagctagaaggaaagatgcacgatctgtgaagatcaagagaagcaagggtattgtcaagtttaaggtcaggtgctcgaggtacctctacacgctctgcgtctttgaccaagagaaagccgacaagcttaagcagtctcttcctccaggtttgagtgtacaagacctttgaagatgaagcaaagttcttctgcagattggagttcctttggtgacgaatcctttgcatcattttataatttccttaggagagtttattttgtgtcgttaaatttatgttgagacttttcgagtttgagtgtgttttggatttaattcagtttgaaaaaccaaatacgttctcaactctggattcaatttggatttttattttcagaaaaaaaaaaatttttattaaataattattttattaatat

SEQ ID NO: 155225 - DNA, 444 bp, Arabidopsis thaliana columbia
gccttcttccgcatctcttttcatttctctctgatttctcgatctctccgtccaactatgggtgccttcacaagcaaattgggcgatgagttgatcgccaacgctgcctacatcggcacacctggaaaaggtattttggctgctgatgagtccactggtaccattggaaagcgtcttgcgagcatcaacgtcgagaacgttgagaccaacagacgtaacctccgtgagcttctcttcaccgcccctggtgctcttccatgcctcagtggtgtcatccttttcgaagagactctgtaccaaaagagttccgatggtaagcttttcgttgatatcttgaaggaaggaggagttcttcccggtatcaaggttgacaagggtaccgttgagctagctggaaccgacggtgagaccaccactcaaggtcttgacggtctcggggacagg

SEQ ID NO: 155226 - DNA, 444 bp, Arabidopsis thaliana columbia
  unsure (1)..(444): unsure at all n locations
gaaacctaccggaagaattctgtaacggcatgaacgccgncgatgctatcgctganaaaggtggtttaccggtaccacctgcctatctctcacttanaggcttactaaaaagggagaagagaaaatctgccgccgtgactggtgtgaattttgcttccggtggagccggaatcttcaacagttccgaccaaaaacttggacaagctattcctttatccaagcaagtcaacaattggctctctattcatgaagaagtcatgaaacttgaaccatccgcagcacagcttcacctatccaaatctctattcactgttgtcataggaagtaacgatcttttcgattactttggatcgttcaaactccgacgccagagcaatcctcaacaatatacacaattaatggctgataaactcaaagagcaattgaagagaattcacgatagtg

SEQ ID NO: 155227 - DNA, 439 bp, Arabidopsis thaliana columbia
  unsure (1)..(439): unsure at all n locations
cggacgaagaaggaagacaaggaagaagatcggagatggcatcgaatgcggcngttccgtgctggagagcggcgggggtggcgatatatatcgtattcaaacatctgtgcgaatatcgtgaggaactgtctcaaggagccacacaaagctgaagctcttactcgcgagaaggttcacttctctctctccaaatggggctgatggaaagccccagaaacctgttttgcggtcagacacacctgaagtttgaagtcaactttgagcttatgttcttaagggattcaaaagtaactgagttaccaagatttgttttctttttattgtcaacaatggagcttgagtgaaaaactcatttccgatcataataatgacacactgagtcttgtgtatctcttttcttcttttgctattctgtttcactttttgtatgcgaacaatg

SEQ ID NO: 155228 - DNA, 445 bp, Arabidopsis thaliana columbia
gtcatcaccaccacaacctccggcgaaattggacgtgcgtgaatcaatctcactgcaagggcaagtctccatgaatctcggaaaacacgtaatcaccaccgtctctcaaaactccaacgtcatcttctcaccggcttcaatcaacgtcgtactcagtataatcgccgctggatccgccggcgctaccaaagatcagatcctctcgtttctcaaattctcttccactgatcaacttaattcattctcttccgaaatcgtctccgctgttctcgctgacggtagtgctaacggtggtcctaagctctcggtggctaatggcgcctggatcgataagtctctctcctttaaaccttcctttaaacagctcttggaagattcgtataaagctgcttcgaatcaagctgattttcaatcgaaggctgtggaggtgattgctgaagtgaat

SEQ ID NO: 155229 - DNA, 413 bp, Arabidopsis thaliana columbia
gcgatgaattgggtaggtttgttgagcttacggggatccctgttgcgagtacgttggtggggctgggatcttatccgggtgatgataagttgtcgttacatatgcttggaatgcatgggactgtgtatgcaaattacgctgtggagcatagtgatttgttgttggcgtttggggtaaggtttgatgatcgtgtcacgggtaagcttgaggcttttgctagtagggctaagattgttcatattgatattgactcggctgagattgggaagaataagactccctatgtgtctgtgtgtggtgatgataagctggctttgcaagggatgaataaggttcttgagaaccgagcggaggagcttaagcttggatttggagtttggaggaatgagttgaacgtacagaaacagaagttt

SEQ ID NO: 155230 - DNA, 431 bp, Arabidopsis thaliana columbia
  unsure (1)..(431): unsure at all n locations
agaagatgtcttggcaatcatacgtcgatgatcaccttatgtgtgatgtcnaaggggggcatctcaccgccggcgggggctcggccaagacggcagtgtctgggctcagagcgccaaatttcctcagttgaagcctcaagaaatcgatggaatcaagaaggactttgaggagcccgggtttcttgccccaaccggactatttctcggtggcgaaaaatacatggttatccaaggtgaacaaggagctgtgatccgagggaagaagggacctggaggtgtcactatcaagaagacaaaccaagctttggtctttggcttctacgatgaaccaatgactggaggtcaatgcaacttggttgtcgaaaggctcggggattaccttatcgagtctgaactctaaaaccaaagtttcatttcaggttcttcttaac

SEQ ID NO: 155231 - DNA, 399 bp, Arabidopsis thaliana columbia
  unsure (1)..(399): unsure at all n locations
ccgttggatatgcctttcacgtggtaaaggataatagacgtggcggtgggcgtgactcannacattgctnagaagaaaccgtgcatggagagacgcctgtggtgtgtaccttcgtagtcctttaaacggcaagcgtgtttctctcttcgtttgcaacttcctcctaacaacggaacattgcatgtcattttactaccctccagcgcgagcctctagaatcgacccgagacaattagaaatgagtgattgtgtgattgtttggtgaagcatatgatatgaaccgtataagaagatagtaagagttggtagttggtacaagactcgttgttacatagattgaaaaaaggcgtctgcacatgaaccttgcttaatctatagactatttgtaagagttttgat

SEQ ID NO: 155232 - DNA, 422 bp, Arabidopsis thaliana columbia
agcccgtcggcccaggaagaagaagaagattaatgtctcacaggaagtttgagcacccaagacatggttctcttggtttcgttccaaggaagagagctaaccgtcacagaggaaaggtgaaggcgttccctaaggatgaccaaaccaagccttgcaagttcacagctttcatgggttacaaagctggtatgactcacattgtcagagaagtggagaaacctggatccaagcttcacaagaaggagacatgtgaggctgttaccatcattgagacacctgctatggtggttgttggagttgttgcctatgtgaagactcctagaggtttgaggtctttgaacactgtctgggcacagcatttgagtgaggaggtcaggagaaggttctacaagaactgggctaagtctaagaagaaggctttc

SEQ ID NO: 155233 - DNA, 442 bp, Arabidopsis thaliana columbia
caaaaatgggtgagaaagatattccaaggaacttgaaggaagaagaagaagaagaagaggagaaccaaagtgaagaagcgggggtttgatctcttcacttccttcagacatagattgctcagggaccaagttgtacaagtaccaaggatgttggtacgacaaagatattctccaagcaatcctcaatttcaacaaaaactttcagccacaagaaacggatataattgttgcttctttccccaaatcgggtacgacttggctcaaggcactcacattcgcactcgcgcaaagatcaaaacacacttcagacaatcatcctctgctaactcataatcctcatgagctagtgccgtacctcgagctcgatctttatctcaaaagctcgaaaccggatttgaccaagttgccatcatcatcttcgagattgttctcaacccacatg

SEQ ID NO: 155234 - DNA, 413 bp, Arabidopsis thaliana columbia
acgaaaaaaaattggcgtcgattgatagagactatgaagaagaagaaaatgccgtgcctcaagctctccaccaacggtaaccttgacggcatcaatacatcttccattctctcggaagcttcctccaccgtcgcgaaaatcatctgcaagcctgagaactatgtgatgattgtcttgaaaggctcagtgcctatgtcatttggcgggaccgaggatcctgcagcttatggtgaattagtttctatcggtggccttaatgcggatgtgaacaagaagctaagcgcttctgtttccgccattcttgagactaaactatcttttcccaagtctcgattctttctcaaagtttatgacaccaaggtatccttctttggttggaacttgtcgactctttaattccgtggtaggtgatt

SEQ ID NO: 155235 - DNA, 420 bp, Arabidopsis thaliana columbia
  unsure (1)..(420): unsure at all n locations
gaaactttaaaacgagagagagagaaagtatatggcgacatcgggaacgtacgtcacggagcttccattgaaaggatcggcgtagaaacactacaagagctggaagagcgagaaccatgtcttcgctgacgccattggccaccacatccaaaatgtcgttgttcacgaaggcgaacatgactctcacgggtctatcaggagttgggactacacatatgatggaaagaaggagatgttcaaagagaagagagagatagatgatgagaataaaacattgactaaaagaggactggatggtcacgtgatggagcatctcaaagtatttgatatcatctacgaatntattcccaaatctgaagatagctgcgtctgcaaaatcactattttatgggagaagcgcaacgtagactttcccaacca

SEQ ID NO: 155236 - DNA, 419 bp, Arabidopsis thaliana columbia
atgacccgtgacgatcttttcaacattaatgctggaattgtcaagaacctttgcactgccatcgccaagtactgcccacatgcgcttattaatatgatcagcaaccctgtgaactctactgttccaattgcagctgagatatttaagaaggctggtatgtacgatgaaaagaaattgtttggtgttaccactcttgacgtcgtcagggccaggactttctatgctggaaaggcaaatgtcccagttgcagaagttaatgttccggtgattggtggtcatgctggggttactattctccctctcttctctcaggcaactcctcaagccaacttgtcaagtgacatacttaccgcccttactaagcgtacccaagatggaagtacagaagtcgttgaggcaaaagcaggaaaaggttcagc

SEQ ID NO: 155237 - DNA, 416 bp, Arabidopsis thaliana columbia
agccgcaaaccattttttgtcaatctagggttcttcttcgtacttgcagatttcgcctccggtttcactacgatctgtgaagatgttctccgctcagaacaagatcaagaaggacaagaatgctgagccaacagaatgcgaggagcaagttgctcaggctttgtttgatttggagaacactaaccaggagttgaaaagcgagttgaaagatctctacatcaaccaagctgttcacatggatatctctggaaaccgcaaagctgttgtgatttacgttccattcagattgaggaaagctttccgcaagattcatccccgtctcgtcagagagcttgagaagaagttcagtggaaaggatgttatctttgttaccacaagaaggatcatgcgtccccccaagaagggtgctgctgttt

SEQ ID NO: 155238 - DNA, 451 bp, Arabidopsis thaliana columbia
gtttcattctcaaacgacttcaacaaccaacttcttgttgctacttccaacgtttcaagggaatccgaaacaccgagagatagactgatcggagggcttttaaccgcggatttcgatgaaggttcttgcttgagtaggtatcagcaatctttgttgtaccggaaggcttcaccgtacaagccttcggaatatcttgtctctaagcttagaagttacgagaagcttcacaagcgttgcggtccaggcacggatgcttacaagaaagcaacagagattcttggtcatgatgatgagaattatgcaagcaaatctgttggtgaatgcagatacattgtgtgggttgcggtttacgggcttggaaacagaatacttactcttgcctctgtcttcctctacgctctcttgacagagagagttgttcttgttgatcaaagcaaagatataagtgatc

SEQ ID NO: 155239 - DNA, 387 bp, Arabidopsis thaliana columbia
atttgggattgggagtgaagacaggtttgccctacatttaccacagcaaatccagcaaccggtgggtgaacttgaagaggggggcgaggtaatcttctggcaggaggatatcattcctttcttccagagcgcaaagctcactaaagaagctgtgacagttcaacaatgctacatggagctgtccaagttgctgaaggagaagctaagccccattgatccttactttgacaagcttgcaaatgctatggtcacttggattgaaccttgggatgagcttaacccacccactaaagcttgagcagcaaaaaaaccaccaccgcagatctggttattagctcaacatatcatctatcttctccggagtgttttcgatttgacttttctcaa

SEQ ID NO: 155240 - DNA, 424 bp, Arabidopsis thaliana columbia
cggacgcgtgggtagttttttccgccacactctttcgccattatttttgttacttggagctagcgtagctaaaaaatatggggagcgataccgaagcagagaagtcgattcaaaaggagaagaagaagtacgctattactcttgctcctatcgctaaacctctcgccggcaaaaaactccagaagagaactttcaaactcattcaaaaagctgctgggaagaaatgtttgaagagaggagttaaagaagtggttaagagcataagacgaggccagaaaggattatgtgtaatagctggaaacatttcacctattgatgttattactcatcttccaatcttgtgtgaggaggctggtggtccttatgtatacgttccttcaaaaaaagatcttgcgcaagcaggggcaacgaaacgaccaacatg

SEQ ID NO: 155241 - DNA, 465 bp, Arabidopsis thaliana columbia
ctccctttaaatttccccgtagagagcatccatggtttttgttatcagagctaaacataaggttccgggttcctttttaaaatcggacagtcaccaccgaaaaggtccggttaagttccgtagcctcgatttcggcgagagaaatggttacctcaagggcgtcgtgacggagatcatccacgatcctggtcgtggtgctcctcttgctcgtgtcactttccgtcatcctttccgtttcaagaaacaaaaggagctcttcgtcgccgccgaaggtatgtacaccggtcagttcttgtactgcggtaagaaagctactctcgtcgttggaaatgttctccctcttagatctattcctgaaggagctgttgtctgcaacgtcgagcatcacgtcggtgatcgtggtgtcctcgctagagcttctggtgattacgccattgttatcgctcacaaccctgacagcgacac

SEQ ID NO: 155242 - DNA, 461 bp, Arabidopsis thaliana columbia
ggagaaacaaatctctctattgctctgtctactcctcttcatcttctcaatatcatcctctgtcgatgaaaccgaagctcgaaaacacaataaatataaacccgcaccgatcatgagcctagtcccaagaactctctacgaccaaatcttcatccacaaggacaacaacgcatgccctgcaaaaggtttctacccctatgaagctttcgtggaggctacaagatccttcccgaagttcgggagcgtaggaaacttttggacaaggcgacgcgaagtggctgcgtttttggcgcagatatctcacgagacaacaggtggttgggccacggcaccagacggaccatatgcgtggggattgtgttttaaagaggaagtgagtccacagagtaattattgtgatgcttctaataaggattggccttgtgtttctggcaagtcttacaaaggaagaggtcccattc

SEQ ID NO: 155243 - DNA, 447 bp, Arabidopsis thaliana columbia
agaattattcattcaggcatcttctcaaatttttgtttgtgaaaaaaaacccacatcaaaagatctctcatttattcgttgcgtttctgctgttttgagtgtcgggttcgttttagctgtaatctttttttccggcgttcgatttgaaaaaatccggggaacaggtgatcggaatcacggctatacacgggatatcacggggtgttagctcacatgtccatattgtccgacagaagggttgtttaatcgaaactaatcctttgccgcacggaggacgtggagctctgccgtctgaaggcggcagcccttccgatctcctctttctcgccggtggcggttccagctataactttttttcctttaggttttaggagttagggtttgttagtgtttttcccttcttcttttttggggcctctggaatcgtttttttctggaggaagtttt

SEQ ID NO: 155244 - DNA, 399 bp, Arabidopsis thaliana columbia
  unsure (1)..(399): unsure at all n locations
aagcaatatcatttccaatttataaaagttaaagccatggctgcatctttctctgtcccctctatgataatggaagaagaagggagattcgaagcggaggttgcggaagtgcagacttggtggagctcagagaggttcaagctaacaaggcgcccttacactgcccgtgacgtggtggctctacgtggccatctcaagcaaggctatgcttcgaacgagatggctaagaagctgtggagaacgctcaaaagccatcaagccaacggtacggcctctcgcacctttcgagcgttggaccctgttcaggtgaccatgatggctaaacatttggacaccatctatgtctctggttggcagtgcttcgtcactcacacatncactaatgagccttgtccctga

SEQ ID NO: 155245 - DNA, 328 bp, Arabidopsis thaliana columbia
acgaaaacccttcccttcctcttcttttctcttctccttccacttccacttcttctatctctcgcaattcagcaatggctgcttgtatagttacctctagcttgaagcctttagccatggccgattcttcctcttctaccattttctcccatccttccatctcctctaccatctcttcctccagaattcgcagctccagtgtttccctccttaccggacgcattaacctgcccctctctttctctcgcgtctctctatctcttaaaaccaaaacccaccttaaaaaatccccctttgtctccttcgttgcccaaacttcggattgggc

SEQ ID NO: 155246 - DNA, 355 bp, Arabidopsis thaliana columbia
aacaatggcttcctctatgctctcttccgctactatggttgcctctccggctcaggcgactgatggtcgctcctgtgcagcggacttaagtcctccgctgccttcccagccacccgcaaggctaacaacgacattacttccatcacaagcaacggcggaagagttaactgcatgcaggtgtggcctccgattggaaagaagaagtttgagactctctcttaccttcctgaccttaccgattccgaattggctaaggaagttgactacctttatcgcaacaagtggattccttgtgttgaattcgagttggagcacggatttgtggaccgatagcactgtaactcactctgattct

SEQ ID NO: 155247 - DNA, 382 bp, Arabidopsis thaliana columbia
  unsure (1)..(382): unsure at all n locations
ccgggtcggccgacgcgtacgctcattcttcttctccatttcgaaaagaagtttattgtgatagataagatccagtcattaggcgactaatgcaaaacagctgtgtgcttcnaattcttcccaccaaagacagaagatggagtcgacaatctctttgagagaatggatcgaatggttgcttatggtccaacgttttgcgatatcacttggggagctggtggatctaccgcagatctaacgcttgatatagcttcgaggatgcaaaacgttgtttgtgttgagagtatgatgcatcttacgtgtactaacatgcctgttgagaagattgatcatgctcttgagactattagatctaatgggattcataatgtgctttgctctt

SEQ ID NO: 155248 - DNA, 345 bp, Arabidopsis thaliana columbia
gacattttctacccaaaaaaaacgattttgttataaccatctcactgattagcaagatggggtcttctcgatctgcgagacggagctaaagctggctcgatcctttggggagaggcagattgttgcatcgcgttcggtggtatctactcgaggaccggcgattcttttcttcagttactataaatgtcgtgtgctcagttaatatgaactcgcgatttatagcatgtatattcataatatctacacgtagagactggagaacaatattacacttccactttattttctatatgatgagatttgatgcgccaacattattcctgatacatacatttcttgatttta

SEQ ID NO: 155249 - DNA, 270 bp, Arabidopsis thaliana columbia
  unsure (1)..(270): unsure at all n locations
aaaaaaacaaacaaattgaagagcgattatactatcacggagaactcaagatccggtgacggatggcaacttcttgtgacnnagctaagtcnanagagagaagactgtactagtagtagtagctgtggatttttgtgtcatcatcggagatcggaatcttcttcttcttcttcttcttggagcttctagaagtggagagaagggggaagatcaagcgacggatagtgataggttttgctgtatgtcagtggattgtgtttaaactgattt

SEQ ID NO: 155250 - DNA, 422 bp, Arabidopsis thaliana columbia
gaagaagaagaagaagaagaaaaaactattgtattaatgagagggaaaagcaggtttacttgggtgagctctccgagcaggccgggagatacgatgaaatggtggaggcgatgaagaaagttgctcagcttgatgtggagctaactgtggaagagaggaatcttgtatctgtagggtacaagaatgtgattggtgcaaggagagcatcatggagaatactatcttccattgagcagaaggaagagtccaagggaaatgatgaaaatgtcaagaggcttaagaattatcgtaagagagttgaagatgagcttgctaaagtttgtaatgacatcttgtctgtcattgataagcatctcattccatcgtctaacgctgtggagtcaactgtctttttttacaaaatgaaaggagattactatcgc

SEQ ID NO: 155251 - DNA, 379 bp, Arabidopsis thaliana columbia
  unsure (1)..(379): unsure at all n locations
aaaaatggttttgcaaaagcttcctctcatttttctgcttttgctcctgaccatcgtcggcggtgcagcaaatgcaggntacctgtttgcccgccgtcgaacaaactaagccgggcaagtttccctgaaggttttttatttggcacggctactgcggcataccaggtctaaggtgcgattaatgaaacttgtcgtggaccagccttatgggacatctactgtagaagatatccagagaggtgcaataacgataacggcgatgtggccgttgatttcttccatcgttataaggaagatatccaactaatgaagaatctaatcacagacgcctttagaatgtctatcgcatggccaataatattttctcattggataaagg

SEQ ID NO: 155252 - DNA, 435 bp, Arabidopsis thaliana columbia
aaaacaaaaaatggctacccgaaaagctcttatcaacgttcaccggatcattcgctcgcaccgccgtggttggccggaggtctatcattcctgccgccgctaaccggtcatatcctattatattccggaatggagttgatttgggggcgagattcttctgtgagaacactgcgtctgcccagaatttcgatattgatctctctaacgaagagaataagagaagaacgatcaacagattgttgtataggagcaagcaaagagggtttttggaacttgatcttgttttggggaattgggttgaggagaatgttaattccatggacgaaaatggggttaaatccctaattcatgtcctcaatttggaaaaccctgatctttggaaatggctaactgaacaggaacagcctccggaaacagtgagtttaaatccggtgt

SEQ ID NO: 155253 - DNA, 381 bp, Arabidopsis thaliana columbia
  unsure (1)..(381): unsure at all n locations
acctcgccaatccgattacgcgaaaaatcaaagaatctttgtttgatttttgatttttaggtttttggatatggcgtcggancggatcttaaaggaattgaaggatctccagaaggatccacctacatcatgtatcgcacgtcctgttgctgaagacatgtttcactttcatgcaacgataatgggtccttcacagagtccttatgctggaggtgttttccttcgaaccatccatttccctcctgattacccattcaagccttctaaggtggcctttactacctaggtgttccatcctatctttaacagcaaccttttcatttgcactttacattttttaatctactattttttcttcttcactcatccattttttagcct

SEQ ID NO: 155254 - DNA, 444 bp, Arabidopsis thaliana columbia
  unsure (1)..(444): unsure at all n locations
ctacggatgggacaccgctggactttcagtttatcccgagacattcgcaaggaaccgggggctataagttatccacgtcgtnggggctatnctcggagccctaggctgcgtcttccctgagcttttggctaggaacggagtcaagttcggagaggcggtttggttcaaggccggttcacagatctttagcgatggaggactcgattacttgggaaaccctagcttggtccacgctcagagcattttggccatttgggccactcaagttatcttgatgggagtctgtgaaggctacagagtcgcaggaaatgggccgttgggagaggccgaggacttgctttaccccggtggcagcttcgacccattgggtcttgctaccgacccagaggctttcgcggagttgaaggtgaaggagctcaagaacggaagattggctatgttctc

SEQ ID NO: 155255 - DNA, 327 bp, Arabidopsis thaliana columbia
ttttcgaaagccttgagagagagaacacatactttaccaactttcttcaatctcgttgcggcagtataattatctcggtcgtcggatatatctctccttctgcggcggcaacaagaagctacaagaataaaaagtctgttttctctcttttcaagaaaccacttacttctaaaatggctcgttctatctctaacgttaagatcgtatctgctttcgtctctcgtgaactctccaatgctatcttcctacttggttattcggccacatctgctcaagggagcgtttctagctgtgtaagaaatttatcttttgcttcctcttttttta

SEQ ID NO: 155256 - DNA, 137 bp, Arabidopsis thaliana columbia
  unsure (1)..(137): unsure at all n locations
taccttctcttcctcctgatgtggtggcttttatcttctactggtgtcatgtaatggtgtggtgtcttttagctgctagtggtgtcatntaatgatgtaacgtcgttattttaaagaaaatttggcaccttttgtat

SEQ ID NO: 155257 - DNA, 492 bp, Arabidopsis thaliana columbia
  unsure (1)..(492): unsure at all n locations
cggccgaaatcccggtgggcgacgcgtccgcggcgatattcttcttcttcggctcacattgttttgtctctcactcgatccttcgttcttgcagggacaatcatttgggagggcgggccaggtcanaagattgaaacgggtcatgaggacattgtccatgatgtgcagatggattactatggaaagcgaattgcaactgcatcatctgactgcaccatcaagataaccggtgtcagcaacaacggtggatcgcagcaactagccacattaaccggccaccgtggtcctgtctgggaagtcgcgtgggcacacccaaagtatggatcaatccttgcttcatgctcctatgatggtcaagtcatactctggaaagaaggcaaccagaaccaatggacccaagatcatgttttcacagaccacanatcttcagtcaactccattgcatgggctcctcatgatatcggactatccttggcctgcgggtcatctgat

SEQ ID NO: 155258 - DNA, 472 bp, Arabidopsis thaliana columbia
  unsure (1)..(472): unsure at all n locations
cggaaanncccgggccggccgacgcgtacgaaaaacattagggagcctctcagatcctcattaaaaccctaaatcaaaagtcgagatcgagggggtccttcgctcgccgtcgatgagcttaactcanatcccatctgctcgtatttcctctggagccgcttctattggtcagcgtcgttgcctcgccggcgccgcttatcaccatggatctaccaaggttgacttctggaaacagcccacgaacccaggaaactggaaagaggagcattttgtgcttatttctctgtctggctggggcttacttttctacagtggatacaagctcgccactgggggaaaaaaagagactcctgtggagagtacacaatgagtttcattgtcaccaggaagaccttttatggagtgacctctcattctcatgcactttgttttcccttttagcataatttgactggtcttgtgtttcattttg

SEQ ID NO: 155259 - DNA, 451 bp, Arabidopsis thaliana columbia
  unsure (1)..(451): unsure at all n locations
cttccaaaaaaaaccaagaaaaaactatctcactgatattaccatcacttcgccgtcncantcatggggggaattcataaaagaggtgagggtatctcaacatctgctttgccgtacaagcgttcatctccgagctggctcaagacaacccctcaagatgttgatgagtccatcttcaaatttgcgaagaaggatttgaccccatcgcagattggtttcattcttcgtgactctcacggaattccacatgtgaaaagtgttactggaagcaagattctcataatttttaaaactcattttctttcacctgagaacccttaagatctttatcacttgatncaaaaagctgttgctatccccaagcatttttataagaacatgaattataatgattccaaattcatccttattctttttaaaagcataatccatctcctttctctttactaca

SEQ ID NO: 155260 - DNA, 429 bp, Arabidopsis thaliana columbia
  unsure (1)..(429): unsure at all n locations
gtcagtgcgcatccttatgagaaatgctttataatctgccaccatgnntcntatgcagagtctaaaaaaaggtatgtgagcctctacattnccttacaaganatcttctcctatcttactcaataccacctctcattatttttatgaatcaatctgcaaatttttcaaaaagttatttaccccttcccaaattggttttattctccgttactctcacggtatccctcatgtcaagatttttactttaatcaagatctttagtatactcaaatctcatgtcctttctccttatatcccttatgatctttaccatctaattaagatttctttttcataccttaacatttctatagtatcatctatttcaataattttaatttctatcctcatccttctttatatcattataaatcttttttttccctattt

SEQ ID NO: 155261 - DNA, 411 bp, Arabidopsis thaliana columbia
  unsure (1)..(411): unsure at all n locations
gaattcccggtcggccacgcgtacgcgaagtggacttcattttcttgtacttgaattaaaatattgcagattgacgacatatacggacatnaatcatgggattgtaagtttaccannatagatagtatgggagttgatggaaaattgaaaagtgttagaggacgcttgaagaaggtttacgggaagattattacactctaaaactggaggaagaccgtcttgttagctttcgtttttgttttggctattgatcctttgtttctgtttattcctttgattgattttcattgatttcgcttaactttttacaatacacttttttcagtaggtttgtgttattctctctttttatttgtcattttctattattattcacatttttttattaattttatatacctatactcaatt

SEQ ID NO: 155262 - DNA, 449 bp, Arabidopsis thaliana columbia
ataaaatcagaattacaaacaaaaatggttttgcaaaagcttcctctcattgggctgcttgtgctcctgaccatcggcgggtgtcgagcaaatgcagatggacctgtttgcccgccgtcgaacaaactaagccgggcaagtttccctgaaggttttttatttggcacggctactgcggcataccaggtcgaaggtgcgattaatgaaacttgtcgtggaccagccttatgggacatctactgtagaagatatccagagaggtgcaataacgataacggcgatgtggccgttgatttcttccatcgttataaggaagatatccaactaatgaagaatctaaacacagacgcctttagaatgtctatcgcatggccaagaatattttctcatgggagaaaggagaaaggagtgagtcaagctggtgtgcaattctaccacgacctcatcga

SEQ ID NO: 155263 - DNA, 329 bp, Arabidopsis thaliana columbia
  unsure (1)..(329): unsure at all n locations
ctcttgatcaaaatatagtgttttattttttataaaatctttatattccactcctcaagaggatttctcaaaattcttggagggttctctcatattnatnnnttcanntnaaaacacctttataaccaccccctaaatctcctatgcctttgatgattctcttatttttttcattcaatcataagactttcatattacattattctttctacaactattatcttacgctttctatttctcacgaattctttatatacttcttcaaattcataagctacacaaattatacatttaattatctatttcattcttattactatttaatcaac

SEQ ID NO: 155264 - DNA, 415 bp, Arabidopsis thaliana columbia
aaacattccaatacacaacacacaaagcacacactttttctttcttttaaaccccaatggcgggagaaaatggcggggtagtccaccaccatcgacgtcggcgagccaagcactgttaccaaaagttcaagccatgtcgtaaaggacgcgaagaagaagggctttgtggcagtcgcctcaagaggtggtgccaagagaggtttggctatattcgatttcctcctccgtttggcggccatagcagtcactattggggctgcctctgtcatgtacaccgccgaggaaactcttcccttctttactcagttccttcagtttcaagccggttacgatgaccttcctgcgtttcaattctttgtgatagccgtagccgtagtcgctagctatctcgtcctttcacttccattcttcatcg

SEQ ID NO: 155265 - DNA, 174 bp, Arabidopsis thaliana columbia
  unsure (1)..(174): unsure at all n locations
acgaagaagaataaaactcaggtcttaagagacttctatatttttgcgtgatctantttacttgggtatcaaaaacaaataaagtcttttcaaactctaattgttaagtaagcttttctttttacaaactatttctatcaatataccctttatgttttttattggtcatttttt

SEQ ID NO: 155266 - DNA, 228 bp, Arabidopsis thaliana columbia
  unsure (1)..(228): unsure at all n locations
gaaaatttcctgcgcctctccttgtctgtgttatctattcaggttaaggatgtcnagagctacgtacattatcgatgcgcggtgtggatctaacatagtagcttacttttgttacaaacttatttctgatgataagctttttggatgtactacaccaggaactattactaacaaggaatgggtttcttcaactgattatagattacaagcattttcaacaattgcttt

SEQ ID NO: 155267 - DNA, 380 bp, Arabidopsis thaliana columbia
  unsure (1)..(380): unsure at all n locations
ccttaacctttcttttccatagctcactcancaaatntngggggctaataacatagatgtgtggtggtgacccaanacactntctctacctcactgcttcanccatgttccntgtaaagatgatcaccaaggaggtcgatgaacatattcttaacttacataacaagaactcctcctactttgtggaatgtatccctaacaactttaaatcaaccgtcttttacattccccctactgttcttaaaatatcttcaactttcatttctaactcaacttctatccaaaaaattttcatccctctcacttttctattcacttctatatttcatataaatgctttttttcattataacacaaatttatttttcattttatttttt

SEQ ID NO: 155268 - DNA, 451 bp, Arabidopsis thaliana columbia
  unsure (1)..(451): unsure at all n locations
taaaaggaattttgcacagccacttttttcatctgcaacaactacaanatnaaagggggccatattataattggcggtgtgtcacactcttcttccaaaactctnatangattctcaatgatctctcactttccctanatcaacaagttgtagactttaaaaaatttgatccccatgttcatcaactcaaaggtagcagctccagtatatgagcacagatagttaagaatgcttgtgttgtcttccgcagcttctgctaacagcaaaatgtctaagcatgtcataaattttttcaacaagtgaatcaagattattatctttttaaaaacagattatagactctgttcaaactggagcaacatattttagcttcttgtttaatgatcccttccgtcgaactncaatttatagttaacttcataaacatctctttccatatttatatcatttt

SEQ ID NO: 155269 - DNA, 260 bp, Arabidopsis thaliana columbia
ataagataccttggagaggagattcatttcttaaagatggaagtgaagataatctggatcgtgtccaaaggcttatattatgctggagatcatataaagtttggttttccaatggctttcactgctacagttttgtcatggtcgattcttgagtattgtgatcatatttttgcagtgaaccaattggatccttctaaagactctctcctgtgtatcacttactatcttatcaaagctcatccttttttcaatcacctttt

SEQ ID NO: 155270 - DNA, 445 bp, Arabidopsis thaliana columbia
ccaaatgagcaggagagatacttatgattattaccctctccaaggaaactactacccagggccatctctcgcatggtatggggggatccaatggtcagagattctccgtgcactctcgtcaatctctcggtgttgcaagcctcaaagagggttggttggagattatgctgtacagacggttggttcgtgatgacggacggtgtctagggcaaggtgtgatggataaccgcgcaatgaccgtggtatttcaccttcttgcggaatctaacatttctcaagcagaccctgttttcaacactaacccgaggaacccttcgcttctctctcacctcattggtgctcacttaaactaccccataaacacattcattgtcaaaaaaccgtaagacctatctgtgcgtgttccacaatccggtcccttgttcttttatccaaccgttccatt

SEQ ID NO: 155271 - DNA, 464 bp, Arabidopsis thaliana columbia
gccgccggacgcgtccggcaggaatcaaaaccagtccatctgcatagctcatgctcctattttccagcatccgttctacaggtctctggacatcctctagaggagccgtgcttgaaggctttaagcagacctccacagatacgaggaatgggtgaaaaataatgatgttctcttgttctggcaagtgaagccagttgtgcacacctttcagctcattgaagaaggaccatgtgaggacttgtgtgcagatggacaacctgctagctttaacgaatggattctacccgcaaaggagtttgatggcttatgggaaagcctaatatatgaatctggacttaagcaaaggttactacgttatgctgcgagtgcattgctgttcacccagaagggtgttaacccaaatctccgttcatggaacaggattatttctttgcacggaccaccagggactggctaaaacatcc

SEQ ID NO: 155272 - DNA, 356 bp, Arabidopsis thaliana columbia
gtttatcctcttggcagcctcggtgagaatcttgttgtctgcgcaagggatccatttggggttcctcttgttccagaggatgacgttcgttattgtcggtctagatttgatcggggaacaggtcagttagtttatataaccctttttctcagtttaaaactacattgaaccataccaccagaagaacgaacaagacccaaagatcaagtcaggaaggaacgaaccaactcactcgcatgtctttttgttacagatagattcataaaaacaatttatttaaagtttctgtctttggaacatgattttatactttacttgagttgttttatatcctatctttttttactgttagtatt

SEQ ID NO: 155273 - DNA, 318 bp, Arabidopsis thaliana columbia
ctcacattttcgtagccgcaagactccttttttattcttacttgcagctatcggtaaagagaagtttcacattaacatttgtttcattgatcattttgattttttaaaatccaccacaactggtcacttgatctattatctcgttggtttttacaagctctatcatttttttgctcatgaattattttttctatattttctttttctccttaaattactccttaaaatcttttttctctatttttttctttctcaaatttatttttctcctattattttatctttttctctttcttatattttttttatttatctttt

SEQ ID NO: 155274 - DNA, 451 bp, Arabidopsis thaliana columbia
  unsure (1)..(451): unsure at all n locations
gatcaatgaaagttagggtttttctttgagatttcttcacccagataaaaaatgtcgctcgtgagaagatttcaaacaggtcgttctttattgaaaacagctggatcaagagaatcttcttctcttccatttaggaatggaaatgagttctctttgattcaaattggagatgatttcagatttggttgttggagaagctatcattcttctctttgtcacgttcctgaagctcatggaaaaagtgcgtattcacgtttatatgaaggccacagcgtcaatacacatttgcttcgatctacaatgattgcagagtttttgccgtttatgaatgaaaaaaggtctgctacaacgcaagttaaggctccacctcagcttcagaaaacgggtgctggtagagtgtccatggtaagttctggatttgnatatgaaccctatgcgctccgggagaaaa

SEQ ID NO: 155275 - DNA, 454 bp, Arabidopsis thaliana columbia
agagatttaggcttaaaggacgtttgtatccatgtattatcccctctgagaatggataagtgcggggaaaggtactaatgggagtgactaatgattaacttgagaatgtagattgggttgaaggaaacgaatatgaaagagtgtttgttgaagtcttaagataagacatttttccaattatgcgcactctaaacatttatttagtacagcacgtgtgatcactttttttgctggtggacaactattttatcttttacaaacgttttcttttttcaacgtagtttgattccttattggttagcttattatatgagattgtacttaatcaaatttttttacatttatcattcttttttattcaatgtttattttgttaggtaataatttttttttttcactttattttattattctaattaatattttttttttttattctgaatttctttctctt

SEQ ID NO: 155276 - DNA, 371 bp, Arabidopsis thaliana columbia
aaaagtgtatggagccagttgaaaagtgttttctttatcctaaaatgaacaaaaccactgtgcatgattttgaccttggtggtgggtctacccctatccctaatgttcaacaattgctccaggacttcttcaacggcaaagagctttgcaagtctattaaccctgatgattctgttgcctacggtgcttcttttccagtgatgctattctcagcgtttaatgaaactagaaggttcaagatcttctattgctcgatttcactcctctctctcttgttttgtaaacttctctttttagtcattacccctttttatctccttttttcacatccatcccaaccttatatataacaaattttttttcttctactc

SEQ ID NO: 155277 - DNA, 410 bp, Arabidopsis thaliana columbia
  unsure (1)..(410): unsure at all n locations
acaagtaaaaactttaaaacgagagagatatatataaatggcgacatcggaaacctacgtgagcgggatgttccgttgggtggagcggcnnanaaacactacaagagctggaagagcgagaaccatgtcttcgctgacgccattggccaccacatccaaaatgtcgttgttcacgaaggcgaacatgactctcacgggtctatcaggagttgggactacacatatgattgaaagaaggagatgttcaaagagaagagagagatatattattagaataaaacattgactaaaatatgactgtatggtcacgtgattgaacatctcaaagtatttgatatcatctacgaatttattcccaaatctgaggatagctgcgtctgcaaaatcactatgatatggtagaatctcaa

SEQ ID NO: 155278 - DNA, 447 bp, Arabidopsis thaliana columbia
gaagattgaaccaccattgaagaaccagctcattatctcaactgttattatgactgttggtggtgctattgtgtcatgggtggggttaccgacctcctttaccatcttcaactttggaacacaaaaagttgtcaagaactggcagctattcctttgtgtttgtgttggtctttgggctggactcattattggtttcgtcactgagtactacactagtaacgcctacagccctgtgcaagatgttgcagattcatgcagaactggtgcagctaccaatgttatcttcggccttgctcttggttacaaatccgtcattattccaatctttgctattgctatcagtatatttcgtagcttcagctttgctgctatgtatggtgttgctgttgcttctcttggtattctcagttccattgccactggtttgtcaatttatgtttattgtcc

SEQ ID NO: 155279 - DNA, 441 bp, Arabidopsis thaliana columbia
gcgtccggatggtgttcctgcaacatcttttccacttattttcactccgccgcagccatcgctcgtgactgcgcctctgttttgggcttgaaaggtgatactcttcaggagtactgtttgtgtacccagcgtgctctagattggagtccatgttgtggtcctgatctttattttgatgatgtcggtcactctactaattttgatataataagaatatctaagcttattacatatctttttttaattgctccatttatttcttttttattactatatttttcttattctctctgtacaattatttacattatatacatttctttattctttattttagtatcacaatatatttttttattcaatctaattttctttttatcttttcaaaactattttttttcactactttcatcttattcatccctcttatttccttttttt

SEQ ID NO: 155280 - DNA, 489 bp, Arabidopsis thaliana columbia
  unsure (1)..(489): unsure at all n locations
aaacccgggccgacccacacataacttagctacattgttttctacaataattttctttcttgtcacgattccactcnctaaggtccgataatactatcagatatgagtgccaaactactaattattaattaattatttataacctcactattccttattaacattatttttttttttttcttcactcatttcttttttttattatttttatcttcctcccacattatttttttttcatcattcattttttttcttttctttttatatctcacttccactatctattattctcttttttttcattttctaatcttttttaataaaattttttctttttccatttctttacttcataacttttccttttttcttctctccttttttttttttatatccttttatttcatacccttatcctttttttatattttttttttttccccatcatttctttttttttttttttttttcttctctcttttttttttt

SEQ ID NO: 155281 - DNA, 390 bp, Arabidopsis thaliana columbia
gctatgatgaatcttaacgttttgtttctttctctccttctacttgcatatactctgctggaagttcctagatggggagcggatgccaaggatcattcaagttttgttgacgatgatgagggagaaaacacttatgatagctatgaggaagatcaccatgatttttatattaacttgtcctcatttccaggagttgagactgtttgttttttccccaaaaacattgccaaattggttccaccttgagaagagacttatcttctttgtggcctttaaaattattttatttcttatatatttgtgttgggacttttaatcttttttcatttttctttttttcatatacacatttttttttaatatatataatttttttatctatataattct

SEQ ID NO: 155282 - DNA, 302 bp, Arabidopsis thaliana columbia
  unsure (1)..(302): unsure at all n locations
gtcgtccctaacctcatctctgcaagctctcaagctttcgtctccgttcgcccatggctccactcctctctcatctctgtcgaagcccaattccttcccgaaccacagaatgcccgctttagttccggtcatcagagccatgaaaacgatgcaggggcgcgtggtgtgcgcaaccagtgacaagactgtggcggtggaggtggtttttttatttttttatttgtngttatntattnttttatgtaatttattataattatttattttaatatatatttgtattataattatttttttttttt

SEQ ID NO: 155283 - DNA, 290 bp, Arabidopsis thaliana columbia
ctcgaatctctctctataatccgatctgttttatttcgccggagctaggttttgttgtttaccgatcaatccttggatgatggcaatggctgttttccgtcgcgaagggaggcgtctcctcccttcaatcgccgctcgcccaatcgctgctatccgatctcctctcttttctgaccaggaggaaggacttcttggagttcgatctatctcaactcaagtggtgcgtaaccgcatgaagagtgttatgaacatccaaaagatcacataggctatgaatatggttgcctgct

SEQ ID NO: 155284 - DNA, 333 bp, Arabidopsis thaliana columbia
  unsure (1)..(333): unsure at all n locations
aagaaacagagatgggtttggttacattattttgagagctaaggcagagatgtacacgcggggattatatatgtagatagaagacaaantttttcctcaaggaaatatctatgcccaatggtttattaccattgaaggatatataagaggttgggtatgacagatattcatgttttgtatggctgaagcataatatgatcttcacttataagtttacagaaatttatattcttgtcttctatttaacctaaatctcatctttttttttttacctttttaattaaaaaaattttctctagtcatattcattgttatcttatttattttttttta

SEQ ID NO: 155285 - DNA, 457 bp, Arabidopsis thaliana columbia
  unsure (1)..(457): unsure at all n locations
caaaactcctagagagatctaataaaaatgatattcttttacgttcttgattctctttctcgttgcagcacaatctatggggggctatgcangcagcttccacaaagacgttaagatacattggggtgatggtcgtggaaagattcacgataatcaagggaaacttctatctctctcgcttgacaaatcctctggttcaggtttccaatctaatcaagagtttctctatggtaaagccgaagttcaaatgaaacttgtccctggtaactctgctggaaccgtcacaacattctatcttaaatctccgggaactacatgggatgagattgatttcgagtttttggggaacataagtggtcatccatatactctccatactaatgtttacacaaaaggctcaggagacaaagaacaacaatttcatctatggnttgacccaaccgctaactttcacact

SEQ ID NO: 155286 - DNA, 451 bp, Arabidopsis thaliana columbia
gttgactactacaactccgttgactcctgccaagcagctaacggcatttggtagtgatgacggaactgtatgggatgatggtgcttacgttggggttaagaaggtgtacgttggacaagcccaagatggaatctcagctgttaagtttgtgtacgacaaaagccctgaggaggtcacaggagaagaacatggaaagagtactctactcggattcgaagagttcgtacttgactatccaagtgaatacatcaccgcagtcgatggcacttatgataaaatctttgggagtgatggctcagtcataactatgctcaggttcaagactaataagcaaacgtctcctccctttggacttgaagctggcacagtcttcgaactcaaagaggaaggccacaagatcgttggtttccatggaagagccgatgttctgctccacaaaaatggagttcat

SEQ ID NO: 155287 - DNA, 416 bp, Arabidopsis thaliana columbia
  unsure (1)..(416): unsure at all n locations
atcagatctagatctaaaagaagagcgtcttcataaacgcccttcttcttcttcgtcttcgggcctgcaaatctagtgttcgtgagatcttttctttcttccgcgaaacgaaaatgagagagtgcatttcgatccacattggtcaggccggtatccaggtcggaaatgcttgctgggagctttactgtcttgaacatggcattcagcctgatggccagatgccgagtgacaagactgttggcggaggtgacgatgctttcaacaccttcttcagtgagaccggtgcagggaagcacgtcccacgtgctgtctttgntgatcttgagccaactgtgatcgatgaggtcaggactggtacttaccgtcagcttttccaccctgagcaactcattagcggttaagaagacgcagcttac

SEQ ID NO: 155288 - DNA, 240 bp, Arabidopsis thaliana columbia
atcgattcatatgaggatgttccaacttacttttaggaatcgttgaagaaagcagttgctggtgaacccattagcatttcgattgaggctggtggtcgtgcgttccagctctatgattcgggtatatttgatggaagttgtggaacacaactagaccacggagttgtggcggttggatactgaactgagaacggcaaagattactggattgtgagaaactcatgttttaaaagctgggga

SEQ ID NO: 155289 - DNA, 441 bp, Arabidopsis thaliana columbia
aaaaacccgggccggccgacgcttccgacacaatgtgtcaagtaccttccggcggatttatacttcaaggagatcggaaaccacatggtggagataataaggagagtagttgctaaccatcctcaccacctgctcttttatggatgaagcaacttaatcacaaatgaccttaaacttcgtctagattgcccacttttacttcttctactaaatgttaacttctatttcttaaattttatctaatcatttactttttacttatttatttatatttcctactttattatttattatttattcttcactaatattattttttttacacttttttctattactcttaatcttttttttatcacctattattttttttttaacttttattttttacttaactaaattttttttctatcttatttatttttttttttataataatat

SEQ ID NO: 155290 - DNA, 383 bp, Arabidopsis thaliana columbia
  unsure (1)..(383): unsure at all n locations
gcgtccggttgttatcttcaacgatagcgttgtgctctgtataagtgtttgatcgcagaaaagcttggtggtttgtagtctacaggcgggggaggaatancaaaaagctcgttcaagcaagagcatgacttagagaagagaagggcagaggctgctaggattagagagaagtatcctgataggattccggtgattgttgagaaggctgagaagagtgatataccaaccatcgacaagaaaaagtacctagtcccggctgatctgactgtggggcagtttgtgtatgtcattcgcaaaagaatcaaattgagtgcagaaaaggctatcttcatattcgtggacaatgttcttcctccagcaggtgcgctcatgtcttttgtgta

SEQ ID NO: 155291 - DNA, 258 bp, Arabidopsis thaliana columbia
gatggctttggagaaagaggaagaagcgttacaaaacggtgcgttttgtgtccttgatgggctctattgcgaggaagagagaccgggtttgtggaggacgatcttgatgacgatggagatttagattttctcgagaaatctgatgagagtgttgtaaagttttattttttaccatctttggatatattaatattttttttactattagatttatattatttaaatattattttgttttctctaataaatttcttttta

SEQ ID NO: 155292 - DNA, 384 bp, Arabidopsis thaliana columbia
cttttaatcaccccggagtagtaagcttgctgctgatcagagctgagtgaaaaatggtgggtggatcaggaatttgcgcgaggcgcgtggtggttgatgctcgtcaccacatgctaggtcgcttggcttcggttgtagcaaaggatctgctcaatggccagaatattgtggttgtccggtgcgaggagatttgtctctccggcggacttgttcgtcagaagatgaagtacatgaggtttcttcgtaagcgtatgaacactaaaccttctcacggacctattcacttccgtgctccctccaagatcttctggcgtaccgttcgcggtatgattccacacatgactaagcttggagctaatgcacttgcccgcttgaatgtctttg

SEQ ID NO: 155293 - DNA, 455 bp, Arabidopsis thaliana columbia
taacaatctactctctttaaaagaaattcgtaagtactatcaagaagcagaagatggcccaaaaggtggaagcacaaggagggagaggagccaacctatgggacgatggatcgacacatgacgccgtgaccaagattcagctcgcagcaggcatagacggaattcaatatgttcagtttgattatgtcaagaacggacaacccgaacaagctcctcttcgtggtaccaaaggccgtgttctcccagctgatccgtttgtgattaaccatccagacgaacatcttgtttctgtagaaggttggtatagccctgaaggtatcattcaaggaattaagttcatctccaacaagaagacttctgatgtcattggatccgatgagggtactcacttcactctacaagttaaagacaagaagatcattggctttcatgggtctgccgggggcaatcttaat

SEQ ID NO: 155294 - DNA, 242 bp, Arabidopsis thaliana columbia
  unsure (1)..(242): unsure at all n locations
ggaanncccggggcggcccacacatacgacccgctgagtttaagcatatcaataatcgtatgaaaagaaactaacaaggattcccttagtaacttcgagcgaacctgaggagcccatctttaaaatcnnacgtcttctgcgttcgaattgtagtctggagaagcgtcctcagcgacggaccgggcctaattttccttgaaaagggcgccaaagaaggtgagagccccgtcgtgcccggaccc

SEQ ID NO: 155295 - DNA, 206 bp, Arabidopsis thaliana columbia
tttaaaaggttttccaaatcaaattcggagaaaaaaaaaaagttgtttgtgactaaaactgattatgacaaaggattgaacactttttctccagaaggaagcctatttcaagtggaatatgccattgaacctatcaatcttggttctactgcaattggattaaagacaaaagaaggagttgtgcttgctgtctagaagcgtatcac

SEQ ID NO: 155296 - DNA, 390 bp, Arabidopsis thaliana columbia
  unsure (1)..(390): unsure at all n locations
atctctcaccattgtttttctctccaaattttattaaacaaaaaaagaaaaatcntagagacgaanaaaaaagaaatggggagtgtataaacattataaaacaangctttattatcctcttcaagaaatccttctgntgttctctctccttactcctacactttaattttttcattagcagattatatatatataaaatttatatgctgtgtaatatgccatactgatattcaccaaattaaaaattatctttaaatgtctaattatcctattattccttttcactaaattactatttttatgtttacgattttttatcaaatataattcttttttttcctattatatttttttcttattttatttttttttttctctacattttttttt

SEQ ID NO: 155297 - DNA, 405 bp, Arabidopsis thaliana columbia
  unsure (1)..(405): unsure at all n locations
cccgggccgacccacgcatactcaaaactcctacacaaatctaataaaaatgtattcctatacagaaaacaacattcttctgtgtcntttccaaccaaaggtgggtgaanaaactaaanataaccanaggctgcancaaccatctcctcgtcttaacgagagaattctctcatccttgtcaagaagatccttatctgctcatccatgacatgatcttgagattgtacctagagctccacagattttcaatgtggttgttgagatcactaaatgaagcaaggtcaaatactatcttgacaaaaagacaggactcatcaatgttgatcgtattctctactcatcagttgtgtaccctcacaactatggtttttttcctcgcacattgtgttaatacaatgaccccat

SEQ ID NO: 155298 - DNA, 506 bp, Arabidopsis thaliana columbia
  unsure (1)..(506): unsure at all n locations
ccggggcggcccactcatacactcttgtaccgagcaccatatatactcctatgatctcatcattactctacacctnntgatgctttttctataagatgcttgtttcctcaaaaaaccattcttaatcccttatttcctttatactcccacatttatcttctcttcattattttttataatccaaattactcctttctccacacataaaaaaacctcctcttttttccttaacaatattttttttctctctatattctttttttctccccaattcttttttttctttcttacctttttttttttcttccaactctttcttcctttcctactttcttttttcttttcccctcttcttttttttttttcaaatantttatttattttttctccctccctttttttttttttttcccacaattttcttctttcctcttccttttttttctcctctcccttttcttttttttttcctcccactttttttttctactccttttttttttttc

SEQ ID NO: 155299 - DNA, 425 bp, Arabidopsis thaliana columbia
  unsure (1)..(425): unsure at all n locations
cggacgcgtgggcacaagttagccacggtgtgttcggagaatgtatctaagtggagatttcaagcgtgttacggagggaagcaggtgtggagacncctcagggattttgaaagaaggatttgatagaatgcttggtgttgtgaggctgagccacgtcatctccggtgaccggaattcttcaggcaccggtggatctgctttgcttcagggacttcacgtcatcatctcctcctctaccgatgagttggaatatggagcagacgagtcgtacaaattagtggttccatctccagagaagccgtcttatgcacaacttgaggccaagagtgtttatggtgcattgcacggtctacagacatttagccagttatgtcattttaatttgaagaaaaaggtcatagagattctaatgacttcatggaata

SEQ ID NO: 155300 - DNA, 441 bp, Arabidopsis thaliana columbia
  unsure (1)..(441): unsure at all n locations
acgcgatactttcaatctctctaaactctctatttcagtaatcgataaccntancaatggggtccaccttaaaagtgaataagtctttctnaacaacaaaaccacctgttgccccaaaaaccaaatcggtttcgaaatccatgaaagccgttcttcaattcccagttttatataatcactcgtttcctgaagaaaggacgatactctcagagacttggtggtggtgctcccgtttacatggccaccgttcttgaatacctcgccgcacaagttctggagctttctgttaactcttcgagagataacaagaaattaattataattcctagtcatcttttttttgccataatgaactattaacaattttgtaaacttcttagtggtttcacaatctctcatctttttttttttcctaacatcaacttttttctatttcctaat

SEQ ID NO: 155301 - DNA, 461 bp, Arabidopsis thaliana columbia
  unsure (1)..(461): unsure at all n locations
ccggggcggcccacgcgtacggtccaaagatagagaagaaatcccttttatttagaaaatgcataaccttatnaanaattagaggcttgatggacaggggcggtggataactnctcacactaaccgagctcgaaatggtgagctttaccgctacatcgcggatacaagaggtgcttttgctcagcctgcgttctacgaggcttttggacttacggtagtggaagcgatgacttgcgggctcccgacttttgccacttgtcacggtggtccagcagagatcatcgagcacgggctctcgggtttccacatcgatccataccatcctgagcaagcgggtaacataatggctgatttctttgaacgttgtaaggaaaatccaaaccattggaagaaaatatcagacgcttgtcttcaaaggatataccaaaggtacacattgaagatatactctgagagattga

SEQ ID NO: 155302 - DNA, 357 bp, Arabidopsis thaliana columbia
atccgtttgtgattaaccatcctgaggagcatctattttctattgaaatttggtataaacctggtggtcttattcaaggggttagtttcatatccaacaaaaagacttctcgtttcattggatacgatcgtggtactagatcatttctccaagttcaagacaagaagatcattggctttcatgggtctgccggagacaatcttaattctcttggagcttactttgctccgttgactatcccattgactcctgccaagccgctaccggcacttggtagtgatgattgaacagcatgggatgatggtgcttactttggggctaagaaggtgtacgtacgacaagcccattatggtctat

SEQ ID NO: 155303 - DNA, 451 bp, Arabidopsis thaliana columbia
  unsure (1)..(451): unsure at all n locations
catttttctaacttctctcaattcccaaacaaaattcaaattcaaaaaacttctctttttgactgaganctagattttaggggtggatggattcanctcccaacttcatccctcggttacttctactatcacttctcatcgtatcaattcctctaacatcatcacaatcctacgccaacactactaatccgtcaccgtcaccaccgtcagattcggatctatgcaacggtgtattcgtttcatacactcacactaaaggatctaagatcccacccaacgacaccgcaaatcaaccctaccggttcgaatctgtgataacagtgctcaaccacggccgcgacgagctcaaatcatggcgtgtcttcctcaaattcgcacaccgagagatcctcgtctctgcttcaaacgctttactctcagacggctcgagcttaccggtgagcctcgtaaa

SEQ ID NO: 155304 - DNA, 463 bp, Arabidopsis thaliana columbia
  unsure (1)..(463): unsure at all n locations
ccactcatttcatttgaagaacaacctcctttattattctcaagattccagaacannatcaagnaagcgtggataactcttcaaaggttgaggcgctttcttccaacccaattcanccgggtcgattccaagagtttcntgttttcgattcccttctcttcaaattctcagtttggatcagaatctgttaagcgggtcacttccaaattcttcttgcacctcctcaaagattataactttagacgtgtctcacaatcttttaactggaaagcttccttcttgctactcttcaaagagtttcagtaatcagacagtgcttttctcattcaactgcttgtctttgattggcactcctaacgcgaagtatcagcgtccgctttctttctgtcaaaaccaaacaagcaaggcaatagctttggaacctatccccaaagctaaagataaaaattcttcaagaatcaaa

SEQ ID NO: 155305 - DNA, 359 bp, Arabidopsis thaliana columbia
  unsure (1)..(359): unsure at all n locations
acagcaagtatcattcacaggatagggaatttttatctcatcatacgaaatgaggtcaatcacagctttntttttactttggtatgtccttgctccttctgctttggcgcaactcctaactgggttctacagccgctcatgcccccgtgccgaatctatcgtggctagtgttttttccaaccgtttcagaagtgacaagtccattactgcaacatttcttcgtatgcagtttcatgattgctttttcaatggttgttattctttcctcttgatcgacccaagacctttaatgccatcatataaaagcactgttccaaattcaatccttaataagctaccatatcatttattatgcttaa

SEQ ID NO: 155306 - DNA, 489 bp, Arabidopsis thaliana columbia
  unsure (1)..(489): unsure at all n locations
gaaaacccggggcggccgacgcgtacaattcgtgtttgaggataatctcttcggctatatctccctctacacgcttaattgcntgttggttcaatacaaacaaggtgtcgtctcnntnccagcntcaatctctccggtggccccgttgtcaagcgctctctacagaagagattggtgataaggtctgctactattttataaatagaagcagagaagtctgctattgagactgatgttaaatcaaagatggagaagactattgaaacgcttcggacgagtttcaactccataaggactgggagatccaatgcatcgatgcttgacaagatttaggtggaatactattgaagttcattaagtttgtaaagcataacccaaatcagtactccggatggaagttctcttttgctgtaaccatattacaaatccaacttgaattctatatatatagccattgttaatctttatctttttgttacctctaattac

SEQ ID NO: 155307 - DNA, 333 bp, Arabidopsis thaliana columbia
  unsure (1)..(333): unsure at all n locations
acgccctaactctctcttcctccttcctccctttttactcattaaccaccacctccgcttctcgatccactcgtaggtcgttcgccntccgcaccactcgtggaaagttcgagaggaagaagcctcatgtcaacatcggaaccatcggtcatgttgaccatgggaaaactactttaaccgcagctctaaccatggctctcgcttccattggttccagcgtcgctaaaaagtacgacgagattgacgcttcgccggaagagagagctcgtggtatcacaatcaacactgctacttttgagtacgagactgagaatcgtcactactctcacgttg

SEQ ID NO: 155308 - DNA, 384 bp, Arabidopsis thaliana columbia
  unsure (1)..(384): unsure at all n locations
cggaannncggggtgggacccacgcgtaccgctcaactttgtattnnatttgagtgtgttttatataaactcatatttatccagtcttcctcaatcacgcggcnccgaagaagtaagagacacgcaggagagagaacgaaaggggttatataatgattgggctagtggtcgagcctgaaatctgaagggagacctgagactgtgtctctggtctttcccggtgggagatacacgtggcttccggtaacccggaaacagagagaagggttctcagagacggttgatctcgaagctaatatctgaataattgagctctgcaaacaaggaagtgatctacgacttcattgacgtcgtgacttttgattccaaggagaagagtgcttg

SEQ ID NO: 155309 - DNA, 431 bp, Arabidopsis thaliana columbia
gtacgaaccagctcatagaactatccacgtgtattccgtacgttggaggagacgcgagggctccaacaaaagattggggtgcagggtttggccaagttataagaaagagtgagaagtgtgtttgcatattggtcagagacaaagatgatcctcaacttggtatcaagattaacgcaaccctagccgctcatcttccctccgcttgtcatatcacggctcctaacatcactgactgtatttcgattctgcatctacctcgtaactcaacattggctaaagagtttgagaacttaggaaggattgaagacaactacaactccacatctcctacacaaattcataaagatgggacaggaggtggaaaagccgtaccagtgaagagtaattggatggaaggagaagagtttgttgtgtgttgagcttttaatata

SEQ ID NO: 155310 - DNA, 427 bp, Arabidopsis thaliana columbia
ctttatctctcgatttgattcataaaccctagctcttagattttttttccgatcagcgagaatggcggacgcagaagcgctttgctttccaagctgagatcaaccagttgctctccctcatcatcaataccttttactctaacaaggagatcttccttcgtgaactcatcagtaactcttctgatgctttggacaagattaggtttgagtccttgacagacaagagcaagctcgatggtcagccagagctcttcattcacatcattcccgacaagactaacaacaccttgacgattatcgatagtggtattgggatgaccaaggctgatctggtgaacaaccttggaacaattgcaagatctggaaccaaagaattcatggaggcgttggctgctggagctgatgttagcatgattggacaggtttg

SEQ ID NO: 155311 - DNA, 414 bp, Arabidopsis thaliana columbia
cgaaactaaccggagcatgaagagacgatatatcggcgaagaaatctccggcgatggggactgttaccgattgggaaggcttatattactccgaatagactagaatcgtaaggagattgatgaagttcgaagacttgcctgagtatttgaaggacaacgagtttatacacaaccattatcgatgttaatggtctttcaaagatacttttctcagtgctttctcttagcacatttagactcttaacatttttactcatttaattttaattttttatatttttttttcttactgatgtgaattgattagtttacttcttttttctaaattattacttttataataattcttatttacataatgcaattattttatagtttttaactaataaatttttttctatttatttattattt

SEQ ID NO: 155312 - DNA, 407 bp, Arabidopsis thaliana columbia
ccggaacggaagggccgacccgcgcgacccgttttctaccagattcatcaatccctcctgctacctcgagagagtaacaactcaccggacgttggaaatccatcctccgggacgatattcgtttcgttagatctagatctgagcgtcggtgagagattttctggatctgtgatacgttccaggaaacatggcgacgatgaaaagtttgataggtctgataaacaaaatccagagggcgtgtactgtcctcggagatcatggcggtgaaggaatgtcgctttgggaagctctcccaaccgtcgctgtcgttggtggccagagttccggaaaatcttcagttctagaaagtgttgtgggaagagattttctgcctcgtggatctggtatcgttacaaggaggccatttg

SEQ ID NO: 155313 - DNA, 259 bp, Arabidopsis thaliana columbia
gcgtccgatctatatcctcctcgacaatgaacctatctattacatctgcagacgttccctaagcatggagagacccacctacacgaacgctcaaccatctcgtctctcatgttatctcatccttgactgcttatctgaggttcgatcgcgcctcgaatgttgatgtgactgatttccaaaccaacttggtcctatactcaataatccacttcatgctttccttctatgtcccagtcatcttcccagagaaggccttcca

SEQ ID NO: 155314 - DNA, 104 bp, Arabidopsis thaliana columbia
  unsure (1)..(104): unsure at all n locations
ccgaaacgcagcttcgaagcgaggtatgtttccgatctccggtcatttccntngtttgggatctatatataaatggtgcgggatcattaatcctttcctaaata

SEQ ID NO: 155315 - DNA, 422 bp, Arabidopsis thaliana columbia
tttcccgagaaaatcatcactgagaaaaatgctcgctgtgtttgagaagacggtggcgaataggcctgaagctttacagaggcgacactcgtctgagtctgctttcgcgttgaaagatggatctctcgctactcatttcgcttccgtgaatcccaactccgtcacgcttaacttcggatcttctggatttgttgcttactctcttgataatcctgatcctcgtgttcctagattatttgctgtggtggatgatattttctgtctcttccaaggacacattgagaacctaccgtttctgaagcagcagtatggactgaacaaaatcacaaacgaggccatcattgtgattgaggcttacaggacactacgtgatcgaggtccttaccctgtggacaaagttgttagagatttccatggaaagt

SEQ ID NO: 155316 - DNA, 193 bp, Arabidopsis thaliana columbia
  unsure (1)..(193): unsure at all n locations
cggcccgacccacacatacggttcttattggcggtgcacccactgtttatattgaaagtggctgttctacnatagcctcttcttatacatatgtgcttgccgatccaaaaactataatcaccattataaaccattctattttaacatcttaatttattattcaacagtgcaatacttatttttttttatactt

SEQ ID NO: 155317 - DNA, 419 bp, Arabidopsis thaliana columbia
  unsure (1)..(419): unsure at all n locations
acgcaaatggctcgcccgccgcttgctcgtctttcttctgtctaccatccaaactctttgnnatggtgacgatgtccactcgatcaatggctggcaggcgtcgtacttatcctcgactgtcatgacgngctgctcagttctgacctagacattcgttaactttctgttcactgcccaaatgcttcaacaaccagccttctatccatactgccgtatctgaagaaggctcggtcacctagacctccgccgagtcctggggaaccggacgtgccgtgtctcgtatccctcgtgttcccggtggtggtactcaccgtgctggtcaagctgcgttcggtggcatgtgtcgttgtttttctttttactctccaatcattttttggctctcttgtctcctttttttttaatttattcttaattct

SEQ ID NO: 155318 - DNA, 243 bp, Arabidopsis thaliana columbia
  unsure (1)..(243): unsure at all n locations
caacaacagtcttgcgattctctaattgggaacagtgcttatgagattancctggttatatgtggtaggggatgcctaaagcctgcnnnaannnattctcatttggagccagattgttnaggttgatttnctgagtnctaagaagctctgtgtttgtatgttnnggtggtggttgtttgaattactatctgatgaattgggtaggatttgaagagcttactggggatctcctgttgcgagtac

SEQ ID NO: 155319 - DNA, 397 bp, Arabidopsis thaliana columbia
cgcgtccgggtttctaccgtatccacatctcctattgttggccagaaaccaggaacttctggtcttggtaggaaggtgaaagtgttcgagcaacccaattatctagagaattttgtccaagcaacattcaatgctcttacggcggagaaagttaaaggtgccacacttgtggtctctggtgatggtcgttattactcaaaggatgctgttcagatcataattaagatggcagcagctaatggtgtacgacgtgtgtgggttggtaaaaacactctgttatcaactcctgctgtatcagctgtgattcgtgaaagatcaggggctgatggatcgaaagcaactggagcattttatcttacagcatgccccaatcctggtggccctactgaggattttg

SEQ ID NO: 155320 - DNA, 363 bp, Arabidopsis thaliana columbia
  unsure (1)..(363): unsure at all n locations
gcgtccgaaaaaatggctgaagaagctcaagtagatctttctaatggctctgattcatcatctccgccgataaagttacctggtttggggaccaacctattcncctttcttcaacctaagcctcctcctgctactattgatgccaatgctcctaaacctaccggcgagaatgaacctctgaaatcgacctacgagactgtcactttcccttacaatccacccaaaagcgcagagccaatcaagtttgaggctgagcccagctctggcaggacttccaactctgtcatcctttggcaggtatatgcacttggagggtttcttgtcctgaagtgggcctgggcaagatggaatgaaaggaactag

SEQ ID NO: 155321 - DNA, 427 bp, Arabidopsis thaliana columbia
cgcagacgaagaaggtgacaatggcttactttagtatgggtgaagctcaccggagaagcactgaatacctaaaccggtggtgcgacaccatttcgtaccaagactcttctacactttgccgtctcctctctttctcttccaattctccacctcttctctcactcgccgacgcactcaacgtcttccaggattctagcagtttgattagacagtctgatagattctctgaatatggcgagattctggctcatgtgtttcgttctctacaaagttaccgagttgggaatctagtcgaagcataccttgctttcgataagtttgccaatgcatttgttcaggagtttcgtaattgggaatctgcttgggcattggaagctctgtatgtagtttgttatgaaattcgagttcttgcggaaaaggctgataa

SEQ ID NO: 155322 - DNA, 397 bp, Arabidopsis thaliana columbia
  unsure (1)..(397): unsure at all n locations
atgatttggttaagtttgtcaagttttttttacaatctggactctatcttcatctaagggtttatccttatgtgctgtgcgtaataaaacttctnaagatttcctgttttgcttaagtacattccatggattagcttcagaacagataacggtcctttcaattctcaaatgcaaagattcaccactaagattgttaacattattaaagctgagaagcttatttaattctaaggcggttctataattctcttttagatataaaattaatatttaccatattatttattatcttgttgcaccgttcctttcattcaccaactttgctttcttatttttctgttttttctaatctatctttatatctttatttctattatcaattctatatctttttctt

SEQ ID NO: 155323 - DNA, 435 bp, Arabidopsis thaliana columbia
gcgtccggaaaaaaagcaaagaacacttgaacgttttttatatagagatggaagggaaagaatagggggggggattaagagctaacgagttgccggaaaggcaaccgataggtacatcggctcagacggacaaagactacaaggagccaccaccagctccatttttcgagccaggcgagctgagttcgtggtccttctacagagccggaatcgccgagttcatagccaccttcctgtttctatacataacagtattgacagtgatgggagtgaagagagcaccaaacatgtgtgcctctgttggaatccaaggcattgcttgggctttcggtggcatgatctttgcccttgtctactgtactgctggaatctctggtgggcacataaacccagcggtgacatttggtctgttcttggctcgtaagctgttattga

SEQ ID NO: 155324 - DNA, 291 bp, Arabidopsis thaliana columbia
atacgcagatctctccctccctctttctccgatcttagatccattcaacaatctacaaagaagagggaaccagtctcttcaggtgggaacacctatctcgtctccgtagatccagagatccacgacctaatcgagaagggaaacgtctgcaatgtcgaggaatcgaacttatctcttccgagaatttcacttccttcgccgtcatcgaagctctcggaagtgccttaaccaacaaatactcctaaggtattcctggtaatcgttattactgaggtaacgaattcatctatt

SEQ ID NO: 155325 - DNA, 357 bp, Arabidopsis thaliana columbia
  unsure (1)..(357): unsure at all n locations
tatctccacgcgtccgaaagcacaaaaaacggggacaaaataatggcgcgaagatgcctaattttcccgntgattttgctcgccgttcttctcttctctccgccgatttactccgccggtcacgattaccgcgactctcttcttaaaagcattctcttcttcgaaggtcaacgttccgttaaactccctccagatcaactcttaaaattgctcctttactcatcattactctacttttccttcgtctgcgtttacttatcctttggttcctggtgcgttttattctacatcatatttcttattttctatttctttttcatcattctatttttattatttattatatttttttttatt

SEQ ID NO: 155326 - DNA, 323 bp, Arabidopsis thaliana columbia
gcgaaaacctcgccaatccgattactttatataatcaaagaatctttgtttgattttggagttttatgtatagggatagcgcgtcaaaacaaatcttgaaggaattgaaggatctccagaaggatccacctacatcatgtatcgcaggtcctgttgctgaatatatttttcactgtcatgcaacaataatgggtccttcatagagtccttattctgtaggtgttttccttgtaaccatccattttcctccatattacccattcaagccttctaaggtttcctttattaccaaggtgttgcatgccatcattaacattaacttt

SEQ ID NO: 155327 - DNA, 426 bp, Arabidopsis thaliana columbia
  unsure (1)..(426): unsure at all n locations
gaacctcttccctttcctcgaaaatccttcttacatcatcatccatggcttcctctgggtgcgatggaatcctgttgggaatggnaaacccactcctcgacgtctctgccgtcgtcgaccaacagtttctcgacaaatacgacatcaaattgaacaatgcgattctcgcagaggacaaacatttgcccatgtacgatgaaatgagccagaagttcaatgttgaatacattgctggaggtgctacccagaactcaatcaaagtggcccagtggatgcttcaagttcctggggcaaccagttacatgggatccattggaaaggacaaatacggagaggcaatgaagaaggatgctacagcagctggtgtctatgtccactattacgaagatgaggcaacacctaccggaacttgcggtgtctgtgttc

SEQ ID NO: 155328 - DNA, 431 bp, Arabidopsis thaliana columbia
  unsure (1)..(431): unsure at all n locations
ccggggggaccgacgcgtccgctcttctctctcgatatcatctaaatctctctttatctcaatttcccaaaatggctgggcgggagatcataatcggaagggacggtttcanaagaatcggtcgtttggttgctagagttgttcttcagagggatgatgttgagctcgtcgctgttaacgatcctttcatcaccaccgagtacatgacatacatgtttaagtatgacagtgttcacggtcagtggaagcaccatgagcttaaggtgaaggatgacaaaactcttctcttcggtgagaagccagtcactgttttcggcatcaggaaccctgaggacatcccatggggtgaggctggagctgactttgttgttgagtctactggtgtcttcactgacaaagacaaggctgctgctcacttgaagggttgtgct

SEQ ID NO: 155329 - DNA, 350 bp, Arabidopsis thaliana columbia
  unsure (1)..(350): unsure at all n locations
tcactcaatgncaatacatattcctctttttacactatacncccaaaaatcctcccggggcttacctacaacggctggaagcctacaaaaatcatctttcttnccttattactctattacgctactcggaaacaataaatctctttccaaatcctctgcttctatattctacattcgtcactactctaatcaagcctatatatgcctttatatctcttatatttacaattatacaactccatttcacaagttaccttataactatttctttccagttttttcttcttctaaacggcggtttctattcttacattccttattttaacattaatttctactacttatatttt

SEQ ID NO: 155330 - DNA, 278 bp, Arabidopsis thaliana columbia
  unsure (1)..(278): unsure at all n locations
aaattccaaaaaagtagaatcagttgtttattatcaatctcaacaagatnancatcaagacgtttaattagagacctaagcagacataatccatcnacagcaagaacaggtctatactcatgtgttatgatcatataatgctaaaagagactatgtgccacttttttcttaccataaccaaataaatcttctatgttctctaagatttattttctctatcatcaattttctattattcatttttattttatttatcttttttttttatattttatttt

SEQ ID NO: 155331 - DNA, 442 bp, Arabidopsis thaliana columbia
  unsure (1)..(442): unsure at all n locations
ggaaancccggggcgacgcgcacgcgatccgctcagcttcctcttcaaccttcttcttctctcttccttcangatctgacctctgttggtggcacgaaccactgcgctcgggcggcaggtctctcagacgtctctttnctctctctgtctcncggagcaacanaacaacaactaacagcaagcttccgtttttgttagctaagaagaagaagaagatgcttactgcttcttcttcttcttcgaccacggctaatattgtctacaagagaagtcaatctacaaggactacgaagacaacgtacggagattcagatttgagcccgagaaagagaaatgggtttggggccttttttcatctctactcttcgaaacaacatggtagcagtaagaaagttggaaactttcatcaacccataagccagactgagacaaaaacagagtt

SEQ ID NO: 155332 - DNA, 458 bp, Arabidopsis thaliana columbia
  unsure (1)..(458): unsure at all n locations
gaaanccgggccgaccgacgcgtccgcctttttctctttcacatctttctttctctcgcaaacccaaattctctcagcgccggtcaaagacttgtctctctgtctggctgtctttcactcttgtcttgtctccttcgaagctgtttgttctgtaagaaagatggaagcaggtggcgcgtacaatccacgcactgttgaagaggtgtttagggattttaagggtcgtagagctggcatgattaaggctttaaccactgatgttcaggagtttttccgactttgtgatcccgaaaaggagaacctttgcctttacggacatccaaatgagcactgggaagtgaatttgccagctgaagaggttcctcctgagctcccagagcctgtcttgggtatcaatttttgccagagacgggatggcggaaaaggattggtttgcccttgttgctgtccacagtgat

SEQ ID NO: 155333 - DNA, 291 bp, Arabidopsis thaliana columbia
acagattctcataatcatctcttctttttttctctttacgaaaagaagaaagatcgaagcttccaagtttacacaaaagcaaaaaagaacgatggctcttgtcaccttcttgtttattgctacccttggagcaatgacgtcacatgtcaatggttacgccggatgaggttgggtcaacgcacacgccacattctacggtggtggtgatgcttccggcacaatgggaggtgcttgtggatacggaaacctatatagccaatgctattgaaccaacacagttgctttaatcac

SEQ ID NO: 155334 - DNA, 239 bp, Arabidopsis thaliana columbia
  unsure (1)..(239): unsure at all n locations
gcgtccgaaaaaacaagtggaagctttaaaacgagattgattattagcaaaaatggcaacntctnnnaagttacgttactagaagttgtccggaaaataatcaacacnataaatactacaatatgtgtaagaacgagaaccatgtcttccctgatgctatcggccaccacatccaaattgttactcttcactaatgctaacattactttcacgtttctatcaagagtattaactacaca

SEQ ID NO: 155335 - DNA, 450 bp, Arabidopsis thaliana columbia
  unsure (1)..(450): unsure at all n locations
ggggcgaccgacgcgtccgcggacgcgtgggaaaatggattcttcgaatgttttagaaaacctaaacccagaaacagagtccgcataagaacaaggtgggttgccattttccattcttctctaccaatcgcatctctttctctgaccttgttcccatcctcgactcaatttctcaaattgtttgctcatcatccaaacaaggttaagatccctacgcaggcttcttctctcactcatctctctctttcttctgtctctccttttccttcttccagaatctctttcaaatccaccatcgctgctaaccctcttcaatcccctctctccatcgtccctcgtcgtcccgttgatccttcctccgncggcgctcttcgncgtgctgctgtcgtctggttccgcaatgaccttcgtgtccacgacaacgagtgtcttaactccgccaacgacgag

SEQ ID NO: 155336 - DNA, 361 bp, Arabidopsis thaliana columbia
  unsure (1)..(361): unsure at all n locations
atctaaacacaactacatttttatattatccacanatcatnaaanacgttggttnacatagattgcctgaagttacaactaancanaaatcaaaactnaaagcttctaccnatttncttgncctcaactactatacttcagtgttttcaaactatttttagaaacctgatccttcaaaaccaatattgatgcaagattctcttattacatggtagtctaagaatgctcaaaattactccattgatatcaagcctttgaccgcttcattgaacgtttactcgagaggttttagaagtctttttaaatacattaacgacaaatacccaaatccttaaaatattattcatttaaaacttatatt

SEQ ID NO: 155337 - DNA, 389 bp, Arabidopsis thaliana columbia
  unsure (1)..(389): unsure at all n locations
gctaagctcttgttcatcatccgtattcttgttatcaatgccattgaccctaagacgtggaagattctccaggtctggcgtttnanacagattttcaatggtgttttccttaaagtcaacaaggctacgatgaacatgcttcgccgtgttgagccctatgtcacttacggattccctaacttgaagagtgtcaaggaattgatctacaagagaggttacggaaagcttaaccaccagaggatagctttgactgacaactctattgtanagcangctcttgtaaagcatggtatcatttgcactgaggatttgatccacgagattctaacagtaggacctcatttcaaggaagccaacaacttcctttggccattccagcttaaggcacc

SEQ ID NO: 155338 - DNA, 459 bp, Arabidopsis thaliana columbia
  unsure (1)..(459): unsure at all n locations
aaaaacccggccggaccgacgcgtccgcggacgcgtgggctctaatcaaaaagcttttattctcagccgttaaatctttctccgatgatggctaccagaaacgtcgggatgggtggantccaagaagaggtctatcaccccaacgcacttagggcggcgctcgctgagtttatctcgactttgatcttcgtcttcgccggctcaggctccggaattgctttcaacaagatcactgacaatggagcaaccactccttccggcctcgtcgccgctgccttagctcatgctttcggtctctttgtcgctgtctctgttggcgctaacatttgcggtggccacgttaaccctgccgttaccttcggtgtcttactcggtggtaacatcactctcctccgtggtattctctactggattgcttagcttcttggctcccgcgccgcttgttttcttcttagcttt

SEQ ID NO: 155339 - DNA, 429 bp, Arabidopsis thaliana columbia
  unsure (1)..(429): unsure at all n locations
aaacttgctccaactgctctatctcaggttctttctcagacacagtttcttccatccgtggggtctctttcttctgcctgtcggtctctccccaanaattctcaccaactccatccttcatctggtttttctctgaatccaaatgctcgttgtgtcagtgtttcatttggactgaatcactccaacaaacttcatatttctgctcctagaaccaaaaggatcctaaccattcaatctgcatacagagatgatgatggttcaggcagcacaagcctattcgtctgatggtttattttgggcggacttatagtccgtgccctcggatgtgtatatgcaccacagatcagcaaggctatagctggagcataccgaaaggatctcatgaggaagttgcctaaattcatatattaccaggaaaaagctttggat

SEQ ID NO: 155340 - DNA, 433 bp, Arabidopsis thaliana columbia
  unsure (1)..(433): unsure at all n locations
cgtccgatcgctcagtaggtctttagggttttagtttcttctcctcaaaaaatggcgatntatgtgaggtactagtcttcttccgggtatggtctcttcgaggttcacggactagatgagatcggacagaacactgaggcggttcggacttctgtctccgacctcagtcgctttggccgtgttgttcagctcacagcgtttcatccctttgagtctgctctcgatgctctcaaccaagtcaacgccgtctctgaaggtgttatgactgatgagcttagaagttttctggagttgaatcttcctaaggtcaaggagggaaagaaacccaagttcagtttaggattggctgagcctaaactcggttcacatatatttgaagctactaaaatccatgccagagcaaatagttgttcttgagcttctcagaagtgtt

SEQ ID NO: 155341 - DNA, 393 bp, Arabidopsis thaliana columbia
  unsure (1)..(393): unsure at all n locations
gagaaacaacaataantntaatgttttttctatgctctcctccgccnctttngtgacgttcttttttcaggccagcatggtcactccattcaccntcttnaattcatcctcttcattccctttcaccctcaanaccaacaaggacatcacttccatctcattctatctnttgaagatttaactacatcaatttgtttccaccaattgtaaagaataagtttcttactctatcttacctccctgaccttaatgacttttaattggctaatgaattttactacctttttctcaacaagtggattccttttttttaattctatttatatcacttatttttttactcttagcacattaactatcccctcttcctactattttactttcttttctttt

SEQ ID NO: 155342 - DNA, 467 bp, Arabidopsis thaliana columbia
  unsure (1)..(467): unsure at all n locations
atccggcttttaaaacccctaaatnccccaaatctgttaacctgannaattccgattcgnaagatgtgcgtcggtgcttctctcgagagggaggggcggggnngtgatttgacctgnnagagaagagggaatcctctgctcgccaaaattcaatcctaagatnngtggagaccttaaatctctctcaagtctggtcttcgatctcttaactctnngctctcgcctttcaaccaagaaaggctttctagctaatataaagttgttgagaatgtaagcttcttgctcaacaaagggatcttcaggctaaaatcccagatattgaaaagtgtttagaggttgttgctactttggaagcaaagaatggtactggtgaggcgctcttagctgattttgaggtgtctgaaggaatatattcacgggcctgcattgaagacacagactcagtgtgtttgtggttgggagctaat

SEQ ID NO: 155343 - DNA, 370 bp, Arabidopsis thaliana columbia
gtaacagagagctgtgattttttggactcttgatccaccagagaggggtgcgttatttggctaaggaatgcaccaagatgttcaccaagaacaattgggttcttgttgaaatcgcttgcacaaggcctgctcttgagcttatcaaggtcaagcatgcttaccaagctcgatacaagaaatcaatcgaggaagatgtcgcgcaacacacatctggtgaccttcgtaagctcttgcttcctcttgtgagcactttcaggtatgaacgagatgatgtgaacatgatgctggcgggatctgaagctaatatacttcacgagaaggtctcagtgaaatcttacagtgactattactatatattaatcttgacaac

SEQ ID NO: 155344 - DNA, 440 bp, Arabidopsis thaliana columbia
  unsure (1)..(440): unsure at all n locations
gcgtcccaatttccaagcagagatgacggtgaagataatgctcgcgcgtcttggttgtaaacacgggcggttctatcgtgtaggtggcgccnatnaaaaatcncgcagggacggtaaacaaatcgaggtgttaggcttttatgatccactccaaggcaaagaagatgcggatagagtgagcctcaaattcgacagaatcaagtactggttatctgttggagctcaaccaacagacacagtggaaagcatgcttttcagggccggtttgataccaccaaagcctatggtagtggtcggttcgaaagatgggcagaagtctacgagccaacatgtttcacccattacaggtgaaatcttgaactaagagtgttgatgcgttgagcaagaaagagccttttgtgtctgtgtgaaaggaagttatgtaatgttgtttaagactt

SEQ ID NO: 155345 - DNA, 258 bp, Arabidopsis thaliana columbia
cgcgtaccagacgcgtggcctcactcactgttacttttctatataaccctaatttcgccattcccttcgctgagacatttagaagggcgtttgtgcaacaaacttagcggtatcttgagacaaggggtttctcagagctcaaatggtccagttacatctatgcttggctctcttctttacatgtcctctaagctttttgttggtggtctctcttggggaactgattacagctccttaaagcaagctttcactagcttt

SEQ ID NO: 155346 - DNA, 299 bp, Arabidopsis thaliana columbia
  unsure (1)..(299): unsure at all n locations
gcgtccgattgatttagggttcctgataaacttcttttattcctattttgaattgtttcnnaattatgttnttataagggtctagatggcgttgtcaattagttttttttttgtgtttcttcaatggcgatcattggagatgcgttgcgtcaagcgtttatgccaaagcatgttttctagagccttatggaagaatatagagcctggattaagctttagaggccgactttagtctcgatcgtggctttccttttttttgtcatcttcacttgcactatcgtctattttaatattgtatt

SEQ ID NO: 155347 - DNA, 461 bp, Arabidopsis thaliana columbia
  unsure (1)..(461): unsure at all n locations
cggaanncccggggggacggacgcgtccggaaagattggagtgttcatagagggcgaaccaatagagccaagtaggaaaatcaacatggagaaaagggaagccgtgttcgcagatagccngaagctgcagggtgaggttgacaagctgaaggagcagattctgaaagccaaggagacgtctacggaagccgagccttcgagtgaagttcttaatgagatgattgagaaactcaaatccgagatagatgacgagtacactgaagctgcaatagcagtaggtttggaggagagactaacggcaatgcgcgaagagttctcgaaagcgagttcagaagagcaccttatgcacccggttctgatcgagaaaattgagaagctcaaggaagaattcaatacccgtttgactgacgcacctaactacgagagcctaaaatctaagcttaacatgcttagggactttt

SEQ ID NO: 155348 - DNA, 424 bp, Arabidopsis thaliana columbia
  unsure (1)..(424): unsure at all n locations
cggggagagaaagagagagattcgttagttcatttatctaatggcgtcgaattcngaagcgtgaggatctgcggattacgagagattgatatcgacatcggacgttgagctattgaagagggcgtggcgtaacgagaaggcggcgccggagattcttcagtacgaatgagctcttgtcgatagagccaaagaacagatcgaattagtggaagaaacaattgaagattatgtggaaaatggcatagatcctctggtggtgtctctatatcagatggatttggacagagcccagtttctactcagatcatatctcatagttaggcttttcaagatagagaagtttatgttccacaacctcaatttaaaagaagctgaaatgctactttcttagcaagagaaagtttttgcttccagttgtgcttat

SEQ ID NO: 155349 - DNA, 415 bp, Arabidopsis thaliana columbia
atggatagtcacaaatggagtctattttttacattacttgctttcctcttcatcgctggctcttccgctgaggtcgtcagtaaacaagtcacacagggcagaggaatagagtacaacaactcttacagtctcacgtcgaatcttggagtgacgacaagagagttgagagacgagcgaccatcaagtaagatagtgacaatcacaagcttctctgtgattaaggacagaggagaaccctatgaatcatctatttttgaggctgccggttacaaatggagattagttttgtacgtgaagggtaatcctaaaggcggtataaataatcatatttcactttacgcgaggatagaagagacagaaactcttccaagagggtggtaaagtgaattttgatcctaaactctttgtccacaat

SEQ ID NO: 155350 - DNA, 398 bp, Arabidopsis thaliana columbia
ttttcatttctctctgatttctcgatcttttcgtccaactatgtctgccttcacaggcggattcttcgatgagtggagcggcaacactacctacatcggcacacctggaaaaggtattttggctgctgatgagtccactggtaccattggaaagcgtcttgcgagcatcaacgtcgagaacgttgagaccaacagacgtaacctccgtgagcttctcttcaccgcccctggtgctcttcatgcctcagtggtgtcatccttttcgaagagactctgtaccaaaagagttccgatggtaagcttttcgttgatatcttgaaggaaggaggagttcttcccggtatcaaggttgacaagggtactcgtgagctagctggaaccgacagtgagaccaccac

SEQ ID NO: 155351 - DNA, 356 bp, Arabidopsis thaliana columbia
gcgtccgcaagaagctgcagagacttgcaaaaatcttatattcaaacaatggcagaagaagctaaagcggaaggaaacgctgcggtcgtgtgcggtgacttcaccacggctataaaccacttcaccgaagccatagctcttgctccaaccaatcacgtcctcttctcaaaccgttccgctgctcacgcgtcgcttcatcaatacgccgaagctctctccgatgcgaaagagacgattaaactcaaaccgtattggcctaaaggttatagccgtctcggtgctgctcatttagggttaaaccagtttgagttagccgtcactgcttataagaaaggtttagatgtcgatccgactaa

SEQ ID NO: 155352 - DNA, 271 bp, Arabidopsis thaliana columbia
  unsure (1)..(271): unsure at all n locations
ttaatgatataacgccggtnatggttataagtcagctattgttactagagggggattactcagaaagagggatgacgctttatatcaattcaccctntggatctattactgctgggatgggaatatatcatgcaatgaaacaatgtaaggcggatttatctactgttcgcttagggttagctgcatctatgggtgcctttcttcttgcttctggttcaaaatgtaaacggtattgtatccctaactctaaagttattatccatcactcact

SEQ ID NO: 155353 - DNA, 433 bp, Arabidopsis thaliana columbia
  unsure (1)..(433): unsure at all n locations
ccgggcggagccgacgcgtacggatttggattctatttctcagctttggagtctgttggtttctcgtccggtggattcaagggtatctcacaagaacgcttgggagcnttatnttgagcacgctaagctatggttagctaattccgagcagccaatcgaatcaaactgcaatacttcatatgctgcattgagagagaagttgaagaagattatggcgtctgactatttcaccactactccggaaatgaaagctccggttgatgtggcggctgcagctggtaactatacttcttaccaggtgcctgtggacgtggaggcttcagggcattaccagcaaaaggaagaagatgcatcaaattccaaagaagttgaatcagttgttaatgatcaatctcaacaagatgagcatcaaaaggttgagttagtgaccgaa

SEQ ID NO: 155354 - DNA, 328 bp, Arabidopsis thaliana columbia
  unsure (1)..(328): unsure at all n locations
acgccagagtaaagcttgaaactttggactaatataatggcgtctttgggtgtntcnnaaatgcttggtactccccttagctgagggcagtttcaagatcgtctgctccgttggcatcaagcccatccacgttcaagactgttgctctcttctctaagaaaaagccagctcctgctaagtccaaggctgtctctgagactagcgatgagctcgccaagtggtatggtcctgacaggagaattttcttgcctgatggtcttttggatagatcatagatcccagagtacttaaactgtgaagtgggtggagattatggttaatacccatt

SEQ ID NO: 155355 - DNA, 382 bp, Arabidopsis thaliana columbia
  unsure (1)..(382): unsure at all n locations
cgggccgaccggcgcgtacggcgattctcactaaaaccctcgaacacatttcctttatctctttctctagatctactcggtatggctactatcaccgggggaaggctanacagatcttcgacagtcgtggtaatcccaccgttgaggttgatatccacacgtcaaatggtattaaggctacagcagctgttccaagtggagcttccactggtatctatgaggctcttgagctgagggatggaggatctgactaccttggaaagggtgtatctaaggctgttggcaatgtgaacaacatcatctttccatcacttattggaaaggacccaactcagcatactgctattgacaacttcatggtccatgaacttgacggaaccca

SEQ ID NO: 155356 - DNA, 343 bp, Arabidopsis thaliana columbia
acgcacgaacgggtttacgtagaccgtcaaactctcctccgtccgacggagaaaaaacgagagtgttaataagaagaggatagataagaataaaaacgactcaaagatctcatcgatcactctctccaagatctattcacgcatcgtcggaagaattttcgcttccgactacgtttctctcgtctgattttgtctccgaacatcctacctaatcgtattcggtgctggatttgaatccggtgaactgaatctgacaatttcgttcccggaggtgtttaaaaatggcctgtatcttgaataaagtgcggaatctatattcatatcctaaaatcaatgaagattt

SEQ ID NO: 155357 - DNA, 398 bp, Arabidopsis thaliana columbia
  unsure (1)..(398): unsure at all n locations
gcaagattctggcaaatgtagaagagacgattgttgttggtaaaggagaaacacagttgtatgcgactattgatctgcgggaggtaganttnanagaaccaggaagatcaaaaatgaacctaagaacccaaagtggtatgagtcgtttcatatttactgtgctcacttggcttctgatatcatcttcactgttaaagatgataatcccattggagctacccttatcggaagagcttacattcctgttgatcaagtcattaacggcgaggaagtggatcagtgggttgagatcttggataatgacagaaaccctattcagggaggatcaaagattcatgtcaagcttcaatatttccatgttgaggaggatcgtaactggaacatgggtatcaaaagtg

SEQ ID NO: 155358 - DNA, 404 bp, Arabidopsis thaliana columbia
atcatttccaatttataaaagttaaagccatggctgcatctttctctgtcccctctatgataatggaagaagaggggagagtcgaagcggaggttgcggaagtgcagacttggtggagctcagagaggttcaagctaacaaggcgcccttacactgcccgtgacgtggtggctctacgtggccatctcaagcaaggctatgcttcgaacgagatggctaagaagctgtggagaacgctcaaaagccatcaagccaacggtacggcctctcgcaccttcggagcgttggaccctgttcaggtgaccatgatggctaaacatttggacaccatctatgtctctggttggcagtgcttcgtcactcacacatccactaatgagcctggtcctgatcttgctgattat

SEQ ID NO: 155359 - DNA, 353 bp, Arabidopsis thaliana columbia
aatggctggagtcacgcttctctctcttgtgcaacggtgcgcctgatttgttctcgagtgttgtctccttcacaggagcgaataatggcgattttgggctcaactctattttaggcggtgcgttcttcgtctctagcttcgttgttgggacgatttgtgtgttgattggatctagagatgtcgctatcgacagaaatagctttatccgcgacgtggtttttcttcttgtcgctctttgctgtctcggtttgatcatcttcataggcaaagtaaccatttgggtcgctctctgttatctctccatttatctcctctatgtagggtttttatcggttttacatttctttgaccgt

SEQ ID NO: 155360 - DNA, 377 bp, Arabidopsis thaliana columbia
gtctcttccttaagatggatcatccggagaattgtgactcgccgtacactttgcattacactgagtacgatggtaaaacgggagctacagggacgaagaaaacaatggaggttgatgctgtcattggagctgatggagctaactctagggttgctaaatctattgatgctggtgattacgactacgcaattgcatttcaggagaggattaggattcctgatgagaaaatgacttactatgaggatttagctgagatgtatgttggagatgatgtgtcgccggatttctatggttgggtgttccctaagtgcgaccatgtagctgttggaacaggtactgtgacttacaaaggttacatcaagaagtttcagcttgtg

SEQ ID NO: 155361 - DNA, 394 bp, Arabidopsis thaliana columbia
  unsure (1)..(394): unsure at all n locations
aagaaaacgattagagatcttcttctttctcctgttgcatctgaagataaaggaaacagaaagcgcgagatctgagtgacggaggaatttcaaagggaggttttcgagatcagaaatggcgcaacccctcgtgaagaaagacgatgatcacgacgatgagttggagtattctccattcatgggaattgagaaaggagcggttcttcaagaggctagagtctttaatgaccctcaggttgatcctagacgatgctcccaggtcattacgaagcttctntatttgcttaaccaaggggagtcattcaccaaggttgaagcaacggaagttttcttttcagttacaaagctntttcaatcaaaagacacgggtttgaggagaatgggctacttgatc

SEQ ID NO: 155362 - DNA, 431 bp, Arabidopsis thaliana columbia
ctaaatcatcgtcgccgtgttcttctccgcttccaccgtcgttgtattcgtcttccgcgtgctgtcccatcggttgggagcggcttggcagaagaagtgaaacttgagagagtaatggagaacttggaagatctgaaaattctggctgagcagtggtcgcatcaaggaattgaatatcttcagaagataccaccgaatcagctgtatgccgccattggtgttttgttgtttacaaccatcttgctcttcctatccattcgcctggtcagacgtaccaaatccaacactgtactcctttctgggctgaccggaagtggaaagactgtgctcttttaccaacttcgagatggatcgtcgcatcagggcactgtaacatcaatggaaccaaatgaaggcacttttgttcttcacagtgaaaatactaagaaagg

SEQ ID NO: 155363 - DNA, 460 bp, Arabidopsis thaliana columbia
gaccggaccggaatgccggcgctcgacccacccgtgacatctaatctccgtagacacttgagcgcaagtcgcctccgcttaaaccgcttcatgtctacttcttcttcttataggcacatcgccgtgttgttgtcactggtctaggcatggtgactccacttggtagaggcgttgaaacaacgtggaggcgtttaattgatggagaatgtgggattagaggattgactcttgatgatctcaagatgaagtcttttgatgaagagacaaagttatatacttttgatcagctttcttctaaagttgctgcttttgtgccttatggatcaaaccctggtgaatttgatgaagccctttggctaaactctaaggcaggtgcgaattttatcggatatgctgtatgtgctgccgatgaagctttgagagatgcagagtgggtaccaacttgagaagaagaaaaaga

SEQ ID NO: 155364 - DNA, 431 bp, Arabidopsis thaliana columbia
gaaaacttcgtctctcttctctgcttctctctctcatttcctgtgagataaaggcggaggctctctccagttattggggtgatccatcgattcttagagttcaaaatggttgatcaagttcagcaccccactattgcgcagaaagctgccgggcagttcatgcgttcaagtgtttccaaggacgttcaagtgggttaccagaggccttctatgtatcaaagacatgcaacctacggaaactactccaatgctgcatttcaatttcctccgacatcccggatgttggcaacaactgcttctcccgtgtttgtccaaaccccaggagagaaggggttcactaactttgcccttgactttctgatgggtggtgtttctgctgccgtctccaagactgctgctgctcctattgaacgtgttaaagctttgatcca

SEQ ID NO: 155365 - DNA, 277 bp, Arabidopsis thaliana columbia
  unsure (1)..(277): unsure at all n locations
atggaaagaaaaatgtacaaatcaacttttttcccaatttgctgtctgttgtttgccttgttcgatcgcgggggttgtcggtatcnatcttcgtcgcctgtgcttcaactcactccttctaatttcaagtctaaggttcttaattcaaatggagtcgttttggtagagatctttgcgccatggtgcgttcattgtcaatctctaacaccaacttgggagaaagttgccagtactttgaatggtattgctactgagtcaaccattgatgctcactctc

SEQ ID NO: 155366 - DNA, 423 bp, Arabidopsis thaliana columbia
caacaatgtcgaatcctgcagccgttaccgtcggcagaggatcaatcactcacgtgatattcgacatggacggtctggttctcgatactgagaagttttacactgaggtccaagagattatacttgctaggttcaataaaaagtttgattggtctctcaaggctaaaatgatgggtagaaaagcaatagaagctgccaggatctttgttgaagaaagcgggattagcgactctctttcagctgaggactttcttgtcgagagagagtcaatgttgcaagaccttttttcctactagtgagctcatgccaggggctagtagactcattaagcatcttcatgtaaagaatattccaatatgtattgctaccggtactcacacacggcattatgatctgaaaacccaaagacacagagagcttttt

SEQ ID NO: 155367 - DNA, 362 bp, Arabidopsis thaliana columbia
  unsure (1)..(362): unsure at all n locations
acataacaatatgtctccttcaacaaaaattctctttttacttctcttatatgtcntcntagcatgagccttctttgatgagtccatcatcaactaccatcttcaacttccatcgtacttcaagttgagaacctatgaagaagttaggtccatctacttacaattgtccttataacactttaaaactaacaacaacatcatctttttcatcaactaccaatacataaaattcaatattttcaaagacaacttaagattcatttatctacacaactaaaacaacaataactctacttacaatctttatctcaccaaatttacctatctcacttactattatttcctctagttttacctttttt

SEQ ID NO: 155368 - DNA, 438 bp, Arabidopsis thaliana columbia
cggacgcgtgggatctccttcctccgatcttcttctccaattcggaatcttcctatcggagggtcaaggctcctttaacccttgatcatcaccgattcaatcaattcggaatcacaatttcaaatcgagagaatttcaatttctcttgtaaaaccctaaattatgtacagcaatttcaaggaacaagcgatcgagtacgtgaagcaagcggttcatgaagacaatgctgggaattacaataaagctttccctctatacatgaacgcgcttgagtacttcaaaactcatctcaagtatgagaagaaccctaagatcagagaagctattacccagaaattcaccgagtatctccgtcgtgctgaggagatccgtgctgttctcgatgaaggtggatcgggtccaggatctaacggtgatgcatccgtcgcaacgaggccc

SEQ ID NO: 155369 - DNA, 193 bp, Arabidopsis thaliana columbia
  unsure (1)..(193): unsure at all n locations
ctgttgcttcttcttctacatccacttttctctaagaaaaggaatacccnanttctgcaagtaaacttcgagtttatagcaagagattcncccagatcatattcatcattgcttttatgacccttattcttctgttcaactttctgattctggtcacaaagttactcatatccttattatttaaaattctctt

SEQ ID NO: 155370 - DNA, 285 bp, Arabidopsis thaliana columbia
  unsure (1)..(285): unsure at all n locations
tttcctgttcgacccactcgtccttaaacaacagataatcttngaaaaatggcgtttttttcaaccaaacagcctctnttnttggcgatgctccttaccattggctgttgtgtcntnnctncatcttccctaaacttctattagagctttgatatcacttgtgttatatttctttccaacatattctaaaatttacaacttctcacttgtactctttacaaaatctccgtctcaagttttcaatccaataaatattacttgttttttaagatctacattaatctt

SEQ ID NO: 155371 - DNA, 405 bp, Arabidopsis thaliana columbia
  unsure (1)..(405): unsure at all n locations
cctccccccctttttttttttttttttttttataacaaatatctgccattntactatagaagttctcttataaaattacgaggatcaaccaaaccaaaaacacatacataacatcattttacattaataacaaacatttatccatacctaaattttcataattctaacatcaaaaacatattttttaattatcataattaccacactcatcattctcattattatcatttcaatactcttccaaagtatcttatccaccatctttctttttttccctagcataactcacctccacactatctacttcaccttattccaaaccttttcacactccctttttaccttatcattaactcatttctccttaacttattatatactcttttccacctttttccatatttc

SEQ ID NO: 155372 - DNA, 413 bp, Arabidopsis thaliana columbia
  unsure (1)..(413): unsure at all n locations
gaatccaaaaacacaaagccgatcactaaaacttattactgtgagagtttcttcaactttttcgatccacctcaagttcctggcggggatnaggatcttgatgatgacatggctgatgaactccaaggacaaatggagcatgattatgatatcggttcaacaatcaaagagaaaatcatctcgcatgctgtgtcatggttcactggtgaagctgttgaggcagatgaccttgatattgaggacgacgatgatgagattgatgaagatgatgatgaagaggacgaggaagatgatgaggatgacgaggaggaggatgatgaggatgatgaccaggaggaagaagcagatcaaggaaagaagagcataatgaagtcatcagctgggcacaagaaggctggaagaagtcaacttgc

SEQ ID NO: 155373 - DNA, 365 bp, Arabidopsis thaliana columbia
  unsure (1)..(365): unsure at all n locations
gccgtgagttcctttggcaggaaggtcacactgcattcgccacaaaagcagaagcagatggagaggtccttcaaattgtggagctttaccgtcncatatatgaagaatatcttgcagttccagttgtgaaaggtatgaagagtgaaaatgagaagtttgctggtggactttacactacaagtgtagaggctttcattccaaacactggtcgtggtgtacaaggtgcaacctctcattgtttgggacaaaactttgcgaagatgtttgagatcaactttgagaatgagaaagcagagacagaaatggtgtggcagaattcttgggcctacagtaccaggacgattggagtgatgattatgactcat

SEQ ID NO: 155374 - DNA, 146 bp, Arabidopsis thaliana columbia
cctttcctcgtaagaaacgaaatgtgttccattgaccaaactatgtcgtctagtggctgacaataaaataacgtatctagagcagatctatcttcattctctcccattaaaagattaccaaatcatagatcatcttgttggtccta

SEQ ID NO: 155375 - DNA, 278 bp, Arabidopsis thaliana columbia
attaaacctactcaatctcagatctctttattcctagaaacctcgagaaaaaccttatcgattgctcctaaagcagagagtaggccctcttataataaaccagcttccgagaagccggtggaggagaaatcaaaagccgagaaagctccggcggagaataaaccaaatgcctgaaagaagctcccgaaggaagctgtttccttatgctacaagaataaaaagatgaagaataatagttgttatacttacattatctacatctttaattgtgcttaatc

SEQ ID NO: 155376 - DNA, 394 bp, Arabidopsis thaliana columbia
  unsure (1)..(394): unsure at all n locations
aagaaaactatcatttaaccgcttgtgtatacaacatggttaagaactcgnnctctgtcagtttccttttcatgactaggcagtactgttnaaatgcaatcaagaagcttatgttcggtacgagaacgttctctaagaacactgcacctgacggtgtgacccaccgtataagatgtagagcacatggaagcaatgtttgaagcattatggtttaccttcgctttttgcatctctgattatctgccgatgctcactgtacttgatcttaactgtcactagaagattattagagaatcaagtgcgattattgacatttattatgacccaatcatcgtctagaggatcaatatgtttagagatagatagagatcttcaaatctaatattttctttat

SEQ ID NO: 155377 - DNA, 431 bp, Arabidopsis thaliana columbia
ctcttttctctccatatttcgattccttattctcgagagaaaaccgtaaatctcttctcgtttcactcaatcaaccagagatgcgttatattcttcacatccagtgtggtcaatgcggtaaccagatcggagccaagttctgggaagtggtttgcgccgagcactttatctatccaaccggaaggtacaccggagactcatatctgcaacttgagcgcatcaacgtttactacaatgaagcgagtttcgtttgattcgttcctcttgcagtgctcatggatttggaaccttttactatggatagtctcatatctttaccttaccgtcattacctatctacctgataactttcttttttgttaatccttttcggttattcaacaggtctcatgttctcttcatctaaatgatcttaacttaattttattctt

SEQ ID NO: 155378 - DNA, 302 bp, Arabidopsis thaliana columbia
  unsure (1)..(302): unsure at all n locations
tcttactctaaacaagatcttanctaanatgtctattaactacccaacccttatccaanattgcaggagttctttttagaagtgcaggagcaacctcatattttttatctcttacaanaacttttcacccatcatttttctactctcatttcactcttcttaaactttctattttcaatcaatgactttatctacattcttaaacaattatttttacgcttatcaaactcatttaaccaacatttttatccacatttctcttaattattttaccccatcatataacaatttcttccattttt

SEQ ID NO: 155379 - DNA, 65 bp, Arabidopsis thaliana columbia
gcgtccggacgatctcccaaactcatttctctacgtttttctttctctctctttctcgtttgctc

SEQ ID NO: 155380 - DNA, 423 bp, Arabidopsis thaliana columbia
  unsure (1)..(423): unsure at all n locations
taacaggtaatcttttttttccagtaaaaatttttntccagcagttttacttaattaccgagacttgttnncacaccaaaatcatataccatttcttttgtgctaaatgaaaaggctagaaaatatttgaacgaaattagtaataaaattcttttccccttttctcaaaagtttcctaactcatatcctttatcatttcttcttctgcaaatactattatctttttatccaaattatattccttcctcttcatttctcattcatattccttattttactttctttacttattatatattttctcttcttttttatcttttttccttaattcatctttattatcctattcattcctttttcaactttttcctattactctttatttattatctttattttttacatccatattttttattattt

SEQ ID NO: 155381 - DNA, 380 bp, Arabidopsis thaliana columbia
  unsure (1)..(380): unsure at all n locations
atggctgcatctttctctgtcccctctattttaatggaagaagaagggagattcnaagcaggggtttctgaagtgcagactgggtgganctcanagaggttcaagctaacaaggcgcccttacactgcccgtgacgtggtggctctacgtggccatctcaagcaaggctatgcttcgaacgagatggctaagaagctgtggagaacgctcaaaagccatcaagccaactgtacggcctctcgcaccttctgagcgtttgaccctgttcaggtgaccatgatggctaaacatttggacaccatctatgtctctggttggcaatgctcgttcactcacacatccactaatgagccttgtcctgatcttgcttattatccgta

SEQ ID NO: 155382 - DNA, 356 bp, Arabidopsis thaliana columbia
  unsure (1)..(356): unsure at all n locations
ccgtaaactgcgacaagagaaagaagattgacttcttttaagagagagagtaacgatngaagagggtcataatctcgatatagagggaagtgatacatcgatttggttgatgaagtgtcctgtagttgtagacaaggcatgtcacaagataacagcttcgtcgtcttcttctttttcttcctctgattctccttccgacatggcaaagattgttcgcgaagtttatcctctacgggacgattctccccccgagttcaaaatgtatatgtgtggtgctgagtatgggaacatgccaaattgctacgctttgaacatgttcacaaactttgtttctattgggggcttttccgatgtta

SEQ ID NO: 155383 - DNA, 376 bp, Arabidopsis thaliana columbia
  unsure (1)..(376): unsure at all n locations
atccataccaatcctcctccttatcttttttttcttgactctaacaccacttcctntcaccgaaatcttcccaaaagatgtagggcctctacaaccatttcttcgatcacatatgaacacgaccattgacaatttctccaatgaaacttagcaacttccgttcaacccttctcttgatgctcctagaatctactactcatacaacaatctactccagtgtattaatctttacttatagtgacactcatatacattaactatctacctaattattttcatatttcacttaattgctctcaatttttctcaccataacaatcaccttaaaaattttatgaacttcataacacattaaattaagaatatcaatttatct

SEQ ID NO: 155384 - DNA, 391 bp, Arabidopsis thaliana columbia
  unsure (1)..(391): unsure at all n locations
tcttcctgtaaaacactaactaatagatcaatatttctttattgatgaagttggcattcatnggggtagctttcattattatggcgcgggcaatcacatctaactctcttattatttttttcaccttcaacttcaacctttcatttttcatttcctactttaccctattttcttcacttacccaaggttgcttcaacttctttactaaccttaaaaacatttccagtacaaccccataccttcatcaatcttgccttttccttcaatcttccattaaagccatttttccctttctcaacactgccctttcagttttacttcctaactcatacaaattcaattattccttacaaaatcatctccatcaccaacttcaacacccttattttat

SEQ ID NO: 155385 - DNA, 414 bp, Arabidopsis thaliana columbia
  unsure (1)..(414): unsure at all n locations
cgcgtccggctcttcctcatgctatccttcgtcttgatctttctggtcgggatctcacanactcactcgggaagattctcactgagagaggtgacatgttcaccactaccgcagaacggtaaattgtccgtgacataaaggagaaacttgcttatgtcgctcttgactacgagcaagatctagagacagccaagagcagttcttcagtggagaagaactacgagctacctgatggacaagtcataaccatcggagctgagagattccgttgtcctgaggttctgttccagccatcgctcatcggaatggaagctcctggaatccatgaaacaacttacaactccatcatgaaatgtgatgtcgatatcaggaaggatctctatggaaacatcgttctcagtggtggttccacca

SEQ ID NO: 155386 - DNA, 454 bp, Arabidopsis thaliana columbia
  unsure (1)..(454): unsure at all n locations
gcgatgaccatgacagcatttctcgcgagacttcttatcggtaacggatcgagccanattcgcgggacttcgagttctagcggcggtccnttcatttccgtttctagggctttcttctcctcctccactccgatcaaagctactctctttcccggtgatgggatcggtcccgaaatcgctgaatctgtcaagcaggtgtttactgccgctgatgtggttattgattgggacgaacagtttgttggtactgaagtagatcctagaaccaatagtttcttgacatgggataatcttcaatctgtgcttaaaaacaaggttggtttgaaaggaccaatggctactccaattggaaagggtcaccgttccttgaaccttactcttaggaaagagctgaatttgtatgccaatgttaggccttgttacagtcttcctggttacaaaacccgttatgatt

SEQ ID NO: 155387 - DNA, 293 bp, Arabidopsis thaliana columbia
  unsure (1)..(293): unsure at all n locations
cttccgcgttgatttccacctaaagcgttaaaccgtttttttctcatcattctgtcctgatctttgaacgtatttcatcagataaacggatggttcatcaancaactcccgtcgatattcagttcctgcttgaaggtaatgaggaagctcgagccaattatgaggatctttatgctgctgtgatgcgtggagaccactaaagctgccttctttatgtcgatcagctgaagcagatgtgtgttgaaagtttcaaagaaggtgttttgagcatctaacagttagcttctgttgat

SEQ ID NO: 155388 - DNA, 260 bp, Arabidopsis thaliana columbia
  unsure (1)..(260): unsure at all n locations
gaaagattgtcctacacagtcacctatttgtcttctcttccgattcaatccctcttagccgcctctctctcctcgccggctggatcaaccatctccnatctttcctcctccgtctcacctctaaatcaaatcctaatctccccttagactatgtctctatagcatctgtactagccaacataatcgttctcgccgatcagcttattttgaatcggttattctcttacctcttcttttactgatgtggtggcctctccaat

SEQ ID NO: 155389 - DNA, 452 bp, Arabidopsis thaliana columbia
  unsure (1)..(452): unsure at all n locations
caattttctctagatccactgatccattcttctcgggaaaattcaaaatccnccggtgaagggaaactcattcattgagttagctaaaacatngtgaccgatatccctatatcggcggatatatcagaggcattgttaccacctgaatctgagaaaaccgtgacttctactgaggatcatgtaccttagtggaaagagcatataacgattctaggattaaccgtgagtgcgttgctcgggactttgttctgtatcattactcataaactaaatctgacggttggaatcatcccgtctttgaacgtcactgcgtgattactcggtttcttctttcttaattcatatactggttttttttctaatcctagtttttcatgtgttatctttaacttatctataaacaccgtttttcaaactttttattttttttttctatttcctttttctttact

SEQ ID NO: 155390 - DNA, 454 bp, Arabidopsis thaliana columbia
ctctctttaaaagaaattcgtaagtttttttttgaagcagaagatggcccaaaagggggaggcgctattatagaaaggagccgagcctatcataccatctatctacacattactcctttaccaatattcatctcgcagcacgcatagacggaattcaatatgttcatttttattatgtcaagaacggacaaccctaacaagctccttttcgtggtaccaaaggccttgttctcccagctgatccttttgtgattaaccattcatactaacatttagtttctgtagaatgtatgtatatcccttattgtattattcaattaattatatttatctccaacaataatacttcttttattcattggatccttattggttactcactttaatctacatgttttaaacacttatattttttccttttattttttttccaattcaattttaattcttattt

SEQ ID NO: 155391 - DNA, 377 bp, Arabidopsis thaliana columbia
gaactgtctctcttctgaaaacagatctctctactttgcttcttcactcgacttgtatctatgatgcatgtcttccgagaatggttgccgaagcatattgaaggcgttagagaagcctgatggtggtgaattcggtaactactacagcttacctgctttgaacgatcccaggatcgataaactaccttattccattaggatacttcttgaatcggccatacgtaactgtgatgagttccaagttaagagcaaagatgttgagaagattcttgattgggagaatacttctcccaagcaggttgagattccgttcaagcctgctcgggttcttcttcaggactttactggtgttcctgctgttgttgatcttgcttgca

SEQ ID NO: 155392 - DNA, 437 bp, Arabidopsis thaliana columbia
  unsure (1)..(437): unsure at all n locations
gaacctactcttctgctaagctattcttagttaagccagactagcaataaacccttcatgttaagcattctgtttcctggtggagaaacctanatattttggtttcttgtatccggtgatgaagatacagtgtgatgtgtgtgagaaagctccggctactgtgatttgtttcgccgacgaagctgctctctgtcctcaatgctacatctagattcacgccgctaacaaactcgctagcaagcaccaacgtcttcatcttaattccctctccaccaaattccctcgttgcgatatctgccaagagaaggcagctttcattttctgtgtagaggatagagctcttctttgcaggtactgctattaatccatccacgtggctaattctcgatctgctaatcaccagtggttcttagccactgggatcaaatagctcttac

SEQ ID NO: 155393 - DNA, 349 bp, Arabidopsis thaliana columbia
agcggatcgatattttttcctgcgactttttttatggtgaagtgagtttttttctttggtagtattattacatttttggaggagagtaaaaataattaccgtaaaaaaaatgaaaaaaaaaacagatctcattctgtataatataacgccttcttgttttttgccttttatcaattaagctttacacaaatatacaagtcctgttgaaatttttattataagaacgttctttaaaaaaaaaaaaaaagtgcatcctttctatattattcaagcttacttacgcattcattctatcttatatcttttttatagttttacctaaattcaatttacattaccgttattttac

SEQ ID NO: 155394 - DNA, 310 bp, Arabidopsis thaliana columbia
  unsure (1)..(310): unsure at all n locations
tctgactcttttttctacacctaatttctatctaatgtggagctaaggtntattacaaagcaggtttattttctagtacagatgtgcntttctctntttatgctttactttctaatcaaaaaattgtacaatgtattgtcatatctatatgataatcccttcatattgcttcttaatcttctatacacaatttaacttatttatatattcttgcaaattgttacccatttcccatccacaaatattctacccctttcaccaattaaaatattattatcttaaactcacttactcttattattcaatcatt

SEQ ID NO: 155395 - DNA, 347 bp, Arabidopsis thaliana columbia
  unsure (1)..(347): unsure at all n locations
cgtccggacttaattaantcaaacataaaaaaatggttcttttattgattatagnccgtttaatagcggcggcatccttcttttgcctggggagcacgaccaataaatctctccggttacctccgggaccaaaaggtcttcctattataggaaaccttcaccagatggagaaattcaacccccaacacttccttttccgtctctccaagctatacggcccgattttcacgattaaaatcggtggccgtcgcctcgcggtgatctcctctgccgagctagccaatgagctactcaaaactcaagaccttaacttcaccgctcgtcctctttttaaagggcaacaaacc

SEQ ID NO: 155396 - DNA, 411 bp, Arabidopsis thaliana columbia
gagccgtccttaaaattgaattcatctaaaaaccaaactcttttttcatggctgtttacaataccaaactcgtgggggcctctgttttctggcgcgtgagggcttctcttgccttttgacttaaagggtataaaaccagaaagtcttaccaaacaaaaactggactcgaagatacttcatgatgagattgtgaagaaagtcaacgaaaacccaaacgctggatggaaagctgctataaatgatcgattttcaaacgccactgttgcagaatttaaacgtctttctcgtgttaaaccaacaccaaagaagcatttcttaggtgttcctattgtgagccattatccatcttttaagctacctaaagcttttgatgctagaaactctttgccacagtgcactagtattggaaac

SEQ ID NO: 155397 - DNA, 362 bp, Arabidopsis thaliana columbia
actcaccctcttcaacaccacaatacacttccccttatccacctaaaaactattctccttatctctcagaatcacccccacccccaccaccacaatatataatacaatatcctaagtacacaccacacccaaatccaaatgtctactattcccctacacctctaccatattactttccttttcctaaactagacatcaaatctccaccatcaccatatttctacatctctccaccaacttccccatactactccccttcttctaaatttaactacaaatcttcaccaccaccgtacgtttacatctcttcaccaccttccccatactccccttcttctaaagtttaattcaaatctccacca

SEQ ID NO: 155398 - DNA, 455 bp, Arabidopsis thaliana columbia
  unsure (1)..(455): unsure at all n locations
ccgctctaccagtttatactggagacaagtgtgtttcctatagaaccagaatcaatgaatcaacgcagggattttacagcaaaacggccgtgcaacataatgaccacatcagctgatgaaggacagttcttaaacatgcttatcaagctcgttaacgccaagaacacaatggagatcggagtttacactggctactctcttctcgccaccgctcttgctctccctgaagacggcaaaattctggctatggatgtcaacagagagaattacgaattgggtttaccgatcattgagaaagccggcgttgctcacaagatcgacttcagggaaggccctgctcttcccgttcttgatgaaatcgttgctgacgagaagaaccatggaacatatgactntatattcgttgatgctgacaaagacaactacatcaactaccacaagcgtttgatcgatct

SEQ ID NO: 155399 - DNA, 449 bp, Arabidopsis thaliana columbia
cgtccgcaatcttcttcatcgatttctctcttccaattctcccaaaagatgtcgaaccctaaagtttgctgggtcatgagtctcagcgggactcccatcggacggatcgagatggagcttttcgctgatacaaccccaaacacggcggagaatttccgtgctctctgtaccggcgagaaaggaatgggaaagctaggtaagccacttcacttcaaaggatcgatcttccaccgtgtgattcccggattcatgtgtcaaggaggtgatttcaccgccaagaacggaaccggtggtgaatcgatctacggtgctaagttcaaggacgagaactttatcaagaagcatacaggagctgggattctctcaatggctaactctggtcctaacactaacggatctcagttcttcatctgtaccgataagacgtcgtggttagattgtaagcacgt

SEQ ID NO: 155400 - DNA, 377 bp, Arabidopsis thaliana columbia
  unsure (1)..(377): unsure at all n locations
gtaaaaatgtctgcttcagcgactcaatcgttcttagaagtttcaatggggatcaatcccgccttcacaccctacgtacnagttgaaagctgttatcaaactagccctagctgaagatgctggtcatacaggagatgtaacgtgtatggctacgataccgtttgatatggaagtggaagcttatttcttggccaaggaagatggtattgttgctggagttgctcttgctgacatgatttttgaacatgttgatccctccttgaaggttgaatggatgcgaaaggatggagattatgttcataaaggattgaagtttgtgaaagtatcaaggaatgcacataagattgttgttgctgaaagagtcttgtctaacttta

SEQ ID NO: 155401 - DNA, 384 bp, Arabidopsis thaliana columbia
aaaaaacaaatcaagcaaatttatttatctttgtcaagagacattgattctcttaaaggtcgtctaatttaagctcagagatgcacacctcatcttaaattgtgctcagaggggttccaaatattaccagtcgttaggaagcaatcacgagttgttttaggaattatttaacgtgataatggctagcaatgagatggaaaaatcgagtaaagagaatgaacctaatacaccttctccttcttctactgcccctccctcttcacattaaccttcatcggctgttagtgctggcattgctactccagattggtctgtttttcatgcatattctcctattccgccgcctcattgttatgtgtcatctattccccaacctcaccctta

SEQ ID NO: 155402 - DNA, 450 bp, Arabidopsis thaliana columbia
  unsure (1)..(450): unsure at all n locations
aacagtgagggtattcctaggtttcagatcttattaatgtctccactcaagtacttntgtgtgagaatattactcttgttgttgctctattccantctcttcctattctcttcttcttctttctttgcctcatcagttgatgatcatgagctacaacgaatagatcctcatttccgagtgagaagattgttggtgaaagatctgtattcaacttgtgatgattatgaaaccaatcttcctcctcctcctaagaagaataatcttcttacttattctgtttcatcatcatcatcatcatctgttactaataataatcaaaccaatctccttaaacccatctcttcttcttcttccaccaataaccatactaaactctccaataccaccaccatttttacgtctcacatacttaactccacaaaatcttcttctaacacatccaataccatc

SEQ ID NO: 155403 - DNA, 431 bp, Arabidopsis thaliana columbia
  unsure (1)..(431): unsure at all n locations
ctctgaatttcgatttcaatggagtcacgcgttcttttactcgccaccgcgaatgtcnttggaatgccgaaattgagacgacgaagcgtatctatccaccgtcaattcagcactgcatcgtcttcctcgttctcggttaaaccaatcntaggaatcggagagggagcgaatcttatctcctgtcgtcagcttcgtccaattcttcttctcgattcgtcggcgatcaacggaggagagaaaagagaaattctcaaaccggttaaagccgccgctgctgaaggtggagataccgctggggatgctaaagttggattcctcgccaagtatccatggctagtcactggattcttcttcttcatgtggtacttcttgaatgtgaatntcaacatccttaacaagaaaatctataattacttcccttatccctattt

SEQ ID NO: 155404 - DNA, 62 bp, Arabidopsis thaliana columbia
cttttctttttctaactattttatttattattcctacaaaatctcatgaaagaaagttttta

SEQ ID NO: 155405 - DNA, 394 bp, Arabidopsis thaliana columbia
  unsure (1)..(394): unsure at all n locations
aattaaacaacaccaaccaaaaaatttctctttaaaaaaaagttaaaacaaaaaaaaggtcgttcacaggaactctcgagagatgcaatttttttnataagacagtctatgtggtggacatgttgtccattgaaggaatgccttaccacaagtcttgcttcaggtgtacccattgcaaaggaacccttcatatgagcaactattcctccatggacggagttttgtactgcaagactcattttgagcaactcttcaaggaatctggcaatttcatcaaaaactttcaaccattaaaaactgataatccagtactgactatgactcccatcaagatatcttccatcttctgtggaacacaatacaagtttgccgcttgctaaaaaactgtttaccc

SEQ ID NO: 155406 - DNA, 458 bp, Arabidopsis thaliana columbia
  unsure (1)..(458): unsure at all n locations
gaagaagagtactagtagtagtagaacgtattctaattgtcaagaaggtgatcanaaancgatctcatgtgaaggagaatagaanaccaataangataaaggacggaagcaaggtaagaatgagttatggtggtctaaagggaagaaatggcaatggaaaccgataattcaagcgcaggagattggtgtaatgttactacaattgggtattgttatgtttgttgtgcgattgctcctacctttaatcccttttcctttttcttttccttatacacatacatcgtatattattaatctcattatattttttagtgttatatctttaattatttagtttatatatattcttgggttttatttattttataatttgtatttatatttatatttttatatttcttaaattatatttcaatttttatttttattttatttattaattctataatttttttttt

SEQ ID NO: 155407 - DNA, 327 bp, Arabidopsis thaliana columbia
  unsure (1)..(327): unsure at all n locations
cgcttgtgcttaggtgctcaacaaatcttttcttcttcatatgaccatcaacnccgcgaaggttttacaagatggactgaaggcgaatctcggtcctaagggaactatcaagatgcttgttggtggttccggagatatcaagcttaccaaggatggcaacacgcttttgaaggaaatgcaaattcaaaatccaacagccatcatgatttccatgacagctgttgctcaggatgacataagtggtgatggtactacttctactgtcatcttcattggtgagcttatgaaacaatcttagcgttgcattgatgaatgaatgcatccact

SEQ ID NO: 155408 - DNA, 342 bp, Arabidopsis thaliana columbia
ctgtgtatctctcactccacctctattttttttcttcctcctctaaccttcttttcgtacgtttataaaaaggtcgttgaaaaaaaaatcataaaccgtcaaaaagccaccgttgatatttcttccttgttgcttcttcaatggcgtcgttcgacgaatcaccttccttaaaccccaaatcctttgaaaagatcttcataaccaagttcgctcattttcacaccgtctagatagtttcctttcacaaacaattacctaattttatatgattgttagtaatacaatcattatcaacttcaatatttttttaactcttctttttacaaaatcatttctttttat

SEQ ID NO: 155409 - DNA, 456 bp, Arabidopsis thaliana columbia
ccagtcgcaactcctcctccagtgcctactttactacctgctgcaacccctgccccatccgcggggccacctgctgcaacgggaggtccttccactactccaccgtcagttgctccttctcctgctgatgttcccaccgcctctccaccagcaccggaaggtcccaccgtgagcccaagcagtgctcccggaccttcagatgcatcccctgccccaagcgccgcattctccaacaaggctttcttcgccggaaccgccttcgccgctattatgtacgccgccgttttggcttgagaactttttttatataattttttttttatccctcaaattatttcaaatctttggtgttaatgtgagaatttgatttattttcgtatttcgctatttgatcggtaaatttttttatcatgatttcgtgtgtcggaatggggaaagtaattattatcttggttg

SEQ ID NO: 155410 - DNA, 440 bp, Arabidopsis thaliana columbia
ccttcttctcttaacaaactctattctctctttttttcaaactcccaccatcctccttccaaggcggcttatctctcccactcggaagaaccttcccaatcctaatcaacaactttttaaactcctccttatcaagaatgtcatccaccgcatcatcaagctactctatttcattatcatacgtctcgaaaagaaacgacacaattgaattaacagtcacagacatctagaagctcgaacaagtcttctcagatccacaattactaaacttcttcgctaatccaacaatcaccgtctagaagaaacgtcaagtcatctacgacatatttaaatcgtcgtctcttcaatctcacacatctaacttcctcaacgtcctcttctacgcgaatcgtatcaatatcgttactgatatcgttaaggagttttagttgttttacaat

SEQ ID NO: 155411 - DNA, 347 bp, Arabidopsis thaliana columbia
ccgggccggcccacgcgtccggccttgtcttatcctaccctttttccttctttctctccgattcttcctccgtcagtggaaagaaatcaaaatggcgttgggacgttgttgtatacccacgtatggtccctaagagagagctcaagtttgcattggaatctttctgggatggtaagagcactgctgatgatcttcagaaggtgtctgctgatctcaggtcatccatctttaaacagatgtctgccgctggtactaagttcattcctagcaacacctttgctcactactaccagtttcttgacaccacctccatgctctgttctgttccacctaggtatggatacact

SEQ ID NO: 155412 - DNA, 436 bp, Arabidopsis thaliana columbia
  unsure (1)..(436): unsure at all n locations
ggaattacccggtccgcgccgcgcgtccgcaaaattggtaaccgaacctttcaaattcgtctcctttcctttcaattccgatgcctttgggccgccatactcttccgacgggtggtcctcnccctctcccaccagcgtcgccgccgctaatcttctcccgaacgttcctttcgcttccttctcccgttccgataagctcggccgtgtagctgattggactcgcaatctctctaatccatccgctcgtcctaacaccggatccaaatcagatccgtctgcagttttcgatttctccgctttcgcaatcgacgaatgcttcggtctcgcttcctccggtggtaatccctacgaagacgcaactttccgtctcggctacggtaaacctccgccgcgtcctaaattcgtacctaaatggcgtttcaatcctcaccacaat

SEQ ID NO: 155413 - DNA, 442 bp, Arabidopsis thaliana columbia
  unsure (1)..(442): unsure at all n locations
gctttggatgatggtaaagatcttggaatgctctgatggagttctcattaatggaaaganagccttacctatacaatgagcggggttgttgcttatgggatcgatttcgaaacaatcacagtccatcctggaaaaacttatagacttcgagtgtcgaatgtgggaatctcgacgagtttgaactttaggattcaaggtcacaacttagttcttgcggaatcagaaggatcatacacagttcaacaaaactatacaagcttggatattcatgttggacagtcttattctttcttggttacaatggatcaaaacgcgagctctgattactacattgtcgcgagtgctcgggttgttaacgaaaccatattgagaagagtcactggagttggaatcttgaattttaccaactcttaaatgaaaagcttaaggtcaattaccctct

SEQ ID NO: 155414 - DNA, 405 bp, Arabidopsis thaliana columbia
ctcctaaacccatcactcttctctttttttccctctccctcgcactctactgcaggagcggtcctttccaccactgggccatttccaatttccccaatttcgtctctcacgaatttatctctccacgtcccgacgaagttccatgggagagagattcacaaaattcacttcagaaatcaaagattctgttttttaaccaaatccaaggtccagagagcgtcgcctttgattctctcggacgtggtccgtacacaggcgttgctgatggtagggttttgttttgggatggagagaaatggattgatttcgcttatacttcgagttatcgatcggagatttgtgatccgaagccttctgctttgagttacttgaggaatgaacatatatttggtcgtcctttatgtc

SEQ ID NO: 155415 - DNA, 433 bp, Arabidopsis thaliana columbia
aaaaatacaaagaatgctcaaaccaagatatctgtagccgccgcaactgctcttctactagaggtgaccattgacccgggcgcgggaactgttacttacactattgaataaaccacttgttttgactactcatgttgtactaccagaaagactatcatggttaatgacattctaaagttcaagtatcgttcttcccacacgtatcatgtggttgtcatacccacatattatttctgtcactccttctactctactaataaccattcctatgtaaacaccaaaatcgatcttaatactccttgaataaactatttcatctttcctacacactgtcactagtataaccaattacggattttatctttccgttcatatcctaactctttcttgtctaccttcatacacattcattctacttttttaaattcttgaa

SEQ ID NO: 155416 - DNA, 446 bp, Arabidopsis thaliana columbia
  unsure (1)..(446): unsure at all n locations
cgtccgggacaagtctttaacaagctccgaggtaaattttttatacataagcaggtacaagcgatatatgatcgttttttcgatcggtgcaagatncaaaccntaagatccaatcttacgtttgaagagttatacatcgctgttcttctcgtttacaatgacataaacaagagattgcctggtcctcatttcgatccaccttctaaggatctagtcaatagcattatgacggactgtgatatcaacttggatggagaacttgatagggaagagtttgtgaagtttattgagcagattacggctgatacgtttaacgtggttagtcagggtttgatcatagctttgattgttgctcccactgtggctattgcgactaagatagccaccgaaggtgtccctggagtttgcaaagttgttcagaagcttcctacttcaatctatgcttc

SEQ ID NO: 155417 - DNA, 388 bp, Arabidopsis thaliana columbia
cttccgcactcttttacttccggcgatctctctccgtcttctcaatggacgccgtcctttactctgttgcactctccttaactcccctaggcgcatcatcctctccttcctcgccgtatcttcttctgccgaggtttctctccgttcagccatgtcacaaattcaccttctctcgaagcttcccttccaaatcccggattccctcagcttcttccgccgccggttccacgttgatgactaattcctcttcgccaagaagtggagtgtacactgttggtgagttcatgacaaagaaagaggacttgcacgtggtgaaacctactactactgtggatgaagctctggaactccttgttgagaatagaatcactggatttcctgtaattga

SEQ ID NO: 155418 - DNA, 389 bp, Arabidopsis thaliana columbia
  unsure (1)..(389): unsure at all n locations
caaaaaccaatcccatatctgaatcttttcctaaacctcagattcatcatcatggcttgttgttctaactacgatggaagcctgctcnntatnnttaacccactcctcgatatctctgccgtcgtcgactacgaatttctcaccaaatacgacatcaagttgaacaatgcgattctcgcggaagacaaacatttgcccatgtatgatgagatgagtagcaagttcaatgttgaatacattgccggaggttctactcataactcaatcaaagtggcttcatggatgcttcaaattcctggggcaaccagttacatggtatccattgtaaaggacaaatatgtagaggccatgaataaggatgctacagcagctgttgttaatgttcacta

SEQ ID NO: 155419 - DNA, 458 bp, Arabidopsis thaliana columbia
  unsure (1)..(458): unsure at all n locations
gaagagagggccttgcttacaaaaagaattttttgtttctggatattgtggaaagtgtaaaccttgtgatgtcctctaaaggcgatgttcttcantntgatgtgacggggaaggttttaatgaaatgtttcctttcgggaatgcctgatttgaagttggggttgaatgataaaattggtcttgagaaggaatcagaaatgaaatctcgcccagctaagagtggtaaaaccattgagcttgatgatgtcacatttcaccagtgtgtgaacctgaccagattcaactccgagaagactgttagttttgtaccaccggatggagagtttgaactgatgaagtatcgaataacagagggtgtaaatctgcctttccgtgtattaccaacaatcaaagaacttggtcgtacacgtatggaagtaaatgtcaaggtcaaaagtgtgtttggtgctaaaatgttt

SEQ ID NO: 155420 - DNA, 324 bp, Arabidopsis thaliana columbia
attctgtatccaccaaaacttttcttctacttttctatctatatatctattgttgagctacgaagtgtaagtacttttgactggctatattgatcaccaagttatagcatttaaaaaaaatgttgtcaagcaaagttgttggcgactctcatggacaagactcatcctactttcttggatggcaagaatactatgaagaatcctttccacgagtcgtttaacactagtgggattgttcaaatgggtcttgctgaaaaccagctttcttttgacctaatagagaaatggcttgaagagcatccagaagtcttgtgtttgaagaaa

SEQ ID NO: 155421 - DNA, 326 bp, Arabidopsis thaliana columbia
  unsure (1)..(326): unsure at all n locations
ggccgagccacgcgtccgcggacgcgtgggtgacgaaagaatcaactcttttaacagaatctttaacancaaacgcatagctatattctacgcttggaacgagaacacaccatattcaaaattcacttacatcaacgcttatggcatcttccaagacattattacaaaccctgctcgctacgggtttagagtgacaaatgcacgatgttgtggagttgggaggaacaatggacagataacttgtcttccaggtcaagcaccatgtctaaataggaatgagtatgtgttttgggatgcgtttcatcccggtgaagctgccaatattg

SEQ ID NO: 155422 - DNA, 176 bp, Arabidopsis thaliana columbia
  unsure (1)..(176): unsure at all n locations
gaaaaatggcgactcttaaggtttctgattctgttcctgctccttctgatgatcctnagcaattgagaacctcttttgaaggatggggtacnaacnaggacttgatcatatcaattctggctcacagaagtgctgaacagaggaaagtcatcaggcaagcataccacgaaacctac

SEQ ID NO: 155423 - DNA, 355 bp, Arabidopsis thaliana columbia
ataataaaaacattcaatagggggggcataaaaagaaacgcgtgggcctttttggggctatacaacgctaaagagctcaacaactgaaggtgggctatgttccactatgatcggattctaagatcaatccatcgctaccagaaaggggccttcgtagaacctctacgaccatttggacgacccattcaacatcaacgcttggaccttcgacaccaacttagttcccgagaagcagaagcggctgcttattatgtgaatgagagcatacatacgagagtgtgttccgggtctattctatgaaaacatgggaaccttcctatgaggtatctttgtatagaaaaagaacctattttta

SEQ ID NO: 155424 - DNA, 396 bp, Arabidopsis thaliana columbia
  unsure (1)..(396): unsure at all n locations
cgacccagtcgtccgagaaaatcaaagcagcagttatggccgacgtatcttcaaagcaccccatggaagatgaggtggaggagactatgcgtctagggtggggcntaagctagagacagacttggagatcaaggcttcggctgataagtttcaccacatgttcgctgtgaaaccacaccatgtctccaaagcaagtccaggcaacattcatggatgtgatctgcacgaatgcgactggtgcacagtcggctctatcgtcttctggaattacgtacatgatggggagtgcaaaggtggctaatgatatgttcgaggcggtgcgtccagataagaacttgattacttttattgtttattgaatgttattcctatgtatttatacaatttctttttgct

SEQ ID NO: 155425 - DNA, 428 bp, Arabidopsis thaliana columbia
  unsure (1)..(428): unsure at all n locations
gaaccaacaagaagtcttcatctttaatcattcattttcttcttcgtcttctatgcanatggttcgcactttccgctccattggcgcgagattgtttcngtgttaagtcgcaattagtttctgcaaatcgaacaactcaatcagtttgctttggagctcgttcctctggaattgcattatcttcgagattgcactatgcatcacccattaagcaattttctggggtttatgcgaccaccaagcatcatagaaccgcttgtgttaaatccatggctgctgaggaagaagaagttatcgaacctcaagctaaagtgacaaacaaggtttactttgatgtggaaattggacgtgaagttgctgtcagaattttgatgggtctctttgaagaagtgttcccaaaaccattttaaactttcgttccttttttt

SEQ ID NO: 155426 - DNA, 334 bp, Arabidopsis thaliana columbia
cgcgtccgtaatattcaaaaagatggctcaaaaagtggtttctttttttggcgccggaggagcttcatgggatgatggtgtccacgatggggttagaaaggtgcatgtagggcaaggccaagatggtgtgtcatctatcaacgtcgtgtatgcgaaggactctcaggatgttgaaggaggtgaacacggaaagaaaacgttacttggatttgaaacgtttgaggttgatgcagactactacatattatcattgcaagtgacctacgacaacttgtttgtccaagactctgacatcatcacatctattaccttcaatacattcaatgaaaaaaca

SEQ ID NO: 155427 - DNA, 386 bp, Arabidopsis thaliana columbia
atttcattttcttccgatcaatacatttatttcattttctgagagagaagaacatggctatgtggttttaaaacgttcgggcggctctttactcaggatcttcctatacaactgtgaaatctccgtataagaaacctgctgctaaaggtgttaaatctaataagactactactgctaaagcaactaagaagcctgtgaaagctgctgctccaacgaataagaaaacaacttcctctcaccctacctattaagagatgattaaagattctattgtatcgtttaaggatagaactttttcttagtcatatactctattcattaatttatattggtgaaacataaatcacttacctctacttttaattagcttttccttttgaatttta

SEQ ID NO: 155428 - DNA, 437 bp, Arabidopsis thaliana columbia
  unsure (1)..(437): unsure at all n locations
accggccggaancccggnggaccacgcgtccgctaaactcaatatataatgataacacgttcacgtgttcatcgtcaaaagagtgtctcagtgagtacaatcttcaggtgtcttctagttttgatcagacgctctattcaattctcttaattagtcatatctttctttcttttttcctcgtttcgtgttaattttattttaaaacaaaggattaaagagtcgttctttcttttggtaacatggagccttaatgatcctttgttagctctagctaggattttacgtactacttagggtattcaaactaaaataaaatcaagaagaagagcagagagatggtgaggacaccatgttgcaaagaagaaggaatatagaaaggggcttggacttctgaggaagatcaaaagcttattgcttattctttacctacatggtga

SEQ ID NO: 155429 - DNA, 386 bp, Arabidopsis thaliana columbia
gagaaaatctatggacatggcaattcacatcttttcagaaactcaacttcacaggcgagcatgtactcaagtgttgggtggaaggtaatgttatagggaaaggttgctccgggatagtgtacaaagctgaaatgcctaacagagaagtcatcgcggtgaaaaagctctggccagtgacagtacctaatctgaatgagaaaactaagtcatcaggagttcgagactcattctcagctgaagtaaaaacacttggatcgatcagacacaagaacattgtacgcttcttgggatgttgttggaacaagaacactagacttcttatgtatgattatatgtcaaatgggagtttgggaagtttgcttacgaaaggagccgtgtatgtagct

SEQ ID NO: 155430 - DNA, 381 bp, Arabidopsis thaliana columbia
  unsure (1)..(381): unsure at all n locations
acgactactacaacattcttccattcactacttcctgctaacacttacaaatccngggctgtagcttcttcctttgtctcagatcctcattcgtcgtctctccaatttcgctcacttttgtcagattctacctctatttttggtccaaggtttttttaccttttttatcacaatatttattgttatctttttctttttcttactatccttttcctttatttttcttattatctgtttcttctgttatttctttttcttattttttttttatatttttatttttcctttttctacattcatttttgttgtgtctgttatactatttatttacctttttttctttcctactcttactcctcattctttacattatttttttct

SEQ ID NO: 155431 - DNA, 452 bp, Arabidopsis thaliana columbia
gttgtttttggagatgaacgtggaacgagaacattgctaggattcgaagagttcgagggtgagtcagacgaatatataggatccgtggaaggatactacgaaaaaaactttggagttgatactgtagtgacaacgctgattttcaagactagcaagaacaaaacagctggaccgtttgggattgtatctggcacaaagtttgaattcaagaaggaaggttacaagatcactgggttccacggacgagctggtgagtatgttaatgctattggagcttatttagctccatcaggcaccacccctttgactcctgcaacacaatcccaaaagctagaaggagctggtagtgaggcaggaactttatgggatgatggtgctttcgacggtgtaaggaaagtgtctgtaggacaagcccaagatggtattggagcggttctcgttgtgtacgacaa

SEQ ID NO: 155432 - DNA, 456 bp, Arabidopsis thaliana columbia
cgtccggacaaagtcgagctcttgtacacaaagtttttttttttggtcaaatcaaaactcctggtgcaggcgctactgccttgatcgcctgaaggagagatctgtgacattaatggaacctgtgtggatgctgcggaagatgagtttttcaggttaacgacaaaagaagggaaattgacagttgaaagagagacttttaggacaccaacagctgatttctcgccgatcttgcaattcgagcaagaccctgttcagattcttgatgctttgttgcctctgtatcttaacagtcagattcttagggcattacaggagtcattggctagtgagcttgcagctagaatgagtgcaatgagtagtgcttcggataatgcatcggatctcaagaaatcgctttcgatggtgtataataaaaagcgttaagctaagattactggagagatttttgagatttgt

SEQ ID NO: 155433 - DNA, 470 bp, Arabidopsis thaliana columbia
cggcgcgaccacgcgtccgcgaaaacaatgtaaaaagcaacggaaagacttatgatactgcttcgtcatcttcaaccggggtgatcttacgacgcctgtgtctctacctcagcttgcttgtccaaagacagtgctgcatatcaatatggagatgatgttgtcattgtcgcggcacaaaggactgcactttgcaaggcaaaacgtggcagcttcaaggatacattttcagacgagttgcttgcctctgtattgagagcattgatagagaaaactaatgtaaacccaagtgaagttggtgacattgtattgggtactggtttgggaccaggatctcagagagccagtgaatgcaggatggctgcgttctatgctggttttccccaaactgttcccatcagaaccgtgaacagacaatgttcatctgggcttcaagctgttgctgatgttgccgcttccataaaagctggttt

SEQ ID NO: 155434 - DNA, 287 bp, Arabidopsis thaliana columbia
ctttatcaacaacactctctctcttctcttttaacactttctttcatctctcgccggaggaacccataaccacaacaatggccacctaaacccaaatcctaatcggagtaatgggttgcgccgatatcgctcgaaaagtctctcgagcaattcacctcgttcccaactccacaatctccggcgtagcaagccggtctttagaaaaagccaaagccttttccacccccaataactacccataatcaaccaaaattcacggcttttaccaatttttttttctaaaatcc

SEQ ID NO: 155435 - DNA, 479 bp, Arabidopsis thaliana columbia
tcggggtattacccctgtgaggaaggtagaccgggtcttatctctggctccgaatcccagaagttctcttgaaccgaccactatctactcggcagtaagagagcgtcaatataaaaccccgaaagaacgttaataccgaatcagacagacgagctcttccaactgggcggcaagtcaaacagccatgacgccaaggagcttcacatgttcgtctggagctcaaacgggtcacccgtttcagaccgggcgggtcttaacgttttcggcggagcacctgacaacgatcaaggcggaagatctgaccaaggtgctaaagagatccgtatgttagtcccagatcaatctcacaacggcgagaccaaagctgtagctcatccagcaagtggagatttcggaggagaacaacaatttattttcgtcggtaaagaagaagaagcattgagaccaaaatacgccgagaatggtctaaacaaacttgc

SEQ ID NO: 155436 - DNA, 254 bp, Arabidopsis thaliana columbia
  unsure (1)..(254): unsure at all n locations
cgtccgtttaaaaaaattnctaagtactatcaagattcattttatggcccaaaaggtggaaccacggggggggaaaggagccaaccgatgggaccattnatctacacatgacgccgtgaccaagattcagctcgcagcaggcatagacggaattcaatatgttcagtttgattatgtcaagaacggacaacccgaacaagctcctcttcttggtaccaaaggccgtgttctcccagctgatccgtttgtgatta

SEQ ID NO: 155437 - DNA, 288 bp, Arabidopsis thaliana columbia
  unsure (1)..(288): unsure at all n locations
gtctacatttacactcggagcttaaaccttctcaatctaccggcggcgaaaatntnttgcggtaggtactttgagatcgtggtagtaacacttgtgaactacggagaagatcatggaaagctcgtcgttatcgtcgacgttgttgaccagaacagagctttggtggatgcccctgatatggagaggatccagatgaactttaagaggttgtctcttaccgatattgtcatttacatcaaccgtgtgccaaagaagaaagctttaatctattcattttaaaatgcttat

SEQ ID NO: 155438 - DNA, 457 bp, Arabidopsis thaliana columbia
cgcgtcctctaaatctctctcgatctcaatttcgcttaatggctgacaagaagatcagaatcggagtcagcggtttcggaagaatgggtcgtttgattgctagagttgttcttcagagggatgatgttgagctcgtcgctgttaacgatcctttcatcaccaccgagtacatgacatacatgtttaagtatgacagtgttcacggtcagtggaagcaccatgagcttaaggtgaaggatgacaaaactcttctcttcggtgagaagccagtcactgttttcggcatcaggaaccctgaggacatcccatggggtgaggctggagctgactttgttgttgagtctactggtgtcttcactgacaaagacaaggctgctgctcacttgaagggtggtgcttaaaaggttgtcatctcttccccaagcaaagatgcgcccatgttcgttgttggtgtcaa

SEQ ID NO: 155439 - DNA, 451 bp, Arabidopsis thaliana columbia
  unsure (1)..(451): unsure at all n locations
atttcctctctcactctgcacacgaaggctagagagagagagaaagaaaaaagcggagggtacgcagaatccatccgattgagggttanngctgcccctaatctggaaacctttgcctcgtttctgatctgttttccggatccgacttgaaggaaagaagacgacgacgcactaccaaaaacatgggcgcgaattcgcttccaacggatgcaaccctcgatctagatgagcagatctcgcagctcatgcagtgcaagcctctctccgagcaacaggtcagagcattatgtgagaaagctaaggagatcttaatggatgaaagcaacgttcagcctgttaaaagccctgtgacaatctgcggtgatattcatggacagttccatgatcttgcagagcttttccgtattgggggaaagtgtcctgataccaactatctgtttatgggagacta

SEQ ID NO: 155440 - DNA, 431 bp, Arabidopsis thaliana columbia
  unsure (1)..(431): unsure at all n locations
cggaccgcgtggccagtatttcgtaacggccaaagtttcccaattctttttttttttccatagtaaggatctgaaatncggagagtgggaagaaaanaatcacattttttattttccgcccggaacaaaaagctgatggnttcagtgtagcaaccaatctcctcggaatcctcaatttcttcacattcctcctctcaatcccaattctctccgccgggatctggctcggcaaaaatgcagcaaccgaatgcgaacgtttcctcgacaaaccaatggtcgtactcggaatcttcctcatgttcgtctcaatcgccggactcgtcggtgcttgttgccgtgtctcttgcctcctctggctttacctcttcgctatgttcctcctcattcttctcggcttttgtttcacaatctttcctttctcatacacaaac

SEQ ID NO: 155441 - DNA, 329 bp, Arabidopsis thaliana columbia
  unsure (1)..(329): unsure at all n locations
ttatacaaaatccgttaatttatttcttccttgtggcccctataacaccgtatggttttatatatagcttggaggattattactaaacaaaantgtatcaagcttataaacatccctcttcttataagcgcgacaagctcgattccgcccgcaacatcctttaactacacaacatgcattcttgcttgattcttatccgcatttgttgtgtctacttacactccaaatctatttcataactataattatcttttattcatctagcatttcattctccatttataatttatatacgttttgacttttatatcttctatacttctaaaatt

SEQ ID NO: 155442 - DNA, 385 bp, Arabidopsis thaliana columbia
  unsure (1)..(385): unsure at all n locations
aaccaaaaaaaataaaacacaaaaacaattattttattggcttcctcaaccatggctttggcctgcccttccttcgccggggaggctgttaaaccttccncatcanatgtcctcggaagcggccgtgtgaccattaggaagactgtcgccaagccaaagggtccatcatgcatcccatggtacggatctgaccgagtcaagtacttggttccattctccggctagcccccgagctaccttaccggtgagttccccggtgactaccgattgtacacctcttgtctatcctcctacccatagaccttttccaggaacctttatctataaattattcacatcagatagtccatgctttgatccctaagctttttttcccttaactatt

SEQ ID NO: 155443 - DNA, 308 bp, Arabidopsis thaliana columbia
  unsure (1)..(308): unsure at all n locations
ctgagaaacacggcaaggtcccattactatgctgtagttattgttgggagccgggaggagtgacatacctatgtgaggacgaanaggaaagcttgcgctgaggttgggattaagtcatttgacgtgggcctaccagaggaagtttctgaagctgatcttattatcaaagttcatgaactaaattcaaatccggatgtccatggcatattagttcaactcccattgccgaaacatattaatgaggagcatatattgggtgcaatcagcattgattaagatgtctattgcttccatccttggaatatttt

SEQ ID NO: 155444 - DNA, 454 bp, Arabidopsis thaliana columbia
gagatagagagatggcgacggaaacggattttgtagctccggtaacggtaagcaacgggggaagcaaaggatgttgcaaggacggtggtcctggttacgcgactcctctcgccgctatgtctggtccatcggagaaacttatctacgtaaccgccgtctacaccggaactggaatagataaaccggattatttggcgacggtggatgtagatccaagctcgccttcgtattcaagtgttattcatagattaccaatgccttttgttggtgatgagcttcatcattctggttggaactcttgtagttcttgccatggtgatgcttctgttgatagacgttatctcgtgttaccgtctcttatatctggtcgcatttatgcgattgatactaaggaaaacccgagggctccgtctttgtataagtatgttgatcctaaagagattgctgataagac

SEQ ID NO: 155445 - DNA, 443 bp, Arabidopsis thaliana columbia
cggacgcgtgggttctgaagcaaagatttttgcttatcttatctgaatcttcgtggctagtctgatataaatttgaggggatgatcaaagccaccatggatcttggttgcctggatttgggatgtctttctgacaagaaaagcggcgtcggagtttccaatctaatggattttgttttcccgtctgatgtcttccagtgacattgaattgagtttcttcctgttcactagaaaaattagggttggtaatttaggctctcgtataggggaattgaaaatggcagttccggaatagtgaagctgttgtttggtgttgtttaggaggttgtgagataggaagatgattaagctttgattgatttagttgtttacatgatctgcttttgtcgcaatgccatcgtattagttggaaaatctagctaaccacctggctaaattagttca

SEQ ID NO: 155446 - DNA, 451 bp, Arabidopsis thaliana columbia
  unsure (1)..(451): unsure at all n locations
cttcatggaactgtattgggtctagaagctgtcacagcaaatggcaacgtgcttgacatgcttggaactttacgggggggcaatactgngtacgacttaaaacatttgtttattggtagtgaaggatcacttggtattgtaactaaagtttctattctcacacaaccaaaattgtcttctgtaaatttagccttcattgcttgcaaagattatctcagctgccagaaacttcttgttgaagcaaagagaaatcttggagagatactctcggctttcgagtttcttgataacaattccatggatttggtactgaaccacctagacggtgtacgtaatccagtttcctcttcggagaacttttatattctgatcgagacaacagggagtgatgaaactaatgacagggagaagcttgaagctttcctgttgaagtcactggaaaaagggttag

SEQ ID NO: 155447 - DNA, 332 bp, Arabidopsis thaliana columbia
  unsure (1)..(332): unsure at all n locations
attcgagactgattctgtgtatgactcatataagctcgctgagagaattgcgaacctagctggaggtgttgctgtcatgagaaggcnnagcancaactgaaactgagcttgaggaccgtaagcttcgtatcgaggatgcaaagaacgcaacatttgctgctatcgaggaaggcatagttccaggtggtggtgctgctttggtgcatctctccactgttattcccgccattaaggagacttttgaggatgctgatgaacgtttgtgagctgacatagtacaaaaggcattgctgtcaccagctgttcttattgctcaaaacgctggtgttgat

SEQ ID NO: 155448 - DNA, 463 bp, Arabidopsis thaliana columbia
gcgaccacgcgtccggaaaaaaagcaaagaacacttgaacgttttctagatagagatggaagggaaagaagagggtgggcgagtgggagctaacgagtgcccggagaggcaaccgataggtacatcggctcagacggacaaagactacaaggagccaccaccagctccatttttcgagccaggcgagctgagttcgtggtccttctacagagccggaatcgccgagttcatagccaccttcctgtttctatacataacagtattgacagtgatgggagtgaagagagcaccaaacatgtgtgcctctgttggaatccaaggcattgcttgggctttcggtggcatgatctttgcccttgtctactgtactgctggaatctctggtgggcacataaacccagcggtgacatttggtctgtttttggctcgtaagctgtcattgaccagagctgtttttacattg

SEQ ID NO: 155449 - DNA, 449 bp, Arabidopsis thaliana columbia
  unsure (1)..(449): unsure at all n locations
cttaaatcgatcacaatctactcacttttgaagtaactatagtaagattgatcancaagggaagtatggctcaaaagggggaaggaaaatgagggaaaggaggcaaccaatgggacgatggatccgatcatgacgccgtgaccaagattcaggttgcagtaggcggaatgggaattcaatacattcagttcgattacgtcaagaacggacaaaccgaacaaactcctcttcgtggtatcaaaggcagtaccattccaactgatccgtttgtgattaaccatcctgaggagcatctagtttctattgaaatttggtataaacctgatggtcttattcaagggcttaggttcatatccaacaaaaagacttctcgtttcattggatacgatcgtggtactagatcatttctccaagttcaagacaagaagatcattggctttcatgggtct

SEQ ID NO: 155450 - DNA, 453 bp, Arabidopsis thaliana columbia
cgatgctctcgtttggtcttctcttcacgtactcttcgttggtgacaaaagttatcagaaatgagtaaatgttccagggggtggattgatccacccacctattgcattgctaccaactgcattcccagaagcttattggaagcaagcttgtaatgttactcctcttttcaatgaattgattgatcgtgttagcttggatggcaaattcttacaggatagtctctctagaacgaagaaagttgatgtctttacatctagacttcttgacattcactccaagatgctagaaagaaataagaaagaggacattcgtttgggtttacaccggtttgattatatgcttgacgaagaaacaaattcacttcttcagattgagatgaatactatctcgtgttcgtttcctggccttagtcgtcttgttagccagctacatcagtcattgcttcgatctta

SEQ ID NO: 155451 - DNA, 443 bp, Arabidopsis thaliana columbia
gccgccgaagttttgtgcaatggcgacgaaaccgacgtttcagctgttttcttcttctgaaggttctggtctagggttagggttccttgattcatcagagccagctcttcctccacctcctcctcctgttgaagtattatccttcgaggtgtcttcctccactgatttcgaagtggataaattgactatcggcgagatcactcttttgaagggtcgtgtgagcactaaagaggtttttggattgcctaattcagatttggttcctggagtctatgaaggcgggcttaagctttgggaaggatcgattgatcttgttaaagctcttgagaaagaatcacaaaccggaaacttatcattttccggaaagcgggttctcgagcttggatgtggtcatgcactttcaggaatctatgcgtgtctcaagggttcagatgctgttcatt

SEQ ID NO: 155452 - DNA, 455 bp, Arabidopsis thaliana columbia
  unsure (1)..(455): unsure at all n locations
cggcaagagcaaaaatggctcgatctttcgctttttctgtgatctgtatcgncctcatcggcgggggtactattcaagctgggacggcaccaccaaccnctacaccanctccaccaactccaacaacttctccaccagcagcaactcctcctcctgtctcagcaccaccaccagtcacaacatctcctcctccagtcaccactgcttctcctccagcaaatccaccaccaccagtctcttctcctcctcctgcttctcctccaccagctactcctcctccagtcgcttctcctcctcctcccgttgcttctcctacaccagcaactcctccttccgtcgctactcctcccccaactcctctagcttcccctcctgctcaagttccaacttcagctccgaccactaagccagattcttcatttccatcttcgttatctagcccacctttttcatca

SEQ ID NO: 155453 - DNA, 397 bp, Arabidopsis thaliana columbia
cgcacccatattatttcttcctcgtttctttcttccgctactattcttccctctccgcgtcattccactatgggcgctcctttcaacaaacttaactcctcccctgccttcccaaccacccacaaggctaacaacgacattacttccatcacaagcaactactgaagagttaactgcatgcacgtatggcctccgattctaaagaagaagtctgagactctctcttaccttcctgaccttaccgattccgaattggctaatgaagttgactaccttatcctcaacaagtggattccttgtgttgaattctatttgtaacactgatttgtttaccgtgagcactgtaactcacccttattctattattgactgtactgtacaatgtttaagcttccct

SEQ ID NO: 155454 - DNA, 458 bp, Arabidopsis thaliana columbia
cgtccggctgcaattacaaagaatggctgcttcaattgttttaaccgcaaactacttcctcaagggggcgccattcgcactggatgggttggagccacatatgagcaaacaaactctggagtttcactggggaaaacatcacagagcttacgtggacaacctcaagaaacaggttcttggaaccgagcttgaaggcaagcccttagagcacattatccacagcacttacaacaatggtgatctcctccctgctttcaacaacgctgctcaggcgtggaaccacgagttcttctgggagtcaatgaaaccaggtggtggaggaaaaccatcaggagagcttcttgctttgcttgaaagagatttcacttcttatgagaagttctatgaagagttcaatgctgctgcagccactcagtttggagctggctgggcctggcttgcttattcaaatgaaaaac

SEQ ID NO: 155455 - DNA, 400 bp, Arabidopsis thaliana columbia
gcgtacggcgattctcactaaaaccctcgaacacattgcctttatctctttctctagatctactcggtatggctactatcaccggtggtcgggctacacagatcttcgacagtcgtggtaatcccaccgttgaggttgatatccacacgtcaaatggtattaaggttacagcagctgttccaagtggagcttccactggtatctatgaggctcttgagctgagggatggaggatctgactaccttggaaagggtgtatctaaagcttttggcaatgtgaacaacatcatcgggccaacacttattggaaaggacccaactcatcagactgctattgacaacttcatggtccatgaactttactgaacccaaaaccagtgtggttgttcaagcaaaagctt

SEQ ID NO: 155456 - DNA, 412 bp, Arabidopsis thaliana columbia
  unsure (1)..(412): unsure at all n locations
ctgagtgaaaaaagcttatcgcggcgattattttccggcgaagaagaagaananagatgggaaggtggctactaatgggggtggtanctcancncanctctctcagaaggaagctgatgtcaggatgatgtgtgccgctgaggttcatcttggaaccaagaattgcaattaccagatggagcgttacgtcttcaagagacgcaacgatggtatttacatcttcaaccttggcaaaacatgggaaaagctccagatggctgctagagttattgttgccattgagaacccacaggacatcatcgtccagtcagctaggccctattgacagagagctgttttgaagtttgctcagtacactggagccaatgccattgctggaagacacactcctggtaccttcaccaatcagatg

SEQ ID NO: 155457 - DNA, 445 bp, Arabidopsis thaliana columbia
gagacactatgaatcttccatcgttaacgtacggcgacgtcaacctccgcgactggcgggcagctgcgaattccggcgggggatgcgatgattgcggaagctcagacgcctgggtgatacacacagtacgtctccgtgcatctctccgcttcttctgcactcattgtctcctccgcaaccatccggcgtcgttttgtcccggttgcttcgccttgtacgattcatctccgccgtcttttcgccgcgtctcttgttccattaaagggtgccactccttgactcacattcactgtgccggcgatgaaagtcacctttcttatctctgtcctccttgccgagaccctaattccttctccttcttccgccctatcgtcgacgaaaacggctctcgcttcgtcgataaagcactctccgaagctttcttatgcgctgctaagatcgctgc

SEQ ID NO: 155458 - DNA, 305 bp, Arabidopsis thaliana columbia
  unsure (1)..(305): unsure at all n locations
gcgtccggatgaaagagcgtgtcaagtttcttcacatgttattgcttaccattgaagatatcaacggttagcctcttattcttgggggtagggtcaacaanaacatanttccnnttcttgattatctcgggaaactaggcgtcaggaaatcgactttcactgagtttcttagaagatacccgcaggttcttcactctagcgttgttatagatcttgcaccggtggttaagtatcttcaaggactggatattaaacccagtgatgtacctcgtgtgcttttgaagtattcacaaatttttgggttt

SEQ ID NO: 155459 - DNA, 440 bp, Arabidopsis thaliana columbia
accaaaccaaactcttcactctctccaactatggccaagaagatgagttctctcagcaggatcttcaacattctgggtcggctcacaactcaaacccacgcgcacaacgtcacgcgcctcctagcaaaccacccatcattctcttccttcagccatttcctaacacaaacacacctcgccgacgaaatcaaccggagaagaaccataaccgtttgcgcagtagataacgccgccatgtcagcattaacctctaaaggctatacactctcaactctcaaaaacattctctccctccacgtccttttagattacttcggaaccaaaaaactccaccagatccgtgacggctctgctctcgccgctactctgtttcaagccaccggagctgctcctggaacctcaggattcgttaacataacggatctgagaggtggtaaagt

SEQ ID NO: 155460 - DNA, 434 bp, Arabidopsis thaliana columbia
  unsure (1)..(434): unsure at all n locations
gcgtccgaatttatgtaggttgctgcaagagtcacatttgtttatgccgagaaggataaatgnttgggggtgaaagttattcacttggacggagaaacaaaaaaagttgaagtacttgatgaagaaccaggagatgatgaagaaggaggtggccagaggacgtataaactatcaatgtcatgtattttaccgtttccaaaacggaatgatccttcaagcacacaagagtttataccagggaaacacgtcttagctgtatatccaggaaccacagccctctacaaggcaactgttataagtaccccacgaaagaggaaatctgacgagtacttgctagaatttgatgatgatgaagaagacggagcattacctcaaagaacagtgccattccacaaagtggtagctttaccagaaggccatcgccagtaatttta

SEQ ID NO: 155461 - DNA, 235 bp, Arabidopsis thaliana columbia
gactgataggagaagcaagacgacttgaatcatttttttcgctgaagatccaaaatcgggtcggcgtatccttaatgaagggcgggaaaacaaaattttttctctaccccaatgaatcgctcgatatctctatggccaattccaggcagaacattaagaagcttttgatggattgtttcattatcaggaagcctactaatatccactcacgttctcttgctattgcttttaacta

SEQ ID NO: 155462 - DNA, 444 bp, Arabidopsis thaliana columbia
  unsure (1)..(444): unsure at all n locations
cctatgtgtggtatgaacttgccctttgttcgttatctcattggtccgcctatgtacggtgggctcattggtgatgggggggcgattaatcactacnaccatatntgggctggatggtgtatcaaggtgatctgtgaccatttgggattgggagtgaagacaggtttgccctacatttaccacagcaaagccagcaacccgtttgtgaacttgaagaaggagtacaagggaatcttctggcaggaggatatcattcctttcttccagagcgcaaagctcactaaagaagctgtgacagttcaacaatgctacattgagctgtccaagttgttgaaagagaagctaaaccccattgatccttactttgacaagctttcagatgctatggttaacttggattgaaacttgngatgagcctaacccacccactaaagcttgagctgc

SEQ ID NO: 155463 - DNA, 225 bp, Arabidopsis thaliana columbia
  unsure (1)..(225): unsure at all n locations
accgcgcgtccggtctagtactaaagatatgtcaactgtcttattctcaactccttttaacggcnttncccgacgcccaccatgcgagttacagtcgtccaatcctccaccgtctataacgatactcctgccactatagacaaagcggagaagtatattgtggaggcggcaagcaaggtagcacaactagtgttgttcccggaggggtttatcggtggctatcct

SEQ ID NO: 155464 - DNA, 445 bp, Arabidopsis thaliana columbia
  unsure (1)..(445): unsure at all n locations
caaccggaaagtattgtccaagacattgataatatggtccggtcttatgttgaaaggccgaattgcatcatattgggtagttctccancaaatcaagatattgctacctcagatgctataaaacttgctagagaagttgatcctacaggcgaaaggacttttggtgttgcaaccaagcttgatatcatggataaaggaacagattgtctagatgttcttgagggaaggtcataccgtttgcaacatccctgggttggaattgtgaatcgttcacaagctgatattaataagagagtcgatatgattgctgcacgtagaaaagagcaagaatattttgaaacaagccctgaatacgggcacttagccagtagaatgggatcagaatatctagcaaaactcttgtctcagcacttagagactgttatcaggcagaaaatccccagta

SEQ ID NO: 155465 - DNA, 452 bp, Arabidopsis thaliana columbia
cgcgtccgctttaatccaatctgctggttcgttttccacattcaaactcgactcttgaatatcaaagtgagaagtctttgctatggctggtaccgctgctgcttctgttgtccgttacgcacctgaggatcatactcttcccaagccctggaaaggccttatcgatgatagaactggttacttgtacttttggaatcctgagaccaatgttactcagtacgagaaaccaaccccctctctacctcctaagttttctcccgccgtttctgttagctcttccgttcaggttcaacaaactgatgcctatgctcctcccaaggatgacgataagtactccagaggctctgaacgtgtgtccaggttttctgagggtggcaggagtggaccgccttattcgaacggtgctgctaatggagttggggattctgcttatggtgcagcatctaccagag

SEQ ID NO: 155466 - DNA, 407 bp, Arabidopsis thaliana columbia
  unsure (1)..(407): unsure at all n locations
acgcgtccgctcgaacacgatgctctgaagacttataaattgcgtaaacttttttcacctggctgggggtctttatcgtcgttagggcgcatctaatatngctttctgcactaaacttggcggtcactggaaacaaggggtaaatgttccagtgtcatcaatgctcggttctcttcgctacatgtccacaaaactttatattggtggcctgtcccctggaactgactagcactccttgaaggacgctttctctagcttcaatggagtgacagaggcatgagtcatgacaaacaaagtgaccgggaggtctagaggttatggattttataacttcataagctaggaatcttgtcaactcttctatttcagcaatgaattgacatgatctgtaatatttttaacataat

SEQ ID NO: 155467 - DNA, 212 bp, Arabidopsis thaliana columbia
  unsure (1)..(212): unsure at all n locations
gtcacaaccaaaaaaaagaaaacacataatcaaagattataatggcttcctcaaccatggctttgtcctcccctggctggggcggaaaggctgtnaagcctgccgcatcagatgtcctcggaagcggccgtgtgaccatgaggaagactgtcgccaagccaaagggtccatcaggcagcccatggtacggatctgaccgagtcaagtacttg

SEQ ID NO: 155468 - DNA, 501 bp, Arabidopsis thaliana columbia
  unsure (1)..(501): unsure at all n locations
cggcacagttgcaaggtttccgtgcctatgccccattctactctttatgtgtccgtccctnggctgatggaagtgagagacatccggtgtcatacagagagtgcgctgtcannccaagcgccaagacnnaccatctatcttagnnctctgtctaggcacaaagcnntgcctcatcttcctaggtacccatccatcgaaggggagtggtaaaaggggtggatcatacccaatttctgacgacatcgttcaggcaacccaaacctcgatgtgatctttgattgggaaccatggttcttgagcctagagattggcttgcacaaggctgcggagggtgctctaggaaagacgtgcaaaaccgttagagttgtttctttcgtgtgctgggaactatttgacgagcaatcagatgaatacaaggagagtgtgttgccatcggatgtatcagctagagttagcattgaagcagcttcgactttcggatggggaaagattgttggaggc

SEQ ID NO: 155469 - DNA, 476 bp, Arabidopsis thaliana columbia
  unsure (1)..(476): unsure at all n locations
cggggcgaccggcgcgtccgcttgtttcttggttttgtgttttagtttttagattaaatgggacagattccnannttgggttggtggatgaatatgttgggccggtcnttngccatcaacttcagcttgattctaaagattttgaagggtgatagagaacgaggagattcatgggacagaacagcgtatgttagcatatggcccgtggtatccaccacggcttcagaatcttcttcgttgtcttcagcatcttgcaactatagcaagattgaagaagacgatgatagaattatcaatctcaaatttggtgatccaacggtgtatgagagatattggcaggaaaatggagaggtgacaacaatggtgatacctggatggcaatctcttagctatttttcaaatgaaaacaacctcttgtggtttcttgagccagagcttgccaaagagattgtgagggtgcataaagttgttgggaa

SEQ ID NO: 155470 - DNA, 361 bp, Arabidopsis thaliana columbia
  unsure (1)..(361): unsure at all n locations
cgtacggtcagtttccgaggttaaacctaaaaaccttttttttcgacctggggaagctctanccggaagcttttcctttgtgcttgatcgtatnccanacnaaagcgtgagcaccgagaatcaccgcgaccggttattgagaatggtgaatagcttatctcccaaggtggttactcttgtggaacaagagtcaaacacaaacacagtctctttctttccgaggttcatgtagacaatgaactactattccccgatgtttgaattaatttatgtgactcttccaagagatcacaaacataggattgttgtggggcaacattttcttactataaatcacttttaacatcattctcatattaat

SEQ ID NO: 155471 - DNA, 317 bp, Arabidopsis thaliana columbia
ttctgtttctcctaactcttcgatttccttctactcaaaacgccgtctttacatggtggaccaactcttcttcaggctgcttctataccctttaagcccttttgcgtatctttcgccggaggaagaaacgttagcgtctcactctctcgccgagcttctctccggtctgtctctagcggctatcctctccgcttactaaacctcgtaccctttgcttcgggagaagctgagactactgatactgaggtggaatcgaacgaaccctaagttcatgaaactgattgtgctgttgatgtcgagaatgaaaatgccaatgc

SEQ ID NO: 155472 - DNA, 442 bp, Arabidopsis thaliana columbia
  unsure (1)..(442): unsure at all n locations
gggcgaccgacgcgtacgttctcgtctctctctctttcatcgcagctttataatccaaatcgaaagcaatttctctcggcggagaaaagagaagcaatggtagtctnttnanntaaagaagtacacgatcaaatttcaagtcagagtttcggggaaaaaaaaggaatgggggatcatctggtgagagctgaggaattcgagaagaaagctgagaaaaagctcaatggatggggaatattcggatctaagtacgaggatgctgctgatctgctcgaaaaagcagctaattcctataagctcgccaaatcatgggatcaagctggaaaagcttatctaaaacttgccgactgtcacttaaagttagatagcaaacatgattctgctaacgcctattctgaggctgctaaatgcttcaagaaagttgacactaattaggctgctt

SEQ ID NO: 155473 - DNA, 248 bp, Arabidopsis thaliana columbia
  unsure (1)..(248): unsure at all n locations
gttgatttgaaggggaataacaactttgtttttgctgtgattggtgatatttcggtgactttataacaggcttgtgaagccataaacaacccctnatatataaactcttatttgaatttaattcttaatgccaacaagcaagtcttattacctacactttctttttttttaccaattcaactttttggtacattgagacatttttcttatttttttacaatactaactctcttctattaataatattt

SEQ ID NO: 155474 - DNA, 439 bp, Arabidopsis thaliana columbia
cacgcgtccgctctcttaagtacctcttttttctgattttgtttatcgccatgaattactgatttccggctggataaacccatcaaagggaaccaatttctcctgtgacttgtacctaactcgatcttaccagactggtgatggcgtctttgaaccctttcgatcttctaggagatgatgctgaggatccaagccagctcgctgtggctttgtctcagaaagtcgagaaagctgctgctgctgttcagcctcctaaggccgctaagttcccaaccaagccggctccttcttctcaagcagtgagggagtcgaggaatgctcctcaaggaggtcgtggtgggactggtggacgtggtggatttttccgtggcaggggtaatggtggatacaaccgggacaacaggaacaatgatgcttcttgtaatgagaatggattttt

SEQ ID NO: 155475 - DNA, 455 bp, Arabidopsis thaliana columbia
cgaaaacaatggaaaaagcaacggagagacaaaggatactgcttcgtcatcttcaaccttcgtcatcttccgacgcctctctctctgcctcagcttgcttgtccaaagacagtgctgcatatcaatatggagatgatgttgtcattgtcgcggcacaaaggactgcactttgcaaggcaaaacgtggcagcttcaaggatacatttccagacgagttgcttgcctctgtattgagagcattgatagagaaaactaatgtaaacccaagtgaagttggtgacattgtagtgggtactgttttgggaccaggatctcagagagccagtgaatgcaggatggctgcgttctatgctggtttccccgaaactgttcccatcagaaccgtgaacagacagtgttcatctgggcttcaggctgttgctgatgttgccgctgccataaaagctggtttttat

SEQ ID NO: 155476 - DNA, 473 bp, Arabidopsis thaliana columbia
gaccacgcgtccgaataaacagagggagtcgccaaattttctcatcattttctcgagaaaatagactaaaagcgatggccgagagaaagaaggagcggaaaaaaaacatcctagtgaaaatgagagaaattcttcatattcaaggaggtcagtgcggaaaccagatcggagctaagttctgggaagttatttgcggcgagcacggtattgatcaaaccggtcagtcatgtggcgatacagatctacagcttgaaaggatcaatgtctattttaacgaagctagcggaggcaaatacgttcctcgtgctgttcttatggatctggagcctggaactatggattctctcagatctgggccgtttggtcagattttccggcctgataacttcgtatttggtcagtctggtgctgggaataactgggcgaaaggtcattacacggagggagctgagttgattgattctgtgcttgat

SEQ ID NO: 155477 - DNA, 419 bp, Arabidopsis thaliana columbia
gacgccgttcgtttcttcaaagaatttcatcttctagggtttgttcaaaaaatttctggggaaaatgaatcttggaggggcggctcttgccaagggaaagatgaaaggagtttccttcaccatcgattgttcaaagcctgtctatgacaagatcatggacatagcttcccttgagaagtttcttcaggagaggatcaaggtcgttgtcaaagctggtgcactcgttgattctgtcacaatcacacgtgagaagagcaagatcactgtcactgcacatggccaatactccaagaggtatttgaagtacttgacatataagttcctgaagatgcacaacgtaacggattgtctcacagcgattgcagcaaacaaggaccgtaacccctatgagttgaggtacttcaacattgtcttagaac

SEQ ID NO: 155478 - DNA, 450 bp, Arabidopsis thaliana columbia
  unsure (1)..(450): unsure at all n locations
cactaactaagagatcaatatggctttagtgatgaagttggcatgcatggtcttggctggcatgattgtggccggggcagtcacagcnaacgcgcttatgagttgtggcaccgtcaacggcaacctggcagggtgcattgcctacttgacccgaggtgctccacttacccaagggtgctgcaacggcgttactaaccttaaaaacatggccagtacaaccccagaccgtcagcaagcttgccgttgccttcaatctgccgctaaagccgttggtcccggtctcaacactgcccgtgcagctggacttcctagcgcatgcaaagtcaatattccttacaaaatcagcgccagcaccaactgcaacaccgtgaggtgattagcgacggtcaaatgaagctactagcggatgtttcgaatattatataatctatgagattttttaaataaaga

SEQ ID NO: 155479 - DNA, 451 bp, Arabidopsis thaliana columbia
gcagagggaagacgatcttaatgaaattgttcagcttgtaggaaaagatgcgctggggggaggggacaaaatcacgggggaaacagctaatctattgagggaagattaccttgctcaaaacgcgtttacaccatatgacaaattctgtcctttctacaagtccgtgtggatgatgcgtaacattatccatttctacaacctagccaaccaggcggttgagagagcatctggaatggacggtcaaaagattacctacactcttatcaagcatcgcttaggagatcttttctaccgtttagtgtctcagaagttcgaagacccagcagaaggggaggatacactggtggaaaaattcaagaaattgtacgacgatctcaatgctggattccgtgctttggaagatgaaactcggtaagctgtcgagtctccaccgcaagtaaaaaaaatccac

SEQ ID NO: 155480 - DNA, 373 bp, Arabidopsis thaliana columbia
attttacgtctgaccgggtctggtttttgtagtaaaatttcatttgaaataccttcttagaacaaacaaaagatcatattatggaatttgaaaacatagtctttgctaattgatgtcttttacttactagttggattgaccagaagagactgctgctgttgtaattgcatctggagatgaactggccttgactgcttctttgctgccttcgtccaagcggacaacttgcgcaaaactcttggacatgttcttcatgaagtctgtgggtaatgcagcagaagcagggttatgttcattttcttctgctactactcctgcagatggcatgcttggctgtcttcttgccttcccggcctagtaaaattttcttccc

SEQ ID NO: 155481 - DNA, 432 bp, Arabidopsis thaliana columbia
caagttagtcataaaaaaaaaaaaaaacacaaaaaagtttcaatggccgcctcaacaagggctctctcctcccctgctttggccggaaaggctgtgaacctttcccctgcggcatcagaagtccttggaagcggccgtgtgacaatgaggaagactgttgccaagccaaagggtccatcaagcagcccatggtacggatccgaccgagtcaagtacttgggtccattctctggcgagtcacccagctaccttaccggagagttccctggagactacggatgggacacagctggtctatccgctgaccccgagacattctcaaggaaccgtgagctagaagttatccacagcaggtgggccatgctcggagccctaggctgcgtcttccctgagcttttggccaggaacggagtcaaatttggagaggcagtt

SEQ ID NO: 155482 - DNA, 186 bp, Arabidopsis thaliana columbia
aaaaaagagatattctaaaagcaaatcggatagcttcggcgatggcgttatcacgactggtcttgacgatccaacacttttcctaaaagcctgcgattaccgccttgccctcctccatccgccgtcatgtttccacagactcatcaccgatcacaatcgaatccgccgtccctttcacatcgcatt

SEQ ID NO: 155483 - DNA, 338 bp, Arabidopsis thaliana columbia
  unsure (1)..(338): unsure at all n locations
gcgacaagaagaaaaagatgaagaagaagagtgtcgagacttacaagatctacatcttcaaggtgcttaagcaagttcatgccgatatcggaatctccagcaaagcgatggggatcatgaacagtttcattaacgatatcttcgagaagcttgctcaagaggcgtcgaagcttgcgaggtacaataagaaacctacgatcacttctcgggagattcagactgctgtgagattggtgcttcctggagagttggcgaagcatgccgtntctgaggggactaaagccgtcacgaaattcaccagctcttgaattattgaagttgggttcttatcatatgga

SEQ ID NO: 155484 - DNA, 269 bp, Arabidopsis thaliana columbia
aaatctgataagaaacttatcagcaagttgtctttaagctcatttggaaggagacaaagtgaagatcctagacccagaagatcgagttctgcaattgtgtgcgcagcaaaggaattacatttcaacaaagatgggactaccattaggagacttcaagctggtgtcaacatgctcgcatatcttgttggtgttacacttggacccaaaggacgtaatgttgttcttgagagcaagtatggatcaccacgaattgttaatgatggtgtgtc

SEQ ID NO: 155485 - DNA, 352 bp, Arabidopsis thaliana columbia
cgattctcactaaaaccctcgaacacatcgcctttatctctttctctagatctactcgctatgggtactatcaccgttgttaaggctagacagatcttcgacagtcgtggtaatcccaccgttgaggttgatatccacacgtcaaatggtattaaggttacagcagctgttccaagtggagcttccactggtatctatgaggctcttgagctgagggatggaggatctgactaccttggaaagggtgtatctataggctgttggcaatgtgaacaacatcatcgtgccagctcttattggttaggacccatctcatcattctgttatagacaactttatggtccatgtactt

SEQ ID NO: 155486 - DNA, 423 bp, Arabidopsis thaliana columbia
tctaaactcaatatataatgataacacgttcacgtgttcatcgtcaaaagagtgtctgagtgagtacaatcttcaggtgtcttctagttttgatcagacgctctattcaattctcttaattagtcatatctttctttcttttttcctcgtttcgtgttaattttattttaaaacaaaggattaaagagtcgttctttcttttggtaacatggagccttaatgatcctttgttagctctagctaggattttacgtactacttagggtattcaaactaaaataaaatcaagaagaagagcagagagatggtgaggacaccatgttgcaaagaagaaggtattaagaaaggagcttggactcctgaggaagatcaaaagcttattgcttatcttcacctacatggtgaaagtggatggcgtactct

SEQ ID NO: 155487 - DNA, 273 bp, Arabidopsis thaliana columbia
cggaaagaggaggagaaagcggcgcagatcgtggcggtgaccgtggtgacttcgggcgtggattcggcggtggacgtggaggtggccgtggccgtgatcgtggtccaagaggccgtggaagacgtggaggccgtgcctcggaagaaacgaaatgggttccagtgaccaaactaggtcggcttgtggctgtcaattaaataacgaatctagagcagatctattttcattttctcccattttaggagttccaaatcatatatcatctttggttgg

SEQ ID NO: 155488 - DNA, 246 bp, Arabidopsis thaliana columbia
cttgtaatcagtcatgaggctatagagcctcctgtagcttttctcgagtccctggttctcggagagtgggaggataggttccaaagaggactttttcgctatgatgtcactgcctgcgaaaccaaagttatcccggggaagtatggtttcgttgctcaacttaacgagggtcggcacttgaagaagaggccaactgagttccgtgtttgattaagtgttggagattcttttgattgctgctaattc

SEQ ID NO: 155489 - DNA, 360 bp, Arabidopsis thaliana columbia
ataacaagtaacatggactcaagagccttacccttctccgttctcgtcatcctcattagtgcagcggtgttggccaacgcttacactcctccttcttcttcttcaaccaccgcataccctgtcgtgaaaaccgtggaagcggcagtggtaggaatggtgttctgtcaatcctgcgacaaattcggatcatggtcattggccggagcaaaatctttatccggagcttatatcaacattatttgccagaatcatttgtcacaagtggagttttacaaaggctttccaactgtattccttccgtgcattttttttataggatgctccaaaaggcttttaaagtattacttttcactatttttt

SEQ ID NO: 155490 - DNA, 297 bp, Arabidopsis thaliana columbia
gttttctcgaattttgaagattttggtgcaacctgttagtgactttggagcgtataagtgttgggtcttcttcgggcgagttgggatacgttttggtttattcgttgtattcgattcattggtactgtgtcaagtatgatgagtctcaaggtaagccggttttgagaaacctcggatgttagcagtttaagaggtttgtgattgtgagcgcttcttggagccctcatgttactggagagtgtctactcttgttagataacggtgaggtctttgtgtttgatttgagtcaaagacatt

SEQ ID NO: 155491 - DNA, 423 bp, Arabidopsis thaliana columbia
  unsure (1)..(423): unsure at all n locations
gcaatttttagggttttatcctccgaaagtctcaacctttttcttatcctcaacaaggagaaatggcggcgactcaacttacagcgtcaccagtgactatgtcagcaaggagcttagcctcgctggatggtctcagagcttcgagtgtcaagttttcatctttgaaaccagggacccttagacagagccagttccgtcgtttggttgtcaaagctgcttctgttgttgcccctaagtatacttcaattaagccattgggagatcgagttttggtgaagatcaaggaggcagaggagaagactttaggtggtatcttacttccatccactgctcaatcaaaacctcaaggaggtgaagtcgttgccgtgggtgaaggaagaactattgggaaagacaaaatngatatcactgtccctactggag

SEQ ID NO: 155492 - DNA, 391 bp, Arabidopsis thaliana columbia
ctccgatcgttaacggcgaccgccgattttcccggtaaaaatgaacgacggagatgtatcgaggcagatccagcagatggtgagatttatccgccaagaagcggaagagaaagcaaacgagatctcggtttctgctgaagaagaattcaacattgagaaactccagcttgttgaggcggagaagaagaagatcaggcaagattatgagaagaaggagaagcaagctgatgttcgcaagaagattgattactctatgcagctaaatgcatcaaggatcaaagttcttcaagcgcaagacgatattgtcaatgccatgaaagaccaagcagctaaagatcttctgaacgttagtcgcgatgagtatgcctacaaacagctcctcaaggatcta

SEQ ID NO: 155493 - DNA, 379 bp, Arabidopsis thaliana columbia
caaaggttgtagagcttctgaaatcaaactgcattgtcaaagtgaagctcttccatgccgacgcgaaaagttctccgagctctcggtggttctaatattggtgtcactatcggaatccaaaattcgatgctcaagagcttgaatgcatccgtaaaggtagcagagagctgggtacatgacaatgtcactcgttacttcaacggtggaaacagagttcgaatcgagtatgtagcagttggagaagagccatttctccagagctatggcaatcagtataagccttttttgattggggcagctatgaatatccaaaatgctttagctaaggcgaacttggcatatgaagtgaaggttgttgtcccctcatgctttgatacct

SEQ ID NO: 155494 - DNA, 447 bp, Arabidopsis thaliana columbia
atgtcttcctctatctctcccctcctcacaaccttcatctccgtcgcaatcctcctctgctccggcatctccacagcggcgacgagttccaaacatccaccgtccattcaacaaaatctacgccttcggagattctttcaccgacaccggaaactcacgctccggcgaaggaccagccggattcggacacttgtcaagtcctccatacggcatgactttcttccgacgaccaacaaaccgttactccgacggtcgtctaaccatcgacttcgtggcagagtcaatgaatttaccgtttctgccaccgtatctcatcctcaaaaccactaacgctaacggcacagcaacggatactcacggcgttaatttcgctgtctctggatcaacggtgattaaacacgcgtttttcgtcaagaacaatctgtcgcttgatatgactcctcagtc

SEQ ID NO: 155495 - DNA, 389 bp, Arabidopsis thaliana columbia
  unsure (1)..(389): unsure at all n locations
ggaatattaagatgacatcttctatggtctctttcatggctctctttctccttcttctgcttgtgtttccgcatatggataaagcccttggcgcacaagaggaagcccagaaacaaaggattcctcgtttcagatgttctccacgaatccccttttgtacaaatccaaacctaccttctcctccgccccacaggtctttcaaaggcacactcgaacctggtcattgacttcactctagcttcgaatgcgtgtgaacgtgtgcatgtttcttacattgtgctttggtttgtggtttctatccttgtttatctttgcatgtgtttgtcatattttacagttntatcgaaccgncgcttgaataaataaatttgcatgtccttttatgttta

SEQ ID NO: 155496 - DNA, 411 bp, Arabidopsis thaliana columbia
gcggaagtgctcttgcccccttctagatcaatagcaatggcaaggaatcgtctggagaaacttccttgtgggggggggggtcctcttgcccatggtttaacaacggctgtaagagtaggacttaacgcagagaagagtggtgatgtcgggcgcataatgattgttgcgataaccgatggtcgagccaacattacactgaaaagatcaactgatccggagtctattgccccagatgctcctagacccacgtccaaagaattgaaggatgagattctggaagttgctgggaagatatacaaggcaagtatgtctcttctagtgattgataccgagaacaaagttgtttcaactggttttgcaaaggagatcgcaagagttgctcaatgaaaaatttatttcttgccaaatgct

SEQ ID NO: 155497 - DNA, 448 bp, Arabidopsis thaliana columbia
cctaacttccttcataaacgctcttcagttagatatatcatcggatgaccaatacgcagtcgtgtcagaaacctcgaaaggcggagactcgttttcttcatgtgtttcctcaaaggaagaagaagtggaagatgacagcaaggagaaagtgatgcagcatcttttggaagcttccgatgacgaacttgggatccctaacacagattttggcgagagtaattatgaaaaggctaatgacggttacgtttatggagatagtttgttagatgggtttggtgatgcgttttgggagcttgaagacgaagcttctaattatttcacgtttctgcagtctgagctgttcatgtataaattatcctaatggttgggaaataacttctattaaaacgtaaattttaaagaatagccaatttcaatacaaatcttatatattcggttcttttttttt

SEQ ID NO: 155498 - DNA, 420 bp, Arabidopsis thaliana columbia
  unsure (1)..(420): unsure at all n locations
cagagagcgagtcacgctccnagtttttttntttnaggaccccgccccaacccagaaagccttcctcatcctagagtgtgcttcttccttttcctcagattttgagctcccaacgcgctcttggtcttgtagctaggcctcgtaatccacttcgacgaggattatctaagtttttatcaagtcgacagcttttccgacgatccaaagttgtcaaggcagtagcaaccccagaccccatcttggaagtacctttaactgacgaaattgtataaagcgcttcgcatgaaatccgaccttaccttatctctgatagtagtaatcgtgcattacatgaaatcaatcgaaatattgttcaaattcagctgcaaggagcttgcggatcatttccaatttctactatcactatcaagttggtctttg

SEQ ID NO: 155499 - DNA, 372 bp, Arabidopsis thaliana columbia
tctcaataatatctctaagagaagaacttctctataaaaaagaaagctctccccctctcctcaatttttaacctcccaactcgctctttttcttattactaatccttataatccacttccacgagaattatctatatttttatcaagtcgacaacttttcctacgatccaaatttttcaaaacaatatcaaccccagaccccatcttataaatacctttaacttatgaaaattttgaaaacgttcttatataaatccgaccctaccttatttcttactattgtaatgttgcattacatgaaatcgataaaaatattttgcaagttaaacttcaaataacattcagatcatgtccaaattctactattacaat

SEQ ID NO: 155500 - DNA, 452 bp, Arabidopsis thaliana columbia
  unsure (1)..(452): unsure at all n locations
agacaacctcaagctctcttcgtcttctttcgattcatcattcgtcgtgctccacgtagagcgcgtctccttgtgtagagaccggcnttattcccggcaccatacctttcggtggtcccagtggtcttgaggttcctgctttcactgctgcaatcgagcaacaccataatcggatcaccgacaccatcctcgaacacgctagtcaaatttgtgctgaaaaatctgtgaatgtgaaaacacaagtggttattggggatcccaagtataaaatctgcgaagctgtatagaatttgcatgctgatcttcttgtcatgggctcccgggcttatggccgcattaagagaatgtttctgggaagtgtaagcaactactgcaccaaccacgcccattgtcctgttgtgattatcaaaccaaaagaggattcttctgcataaaaaggatttatatgtaca

SEQ ID NO: 155501 - DNA, 470 bp, Arabidopsis thaliana columbia
  unsure (1)..(470): unsure at all n locations
cggttctgaattcccggagccgaccctcccgtatctccactagtcacacctaaatccattttctttttccaagccaacccactatatcaaggaaactttcctcatcctcgagtctgtcttcttccttttcctcanattttgagctcccaacgcgctcttggtcttgtagctaggccttgtaatccacttcgacgaggattatctaggtttttatcaagtcgacagcttttccgacgatccaaagttgtcaaggcagtagcaaccccagaccccatcttggaagtacctttaactgaggaaaatgtagaaagcgttttggatgaaatccgaccttaccttatgtctgatggtggtaatgtggcattacatgagatcgatggaaatattgtgcgggttaagctgcagggagcatgcggatcatgtccaagttctactatgacaatgaatatgggttttgagcgtcgtctaat

SEQ ID NO: 155502 - DNA, 438 bp, Arabidopsis thaliana columbia
  unsure (1)..(438): unsure at all n locations
ggaagggctataagagttatgtattctgttcgtgatccaagtctccntaagaagagaggtggtaatatatgtatgaagagatcttnacaaatcaattgatcacaaatcacttcacgagacattttcagcctttggtcccattctatcttgcaaagtggccttttatccctctggtcagtctaaaggctatgggtttgtgcattacgacactgattaatcatctcaagtagccattgataaactgaatgtaatgcttcttaacgatatgcaagtttatgttgtaccctttgttcacatgcttcattgagatcctttttttttataatattaaattcacttatgatttatatcaaaaattctcttcttgttcttataattattaaatacttatcataatcttttctttatttcttaattacttctttttttatttttttt

SEQ ID NO: 155503 - DNA, 255 bp, Arabidopsis thaliana columbia
  unsure (1)..(255): unsure at all n locations
gaaggacgatcgatctaaggagactatgtttatcttccacgttccttgtctgcgagacgactactcttatgtgatgatggatganagcaccggagacgcggcggttgtggatccagttgatccggagaaggtgatcgcatcggctgagaagcaccaagcttttatcaagttcgtactcactacgcatcatcactgggatcatgccggtggaaacgagaagattaagcaggtggttcctgatatcaaagtatatgg

SEQ ID NO: 155504 - DNA, 458 bp, Arabidopsis thaliana columbia
  unsure (1)..(458): unsure at all n locations
ggaannccgggggggacgccacgcgtccgctagattattttttctaatctgttttttttaatagccaacggtcctaatcaagaggaagatttctttaaaccaagacaagccttgacattcttcttcatctgctccttatttttcatcatttcacatcttttttaaaagctctttacctatactccacatatttttcttgctctccttttttacaactatttgatcaaacacttgcttaatccttatacctttatatattattatcatatccattttcatcgtatcaattttaatcattattcgaaactttaatttcttggtaatattgcatatctaattattaatcttgcttctatcttttctccatctttttacaattcacttcctttttattctatctactattatttctttgtttctctttcatttatttattacttctcttttaacaactatct

SEQ ID NO: 155505 - DNA, 449 bp, Arabidopsis thaliana columbia
  unsure (1)..(449): unsure at all n locations
ggaattccagggagacggacgcgtccgctcttattttctcagttcttttaactcttttctttacatatattcaaatggccaccaagaagggtgaacaagtgactcgagtagcanctttnaacatcgaggtgccaccaccaaaggctgtggagtcggaggaagtcaccaccgtctccgagtctcttccagctccggtaacagaatctcaagcgcctgtcgaagtaacaactaaagatttggtcgtggaagagacagagaaaccaatcgaagaaacagaggaagctcaagttgaaactccggaagttgtggagatcaataaagaggaagaagcgtcggttgttactcccttcgttattgcactttccctccttacacaatatttttttttgtgcttttaatattttttattatttttataatttattcattttatttttttcatttttatt

SEQ ID NO: 155506 - DNA, 450 bp, Arabidopsis thaliana columbia
tcctaacaaagcaatatcatttccaatttataaatgttaaagccatggctgcatctttgtctggcccctctatgataatggaagaagaagggagattcgaagcggaggttgcggaagtgcagacttggtggagctcagagaggttcaagctaacaaggcgcccttacactgcccgtgacgtggtggctctacgtggccatctcaagcaaggctatgcttcgaacgagatggctaagaagctgtggagaacgctcaaaagccatcaagccaacggtacggcctctcgcaccttcggagcgttggaccctgttcaggtgaccatgatggctaaacatttggacaccatctatgtctctggttggcagtgctcgtccactcacacatccactaatgagcctggtcctgatcttgctgattatccgtacgacaccgttcctaacaaggttgtac

SEQ ID NO: 155507 - DNA, 460 bp, Arabidopsis thaliana columbia
  unsure (1)..(460): unsure at all n locations
gcgtccggtctaaaaaccctaatctcactccgcctttttcttgatccatcaacacttccncaaaaagaaagattgttgctgcgttggagcgtgccntcttgagcgggaaagcttccccaaccactggcgatatcaaggatattcttggatcagttggtgctgagacagaggattctcagattgagcttttgttgaaggaagtgaaagggaaagacttggctgagctaattgctgctggaagggagaagttagcttcagtaccatcaggaggtggtggtggtgttgcggttgtttctgtttcatgtgggagtggtggatttttttatcctatttctcttttacttctttaattaatattaaatttttttttatatttatttttagctatttttttaattctattttttgatcaattgtttatttttattttttcaacacattttcttttttatattttcta

SEQ ID NO: 155508 - DNA, 442 bp, Arabidopsis thaliana columbia
  unsure (1)..(442): unsure at all n locations
gggggacccacgcgtccgaaaaaaagaaaacacaaaaacatacatttttattttcttcctcaaccatagctttntccagcaagaccttctccgaaaagagctgagaagcctcccncatcanatgtcctccaaagcggccatgtgaccatgaagaagactgtcgccaagccaaaaagtccatcatgcatcccatggtacggatctgaccgagtcaagtacttgggtccattctccggctagcccccgatctaccttaccggttaattccccggtgactactgatggtacaccgcttgtctatcctccgacccagagaccttcgccaggaaccgttagctttaatttatccacaacatatggtccatactctgaacccttaactatgttttccctaagctatttgcttattacggaatgtaattcctataaactttttttttca

SEQ ID NO: 155509 - DNA, 445 bp, Arabidopsis thaliana columbia
atttgtggtactctcagtgttagacaagtccgatcaagtttaagcagtcatgagagagttgcttcctctggttggtctgtctttcatgtttacctattcaaacgcggcggtttgtgtgtgcaaggacgctaacgagctggatcttcagaaggtgatagacttcgcatgtggaggaggtgctgactgtgcacagattcagacgaccggagcttgttatcaaccaaacaccctcaagaaccactgtgacgttgccgttaacagctactatcaaaagaaagcttccaccggtgccacatgtgacttcaacggcgccgccgtcatctccacttcccctccttcgactacgtcaagctgtttatctagttctagttccaacggaacccccactgccggatatccattcaccggaaattcaaccacatcaagtccaagcaccacaaattca

SEQ ID NO: 155510 - DNA, 148 bp, Arabidopsis thaliana columbia
  unsure (1)..(148): unsure at all n locations
ttccacctttcccacaaaccacacatcaatcatatgatgggtcacaggnaccagtggtaagactattacagctgagggtccggtcttcaaattttttcctttttctcaaaatttaacttgaaattcaagatcctaatcttaccaaaat

SEQ ID NO: 155511 - DNA, 449 bp, Arabidopsis thaliana columbia
gaaagttgctgtatctggaaagaagcgttaccaaaagctgtacaggaggcattcaagagaacgtgttggtatgacaggagagacattttatcaattgcagcagagaattcctgaaagaatcgttgagcatgctgttcgtggaatgcttccaaagggacggcttgggagagctctgttcaatcacctgaaggtgtacaaaggccctgaccatcctcacgaggcccagaaaccgcttgatctgcctatcatggacaagagaatacagctgcaaaaatagaagctccaccactgttccattatcgccaagcgcagaaagttttttcttctcaagtttctgtagtttcttcatcccaaaaccagaggaggctttacagattcttgttttcgcttctatcaactctgttatgctacaaaactttctaatttgaaatatttctcgtttttttttt

SEQ ID NO: 155512 - DNA, 363 bp, Arabidopsis thaliana columbia
  unsure (1)..(363): unsure at all n locations
ctttcacggcgtcaatgtctgatatctcttccaacaacatcatggataccaagagttagacagactccatcgtgtgtgaattacanaanaagaaagttcatctcttttactgcttagagtgcgaataacttgctcgcaacatcgccgctgaatctgatcacatcactctccaatccatcaactggaggagttttgctgatagattcccgaatctatttatcaacatcgcacatgatatccgatgccagcacgttgcgttccttgcttcattcagttccccttctgtcatctttgagcagatctctgtcatttactttctccctcgattgtttgttgcgttcttcactttggtgttgccttttt

SEQ ID NO: 155513 - DNA, 440 bp, Arabidopsis thaliana columbia
gaaagacttcacattttaccattatttgctctgagctcagtaggagagttcaaggaacgatggcaaagatgcaagtatgaatctttatcgctgtcgttgcgcttatcgtctgctctgcatctgctaaaaccgcaagccctccagctccagtgctgccaccgacaccagctccagcaccagccccggaaaatgtgaatctcaccgagcttttaagtgtagctggtccgttccacacattcctcgactaccttctctcgactggagtcattgagactttccaaaaccaagctaacaacactgaggaaggcatcacaatctttgtccctaaagatgatgctttcaaagctcagaagaatcctcctttgtcaaatctcacaaaggatcaacttaagcagcttgttctcttccatgctctgcctcattactattcgctttcggaa

SEQ ID NO: 155514 - DNA, 448 bp, Arabidopsis thaliana columbia
  unsure (1)..(448): unsure at all n locations
gccgttaaatctttctccgatcatgccgtccagaaacatcgccattggtggagtccaagaagaggtctatcaccccaacgcacgtanggcggctctcgctgagtttatctcgactttgatcttcgtcttcgccggctcaagctccggaattgctttcaacaagatcactgacaatggagcaaccactccttccggcctcgtcgccgctgccttagctcatgctttcggtctctttgtcgctgtctctgttggcgctaacatttccggtggccacgttaaccctgccgttaccttcggtgtcttactcggtggtaacatcactctcctccgtggtattctctactggattgctcagcttcttggctccgtcgccgcttgtttcctccttagctttgccaccggtggcgagccaattccagcgttcggtctctcttccggagtcggatca

SEQ ID NO: 155515 - DNA, 380 bp, Arabidopsis thaliana columbia
gagaaatttcggttgtgaagagaagaaagattgttaatttgttttgttgtgcgcacgaggatgagtcaacggtagcgatgaaggaaacattctttaaattctaagatgttcttgagcctggttgccattttcttccatggtgtcttggtagtcaagttgctggttacctctctctaaaggttcagcaattgaacgttcgttgcgagacaaatactaaagacaatgtgttcgttaatgttgttgcatcgattcagttccgtgctttatctaataatgcaaatgatgcgtactacaagctcagttacacaaggggtcatattcaagcttatttgtttgatgttatttgagctagtatcccgaaatttcttcttgattatttc

SEQ ID NO: 155516 - DNA, 420 bp, Arabidopsis thaliana columbia
  unsure (1)..(420): unsure at all n locations
tcccggtggacgggcgcgtccgaaatgatcttctcctccgatcattagtctctttaatctttctcagcctcttcttgttcgagggctctcttcctccggaggaagatatcntccggtaacggaaatgctactaacggtgacggagggtttagtttccctaaaggaccggtgatgccgaagataacgaccggagcagcaaagagaggtagcggagtctgccacgacgatagtggtccgacggtgaatgccacaaccatcgatgagcttcattcgttacagaagaaacgttctgctcctaccacaccgatcaaccaaaacgccggcggtgcttttgccgccttctccgaagaggagcgtcagaagattcagcttcaattctatcagtgcatcgttagcatcgttaacgagagagtcaggacc

SEQ ID NO: 155517 - DNA, 303 bp, Arabidopsis thaliana columbia
  unsure (1)..(303): unsure at all n locations
caggctgaaaaggattctgcaggttacttttctggaggcgaactagttantgcgaatgaagcttatgacctgaagatagaggttatcagataacgtgaacgcgagaagaatcttcctaggaaaaaacgtagaaagctagaatctgccatagagatgctataagataacgaaggataagaagaggaagaacacgaataacgagactaatagagagtaagatcaatatgtaaatactataaaaaactggatacatattatatgagattgtcactaaacgatcttggttacatgagatctaaagcg

SEQ ID NO: 155518 - DNA, 418 bp, Arabidopsis thaliana columbia
  unsure (1)..(418): unsure at all n locations
cgcgcaagaagacgattctctctcttgtgttgaagaaatgaagcacaacaatgaggtagccaattgtcacttcagaaaggactgncataattatgtcaagacatggttcaaccagcctgccaggaaaaccagaagaagaattgcgaggcaaaagaaggctgtgaagatcttccctcgtccaacttctggacctctccgccctgttgtgcatggtcagactcttaagtacaacatgaaggtcagaaccggtaaaggattcactcttgaagagctcaaggctgctggtatcccaaagaagttggcgcctacaattggtattgctgttgaccatcgtcgcaagaaccgatctttggagggtcttcaaacatatgtccataggctgtaatcctacaagaccaagttagtcatttttccgcgt

SEQ ID NO: 155519 - DNA, 439 bp, Arabidopsis thaliana columbia
cgcatctcttttcatttctctctgatttctcgatctctccgtccaactatgtctgcctggacgagcaaattcgccgatgaggggatcgccaacgctgcctacatcggcacacctggaaaaggtattttggctgctgatgagtccactggtaccattggaaagcgtcttgcgagcatcaacgtcgagaacgttgagaccaacagacgtaacctccgtgagcttctcttcaccgcccctggtgctcttccatgcctcagtggtgtcatccttttcgaagagactctgtaccaaaagagttccgatggtaagcttttcgttgatatcttgaaggaaggaggagttcttcccggtatcaaggttgacaagggtaccgttgagctagctggaaccgacggtgagaccaccactcaaggtcttgacagtctcggtgacagatgca

SEQ ID NO: 155520 - DNA, 434 bp, Arabidopsis thaliana columbia
caaaagaagaagagaaacaacaagaagatgtaatggcttcctctatgttctcctgcaccgctgtggttacctcccgggcgcaagccaccatggtcgctccattcaccggcttgaagtcatccgcttctttcccggtcacccgcaaggccaacaacgacattacttccatcacaagcaacggaggaagagttagctgcatgaaggtgtggccaccaatcggaaagaagaagtttgagactctatcttacctccctgaccttagtgacgttgaattggctaaggaagttgactaccttctccgcaacaagtggattccttgtgttgaattcgagttggagcacggatttgtgtaccgtgagcacggaaacactcccggatactatgatggacgatactggacaatgtggaagcttccattgttcggatgcaccgac

SEQ ID NO: 155521 - DNA, 421 bp, Arabidopsis thaliana columbia
ctctttaaaagaaattcgtaagtactatttagattcagaagatggcccaaaaggtggaagcaggaggagggaaaggagccgacggatgttactatggatcgacacatgacgccgtgaccaagattcagctcgcagcaggcatagacggaattcaatatgttcagtttgattatgtcaagaacggacaacccgaacaagctcctcttcgtggtaccaaatgccgtgttctcccagctgatccgtttgtgattaaccatccagacgaacatctagtttctgtagaaagttggtatagccctgaaggtatcattcaaggaattaagttcatcttcaacaagaagacttctgatgtcattggatcctatgagggtactcactttactcttcaagtttaagacaagaagatcattggctttcttgg

SEQ ID NO: 155522 - DNA, 443 bp, Arabidopsis thaliana columbia
aatctactctctttaaaagaaattcgtaagtactatcaagaagcagaagatgccccaagagagtgtagctcaaggaggggaaggagccaacctatggtacgattgatcgacacatgacgccgtgaccaagattcatctcgcagcaagcatagacggaattcaatatgttcagtttgattatgtcaagaacggacaacccgaacaagctcctcttcgtggtaccaaagaccgtgttctcccagctgatccgtttgtgattaaccattcagacgaacatctagtttctgtagaaagttggtatagccctgaaggtatcattcaaggaattaagttcatctccaacaagaaaacttctgatgtcaatgtatccgattaaggtactcacttcactctacaagttaaatacaataatattattgtcttttatattttgtctatgacaa

SEQ ID NO: 155523 - DNA, 440 bp, Arabidopsis thaliana columbia
atcaagaagcagaagatggcccaaaaggtgtattctcaaggagggaaaggagccaacctgatgggacgatggatcgacacatgaggccgtgaccaatattcagctcgcagcaggcatagacggaattcaatatgttcagtttgattatgtcaagaacggacaacccgaacaagctcctcttcgtggtaccaaaggccgtgttctcccagctgatccgtttgtgattaaccatccagacgaacatctagtttctgtagaaggttggtatagccctgaaggtatcattcaaggaattaagttcatctgcaacaagaagacttctgatgtcattggatccgatgagggtactcacttcactctacaagttaaagacaagaagatcattggcttttatgggtctgccgggggcattcttaattcttttgtggcttactttgctc

SEQ ID NO: 155524 - DNA, 444 bp, Arabidopsis thaliana columbia
gaaccaggaggaaggtcgccgacacaagttgcttatgagccaccagttccgatttacatggtgacggatccgtttcaacttcctgcttatttcctaaacccttctcctgaaaagaaattggttatcggttttgactgtgagggtgttgacctctgccgacatgggaaactttgtatcatgcagattgcattctctaatgcaatatacttggttgatgtcatcgaaagtggagaggtgattatgaaagcgtgttagcctgcactcgagtcttattacatcaccaaagttattcacgattgcaagcgtgacaatgaggctctattcttccagtttgggattagattgcacaatgttgtggacactcacattgcttattctctgattgaagaacaagaagggcggtggagacctcttgatgattacatatcgtttgtttcactcctt

SEQ ID NO: 155525 - DNA, 370 bp, Arabidopsis thaliana columbia
  unsure (1)..(370): unsure at all n locations
gacctgattccggttatctttactttatttggaaaccaaacgaatgcnatatagcgagattcgactcgaaccgggttggtgatcttatgagagataagcatctatcttttatcggtgattccatggctagaaatcagcttgagtctcttttatgcttgctctctaccgtctctagccctgatctcgtctatatgaaacggataagacattaaattcagatgatggcgtttcgagtcacacaacgtcactttctcggtttactgttccccgttttagttttcctatatagagaaatcggggtacttttaccacatttattgctcattgaccgccttatttaatttttttcttttatttaatacttctttat

SEQ ID NO: 155526 - DNA, 404 bp, Arabidopsis thaliana columbia
  unsure (1)..(404): unsure at all n locations
gtgagagactcgtagaagaaggttaaaatcttaaggaaagtcttgttactctgaaagagtacctcgtgaagctgtggagaggagctccaacatgtatcacagtctataccgaatatgactcaccctgatgttcctgttggaggagaggattcatcggcaattatacaggaggttggtagtccacgtgagtttagttttccaataaaggatcatcttcagcttgggaaggatcttgatctcattgattttgactctgctgcttaggtaagtggttcaatgtttttctatttgaagaaggaggcagatctattatagattactctnttttattttacattatcacaattcttgtatattagttttgtctctcttaatttactttcttaattctttttgtacttttt

SEQ ID NO: 155527 - DNA, 415 bp, Arabidopsis thaliana columbia
gataataaattcttaagacagatctttttctaggattgaagatcttcaaacccatcttaaattttaaaacaaaaactgattgttttagtctgaaaataaataattaaaaagctactatatgcattttacaaaaaaagcttgattagtgatttactcttcatcatcctcatcattattatcaccaccttctccgttttatgcctttactctctttatcaacttatacttcctttctttttatatcatcttcttcaatttttacggtgttgttttctcttttatcattatttctttatttttttttattagtttttttttattctattttgttttattaatatcttttttttttatttcttaaattctctatttattttatataccttttttttatattaattattttatttatttt

SEQ ID NO: 155528 - DNA, 350 bp, Arabidopsis thaliana columbia
  unsure (1)..(350): unsure at all n locations
gttgatccattgtcaaagtctattttatctgtgaacactatactaaggagaaaaatgaacggaaagttgttgggtgacggcacanattgtattggttccatttctgctattgaggatggcctacgaagttcaagtgatccaagcagtgtaccttcttcttcttcgccattggccagtaaaacagtggtggttattggtgctggtggagcaggcaaggctcttgcttatggtgcaaaagataagggtgccaaatttgttattgctaatcttacttactaacttgctctagaacggggagaagcaatatttggcaaatcgttatctcttacagatttatattatctttcacc

SEQ ID NO: 155529 - DNA, 392 bp, Arabidopsis thaliana columbia
  unsure (1)..(392): unsure at all n locations
gtttgtgtctcttaacttatccctttatccaaaaaggggaaaaccacctaagggggaagagtatatcgcctacgagaccgacctatttcancttatcnattaatacacccatatcttgttcgttgcggccgataacttctgatcaactcaacttcaaaacatcataaagggtcttcgtggaaactccttcgtgcttatggggaagaacactatgattaagcgttccgttagaattcacttttataacaccggaaacactgcaatccttaattctgcttcctctccttcaaggaaacattggtttgatctttcccaaatgttacctcaaagtaatttatccaaataattttctttttaccatagtttttttccctttcttcttttttattttg

SEQ ID NO: 155530 - DNA, 382 bp, Arabidopsis thaliana columbia
  unsure (1)..(382): unsure at all n locations
caaacacagcataaaaaaaaaaaaaagccttcatgaatagaatcggnctctttctctatgatcggtctctctctctgactggggagtgttctctcaaatcctctgataagaatcaatggccaaggaattagcagagaaagctaaagaagcttttctagatgatgacttcgatgttgctgttgacttatactccaaagccattgacttggatcccaattgcgccgccttcttcgccgatcgtgctcaggccaacatcaaaatcgataacttcactgaagctgttgtagatgcgaacaaagccattgagttggatccaacgttggcaaaagcctatctcagaaagggcactgcttgtatgaaactagaagaatataatactgct

SEQ ID NO: 155531 - DNA, 460 bp, Arabidopsis thaliana columbia
  unsure (1)..(460): unsure at all n locations
accgacgcgtccgtacataatttacctgagtttctacggcttttttttttgcacagcgagcgnctcanaagagagagagttctaatcctttagggtggtncccttaangatactctcaattgagctgttcatcgccatatcttctaccatgacgcttcttttctnttttagaagttcaatgtcaaccaatatgtggaggatgtccacagaatctacaaactgattgctcattgtgaagcataatacaacaaatggcgtcaccctgatccttatatcgttccatgggctcctggtggctcaaagttctgtagaaacccgactccgcctgctttgattgagattgtgtacaactatgttctagaatacaacccataataaacctatcttccatattgtcacacccatcaataaaattgaagcatcccgtagctatggtttggagataaattaaacttacttt

SEQ ID NO: 155532 - DNA, 447 bp, Arabidopsis thaliana columbia
caggggggacgcgacgcgtccgcaactttttttaccatcccttttaacgtttgattttcttgtatttcatttcaaccactgatagtttttagtttgttttgggaagaatcaactatggcgaccaaaagaagcgttggaactttgaaggaagcggatctgaagggaaagagtgtgttcgtgagggttgatctcaacgttcctttggatgataactctaacatcaccgatgacaccaggattcgtgccgctgttcccaccatcaagtacttgatgggtaatggatctagggttgttctctgcagtcacttgggccgcccaaaaggtgttactcctaagtacagcttaaagcctcttgtgcccaaattgtctgaacttcttggtgttgaggttgttattgcaaattgactctattggtgaggaagttcatatattggttgtcagtcttcc

SEQ ID NO: 155533 - DNA, 399 bp, Arabidopsis thaliana columbia
cttgaaatcagatctcttcgagacttcttttgtaaccaacaaagaaccatggagctccgctctatagctcttttgttcgttcttctactctcagttctttcttctttctcttcttcaagtttcatttcagatggggtcttcgaatctcagagtttggttcttggcagaaacttgcttcagaccaagaaaacatgtcctgtgaactttgagtttatgaactacacgatcataaccagcaaatgcaaaggtcccaaatacccaccaaaagaattttgtatcgccttcaaggactttgcgtgtccttacactgaccaactcaacgacctgagctcgtattgtgcaaccactttgttcatgtacatcaatctctttggtaaataccccctctgacctttctct

SEQ ID NO: 155534 - DNA, 330 bp, Arabidopsis thaliana columbia
  unsure (1)..(330): unsure at all n locations
aaacttctctctaaatctcagtgatttctcataaaatgagaaagatgctnagagagaagaatttatctctatttaggtagagtcactctcacatcnnctcttttcttctattacttccataaaatttaaaagatgccaaaacatactacttatctcctccctctttctcacataaaacttctccatcacacacacctactttttctaactgaagaaatccaccttacaacccttctccttcaacatcttcttacccttcaccttcatcacattacttaacttcttccacttcattacaaacttcatcttcacacactttcataacacact

SEQ ID NO: 155535 - DNA, 450 bp, Arabidopsis thaliana columbia
  unsure (1)..(450): unsure at all n locations
ggaaaccgggcgggacccacgcgtccgcaagattcatctacaatgttctttttctttctctgccgatgagaanatccatctagtaagtttttattttcaggagagcaggaccntatntttccancataaaccattcaacatacataattcattactggagagatttcataaaacattactcccatcctctctcaaactaaatcaatttatgaccttccaatcctccctgctacaaggaaaaggtggggaaatacgcagaatcaactcattttttacataatcaactaatttaagctatctcagatagtctattactgtataaaaattacttacattaagtaattgattattgctcacaagtcatttctatttacttctatccatcttttttctaacccaatatttgccttggaattcctccactctctaactatttttttcttacatttt

SEQ ID NO: 155536 - DNA, 426 bp, Arabidopsis thaliana columbia
ggcgggacccacgcgtccgcgcttttctctcttcagtgatttctcagttctgttccgacatcaatggcttttggaagattgattggtcggctggactgcgaaatcgtctgactttcacagcagcgatgttcggctcttacgtcccgttttaatcgggctctcgttcggcacctccagctttttcagtgaagatgaccgactcttttcccgacagcatacggctccatcagcggtgttggtcggattttagttttactttggccatagatgagttactctcaccttttggtctttgttttcccttcaataatttcagcaattatgtgttggtgataacgatttaagtgctatgttgcttaaactgttgattatccgactcatgttgtttgaagcttggttttacaggaattattattaatatttgca

SEQ ID NO: 155537 - DNA, 361 bp, Arabidopsis thaliana columbia
  unsure (1)..(361): unsure at all n locations
tttcttggaatgactggtgatngtagcaaagatgcccctgctctaagagagagctcatatcnntattgctgttgctgatgctacagatgctgctcacggtgcttcagatatcgtgctcactgagcctggactcagcgttattatcagtgctgttctcaccagcagagctattttccagagaatgaagaactatactatctatgcagtctcaatcaccatccgtattgtgtttggtttcatgcttattgctttgatatgggaatttgactgctcaaccttcatggttctgatcattgccattcttaacgactgtaccatcattacaatcttaaaggacagatttaaaccatctcccacacct

SEQ ID NO: 155538 - DNA, 449 bp, Arabidopsis thaliana columbia
  unsure (1)..(449): unsure at all n locations
cgtcctaaagtgctctctccccaatagctaatcacttccgtcttttacncggcnncnnatctccagccatggtctttttcaaaatgacactcacagctttcncttccactatcncactcttcctcttcactctctccttcttcttcgcttcagattctaacaattctccttatctccttcttcccggtgttgaatactctaatagagtcagatctaaaaaatccatatttgatatcaaatcggatccgcttaaaccacaatttattcatatccgtaaacaaacttatgatcatctgtcattagcattaacttattcttcttacgcgagaaaacttatactctataattctaaactcgtcatgatcttctcttatctttctagaaattacaccgatcttattaactaacctacttatctaaccttttttcattcttatttatcctcattt

SEQ ID NO: 155539 - DNA, 405 bp, Arabidopsis thaliana columbia
cgtccgaaacaatggttgaatcggagaaaacgaatctcacttgtctccgtctcgaaatctccggggccgatccaattttcgtcagaggcacttggcataattctcgtttcgatatctccgtcaccgatggttcctcctcttggatttgcaatgcgacggaggaggaagtggcggagagagcagcacaatgggaccagcctgtgtcagagtatttaaagctcgccgagcaatacttatggtttcaacaacctaattcggtctatagtttctccgatgctctagagggatctaaacggctctcttggacgtttgaaaaagaatggactaaacttgagtggaggtggtaaagtaaaccatcagatgataaccagaagatcacctgtgggatcttggattttcttatgg

SEQ ID NO: 155540 - DNA, 448 bp, Arabidopsis thaliana columbia
  unsure (1)..(448): unsure at all n locations
cttgtcttttcttaaaagagctcaaaactctctttcatctttccgctgtcttcttaaagtctggtctaccgtaatcatgcgaacgtcancaacagcggtggctccatcaactggatctgtccagaaaaaagatcaagactggcgtgcgattttgtctcccgagcaatttagagttctcagggaaaagggcacagagaaccgaggtaaaggagagtataccaaactgttcgacgacggaatctatagttgtgctggttgtgcaactcctctttataagtccaccactaatttcgactctggttgtggctggccttccttcttcgatgctatccctggtgccattaaacaaacgcccgaggcaggagggagaagaatggagatcacgtgcgcggcatgttacggacatttaggtcatgttgtcaaaggaaaatgtttttccacatcgtcc

SEQ ID NO: 155541 - DNA, 441 bp, Arabidopsis thaliana columbia
  unsure (1)..(441): unsure at all n locations
cgtccgaaaaaacctgtctcactcctcgtcaacctttttttctcccgctgtcgccaanattgaaagttggttcanttgtggcttgagcggataataangaattcantaagagataagttcatcctgacaacatggagaccaagaatgagaattctgatgtttcacgggcagaggagtttaaaagtcaagccaacgaagcttttaaaggtcacaaatactccagtgctattgatctatatacaaaagctattgaactcaacagcaacaacgctgtgtattgggcaaatcgtgcatttgctcacacaaaactggaggaatatggcagtgcaatacatgatgcatcgaaggccattgaagttgattcaagatactctaaaggctattacaggcgtggtacttcgtatcttgccatgggaaaatttaaggatgccttgaaagact

SEQ ID NO: 155542 - DNA, 167 bp, Arabidopsis thaliana columbia
cggttccattccactctctacttacctgataaccttcaatgtctgctattacatcaatgttaatgtgattgtttcgatccacaagggtatgcctcacatgttctaccacggtcgtactggtcgtatctggaacgtcactaaacgcgccgtctgtgtttaattcaaca

SEQ ID NO: 155543 - DNA, 190 bp, Arabidopsis thaliana columbia
tcacttagccttaactcatccttattatcattgcttttctcaccaacaaaactattttccaaaaaatgaaaaactatactatctatgcagtctcaatcaccatccgtattttgtttggtttcatgcttatttctttgatatgggaatttgacttctcagccttcatttttcttatcatttccattcttaa

SEQ ID NO: 155544 - DNA, 280 bp, Arabidopsis thaliana columbia
  unsure (1)..(280): unsure at all n locations
gcgtccggtagaaacaacctacgtcgaatctttatttgttggcagattatncnacctagagataagttggttcttagtgcaggtcagattctttacccctgtatgcaatgttcggatattttcttacttgaggctgatatttgccagctcgggatggatcatcgaaaattaaacattctagcaagataatactgttcttacattaataggaaaattaaacccatcatcttgtcccaccatttactttctgttctcctacaattacaagaaaatatgtcca

SEQ ID NO: 155545 - DNA, 339 bp, Arabidopsis thaliana columbia
aacttgtttagtcaaacttgaagaagataaaaaatctttttaaagagctttgaagatagatggctatgtctgatggccagcctatgctactcctcctcgtatcactcttcttcttaccggctttgcgtggcgccatagatttcgaatactgcgccaaatatggtaacgattactgaaccgtcactagcattgtggtctctccatctgttggtcctcacgaaaacccaaccatcactataaatttattcggttctgcatgcaaaaacattccctcgttaacccttttttacgtagcctttagagatgtagtatctaccggccttttaataacttacaacc

SEQ ID NO: 155546 - DNA, 413 bp, Arabidopsis thaliana columbia
  unsure (1)..(413): unsure at all n locations
ttagctttatataaccaaactctgtttctgaacagagttagtcaaagagagagaagccatggaagctatgaaggagactgtggaggagagcttgagagagatgagagagacgtttgcaagtggaaggacaaggagtctgaagtggaggaaggcacagatcggagctatatacgagatggttaaggacaacgaagacaggatctgcaatgctctgtttcaagatttgggcaaacacagtactgaagcttttagagatgagcttggtgttgtcttgcgaacagctactgttgcaatcaactgtcttgataaatggggccgccccaaacatagcaaacttnctctgttgttctacccagcaaaagggaaagtcatatcggaaccctatgggacggntcttgttctgtctagctgga

SEQ ID NO: 155547 - DNA, 388 bp, Arabidopsis thaliana columbia
cgacgaagacaggcctagattcgttttccaatctcgtccttcttcttctcacacggcggaggaagaagaagaagctagaatccctaacaagcttttcatttcaatctccgtctcaatctccctcatcatattatctctctccttcttctacttcgaatctgaacctgccaaatcgctactattatggctttccctctctttcctcgtcggtcctttcgctcctagctcgctcaccggaggtaagattcgcgtcggttatggtcagatcttggagccagaacagattcacgatgagtcatccacggataacgaacgtgaatccaggaggaaatcggtgaataagcgatctaaaggttcgacgaagagcgataatccgccggaaaatgct

SEQ ID NO: 155548 - DNA, 269 bp, Arabidopsis thaliana columbia
agaagatgatgatggcgatcgattctaaactttcttttttaccattcttattttcgtttgccgtaggtggttaaaaaaccgtttttgttgatgaggctcatttaaagaaccaaccaaatgatgtttctttctctcactctctgtctttctgttttctttttgttctgtttagaatttagaaatccaccaagtattcggtcgagacttgttttagccgttactttctgctgcttatattttctaaattgggtgtctatttcgatacatta

SEQ ID NO: 155549 - DNA, 411 bp, Arabidopsis thaliana columbia
acccgtctttctagggtttggtttatgaacgctccgccgtaagaattgtcctccgccgccgcgttttcccgtcgattcagaacagaaggattattgcttttgccaatctgtatcaatatccgtttgattatccttgtaatttcgtgtaaaaaccattcaaggtttcagcttcttccctcgttctttagggtttagatttgatttggggttgggatgagtagtccgttcagtgaagagatactgattgataacctcgctaagctcaacagcactcaacaatccatccaaagtatcctttttattattattcgaattcattgcctcaattgaatacatctctgtgttttggattagctcattcacattggtgtgtcttcatttgaatgaacctcttactgtatgcttaaatgt

SEQ ID NO: 155550 - DNA, 359 bp, Arabidopsis thaliana columbia
gcctttctagggtttggattatgaacgcttttctttatgaattgtcctccgccgacgcgtgtgggcgtctattcagaacagatggattattgcttttgccaatctgtatcaatatccgtttgattatccttgtaatttcgagttaaaaccattcaaggtttcagcttcttccctcgttctttagggttaagattcgaattgtggtagggatgagtagtccgtttagtgaatgagattactgattgtttacctcgcttagctcaacctttcttatcaattcattccaattatcctttttttttattatttcaaattcattttccttttatacttatactatttcttattattttgtttta

SEQ ID NO: 155551 - DNA, 409 bp, Arabidopsis thaliana columbia
atcagttttcacttcgattcctgatctctgggggattgatcagctgttccctatagttcctatccataagctcgatcaaaggcccggggctcgcggaatcctttcagatttaacgtgtgatagtgacgggaagatcaacaagttcataggcggtgaatccagcttgccgttgcacgagctggacaagaatggcagtggaggaaggtactttttgggtatgttccttggaggggcttacgaggaggctctcggtggagtccacaatctgtttggtggaccaagcgttgtccgggtctcccagagcgatggaccacacagctttgcagtgacccgagcggtgcctggtcagtcctcagcggatgttctccgagcaatgcagcatgagccggagctaatgtttcagacccta

SEQ ID NO: 155552 - DNA, 378 bp, Arabidopsis thaliana columbia
ttaagataataaccgtaaacttcatgaaaataaccaatcaaacaaactacatccgggactctcaataggtttcgaagagatgatacctctcaaataagggtttaaatacacaaaactaatcaaatttgtgagggaggagataagcatgtaaacttattttgggaaaaacctgatttctgtatggaaccggatagcggcaacctcacttccttgaaccactggcctcctcgaattcagcttcaggcgtctgctcagtcccacttgtaccctcaccagagcttccatcggaaccagatgatccagatcccttagacatgtgttctccgatcttcgacactgccttgtttgcagcttcgaccttagccttgatgtcctcga

SEQ ID NO: 155553 - DNA, 404 bp, Arabidopsis thaliana columbia
aatccgtagccaggagtttcaccctacttacttccggcgagttagtgatcaaggaatgcttttgcttgctgacaaatgcttgggaatggaaaccatttgtcttggtggcttttgtcgggtaacagatgctggtttcaagactattcttcactcttgcgctagcctctccaagtttagtatatatcatggacctaaattgacggatcttgtcttccatgacatcttagcaactactctttcgcttagtcatgttagcttaagaaggtgccatcttcttactgaccacgcaattcaaaagctggcatcaagtctcaagctggagaatcttgacctcagagggtgcagaaacctgagggatgaaaccttgacagctgtatctcatctgccaaaactgaaggttttac

SEQ ID NO: 155554 - DNA, 363 bp, Arabidopsis thaliana columbia
gcgaaaaaacgaaaatggcggcgaacggagtagcgacggcgggacgtcaggtatcagagaaagaagctgatatccagatgatgttatcagccgatgttcaccttggtaccaaaaactgcaactatcagatggagcgttatgtcttcaaaagacgcgacgacggtatttacataatcaatcttggaaagacatgggacaagcttcagatggctgctagggttattgtagcaatcgaaaacccaaaagacataattgttcaatcagccaggccttatggacaaagagctgtcttgaagtttgctcagtacactggtgttaatgcgattgctggaagacacactcctggtactttcactaaccaaa

SEQ ID NO: 155555 - DNA, 380 bp, Arabidopsis thaliana columbia
gccttattcgtcttcttcgttctctagttttttcctcagtctctgttcttagatcccttgtagtttccaaatcttccgataaaaatgtcgggtaaaggagaaggaccagctatcggtatcgatcttggtaccacttactcttgcgtcggagtatggcaacacgaccgtgttgagatcattgctaatgatcaaggaaacagaaccacgccatcttacgttgctttcaccgactccgagaggttgatcggtgacgcagctaagaatcaggtcgccatgaaccccgttaacaccgttttcgacgctaagaggttgatcggtcgtcgtttctctgacagctctgttcagagtgacatgaaattgtggccattcaagattcaagc

SEQ ID NO: 155556 - DNA, 200 bp, Arabidopsis thaliana columbia
ggccttgaacaactacttctttctcttgttttttcctcagactctgttattacatgggtggtggtttccaaatcttgcgagagaaatgtattttaaaggagaaggaccatttatcgtcaatgttctaggaaccacttacttttgcgttgtagtatggcaacacgacctttttggaacattgcttattctcctaggtatca

SEQ ID NO: 155557 - DNA, 411 bp, Arabidopsis thaliana columbia
ctgctgctgatgatgatgcggttaaggagttggatgaaatgaagaaacgattgaaagagatggaggacgaagctgctgctctgcgtgagatgcaggctaaggtcgagaaggaaatgggagctcaagatcctgctagtattgcagcgaatcaagcaggcaaggaggaggttgatgctcgatcagtttttgttggcaatgttgattacgcttgcacacctgaagaagttcagcagcatttccaaacatgcggcactgtccatcgggtgaccattctgacagacaaattcgggcagccaaagggatttgcatatgtagaattcgtcgaagtggaagctgttcaagaggctctacaactgaatgaatcagagctacatggtcgtcaattaaaggtcttgcagaagagaacaaacg

SEQ ID NO: 155558 - DNA, 416 bp, Arabidopsis thaliana columbia
aattgatctcgtggcattgtagtaagaagctttaatttaattggtcctccaaggaaattgcatcgaagtcagctccaaattttcgatcagggttgttgagcttttgtgttaaagtttcgatctttatcgaatttcagcaaaaagctgtagaatcggcaatttggttctattgagtatctgatgaaatgagaagcaaaagatatggttggaatgattcgaggaggaatgggtgatcagaattggagtcgtttatttttctggattattctgtttttttagttattagttcatatctttgtttattgtttctttctatcattttatatttttttttttctatcttctctatttcttttattatgtattgttttatttttattttctttctttttcttctttatttctacttttttttt

SEQ ID NO: 155559 - DNA, 398 bp, Arabidopsis thaliana columbia
cgaaagccttgagagagagaacacagacgataccaactttcttcaatctcgttgccgcagtataattatctcattcctcggatatatctctccttctgcggcggcgacaagaagctacaagaataaaaagtctgttttctctcttttcaagaaaccacttacttcgaaaatggctcgttctatctctaacgttaagatcgtatctgctttcgtctctcgtgaactctccaatgctatcttccgacgtggttatgcggccacggcggcgcaagggagcgtttcgagcggtggaagaagtggagctgttgcttcggctgtgatgaagaagaagggagtggaagaatcaacccagaagatttcttgggttccagatcccaaaaccggttattacagacccg

SEQ ID NO: 155560 - DNA, 414 bp, Arabidopsis thaliana columbia
gaaatttttcttagagaagaagaagaagaagcaaaatggccacaagcgcatcagctttgctctcaccaaccacattctccactgcaatctcccacaaaaaccctaactccatctcattccatggccttcgtcccctccgtctaggtggctcctcctccgccctacccaaactatcaaccaccgggagaaaatcctcctccgctgtcgtgagagctgagctaagcccttccatcgtcataagtctcagcacaggtctctccctcttcctcggccgtttcgtcttcttcaacttccagagagagaacgtagcaaaacagggcttaccggagcagaacggaaaaacccatttcgaagctggagatgatcgtgctaaggagtacgtcagtctcttgaaatcgaacgatccaattggat

SEQ ID NO: 155561 - DNA, 360 bp, Arabidopsis thaliana columbia
gcctctccagattattcagcctgaaggtccaagttttcgtgtaaggggttactttgtcgagtggcagaagtggaactttcgtattggattcactccaagggaaggtttagtcatacattcggtagcatatgttgatggcagtcgaggtcgaaggcctgttgcacacaggctaagttttgtggaaatggttgtgccttatggcgatcctaatgagccacattacaggaaaaatgcttttgatgcaggggaggatggtctcgggaaaaacgcacattcgcttaagaaggggtgtgactggctgggatctatcaagtacttctatgcccatttcacagatttcactggaggagttgtaacaat

SEQ ID NO: 155562 - DNA, 411 bp, Arabidopsis thaliana columbia
cgctgctcaacagagtcctgaaaaccccaactggttccaggggacagctgatgccgtcaggcgatacttgtggttgttcgaggagcataatgtcttggagtatctcattcttgctggggatcatttgtatagaatggactatgagaagtttattcaagcacatagggagactgatgctgatatcacagtagctgcattaccaatggacgagcaacgagccactgcttttgggctgatgaagattgatgaggaaggacgtattattgaatttgctgaaaaaccaaaaggggagcacctaaaggccatgaaggttgacacaacaattctaggtcttgatgatcagagagccaaggagatgcctttcattgctagtatgggtatttatgttgtaagcagagatgtaatgctaga

SEQ ID NO: 155563 - DNA, 371 bp, Arabidopsis thaliana columbia
ggctgatcagagctgagtgaaaaatggtgtctgtatcaggaatttgcgcgaagcgcgtggtggttgatgctcgtcaccacatgctaggtcgcttggcttcggttgtagcaaaggatctgctcaatggccagaatattgtggttgtccggtgcgaggagatttttctctcccgcggactggttcgacagaagatgaagtacatgtggtttctccgcaagcgtatgaacactaaaccttttcacggacctattcacttccgttctccctccaagatcttcttacttaccgttcgctgcttgattccacacatgactaatctaggatcttatgcactggccctctttgaaggtattttgaatgagttccatctc

SEQ ID NO: 155564 - DNA, 406 bp, Arabidopsis thaliana columbia
aaaaattcttcttcttcttcttcttctccgagctccgtccgagcagagaagaagagtaaggtgagttttagagtgcacttgtgtggcactctcatttcttatcctgcgcctcttacgatttcttatggtgcgcttctccgactagtttcggtgtctaatggactcttcctcttcttctctatctctccaagaaaaaatctcttctggttatttctagggtttcgttggttcttttttcgaaatgctttggataacgagatttgctggattattctccgccgcgatggcagtgatcgtgttatctccgtcgcttcagtcatttcctccggcggcggcaatccgttcttctccatcaccgatcttcagaaaagctccagcggtgttcaacaacggcgacgaatgtctc

SEQ ID NO: 155565 - DNA, 402 bp, Arabidopsis thaliana columbia
  unsure (1)..(402): unsure at all n locations
caaggattacagaggcaagattgaaactgagctcagcaagatttgtgatggcattttgaaccttcttgaggctcatctcattcctgctgcttctttggctgagtccaaagttttttacctgaagatgaagggagattatcatcggtaccttgctgaattcaagactggtgctgagaggaaagaagctgctgagagcactcttgttgcctacaagtctgctcaggatattgctcttgctgatctggctcccactcacccaatcagactggggcttgctcttaacttctctgttttctactatgagattctcaactcatctgatcgtgcgtgtagtctcgcaaagcaggcttttgatgaggcaatctcggagctagacacattgngagaggaatcatacaagga

SEQ ID NO: 155566 - DNA, 409 bp, Arabidopsis thaliana columbia
cggacgcgtgggatcgattctcgtctctctctctttcatcgcagcgaataatccaaatcgaaagcaatttctctcgacgaagaaaagagaagcaatcggagtctgtggaggtaaagaagtacacgatcaaatttcaagtcagagtttcggggaaaaaaaaggaatgggggatcatctggtgagagctgaggaattcgagaagaaagctgagaaaaagctcaatggatggggaatattcggatctaagtacgaggatgctgctgatctgctcgaaaaagcagctaattcctataagctcgccaaatcatgggatcaagctggaaaagcttatctaaaacttgccgactgtcacttaaagtcagatagcaaacatgatgctgctaacgcctatgctgaggctgctaaatgc

SEQ ID NO: 155567 - DNA, 408 bp, Arabidopsis thaliana columbia
ctcgccgttccgttagcttacgccggcgtcactttcgtcactgctttcgtcaaaaccgggcagaagttctcttctcctaaagctcagcgcaagaaactggtgaatcagaatgctatgctttgcagatctatagatgagctattaaggaaagctggaacagtgcatagctctgagcttaaggcacttgaacaaaagacagagtttaacatggaggagatattgcggaaatacattcgttatgcgttgaatgagaaaccgtttaatcccgaccttgttgctgatctcattcatctaagaaaagcttctggtttgaatgattctcagattcctgagattttaaatgagatctctcgtcgtattgtcaaggaaaaaggtccggtagtgatgaaaatgcaaggctttaccgaa

SEQ ID NO: 155568 - DNA, 411 bp, Arabidopsis thaliana columbia
cggacgcgtggggtttttctgttggaagcttccagattgatgtagttggagggtggcgtgacatgtatggatttggtacgcctgttgctttgctgatgggactaggcatgtggagtctccctgcatctcctcgctggttgctgcttagagctgtccaaggtaaaggacaattacaagaatacaaagagaaggccatgcttgccctcagcaaattacgtggcagacctccaggtgataaaatctcagagaagttggtagatgatgcctatttatctgtgaaaacggcctatgaagatgagaaatctgggggaaacttcctggaagtattccaagggcctaatttgaaagctttgacaattggtggaggtttagtcctcttccaacagataactggacagcctagtgttcttt

SEQ ID NO: 155569 - DNA, 406 bp, Arabidopsis thaliana columbia
  unsure (1)..(406): unsure at all n locations
caaaccaagaagaagaagatggtgaaactggagaactcgaggaaacccgaaaaaatgtcgaacaagaacatccccatgtccgatttcgtggtcaatctggatcatggtgatccaacggcgtacgaagaatactggaggaagatgggtgacaggtgtacggtgacgatacgtggttgtgatctcatgagttacttcagcgacatgacgaacttgtgttggttccttgagccagagcttgaagatgcgatcaaggacttgcacggtgttgttggtaacgctgcgacggaggatcggtacatagtggttgggaccggttcgacgcagctttgtcaagccgccgtccacgcactctcttcactagccaggagtcaacctgtcagcgtcgtcgccgccgctcctttntact

SEQ ID NO: 155570 - DNA, 401 bp, Arabidopsis thaliana columbia
gttctgccaaagtttctctgcagcttctcctcttctcagaaattagggttccgtctcaaattacgagcagatctcgtactctctgatgtctgaagatccggagtaccgttgcttcattggtgggcttgcttggacaacgtctgatcgtggtctcagagatgcctttgagaagtatggtcacctcgttgaggccaaggtggttcttgacaagttttctggtcgctcccgtggttttggattcatcactttcgatgagaaaaaagctatggatgaagctattgcagcaatgaatggaatggatttggatgggcgaactatcactgttgataaagctcagcctcatcagggtggtgcaggcagagataatgatggtgaccgtggtcgagaccgtggatatgatc

SEQ ID NO: 155571 - DNA, 410 bp, Arabidopsis thaliana columbia
atctgcttcacatctgtagatggtgagaaagctccatcaggagagagctttgaggaatggctggaacctcttaacaaaagcaacaatatttacgcagttggtattaactgcgcacctcctcaattcatcgaaaatctgattcgcaaattcgccaagctgacgaagaaagcaatcgttgtttacccgaatagcggagaggtttgggatggaaaagctaaacaatggctgccatcacaatgctttggtgatgatgaatttgagatgtttgcaacgaaatggcgtgaccttggagctaaactcatcggaggatgttgcaggactacaccttccaccattaacgctatctccagagatttgaaacgaagatgatttttcttcagggagaaaagactgaagattctttttcaact

SEQ ID NO: 155572 - DNA, 431 bp, Arabidopsis thaliana columbia
aacccggggcggcccacacgcgtccggttgacttcacatggcttccaccgccgcatctgcagctctttcgatcatcaaatccaccgggggcgccgccgttacacgctcctcccgcgcctcctttggacacattccctccacatctgtctccgcacgtcgccttggcttctccgccgtcgttgactctcgtttctcggtccacgtggcgtccaaggtccactccgtgcgcggaaagggcgccaggggagtgattacgatggcgaagaagagtgttggagatctgaattctgtagatttgaaggggaagaaggtgtttgttagagctgatctcaatgtacctctcgatgacaaccagaatatcactgacgacactagaatcagagccgccattcccaccatcaagtttttgattgagaatggtgctaaggtca

SEQ ID NO: 155573 - DNA, 410 bp, Arabidopsis thaliana columbia
cttgaagaagaaaaaaaatctttttaaagagctttgaagatccatggcgatgtctcatgggcggcctatgctactcctcctcggatcactcttcttcttaccggctttgcgtggcgccatagatttcgaatactgcgccaaaaatggaaacgattacggaaccgtcactagcattgtggtctctccatctgttgggcctcacgaaaacccaaccatcactataaatttattcggttctgcaagcaaaaacatccccgcgggaacccttgtgtacgtagcctttagagatggggaatttaccggccttttaaaaacttacaacctttgtgatgtgagtgcatgtaacaatgaagctgagattgaagctggcaccaactttgagttaactctttccgacgttctttatgttg

SEQ ID NO: 155574 - DNA, 400 bp, Arabidopsis thaliana columbia
ctgagagttcagacaccgaatctagcgaatctgtctctcaacgactcgatctggaggacaaactctgtcttcaaagagcgtcgaaacttagacatagccgccaccaccgacaagaacaacaaccagatcgactattatcagaagaagacaacttccgacaacatcaattccaactggaactggaagtcttctggttcaaacaacgacatgggtttaggattcggacctgtgggttcaaaatccaccgtcgatttaaacccaatcgacaaattcaactcaccgttcaacgacacgtggaaattcaactcagtcaacgttaacgttaacggttactcaccgtcaagcgccgttaacggagatttcaacaaaggggtttacacgtcgatgaagaagtatgggt

SEQ ID NO: 155575 - DNA, 410 bp, Arabidopsis thaliana columbia
gtgaagaatcatttcaagccatgtctccggctaaagttgatactaccaagaaggctgatgctaaggccaaggccttgaaggcggcaaaggctgtgaagtctggtcaagccttcaagaagaaggacaaaaagattaggaccaaggtcaccttccacaggccaaagactcttaccaagcctagaactggtaagtacccaaaaatcagcgctactccaaggaacaagttggatcactaccaaatccttaagtacccactcaccactgaatctgcgatgaagaagattgaagacaacaacactcttgttttcattgttgacattcgtgctgacaagaagaagattaaggatgctgttaagaagatgtatgacatccagaccaagaaagtgaacacactcatcaggcctgatggt

SEQ ID NO: 155576 - DNA, 408 bp, Arabidopsis thaliana columbia
agactttattcgggaggagaaacattttccggggaatgtggtttctgggattcgcgagagaattcaaatccaagctttcccggaaactgagaaaatctaagattcatcaagagtcagtgaatcgatggtcagattgtggatgcaaatcttgcaagtcatggactaagaacgaagatgggaatcttcacgtcgtggtcaaagattctacttctcgagagtactctgttcaagaaccgtccgagaatgtaatattcatacacggttttatggggtcatcacatttttggacagaaactgtatttgaacacattcaaaaagatgattataggctcctcgcgatcgatcttttgggattcggggagagtcctaagccaagggatagtctctatacattgaaagatcatgtgg

SEQ ID NO: 155577 - DNA, 407 bp, Arabidopsis thaliana columbia
gcaatttttagggttttatcctccgaaagtctcaacctttttcttatcctcaacaaggagaaatggcggcgactcaacttacagcgtcaccagtgactatgtcagcaaggagcttagcctcgctggatggtctcagagcttcgagtgtcaagttttcatctttgaaaccagggacccttagacagagccagttccgtcgtttggttgtcaaagctgcttctgttgttgcccctaagtatacttcaattaagccattgggagatcgagttttggtgaagatcaaggaggcagaggagaagactttaggtggtatcttacttccatccactgctcaatcaaaacctcaaggaggtgaagtcgttgccgtgggtgaaggaagaactattgggaagaacaaaattgatatc

SEQ ID NO: 155578 - DNA, 404 bp, Arabidopsis thaliana columbia
  unsure (1)..(404): unsure at all n locations
tnaaacatcatcactcttgaaacacttcaaatctccggtcaacaaaaaccatgacttcaatttcttaaacaaaaagtttcaatctttttccaaacaaaacccatttcagattttgttctttgagaaaccaacatgagaaagacttctgtttcatctaatagctttggtgggtttttaagtcccggagctccgagttacgctgacaacaaaggttggagctccgagagagttcctcatccttcctccactacttcctcctctgcaattaacggtggtcgtcgtcacatcggctcttcttccgctttaacgacgccgttttacagcggcagagcaattccttcgaaatgggaagatgctgagcggtggatttgtagccctgtgtcgacttacccacaaggtgtttg

SEQ ID NO: 155579 - DNA, 410 bp, Arabidopsis thaliana columbia
aaaccactcatttttctattactgaaatttttcttagagaagaagaagaagaagcaaaatggccacaagcgcatcagctgggctctcaccaaccacattctccactgcaatctcccacaaaaaccctaactccatctcattccatggccttcgtcccctccgtctaggtggctcctcctccgccctacccaaactatcaaccaccgggagaaaatcctcctccgctgtcgtgagagctgagctaagcccttccatcgtcataagtctcagcacaggtctctccctcttcctcggccgtttcgtcttcttcaacttccagagagagaacgtagcaaaacagggcttaccggagcagaacggaaaaacccatttcgaagctggagatgatcgtgctaaggagtacgtcagtc

SEQ ID NO: 155580 - DNA, 409 bp, Arabidopsis thaliana columbia
cggacgcgtgggatcgagtctcgtctctctctctttcatcgcagcgaataatccaaatcgaaagcaatttctctcgacgaagaaaagagaagcaatcggagtctgtggaggtaaagaagtacacgatcaaatttcaagtcagagtttcggggaaaaaaaaggaatgggggatcatctggtgagagctgaggaattcgagaagaaagctgagaaaaagctcaatggatggggaatattcggatctaagtacgaggatgctgctgatctgctcgaaaaagcaactaattcctataagctcgccaaatcatgggatcaagctggaaaagcttatctaaaacttgccgactgtcacttaaagtcagatagcaaacatgatgcttctaacggctatgctgagggtgcttaatgc

SEQ ID NO: 155581 - DNA, 410 bp, Arabidopsis thaliana columbia
ggcaacagaaggaaaaaaccccatcaacattatactctatgtcttcaagtcttgcaagagcgcggtcaatgggttttttctcaagatattccaaccgatgttgttgttgaagtcggagaagccaatttctctcttcataagttcatgttagtggctaagagtaactacataaggaagctaataatggaatccaaagatagcgacgtgacaagaatcaatctctcggatatacccggaggtcctgagatatttgagaaagctgccaagttctgttacggtgttaacttcgagatcaccgttcagaacgtggcggctcttcattgcgcagccgagttttttcagatgaccgataagtactgtgacaacaaccttgctggttggacacaagacttcctttcttaagtagctct

SEQ ID NO: 155582 - DNA, 402 bp, Arabidopsis thaliana columbia
ctggaagacatggcacaagacgtggaaccgaactaaagcagagctaaatgccgagcaaaagaggagtagagggaatcgcagagtgcttatgctgggagaagaagtatgagaagggagacattgcaattttcagaaagaaaataaacgatagatcatgcgatagatcaacaccggttgacacctgcaaaagaaaggacactgacgatgtctggtacaaggagatagaaacgtgtgtaacaccattccctaaagtatcaaacgaagaagaagttgctggaggaaagctaaagaagttccccgagaggctattcgcagggcctacaagtatctgtaaaggattgattaatggcgtcggcgagggatcataccaagaagacatcaatctatggaagaagcgagtga

SEQ ID NO: 155583 - DNA, 392 bp, Arabidopsis thaliana columbia
ctcataccaaaaaaaaaacacaaccaagagaaagaggcgtaaccttctgatttctttcttttaagatatcaataaaatctttcacattttctaatttttaattcttttcaagattttgtggtctccttcaacactccatcagaagtacgcagtttggtttccaggttaagtgcttacgacctgatcagaaaacaagggactatggaactcacgtgagccaaaaagaacactccatttcgatggagaattatccagaaacacagtttattcccggagattcaatgatccagaatgctatagtttcttactctgaggcatcagccggcagagaaagaagaactgcatctaacaatgtctcagcctcacaggagaggcaggcatcgtccagattt

SEQ ID NO: 155584 - DNA, 396 bp, Arabidopsis thaliana columbia
ctctctcacacacaaacacgatccaatgacgactagcaacaacgtgaacggatgtttcggagagacgaagctgaccaaagtgttcgtaggaggattggcttgggatactcacaaagaagcaatgtatgatcatttcatcaagtatggggacatcttggaggcagtcattatctccgacaaactcactcgccgttccaaaggatatggctttgtgactttcaaagatgcgaaagctgccacgagagcttgcgaagactctactccgatcatcaatggccgccgtgccaactgcaatctcgcctccctcggtggccgtcttcgtaaatcccctaccatgacctctcctcaacaaggaccaaaaaatgggaacagggccacgccaccacatgttggaaa

SEQ ID NO: 155585 - DNA, 408 bp, Arabidopsis thaliana columbia
agctaatgaatgaactgcagaaaagttctggccatccgtcacaaaattttgcaccatacattgagcaacttgccgctggaaattttggtcaattgccacatgaaggccatcagagggaactacttgaacagctactttcaacaaaaatgcaatctcaatatggaccaatgcaatctccatacggacaactgcaatctgaaccaactcggtctttggagtaccaactgctgcagcaagagcagctgatgcaattggcaaacggagtgaggcacaatacactattggaggaacagagacatattgaccctctgtggccatctgaccataatgatcagcttctaagaagtcatcctgggatccaacgttcgcgatcctctacaggatttagacaactagactttcatcaac

SEQ ID NO: 155586 - DNA, 399 bp, Arabidopsis thaliana columbia
gctcgatccattgattagaagatgacaactccacaagtgaagaccggtttgttcgttgggttgaacaagggacatgttgttaccagacgtgaattagctcctcgtcctcgttctcgcaaaggaaaaacgagcaagaggacaatctttatcagaaacttgataaaggaagttgctggtcaagctccctatgagaagagaatcactgagcttttgaaggttggtaaagacaaacgtgctcttaaggttgctaagaggaagttgggaacccacaagagagccaagcgaaagagagaggagatgtccagtgttctccgcaagatgaggtctggcggtggtggtgcaactgagaagaagaagtgaacgtcatcttaagtttgtgaatcgcttcgtaagagttat

SEQ ID NO: 155587 - DNA, 406 bp, Arabidopsis thaliana columbia
cacttttcgtccaagccgctaaaaatgaagcacaacaacgttatcccgagctcacactttcgcaagcactggcagaattatgtcaagacttggtttaaccagcctgccaggaagacaaggagacgtgttgctagacagaagaaggctgtgaagatcttccctcgtcccacctctggtcctctccgacctgttgttcatggtcagacacttaagtacaacatgaaagttagagctggaaaaggattcactcttgaagagcttaaggttgctggtatcccaaagaagttggctccaacaatcggaatttctgttgatcaccgacgcaagaaccgttctttggagggtcttcagtccaatgtccaaaggttaaagacttacaaggctaagttggtggtgtttcctcgcc

SEQ ID NO: 155588 - DNA, 408 bp, Arabidopsis thaliana columbia
ctatttgctcatctccttcgatttcgaacccctaatcttgagatggcatcggagaagaagctctcgaaccctatgagggatattaaggtccagaagctagttcttaacatctctgttggtgagagtggtgatcgtctcactcgtgcctccaaggtgttggaacagctcagtggtcagactcctgtcttctctaaggcgaggtacactgtgaggtctttcggtatcaggcgtaatgaaaagattgcgtgctatgtcaccgtgagaggtgagaaggcaatgcagcttcttgagagtggcttgaaagtgaaggaatacgagctgttgaggaggaacttcagtgacactggctgcttcggattcggtatccaggagcacattgatcttggaatcaagtatgatccttctacc

SEQ ID NO: 155589 - DNA, 410 bp, Arabidopsis thaliana columbia
acatcaccttgttgctttccaaaaaaaaacaaaaaaatgaatcatctaatccctcctctttctccaacaaataggtggtggtcggaagaaacaacagcggtcgtgaccggagcaaacaaaggtataggttttgcggtggtgaagaggttattagagcttggactaactgtagttttaactgcccgaaacgccgaaaatggaagccaagccgctgaatccctccgccgcattggctttggaaacgttcatttttgctgcctcgacatctccgatccttcttccatcgccgcgttcgcctcttggttcggtcgcaacttaggaatactcgacattctggtgaacaatgccgccgtttcatttaacgcggtgggcgagaatttaatcaaagagccagagacaatcattaagac

SEQ ID NO: 155590 - DNA, 407 bp, Arabidopsis thaliana columbia
ggaggacccaagaactcaactcccacagtgatatcgccgcagcaatacaagaaaagattcaggggagcgatgacggcttattttgtgatggttcctgaccagtggtcgcctgccgcggttgtgccaagcaacagttcttcagcagaggtgaaggaggaagaagagaaagacaatcctcaagctgttggtaacaagtcctgaagtattttcagcaaacatacacaatattcagttagcaaatatagtttttattttttttggttggaatggtcttatgggtaatttgtgtttatgtattacccttggccttaattgtttcatttgcctttttcattgtctttgcatcttaattatattatataatgtagctatttgacatgtcacttatttatattctttattgtttt

SEQ ID NO: 155591 - DNA, 406 bp, Arabidopsis thaliana columbia
gctaaagcagcagccagtcgggacagtgaaatggcgactgaagatgtgcaagatcccagaatcgctaagattgcctcttccattagagtcatccccgacttccctaaaccaggaatcatgtttcaggacataacgacgcttcttctcgacactgaggcctttaaggatactattgctttgtttgttgatagatacaaagataaaggcatatctgttgttgcaggtgttgaagctagaggtttcatttttggccctcctattgcgttggctattggtgccaaatttgttcccatgaggaagcccaagaagctacctgggaaggttatttcggaggagtattcgttggagtatggaacagatacgattgagatgcacgtaggtgcagtagagcctggtgagcgtgcta

SEQ ID NO: 155592 - DNA, 404 bp, Arabidopsis thaliana columbia
aacagttgcttatgagttcttcacaaaggcatatcttctgtatgaagaagaaatttgagattcaaaggcacaagtaacagcactacgtttaataatagggacactccagaggatgcgtgtatttaatgttgagaacagagatactctgactcacaaggcgacagggtattctgcaagactcctaaggaagccagatcagtgtagagctgtttatgaatgtgcgcatctcttctgggctgacgaatgcgagaacctgaaagatggagagagggttgtgctttgcctgaagagggcacaaaggattgcagatgctgttcaacaaatggccaacgcattccgtggtaccagtagcactgggtcggtgtctttatatgtcgtacttgtttacaagtatctctactttc

SEQ ID NO: 155593 - DNA, 404 bp, Arabidopsis thaliana columbia
ggagcgtcaccggagcattgactgtggcggtgccgcctaccgccgccgcttgccgggcgaaaccctttctcatctcctcttcctttcccaagcagacaaagaaactccatctctcttcgccttctctgtctctaccatcatcacatttctcctcctctttcaaaaccgcagctacctccatcgagcaacagtcttctgttaacaagggagagagcaccaagtaccatttcctggtagcaaacgctaaattcatgcttgacgaagaggagcacttccaggagcaattgtttgaacgtctccgttacttcggtgagcgtgaattagtgcaagacttctggcttgtcattgagcctaaattccttgacaatttccccaaaattactcaaagacttcgtcgtcctgct

SEQ ID NO: 155594 - DNA, 408 bp, Arabidopsis thaliana columbia
ctctttctcagaaatctctctctttcgcactttctgcaaatggttctcttcttcctttaagctcaatctcgccactggagtctcaatcgggaaagatctccatcttctccggaggaaaaacggatccgtaaatcgtgaatttttaaacagagaagaatcaattcaatggaggaagagaaagcttctgctgcacagagcttaatcgatgtagttaacgagattgctgcgatttctgattatcgtataacagtgaagaagctttgttataatctagcgaggagattaaagctgcttgttcctatgtttgaggaaattagagaaagtaacgaaccgatcagcgaagatacgttgaagactttgatgaatttgaaggaagctatgtgttcagcgaaggattatctcaaattt

SEQ ID NO: 155595 - DNA, 375 bp, Arabidopsis thaliana columbia
ggcaggaacctacatttgttggtgccaatctttgaaacgcttcatgggataaacttggtgcgctcccaattatcaaagctggtattttaaaaaccacatgctgttcaacttgtaagagacccttttttttttattcatgtctgttattcatcagtgttacattacttttagtcttttattattaacattattagtgcttttttgatgctttttttttttttttttattttttttttttttttttttttgattttttattctttattgattgttgggttgttttttatttttattatttttttctatatatattttttattttttttttcattttttcaatttttatattttttgtacatttgtttttatttattt

SEQ ID NO: 155596 - DNA, 410 bp, Arabidopsis thaliana columbia
catatgataaccctaggtttggagggcatcaaacactcagtgaaagagagagatcttactctgcagtaaatcagacaattcactgtggttttgtcaaaggaactggatttgatttgagcgaaaaggatagggcctatatgaagaactgtgtagtctctgtgtcttcttgcatttttggaagctctgattttctaaggagacctgcaaccaaaaagattagtgagttttcgaagcgaaatgtttgctttgtgatgtttgttgatgagcaaacgctatcgaaactggctagtgaagggcatgttcctgacaagcaaggatttgttggtttgtggaaaactgtagtagtgagcaatttgccttataatgatatgcgaaagactggcaaggttccgaaatttctgtcacaccgt

SEQ ID NO: 155597 - DNA, 412 bp, Arabidopsis thaliana columbia
cacaaccaaaaaaaagaaaacacaaaaacaaagattataatggcttcctcaaccatggctgtgtcctcccctgccttcgccggaaaggctgtgaagcctgccgcatcagatgtcctcggaagcggccgtgtgaccatgaggaagactgtcgccaagccaaagggtccatcaggcagcccatggtacggatctgaccgagtcaagtacttgggtccattctccggcgagcccccgagctaccttaccggtgagttccccggtgactacggatgggacaccgctggtctatccgccgacccagagaccttcgccaggaaccgtgagctagaagttatccacagcagatgggccatgctcggagccctaggctgcgttttccctgagctattggctaggaacggagtgaagttcg

SEQ ID NO: 155598 - DNA, 412 bp, Arabidopsis thaliana columbia
cggacgcgtgggttgaaacttgagcttcaattacaaagaatggctgcttcaagtgctgtcaccgcaaactacgtcctcaagccacctccattcgcactggatgctttggagccgcatatgagcaaacaaactctggagtttcactggggaaaacatcacagagcttacgtggacaacctcaagaaacaggttcttggaaccgagcttgaaggcaagcccttagagcacattatccacagcacttacaacaatggtgatctcctccctgctttcaacaacgctgctcaggcgtggaaccacgagttcttctgggagtcaatgaaaccaggtggtggaggaaaaccatcaggagagcttcttgctttgcttgaaagagatttcacttcttatgagaagttctatgaagagttca

SEQ ID NO: 155599 - DNA, 410 bp, Arabidopsis thaliana columbia
ttcgaattttgacaagtcttgacgaagaagaagaaacagagctgcttcaatggcttctaactcattactacgttcttcttcaaatttcttcttaggatcccatatcataatctcatctcccacccctaaaaccaccagaaaaccctctttccctttctccttcgtctcccgtgctaaataccaaatcactcgatcgtctcaagacgaaaattcgccaaatggtaaacccaattcgccattctcgtcgcaagtagccttagcagctattctactatcttcaatttcatcttcgccgctagctttagctgtagtggacgaaccagcttctccgtctgtcgttatagaatctcaagctgtgaagccatcgacgccatcgccattgttcattcagaacgagatacttaaggctc

SEQ ID NO: 155600 - DNA, 413 bp, Arabidopsis thaliana columbia
aaatcttaaacgttttactttgtgctgcactactcaacctcaatggccgcctcaacaatggctgtctcctcccctgccttcgccggtaaggccgtcaagctttcccccgcggcatctgaagtccttggaagcggccgtgtgacaatgaggaagactgttgccaagccaaagggcccatcaggcagcccatggtacggatctgaccgtgtcaagtacttgggtccattctctggcgaatcaccgagctaccttaccggagagttccccggagactacggatgggacaccgccggactttcagctgaccccgagacattcgcaaggaaccgtgaactagaagttatccacagcaggtgggccatgctcggagccctaggctgcgtcttccctgagcttttggctagaaacggagt

SEQ ID NO: 155601 - DNA, 408 bp, Arabidopsis thaliana columbia
gttccgattgataacggagattctatgaagatcgcagaagaagaatcacaaagaacactgtacgcatatgttactggaacttcaattgttgcaatcaagtacaaagatggggttttgatggcttctgatatgggaggttcatatggatcaaccttaagatacaagaacatcgagagagtgaaggctattggtaagcattctcttcttggtgccagcggagaaatcagcgactttcaggagattctccgttatcttgatgagctcaccctgaatgataacatgtgggatgatggtaactctttgggaccaaaagagattcacaactatctgacccgtgtgatgtacaaccgtcgcaacaagtttaaccctctgtggaacactctcgtccttggaggcgtcaaaaatggg

SEQ ID NO: 155602 - DNA, 397 bp, Arabidopsis thaliana columbia
gatgaatagggaaaagttgatgaagatggctaacactgtccgcactggcggaaaggggacagtaagaagaaagaagaaggctgttcacaagaccactacaaccgatgacaagaggctccagagcactcttaagagagttggagtcaattccattcccgccattgaagaagttaacatttttaaggatgatgtagtcattcagttcattaaccctaaagttcaagcttcaattgctgctaacacatgggttgtgagtggtacaccacagacgaaaaaattgcaagacattcttcctcagattatcagccaacttggaccagataacttggacaacctgaagaagctagcagagcaattccagaaacaagctccaagtgcaagtgatgtcccagcaaca

SEQ ID NO: 155603 - DNA, 408 bp, Arabidopsis thaliana columbia
gtcgtaaaatgcggcaaatccggccggagattgaagttagcgaagctggtctcagcggctggattgtcacagatcgaaccagacatcaacgaagacccgattggtcaattcgagactaatagcattgaaatggaagatttcaagtatggatattacgatggagctcatacttactatgaaggagaagttcaaaagggaacattttggggagcaattgctgatgacattgctgctgtggatcaaactaatgggtttcaaggtttgatctcttgtatgtttcttcctgctatagctcttgggatgtattttgatgctccgggtgagtacttgttcataggtgcagcgttattcacggtagtgttctgtataatagagatggataaacctgaccagccacacaacttcgag

SEQ ID NO: 155604 - DNA, 412 bp, Arabidopsis thaliana columbia
gctaaatttgtggggataaaatcaccaatcccatacttttggaaagattacgcgggaaagaaacgattacagtacggaatgaattttgcgtacggaggaacaggagtgttcaacactcaaactccattgcctaacatgacaactcaaatcgacatcttccagaacattctcaccaccggcgacatctactatcctcccgagcttacttcatccgtggctctcgtcagtgtcgctggcaacgactactccaatttcatcgccctaaaccgccctgcctctgaattcccagcattcataaagcaagttgtggatcaaacagaggtgaatttgagacggatccacgctttgggagtgaaaaagattgcagtaccatccctgcaaccgcttggttgtctccctcccttcacattcg

SEQ ID NO: 155605 - DNA, 323 bp, Arabidopsis thaliana columbia
attttactctccagagaaagaaaaaaaaaacctcctctgcttttgtgatcctttaaggaaaaagacgaaatggcaacggaatcgtacgaagccgccattaaaggactcaatgatcttttaagtacgaaagcggatctcggaaacgtcgccgccgcgaagatcaaagcgttgacggcggagttaaaggagttgactcaagcaatttaaaccccattggacgaattaagaccggttttacttaatttaaaactcggaaatattttgaaagtatgtctctgtgtaaaattattttgcaaactctcagactcaaaggtttttggtgt

SEQ ID NO: 155606 - DNA, 405 bp, Arabidopsis thaliana columbia
gaagagtatatgatgctttaaacgtcctcatggctatggatataatatccaaggataaaaaagaaattcaatggagaggtcttcctcggacaagcttaagcgacattgaagaattaaagaacgaacgactctcacttaggaacagaattgagaagaaaactgcatattcccaagaactggaagaacaatatgtaggccttcagaatctgatacagagaaatgagcacttatatagctcaggaaatgctcccagtggcggtgttgctcttccttttatccttgtccagactcgtcctcacgcaacagtagaagtggagatatcagaagatatgcagctcgtgcattttgatttcaacagcactccatttgagctccacgacgacaattttgtcctcaagactatga

SEQ ID NO: 155607 - DNA, 410 bp, Arabidopsis thaliana columbia
aaaacactcaacagacaaaaaaaaaaaaggtaggcgcatcagtgatggagaagattattgacgtagcttatggtgcatgagtgaaggcgggtttgacgttgttggagaagaatctgttgccggatcttgtcattaggcggctcatacgtctgcttttggccagtcgtctccgttccgtttacaaacccacggcggagatgcaactctccgatctcctccgttttgttgactctctaaagaagatgcctatagctatcaataccgagacggcaaagactcaacactatgaattaccaacagctttcttcgaacatgctcttggaagaaacatcaaatacagctgttgttactattcaaacgattcaagtagcttagaagaggcaggggaagctatgttggctctttcttgt

SEQ ID NO: 155608 - DNA, 410 bp, Arabidopsis thaliana columbia
agaagctaagacaatggcatccatggcaggaccagatcatctcttcaatttgagaaaccagtttctacttgggtgcttatcaagctgcgatcaacaacagcgagatccctaatctttcgcaggaagatatcgtcgagcgagactgtctcgtccatcgcgcttacatcgctctcggaagttaccagcttgtcatcagtgagatcgatgaagccgctgctactcctctacaggcagtgaaactccttgctatgtatctatcgagtcctgaaaacaaggaatcaaccatttcgagcttgagggaatggttggcagatccaactgtaggaaacaatgctattatcaggttgattgctggtactatattcatgcatgaggaagactataatgaggctcttgagcacactcattct

SEQ ID NO: 155609 - DNA, 413 bp, Arabidopsis thaliana columbia
ctctttccctaaacacactgattattttctctccgacgccgccatgtctctgctctcagatctcgttaacctcaacctcaccgatgccaccgggaaaatcatcgccgaatacatatggatcggtggatctggaatggatatcagaagcaaagccaggacactaccaggaccagtgactgatccatcaaagcttcccaagtggaactacgacggatccagcaccggtcaggctgctggagaagacagtgaagtcattctataccctcaggcaatattcaaggatcccttcaggaaaggcaacaacatcctggtgatgtgtgatgcttacacaccagctggtgatcctattccaaccaacaagaggcacaacgctgctaagatcttcagccaccccgacgttgccaaggaggagc

SEQ ID NO: 155610 - DNA, 393 bp, Arabidopsis thaliana columbia
gccatggcgaccacttcatcgacaaaacaagtcattgtcttcacaatttcccttctcttggttggtttccaagcagtccatgcagactattaccgtcagaggccaccggttacccctaccccttacgttcctaagccacggtacccacttccgagcccgagccccaagcctgtttatcgaccacctactacccctagtctacccgctggctcaatcgctagactattccttgatccacataacgctcttcggtccggactaggtttgcctccattgatttgggacggtaaactagcgagctacgcaacatggtgggctaaccagaggcgttacgactgctccttaacccattccaccggctcatacggtgagaacttgttctggggaagcggc

SEQ ID NO: 155611 - DNA, 389 bp, Arabidopsis thaliana columbia
tcatttggtacttttttcttagaaagctgtcctaaaagcttaaacactaaaacacatctggaataataacccaaagatcataacttttaaacctcgtacatcatcagattcattcaaactgagctttttctatgtgggcagagcaactaggggtttggtcattggatccaaccttttttgaatttttaaacggttttaggtttttggtgggtaaccctaattggcttactgatccaatggaagatcagtatccaccaccatctgatactctgttgaaatacgtgagtgagattcttatggaagagagtaatggagattataagcaatctatgttctatgattcattggctttacgaaaaactgaagaaatgttgcagcaggtcattact

SEQ ID NO: 155612 - DNA, 265 bp, Arabidopsis thaliana columbia
cctcaatctccggctttcaatgccgttctgatccagatctcgtcggttctcccgtcggtggatcatctcgccgtcgtgtccatgcctccgccgggatttcttcctcattcaccggggacgctggattatcctccaggatcttaagatttcctcctaatttcgtccgtcagctgagcattaaagcccgtagaaactgtagcaacatcggtgttgcacagatcgtggcggctaagtggtccaacaacccatcctccgcgttaccttc

SEQ ID NO: 155613 - DNA, 409 bp, Arabidopsis thaliana columbia
aaaaaaaaaaactcattaagtaaagacaaaggaagagaagaaagacgatttctcgaagaagctatggcggatcaactcactgacgaacagatctccgaattcaaggaagcttttagcctcttcgacaaagatggcgatggttgcatcacaacaaaagagctgggaacagttatgcgttcactaggacaaaacccaacagaggctgagctccaagacatgatcaacgaggttgatgcagatggaaacggcactatcgacttccccgagttcctgaacctgatggctaagaagatgaaagacactgactccgaggaagagctaaaagaagccttcagggttttcgacaaagaccagaacggtttcatctccgctgctgagctacgccatgtgatgaccaatcttggtgaga

SEQ ID NO: 155614 - DNA, 413 bp, Arabidopsis thaliana columbia
cgtttttatcttttcctccgaagaagaagataagaggttgaagaagaagaagatgccagggccagttattgaggaagtgagtgaggaggctcttatggatgccattaaagagcagatgaagctccagaaggagaacgatgttgttgttgaggatgtgaaagatggagacgaagacgatgatgatgttgatgacgacgacgatgagattgctgatggagctggtgagaatgaggcttccaagcaaagtagaagcgagaagaaaagccgaaaggcgatgctgaaactcggaatgaaacctgttactgatgttagcagagtgactatcaagagatcaaagaatgtgttgtttgtcatctcgaagccggatgtgttcaagagtccgaactctgagacctatgtgatattcggtgagg

SEQ ID NO: 155615 - DNA, 420 bp, Arabidopsis thaliana columbia
gagacccgacccaggcgcaccggttcaatcatttctcttcaacggcttccttatacttcgggatcggtgctcaccttacgcaacgcgcttcttgtatagattcgggcggcctgagctctctttatgcatctccgacatcgggaggcaccggtggttctgttttctctcatcttgctcaagctccagaggatcctattcttggggagacaggtgcatacaacaaaaatcctaacccagttaagcttaatatccgagtcgcagcttacctaacggtggagggaaaacctttggttcttaatgttgtgaggaaagctgagcagcagcttatcaatgacagaacaagaatcaaggagtatcttcccattgttggattggttgagttcaacaagttaagcgctaagctcatactaggcgctgaca

SEQ ID NO: 155616 - DNA, 411 bp, Arabidopsis thaliana columbia
gcagatgatttgctgttgtaacaagatggatgccaccacccccaaatactccaaggctaggtacgatgaaatcatcaaggaggtgtcttcatacctgaagaaggtcggatacaaccctgacaaaatcccatttgtgccaatctctggattcgagggagacaacatgattgagaggtcaaccaaccttgactggtacaagggaccaactcttcttgaggctcttgaccagatcaacgagcccaagaggccatcagacaagccccttcgtcttccacttcaggatgtctacaagattggtggtattggaacggtgccagtgggacgtgttgagactggtatgatcaagcctggtatggttgttacctttgctcccacagggttgaccactgaggttaagtctgttgagatgca

SEQ ID NO: 155617 - DNA, 407 bp, Arabidopsis thaliana columbia
gttaaagtctctttcttcttcttaactttttcttcttctttaagatcaaagaaatcgttttgggcagatttgatcttgcgttaattttctaagcaaaatatggcgggagaagatagccgtgaagctcaacgaggcgacgaatatgaggaatcgagtcctctcttgaaggtgaacgagaatgacggcaagatctgctcgaaaagagatgccaaggcggcgcctcttgtgcctcctcccgcggcggaggaatacggctggacggcggatggattgcctgtgagccatggtagcgtgattggcgagccgatcaggagaaaccagtggaattctggtctttttacctgtcttggtcgcaatgatgaattttgcagcagcgatctcgaagtttgtcttcttggaagtgtggc

SEQ ID NO: 155618 - DNA, 417 bp, Arabidopsis thaliana columbia
ctcttcatcttctaagaaagaaacaaagaaagacttcacattttaccattatttgctctgagctcagtaggagagttcaagaaacaatggcaaagatgcaattatcaatctttatcgctgtcgttgcgcttatcgtctgctctgcatctgctaaaaccgcaagccctccagctccagtgctgccaccgacaccagctccagcaccagccccggaaaatgtgaatctcaccgagcttttaagtgtagctggtccgttccacacattcctcgactaccttctctcgactggagtcattgagactttccaaaaccaagctaacaacactgaggaaggcatcacaatctttgtccctaaagatgatgctttcaaagctcagaagaatcctcctttgtcaaatctcacaaaggatcagctta

SEQ ID NO: 155619 - DNA, 448 bp, Arabidopsis thaliana columbia
gtaccggatcgccgtgtcgacccggcgtacccgtacatgcctcctactggtgtacggcagacaatgttgttcagtgctacatttcctagggagatacagagacttgcatctgattttctttcaaattacatatttctggctgttggaagagtgggttcaagtacggatttaattgtccaaagagtagagtttgttcatgattctgacaaaagaagccatctaatggaccttcttcatgcccagagggagaatggtaaccaaggaaagcaagctttgactctagtttttgtggagacaaagaagggagctgactctttggagaattggttgtgcatcaatggtttcccagcaacgaccattcatggtgataggtcacaacaggaaagagaagtggcactgagatcattcaagactgggcggacacctattttggttgcaaccgatgtgg

SEQ ID NO: 155620 - DNA, 310 bp, Arabidopsis thaliana columbia
atcatttctcttccacggcttccttatacttcaggacctctgctcaccttacgctacgcgctccttttatagccctacgcagcactggctcttctcctcgaacctccgattcattctccgtcaaggctcaatccgtcgcgctttcacaggacgatttgaagaagctcgcggcggagaaagctgtggaggcaattaaacctgggatggttctagggctcggaaccggatccaccgcagcttttgctgttgatcagatcgggaaactactctcttccggtgaactctacgatattgtcggtatcccaacgtc

SEQ ID NO: 155621 - DNA, 396 bp, Arabidopsis thaliana columbia
gctggaccgtttgggattgtatctggcacaaagtttgaattcaagaaggaaggttacaagatcactgggttccacggacgagctggtgagtatgttaatgctattggagcttatttagctccatcaggcaccacccctttgactcctgcaacacaatcccaaaagctagaaggagctggtagtgaggcaggaactttatgggatgatggtgctttcgacggtgtaaggaaagtgtctgtaggacaagcccaagatggtattggagcggtctcgtttgtgtacgacaaagcaggtcaggttgtagaaggaaaagaacatggaaaacccacattgcttggatttgaagagtttgagcttgactatccaagtgaatacatcacggtagttgatggcacc

SEQ ID NO: 155622 - DNA, 375 bp, Arabidopsis thaliana columbia
gtcctttcgcagaaaccatttggagttggagctttggacgacgacaatggccccgaagaaaggagtgaaggtagctgctaagaagaagaccgcggagaaagtttcaaaccctctattcgagaggaggcctaagcaattcggtattggtggagctttacctcctaagaaggatctctctcgctacatcaaatggcccaaatccatccgtcttcaaaggcaaaagaggatcctgaagcagaggttgaaggtccctccagctcttaaccaattcaccaagactcttgacaagaatcttgctaccagcctcttcaaggtccttctgaagtacaggccagaagacaaagctgccaagaaggagcgtcttgtaaagaaggc

SEQ ID NO: 155623 - DNA, 362 bp, Arabidopsis thaliana columbia
cgctgtctgaatcatatttcgattctgatttttcttcatggattcgtatagccaataagttttttcaatattcaaaacaaaaaccccatcaaaataatctccggaccagtttctctttcgattcagtcggaccggaaaaacaatggcgtctgtgaaccctttcgatctcttggacgatgacgcagaggatcccagccagattgttgcgtctaagccattgaaggttgtggctccggttcagactgctaagtctggtaagatgccgactaagccgcctcctccttctcaagctgtgagggaggcaaggaacgctcctggtggaggtcgtggtgctggacgtggagggagttatggtcgtggtg

SEQ ID NO: 155624 - DNA, 419 bp, Arabidopsis thaliana columbia
tttctctctcccctgaagctcccctcactcactcttctccgaggaagaacaacagagacaatggcggttcccaaagccattattctacctatcttgctactcatctgtggtgctgctctcggagctcctgcttctgaaggttatcttcgtaatggaaacttcgaagagtcaccaaagaaaaccgacatgaagaaaacagttctactaggcaaaaacgccttgcccgaatgggaaaccaccggtttcgtcgagtacatcgccggcggtcctcagccaggaggcatgtacttcccagtggctcatggagtccacgccgtgaggctcggaaacgaagctacaatctctcagaagttagaagtgaagccaggttctctctacgcactcacgtttggtgcgtcgagaacttgtgcacaagacga

SEQ ID NO: 155625 - DNA, 319 bp, Arabidopsis thaliana columbia
aaaaggaagaagaagaagaagaaaggattcgtcttccttcttccacaccctttctgacaccggatctcccctcccaccttctgggtcccgttccgtttctccatcagatcctcgattccgatccaacagttcgaattcagtttccgattctgatctgatcgaaccaatactcactgagatttgatcggcgattatggagtctatatctccggtatcgaatcagcttcttcagccgacgactactagctctaattccgatcgctctcgtcgtaagcgtaagaagaaatcatcgccatcatcgggtgagaaatctccatct

SEQ ID NO: 155626 - DNA, 399 bp, Arabidopsis thaliana columbia
ctcagctcgtgactggaacatcctgagccagctcaaaggaaccacaaccaccacgaagacgtggccaaaccggcgtcacatcggggaaagctcccaacctaaacggatactgtgagagctggagagtcaacgtggagcttaacaacataagggactttaaggtggttccacaggaatgtgtatggttcgtccaaaagtacatgacctcatctcaatacgaagatgacgtggagagagccgtctatgaagccatcctctacctcggaaaaacttggtgcgagaagaagacatgcgatggcatggatgcttggatctttgacattgatgacactcttctctcaaccattccttaccacaagagcaacggttgtttttgtggtgagcatctgaacactacca

SEQ ID NO: 155627 - DNA, 416 bp, Arabidopsis thaliana columbia
gagttaaattgagtttgtgtctcgtaacttatcctgtgagcgaaaatggtgaaagcaactaaggcggagaagaagatcgcctacgataccaagctatgtcagcttatcgatgagtacacccagatcttggtcgttgcggccgataacgtcggatcaactcagcttcagaacatcagaaagggtcttcgtggagactccgtcgtgcttatggggaagaacactatgatgaagcgttccgttaggattcactctgagaacaccggaaacactgcaatcctgaatctgcttcctctccttcagggaaacgttggtttgatctttaccaaaggtgacctcaaggaagtgagcgaggaggttgctaagtacaaggttggtgcccctgctcgtgtgggtttggaggctccaattgatgtggt

SEQ ID NO: 155628 - DNA, 418 bp, Arabidopsis thaliana columbia
tataaatttgatccatgggaacttcccgctaaagcatcgtttggagaacaagaatggtacttctggagtccacgagatcggaagtgtccaaacggagcaagaccaaacagagcggcgacttcaggttattggaaagcgaccggtacagataaaccggtacttgcttccgacggtaaccaaaaggtgggcgtgaagaaggcactagtcttctacagtggtaaaccaccaaaaggcgttaaaagtgattggatcatgcatgagtatcgtctcatcgaaaacaaaccaaacaatcgacctcctggctgtgatttcggcaacaaaaaaaactcactcagacttgatgattgggtgttatgtagaatctacaagaagaacaacgcaagtcgacatgttgataacgataaggatcatgatatga

SEQ ID NO: 155629 - DNA, 245 bp, Arabidopsis thaliana columbia
ggagaacccaaattcaaaactaaaaacacacacacattttagacaaacatatatgttatagatgcgaaaatcacagtacagacttgggtcgttccttctgctctatgccatcactgtcaacagctacatgtctaatgctctattatcagtaccattaaggtcccaattgagctgttctcgtctctagatcctcttgccagtatacaacttttgtagaattgtccatttgaagcaattattttttt

SEQ ID NO: 155630 - DNA, 417 bp, Arabidopsis thaliana columbia
gagaaaacgaaaaccctagtttcagaggcattttttgacaccgaaaatggcggaaggactcgtttgtaagggcaccatgcgtgcgacgcactgacatggtgacggcaatcgccaccccaatcgataacgcagacatcatcgtctcagcttcccgcgacaaatccatcattttgtggaaactcaccaaggacgacaaagcctacggtgtagctcagaggcgtctcactggtcactctcacttcgttgaggatgttgttctctcctccgatggacaattcgcgctttccggcagctgggacggcgagctccgtctttgggatcttgctgctggtgtctccactcgtagattcgttggacacaccaaggacgtgctcttcgtcgccttctcactcgacaaccgtcagatcgtctctgcat

SEQ ID NO: 155631 - DNA, 415 bp, Arabidopsis thaliana columbia
ggctccttcaacaaaagttctctctttacttctcttatatgtcgtcgtgtcattagcctggggtgatgagtccatcatgaacgaccatctccaacttccatcggacggcaagtggagaaccgatgaagaagtgaggtccatctacttacaatggtccgcagaacacgggaaaactaacaacaacaacaacggtatcatcaacgaccaagacaaaagattcaatattttcaaagacaacttaagattcatcgatctacacaacgaaaacaacaagaacgctacttacaagcttggtctcaccaaatttaccgatctcactaacgatgagtaccgcaagttgtacctcggggcaagaactgagcccgcccgccgcatcgctaaggccaagaatgtcaaccagaaatactcagccgct

SEQ ID NO: 155632 - DNA, 415 bp, Arabidopsis thaliana columbia
aatttagtccgctttctctcacttatccgctcggccgcttccacatcgcttggccgcagccgccgccgtccgccgtcgctatccaccaccagattttaaatccccgccggaagttcaccttcaatacccaatatctgttataagtttggtggatgaagttgctggatattgcttgagatcgtcatctgacctcaaaactcatagtcctgagtactttgctacttggcgtatttattttatctggttggccatttttgtcctgaaaagcttcaggatttaaggaaaacagagactttgtatagtagggtttgtcctacttattggagctgatggtgtaataatacatataatagcagaagactgcgtcatcaaatctattatcaatgtcagaaggtgatttggccgtcatgaaacc

SEQ ID NO: 155633 - DNA, 207 bp, Arabidopsis thaliana columbia
  unsure (1)..(207): unsure at all n locations
ggaagagctctcccgacagagaaggatgtgctatcctaagatttacaggatgaanctctggggtacgaacgaggttcgtgccaggtccaagttctggtatttcttgaggaagctcaagaaggtgaagaagagtaatggacagattctcgccatcaacgagatctattagttgaacccaacaacgatcaagaacttttttatttgttt

SEQ ID NO: 155634 - DNA, 417 bp, Arabidopsis thaliana columbia
gcggttccatcaccacaacgccggacgacaatgggtattgatctgatcgccggaggtaagagtaagaagaccaaaaggacaggtccaaagtctgatgatgtctacctcaagcttactgtcaagctttaccggtttctggtaaggagaactaatagcaagttcaatggtgtgatattgaagaggcttttcatgagcaaagtcaacaaagctcctctttctctatctaggcttgtggagttcatgactggcaaggaagataagattgccgtcttggttggaactataactgatgatttgagggtacacgagattccagccatgaaagtgactgccttgaggttcacagagagagcaagggctcgcattgagaaagctggaggtgaatgcttaacctttgaccagctcgctctcagagct

SEQ ID NO: 155635 - DNA, 319 bp, Arabidopsis thaliana columbia
atcgtacgcaaaagtttccgatatggctcgctcgtttggagcaaacagcactgttgtgcttgcgagcatcttcttcggatgtgtagtgggcgttttccactgcaaaagaagaggctacgaagttaggatcagttattgggatagatcttggtaccacttactcttgtgttggtgtttacaagaatggtcatgttgaaattattgccaatgaccaaggaaaccgtattacaccttcatgggttggttttactgactctgaaaggctcattggtgaggctgctaagaatcatgctgctgataatcctgagaggactgtctt

SEQ ID NO: 155636 - DNA, 409 bp, Arabidopsis thaliana columbia
attttgtcattcttcaaaatacgttctcgccatttgcgccattgattaattcaagtgcgttgaaggtagaggttagttctacacaaagcttgatcttttaggggttttctctagttattggagagtggtgagaattagaaactgcattatccgatctaaaatgggtgatacagagaagtgtaacagtgatatgatccagagacttcattcatctttcggcactacttcttcttccattcccaaaaatcccatttctcagctcgatttaaaccctaatttcatccgctcatcagctcctcaattctccaagcctttcagtgacagtggcaaacgaatcggtgttcctccgtcgcaccccaacttaatcccaccgacttctccgttttctcagatcccgaccacccgacaa

SEQ ID NO: 155637 - DNA, 391 bp, Arabidopsis thaliana columbia
agcgatatgcaggatcgtcaaactggaccgtacaggaagctgctgaatgtgtgaaaaaagattttggaagcattgacattcttgtgcattcccttgcaaatggcccagaggttagcaaacctcttctggagacatcaaggaaaggctatctcgctgctatctctgcttcgagttactcctttgtttccttgctgaggcattttctgccaattatgaacccaggaggtgcttcaatatctcttacttacattgcctctgaaagaatcattcctgggtatggtggaggtatgagttctgccaaagctgcactagagagtgacacacgggtgcttgcatatgaagctggaaggaaatcaaacattaggtttaacaccatctttgttggtccttt

SEQ ID NO: 155638 - DNA, 284 bp, Arabidopsis thaliana columbia
cagatctctgatgcagtcctcgatgcctgccttgaacaagaccctgacagcaaagttgcttgtgagacatgcaccaagaccaacatggtcatggtctttggtgagatcactaccaaggctactgttgactacgagaagattgtccgtgacacctgtcgcgccattggatttgtctctgatgatgttggtcttgatgctgacaaatgcaaagtcctagtcaacattgagcaacagagcccagacattgctcaaggagttcacggtcacttcaccaaatgtcctga

SEQ ID NO: 155639 - DNA, 426 bp, Arabidopsis thaliana columbia
  unsure (1)..(426): unsure at all n locations
gactgaatataaatcaccagcgacaccacctttttttataaacagtctcatctctccggaggggaataaagatgtcgtgggagtcatacttcnattaccatctcatgtgcgaggtctaaggcaaccacctcacacactccgccatcttttgccaagacggcattgtctggtctcagagcttatttttccctcagtataatcctgcatagatagcttgaattaacaaagactttgatgatgcttgatattttgccccaactcttctattccttggctgttagaattacattgtttttcatgttgtggttgttgtcctttttttttattttattattttctcttttttatatttttctattttttattttttatttttttattcttttattttttatttatttttctctttaattttttatcattttt

SEQ ID NO: 155640 - DNA, 451 bp, Arabidopsis thaliana columbia
  unsure (1)..(451): unsure at all n locations
cggaannncccgggtcggacccacgccgtccgtggtaaccgctggaggtatgcatcaccacaggtattctcttcgacaagtaccatccaggttacttcggtaaagttggtatgaggtatttccacaagctgaggaacaagttcttctgcccaatcgttaacctcgacaagctttggtcactcgtccctgaagatgtgaaggcgaaatcaaccaaggacaatgttccgttgatcgatgtgactcaacatggtttcttcaaggttttgggtaaaggtcatttgcctgagaacaagccgttcgttgtgaaggcgaagcttatttcgaagactgctgagaagaagattaaggaagctggtggtgctgttgtgcttactgcttaagttaggtgaatttatttgcttaactctgtttttgaatcttttatggagttttatcatcttttgttggcttt

SEQ ID NO: 155641 - DNA, 408 bp, Arabidopsis thaliana columbia
ctgtctgttcactggaggtgaattttgatttttttggccgatcggatttgagtttttgaatctctgattgctgagaaaatgccggcgttttacggaggaaagcttacgaccttcgaggacgatgagaaggagagcgagtatggttacgttcgtaaggtttcaggtcctgttgttgttgccgatggtatggccggtgctgctatgtatgagttagtgcgtgttggtcatgataatttgattggtgaaatcatccgtcttgaaggagattctgccaccatccaagtttacgaggaaacagctggattgacagttaatgatcccgttcttcgaacacacaagccactttctgtggagctcgggccaggaatattgggaaatatctttgatggaattcagaggcctttgaag

SEQ ID NO: 155642 - DNA, 274 bp, Arabidopsis thaliana columbia
gaagaagttaactatggcaaaggatgtggaatccgttcccggagaaggatttcagacgagtgtactatcaagatccgccgccggctccgtttattgatggagcggagctaaagaagtggtctttctacagagcagttatcgcagagttcgtagccactctcctcttcttatacatcaccgttttgacagtcatcggttacaagattcagtccgatactgatgccggtggcgtttattgcggcggagttggaatccttggtttcacttgtgcctt

SEQ ID NO: 155643 - DNA, 402 bp, Arabidopsis thaliana columbia
agaagaagaagaagcagagacaacaagaagatgaagaaacagtctcatctcgccggagaagaggaaagatgtcgtggcaatcatacgtcgatgaccatctcatgtgcgaggtcgaaggcaaccacctcacacacgccgccatcttcggccaagacggcagtgtctgggctcagagctcagctttccctcagttgaagcctgcagagatagcaggaatcaacaaagactttgaagaagccggacatcttgccccaaccgggctattccttggcggtgagaagtacatggttgtccaaggtgaggctggagccgtcatccgagggaaaaagggacctggtggagtcactattaagaagactactcaagctcttgtctttggtatctatgatgaaccgatgaccg

SEQ ID NO: 155644 - DNA, 414 bp, Arabidopsis thaliana columbia
ttcctcgccgccgcctcctactctctctttctctctaaattgctcaattctctcggccacagacgtagacaaggatggtgactaaagcagaaaaacaattcgccaaaaatttcaacatagacgatctccctgacgtccctgccggacttcctccacatctcaaagcccagcaaactcgtgtcgtctctaaaaacaacgctcctgctcatactgcgagtgccatttactcgggtacctatgtttcttctacggaagaggacgacaatgtgaagctaggaaacttctatgataacttcaaagttgatgtggttagtctcacaaagacagatatggaatttgatatgattggtattgatgcagcgtttgccaatgcattccgaaggatccttatagctgaggttccttcaatggcta

SEQ ID NO: 155645 - DNA, 410 bp, Arabidopsis thaliana columbia
caacaaatggctctcgaaacttttctaataatactcaaaaacgctatttcctccaaaccaggttctcgtcgaccacaccgatgatctcctccgatatcaaccaccacttcctccgtcggagtattatcgttcgaagtagcacgtgtcatgaccaaactcctacatctcactcactctctcaccgattccaatctcctcactcctcgagaccactctctttccttagaaggtctaaccaaaatcgtcaacggcgacgaaacattccacctcagcctcgtttgtgctgagctcgcagatagtctcgcccacgcagctaactctgtttcaagactgagcaaccgctgcaccacggccagcctccgttctttccaaccgttattccatgaatttgccgacatgggtcgtgaccc

SEQ ID NO: 155646 - DNA, 412 bp, Arabidopsis thaliana columbia
cttaagagttaaagactaatcccaacaatggcgtctctcaaagtcccaagcaatgttgctcttcccgaagatgacgccggggaactccacaaggctttttcaggatggggtaccaacgagaagctgatcatatcaatactagctcacaggaacgcagcacaacgcagcttgatccgcagcgtttatgcagctacctacaatgaggatcttctcaaagcattagacaaagagctttctagcgactttgagagagctgtgatgttgtggactcttgatccaccagagagagatgcttatttggctaaagaatccaccaagatgttcaccaagaacaattgggttcttgttgaaatcgcttgcacaaggcctgctcttgagcttatcaaggtcaagcaagcttaccaagctcgat

SEQ ID NO: 155647 - DNA, 390 bp, Arabidopsis thaliana columbia
acgagatggcgccgccggtgacggagcggtggtgcttagctttgattcttctctttggctgcttgttcgtccaatctggaacggcaatttactgcggtgctgaagattgttatgctcttctcggagtcgctcaagatgcgaacgcatcggatatcaagagatcttattataagctctctcttcaacatcatccagataagaatccggatcctgaatcgaggaaactgtttgttaaaatcgccactgcttatgagattttgaaagataatactactcgggcacaatatgattatgcaattgaacatccagaagaggtattttacaacaccgctcaatattaccgcgcgaaatatggacataaatcggatccccgggctgttcttgttggtc

SEQ ID NO: 155648 - DNA, 399 bp, Arabidopsis thaliana columbia
gctgttgaatatctgctcggaggatgctaaggctgctttcacggcggttactgtttctctgcttttccgatcggctttggccgagccaaagtctataccttcaacatctatgcttcctactctcgatgtgggtgatcgtgttatagccgagaaggtctcatactttttcaggaagccagaggtttcagacatagttatcttcaaggctcctcctattttggtggaacatggttacagttgtgctgatgttttcataaaaaggatagttgctagcgaaggtgactgggttgaagtttgtgatggaaagctcttagtaaatgacactgttcaagcagaggattttgtcttagagccaattgactatgaaatggaaccaatgtttggccctgaaggttatgt

SEQ ID NO: 155649 - DNA, 397 bp, Arabidopsis thaliana columbia
ggcatcttccaccggtctcaccgtcgccggagctctgcttgccggagattttcgatggccagctgtatcgtctctaatacccagaaagacttcttcttcattgtcatgccttagcaacagagatttatcgtctccttataattgctgttggcgactatccagaggcaaaattttgacttctctcagtaactcacggaaatttgctgtgggaaaggaagcagaagatgggtttctatcgaatgtgagcgaagatactgatgagatgttcgacgacttgttcaacaaatatgggaaggttgtttttagaagcactgatgttaagtctccaacagctgaggttgactatgatgcagagagtttagcatttgctgttgaattggctaaagttgctagtgat

SEQ ID NO: 155650 - DNA, 409 bp, Arabidopsis thaliana columbia
cggacgcgtgggttttttttcccttctcccaatctcatcttctccgaaaacctttcttcgggcaaatttctgtgaaaacatggctgacgacgagcaccactttgaggccagcgaatccggagcttccaagacctatcctcaatcagccggtaacatccgtaaaggtggtcacatcgtcatcaaaaaccgtccctgcaaggttgttgaggtttcgacttccaaaactggcaagcacggtcacgccaaatgtcactttgttgctattgatatcttcactgctaagaagcttgaagatattgttccatcttcccacaattgtgatgttccacatgtgaaccgtgttgattaccagttgattgatatcactgaggatggctttgtgagccttctcactgacagtggtggcacc

SEQ ID NO: 155651 - DNA, 403 bp, Arabidopsis thaliana columbia
gaaagaaaacagagcaattacttgaagaatccataggaagctgaagatgagaagaattccgcggatcaaatttcctcagagacattctatctcatctggttctggaccggcgccgggatctgtttccggcgttaagaaaaatgtgacggcgagttctgatgttccggcagctccgaagaacactgctgatggagggaaagcatctctccagccgaaacgtacacctgtctccgacaaagaaatcgaatctattatgttgggtggttgcatatgacatttggggagttacgaagatttgatcgaacacattggtgttcttgtcttgttcggctggtgatgtttattttgctgtttttaaatgtaaagaagtaactaataatgtagagaatatgattttataaga

SEQ ID NO: 155652 - DNA, 398 bp, Arabidopsis thaliana columbia
gcggaatcggttgtgagagagagagacggtgatcgggaaatgtcgacgaaaggcgcggcggcggcgtaccctagcgcggctcggatatctgattctccatgttatcttcagtactctgcttctctcaaatgtcttgaagaatttggatcagacaagagtaaatgccaggatcattttgatgtgtacaaggaatgcaagaagaaagagagggaagctcgactggaacgcaataagacacggtcgttgttctcgtgaatgcagatcctcgaataccaatgatgtctcagaacatcacctagctagtagtatcctgttgtttcatttgcaatggctgtgtttgtatgatctatctaagtaaacaagtggaaagtgtttgttaatgttactttttactcccc

SEQ ID NO: 155653 - DNA, 411 bp, Arabidopsis thaliana columbia
  unsure (1)..(411): unsure at all n locations
gagacttttgaggatgctgatgaacgtttgggagctgacatagtacaaaaggcattgctgtgacgagctgctcttattgctgagaacgctnnanttgaaggagaagttgttgtggaaaagattatgttcagcgattgggagaatgggtacaacgcaatgactgatacatatgagaatctgttcgaagctggagtgattgatccggctaaagtgacaagatgtgcgctacagaacgctgcttccgtagcaggaatggtactgaccactcaggccattgttgttgacaaaccgaaacccaaggctcctgctgctgctgctcctgagggtctcatggtgtaatcaaaacacaacatcttatcatcacaatggcatctttgtctttttgcacatttgtcatccccatttatctgc

SEQ ID NO: 155654 - DNA, 396 bp, Arabidopsis thaliana columbia
ggaagaagaagaagaagcagagacaacaagaagaagaagaaacagtctcatctcgccggagaaggagaaagatgtcgtggcaatcatgcgtccatgaccatctcatgtgcgaggtcgaaggcaaccacctcacacacgccgccatcttcggccaagacggcagtgtctgggctcagagctcagctttccctcagttgaagcctgcagagatagcaggaatcaacaaagactttgaagaagccggacatcttgccccaaccgggctattccttggcggtgagaagtacatggttgtccaaggtgaggctggagccgtcatccgagggaaaaagggacctggtggagtcactatcaagaagactacccaagctctagtctttggtatctatgatgaac

SEQ ID NO: 155655 - DNA, 410 bp, Arabidopsis thaliana columbia
cgattctcgagagttatcagagatgagttcggacgatgagagagacgagaaggagctgagggttacctctcctgaaggggtcaccaagtacaagagcgccgctgagatcgttaacaaggcgttacaggttgttttagctgaatgcaaaccaaaagctaagattgttgatatctgtgagaaaggagactcttttattaaagagcaaacagcaagcatgtacaagaattctaagaagaagattgagagaggtgttgcgttccctacatgcatttctgtgaacaacactgttggtcatttttcaccgcttgctagtgatgagtctgtgttggaagatggggacatggttaaaatcgatatgggatgtcatattgatggggtcattgcccttgttggtcacacacatgttcttt

SEQ ID NO: 155656 - DNA, 413 bp, Arabidopsis thaliana columbia
ccgatgaagaagttgagagcttgaaccgcaggaagccttgctcagaacataaaatgaaggagatagctggcagtgggatcttttctcgtaacgaaaaagatgatgcgtcagagccattaccagtttatcagcaagcagttaatggtataagccagatatcatttggtgaagaggaaaatctatctcctaaaaagccggctactgtacctgaagtggcgaaacagcgagagctcagtgggactatggagaatgaatcagctaataagctacagaagcagctctctgatgctaaatacaaagagatcagtggacagaacatctttgcaccaccgcctgagatcaaacctcgatctggaactaatcgtgcattggctcttaaggacaatttcaacctcggagctgaatctcaaact

SEQ ID NO: 155657 - DNA, 240 bp, Arabidopsis thaliana columbia
aacatatccatggatcaacaagaatgatctttttattggtggagaatgggatttcgtgggggggaaacgattacacatgaaggcattcatagaggcgttcacggagatcatggaaaggaagaggaattcacataggaaaggtttgagatgattttatcattgcactcaaagatgaagattccgtgaattctacatcgttttgaatggatttgtgtcgagattgttttatatattaccttt

SEQ ID NO: 155658 - DNA, 410 bp, Arabidopsis thaliana columbia
gttagatatagccacagcatatgacttaattggggtagagaccagaaccaccggcctcttgtcaagagctagggagccactaaagaaccgctctgccgtttttgctttgggtgacaggataaaaattataaaggatattgatcaacctgctttgatcccgcacatagccgaagccagctctctcaaatatccttatgaagtgctcttcaggagcctgcacaagctacttatggatacagctacttctgagtatatgttttgtgatgatttctttggtgaagagtccatattctatgaaatttttgcgggtccattttctgtcatcgatgagcacttcaatcccgttctttcaaactgttttgatgctattggcctgatgcttatgattcgcataatacaccaccaccagc

SEQ ID NO: 155659 - DNA, 417 bp, Arabidopsis thaliana columbia
gttccaataatacttcctccaccatctctcctcctctcgttagatctaagaaacagagaaaacaagagagatagaatgagaaagggagttctaaatcctgacagagatcgtcagatagtggaacatgagttgcaggaaactgggtttagtccagaaacagagaaagtcaagaacaagaattttgaagaagatgaagaggaagaagatgaatctgtggagaagatatttgagagtagagaagtaccttcttggaagaagcagttgacggtgagggcttttgtggtgagctttatgctaagcatcttgtttagtttcattgttatgaagcttaacctcacaacgggaatcatcccttcgctcaatgtctctgctggtcttttgggtttcttctttgtcaagacatggactaagatgctt

SEQ ID NO: 155660 - DNA, 405 bp, Arabidopsis thaliana columbia
aacatatccatggatcaacaagaatgatcctgatattggtggagaatgggatttcgaggaatggaaacgattacacatgaagacattcatagaggcgttcacggagatcatggaaaggaagaggaatccacaaggaaagggtagagatgatttcagcaatgtactcaaagaagaagatcccgcgaatgctccatcgtcttgaatggatttgtgtcgagtatgttctatatatcacctttgtgtctaaactccatattaaataaaaaaagctggagagtctagctaggttattgtggagactaatgacaagaatgtttttgtcatgttgtattgtaagatttgagttatatatcatgtggattgtattattgtgttatacaagagtctttaagagattttggcatt

SEQ ID NO: 155661 - DNA, 418 bp, Arabidopsis thaliana columbia
caatttttagggttttatcctccgaaagtctcattctttttcttatcctcaacaaggagaaatggcggcgactcaacttacagcgtcaccagtgactatgtcagcaaggagcttagcctcgctggatggtctcagagcttcgagtgtcaagttttcatctttgaaaccagggacccttagacagagccagttccgtcgtttggttgtcaaagctgcttctgttgttgcccctaagtatacttcaattaagccattgggagatcgagttttggtgaagatcaaggaggcagaggagaagactttaggtggtatcttacttccatccactgctcaatcaaaacctcaaggaggtgaagtcgttgccgtgggtgaaggaagaactattgggaagaacaaaattgatatcactgtccctact

SEQ ID NO: 155662 - DNA, 411 bp, Arabidopsis thaliana columbia
aaaagcttttaacctcagccgttaaatctttctccgatcatgccgaccagaaacatcgccgttggtggagtccaagaagaggtctatcaccccaacgcacttagggcggcgctcgctgagtttatctcgactttgatcttcgtcttcgccggctcaggctccggaattgctttcaacaagatcactgacaatggagcaaccactccttccggcctcgtcgccgctgccttagctcatgctttcggtctctttgtcgctgtctctgttggcgctaacatttccggtggccacgttaaccctgccgttaccttcggtgtcttactcggtggtaacatcactctccttcgtggtattctctactggattgctcagcttcttggctccgtcgccgcttgtttccttcttagcttt

SEQ ID NO: 155663 - DNA, 343 bp, Arabidopsis thaliana columbia
ggcttctcactcgtcgactctcctctcttcttctactttcgctcctttctcctctcagggggttcattattctcccaaggcgtctactctcagattctcccgtccaatcagaaataaacctaatctcgccttgcgatgttcagtctcaattgagaaagaagttcccgaaactgaacgaccctttactttccttagggattctgatgacgtcactccatcttcttcttcttcttccgtcagggctcgttttgagactatgattagggctgctcaagacagtgtttgtgatgcaattgaagctatagaaggcggtcctaagtttaaagaagatgtttggtctcga

SEQ ID NO: 155664 - DNA, 326 bp, Arabidopsis thaliana columbia
accaaatcgattcttcttcaaccatgtctttcttcacctccaaattcgccgatgagcggagtgctaacgctgcttacaggggaacacctggaaaaggtatccttgcggcagatgaatcaactggtactattgggaaacgtctcgctagcatcaacgttgagaacgttgaatccaacagacgtgctcttcgtgagcttctcttcactactcctggagctcttccttgcctcagtggtgttatcctctttgaagaaactctttaccagaagagctctgatggtacgccttttgttgatatgttgaagagtgcaggtgttattcctggt

SEQ ID NO: 155665 - DNA, 411 bp, Arabidopsis thaliana columbia
gacgacatcaacgtctgacttcgcttctcctctcacatggctctacctaaccaacaaaccggagattatcctagcttcaagctcgtcatcgttggtgatggaggcacagggaaaacgacctttgtgaagagacatcttactggggagtttgagaagaagtatgaacctactattggtgtggaggttcatcctttggatttcttcacaaactgcggaaagatccgtttttactgctgggatactgctggacaagagaaatttggtggccttagggatggatactacatccatggtcaatgtgcgataataatgtttgacgtcacagcaaggctcacatacaagaatgttccgacatggcatcgtgatctttgcagggtgtgtgaaaacattccgatttgtctgtgtggaaac

SEQ ID NO: 155666 - DNA, 419 bp, Arabidopsis thaliana columbia
caagctagaagtttcctctgcatcagagaatcaagaagttgagagtaaaaacgattcgggagatctccgaggctgcagggtcaccgaagaaaacagcaatccagctaaagaagggctacaaatcacagaggctttacaaatgcagatggaagttcagaagaaacttcatgaacaaatcgaagttcagaggcatttgcaggtgaagattgaggcacaaggaaagtatctacagtccgttttaatgaaagctcaacaaactctcgctggctactcatcttcaaatctcggcatggattttgcgaggaccgagctctctagattagcttcaatggtgaacagaggctgtccaagcacttcgttctcagagctaacgcaagtagaagaagaagaagaaggtttcttgtggtacaagaaaccag

SEQ ID NO: 155667 - DNA, 415 bp, Arabidopsis thaliana columbia
aaagcctctcgttgctagaggaatcaaacaatggtgtttgtgaagtccaccaagtcgaatgcttacttcaagaggtaccaagtgaagttcaggagaagaagagatggaaagactgactacagggcaaggatccgtcttatcaaccaagacaagaacaagtacaatactcctaagtatcgttttgttgtccggtttaccaacaaagacatagtggcacagattgtatctgcaagcattgctggtgacattgttaaagcttctgcttacgcacatgaactgcctcagtatggtctcactgttggtcttacaaactatgctgcagcttactgtactggccttcttttggctcgccgtgttttaaagatgttggaaatggatgacgagtatgagggaaacgttgaggccactggagaag

SEQ ID NO: 155668 - DNA, 412 bp, Arabidopsis thaliana columbia
cccacgcgtccggcgtgtgttggtgatatggttatggctactgttaagaaaggtaagcctgatctccgtaagaaggtgcttcctgctgtcattgttaggcagaggaagccttggcgccgaaaggacggtgtcttcatgtatttcgaagataatgctggtgtcattgtcaatcccaagggtgaaatgaaaggatctgctatcactggaccaatcggaaaggagtgtgctgatctgtggccaagaatcgcaagtgctgcgaacgccatcgtttaagcaagcttgagatctctatgttttgtgttgaacgtttagcattatctctatttgggattgttttttgtttttgtcttagacttttgttatgccttaaagctgattctagttcttataagaaccttcgtttctcgtgcca

SEQ ID NO: 155669 - DNA, 378 bp, Arabidopsis thaliana columbia
gttttctccgaaccaatccttctcttcctcggtgaatctcccgcaatcgcttcggccgcatcgctcttcgtctacggtcttatccctcaaatctttgcctacgcagcgaactttccaatacaaaaatttctccaatcacaaagcatagtagctccaagtgcttatatctcaacggctacgctctttgttcaccttcttttaagttggctcgcggtttacaagcttggtatgggacttcttggtgcgtcgcttgtgcttagcttgtcgtggtggattatagtcgtggctcagtttgtttatattgtgacgagtgagaggtgtcgtgagacgtggagaggttttagtgttcaagctttctcgggtttgtggggtttcttt

SEQ ID NO: 155670 - DNA, 418 bp, Arabidopsis thaliana columbia
ggcggcttggcttccgggaacagaaggtcattgagtggctgatgctctgtttggtgattaggggttcacaggaaagttggcgcggacgttttttaagtcggtgaagcatctaccgatgaatgttggagatcggcattacgacccattgtacccattcggtttcgggttttccacaaaaccatacaaaatgtagactcccttttagttattcggcaaggagaggacaatattaatttacaaaacgaaataacttcgatgcacaattttgtgggttctagctctcaagttaatgttgatgctttgagattgtctgtttacataactagtatgtttttaacagtgatgatatgaatcatcttttgttattttcccgttaataaatttttacttttttattatatttttatatattttatta

SEQ ID NO: 155671 - DNA, 415 bp, Arabidopsis thaliana columbia
ggaagataaggcgaggttggtgcaagagacaggtttgcagctaaaacagataaacaattgggtcatcaatcagagaaagaggaactggcatagcaatccatcttcttccactgtattgaagaacaaacgcaaaagcaatgcaggtgacaatagcggaagagagcggttcgcgtagaaacaacaaacatatgatgtgaattggggaggtggaagatgggatttgaaagcagggttttagggatttaaagttgagaattttatggaggagtttggattatacagagagaggggacagtatttgaaaggaactttttgtgctattacatagaaacgtagtttggtttatatatttaaattttataatttatattttttggtaatattttttttgtttttttttttatttttttgtttt

SEQ ID NO: 155672 - DNA, 399 bp, Arabidopsis thaliana columbia
atcaaatcgaagaaggagagaagaacagagaaaaagagttgaatcaaatatggctgggagagctacgatccctgctcgcaactctgccctcatcgcaatgatcgccgatgaggacactgttgttggatttttgatggctggagttggtaatgttgacataaggaggaagacaaattacctcatcgtggattcaaagacaactgtgagacaaattgaggatgctttcaaggaattctcagcaagggatgatatcgctatcattcttttaagccaatatatcgccaatatgatccggttcttggtggatagctacaacaagccagttcctgcaatcttggagatcccttccaaggaccatccctatgatcctgctcatgattcagttctctctcgtgtcaa

SEQ ID NO: 155673 - DNA, 409 bp, Arabidopsis thaliana columbia
aaaaggttaacctcaaaacaagtagctccttcttccattaggatggcggcaggactcgggagcgccgttacattcaaacgactccaccactctttctcctcctcctctaccgatttccgactccgcctcccgaaatccttatccggattctctccgtctcttcgatttaaacgcttttctgtctgttacgtcgtcgaagaacggagacagaattctccgattgagaacgatgagagaccggagagcacgagctccacaaacgctatagacgctgagtatctggcgttgcgtttggcggagaaattggagaggaagaaatcggagaggtccacttatctaatcgctgctatgttgtcgagctttggtatcacttctatggctgttatggctgtttactacagattctctt

SEQ ID NO: 155674 - DNA, 413 bp, Arabidopsis thaliana columbia
  unsure (1)..(413): unsure at all n locations
ctcaaatttagggttttctcttttctcgaaagtcttgcggttttctgaatcatctctatcgtgtgtgagggtttcgtttggggtctgganaaaggggtttctggaaacaaggagttcataattcgcgatcttgatctatcgatcttcatttatatataaaagcgtgaatgagattatgatggagtcgaaaggtggtaaaaagaagtccagcagtagtagttccttattttacgaagctcccctcggttacagcattgaagacgttcgtccaaacggtggaatcaagaaattcaaatcttctgtctactcaaactgctccaagaggccatcctgagtaccagcgtgcaccgatcttcataatatagttatagctttctttactttccagtttataattttcttctttcaaagct

SEQ ID NO: 155675 - DNA, 302 bp, Arabidopsis thaliana columbia
gttgttcttgagagcaagtatggatccccaataattgttaatgatggtgtcactgttgcgagggaggtcgagttggaggacgcggttgagaacattggtgcaaagcttgtaaggcaagcagctgcaaagaccaatgacttggctggtgacggtacaacaacatctgttgttcttgcacaaggttttattgctgagggtgtcaaggtggtggctgcaggtgcgaaccctgtattgatcactagggggattggagagactgcaaaggctttggttaacgagctgaaacttatgtttaaagaggt

SEQ ID NO: 155676 - DNA, 375 bp, Arabidopsis thaliana columbia
tggtttcataaccacatcaccaaacgacaatgggtattgatctcatcgacctaagtaataggcgggcgaccaaaaaggcagctgcggggactgatgatgcttacctcaagcttactgtcaagctttaccgagttatgttaaggagaactaatagcaagttcaatcacagtgatattgaacaggcttttcatgagcaaagtcaacaaagctactatatatgtatctaagcttgaggcgttcatgactgacaaggaatataatattgccgaatcggttggaactataactgaggatttgagggtacacgagattccacccatgaaagtgactgccttgaggctcacagagagagcaagggctcgcattgagaaagct

SEQ ID NO: 155677 - DNA, 415 bp, Arabidopsis thaliana columbia
ggcgaatacccaactcaaatccgatgcaatcatggacatgatgaaggaacatctttccaccgacgccgggaaagaggtcacagaggggatcggtcttgtttatcagatcaacattgctccaaagaaattagggtttgaagaggttacttacatcgttgatctgaagaaaggcgaagtcaccaaagggaaatatgaaggagggaaagtggatgctacgttctccttcaaggatgatgattttgtcaaagttgccactggaaagatgaatcctcagatggctttcattaggggtgcgatgaagatcaagggtagtctcagtgctgcgcagaaattcacccctgacatcttccctaaaccttcaaagttgtgaacaccaaaaagagtggtatgcagcaaaccctaaactcaagctcaa

SEQ ID NO: 155678 - DNA, 420 bp, Arabidopsis thaliana columbia
cggacgcgtgggacagagtaacccaaaaaacagagcaatctctaaaaaatctcaagaaacgcgcactaaaatgggttcaacgggggagacacaattaactccggtgcaagtcaccgacgacgaagctgccctcttcgccatgcaactagccagtgcttccgttcttccgatggctttaaaatccgccttagagcttgaccttcttgagattatggccaagaatggttctcccatgtctcctaccgagatcgcttctaaacttccgaccaaaaatcctgaagctccggtcatgctcgaccgtatcctccgtcttcttacgtcttactccgtcttaacctgctccaaccgtaaactttccggtgatggcgttgaacggatttacgggcttggtccggtttgcaagtatttgaccaagaacga

SEQ ID NO: 155679 - DNA, 421 bp, Arabidopsis thaliana columbia
ctctcctcaggtaactaattaatattcaaaaagatggctcaaaaagtggaagcagggggtggcgccggaggagcttcatgggatgatggtgtccacgatggcgttagaaaggtgcatgtagggcaaggccaagatggtgtgtcatctatcaacgtcgtgtatgcgaaggactctcaggatgttgaaggaggtgaacacggaaagaaaacgttacttggatttgaaacgtttgaggttgatgcagacgactacatagtagcagtgcaagtgacctacgacaacgtgtttggccaagactctgacatcatcacatctattaccttcaatacattcaagggaaaaacatctccaccctatggattggaaacgcaaaagaaagttgtactcaaggacaaaaacggtggttaacttgttggctttc

SEQ ID NO: 155680 - DNA, 396 bp, Arabidopsis thaliana columbia
gtttccttctccggcgatattcttcttcttcggctcacattgcatcgtctctcactcgatgcttcgttctttcagggacagtgcagtttcggaaacatgccaggtcagaagattgaaacgggtcatgaggacattgtccatgatgtgcagatggattactatggaaagcgaattgcaactgcatcatctgactgcaccatcaagataaccggtgtcagcaacaacggtggatcgcagcaactagccacattaaccggccaccgtggtcctgtctgggaagtcgcgtgggcacacccaaagtatggatcaatccttgcttcatgctcctatgatggtcaagtcatactctggaaagaaggcaaccagaaccaatggacccaagatcatgttttcaca

SEQ ID NO: 155681 - DNA, 402 bp, Arabidopsis thaliana columbia
gcaaaatggaacccaagcaaagagattgagtatccaggacaagtccttaggttcgaagacggcttcgatgctactagcggggggaatgtcatggtcactcctaccgacaagaagtccatcactgattacggttctcccgaagagttcctctctcaggttaattacctcctagggaaacaagcttacttcggtgagactgcctctgagggaggctttgacaacaatgcagtggcaacagcaaacattctggagtcatcatctcaggaagttggtgggaaaccctactattacttgtctgtgttgacaagaacggctgatggagacgaaggtgggaagcatcatctgatcacagcaaccgtgaatggagggaagctttacatctgcaaagcacaagctggagac

SEQ ID NO: 155682 - DNA, 412 bp, Arabidopsis thaliana columbia
gtcttggcacgtttgtttttgtcggtgatcttattgccatgtcacattcagttcattgtagcgcgcatatcaacctcgggggcggtttaacttctttggaaagtccttcccgaatatcctagaaagaagcttgacttgcacattccatgtctctcttgcactagttcttctgaacagcttacccgtgtattaccttgatggtgaatccattttagagtcaagtctccagtcttttacttggttaagcccaagaaagaagaagaaagctcttcaagtttgccttgttggtgggagtctcctctctttcctcgccttcttcagaatcttcctcctcggtttacctctgagccgccgatggtaaatgcccccggtcttgaatctcaaatctttacaagatgatggttccagaatt

SEQ ID NO: 155683 - DNA, 187 bp, Arabidopsis thaliana columbia
  unsure (1)..(187): unsure at all n locations
aagcaatatcatttccaatttataaaagttaaagccatggctgcatctttctctgtcccctgtatgataatggaagaagaagggagattcnaagcggaggttgcggaagtgcagacttggtggagctcagagaggttcaagctaacaaggcgcccttacactgcccgtgacgtgggggctctacgtg

SEQ ID NO: 155684 - DNA, 415 bp, Arabidopsis thaliana columbia
gtaaagaagaacaatggcttcctctatgctctcttccgctactatggttgcctctccggctcaggccactatggtcgctcctttcaacggacttaagtcctccgctgccttcccagccacccgcaaggctaacaacgacattacttccatcacaagcaacggcggaagagttaactgcatgcaggtgtggcctccgattggaaagaagaagtttgagactctctcttaccttcctgaccttaccgattccgaattggctaaggaagttgactaccttatccgcaacaagtggattccttgtgttgaattcgagttggagcacggatttgtgtaccgtgagcacggtaactcacccggatactatgatggacggtactggacaatgtggaagcttcccttgttcggttgcaccgac

SEQ ID NO: 155685 - DNA, 415 bp, Arabidopsis thaliana columbia
  unsure (1)..(415): unsure at all n locations
gttttatacttcatgaaagcgtgtttttcttgtctggactcccttacattttcctagaaaggactggttttctgagcaactgcgaggattcanaccaaaagtaatactcctgaagcccagggaaaatgcattgctcgactattactttaccattgctgcgtaaacttgcccctcatgatggcgtcgtatcctgtattcagattcatgggcatggaaagcagttttcctctgccgtcctggaaagtggtgtctgcccagatcttattctacttcatcattgaggattttgtatactattggggtcacaggatcttgcatactaaatggctctacaagaacgtgcacagtgtgcatcatgagtacgcgacaccgtttggtttgacatcagaatatgctcatcccgctgaaattctgt

SEQ ID NO: 155686 - DNA, 417 bp, Arabidopsis thaliana columbia
agcttctctaatttcatagctcctaacaaagcaatatcatttccaatttataaaagttaaagccatggctgcatctttctctgtcccctctatggtaagaaaacgacccataattctcctttgtattatttgattaagttgaatacaatagaattatttcaccagtaaataagactaacatggaaattgatgatcgataaaccaaatcagataatggaagaagaagggagattcgaagcggaggttgcggaagtgcagacttggtggagctcagagaggttcaagctaacaaggcgcccttacactgcccgtgacgtggtggctctacgtggccatctcaagcaaggctatgcttcgaacgagatggctaagaagctgtggagaacgctcaaaagccatcaagccaacggtacggcc

SEQ ID NO: 155687 - DNA, 311 bp, Arabidopsis thaliana columbia
gttaagcttttgatccagaaccaggatgagatgattaaagctggcaggctttctgaacccgacaggggtattggtgactggggggggaggacgattaaggatgaaggttttggttctctatggagaggaaacactgccaatgttatccgttatttccccactcaggccttgaactttgccttcaaagattacttcaaaagacttttcaactttaagaaggacagagatggttactggaagtggtttgctggtaacttggcatttggaggagcagctggtgcctttttccttttgtttgggtactcccttga

SEQ ID NO: 155688 - DNA, 446 bp, Arabidopsis thaliana columbia
  unsure (1)..(446): unsure at all n locations
ccggaccggaatgcccgacccgccccacgcgtccagcacaccattcctgtaaacacaaaaacttgtaatttccaacgaaatggcgcggttcagtcgggttgtagtcgtgactgtgagtcttgccatctctatgttccctgacacaaccactgctcaactcaaaaccaatttctacggaaactcatgtccgaatgttgaacaaatcgtgaaaaaagtcgttcaagaaaaaatcaaacagaccttcgtcaccatcccagctactctccgnctcttcttccacgattgcttcgtcaatggatgtgatgcgtcggtcatgattcaatcaacgcctaccaacaaagccgagaaggatcatccagacaatatttttttggccggagatggatttgacgttgtgatcaaagccaagaaagctcttgccgctttcccaagttgcaaaaacaaag

SEQ ID NO: 155689 - DNA, 428 bp, Arabidopsis thaliana columbia
  unsure (1)..(428): unsure at all n locations
tagcaacaaagcaccccatggaagattatttttagaagacggaggcgtctagtttgggggggaatctatagacagacgtggagatcaattcttcntctgataagtttcaccacatgttctctgggaaaccacaccatgtctccaaagcaagtccaggcaacattcattgatgtgatcttcactaaggctacttttgctcattcttctttatcgtcttccggaattacgtacatgacgggtatgcaaaggtggcgatttttattatcttttcttttcacccagataagaactatctcactttttggtcttatttttattctatcttttataattcttttcttattttctttttttttttaccatttttttctgttttttatatttttttcattttttccttcatttttttatctctttttctctttttt

SEQ ID NO: 155690 - DNA, 419 bp, Arabidopsis thaliana columbia
ataaagagagccagtcgagggtaaaactaaatgccaccattttcaatctttccacaataatggcggctactagagtgtggacgtcatctactaccttgacccaaaccaccttctgtttcctcgccaagcaagctttcactcttccggcgaagaaatcctgcggcggatttgtttgtcttttgcttattataatatctttgatgttttacttttagaaatttttttcttgcagcaccattttcttatccttatgtaatttgttttttttttttttttacttctttatatatttttataacaactcatgaaattattacaattttgattgttattattaaatatctttttaattatattatttatctttaatttttatacaattttttttattattttttttcattttatttataatattt

SEQ ID NO: 155691 - DNA, 430 bp, Arabidopsis thaliana columbia
gcccgcacctagcactggagacgtgtagacagtggcgtctgagcaacaagaccgtgaacatgatgagaaacggaaaaatgcctactgtaactatggaacaggctcagaagaattaccgcaaggctgttaacactggtcttcttaaggttctctctaagatgggcatctcgttattctctagttattgtggagcacaaatatttgaaatttatggattgggaaatgaggttgtggaattttcgttccggggtagtgcatctcaaattggtggattaactttagatgagctggctagggagacgttaactttctgggtgagggcattttctgaggatacagccaaacggctagagaacttcggtttcattcaatttaagcctggaggtgaatatcatggaaacaacccaaaaatgtctaaattacttcataa

SEQ ID NO: 155692 - DNA, 382 bp, Arabidopsis thaliana columbia
agacacgaagacacagaacaagtagccactctctcatctcaccacccctctttctctctacttgctctctatctctctctgtgtctctccactttctcttcttcttcttcttcttcttcttcttgctctagagatctctctatctccattcttttctctctctgtttctagaaagacaacagtgacattttgtctgaacgcatctatggctgctctggtgctttcacttctccttctattcttggctggacattctaatgcctcatggtgtgtgggtaaaaccaggctgagtgattcagtgcttcaagccaccctaaactattcttgggggaatgggggcacattggaatgctacctaacccaaaccatcttgtgttaaccc

SEQ ID NO: 155693 - DNA, 299 bp, Arabidopsis thaliana columbia
gcaacagttggtctgattcagtcttctttcttctggggttaccttcttacacagatagctggtggaatttgggcagacactgtaggagggaaaagggttcttggattcggtgttatttggtggtcaatcgctacaattctcactcctgtagctgctaaactcggtcttccttacttgctcgttgttcgtgctttcatgggagttggagagggtgttgcaatgcctgctatgaataatatattgtcgaagtggttttctgggcaagagagaagcttatcactctctcttttttttagtgg

SEQ ID NO: 155694 - DNA, 433 bp, Arabidopsis thaliana columbia
aggaaagctgctaaacatcgagctaaggttactgcttctagcatcaaatgctaatgtcggaggacccacgaccgcagctggaatggcgacggcaaagggatggaactcgttgatagttcccgggattctggccggaatatttgggatcgccattgcaactttcataggaattgcatttggagttaaagttcttaagttcatgtgaagatggtagtataactaaactatggacctgactctgctcagtgctcactctctctctctctctatatatatatatatatatatatatatatatagtgagtgatattgtaaaccccacaaaatttcaagtgggcttaatttgccaaagggttccttactgtgttttattttgaggctttgtaccttcgaatggaatttgttcataccacggagctcattactattcttt

SEQ ID NO: 155695 - DNA, 182 bp, Arabidopsis thaliana columbia
acgctctagagtatctgtctcctgagacaaaaagggcgggcgtccttttttaataacagatattgttgataaacaaaaaaatgcgtacgtgaaactatggaacaagctcaaaaaaattagggcgggcgttctagagaatccaagcttacatacgcttgcatgcaacgtcatagcttttttat

SEQ ID NO: 155696 - DNA, 370 bp, Arabidopsis thaliana columbia
acggaacgccgttgttaccgttccagcttacttcaacgactctcagcgtcaggctacaaaggatgctggtgtcatcgctggtttgaacgttatgcgaatcatcaacgagcctacagccgccgctattgcctacggtcttgacaaaaaggctaccagcgttggagagaagaatgttcttatcttcgatcttggggggggcacttttgatgtctctcttcttaccattgaagagggtatctttggggtgaaggcaactgctggtgacacccatcttgggggggaagattttgacaacagaatggttaaccactttgtccaagagttcaagggggagagttaggaggatatcaccgggtacccaagagctttt

SEQ ID NO: 155697 - DNA, 457 bp, Arabidopsis thaliana columbia
cggacgcgtggggtcggctaatatctcagacgagaaatcgacgccggagaaaaagcaatttagttctctttcatctaccaaaatgacatcttctctgtcacttcactcctccttcgtaccttccttcgctgatctctccgaccgaggtttgatcagtaagaactctccgaccagtgtttccatttccaaggttccaacttgggagaagaagcagatctcaaatcggaactctttcaagctgaattgcgtgatggagaaaagtgtcgatggtcaaactcattctaccgttaacaataccactgatagcttaaatactatgaatatcaaagaagaagctagcgtctctacattattggtgaacttggataataaatttgatccctttgatgcaatgagcactccgctttaccaaactgctacttttaagcagccttctgctattgaaaatggaccttat

SEQ ID NO: 155698 - DNA, 344 bp, Arabidopsis thaliana columbia
tgcagctccgagagcaatggagaaatcgaagatgagagcttaaaagatggaacatgacaaagctcaaggatcttttgaatggaaaagactatgtgctcacttatgaggataaggatggtgactggatgcttgttggagatgttccgtgggagatgtttattgatgtctgcaagaagctgaagataatgaaagggtgtgatgctattgggttagctgcagctccgagagcaatggagaaatcgaagatgagagcttaaaagatggaacatgacaaagctttttaactatacaaaatatgtgcgatcttttggtggcgttgttaaattaaaaaacatctttttctt

SEQ ID NO: 155699 - DNA, 452 bp, Arabidopsis thaliana columbia
gaaaaactgataatgaagggtcttcatctccacctcgtcctagtcaccatgacgatcgttgcctccatcgccgccgctgcaccggctgctcccggaggagctctggctgatgaatgcaaccaggattttcaaaaggtgactttgtgtttggactttgcgaccgggaaggcaacaattccgtctaagaagtgttgtgacgctgttgaagatatcaaagaaagagatccaaagtgtttgtgtttcgttatacaacaagcgaagacaggaggacaagccttgaaggatcttggtgttcaagaagacaaactcattcaactcccaacttcttgtcagctccacaacgctagcattaccaactgtccaaagcttctagggatttcacctagctcgccagacgcagccgtattcacaaacaatgccacaacaacaccggtggcaccagcaagaaagtc

SEQ ID NO: 155700 - DNA, 270 bp, Arabidopsis thaliana columbia
  unsure (1)..(270): unsure at all n locations
aacanaacgatatccttcttatttcgtcgccgtcgctactctttctcgtcggtggtatagtgtcaactttcaaggaagatggctggtggtggcctgaanagccttatatcttcagcagtgggtcgaggtgtgaccgaagcaagagcaaggattttcggacatatgcttaacccaacgggacagagatcttctcataagatattaaggaagaagcttattgtgataaagttgcataatggtattcatacgacattaagaatgaggatccca

SEQ ID NO: 155701 - DNA, 332 bp, Arabidopsis thaliana columbia
ggggggacccacgcgtccgcaaaaccggagctcagagactgatttcttatagtaaatcgcaaccatggcgggagaagctgtcactatcagggccgtaaacttcatgaccaacaggcttctcgccagaaagcaattcgttattgatgttcttcatcctggaagagccaatgtttcaaaggctgagcttaaggagaaattggcgaggatgtatgaggttaaggacccaaatgctatcttctgtttcaagttcagaactcactttggaggtgggaaatcttctggatatgggttgatctaatatactgtcgagaacgcttagaaagtttagccta

SEQ ID NO: 155702 - DNA, 353 bp, Arabidopsis thaliana columbia
acgggaataaaccagatcgtaaccggagacctatataaccttgtctgaacaagagttggtcgagtgtgacacttcatacaacgggggttgtaacggaggtcttatggactatgcttttgagttcattatcaagaatggtggaatcgatacagacaaagattatccttacaagggtgttgatggaacttgtgaccagatcaggaaaaacgcttaagttgtcactatcgattcatattaggatgttccaacttacagggaggaatcgttgaaaaaagccagtgctcatcaacccattagcattgccattgaggcttgtggtcgggcgttccaactctatgattcgggtatatttg

SEQ ID NO: 155703 - DNA, 447 bp, Arabidopsis thaliana columbia
caggtgggcagtgattataacttcgtctccgtgtctgttcaagctcccattcttgtggccttcacgcttcaggaacaaagaccagtatctctctgaaagactacttctcggaaattttcgtctccatggcacccgtgagggggattcttggcttgcaaagggcagtgtccatttggaaggaaagtaacagactgactccagctttgagatcattcagcactcaagctgcatccacttccaccactccacagcctcctccacctcctccgcctccggaaaagactcatttcggtggtctcaaggatgaagatcggatttttactaatctctatggtctgcatgacccatttctcaaaggcgcgatgaagagaggttgattgcataggaccaaagatttggtgctcaagggtactgattggattgtcaatgaaatgaagaaatctggac

SEQ ID NO: 155704 - DNA, 371 bp, Arabidopsis thaliana columbia
ctactctcactgtaatcccttagatcttcttttcaaatttcaatggcgtccggtgatgttgagtatcggtgcttcgttggaggtcgggcatgggccactgatgacagagctcttgagactgccttcgctcaatacggcgacgttattgattccaagatcattaacgatcgtgagactggaagatcaaggggattcggattcgtcaccttcaaggatgagaaagccatgaaagatgcgattgagggaatgaacggacaagatctcgatggccgtagcatcactgttaacgaggctcaatcacgagggagcggtggcggcggaagccaccctggaggtggtggctgtggataccgcaacggcggtggtggagg

SEQ ID NO: 155705 - DNA, 376 bp, Arabidopsis thaliana columbia
gaaaaacctagaaagctctagagagaaagagagagagagatggaaggtaaagaagaagatgttagagtcggagctaacaagggtccggagaggcaaccgatcggaacttcggctcagagtgacaaggactacaaagagccaccacctgcgccgttgttcgagcccggcgagctagcttcatggtccttctggagagctgggattgctgagtttatagctacgtttttgttcctgtacatcactgttttgactgttatgggtgtgaagaggtcaccgaacatgtgtgcttccgtcggaatccaaggtatcgcttgggctttcggtggtatgaacttcgctctcgtctactgcaccgctggtatcttcgggggacaca

SEQ ID NO: 155706 - DNA, 447 bp, Arabidopsis thaliana columbia
ggtacctcttgcttcttctttctctcacgcacctctttgaagattcttcttctcttaccgggttggattcgtctcttcttggggattttgagtttgattctaattttggatccagagggtttatttatgtgaatgattccgattttggggaacttgttcgtctgaaatgttttgttgaaccggttgcgtcatcggtgcgtcttttcatggtcgttaagagtttcatgattgcatcggtgttgtgagttttacgatgctgttgttgttgatgagctgattttttttttttttttttctggtgattatttgtctcctatgtgaaacattcttaagtatttttgatcagattgatttgatcacaagtttatcccgttgcaatctctctgtttcattttgtgaacgctcatgtggatcattgattttgttgatcacttgtgggagattttt

SEQ ID NO: 155707 - DNA, 348 bp, Arabidopsis thaliana columbia
tttttggtttgagaattgggcgagggagaaagatgggtaaagtggcagttgcaacgacgggagtgtgttcggtggcggtatgtgcggcgacggcgtttatagtacggaggagaatgaaaagcgcagggaaatgggcaagagtgatagagatattgaaagcctttgaagaagattgtgcaacgccaattgccaaattgagacaagtggctgatgctatgactgttgagatgcatgctggtcttgcttctgaaggtggcagcaagcttaagatgcttattagctacgttgataatcttccttctggggatgagactggttttttctatgcgttggatctaggcggaacaa

SEQ ID NO: 155708 - DNA, 435 bp, Arabidopsis thaliana columbia
  unsure (1)..(435): unsure at all n locations
aaacatcaaagacaaaaaccaaacctctttcactattacactgttcctcaaaaaaaaaaaatgtggttgttagtgtttaaactctggctatttttgtctcttcttcaaatctctgtctctgctagaaacctagcttcacaagaaccaaaccagtttcaactactcaagtaccacaaaggagctcttctctccggcaaaatctccgttaacctaatctggtacggcaaattcaaaccatctcaaagagcaatcatctccgacttcattacctcactcacacacacttctgctacgtccaaaactctccaccaaccatctgttgccacgtggtggaaaaccacagaaaaatactacaaactcgcaacacccagcaaaaactcatcacctctgtctctaactctcgggaaacanatcatcgacgagtcttgctctcta

SEQ ID NO: 155709 - DNA, 233 bp, Arabidopsis thaliana columbia
  unsure (1)..(233): unsure at all n locations
tttttggtttgagaattggacgattgagatatatgggtaaagtggcanttncagcgacggtattaaattcggtgtgtgcgtgtacaacaacnncgttaatagtaccgatgagaatgaaaagcgcattcaaatggtcatgagtgatatacatattgaaagctcttttaagaatattgtgcaacgccaattgtcaaatttaaacaaattttttgatacttttacttttcatattc

SEQ ID NO: 155710 - DNA, 352 bp, Arabidopsis thaliana columbia
  unsure (1)..(352): unsure at all n locations
gtgaagtacaagagctcatttgatgcgttctcacagatcgtgaagaaggaaggagccaggtctctgttcaagggtgcgggggcgcaacatcctgcgtgccgttgcaggtgctggtgtgcttgctggctacgacaagctgcagttaatcgtcttcggcaagaagtatggatctggaggtgcctaagtaccaccaaatcccgcagtcattaagcttcggcttttgtttttttctccattttttttgcagnttcagatttcttttataaaaaagatgttgatgaaatcattttcccataaaattagagaggagcaaggggaaatattatcttgtcgacgataatggttttgttat

SEQ ID NO: 155711 - DNA, 443 bp, Arabidopsis thaliana columbia
  unsure (1)..(443): unsure at all n locations
cacttttcgtccaagccgctaaatttgaatcacaacaacgttatcccnagctcgcgctggcgcaagcactggcagggttgtgtcaagacttggtttaaccagcctgccaggaagacaaggagacgtgttgctagacagaagaaggctgtgaagatcttccctcgtcccacctctggtcctctacgacctgttgttcatggtcagacacttaagtacaacatgaaagttagagctggaaaaggattcactcttgaagagcttaaagttgctggtatcccaaagaagttggctccaacaatcggaatttctgttgatcaccgacgcaagaaccgttctttggagggtctttagttcaatgtccaaaggttaaagacttaccaggcttaagtggtggggttccctttgccgttcccgtcaagtcaagggttggtgattttacttca

SEQ ID NO: 155712 - DNA, 418 bp, Arabidopsis thaliana columbia
ttatttgatagcccggcgattaaaaagattcctatcatcatcactcgccggctaatggccacaacgatgacacgtgtctccgtcggcgtcgtcctctttgttctcttagtctcgctggttgccgtctccgccgcgagaagcggtcctgatgatgttatcaaactcccttcgcaggcttctcgcttcttccgtcctgctgaaaacgacgacgattctaactccggtactaggtgggctgttctagtcgccggatctagcggatattggaattacaggcatcaagctgatatatgccatgcctatcaacttctgaggaaaggtggattgaaagaggagaataatggggtattcatgtatgatgatattgctaacaattacgaggatccaaggcctggaaccattatcaacagccctcatg

SEQ ID NO: 155713 - DNA, 452 bp, Arabidopsis thaliana columbia
  unsure (1)..(452): unsure at all n locations
cgctcttctattctcttctcttctcttctcttctcttctctcctcttgaacctcaatcacttaacaaaaccctcagtagaaaactgccactaagtttttagtcatcgttggttttcacaataaagcagctcacatgcaaacattctcgtttaagaggagacccaaccattcacatttnccatcaactctcttcttgttctttctctctttaactctgttcatctctggtgtgaggtctcgtgtactaagtcctgtccctctagataactcgagcttgatctctgatggtgtccatggcgcctcggattacaagtatatcactctcgaccctccaaagaacgtttccaaagcaggttgcatacatgtctacgggttccttccatgtgcagacaatatttgaggttatgtcttccaagttttttcctttggctggctcttgatcattggtgact

SEQ ID NO: 155714 - DNA, 298 bp, Arabidopsis thaliana columbia
ctctcactctgtatctcctttggatgcgtttatgttgagaggaaatgtcggatcttcagacaccgattgagaggctctaagaggaagaagactcgggttgattactctgttaagttcagaaggatcattgtcatctacattgatcttccattctcaggcacattctactttctcatttaccatggagacatgtggtcagagttcaagttcttcgagaaacgtgtgaaggaacactatcgagaatggtaagaaagtcatcatacggcttaatggttgggatgcttccaaggacgggctt

SEQ ID NO: 155715 - DNA, 413 bp, Arabidopsis thaliana columbia
ctctaatttcatagctcctaacaaagcaatatcatttccaatttataaaagttaaagccatggctgcatctttctctgtcccctctatgataatggaagaagaagggagattcgaagcggaggttgcggaagtgcagacttggtggagctcagagaggttcaagctaacaaggcgcccttacactgcccgtgacgtggtggctctacgtggccatctcaagcaaggctatgcttcgaacgagatggctaagaagctgtggagaacgctcaaaagccatcaagccaacggtacggcctctcgcaccttcggagcgttggaccctgttcaagtgaccatgatggctaaacatttggacaccatctatgtctctggttggcagtgcttcgacactcacacatccactaatgagcct

SEQ ID NO: 155716 - DNA, 425 bp, Arabidopsis thaliana columbia
gttactattgaaagtgctgaagctactaagaagtacaatgtggcgatcaagtgtgccaccatcactccagatgaaggccgtgtcacggaatttggcttgaagcagatgtggagaagtccaaatgggaccatcaggaatatcctgaatggaactgtatttagagagccaattatctgcaaaaatgttcccaagcttgtcccaggctggacaaagcccatctgcattggaaggcatgcttttggtgatcagtaccgtgccactgatgctgtaatcaagggaccaggaaaactgactatgacctttgagggaaaagatgggaaaactgaaaccgaagtctttacatttactggtgaaagtggggttgctatggcaatgtacaacactgatgagtccaatcgtgcttttgctgatgcatcgttgaacac

SEQ ID NO: 155717 - DNA, 390 bp, Arabidopsis thaliana columbia
gaacaatggcttcctctatgctctcttccgctactatgggtgcctctccggctcaggccactatggtcgctcctttgcaacggacttaaatcctccgctgccttcccagccacccgcaaggctaacaacgacattacttccatcacaagcaacggcggaagagttaactgcatgcaggtgtggcctccgattggaaagaagaagtttgagactctctcttaccttcctgaccttaccgattccgaattggctaaggaagttgactaccttatccgcaacaagtggattccttgtgttgaattcgagttggagcacggatttgtgtaccgtgagcacggtaactcacccggatactatgatggacggtactggacaatggggaagctttcc

SEQ ID NO: 155718 - DNA, 448 bp, Arabidopsis thaliana columbia
gcttgggcacactggaaaaaactgggtagacccaagtatatcgttgctccaatggttgataactctgagcttccgtttagattgctctgccagaaatacggagctcaggctgcttatactccgatgttgcattctaggatcttcaccgagactgagaagtatagaaatcaggagttcaccacctgtaaggaggacaggccattgtttgtgcagttctgtgctaatgatcctgatacgttattggaagctgcaaagagagtcgaaccttactgcgactatgttgatatcaatttagggtgtcctcagcgtatagcgaggcgaggaaattatggtgcattcttgatggataatcttcctttggtgaaatcacttgttgaaaagttagctcagaacctcaatgttcctgtctcctgtaaaatccggatcttcccgaacctggaagatacac

SEQ ID NO: 155719 - DNA, 433 bp, Arabidopsis thaliana columbia
atacaaaccccgagaaggagattctgagcataaggagaagccaatgcagcaaatagagtcacttgaaggcgatgatggtgctgataagagcacgcacagagagaaagagaaggaagccccaccagagaatatgttagcgaagactgaagcatcaatggcgaagagtagtaataagctgtcagagcccgtggaagagatgaggcatcatcagccagggagcagaatgccaggggacacagtactgaagatactgatgcagaagttaaggtcattggacttgaacctatcgattctagagagatacttagaggaactgaacctgagatacgggaacatattcaaggagatggaccgcgaagccggtgtgagagaaaaggcgaatgtggctttgagacttgacttggaaggtatgaatgaaaggcaagaggggatg

SEQ ID NO: 155720 - DNA, 377 bp, Arabidopsis thaliana columbia
gagagatccgaaatgtcggtgacatcaacggtggaggagaaccaccagaaaaatccatcaacgccggcggcggtggaggagaagaagaagaggagatgggtgttttgggatagaaggtggaggagattagattttgtgaaattctcagcttcttttactgttcattctcttgctcttttggctccgttttatttaactgcgtatgatctttgagttacgtgtttgttttacaccatcggtgttcttggtatcaccgagtcttatcatttcatcttgtcttactgtagtttcaaagtgtgtaattggcttgagtatatcttagactattgtgcccttttcgctattcagggagatccgattgtttggtttagtacaca

SEQ ID NO: 155721 - DNA, 436 bp, Arabidopsis thaliana columbia
cattttcgtagccgcaagactcctttcagattcttacttgcagctatgggtaaagagaagtttcacattaacattgtggtcattggtcatgttgattctggaaaatcgaccacaactggtcacttgatctataagcttggtggtattgacaagcgtgtcatcgagaggttcgagaaggaggctgctgagatgaacaagaggtccttcaagtacgcatgggtgttggacaaacttaaggccgagcgtgagcgtggtattaccatcgatattgctctatggaagttcgagaccaccaagtactactgcacagtcattgatgccccaagacatcgtgatttcatcaagaacatgattactggtacctcccaagctgattgtgctgttcttatcattgactccaccactggagggtttgaggcttgtatctctaaggatg

SEQ ID NO: 155722 - DNA, 446 bp, Arabidopsis thaliana columbia
ctcaaatctcacaatcttttctctccaaattctcttctctctgaatcaatccaatcatggttgaggcggcgaacaccgttggaattgcggtgaaccacatcccattgttgaaggatgagctcgatatcgtgatccccacgatccgtaacctcgatttcctggagatgtggaggccttttcttcagccttaccatctgattatcgtccaagatggagatccatcgaagaccattgctgtccctgaagggttcgattacgaactctacaacaggaacgacatcaaccgtatccttggtcctaaagcttcctgcatttccttcaaggactctgcttgtcgttgcttcggctacatggtcttcaagaagaagtacatcttcactattgatgacgattgcttcgttgctaaggatccatctggaaaagctgtgaacggctttgagcaacac

SEQ ID NO: 155723 - DNA, 310 bp, Arabidopsis thaliana columbia
ataaacttttgctctacaaaattttttattttgttacagtacgaatgccattatggatggccaaagcaattgcgttgggaaaaatgattagaatcacttctctaaacaatgctcttaagagtatgtacaatgcttataatatatttaagaagcaattcattatcaagcctttctctaaagcgaccataaatcttcttattctcattccaatacacattttcactattttgttcatagtcccttatcaccacatgtctggaaagatcaatgccaagcttaatggatctcttaacaaatcttgagtcattaa

SEQ ID NO: 155724 - DNA, 441 bp, Arabidopsis thaliana columbia
  unsure (1)..(441): unsure at all n locations
ggcttttgccattgcttctgctctcacttccacactcacattatccacgagcagagtccggaatcctacccagagaagaccacatgtagcgtccacatcatccaccggtggaagattaatgagagagcgcttggtggtggttcgtgccggcaaagaagtttctagcgtctgtgaaccacttcctccggaccgtcctttatggttccctggtagctctccacctgaatggctcgatggcagcttacctggtgatttcggtttcgatcctctcggtttagggtctgatccggacaccctcaaatggtttgcacaagctgagcttatacatagccggtgggcaatgctggccgtgaccggtatcataataccagaatgtctcgagcggttaggtttcattgaaaatttcttatggtatgacgcanggtcttgtgagtacttcgc

SEQ ID NO: 155725 - DNA, 431 bp, Arabidopsis thaliana columbia
caaaaagcttttaacctcagccgttaaatctttctccgatcatgccgaccagaaacatcgccattggtggagtccaagaagaggtctatcaccccaacgcacttagggcggcgctcgctgagtttatctcgactttgatcttcgtcttcgccggctcaggctccggaattgctttcaacaagatcactgacaatggagcaaccactccttccggcctcgtcgccgctgccttagctcatgctttcggtctctttgtcgctgtctctgttggcgctaacatttccggtggccacgttaaccctgccgttaccttcggtgtcttactcggtggtaacatcactctcctccgtggtattctctactggattgctcagcttcttggctccgtcgccgcttgtttcctccttagctttgccaccggtggcgagcca

SEQ ID NO: 155726 - DNA, 448 bp, Arabidopsis thaliana columbia
gtcttggcaatcatacgtcgatgatcaccttatgtgtgatgtcgaaggcaaccatgtcaccgccgccgcaattctcggccaagacggcagtgtctgggctcagagcgccaaatttcctcagttgaagcctcaagaaatcgatggaatcaagaaggactttgaggagcccgggtttcttgccccaaccggactatttctcggtggcgaaaaatacatggttatccaaggtgaacaaggagctgtgatccgagggaagaagggacctggaggtgtcactatcaagaagacaaaccaaagctttggtctttggcttctacgatgaaccaatgactggaggtcaatgcaacttggttgtcgaaaggctcggggattaccttatcgagtctgaactctaaaaccaaggtttcatttcaggttcttcttaactaaagagtgtcaatgcactttt

SEQ ID NO: 155727 - DNA, 255 bp, Arabidopsis thaliana columbia
  unsure (1)..(255): unsure at all n locations
tccaaatgggcgactgatggaggcagtcggtgtaaattacaaatatgcccctacgggttaattcactgatctgatgctccacggctggccgttgaccccaccgagaagtttccgagctgcaaagatgaagcggtcagaatctccggctagcatcggagataacggagtctcnaggaacaagatggagattttcgcagaaacacatgacttattcgtattgtacgatcatataggacaaggtggttttgcggagtg

SEQ ID NO: 155728 - DNA, 449 bp, Arabidopsis thaliana columbia
atggatatgagcgacaatactgcgagctctcggcgtgtctttcaaagaagtgttcctctgctatggcgcttgatggagaacaaaagaagcataagttgtctgaaataaaatccgggctggaaaatgcagaagtattgattaggaaaatggatctcgaggcaaggacccttccacctaatcttaagtccagcctccttgtcaaattaagagaattcaagtctgatctgaacaatttcaaaactgaagtgaagagaatcacatctggacagttgaacgctgctgctcgcgatgagttgctagaagctggtatggctgacacaaagacggcttcagctgatcagagagcaagattgatgatgtcaactgagcgtttgggccgaaccactgacagagtcaggacagttgtagaacaatgatggggactgaagaaatcggtgtttcaatgcttc

SEQ ID NO: 155729 - DNA, 425 bp, Arabidopsis thaliana columbia
caacgcctctcgctctctctccccaccggtttacataaagatggaaagtagcttgtatgatgagtttggtaactatgttggacctgagattgagtctgacagagatagtgatgatgaagtagaagatgaagatctccaagataagcatcttgaagaaaatggttccgatggcgaacaagggcctgggggttctaatggctggattaccactatcaatgatgttgagatggagaaccaaattgttcttcctgaggataagaagtactaccctactgctgaggaggtttatggtgaggatgatgagaccttggttatggatgaagatgagcagcctcttgagcaacccattatcaaacctgttaaagatattagatttgtggtgggggtcaaagatcacgcaacgtatgtgacaacacatgttttta

SEQ ID NO: 155730 - DNA, 435 bp, Arabidopsis thaliana columbia
caaaaaccaaacctctttcactattacacttttcctcaaaaaaaagaaaaatgtatttggtggtggttaaactctttctatttttgtctcttcttcaaatctctgtctctgctagaaacctagcttcacaagaaccaaaccagtttcaactactcaagtaccacaaaggagctcttctctccggcaaaatctccgttaacctaatctggtacggcaaattcaaaccatctcaaagagcaatcatctccgacttcattacctcactcacacacacttctcctacgtgcaaaactctccaccaaccatctgttgccacgtggtggaaaaccacagaaaaatactacaaactcgcaacacccagcaaaaactcatcacctctgtctctaactctcggggaacaaaatcatcgacgagtcttgctctctaggaaaatct

SEQ ID NO: 155731 - DNA, 389 bp, Arabidopsis thaliana columbia
gaacaacaacactaagcaaaaaagaaaagctcaagccgagagagacaatggcatcaacattcacgagctcaagcagtgttcttaccccaacaacattccttggccagactaaagcctcaagctttaacccccttcgtgatgttgtctctctcggatctcccaagtacactatgggaaatgatctttggtatggacctgacagagtgaagtacttaggacccttttccgttcaaactccgtcttacctcaccggagaattccctggcgattatggttgggacaccgccggtttatccgcagaccctgaagcctttgccaaaaacagagctcttgaggtgatccatgggagatgggcaatgttgggagcgttttggttgcataaccccctg

SEQ ID NO: 155732 - DNA, 452 bp, Arabidopsis thaliana columbia
acagctcaggggtactacaacaggatgtatcagaacaagttatatggtcagtatggtagcacagggagatctgctttgggttatggttcatctgggtatgattcaagaacaaatggaagaggatgggcggccacagacaacaaatacagaagctggggcaggggtaacagttactattacggaaatgagaacaatgtagatggtttgaatgaacttaacaggggacctagagctaagggcacaaagaaccagaagggaaatctagatgatagcttagaggttaaggagcagactggagaatcaaatgtaactgaggttggggaggcggataacacatgtgttgttcctgacagagaacagtacaataaagaagatttcccagtggattatgcaaatgccatgttctttatcatcaagtcatacagtgaagatgatgtgcacaagagcattaa

SEQ ID NO: 155733 - DNA, 418 bp, Arabidopsis thaliana columbia
aattgtttgggattcagaagtaaaagaaatcattttatctactaatagtggacaaattggtgtattagcaaaccacgcgccgattgccacagctgttgatataggtattttgaaaatacgccttgctaaccaatggttaacgatggctctgatgggcggttttgctagaataggcaataatgaaatcactattttagtaaatgatgcagagaagaatagtgacattgatccacaagaagctcagcaaactcttgaaatagcagaagctaacttgagaaaagctgaaggtaagagacagacaattgaggctaatctagctctcagacgagctcggacacgagtcgaggctctcaatacgatttgattttgtaactagctgacgtgtaaaaaaaaagaatgtataaaaaaaataggatcg

SEQ ID NO: 155734 - DNA, 447 bp, Arabidopsis thaliana columbia
ataaaagttaaagccatggctgcatctttctctgtcccctctatgataatggaagaagaagggagattcgaagcggaggttgcggaagtgcagacttggtggagctcagagaggttcaagctaacaaggcgcccttacactgcccgtgacgtggtggctctacgtggccatctcaagcaaggctatgcttcgaacgagatggctaagaagctgtggagaacgctcaaaagccatcaagccaacggtacggtctctcgcaccttcggagcgttggaccctgttcaggtgaccatgatggctaaacatttggacaccatctatgtctctggttggcagtgctcgtccactcacacatccactaatgagcctggtcctgatcttgctgattattcgtacgacaccgtttctaacacggttgaacacctcttctttcgttagcagtaccat

SEQ ID NO: 155735 - DNA, 453 bp, Arabidopsis thaliana columbia
caaaaaccctaaaaagcttaccgaatttttcttgtggtaatgcagagtcaatgtacctggacataaatggtgtgatgatcaaacagtttaacttcaaagcctctcttctcccattctcttctaatttccgacaaagctccgccaaaatccatcgtcctatcggagccaccatgaccacagtttcgactcagaacgagtctactcaaaaacccgtccaggtggcgaagagattagagaagttcaagactactattttcactcaaatgagcatattggcagttaaacatggagcgatcaatttaggccaaggctttcccaatttcgacggtcctgattttgttaaagaagctgcgatccaagctattaaagatggtaaaaaccagtatgctcgtggatacggcattcctcagctcaactctgctatagctgcgcggtttcgtgaagatacgggtc

SEQ ID NO: 155736 - DNA, 385 bp, Arabidopsis thaliana columbia
gttaattgcccaataagttgtgtgagttgtctaatctttcaaatcaaacagcccgtaaagcccataaagtcgcaaatttcgcattccaaagtttttaagaatggagaaacgttcagattcagagagtgtagagattttgggtgattgggattcacctcctccggaagaaagaatcgtaatggtttctgttcccacttcaccagaatctgattacgcgagatcgaatcaaccgaaagagatcgaatctagggtttcagacaaggaaacagcgtccgcatccggagaagtggctgcgaggagggtgttgccgccgtggatggatccgtcgtatgaatggggtggtggcaaatggaaagtagacggaagaaagaacaagaacaagaaa

SEQ ID NO: 155737 - DNA, 394 bp, Arabidopsis thaliana columbia
ctcggtgattacaacacctggtcacgcagagattttaccgattaatgcattcactactcagaagccgtacacattaaaaggctacgcttattctggaggaggtaagaaggtaacgagggttgaggtgactctagacggaggagacacgtggagtgtttgtgagcttgaccaccaggagaaaccgaacaagtacggtaaattctggtgctggtgtttctggtcacttgacgttgaggttcttgatctgctcagtgctaaagacgtcgcggttcgagcctgggacgagtctttcaatactcagcctgataaactcatctggaacctcatggggatgatgaacaattgcttggtcaagattaggaccaacgtgtgcaagcctcatagatgagagata

SEQ ID NO: 155738 - DNA, 447 bp, Arabidopsis thaliana columbia
gtgaattctcataaaatgagagggatggtgagttttgccgattgggctctctttgctggtgtactctcacagcaggtcgtgggcttcttatgcttccataaggtttgaggatgccaaaacatactacttatctcctccctctgactcacatggaactcctccatcacacacacctgcttcttctaactgtggaagttcaccttacgacccttcttctttaactccttatcacccttcaccttcatcacatacttcaacttcttccactccatcacacactccaacttcacacacttcattacacactccaactccatacaccccttcttgttactgtggaagaacacctttctacctcttcacgcctttacactctttcaattcttcgaacctaacgttattacatcctctttattgaggatattactcattcttcttcaccaaaaa

SEQ ID NO: 155739 - DNA, 302 bp, Arabidopsis thaliana columbia
  unsure (1)..(302): unsure at all n locations
gcccttgcaaaccataaccaaaccatgatcatcatcatctcttggtgacagaagaaaagagttgaggaacagagaaaatggcagcacaagcacttgagtcttcttcacttacctactgtgttcagacagatagacagatatttgactcaaaaccagttgcgtgtgtctcacannnnnnactctcctttgttgctaaagctgctgcaacttcacctgtcaagcaaggagccaacagaccattggggtttgcttcatcgcatagtatctcttacttggatggcagcttacctggggactatgga

SEQ ID NO: 155740 - DNA, 452 bp, Arabidopsis thaliana columbia
tttcgttgtacagagaagaagcaaaagagagaaacatctgacccggaatctgacctgaaaacccggaagaatcgaaaaatggggaaagatggtctgagcgacgatcaggtctcgtcgatgaaggaagccttcatgctcttcgacaccgatggcgacggcaaaatcgcaccgtcagagctcgggatcctcatgcgatctctcggcggaaacccgacccaagcccagctgaaatccataatcgcatccgagaatctctcttcaccgtttgatttcaacagattcctcgatctcatggcgaaacatctgaagacggaacctttcgatcgccagctccgtgacgcattcaaagtgctcgataaggaaggtaccgggttcgttgctgtggcggatctgaggcatattctgaccagtatcggagagaagctggagcctaatgagttcgatgagtggat

SEQ ID NO: 155741 - DNA, 392 bp, Arabidopsis thaliana columbia
attctcttaaagtttcctactttcctggaatttcgtcctcaatctctcaagtttcatcggttttgatttgggtttgatcggaaaagtcatgggtaattgttgcggaacagcaggatcattggctcaaaacgataacaaacccaaaaaaggaaggaagaagcaaaaccctttctcgattgattacggtcttcaccacggtggtggagatggaggtggaagacctcttaagcttatcgttttgaatgatccaacaggtcgtgagatcgagtctaaatacacgttggggagagagctaggtcgtggagaattcggtgttacgtatctatgtacctgataaggagacagacgacgtttttgcttgtaaatcgattttgaagaaaaagctgaggaca

SEQ ID NO: 155742 - DNA, 442 bp, Arabidopsis thaliana columbia
gagagaagtcctctcagagaaacggcagccacatcaaccaacccaaacatcgaaagagagacacttttctctctctctttctctatctccttccaatctctctagggttttcgttacaacggcgaaaagatgttcggtagaggaccctcgaagaagagcgacaacactaagttctacgagatcttaggtgttcctaagagcgcttcaccagaagatctcaagaaagcttacaaaaaagccgctatcaagaatcatcctgataagggtggagatcccgagaagtttaaggagttagcacaagcttatgaagtgcttagtgacccggagaagcgtgagatttatgaccagtatggagaggatgcactcaaggaaggaatgggtggtggaggaagtggtcatgatcccattgaaatttgctcatcctctttggggaggccccttt

SEQ ID NO: 155743 - DNA, 436 bp, Arabidopsis thaliana columbia
gagaaatggctctgtttagagatattgttcttcttgggtttctcttctgcttgagcttagtagctactgtgacttcagaggagggagcaacgttgctggagattaagaagtcattcaaagatgtgaacaatgttctttatgactggacaacttcaccttcttcggattattgtgtctggagaggtgtgtcttgtgaaaatgtcaccttcaatgttgttgctcttaatttgtcagatttgaatcttgatggagaaatctcacctgctattggagatctcaagagtctcttgtcaattgatctgcgaggtaatcgcttgtctggacaaatccctgatgagattggtgactgttcttctttgcaaaacttagacttatccttcaatgaattaagtggtgacataccgttttcgatttcgaagttgaagcaacttgagca

SEQ ID NO: 155744 - DNA, 452 bp, Arabidopsis thaliana columbia
cgccatggctgctctacaatacttggaatctctgaaaaatacgcatccagagctcggcgaatggtacaattcccttgcagatctgtatcagaaaaagctctggcatcaactcacccttaagctcgaacagttcatcgctctcgctgtctttcaggctggtgatgctttgattcagttctatcacaatttcatcactgactttgagacgaagatcaatcttctgaagcttgcgcattttgctgtggtggtctctcgacagtactctgagaaagaagctgcagttagctatcttgaaagcgtgattgagaaacttagagctactaaagagcctatgattactgaaccaatcatttatattgaaacacaaaaagctttattcaagcttgagcaaggtgatcagaacgagtgcaaaaaaatcttggacgatggaaagagctctcttgatagtatga

SEQ ID NO: 155745 - DNA, 163 bp, Arabidopsis thaliana columbia
cttgaggatccaatggtagctttgtgttgtttctctttgatgttttctggtttatgtttgtggattttgatgtttattgctgttgtgaaactttgagtttggctaccattgaataagaagaatgagaataaaatcttgagatccaaatttttgtttaagcttt

SEQ ID NO: 155746 - DNA, 415 bp, Arabidopsis thaliana columbia
aaacatccttgggcagaggaaaaagattatatgcgactcttttcctctaaaagggtctgtctttttcttcttctctcttcagatctgcatctcacggatcaatcctgtgtttgaaacaatgggtgttgcagtcgaaaactgtggtggatctccggctgatcctgctcatatcgacgagaatccttgcaagaacgcgctgctgcaccaaggaaaggcagatgacgccctcatgaattttgattcaatccttgagctaccaaataatgcccgagcggattataacagagcggtcaactctggtgcacccactaacgcagcactagagtgggctgcggctaagcatatcacactctttgtaccttgctaaataccgatcttacgctgactccaaaattaacgactagcttgatctagc

SEQ ID NO: 155747 - DNA, 455 bp, Arabidopsis thaliana columbia
  unsure (1)..(455): unsure at all n locations
ctctgtcttccttcgcttccctcttctctcaccacaatccgagagagagacagtactgtaatccaagtgagagagagagagaaatgaaaatgcagacgaagaagctctttatcaccattgtctcctttcttctctatgctccattgttcttatcttcaccagttcctgaccctgaatctgtcgttgaagaagttcacaagagcattaatgcgtcggttgcaggaagaaggaagttaggttacctctcatgtacgaccggtaacccaatcgacgactgttggcgttgtgaccctcactgggagcaacaccgtcaacgtctcgctgactgcgccattggattcggcaaaaacgccatcggtggccgtgacggtcggatctacgtggtcactgactcangaaacgacaacccagttagccccaagcccggaactttaagacacgccgtggtccaagac

SEQ ID NO: 155748 - DNA, 322 bp, Arabidopsis thaliana columbia
ccggattacgtttcacgtatcctggaatcgacggtcatccaccaccgggatcgaaaccacttattgaagatttctcaatcacgctgaattccagcgatcggtgtctcctcgtcggatctaatggcgctgggaaaacgacgattctgaagatattgggagggaaacacatggtggagccgcatatggttagggttctgggtcgctcggcggttcatgatactggattgacctcttctggtgatctctgtgatctagggggcaagtggaggcctgatgttggatttgcaagatttagtggtaccataccaatggacatttcggt

SEQ ID NO: 155749 - DNA, 381 bp, Arabidopsis thaliana columbia
attcaagcaaaattcatcaagacttgtcaatttgaaaaaatgtcgcaatcaaccgtagatgttccgccaaagggtgggtttagctgcgatctgtgtaagagaaatgatatgcttacacaaaagggtcttaaagctccgtcttttttgaagactggaacaaccattgttggtttgattttcaaggatggtgtgatactaggggcagatacccgagcaactgaggggccaattgttgctgataagaactgtgagaagattcactatatggcaccaaacatatattgctgtggtgcaggaactgcggctgatactgaagcagtcactgatatggtcagctgacagcttcgattgcatcttttccacactggaagacactttttg

SEQ ID NO: 155750 - DNA, 420 bp, Arabidopsis thaliana columbia
ctctaaatgagactgtttttggtgattatgaggttacgcacataagttatccaggaattccttcttcttcgccaaatggagatgttactggagatgctccaggaggccttccaattccgatcaatgcaacaacttttgccaacaaaagccagggaataggttttagaacgattgcaattattgcgttgtcaggttttgtcctcattctggttttggttggagctatttctataatcgtgaaatggaagaaaattgggaagtcatctaatgctgttggtccggctttggctccatcgattaacaaaaggcctggtgctggatctatgttttccagtagcgccagaagctcaagctcagattctttgatgtcttccatggctacatgtgctttattcagtaagaccttcacactcttcgagc

SEQ ID NO: 155751 - DNA, 374 bp, Arabidopsis thaliana columbia
gtctcgttctcttctctttaccgccttcatctaggtctgctaatatcaagtgaaggagctcgaaatggccacagttgcaggacagttgatctgggagatcgtgaagagaaacaactgtttcttggtgaagcaattcggtagaggtaatgccaaggttcagttcagcaaagagagcaacaacctcgtcaacatcaacttgtacaagcactctggtttggccaacaaaaagacagtgaccattcaggcggctggcaaggaccaaggtgttgttctcgttaccatcaatgactatgagacaaaacatgcctatgctttctgttaacaagtctattctcaataatgagttctcgttgtttattaatgtttttgttata

SEQ ID NO: 155752 - DNA, 331 bp, Arabidopsis thaliana columbia
ctcactctctgatggattacgaattttattttcaatactaactaaaaccattttggtccgatcaaacatggcgggcggaggtccatttcacgtcgtgcaccactataccaataccacttaggcgtacatatttcttcggtgctgatttgtgacggtataaacatagaagagcgagcccacctgggggcgtcagactaggtcactattctgatgtcgtacgcaatgacgtttattttctggtgatcaaaaactggtttgggactccgatggcctaacgaggactgtacgttgaccggaaagggactataataatgatttgtgacctgttttg

SEQ ID NO: 155753 - DNA, 434 bp, Arabidopsis thaliana columbia
gcttctcctctcgagtttgggattcgagtttaaggaattagggtttctaatctctctctctttctctcgagatttttcttcacttagttcttgattctgattaaaagttgatcttatagttccggtaacttcgttttctgggtttaattttcgattcaatcttcatctccttgatccacagccatgactgagtattgggtaagtcaagggaacaaatggtgtgaattctgtaagatatggatacagaacaatccaacaagtattagaaaccatgaccttggtaagcgtcaccgagaatgtgttgataagaagctcactgatatgcgtgagaggagtgcagccaaagacaaagagctcaagaaaaacgaaaaactgcttcaacagatcgaagctaaagcaactcgtagctatcagaaagatattgcaactgctca

SEQ ID NO: 155754 - DNA, 444 bp, Arabidopsis thaliana columbia
aaactaaagatgtatgttacaaggcgtttatcggaataccagaaaaagccatcggagctgaaactgcttccaccggaaggtccaaactccggcataatggtgattcaagacgaagaatcacaggccacttgctgctttggttcttgctatgagggtagacttaagggcttgccgtttccacaaaacgtgaagctgaatgcagcgtatactagtggaggaggagaacaccagacaacacatcttactccagttgtgttcattcctgttcttgatcagccattgtcttcaaacctttactatgttttacaaaggcgtgggaagcatactggcaaagcatctgcaagtgcaacagaagaggagagggtttcaagctgcttttgctttagctatattcctgacgctaagccacaagaagcagatccttatgacatataccaacaattc

SEQ ID NO: 155755 - DNA, 287 bp, Arabidopsis thaliana columbia
tcactactgaagcacggactagtagtcctccaatgtctcgtcattctgagccatacgggggaggacgagatgatcctaatgggaataattttgatacggcttcgactaaatcgcttaccaataatccctctgtggtggcttccaatctcatattagacctattgtcattggatgacgtaagtaacacggcagaagcagaagatgttgaagacaagaagaagcaagaccattcaaaggcagagactttcaatccttgcgaggcgtcgcctgaattgcaggcggacgaa

SEQ ID NO: 155756 - DNA, 335 bp, Arabidopsis thaliana columbia
  unsure (1)..(335): unsure at all n locations
cagatatttggctcaaaaccagttgcgtcttcctttcataagaagagttcctttgttgttaaaggggctgcaactccacctgtcaggcaagganccaacagaccattgtggtttgcttcatcgcagagtctctcttacttggatggcagcttacctggtgactatggattcgaccctcttggtctttcagacccagaaggtactggaggattcattgagccaagatggctagcatacggagagatcatcaacggactgttcgccatgttgggtgcagctggagctattgctcctgagattttaggaaaggctggtctgattccaccatagactgc

SEQ ID NO: 155757 - DNA, 437 bp, Arabidopsis thaliana columbia
gcgagttcttctctgcgtttaagccatagataacaaaccaaactaaaaaaaaaaagtttctccttttatcattccttctcttcccttgtataggtgtgatcctcttcaaggggatttctctggcgggtcatacattcgcaccgatcaaagtcggattggtctttcttaacgcaatcttgacccgattcaaaaaatttctgggtttgttagtgaatagataagaagataaatgggagctccgttagtgtgccacgggcattctcgtcccgtcgtcgatgtggcttatagtccggcgactccagatgggttctttctcattagcgccagcaaagattcgaatccgatgttgaggaatggagagactggtgactggattgggacttttgaaggacataagggagcagtttggagttgcagccttgataaaaatgctattc

SEQ ID NO: 155758 - DNA, 429 bp, Arabidopsis thaliana columbia
gagaaatcagcttcaagcttaagagagcttcgaaagcgaaagcgacgatttcttctccatcgtgagagcaaatctccagagccggtttctcttcttcttcttcctcctcgcgccgtctctgaaactccatcatcgtatcaatcaaattgcttcctcctccaaattgaaaaacaatggaattggattcggagaacaaattgttgaagacgggtttggttatagtggcgacacttgttatagccaaactcatcttctctttcttcacttctgattctaagaagaagcgtcttcctcctactcttaaagcttggcctccattggttggaagtcttatcaaattcttgaaaggacctattattatgcttagagaggaataccctaagcttggaagcgtgtttactgataatcttgttcacaaaaagattactt

SEQ ID NO: 155759 - DNA, 371 bp, Arabidopsis thaliana columbia
ctgaagcaaggactagtagtctctccaatgtcttgtcattatgagccatacggaggaggacgagatgatcctaatgggaataattttgatacggtttcgactaaatcgcttcccaataatccctctgtttctgcttccaatctcatattagacctattgtcattggatgacgtaagtaacacggcagaagcagaagatgttgaagacaagaagaagcaagacgattcaaaggcagagactttcgatccttgggaggcgttgatgttgagagatgatccgaagaagaagatagaaacgattgaggaggaaccttcaaccgctgaggaccatcagagagattcagggaattgggtgcttgcgttagaagaaac

SEQ ID NO: 155760 - DNA, 314 bp, Arabidopsis thaliana columbia
ctcattgcttcatcattaccaaatcttttttttaatcttatctctcaaatctacggtgtgctcttttctccaaaggctcggggctttcttaatcatccctatctggcttgatggtttcatttgatatctctataaacgtgtctttggaaacacggagtccataattctcgatctttatctatcgatcttcactaatatatacaagcgtgtactttattataatgcagtctaaagtgtgttaaaacaacttcatcactcgtatcttcttattttacgaatcttctcttctctttcagcatttaatacgttctttc

SEQ ID NO: 155761 - DNA, 453 bp, Arabidopsis thaliana columbia
gaaaccctaaaaaaaacacgatgatgctcaagcaagctgcgaagaaggccctagggcttacgtcacgtcaatcaacaccgtggtctgttggtatcctccgaacctaccatgagaacgtcatcgaccactacgataatccccgcaacgttgggtctttcgataagaatgatcccaacgttggtacgggactcgtaggagctcccgcttgtggtgatgtgatgaagcttcaaatcaaggtcgatgagaagactggtcaaatcgttgatgctcgctttaagacttttggttgtggttcagccatcgcttcttcatctgttgccactgaatgggtgaaaggcaaagctatggaggatgttctgaccatcaaaaacaccgaaatcgcaaagcatctttctctcccaccagtcaagctccactgcagtatgttggcggaggacgctatcaaggcagctg

SEQ ID NO: 155762 - DNA, 450 bp, Arabidopsis thaliana columbia
attcatttggcggatcctgatattcatgagcttatggagaaagagaagcaacgacaagtgagaggaattgaattgattgcttctgagaatttcgtgtgtagagctgtaatggaagctttaggtagtcatttaacgaataaatactctgaaggtatgcctggagctagatactatactgggaatcaatatattgatcagattgagaatctctgtattgagcgtgctcttactgcgtttggtcttgaatctgataaatggggtgttaatgttcagccttattcttgtacttctgctaacttcgcggtgtataccggacttttattgcccggtgaacggattatggggcttgattcgccttctggcggtcatatgagtcatggttattgtactcctggggggaagaaagattcggcttgcttcatcttttttgagagttttccttattaagtg

SEQ ID NO: 155763 - DNA, 442 bp, Arabidopsis thaliana columbia
ctctcttctcttacaatggagaattcaccgagatacagagaagcgacgaatctgattccgtcgccgtgatgtcacaacagcaacaacagttgcggtatgagcagttgcagtgaaagtaacaaaccaccaacaactgcgacccgacacgtaaccacaagatccgaatccggttacccgtacccgacaacattcgtccaagcagatacttcttccttcaaacaagtcgtccagatgctaaccggatccgccgagagacccaaacacggttcatctctcaaaccaaacccgacccatcatcaacccgacccaagatccactccttcttctttctcaatcccaccaatcaaagccgtacctaacaagaaacagtcttcttcttcagcatcaaggtttcgtctctacgagcgtcgtaattcaatgaagaatctcaaaatcaatcctt

SEQ ID NO: 155764 - DNA, 437 bp, Arabidopsis thaliana columbia
ctccggcgtcaagaaactccactttttctcaacaacccaccgtcccaaatccctgtccttcaccaaaaccgcaatccgcgccgagaaaacagattcctccgccgccgctgctgcagcccccgccacgaaagaagctcccgtgggattcacgccaccgcagctagacccaaacacaccgtctccgatcttcgctggaagcaccggtggtcttctacgtaaagcgcaagtggaagagttctacgttatcacgtggaactcaccgaaagaacagatctttgagatgccgacaggaggagcagcgatcatgagagaaggtccgaatcttctgaagctagcgaggaaagagcagtgtttagctttggggacatggcttagatccaagtacaagatcacttaccagttttacagagtgtttcctaacggggaggttcaatatc

SEQ ID NO: 155765 - DNA, 487 bp, Arabidopsis thaliana columbia
taccgattcggagtttcgacccagacccacccgtacatctaccaacgagattcttctcgaaaatttcctgcgcctctccgtgtctgtgaaatcgattcaggttaaggatgtcgagagctacatacattatcggtgcccttgcgggatctgcggtagtagcttacgtgtgtgacaaagttatttctgatgataagctttttggaggtactacaccaggaactattactaacaaggaatggggtgctgcgactgaagagagattacaagcatggccaagagttgctggtcctcccgtcgtcatgaaccctatcagtcgccagaatttcatcgtcaagtcacgtcctgaataacttttgatgccttctcgtgcatcgttctcattcgttatggattcattttcgaatatctgctcttttgtgtttgatttgaggatcggctgattgctctagctggttatagtaataaattgtgttgatgcgtaacacat

SEQ ID NO: 155766 - DNA, 406 bp, Arabidopsis thaliana columbia
gaaaatagaaaagtaggatcatggtggcgatgatcatggcttcaaggtttaaccgggaagctaagctcgcatctcaaatctgggctacacttttgggaaaccgaagctgctacacatccatggccgccacatcttcctctgctttacttcttaatccgttgacttcttcttcttcttcttctactctccgtcgtttcagatgctcgccagagatctcttctctctccttctcctccgcttctgatttctctctagcgatgaagaggcagagtcggagttttgctgatggttcggaacgagatccgtctgttgtgtgtgaggctgttaagcgcgagactggacctgatggactcaacatcgctgacaatgtgtctcagctcattgggaaaactcctatggtgtactt

SEQ ID NO: 155767 - DNA, 431 bp, Arabidopsis thaliana columbia
gatcgcttcaatctatctctggagatcatcaaagtatactgggaatcacgttaagcttcaaactcgtcaagcatatttcgagttattgcaaccctctttaactccaagcaaagttatggatattttcatcagagcagctgaatacgcagagatttcagttcgtaaatccgatgatgaatctctgcagaaactctttatgtctgtcaaaagcgagctaaatttggatcctaagaagttgaagcaagaggaagctaagttttggaaaaagcatcctgcaactatcaagacttgagctttgatacagaaacagttaactcgtgaatcatcagtcctgtctccgactctgcaacgtgatttcaggcatgtgctagaagttgcacctcgcctgcttgaagatttgattaaagtcttatataggccttaattttttt

SEQ ID NO: 155768 - DNA, 374 bp, Arabidopsis thaliana columbia
ttgcaaaccaacgtataacactaactaagagatcaatatggctggagtgatgaagttggcatgcatggtcttggcttgcatgattgtggccggtccaatcacagcgaacgcgcttatgagttgtggcaccgtcaacggcaacctggcagggtgcattgcctacttgacccgaggtgctccacttacccaagggtgctgcaacggcgttactaaccttaaaaacatggccagtacaaccccagaccgtcagcaagcttgccgttgccttcaatctggcgctaaagccgttggtcccggtcttaacactggccgtgctgctgggctttctagcgcatgcaaagtcaatattccttacaaaattagcgccagcacca

SEQ ID NO: 155769 - DNA, 429 bp, Arabidopsis thaliana columbia
cttagctttgttcctctgtcgccttggagaatctccagaagcgtatcatgtggccttcgtctcgaaactcttcgcagcctgaagctatgagacaagaaaagaagtcgatatctgtgagttttagagcagagaatctcataccaggggttgtgataggattcatcataggtatgatattggatttatcacagcaagtgacctccccagtgaaaaggagcagacttttatccagcaaggtccagaagcagagttctgtaccaggcaatggcaaggaccaagagcttaaaatggtactggtagttaggcaagacttgaagatgagaacgggcaaaattgcgtcacagtgtgcacattgctgccaccggcatgtatgcatagttgatgcatagtgaccgataccttttgcggcgatgggaggaaaatgggcag

SEQ ID NO: 155770 - DNA, 325 bp, Arabidopsis thaliana columbia
cgttctgttttttcttgcattttccccagaattccttcacattctctccttttcctctttttaattcctcaccacctcaaattcttcataaacaaatccacttctgcatggttgggagaatctgttagagaatttttgttgttgttgggttcagatttggaaaatttcctttttttcgagtttcttctgaattattcatcgtggagattctcggatcgggaagggctgcgagaggtggttttcacggcggggatagattcatcttctgtcttctcctgaggggggtagccgggctcccgtctttgcggttttttaacccttacct

SEQ ID NO: 155771 - DNA, 448 bp, Arabidopsis thaliana columbia
ttaaaacccaaatcctatcactactctaaaagaatcttcatcatggcctcagtaacctcagccaccgttgcaatcccatcgttcaccggccttaaagcctcaaccatcaaatcatccgccaccgtcagaatccaaactgctgctgttgcatcaccgaagcttacagtgaagtcatctctaaagaacttcggagtcgcggccgtagcggctgcagcttcaattgctttggccggaaacgccatggcaatagaagttctcttgggaggagggggatgggtcgttagcttttattcccaacgacttctctatagctaaaggagagaagattgtgttcaagaacaacgctggatacccacacaatgttgtcttcgatgaagacgagatcccaagtggcgtcgacgtggccaagatctcgatggacgagcaagatctactcaacggtgcggga

SEQ ID NO: 155772 - DNA, 446 bp, Arabidopsis thaliana columbia
gaagaatcaagatggctctggaaatctgtgtgaaagctgctgttggtgctcctgatcatctcggcgactgtccgttcagccaacgggctcttctcacactcgaggagaagagtcttacctacaaaatccatctgattaacctctctgacaaaccccagtggttcttggacattagtcctcaagggaaagtaccagtgcttaagatcgacgacaagtgggtgactgattccgacgtcatcgttggtatactcgaggagaagtatcctgatccaccactcaagactcctgctgaatttgcctctgttggatccaacatttttggtacttttgggacattcttgaagagcaaagactccaatgacggatctgaacatgccttgcttgttgagctagaagctttggaaaaccatcttaagagtcacgatgtgccctttatcgccggagaa

SEQ ID NO: 155773 - DNA, 421 bp, Arabidopsis thaliana columbia
atcagacatcactcatatctttagattcacattaatgcttttcaactaaatcctcttcgtgtgattctccgatgacgtccatcagttcctccgatcacccccttccggtgagcaagaaacgattaaagccattgatattacgagatttccttctcgatgatctcagctcttgctcatccaacggcttcaaatctttccctcgtctcctcaacgctgagatccaacggtcaggaatgttccaccacaatcgccgtattacctgcggattagcgtttagtcacgccgttcataaagcttcgacggcgttactcaccgccgttaaactcttgcccttcccttcctccgttaaatctcagtctcgtgatagagataacaagaaaggacttttctcaagaagcttctggaagaaacttttccgacg

SEQ ID NO: 155774 - DNA, 382 bp, Arabidopsis thaliana columbia
tgaagacggcttcttcttctcacaaacctcatctctgctaatcaaaatgtctctggttgcaaatgaggagtttcaacacattcttcgtgtgttgaatactaatgttgatggtaagcagaagattatgtttgcccttacctctatcaaaggtattggtaggcgattggctaacattgtctgcaagaaggctgatgtcgacatgaacaaaagggctggtgagttatctgctgctgagattgataacctcatgacaatcgttgcaaacccacgtcagttcaagatcccagactggttcttgaacaggcagaaggattacaaagatggcaagtattctcaagttgtctccaatgctcttgacatgaagctgagagatgatctttga

SEQ ID NO: 155775 - DNA, 450 bp, Arabidopsis thaliana columbia
gtaaaaatcctctcgagagacaagaatgagaatgacacttgttcacttgtctctctccctcttctcatgtctcctccttgggctttctccgaccttcattgcctccactcccgtctccgaacccgaactcgtagttcaagaagttaacgaaaagattaatgcgtctaggaggaatctaggcgtgctctcatgtgggaccggaaatccaattgacgactgttggagatgcgacccgaaatgggagaaaaaccgacaacggttagccgattgcgcgatcgggtttggcaaacacgcaatcggtggtcgtgacggtaaaatcttcgtggtgactgactcgagtgacaaagacgtggttaaccctaaacccggaacccttagacacgcggtgatccaagacgagccactatggatcatcttcgcgcgtgacatggtcataaaactaagaagagc

SEQ ID NO: 155776 - DNA, 447 bp, Arabidopsis thaliana columbia
tctttccatacttatcgatcacgtcacctcctttgtctctattacctaactccatccttaaaaatccaatctttcacctttcttctccgagatttcactacactgcgcaataaaaaaatggcgaatacccaactcaaatccgatgcaatcatggacatgatgaaggaacatctttccaccgacgccgggaaagaggtcacagagaagatcggtcttgtttatcagatcaacattgctccaaagaaattagggtttgaagaggttacttacatcgttgatctgaagaaaggcgaagtcaccaaagggaaatatgaaggagggaaagtggatgctacgttctccttcaaggatgatgattttgtcaaagttgccactggaaagatgaatcctcagatggctttcattaggggtgcgatgaagatcaagggtagtctcagtgctgcgcag

SEQ ID NO: 155777 - DNA, 272 bp, Arabidopsis thaliana columbia
tggcgagcaagatgagtctccgttactctctctttttgatcttcttctctctcatttcactccaaggttttgccaagaagaccggagatgtgtcggaattgcagatcggtgtcaagtttaagccaaaaacatgtgaagttcaggctcacaaaggtgatacgatcaaggtgcactatagggggaaacttactgatggaactgtattcgattcgagttttgaaaggggtgatccgtttgagttaaaattaggaagtggtcaggttataaaaggt

SEQ ID NO: 155778 - DNA, 306 bp, Arabidopsis thaliana columbia
  unsure (1)..(306): unsure at all n locations
ggcaaggagattgctgtggagggatcatgggataattggaagacaagtcggctgcagagatctgggaaggacttcactatgatgaaagtgttaccttcaggagtctatgagtacaggttcattgtggatggacagtggaggcatgcccctgagctcnctttagctagagatgatgctgggaacactttcaacattttgaatcttcatgactatgttcctgaagacattcatagcatatttgggtttgagcgctcgcaatctccagagaatagttacagcaacttgcttctcggagctgaggactac

SEQ ID NO: 155779 - DNA, 273 bp, Arabidopsis thaliana columbia
gttccaagccgtatcctatcaaaacactgcaagtctctctctctttcaagccttggcggtggttgaatcgaaagctatgtgtcagaccgttgttctcagagtggccatgacatgtgagggatgtgttggagctgtgaaaagagttcttgggaaaatggaaggcgtggagtcatttgacgttgatataaaggagcataaagtgactgttataggcaacgtgcagtcagacacagttttacagaccgtgtctaattccgtaaagaaaacgttttt

SEQ ID NO: 155780 - DNA, 356 bp, Arabidopsis thaliana columbia
atttttcagcaccgaaaatggcaaacatcggcgtagtgacgacagcgactaacaaccaggtgagcttccgtaactacgtgaatggattccctaaagaatccgacctctacattgcagcaagcaccgttgacttacgtgtacctcccggatccatggcggttctagtgaagaatctctacttatcttgcgaacctcatagccgcactcgcatggggaagcctggatcctcgtcttctgcttcatggcttatgcttcactatcgcaagccaatctttgggttgggaggggctaaagcaatagattcagggcacccaaattacaaaacaggagatttactttggggaaaagtgggtggg

SEQ ID NO: 155781 - DNA, 448 bp, Arabidopsis thaliana columbia
cttggttggtggacaaagcaggtcgtcggcttctgcttactatctcttcggttgggatgacgaggagccttgtaattgttgcagcggctttctatcttaaggaatttgtgtctcctgattcagacatgtacagttggctgagcatattgtcagtagttggagttgtggcaatggttgtctttttctcattgggaatgggaccaataccgtggctcattatgtctgagatccttcctgtgaacataaagggtttagctggaagtattgcaactctagccaattggttcttttcttggttgatcaccatgacagcaaatttgctgttagcctggagcagtggaggaactttcactctgtatggattggtttgtgcattcacagtggtgttcgtgactttatgggttcctgtgaccaatagcaaaactcttgaagaacttcaatccttgtt

SEQ ID NO: 155782 - DNA, 421 bp, Arabidopsis thaliana columbia
ctcagatctgagaatcatttcttcttcttcttcctcactttgttcatcatcttcttctccgatctaaacaacaatggcgacaccaggagcttcctcagcaagagatgaattcgtatacatggcgaaactcgccgaacaagcagagcgttacgaagaaatggttgaattcatggagaaagtcgcgaaagctgttgacaaagacgaactcaccgtcgaagaacgtaatctcctctccgtcgcttacaaaaacgtcatcggagctcgtcgtgcttcgtggagaatcatttcatcgatcgaacaaaaggaggagtctcgcggtaacgatgaccacgtttcgttgatccgtgactacagaagcaaaatcgaaacggaaacttctgatatctgtgacggaatccttaagcttctcgatacgattctc

SEQ ID NO: 155783 - DNA, 448 bp, Arabidopsis thaliana columbia
ctttctgcaatggcgagattagtgcgtgtggctagatcctcctccctctttggctttggtaacgcggttctactctacttcagccgaagctagccacgcgtcgtcgccttcgccgtttcttcacggcggcggagctagcagggttgctccgaaagatagaaatgttcagtgggtgtttttgggatgtcctggtgttggaaaaggaacttacgctagtagactatcaacccttctcggcgttcctcacatcgccaccggcgatctcgtccgtgaagagcttgcatcttctggacctctctctcaaaagctatcggagattgtaaatcagggaaaattgggttctgatgagatcattgtagacttattgtccaaaagacttgaggctggtgaagctagaggtgaatcagggtttatccttgatggcttttctcgtaccatgagacaagct

SEQ ID NO: 155784 - DNA, 347 bp, Arabidopsis thaliana columbia
ctactcgaatgcggagcagagggaagccatggttactgctgagcgacgttccgttgatggaagagttcagaaaattattgagctgaagaacaaggtttgtgctggtaatgataacagctttgttatcctaaatcaaaagggtattgatcccccgtcattggatcttcttgctagagaagggataatcgcccttagaagggcaaagaggaggaacatggaacgtttggttttggcatgtggtggagaagctgtgaactctgtcgatgacttgacccctgattgtcttggttgggctggacttggttatgagcacgtttttggagaggagaagatcacatttgttgagc

SEQ ID NO: 155785 - DNA, 436 bp, Arabidopsis thaliana columbia
gaagcaatggggagaaagaagggattaccggagttcgaagagtcggcgccggatggctttgatccggaaaatccatacaaggatccggtggcgatggttgaaatgagagagcacatcgttcgagagaaatggatccaaatcgagaaggctaagatcttgcgtgagaaggtcaaatggtgttaccgcgtcgaaggagtcaatcactatcagaaatgtcgtcatcttgttcagcagtatctcgattccactcgcggcgtcggttggggaaaggatcatcgtcctatttcgctccacggtcccaaaccggaggctgttgaagctgaataatgttgtgtgcctcattgagatgtctgaggttttgatatgggacatagaatggaatcatttcacaagctaatggctccctgatatcttccaaactctgtagatttctctt

SEQ ID NO: 155786 - DNA, 431 bp, Arabidopsis thaliana columbia
atcatatttccctttacgcaaggatcgaagagacaaactctcttccattaggttgggaagggaatgttgatctcaaactggttgtccataatgggaagctacacaaatatttgactgttacagatggcttagtgaagcgatataacaatgcgaaaaaagaatggggtttcggacaattgattcctcgatcaacattctacaacgcgaacgaaggttaccttgaccaggacactggttcttttggtgctgagatctttattgttaaaccggctcaacaacaagagaaagttacattcatatcaaaccctccaaacaatgttttcacttggaagatacttcgtttctctaccttggaagataaattctattactccgatgattttctcgttgaagaccgatactggagactaggatttaacccgaaaggggat

SEQ ID NO: 155787 - DNA, 412 bp, Arabidopsis thaliana columbia
ggaagctttaaaacgagagggagagagcaaaaatggcgacgtcgggaacgtacgtgacggaagttccgctaaaaggatcgggcgagaaatactacaagaggtggaagaacgagaaccatgtcttccctgatgctatcggccaccacatccaaaatgttaccgttcacgaaggcgaacatgactctcacgggtctatcaggagttggaactacacatgggatggaaaggaggaggtgttcaaggagagaagagagatagacgatgagaccaaaacgttgacgttaagaggacttgagggtcacgtgatggagcagctcaaagtgtacgacgtcgtctaccaattcattcccaaatctgaggatacctgcattggcaaaaatactttaatatgggagaagcgcaactattattc

SEQ ID NO: 155788 - DNA, 449 bp, Arabidopsis thaliana columbia
ctttcggattcaaatctcagatctagctcatccatggcgttgctcgtcgagaagacctggagtggccgtgaatacaaggggaaagacatgtctcaagccgatttcggtcgtctcgaactcgagctcgccgaagttgagatgcctggactcatggcttgtcgtaccgaattcggaccttctcagccattcaaaggcgctagaatcaccggatctcttcacatgaccatccaaaccgccgtactcatcgaaaccctaactgctctcggtgctgaagtcagatggtgttcctgcaacatcttttccactcaagaccacgccgccgcagccatcgctcgtgactccgccgctgttttcgcctggaaaggtgagactcttcaggagtactggtggtgtaccgagcgtgctctagattggggtccaggtggtggtcctgatctgattgttgatga

SEQ ID NO: 155789 - DNA, 448 bp, Arabidopsis thaliana columbia
gttagacacggatctgtgagatctagaagaagaagaagaagaagaagctaagacaatggcatcgagtggcaggaccagatcatctcgtcaatttgagaaaccatttctacttgggtgcttatcaagctgcgatcaacaacagcgagatccctaatctttcgcaggaagatatcgtcgagcgagactgtctcgtccatcgcgcttacatcgctctcggaagttaccagcttgtcatcagtgagatcgatgaagccgctgctactcctctacaggcagtgaaactccttgctatgtatctatcgagtcctgaaaacaaggaatcaaccatttcgagcttgagggaatggttggcagatccaactgtaggaaacaatgctattatcaggttgattgctggtactatattcatgcatgaggaagactataatgaggctctgaagcacactca

SEQ ID NO: 155790 - DNA, 423 bp, Arabidopsis thaliana columbia
gtgacaatagaatcaaacgatcatcgagattttgttagattgcagaatctttcagaagctgacattagatctctggtttctagtgcgctagtcactagaaataatacatctaatgcttctgaatctaacttgggaccagtttcaggtctaagcgctggagttaacaaacaggaagacgcatctcagaaccaagagatcaccttggagaagacaacaagctggggcacagcataggagcaacacgtccctctaaagaaccttctgagtgaagcaagatcaccaaggctacaacaacaagcaaaggatcacgagagtaacaacataccgagagtgagttcgatactgggacaggagacatcccctgaagatggtcactggccagagaaaagagaagtgagcgaggaatggaattcaccagcaaag

SEQ ID NO: 155791 - DNA, 442 bp, Arabidopsis thaliana columbia
gaaacaacaagaagtagtaatggcttcctctatgctctcctccgccgctgtggttgcatgcccggctcaggccaccgtggtcgctccattcaccggcttgaagtcatccgctgcattcccggtcacccgcaagaccaacaaggacatcacttccatcgcaagcaacgggggaagagttagctgcatgaaggtgtggccaccaattggaaagaagaagtttgagactctatcttacctccctgaccttagtgacgtcgaattggctaaggaagttgactaccttctccgcaacaagtggattccttgtgttgaattcgagttagagcacggatttgtgtaccgtgagcacggaaacactcccggatactacgatggacggtactggacaatgtggaagctttcattgttcggatgcaccgactccgctcaagtgttgaaggaa

SEQ ID NO: 155792 - DNA, 451 bp, Arabidopsis thaliana columbia
agaacctgcattggaaactcttaaagaatctgttgatacatcagctgagttaggagctggtactgatgaagtcgatgaacgttcaagtatgttggaccatattgaacttgagttcgaagcacatatcaatgaacttaaagaagctggatctgatggtatcaacaaagttgaggaatctaaagatgatgaagaagctgcaaggagacataaaatgttggaagccattgaacgtgaatttgaagctgctcatgctggatttgaacaactaaagactgatgattccgcccaaggattagatgatgaacaatctgcaaagagacaaagcatgttggacgagattgaacgtgattttgaagctgctacaaaaggtcttgagcaactaaaggctgatgatttaactggaatcaacgatgaagaacacgctgcaaagagacaaaagatgcttgaagag

SEQ ID NO: 155793 - DNA, 439 bp, Arabidopsis thaliana columbia
cggacgcgtgggttgaaacttgagcttcaattacaaagaatggctgcttcaagtgctgtgaccggaaactacgttctcaaggcacctccattcgcactggatgctttggagccgcttatgagcaaacaaactctcgagttcactgtggaaaacatcacagagcttacgtggacaaccttcagaaacatgttctttggaaccaacctggaaggaagcccttagtgcacattatccacagcacttacaccaatggtgatctcctccctgctttcaacaacgctgttcaggcgtggaaccacgagttcttctgggagtcaatgaaaccaggtggtggaggaaaaccatcaggagagcttcttgctttgcttgaaagaaatttcacttcttatgagaagttctatgaagagttcaatgctgctgcagccactcagtttggagc

SEQ ID NO: 155794 - DNA, 282 bp, Arabidopsis thaliana columbia
atttttctcttcttcctcttctgaaaaattagggtttgagttcttcttctaatcgagcagaaagatgggtggaggagacgcacagaaatcagccatggctcgtgccaaaaacttggagaaggctaaggctgcaggaaaaggtagccaattggaagctaacaagaaagctatgtcgattcagtgcaaggtttgtatgcaaacattcatctgcacgacatcggaagtgaaatgcagggagcacgcgggggcgaagcatccgaaagccgatgttgtcgcttgttt

SEQ ID NO: 155795 - DNA, 441 bp, Arabidopsis thaliana columbia
gaaagattgttacaaggccttgggagtagttcacaagctatggtctgaagttcctggaaagctgaaagattacatttctcatcccaagttcaacgggtaccaatctttgcatactgtagtgatgggtgatggaactattccgctggaagttcaaatacggacaaaggagatgcatttgcaagctgaatttgggtttgcagctcactggagatacaaggaaggtgactgcaaacactcatcgtttgtgcttcaaatggttgaatgggcaagatgggttgtgacctggcattttgaaaccatgagcaaagacggatcgtcgatctgctcttctgagcccttgtgcagtttcccgtctcacgcagaagactgtccgttttcatataagcctagtggtaaccaagaaggaccagtctatgtgattgtaatcgaaaatgagaagat

SEQ ID NO: 155796 - DNA, 420 bp, Arabidopsis thaliana columbia
gttcggcttcaagcagttactggtttgaaacatatattggctgcatctcatgctatcttccagactcataatgatggaactggaaaggcaaatgaaattcttgatacagttatgaataattatatcaaaactatgactgatgatgacgacaaggaggttgttgctcaggcttgcatcagtgttgccgatatcatgaaggattatggttacccagccattcaaaagtatttatcaccccttgttgatgcgacattgctactgctgacggaaaaagcagcttgccagcagttagaagatgagagtgatattgatgatgatgatactggacatgatgaggtccttatggtatgcagtttctgaccttccttcccgtctttgtatagtgtatggtgtctcaatttgaacctgtctttgcccaat

SEQ ID NO: 155797 - DNA, 247 bp, Arabidopsis thaliana columbia
  unsure (1)..(247): unsure at all n locations
gcaataagtactagtgtccgggttcaaaaaaggagagcgtgggtctctntttaattaacagaaaacaaaatggcaactgatcaaattacaaaatcatggagaagcgtattcaaaggcctgcggaggttgtggctcgtcatctatggccatatcataggtggttgctgcttgttgggcttgttctgcatcttttgcacccactgcaagtgatgctgttgtagccttttcatctgtcatagacagtact

SEQ ID NO: 155798 - DNA, 447 bp, Arabidopsis thaliana columbia
ccgaatttgtggcaaaatcagattctctgggaagacgatattagcaatcatggagcgtctaacggctcctcctcgtttgatgatgggctctgatcttgatcatactatggttgatcatcatgatcctgagaatctatctctgctgagattcaattcgttgtgggaacacgcttatcgccatgactctcttcttgtgttttctacgggaagatcaccgacattgtataaagaactcagaaaggagaaacctttgttgacccctgatattaccattatgtctgtaggaactgagattacttatggtaactctatggttcctgatcatggttgggttgaggctctgaacaataaatgggatttgggtattgtcaaacaagaagctagcaacttccctgagttaaagcttcatgcagaaactgagcagaggccacacaaggttagctttta

SEQ ID NO: 155799 - DNA, 447 bp, Arabidopsis thaliana columbia
attctctctgcgtttcttagatcgagcgagcgaatcgagagatcatggaaggtggagctgctctgtacaatcctcgaactgtcgaagaagttttcaaggatttcaaaggtcgtcgtactgccattgtcaaagctctcaccaccgatgttcaagagttttaccaacaatgtgaccctgagaaggagaatctttgcttgtatgggttaccgaatgaagaatgggaagtgaatttaccagctgaagaagtgcctcctgagttaccagagccagctcttggtattaactttgctagggatgggctctctgaaaaggaatggctttcgcttgttgctattcacagtgacgcttggttactgtctgtctcgttttactttggctcaaggttttctttccacaaggaagagaggaagcgtttgttcaacatgatcaatgatgttcctactatat

SEQ ID NO: 155800 - DNA, 337 bp, Arabidopsis thaliana columbia
gccgctaagaattgatccggcgagaatggctagcatcaatgagtacgaggaaggtccaggggagagggagagtgggtacggcccggatattgtgccgtattctgtgaaatcgttcgtgtcacacatgttcagactcataatggacaagaacgttgtcgagatccaccagatgtgtgagacattgttccagagcatatcgtatcgtatgttcatggtctcgccgtttccaattttgttattcttttgtttttttcttatacttcttcctttttttctttattcttgttctttctagagatttattcatctttttgatttttctatttatattttttta

SEQ ID NO: 155801 - DNA, 418 bp, Arabidopsis thaliana columbia
ctatctttctgttattttcttcttcttcttcctctttttattttctaaatttatgtgggggtgtttaatcctttttatcgatctcaagcgacctctttgtcaaacctgacaatcccaaatgatgaagaattctgacgtcgctatttattaaaaccaaaacaatctcttcttatatactttagtttcagacaggaacccaacaaaaaaatcaaaactcttttctcttttctttttttttgcaaaaaaaataaaaatggggaattgtcaagcggccgaagcagcgacggttttgattcatcacccggcggagaacaaggtggagaggatttactggtcagtgacagcgagtgacatcttgaaatccaatcctggtcattacgatgcgttggttgtgtcttctcattctaatattatcttt

SEQ ID NO: 155802 - DNA, 419 bp, Arabidopsis thaliana columbia
tacaaacagatctttttgaaattggattcatctaagaagcagactctgttttcatggctggttacaataccaaactctgtggggcctctgttttcttgctcttagggcttctcttggcttttgacttgaagggtatagaagcagaaagtcttaccaaacagaaactggactcgaagatacttcaggatgagattgtgaagaaagtcaacgaaaacccaaacgctggatggaaagctgctataaatgatcgattttcaaacgccactgttgcagagtttaagcgtcttctcggtttaaaccaacaccaaagaagcatttcttaggtgttcctattgtgagccatgatccatcttttaagctacctaaagcttttgatgctagaactgctttgccacagtgcactagtattggaaacatct

SEQ ID NO: 155803 - DNA, 448 bp, Arabidopsis thaliana columbia
gttacttctaccacaagcgaatcagcggctacatcagagagcatagagagcttaaagcagacactaaggaagctacgcggtctaagcgcacgtgatctcgtaaaccacccgaatttcgatgcgattatagcagccggtacacgttacgaggtactcagctcagcttctattggttacatctctttgctagccaaatacaaaaccgtcattaaagaaggactcgaggcttctcagagagtccagattgctcaaacccgagccaaactgctaaaagaaaccgcaatggagaagcagagaaccgtagactcggttttcgcagcagcaaagaccactgctcaaagaggagacgcgttgcacatcagaatcgtagcgatcaagaaactgttggcaaagctagaagcagagaaaggtgacgttgattcaaagttcacctctttaacgacgagtc

SEQ ID NO: 155804 - DNA, 214 bp, Arabidopsis thaliana columbia
tttcccggtccgcccaacccttccgaaggacctttcaaaaccgaattgaattttataactgtttccgaagttgctgaacctttgtcgggccttaacaaagggaagggggggaaatcccagaaaattgttaatattcgcttaggaaatgaatcaacaagccgtggtcagtctttgaaggttgattgggaaaaagctgttgtccagttttttgaag

SEQ ID NO: 155805 - DNA, 356 bp, Arabidopsis thaliana columbia
attttcaccttctaaggttcttcgtcgttcttattgatctgtgaagatgtattcgggtcagaacaagatccacaaggataagggtgttgcaccaacagagtttgaagagcaagttactcaggctttgtttgacttggagaacaccaaccaggagttgaaaagcgagttgaaagatctctacattaaccaagctgttcagatggatatttttggcaaccgcaaagctgttgtgatctacgttccattcaagctgaggatagctttccgcatgattcatcttcttctggtcagtgtgcttgtgatgaatttcattgtcaattgttgtgtttttttgtttttaccatttattaattatt

SEQ ID NO: 155806 - DNA, 285 bp, Arabidopsis thaliana columbia
agcaataacaacagaggcgaatcatatctttaatcagccggaaaaaacggataaagcgatcgagagacatcacgttcttcttgagcatatacgaccttcttcttcttcttcgcacaattacgaggactgctctatctgcttctgcttgcttggctggggacagagctgcatatcagaggacctctctctatggtgatgatgctgtcattgccgggagacataagactccactctgcatgagcatacgcggcgtgttcacggatacatatgccgatgattcgctcg

SEQ ID NO: 155807 - DNA, 452 bp, Arabidopsis thaliana columbia
cttacagtttgttaacatacacaaaacatttttctctatattataccattcactcactatctcgctcccagaaaaagatggcgagactgagccagcagatcatgatgactatagaggacgtgaccacaattaacatagctaatagtgaccccattgaaccacgtcacttcatgtgtgaggactctttgattgataatggcaacattaatgagcttgagacattagctagagctaattacttgacttacggtattgactttgctggccgtgcaaccagccggatcaacaaccacttaaccactagcgatgttatcgcttttgcctttcgaggaactacattacaccttacgcttttgcaagaggacaagacattctccgaggagttaactatgctttcgctgctgcctgaatccgagacgaaaccggctgacaattgggaggtcgcatagcat

SEQ ID NO: 155808 - DNA, 413 bp, Arabidopsis thaliana columbia
ctccttcattttttctctctctctcaaactcgtctctaaaactcgtccgtcgattaattcctcggtagtctcaggtttgagagagtcattgcctgaggcatctaataatgggaacaccagagacatctcgggagccttgccctgatcgtatactcgatgatatcggtggtgcttttggtatgggagctgttggaggatctgcctttcatttcattaaagggacttacaattctcctaaaggtagtcgctttgttggaggaacacaatcggtgagcatgaacgcacctcgtactggatgcagttttgctgtttggggagtgttattctcgacatttgacttgaccatggtgttcctaaagcaaaaggaggttcccttgaactctattattgctggtgctggaactgggagggtt

SEQ ID NO: 155809 - DNA, 375 bp, Arabidopsis thaliana columbia
gtttacattgttgaatgcttgaaagtatctttgttttaaccacactctctcttccctgttactcaccattttgtgtgtggggcctccgaaacccatttcgattaccacaatctgagctcataaatctggtttgggtttaggacaaatcagagaagaagatgatgtttggtttagagaatacgatgactttggagcatgaaaatctgaaggagaatcatgagactctgttgaaagattatgagtgtcttcaggagaggtttaagcatgctgaggaagcttatgtggttattatagtgcatcatgtgtacatagcttaggtgcttgtagtgagttacattactctttgctgaggaaagtattgtatgagagaagggt

SEQ ID NO: 155810 - DNA, 323 bp, Arabidopsis thaliana columbia
gcagaatctaaaaacacttatcgtttcgtctcttctctgatccattgttgaagatgtcgaagagaaaaactaaggaggcaaaggttgagactgtgactcttggaccttctgttcgtgaaggagagcaagtttttggtgttgttcacatctttgcatctttcaatgacactttcattcatgtgactgatctctccgttagagaaactctcgtccgcatcaccggtgatatgtatgtgaatgctgaccttgatgagtccttttctaatgctgctatgcatgctgcttcagatgttgttcatttatgcaatgggctttgtcattac

SEQ ID NO: 155811 - DNA, 452 bp, Arabidopsis thaliana columbia
  unsure (1)..(452): unsure at all n locations
tctgaatggaccaaaagcttgcgacatctttgtgtcttaatcttctctctcctcttctggaaaaactgaacctttaattcgttcttcacatctcctttagctttctgaagctgctatcttcaagctcaaaaccaacccctagaaataaaatgacggcgacacaaatgctgcttcatcttcttcttcttccacttctcttccttcacttcagcaaccaagtcatggcagaaatcaccgacgagttagcgacattgatggaggttaaaacagagcttgacccagaagacatacacttagcttcatggagtgttaatggagatctgtgtaaagactttgaaggtgttggttgtgacttnaaaggacgagttttctaacatatctctacaagggaaaggcttatctggtaaaatctctccgaacattggaaagcttaaacattttgacgggtttgt

SEQ ID NO: 155812 - DNA, 443 bp, Arabidopsis thaliana columbia
tgctttctctggaaaggacccaaccaaggttgacaggagtggggcttacatcgttaggcgggcagctaagagcattggaggcagtgggctagcgaggcgggtcattgtgcaagtctcgtatgccattggtgtccctgagccattgtctgtgttcgtggacagttatggaacaggaaagataccagacaaggagattcttgagattgtgaaggagagttttgatttcaggccaggtatgatctccattaacttggatctgaagagaggaggtaatggtaggttcttgaagactgctgcctatggtcactttggaagggacgatgctgatttcacctgggaggtagtcaagccactcaagtctaacaaggtccaagcttgaaacctgtcagcctctgtttcacttctgtccagaatcagtcttgttctctgtattttaggctctt

SEQ ID NO: 155813 - DNA, 440 bp, Arabidopsis thaliana columbia
cgatttctctcctctgctctccaattccatcttcccatggcgatttcggctccagccgctggttcttcctcctctagaatgctctgttcctactcctctccttctccttctctctgtcccgccatttccacctctggtaaactcaaaaccctaactctctcttcctccttcctcccttcttactcattaaccaccacctccgcttctcaatccactcgtcgctccttcaccgtccgcgccgctcgtggaaagttcgagaggaagaagcctcatgtcaacatcggaaccatcggtcatgttgaccatgggaaaactactttaaccgcagctcgtggtatcacaatcaacactgctactgttgagtacgagactgagaatcgtcactacgctcacgttgattgtcctggtcacgctgattacgttaagaatatgattaccgg

SEQ ID NO: 155814 - DNA, 444 bp, Arabidopsis thaliana columbia
caaagcaatatcatttccaatttataaaagttaaagccatggctgcatctttctctgtcccctctatgataatggaagaagaagggagattcgaagcggaggttgcggaagtgcagacttggtggagctcagagaggttcaagctaacaaggcgcccttacactgcccgtgacgtggtggctctacgtggccatctcaagcaaggctatgcttcgaacgagatggctaagaagctgtggagaacgctcaaaagccatcaagccaacggtacggcctctcgcaccttcggagcgttggaccctgttcaggtgaccatgatggctaaacatttggacaccatctatgtctctggttggcagtgctcgtccactcacacatccactaatgagcctggtcctgatcttgctgattatccgtacgacaccgttcctaacaaggttgaac

SEQ ID NO: 155815 - DNA, 445 bp, Arabidopsis thaliana columbia
  unsure (1)..(445): unsure at all n locations
gtccacatctttctcctttggtggcaaacacaactacagatagagagaaacgatggcgtggaaggcgcttatgagctgtggcatagccgccntttacccttcgcttctctcttcttccaagtctaaattcgtatccgccggagttccactcccaaacgccgggaatgttggtcgtatcagaatggctgctcactggatgcctggcgagccacgaccagcttaccttgacggttctgctcctggtgactttgggtttgacccacttggacttggagaagttccagcgaaccttgagagatacaaagagtcagagctcatccactgtagatgggctatgctcgctgttcctggggatttggtaccagaagcattaggatatggaaactgggttaaggctcatgaatgggcagcactacccaggggtcaagccacttacttgggaaac

SEQ ID NO: 155816 - DNA, 443 bp, Arabidopsis thaliana columbia
cttctctgctcaccaacgtctctttcctcctccttcgctctctcttctgctcttttaggggctcgttcgttctccatgccagggacaaggagattcatggttctgtgtagttcccagaaggaaagtcagatgacagtgtcagtaactggagcaactggattcatagggagacgattggttcagagacttcgtgctgataaccacgctatccgggtcttaacacgctctaaatccaaagctgagcaaatatttcctgccaaggacttcccaggtattgtgattgcagaagaatcggagtggaagaactgtgtacaaggctctactgctgttgtgaacttggcaggactgcctattagtacaaggtggtctcccgagatcaagaaagagattaagggcagccggatccgtgtcaccttcaaagttgttgacttaatcaataattc

SEQ ID NO: 155817 - DNA, 445 bp, Arabidopsis thaliana columbia
  unsure (1)..(445): unsure at all n locations
aaactctcatctctctctctttgcctcttcctcatttgcattatctatctcccccaacaggctggcgcatgcggctcttgcggcgcgactnaagggcggaaagcactcccctaaagcccctaagctaccagttcctccggtgaccgtccctaagctaccagttcctccggtgaccgtccctaagctaccagtccctccggtgaccgtccctaagctacccgttcctcctgtgaccatccctaagctacccgttccaccagtgactgtacctaagctacccgttcctcctgtgaccgtccccaagctacccgttcctccagtgaccgtccccaagctacccgttcctccagtgacagtccctaagctacccgttcccccggtaactgtacctaagctacccgttcctccagtgaccgtccctaagctaccccttcctccgatttca

SEQ ID NO: 155818 - DNA, 441 bp, Arabidopsis thaliana columbia
aagcccacttagtttcctttttctgcatacgacgccgttttgcgattccaccctaaccaggtctgagtgacgaacagtctgagaagtttctagaccaaaccacactcttcttcgtcttctccgttctctctatatttctcctcaccttcaacgcagctttctcgttctcgtctcagatcgtgttactaacaaacaccgtttctccggcgaaaagctctctgttactaaaaactcacagaacctaaaaatggcggatcaagctatgacggatcaagatcaaggagctgttactctctacagcggcacagccattaccgacgcgaagaaaaaccatccgttctctgttaaggtcggattagctcaggtacttcgtggcggcgccattggtgaaagttcctcggttaaccaagctaagctcgctgaatccggcggcgcatgttc

SEQ ID NO: 155819 - DNA, 429 bp, Arabidopsis thaliana columbia
gaagaacaatggcttcctctatgctctctttcgctactatggttgcctctccggcgcaggccactatggtcgctcgggtcaacggacttaagtcctccgctgccttcccagccacccgcaaggctaacaacgacattacttccatcacaagcaacggcggaagagttaactgcatgcaggtgtggcctccgattggaaagaagaagtttgagactctctcttaccttcctgaccttaccgattccgaattggctaaggaagttgactaccttatccgcaacaagtggattccttgtgttgaattcgagttggagcacggatttgtgtaccgtgagcactgtaactcacccggatactatgatggacggtactggacaatgtggaagcttcccttgttcggttgcaccgactccgctcaagtgttgaagg

SEQ ID NO: 155820 - DNA, 448 bp, Arabidopsis thaliana columbia
aaaccacactcatggcgacacttctctcaccttcttcaagctaagttttcattttggtcactgccacagatctatggccatggatatatctctgttcttcattttcctggtcatttacgcgccgttagtctcatacgccgatgaatctcaagccgagattgatgctctcacggcgtttaaactcaacctccatgaccctctcggtgctttaacttcatgggatccttcaacaccagcagctccatgtgactggcgtggcgttggctgtactaaccaccgtgtcactgagatccgtcttcctcgtctccaactctccggacgaatctccgatcgtatctccggtctacgcatgctacggaagctcagtctccggtctaactctttcaacggtactatccctacttcactcgcttactgcacgcgcctactctccgtctttcttcagtac

SEQ ID NO: 155821 - DNA, 424 bp, Arabidopsis thaliana columbia
cggacgcgtgggcggacgcgtgggttctcacattttcgtagccgcaagactcctttcagggtcttacttgcagctatgggggaagagaagtttcacattaacattgtggtcattggtcatgttgattctggaaaatcgaccacaactggtcacttgatctataagcttggtggtattgacaagcgtgtcatcgagaggttcgagaaggaggctgctgagatgaacaagaggtccttcaagtacgcatgggtgttggacaaacttaaggccgagcgtgagcgtggtattaccatcgatattgctctatggaagttcgagaccaccaagtactactgcacagtcattgatgccccatgacatcgtgatttcatcaagaacatgattactggtacctcccaggctgattgtgctgttcttatcattg

SEQ ID NO: 155822 - DNA, 383 bp, Arabidopsis thaliana columbia
actcaagactcctttcaggttcttacttgcagctagggtgagagataactttcacatttacatttttgtcattgtgtcatgttgattctggaaaatcgaccacaactggtcacttgatctataagcttggtggtattgacaagcgtgtcatctagaggttcgagaaggaggctgctgagatgaacaagaggtccttcaagtacgcatgtttgttggacaaacttaatgccgatcgttagcgtgttattaccatcgatattgctctatggaagtttcagaccaccaatttctactgcacagtcattgattccccaagacatcgtgatttcatcatgaacatgattacttgtaccttccaagctgattgtgcttatcttatcatt

SEQ ID NO: 155823 - DNA, 428 bp, Arabidopsis thaliana columbia
  unsure (1)..(428): unsure at all n locations
gtcgagaaagaaactgcattgaaaaggttagaagaggcaatcgaaaggtttaatcagaaagaaacagaatctagtgacttggttgaaaagttaaaaacacatgaaaaccaaatcgaggagtacaaaaagctggctcatgaagcatcaggagttgcggacactagaaaagttgagcttgaagacgcgctatcaaagttgaagaatcttgaatctactattgaagagctcggngccaaatgccaggggcttgagaaagaaagtggggatttggccgaggtgaatttgaagttgaatctggaactagccaatcatggatctgaggccaacgagttgcagacaaagctctctgccttggaggccgagaaggagcaaacagccaatgagcttgaggcttcaaagacaaccatagaagatctaacaaagcagct

SEQ ID NO: 155824 - DNA, 451 bp, Arabidopsis thaliana columbia
aaacaaaaatggttgcaaaagcttcctctcattgtgctgcttttgctcctgaccatcgtcgcctctccagcaaatgcagatggacctgtttgcccgccgtcgaacaaactaagccgggcaagtttccctgaaggttttttatttggcacggctactgcggcataccaggtcgaaggtgcgattaatgaaacttgtcgtggaccagccttatgggacatctactgtagaagatatccagagaggtgcaataacgataacggcgatgtggccgttgatttcttccatcggtataaggaagatatccaactaatgaagaatctaaacacagacgcctttagaatgtctatcgcatggccaagaatatttcctcatgggagaaaggagaaaggagtgagtcaagctggtgtgcaattctaccacgacctcatcgacgagctcataaaaaatggta

SEQ ID NO: 155825 - DNA, 409 bp, Arabidopsis thaliana columbia
gggagagcaaaacaaagatcggagaagatgttgactattctttcttccgaaacgatggacatccccgacagtgttaccatcaaggttcacgctaaagtgatcgaagtcgaaggacctcgcgggaagcttgttcgcgatttcaagcatctcaacctcgatttccagctgatcaaggatccagagactggaaagaagaagcttaagatcgattcgtggtttggaacacgcaaaaccagcgcctccatcagaaccgctcttagccacgtcgataacttgatctccggtgttaccagaggtttccgttacaagatgaggttcgtgtacgcccattttcccatcaacgcctccatcggcggtgacggaaaggctatcgagatccgttactttcttggccagaagaaggtgagga

SEQ ID NO: 155826 - DNA, 439 bp, Arabidopsis thaliana columbia
aggcgtacggagatttaatacaaaagaaagagaaaaaagtaagttatggcaggactcatcaacaagatcggaggcgcactccacattggaggagggaacaaggaatgtgagcacaagaaggaagaggaacacatgaaacacgttgactagcacaagagtggtgagcacaaagaaggtattgttgacaagatcaaagacaagatccacggtggtgaaggtaaaagccacgacggagaaggcaaaagccacgacggtgagaagaaaaagaagaaggacaagaaggagaagaaacatcatgatgatggtcaccacagcagcagcatgtacagcgacagcgattaatgtgaggaaatgaggaggatcgcttgaataaaacagatctggttctggctattattaattaatgttgctgtatgttcttatcatcttaaaagagagg

SEQ ID NO: 155827 - DNA, 404 bp, Arabidopsis thaliana columbia
  unsure (1)..(404): unsure at all n locations
agagcgacccnttttgttactcatcttcacaggaaacattgttttttgtgaagtcctccaaatcgaatgcttactggaacaaagtacaaagtgttggtcaaaaaaatgaaaacacatgaaaaccattacagggcgtgcgatacgcttactaatgaagacaagaacatgccaacacccctaagttccgctttgttgtctcgacttaccaacaaaaacattgtggcacatattgtatctgcaagcatagcttgtgacattgttaaagcttcggcttacgcacatgagctctctcagtattgactcactgttggtcttaccaactatgctgcagcttactgtactggccttcttttggctcgtcgtgttctgaaaatgctggaaatggatgatgagtacgagggaaa

SEQ ID NO: 155828 - DNA, 290 bp, Arabidopsis thaliana columbia
tctacccaatcaaagggcttggatcctaaatcggagaatcttgatccacgcatgccgaccagaaacatctgcattgatggagtccatgaagaggtctatcaccccaacgcacttagggcggcgctcgctgagtttatctcgactttgatcttcgtcttcgccggctcaggctccggaattgctttcaacaagatcactgacaatggagcaaccactccttccggcctcgtcgccgctgccttagctcatgctttcggtctctttgtcgctgtctctgttggcgctaacat

SEQ ID NO: 155829 - DNA, 441 bp, Arabidopsis thaliana columbia
ggagctcgatccattgattagaagatgacatctccacatgtgaagaccggtttgttcgttgggttgaacaagggacatgttgttaccatacgtgaattagctactggtactcgttctcgcataggaaaaacgagcttgtggacaatctttatcagaaacttgataaaggaagttgctggtcaatgctccctatgagaagagaatcactgagcttttgaaggttggtatagacaaacgcgctcttaatgttgctaagaggaagttgggaacccacaagagagccaatcgaaagatagaggagatgtccagtgttctccgcaagatgaggtatggctgtggtgctgcaactgataagaagaagtgaacgtcatcttaagttgggaatcgctcgtaaagagatatggtttcttgttgcattatcgttattatgattcctaagct

SEQ ID NO: 155830 - DNA, 241 bp, Arabidopsis thaliana columbia
cggacgcgtgggtgggaacaaacatgtattcatcttcggctcttcttggtacacacaaagacgcaaacctcgcatccattggtgttgaggagttgattgaaaaggctgatggatttgccggagtcttcccagagcacaaatacgatattgtgaaaaagctgcaggagaggaagcatattgttggaatgactggtgatggtggcaatgatgcctctgctgttaagatagctgatattcgttt

SEQ ID NO: 155831 - DNA, 443 bp, Arabidopsis thaliana columbia
cgggcggacccacgcgtccgaaaaaagaaaaacatcactttcttcaagcggatgaaaaattcaaagattgagtcaccacggccatagtaatatacgcgtatgagttcccagatgtgatctccatccaacgttgtatttctttcgttttggttatcttcttcggttccatcgaattccaacaattcccatcgaggaatttggttacgaatcttttgatctgactaaacctagggagcttgatcacaaggagactgaaaccaatgctaggaggagtctcttcaggttagtagaatgagtagaaaaagaacggaaaatggcagtgaatcaggaccagccacttctcatgttcctgtggatagattcgggtttctcaagcaagaacatgccaattcgcctgagcgttttagcaagtctaaaactacattattcactgatcatgacag

SEQ ID NO: 155832 - DNA, 334 bp, Arabidopsis thaliana columbia
caaaaagagtcacttccctgtcacatattatttcttgaaactttctcttcatcaaccacttcgtgttttttttattatccagcgtcctcccattaatccttactctccattctcaatcatactactcatatttcatccttactatcttcaacaccacattatacccttacctattcttctcttctctttcctccttctctagctctgttcacaactatccatccctcttgtctttagccttcatcttcttcactcttaccaatactctttacttaatctcataccttttcaatttcaccactcttctaccttttagcaacttaaaattttttct

SEQ ID NO: 155833 - DNA, 406 bp, Arabidopsis thaliana columbia
  unsure (1)..(406): unsure at all n locations
cgagtgatggttattgcggtggcgactactttctccattgtttccggaatcaagctttcggtgatcttaacttcgtgcagggccntanatgatgcgtccagtagttgcggaagaagcaacttgaccggagttagaatttttccgacattgagtcggcgacgattctcatcgatcggagctgtttccccaattcgtggggatgctcaatcttcctttagtcgcagctctttcgcttgctctcagaatctcggtttgagcggtggatttagtgcatctgaagctctgccacctgcttgtgcagaggctagcccttcttccattaaatcttacaaccagatgattgaaaccttgattgatcgggttgatctatctgatactgatgctgtattattttcttgagtttttg

SEQ ID NO: 155834 - DNA, 384 bp, Arabidopsis thaliana columbia
  unsure (1)..(384): unsure at all n locations
ctcgccgaagaggaagaagaagaagatgttttggttatcatacgtcgatgatcaccttaggttggatgtctaaggcaaccgtgctgacctccgccncaattctcggccaagacggcagtgtctgggctcagagcgccaaattttctcagttgaagcctcaagaaatcgatggaatcaagaaggactttgaggagcccgggtttcttgccccaaccggactatttctcggtggcgaaaaatacatggttatccaaggtgaacaaggagctgtgatcctagggaagaagggaccttgaggtgtcactatcaagaagacaaaccaagctttggtttttttcttttacgattaaccaatgactggaggtcaatgcaacttttttgtct

SEQ ID NO: 155835 - DNA, 393 bp, Arabidopsis thaliana columbia
gaactacaaccggatcatggacaaacacattcaagaaaagatgagccctgccggggggaaaagaggtgtagcaatcgtcgattttgttcttagactcatcgcagcaatcacagctatggctgctgcagcaaagatggcgacaacggaagagactcttcctttcttcactcagttcttgcagttccaagctgactacactgatctaccaactatgtcatcttttgtgatagtaaactcaatcgtgggtggctacctaaccctctcattgcctttttctatagtctgtatcctccgccccctcgcggagccgcctaggctattcctgatcttatgtgatacggtgatgatgggccttacccttgtggctgcattcgctttcgcagccatagttta

SEQ ID NO: 155836 - DNA, 448 bp, Arabidopsis thaliana columbia
  unsure (1)..(448): unsure at all n locations
gaaaacccggcccgacccacgcgtacagtaagatacactnaatcaaaanatctagtcttttcggcgacatcttcctctncttttctgcttaattcttaaacttgtcgcgcaccatcctttcaaatactctccanaactctcttctctctccttatcctctcaaaaggctgctgctttcgatttttcctcatcttctttcactctcaataaacaaatccttaattatttttttttcaatgctttatctatcaaaccatatgcttatgttttatgtcttaatatctcctataacatctctcatcttattatattaattctcttatatgttcttgttcttttttaacaataattttattttataattttctatatttttttttatttcttattctttttattatttattttttaatttattcttttttttttcctattctttttttttttt

SEQ ID NO: 155837 - DNA, 270 bp, Arabidopsis thaliana columbia
gtgacagagaccgtgtcggaaccaacttcatacaccggaagttccggtggataaggggggtgctgctgcagatgttggtcctcatgataagcctgtggctccacctcccgttcttccatctccggcaccggctgaggagaagcatgaagactctaaggctattgttctcttcgtccctaaagaagtagaggatgagaagaaagaaggatcagttaatctatatgctgttctggctagagttgatacagagtatatgatttcacttattaa

SEQ ID NO: 155838 - DNA, 202 bp, Arabidopsis thaliana columbia
ccggggcgaccgcacgcgtacgcgtgtacgaatttgagcctgagtcaattcctttttttttttacttccggttcttccgttgatggtaaagtttttcagtgggcgcttttatattcatgtttgtactaagagtacgtctgtctagtttgggattgtactaaatgttgttgttgttagatttatacttttttattgatttttt

SEQ ID NO: 155839 - DNA, 410 bp, Arabidopsis thaliana columbia
gagcaatctaagaaaagagggatttttttttttttgttgttcttccatttaaagtgcgggaatttacgagtaagggggctcatcatctatttctatctcttccgtctgcttattcttctactcccactaatcttaacatcatcgacttgtatgtcgccctttctgtcttcaccactctcattcacttttgattatatggcttcggaggcatcatttccatttaactctttcttatctgtacttctctcttgtatctttacagcatttcttttcttttaccttcttattcaagtgatcataagcatacattaaatttaactctctatctcctttattaactttttcttatttttttctcttcttcttatttcttcatttttcgattaattacttccttttttataattttt

SEQ ID NO: 155840 - DNA, 219 bp, Arabidopsis thaliana columbia
  unsure (1)..(219): unsure at all n locations
cataattcactaatgttttttttcataatttatacaaatcaaangggccttgctttcacaatattgcgtataggaactctctctcctccttattctattccactcccactaaacattccttctctctctcactcttctccaatccttattttattttttaaatatttaaaattttatacatcatatcaatttcctttttaaaaattcttaataatataa

SEQ ID NO: 155841 - DNA, 242 bp, Arabidopsis thaliana columbia
  unsure (1)..(242): unsure at all n locations
ggaaancccggcccgacccacgcgaccgnnnaaaaacaaganaatctctaagtttaggtttntgaggaaagaaaaattctattggtccgttctccaataaagattggtaggattttaaacctccttcaatcttcactcacacgaatgtcgtaaagacactttttttcataactcagttttccaaaattgcctcatatctctttaaacacatattttttgatgtttcttttgctcatcttcaa

SEQ ID NO: 155842 - DNA, 429 bp, Arabidopsis thaliana columbia
cgatcgcgatccatcttcaattccatcttttatcttcaataccaacttgaaataaggtcgcagaaggctacgcaaggggggtatacttctatccaccactcgaaaaccaagtattgaaagcatggaacgtcttcgctcgccgtcaaatcagtaccaaattgatcaacactgagtctcgtccacacataacactcttctccacctccttcttcgattcaacgagactcgaatccgtcatcaaaaacttcgtatccaagcaagaaccaatctcgatctcgttctctactatcgggagcttctgtagcgacaacaacgtactgtttctatcttcgactccgtctctatcgcttcttcagttgcagactcagttatgtgatatgttgaaaaaagaatctgttgacattggtgatgagtatcgtgttgattctt

SEQ ID NO: 155843 - DNA, 420 bp, Arabidopsis thaliana columbia
gacaaaatttaatgcgtaacccccaagtctttctttcttctattcatcgccaccctcttggccggaaacttcaccgtgtgggtacgcaacagcattttaccaaacagcgacttcttgctatgaccaaaaccatcagacatgaaaagcacagaaatactaaacaaactagcaataccaaactgcgaagtcacaatattcgtcgaatacattaaatcatgacataaacaaagacacatgcttctcgttgttcccgtccctaaattacctgtaagacttgtgaactaaacatccatcaaacaaagacttaaagtcgttaaaagacattattactcactcacttttagtgctgctagaacttgtgcacaagacgagagactttacatatctgtagcacctgactccggtgtgattccgattcag

SEQ ID NO: 155844 - DNA, 434 bp, Arabidopsis thaliana columbia
caaaaactccgttcgtggactacctataattttatcatcgccgacggagacaccgggttgggcggcaccaccggcgggggcgaactctgcaagcttttcgttgaaagaggcgccgctggggtccacatcgaggaccagtcctccgtcaccaagaagtgtggccacatggccggaaaggtcctcgtggcagtcagcgaacacatcaaccgccttgtcgcggctcggctccagttcgacgtgatgggtacagagaccgtccttgttgctagaacagatgcggtcgcagctactctgatccagtcgaacattgacgcgagggaccaccagttcatcctcggtgccactaacccgagccttagaggcaagagtttgtcctcgcttctggctgagggaatgactgtaggcaagaatgtgccggcgttgcaatccattgt

SEQ ID NO: 155845 - DNA, 433 bp, Arabidopsis thaliana columbia
gctaaactttattggagaaaccctaatcggcgacattgggtatttttcgtgactctatcgacgagaggcgtgccactggaggcaagcacaaacaatggaggaagaagcgaaagtatgagatgggaaggcagccagtcaacaccaagctctcaagcaacaagacggtcagaagaataagagttcgcggtggaaatgttaagtggcgtgcgctgaggctcgatactggtaactactctaggggaagtgaatcaactactcccaggaccagagtgcttgatgtggtctacaatgcctccaacaatgagcttgtacgtactaagacacttgtcaagagtgctattgttcaggttgatgctgctcctttcaagcagtggtaccttttgcactatggtgttttgcttgggcgcaagaagaagagtgctttttccaccaa

SEQ ID NO: 155846 - DNA, 358 bp, Arabidopsis thaliana columbia
  unsure (1)..(358): unsure at all n locations
gtctctcttctctttcctctctctttcacatatcttcaagaagtttcccacctcggggcgtatcaaatacaactgctggggagaaatcaaaaatcanacatatgaacattctcttctccagattctactttttgcttctgtttctctgttcttggaccagtttcactttcaccacaacagaagcttatgatgcacttgatccatatggaaacattactataaaatggcatattatgagctggactggtgatggttatgtggctgttgtaacaatctttaatttccaacaataccgtcacattgaggcgccctgatgtcaattaggatggagttggattaataatgaagctatttttta

SEQ ID NO: 155847 - DNA, 409 bp, Arabidopsis thaliana columbia
gattaatcttacgattcatctcacccactttttcttgtcatgataacgaccccactctggatgtgaggactgaagcaaagggatgattctataattgaaagaccaaacgctcatcaaaatcaatctaaatcgttcgtacttatcttctcttagatttccgacatagattcttacttacaagctctgacaaaacccgatcacaactcgccgagaagaggacactatatgaatgttagaatataggagaataaggaacacaatggattgatattcttcaagagcaaattacaacaccttgttgagagcactagaattcttatctttattgttcgtagctcctttttctatttctactgttacatttttgtttaatctttcctttcactattaatttttcatttaaactttt

SEQ ID NO: 155848 - DNA, 415 bp, Arabidopsis thaliana columbia
atttgatatacaaatttgacttctcagccttcatttttctgatcattgacattcttaacgacggtgccatcatgacaatgggagaggacaaaattaaaccatctaccacacctgatagctttaaacttaaagaaatttttgctactggagtcgttctaggaggctaccaggccatcatgactgttattttcttctgggcggcgcacaatactgactttttctcggacacattcggtgtgaggtccattatggacaataaccacgagctaatgggtgcggtgtacttacaagttagtatcattagtcaagctctgatctttgtcacaagatcaaggagttggtcttttgttgaacgactctgagcattgctgatgattgctatcctcattgcacaaacttattgctacttttattg

SEQ ID NO: 155849 - DNA, 444 bp, Arabidopsis thaliana columbia
accgggccggaccgaggcgtccggagctttgatcccatggttcttcaagagtatcttttcaggggtatttatgcttatggtggtggggagccttctgctattgagcggacaggaatcatccccttctgtaagggtcttgatgtgattcaacaggctcagtctggtactgggaaaacagcaactttctgctctggtgtcttgcagcagctggacttctcccttatccagtgtcaggctttggttctagctccaactagagagcttgctcagcaaattgagaaggtcatgagggcccttggtgattaccttggtgtcaaggttcacgcctgtgttggtggaaccagtgtccgtgaggatcagcgcatcctccaagctggtgtccatgttgttgttggaactccagggcgtgtctttgacatgttgaagaggcagtctcttcgtgct

SEQ ID NO: 155850 - DNA, 238 bp, Arabidopsis thaliana columbia
attggcaaaggaacaaagtcatgggtgtcttttcccaagggcaaaggtatcaagctggcggtcatcgaggaggccaggaagaggcttgctagtcaacaggctgcttaattttgtgattttcagttctttgttatgcttctttagacgtttcatatttcctagactcacttcgtttcttttggtactctgctcagttttgaaacttctcttatattatttatttcaagagttaatatca

SEQ ID NO: 155851 - DNA, 266 bp, Arabidopsis thaliana columbia
ctgactcgtgggcaaaaatggtttttttgatgctccagaagcggctcgccccatgggtgatgaatttcggaaagggcggagttttactcaatcccaactaaagctccgacatctccattgccaattcccgccaaaacatcatgaagcttgtgaaggatggttttatcatcaggaatccaaccaagattcactctcgttccagagctttcaaaatgaagattgccatattgaattttcgtcactctgtataccgtaagaggaagggt

SEQ ID NO: 155852 - DNA, 251 bp, Arabidopsis thaliana columbia
  unsure (1)..(251): unsure at all n locations
cgcgnccgacggtggtcacaggcctcattactgtggttatagtcctcaatacggnggacctggtaacgagtgtcagaatcagaatgtgggacggactaatcagagtcagtactacactccgcagcagcagcaacaaccgtaaccaccacgaagctcgaatcaaagccctaatcagatgaatgaggtagctcctcctcctagtgttgaagaggtgatgaggtaatgttagcgtatgctatatatagatgcta

SEQ ID NO: 155853 - DNA, 370 bp, Arabidopsis thaliana columbia
gggcggaccaacgcgtccgaacacgtgtaaggtgggaactgtctcattgtggatactaaaagcggcgtcccaacttctggtggaggtgccacgtggacggcggcagataacaaggcattcgagaatgctttggcggtttacgacgacaacactcctgatcggtggcagaaggtggctgcggtgattcctgggaagacagtgagtgacgtaattagacagtataacgatttggaagctgatgtcagcagcatcgaggccggtgtaattccggtccccggttacatcacctcgccgcctttcactctagattgggccggcggcggtggcggatttaactgttttaaacctggtcatcatgttttgttttaaa

SEQ ID NO: 155854 - DNA, 135 bp, Arabidopsis thaliana columbia
gccggagctaggttttgttgtttaccgatctattctttaatcaatggcaatggctgtttgccggctctaaaggaggcgtggcctcccttcaatcaccgctcgcccaatcgctgctatccgatctcctctctcttc

SEQ ID NO: 155855 - DNA, 287 bp, Arabidopsis thaliana columbia
gcgtacggaagaaatggcttgcaccctatatttccttttcctttacgaaagattcagctgcaaaaccgtcgaactcatacgcgaatgggaagaacaatccatcacctaagcaatcgcctatgaagcttccatggacatctatggtgctcctcctgccgcgaaacgtatcgccttctctttctctgaaaatccagacatacctattgctctagctttctagagaccaacctactatctttttatttccttgaaattcttcttacttgaacttgatacatcctcttact

SEQ ID NO: 155856 - DNA, 469 bp, Arabidopsis thaliana columbia
gcgtccgctcgttttgataaaaatctctgaatcttttctatctctcttctcatcaaaccatggggccgtacaaatatcgtccgggtaggtcttacaactctcccttcttcaccaccaactctggtgctcctgtatggaacaacaactcctccatgaccgttggacccaaaggtcctatccttcttgaggattaccatctcgtttagaagcttgccaatttctacagggaacggattccacagccttttgttcattccctaagagccagtcctaaaggtttcttttttgtcacttattatgggtgtgggccgggcttgagctgacttatctccaaacctccctttgttccatacttctttttcattttaccctttctttccaccccttttcccattattcctttcaaaatccccttaatactctttcattaaactcctttctgtgttttatttcatcctattttctatca

SEQ ID NO: 155857 - DNA, 271 bp, Arabidopsis thaliana columbia
tacaaccatctatattacatacatttgtatttcactgaggaaaggtaacaggggcggcgaactatctgtgggggagccttctaagcttatcacacttactcaatcctttgaacatgaccagatctattctttgttgacaacataccaatcctaactttcaagaatgctaagatctatgattcttttccatacaaccaaccaattaatctttactaacctttgaactcgtatgattgttccatagaggcttttataaaataccaattgtcca

SEQ ID NO: 155858 - DNA, 438 bp, Arabidopsis thaliana columbia
  unsure (1)..(438): unsure at all n locations
caaaatcttggtgagagaccaatatttcttctctcgctttccaaaatcctaactagatctggcactaatagatactggggcgctactacaacaagtatctctgcctctccttctttaccgaaacaattctgttcaagacacttctttgccgtcgctgactcttcctcctctagctccgccgctcttggaagccaatcgagttcttctgctccaccttatgagaacaaacgagggtctaagtggtcacaattgttgttgttcttgcctggagcgattaccttttgtcttgtgtcatggcagatcgtcaggatagaggaaaagttcaaaacactgttttatcaacatcaacttttgaacattgaaccaataaatctaaatatagaccattctttngataagaatcttaattctttataatttttaccgttttattttcaa

SEQ ID NO: 155859 - DNA, 406 bp, Arabidopsis thaliana columbia
acatttccaatttataaaagttaattcttttctgcatctttctctatcccctggtggtgatttaagaagaggggggattctaaacatattttgctgaatttcaaactttgtggagctcatataggttcaagctaacaaggctcccttacactgcccatgactttgtggctctacgtggccatctcaagcaaggctattcttcgaactatatgtctaataatcttttgagaactctcaaaagccatcaatccaactgtactttctctctcactttcttagcgttttacccttgtttaggtgaccatgatggttaaactatttaacaccatctattttttctgtttggcattgcttttacactcacacatctcctaattatcctttttcttatctttcctattatcct

SEQ ID NO: 155860 - DNA, 268 bp, Arabidopsis thaliana columbia
acgagaaatatcaagactaagaaacaatattattttataatcattgggagagccatcatggcggggagagcaaacgtaccgtggggggtcataaattctcctctcgttgatggtttgaagattcataacaaaaactgtgctgttaagagttttcgtgccctttgttactttttaaatcttgtttctgttcccagagttcaaggatttaagtctcaactctttatttatttacccatttctcgaagtttccttacctagatattattct

SEQ ID NO: 155861 - DNA, 420 bp, Arabidopsis thaliana columbia
gaacaacaacactaagcaaaaaagaaaagctcaatccgagagagacaatggcatcaacgtgcacgagctcaagcagtgttggtaccccaacaacattccttggccagactaaagcctcaagctttaacccccttcgtgatgttgtctctctcggatctcccaagtacactatgggaaatgatctttggtatggacctgacagagtgaagtacttaggacccttttccgttcaaactccgtcttacctcaccggagaattccctggcgattatggttgggacaccgccggtttatccgcagaccctgaagcctttgccaaaaacagagcttttgaggtgatccatgggagatgggcaatgttgggagcttttggttgcataacccctgaagtttttcaaaagtgggtccgtgtggacttta

SEQ ID NO: 155862 - DNA, 425 bp, Arabidopsis thaliana columbia
atcgtcaagcacgccatggagattatccacctcttgtctgacttgaacccaattcaggtgatcggtgacgccattgtcaagagtggtccacgtgaagatgctaccagaattggatctgctggtgttgttaggagacaagctgttgatatctctcctctaagacgtgttaaccaggctatcttcttgattaccactggtgctcgtgaagctgctttcagaaacatcaagactatagctgagtgccttgctgatgaattgatcaacgcagccaagggctctttcaacatctatgccgtgggaagaaggatgagattgaaagagttgccaatgctaatcgtttaggatttttcctttgccctgtgcgttacaatctttttttaattgattttaaggttttatcttcaatttaaattgtaatatgtatt

SEQ ID NO: 155863 - DNA, 316 bp, Arabidopsis thaliana columbia
atagaaacaaaccttttaattgttatgattttttttaccaacctatacataataccatgggcaggacctcatgttgagcgggggccgcgttaaccaaaggattacacctcataacactctctgatgacttatatgtaaagcatttacatacctatatctgatcctaacagaactgaaacactactcttaccatggtgataacctactcttacccttcgaagtaagactcttctataatccggatctagctaccttatttgcacggtttgctttgtcgagcacttttttaagactttgcaagaacgaagataaaaca

SEQ ID NO: 155864 - DNA, 409 bp, Arabidopsis thaliana columbia
attttcgtgtccctcctcctcctcctcctttttattaagacaaatattatgagtttctcgttgtggttttagtgatcggggggacaagctataaaaatcgtcaatcgtgatcggattgatttgataataatggtgaatgagacggagttttactatgtcctcggctgttagccccaccgttactgaggcttgaattaagaaagcttattacatcattgcacgcctagtgcattcagataaaaaccctaatgatcctcatgctgctcataatttccaggtattgttagaagcctaccaagtgctaagtgatccaatgcaacttcattcctattacacattttgtaagttaggtattttcaactgagatcattaatctctccgttttattttcttttcttttttgtgattt

SEQ ID NO: 155865 - DNA, 467 bp, Arabidopsis thaliana columbia
  unsure (1)..(467): unsure at all n locations
cggaannncccgggtcggacccgacgcgtccgggataatgtaacccgtttagctnctctctcttttctttacccttgcataaatcttacggtggccatgagcttggcttcgattccctcgtcgtcaccagtggcttcaccgtacttccgctgccgtacttacatcttctccttctcttcctcacctctctgtttatatttcccgcgcggtgactctacttctctcaggccacgagttcgcgccttgcgaacggaatctgacggtgctaaaatcggtaactcggagtcttacggctccgaattgcttcgtcggcctcgtattgcgtcggaggaaagctccgaagaagaggaggaagaggaagaagagaacagcgaaggtgatgagttcgtcgattgggaagataaaatccttgaggttactgttcctcttgttggcttcgtcagaatgattcttcactccggaaaata

SEQ ID NO: 155866 - DNA, 323 bp, Arabidopsis thaliana columbia
atctcttctttcttctctctcaccttaattattggattcgttctgatcaactttgaacagaatttacaacaaatcgcggagggaaatctaacccttccttcttcctcaggaagatttaagattcttgtttataaggatattctgaagaatctttttaaattttttttaaatgtttcatttgatcccacttttctgtataaagtgaaatatatacaattaaaattatttcatagtataactacttctcatttttttcatctacagagccttatcattttttttactcatttttattctttgtgttgataatcaactttaatttt

SEQ ID NO: 155867 - DNA, 447 bp, Arabidopsis thaliana columbia
  unsure (1)..(447): unsure at all n locations
ccggcgcgacccacgcgtccgcggacgcgtggggtnctttggatatcatttttccaaactgaaaatggctaantcatatggagctatcttcctcttgaccgggattaacctattcatgcttcaaaccatggttatggcctcaagtggatctaatgtgaagtggagccagaaacgttatggaccaggaagcctgaaacgtacccaatgcccatcggaatgtgataggaggtgtaaaaagacacagtaccacaaggcttgcattacgttctgcaacaaatgctgcatgaagtgtctctgtgtgccttcggtttactatgggaacaaacaagattgttcctgctacaacaactggaaaactcaagagggtggtccaaaaagcccttggataatatctcccttcgttccctttttataataaatattttcatctacatctaaatctccttt

SEQ ID NO: 155868 - DNA, 291 bp, Arabidopsis thaliana columbia
acccacgcgtacgaccaactctttataccagcctctgtaacgtttgatcatcttgtatttcatttcaaccactcattgtttttagtttgtttggcggagaatcaactatggctactaaaagaagcgttggaactttgaaggaagcggatctgaagggaaagagtgtgttcgtgagggttgatcttaacgttcctttggatgataactctaacatcaccgttgacaccattattcgtgtcgttgttcccaccatcaagtacttgatgggtaatggattctagtgttgaactt

SEQ ID NO: 155869 - DNA, 442 bp, Arabidopsis thaliana columbia
  unsure (1)..(442): unsure at all n locations
accacgcgtccgcctagtttatcgaccaaacgtcgccgtttttgattctccggatggtgtggaggttcgaggactngacgaccaaatcttcgccagagattttgacgagagaagctcttatctttgtggctgagttacagagagagtttcgtggccatgtgaagtatgccatggagtgcctgatagaggcaagacggcgttataacttccggtgccgttcctgggtttgatccttccactaagttcattagagacagttattggtgctgtgtcttcgtcctttctgctttatttttattctaatgttatgatctaccgttcttttctttatgtatttattattatttcttttaatttttgatcttaatattttattgctgtatatcagttatttttttctttaagattgtatatattttttatgagttattattactttatt

SEQ ID NO: 155870 - DNA, 451 bp, Arabidopsis thaliana columbia
cggccgaccacgcgtccgaagaaataaatacacacaatgaccaaatttttttgctccaacattggactttgattattgtggggttacttattggtaactatgtcgtcaatcttgaagcctcgcaccatgtctacaagagacttacccaaagcactaacaccaaatctccttccgtaaaccagccctaccggaccggtttccatttccaaccccccaaaaattggatgaacgatcctaatgggcctatgatatacaaaggaatatatcatcttttctaccaatggaacccgaaaggagccgtgtggggtaacatcgtgtgggctcattccacgtcaacagacttaatcaattgggatccacattctccagctatcttcccatctgcacccttcgatatcaacggatgctggtccggttcaactactattctccctaatggaaaaccggttat

SEQ ID NO: 155871 - DNA, 236 bp, Arabidopsis thaliana columbia
gaaaacccggcccggccggcgcgtccggatcctcaaaaccctaaacacattctcttcttttttttaatctctttctcttccattcgcactttttttctggttggagagtcaatctcgttactgtgtttcataagactattgaagttaacatgtctggagcattgaatatgactcttgatgagattgttaagaggggtaaaactgcatggtctggggcaagaggtatttttcttttc

SEQ ID NO: 155872 - DNA, 412 bp, Arabidopsis thaliana columbia
  unsure (1)..(412): unsure at all n locations
ccaaaacgtcttgaattcatcattactagtttcctttccttagtaaaaccctacatttctccgcccgcctttgatttctccccggccgttcccgccgccggtctccgatttaaccaggattgagtctaattccttctttttgtgctcattgctgtcggattctctaccggcgttacatcgaccagccagactcttccccatttgactgctttactgattcaatcgctcttttagattctggaagttgtgactcagtatctccccttcaacgaattagcatcctgcgcaagaatgtctattgcatcatcacttacttcagccacactntgcggcgcctcagtttttcctaaagcattagcctgcagctctgagttccctatcaatcttcccagctcctttgaaagttcaaaga

SEQ ID NO: 155873 - DNA, 421 bp, Arabidopsis thaliana columbia
gtaagatggccaagtacaacgagattgcgaagaagaagagagaggctaaagccgggagaaaacgagccattcacggggatcctctcaccaataaattgaagaccagaactccggtcccctccgtctccggcaaacgtcagagaaagctccttcgcaaatggcgcagagagcagaaagatatggtggagaagggtcttgttactatggaagatgtggagatggcttctgctcaagctgcatcagaagactccaagaaatcccccagaaaatttagcgttaagaagagcttgaagttgaacaaactaaataataaaggcaaaaagaagaaaaaccagaaagccagtggtgaaaaatctgctgattgtatgctagaatgggtgtcgtgtatacctgtaaacccatttcttctaacggatgatag

SEQ ID NO: 155874 - DNA, 439 bp, Arabidopsis thaliana columbia
cggacgcgtgggaaaaaggcacctggtcgttgctcttcttacgtcaatgctaaatgccagagacggacgatcaggatacgaggcttaccttgtcactcacaatctccttatctctcacgcagaagcagttgaagcttaccggaaatgcgaaaagtgtaaaggtgggaagatcggaattgcacatagtcctgcttggttcgaagcacatgaccttgctgattcacaagacggtgcgtccatcgaccgtgcacttgactttattttgggatggcatctagacacaactacatttggagattatccacagatcatgaaagacattgttggacatagattgcctaaatttacaactgagcagaaagcaaaactgaaagcttctaccgatttcgttgggctcaactactataccttcagtgttttcaaaccattttggagaaac

SEQ ID NO: 155875 - DNA, 392 bp, Arabidopsis thaliana columbia
atcggcactagggtaaaaggaacagtgttcaagactgatgcaaatggtgcattaggtgacatttctgcaaagtcatcggcttacttgtcggtagaacaagcgtgtattcatagaattaagcatgtggaagaagctggtattgtacctggtatggtggaagagtttgtcatcattggtgaaaatgaaagtgatgacagtttgctattgagcttaaggaatattcaatacgaacttgcttgggaacgttgcaggcagcttcaggctgaggatgttattgtcaaggctaaggttattggtgctaacaaaggtggattggttgctcttgtggaaggtcttcgtggatttgtgcccttttcgcagatatcatctaaagcattatttgtagagctttt

SEQ ID NO: 155876 - DNA, 429 bp, Arabidopsis thaliana columbia
accggaccggaatcccggggcggcccaccccgtccgggaggcaaaaccaaaatggaaactactcatttctcttcctcttcttcttccgagcgcaggatcggtgctctgctccgtcatctcaattccggctcagattcggacaacctgagctctctttatgcatctccgacatcgggaggcaccggtggttctgttttctctcatcttgttcaagctccagaggatcctattcttggggtgacagttgcatacaacaaagatcctagcccagttaagctgaatttaggagttggtgcttaccgaactgaggagggaaaacctttggttcttaatgttgtgaggaaagctgagcagcagcttatcaatgacagaacaagaatcaaggagtatcttcccattgttggaatggttgagttcaacaagttaagc

SEQ ID NO: 155877 - DNA, 448 bp, Arabidopsis thaliana columbia
ctcctccaaacaagtcttcctctaccgtcttcaaccacaaaccaaccgtagattcaacagcgatgcatcacttgcgcacaagagagcgcatcgtgatcggactagctgctgactctggctgcggcaaaagtacctttatgcggaggctcaccagcgtctttggtggcgctgctaagccaccaaaaggcgggaaccctgattccaacacactcatcagcgacacgaccactgtgatctgtcttgatgattaccattctttggataggtacggtaggaaagagcagaaagtcaccgctttggacccacgcgccaatgactttgatctcatgtatgagcaagtcaaagctcttaagaatggtatagccgtcgagaaaccgatttataaccatgtcactggacttcttgacccttcggagcttattcaggtctctaagaatcttgtcatcga

SEQ ID NO: 155878 - DNA, 321 bp, Arabidopsis thaliana columbia
  unsure (1)..(321): unsure at all n locations
ggccgtctcatcattccaatgccctattattttctcctcctcctcaatctccaccttgcaatgccgttctgatccagatggcctcacttctcccatcngtggatcatctctccctcgtgtccatgcctacgccttgatttcttcctcattcacctgagactctttattatcctccaatatcttaagatttccttctaatttcgtacgtcatctgtgcattaaatcccttttaaactgaagcaacatctgagttacacatatcattgcggctatatttgttcaacaacccattctccgtgatacccttctcttttcctttat

SEQ ID NO: 155879 - DNA, 408 bp, Arabidopsis thaliana columbia
ggattgcgaaggatttccaagagtattcattttttgttttccaagaataccgtcggggggggaaacatcggatcactgtgagtgagccatgccttttctcgcacgctggctatcacgtatgcaaaaaggcacctggtcgttgctcttattacgtcaatgctaaatgccaagacggactatcacggatacagagccttaccttgtcactcacaatctctcttatctctcactcataaacagtttaagcttaccggaaatgcgaaaagtgtaaaggtgggaagatcgctattgcacatagtcctgtttgtcacgaatcacatgaccttgattattcacatgactgagcgttcatagaccgttcacttgactttattttgggatggcatatatacacaactacatttggag

SEQ ID NO: 155880 - DNA, 318 bp, Arabidopsis thaliana columbia
  unsure (1)..(318): unsure at all n locations
aaaaaccgggccggccgaaggcgtccgaatggcggaggctgaaatatctcaaattgttgttcaacaggaagaatgagcanncnttcnagtataaccgtgtacgtcggagagcttcctggcnatatccgtgagagagaggtcgaagatttgttcagtaagtatggacctgttgttcaaattgatttgaaggttcctccaaggcctcctggttatgcattcgttgagtttgatgatgctcgggatgcttaagatgctattcatggtcgtgatggctatgactttgatgggcatcgtttgatggtggaattggctcatgtt

SEQ ID NO: 155881 - DNA, 297 bp, Arabidopsis thaliana columbia
  unsure (1)..(297): unsure at all n locations
agaagatgtctcaatcaatctcctccagctcattttcagaagaagttgttantntanatttgatccaatccaagactctgggcgagtctctncatcaatatcttgacgttaggactcatgactagtttatgagaggccattgttaggcaactaatatcgtcaacattccctacatgctcaacacaccttaatgtagagtgaataatcaatagttctttgagcaagtatctttctcttctaaacccagctgatgatattcttgtgggttgtcattatttatccagtttcttaaaagcc

SEQ ID NO: 155882 - DNA, 442 bp, Arabidopsis thaliana columbia
ccactttctcatccgatctcttcaccttgtttaaccatatactcatcagcctctctcgcgaaaccccaaaaagcaaaccagacatgattcaagacaagtctaaaggtgcaaagcaaacgcttctagagcggccatggttcctcgctgtggctctagctggtcttataggtggcgcaatgctcatcacaagcttcatccgagctacggacaacaccttgtcactctgctccacggctaagaacacagctgcgtctatagccaaatacacagccaccccaatccaactccaatccatcgtccactacgccacttcacacaccgtccctcaacaatctttcgaggagatctcgatctctttaaacgtcctcaaggagcgtctcccttgtaactttctagtctttggcctcggccgcgacctcctcatgtgggccctcctcaatcc

SEQ ID NO: 155883 - DNA, 320 bp, Arabidopsis thaliana columbia
  unsure (1)..(320): unsure at all n locations
aaacccgagcaaannccncnccggccgacgnnncnccaccgngancagaanggcagccncnnccncaccgccnccnccaaccaccgccaccncgaagnccaagaagggaacgaagaaagaganncaagagncgcnncnaaccccgaggnncnacacgacggacnncgaggaaanggaacagcnnnncaacacggagancaacaagaaccnnaacgaagcagagnncgaggcncngcnncaagagnncaagaccgannacaaccagacacannncgngaggaacaaggagnnnaaagaagcngcagacaaaangcaaggac

SEQ ID NO: 155884 - DNA, 341 bp, Arabidopsis thaliana columbia
acaaaacatctctaattcaccaattttattttcctttccttaataaaaccatacagttgttcatcttccattgatgtttcccccaacacttccaccctcattatcctatttaacctgtatcaattctaattccttctttttatcctcatttccatacatattctataccttcattccattctaccaaccaacctcttacccatttcactactttactcatccaatctttcttttatattctgcaagttcgtaccaattctttccccttcaactaattatcatcctactcaagaatgtctaattacatcatcacttactttacccacacttttctgatcctc

SEQ ID NO: 155885 - DNA, 385 bp, Arabidopsis thaliana columbia
aagaaatggaggtagcagcagcgacttttactagcttcacaacgcttcgagctcgtgcgggagcgattatcccgtctggtacacgtaatctgagatctaaaccgagattttcttcatcttcatctctcagagcttctctttcgaatggctttctttcgccgtataccggaggaagcatctctagtgacttatgcggcgctaagcttcgtgcggaatcgcttaatccgttaaatttttccagttccaagcctaaacgcggagttgtcactatggttatacctttctcaaagggaagtgcacacgaacaacctttttctgatttggcatcatattttgtcaagaactcaattgtatatttgggaatgtctctcgaacctttaattac

SEQ ID NO: 155886 - DNA, 333 bp, Arabidopsis thaliana columbia
aaactttctctcaattctctctacctttatcaagatgcagatctttgttaagactggcagcggtaagacaatcaccggtggaggttaaagctccgacaccatcgacaacgttaaggccaagatccatgataaggagggcattcctccggatcagcagaggcttattttcgccggcaagcatctagaggatggccgtacgttggctgattacaatatccagaaggaatccacccttcacttggtccttaggctctgtggtggtatgcatatttttcgttaaaaccttatctttaaagacgattactcttgaggtgtatagttctgtcactattt

SEQ ID NO: 155887 - DNA, 459 bp, Arabidopsis thaliana columbia
ggggggacgacgcgtccgctctcttccgtcaatatggaaggcgtcacttttttgtctttcttccttcttttcatcggccgcgccattgccgccaagtgcaccgtctccttccgtgacggcatgttaccaaacggagacttcgagctaggaccaaaaccatcagacatgaaaggaacagaaatactaaacaaactagcaataccaaactgggaagtcacaggattcgtcgaatacattaaatcaggacataaacaaggagacatgcttctcgttgttcccgccggtaaattcgctgtaagacttgggaacgaagcatcgatcaaacaaagacttaaagtggttaaaggaatgtattactcactcacttttagtgctgctagaacttgtgcacaagacgagagacttaacatatctgtagcacctgacttcggtgtgattccgattcagacggtttatagt

SEQ ID NO: 155888 - DNA, 456 bp, Arabidopsis thaliana columbia
acgcgtccgcttcttttctcttctccagatctgatccctaacctttgattcattgttgttgttctctgctggtttatcagagagcatgatcatgtacggaagagatccatggggaggtccattggagataaacactgcagattccgccaccgacgatgatcgtagtcggaatttaaacgatttggatcgtgcggctctttcacgtccactagatgagacgcagcagagttggttacttggtccaacggagcagaagaagaagaagtacgtcgatctcggttgtattatcgttagccgcaagatcttcgtctggactgttggtactcttgttgccgccgcgttactcgccggattcattaccttgatcgttaaaactgtgccgcgtcatcatcctaagactccgccgccggataattatactatagctctacacaaagcttttaagttcttcaatgc

SEQ ID NO: 155889 - DNA, 404 bp, Arabidopsis thaliana columbia
attactgccacagtcgaggtgtctaccacagagatctcaagcctgaaaatctgatccttggcggaaatggggttttgaaagtctctgattttgggttaagcgccttctcacgactagttcgggaagatggtttgcttcatacagcttgtggaacgccaaactacgttgcccctgaggttttgtcggacaaaggctatgacggtgcagcagcagatgtctggtcttgtggtgtcattctctttgtgcttatggctggttacttgccttttgatgagccgaatctcatgacattatacaaacgtatatgcaaggctgagtttagctgcccaccatggttctcgcatggtgccaagagagtcatcaagcgtattctcgtacccaaccctattaccagaataagtatt

SEQ ID NO: 155890 - DNA, 361 bp, Arabidopsis thaliana columbia
gcgtccggtagcgagtataaaaaccctagccggctttatatgagacatcatcgaggctattgagggtgggagggattcagacttttacgcttcctgatcttccttacgattatggcgcattggaaccggccattagtggagagatcatgcagattcatcaccagaagcatcaccaggcttatgttactaattacaataatgctcttgagcagcttgatcaagctgtgaacaagggagatgcttccactgttgttaagttgcagagcgccatctaattcaacggctgttgtcatgtcaaccattcgattttctggaagaaccttgctccttccagtgaatgcgtgtgatagccaccaaaagg

SEQ ID NO: 155891 - DNA, 384 bp, Arabidopsis thaliana columbia
  unsure (1)..(384): unsure at all n locations
gcaaaacggccagatnncaccaattttattttcctcnccttaataaaaccctacagttggtcgcccgccagggatgggtgccccaacgtccccgacctcagtatccgatttaaccaggattgagactaatcccaaacactcgtgctcattgccatcggattctaataccggcgtcacatcgaccagccagactcttacgcatatgactgccttactgattcaatcgctctttcagattctggaagctgagaactaagtctgtccactacaacgaatcagcatccagcgcaagaatgtctattgcatcatcactgactttagccacaccatgcggctccttagatcttcctaaagcattagccagcagctctgagctacctatca

SEQ ID NO: 155892 - DNA, 432 bp, Arabidopsis thaliana columbia
  unsure (1)..(432): unsure at all n locations
acgttctcttaaccggacggtttttgagagttcgccgncgngatggctcctgattcgttaaagaagaactacaggtgctcacgatctctaaagcagttctacggcggtggtcctttcattgtttcatctgatggttctttcatcgcctgcgcctgtggtgacgtcattaacatcgttgattctacggattcatcagtgaaatccacgattgaaggcgagtcggatacgctcactgctttagctcttagtcctgatgataagctccttttctctgctggacatagtagacaaatccgagtttgggatttggaaaccttgaaatgcattcgctcttggaagggacacgaaggacctgtgatgggaatggcttgccacgcatctggaggattgctagctactgctggagctgataggaaagttcttggttgggat

SEQ ID NO: 155893 - DNA, 190 bp, Arabidopsis thaliana columbia
  unsure (1)..(190): unsure at all n locations
cggacgcgngggccaccacccccaaatactccaaggccaggnacaacagcaaacgagcggggngacaccaagggngaaagcaagaanagcgngcccacgggncngaccanccaaagaganaccagccncaaaaccnccagnggnggagncaanganaagaacagcacaaccagcccgggaggcaccagca

SEQ ID NO: 155894 - DNA, 411 bp, Arabidopsis thaliana columbia
aaaacccggccggaccaacgcgtccgggcaaataaagatcatcttcataaatcttttcagatctcttccaattttctagaaaaagcagtgtcttgctgtggtggaagctgtggttgtggatctgcctgcaagtgcggcaatggttgcggaggttgcaaaaggtaccctgacttggagaacaccgccaccgagactcttgtcctcggtgttgctccggcgatgaactctcagtacgaggcttccggcgagactttcgttgccgagaatgatgcttgcaaatgcggatctgactgcaagtgcaacccttgtacctgcaaatgaagaacttcataaaccctaagtctgtaataaccctaatgttatgttagggttgcttatatgtaataattggctgatttttccggtagtttt

SEQ ID NO: 155895 - DNA, 424 bp, Arabidopsis thaliana columbia
  unsure (1)..(424): unsure at all n locations
atgcactngctcaaggntngaaagttatttcttgngtnggtgagactcttgaggagcgggaagctggatcgaccatggatgttntggctgcccagaccaaggctattgccgatcgggtgacaaactggtcaaatgttgtcatagcctatgaaccagtgtgggccattggaaccggaaaggtcgctagcccagcccaagctcaagaagtacacgatgagctgaggaaatggctggccaagaacgtgagtgctgatgtcgctgctacaacccgcatcatttatggaggatccggcaatggtggtaactgcaaggagctaggtggacaggccgatgttgatggtttcttggtcggtggtgcttttctaaagcctgagtttatcgacattattaatgccgcataggtgaagaaaagtgcctaatgagc

SEQ ID NO: 155896 - DNA, 427 bp, Arabidopsis thaliana columbia
  unsure (1)..(427): unsure at all n locations
ngctactctgcaaccatgtcgaagttaggttgaggaggaacctctggtaacaagggcaggatgtcactgggtcttccagtggcagccactgtgaactgtgctgacaacaccggagctaagaacctttacatcatttcggttaaaggaatcaagggtcgtcttaaccgtttgccatcagcgtgtgttggtgatatggttatggctactgttaagaaaggtaagcctgatctccgtaagaaggtgcttcctgctgtcattgttaggcagaggaagccttggcgccgaaaggacggtgtcttcatgtatttcgaagataatgctggtgtcattggcaattccaagggtgaaaagaaaggatctgctatcactggaccaatccgaaaggagtgtgctgatctgtggccaagaatcgcaagtgctgcgaacg

SEQ ID NO: 155897 - DNA, 397 bp, Arabidopsis thaliana columbia
cggacgcgtgggtcttaatcggctttttttatccgaatccggacccgaaagcctgggaggccgacgattaattgcacgatgtccgatgctccgtcgtcttccccggatgccacggcgtcgcactggtgctatcactgcaacaaacgcgtcgtcgttgaaaccttagatgactttgtcgtgtgctgcgaatgtaacaaaggtttcgtcgagtcaattcaaccgactcccgccgcttattcatcgccggcgccaccgcagtcactttccccagatctgaatgtagaagactccagtattggctcgcatttccttcagatgctccgcttgttagcccacgcgcctttcttagcgttcaccaccacgacaccttgatgttttatcttacgaagatgatttc

SEQ ID NO: 155898 - DNA, 370 bp, Arabidopsis thaliana columbia
gatgcaaggcaacgttttaaagcatttatttttggttactgaaatgagcaagctggttgaggcatgtaaactgatggcggtttcacaaacagagcatgacttggcttgcaatggtggccaaggagctgcatatgaggcagttacggatctcttaaataatgaaagtgtgtttgacatcgaccggctgcgttttggaatgctatatgctttgcgctatgagaaagaaaattctgtttagttgatgcaattgttcaacaaatttgtctttaccggactccaagtactaaccagggcttgttgcaattttattttgatacatagcctatatttattatctcactggttatttattttgaaacttatttctttt

SEQ ID NO: 155899 - DNA, 450 bp, Arabidopsis thaliana columbia
  unsure (1)..(450): unsure at all n locations
ccacgcgtccgatcacatttagctttttttggttcctttattttgtaacgccatttatgcgttaaacttgtgtgaagtgtttgtttggtctgagctggagatggtgagaatctcactgcttttgttgtgtttactggtttcaacttgtctcttcacttcttcatcagcacaagctccaggttttgtgagcttggattgtggaggtgcagagccattcactgatgaacttggactcaaatggtcacctgataatcatctcatttatggagaaaccgctaatatatcgtccgttaacgaaacaagaactcagtacacgactntaaggcatttccctgctgattcaagaaagtattgctacactctcaatgtcacgagtaggaatagatatctcattagagctactttcttgtatggtaatttcgacaacagcaacaattgtgtttccaaatt

SEQ ID NO: 155900 - DNA, 245 bp, Arabidopsis thaliana columbia
  unsure (1)..(245): unsure at all n locations
gtacttcagctctggtttgaaaggtgttgtatggagcatgccaacctcagctgctgtgggggtctttgcaaaaagcgtgaggttnaagttctttgaggttccaacaggctggaagttttttggtaatctgatggatgctgggatgtgttctgtttgtggagattaaagttttggaactggctcggatcatatccgttagaatagacggaatttttgcagtatttgcatggttgtctattctagct

SEQ ID NO: 155901 - DNA, 432 bp, Arabidopsis thaliana columbia
tgcttcttatttggcaaaccaatatatttttcgccctttgctttccccttatatggggggcagtggagaccatttgcttgctagctgttctcaccaagatattggaaggcggttgggttccgctagtattcgccactttcttcctcactgtaatgtacatttggaactacggaagtgtactcaagtaccaaagcgaggtcagggaaagaatctccatggattttatgcgtgagctcggttcaactcttgggaccattcgaatccctgggattggactcctttataacgagcttgtccaaggtataccttccatttttggacagttcttgctcactcttcctgcgattcactcaacaatcatctttgtctgcatcaaatatgttcctgtcccggttgttcctcaagaagagaggttcctcttcagacgggttt

SEQ ID NO: 155902 - DNA, 445 bp, Arabidopsis thaliana columbia
cgtccgaaaaaatggtgaatcaaagaaagctacaagttgtattaagaggaaaaggagaattatcctctcagtacaaccaaagtagttgagtggttgcagccagtaatgtgtcgagagcttctctgcaaatttccagataactctgcttttggattcgactactcacagagctctctttggtctcctctcttgcctcgaaattacgccagtccttcagatctagactccgacagttgcgtttgtcggaatcttaagctaggggagtttcaagtaggcaagaagaagaagatgaagatgatgtcaatgaagaagaacaagaagaagagtaaattactgaaactagacataccttcaatgaagaatgatgattcttctcctaaaattggctgttttcctcttcctaccaagggatggaatggtgtgttaaaggcagcttcaaaacatt

SEQ ID NO: 155903 - DNA, 446 bp, Arabidopsis thaliana columbia
  unsure (1)..(446): unsure at all n locations
cgtccgggaaactctaaggttcaattcagcaaggtttcttacaacctcaccaacgttcactcttagangcactctggtcttgcaagcaaggagactgtgaccatccaggccgctgacaaggaccaagctgttgtgctcgccaccaccaagaccaagaagcagaacaagcctaagctctctgtcaacaagtctatcctcaagaaggaattccccaggatgtcaaaggctgttgctaaccaggtggtggacaactactacaggccggacttgaagaaagctgcacttgctagactcagcgccatcagcaaaggtctcagggttgccaagtccggtgccaagcaaagaaacagacaagcttaagctttttctttcacaatctgttttttttgaagtaaaagattttgttgaacaggttttatttaagttgttgctttgaagtttaacca

SEQ ID NO: 155904 - DNA, 486 bp, Arabidopsis thaliana columbia
  unsure (1)..(486): unsure at all n locations
agaaagatctaatctagagagacccaaataagtgatnncggaagagatggctttcttacctgcgggatgtcattnggtcacgaccagcttgaannncagacccnngttcgtcttcctttcctttannagccattanncctctgannaaccatcctaaggcttttttggttgctaacctgtgagtgcccagagcaccagatggctttcaaatgttaaggcccctctaagtatggaccaaggcttttgacccggtattctcctgcggcttgcttcttacctgcnnttcgatggtgattctcggagaatagcttgaagcctgctttggttctggatatctctcctttcccttcaagaattttcttgcttcgagcattgcttctggtggccctcgtcctcactgtcatcattggttgtcgtcgtcggcgtttccaactttgaccctgtcaagagaacctaagacctatatatctttcttacatcattatt

SEQ ID NO: 155905 - DNA, 387 bp, Arabidopsis thaliana columbia
  unsure (1)..(387): unsure at all n locations
ggaaanccggggcgaccgcacgcgtccggcttatcagccttggatttggactaccgtttaaccatgaactcgattttgccccggagatgtgtgaaaacagaccgtgttgggccgttcacacataggtaccgaactccttaccgatcatcaggcagcaccgaaccattctggtactcgataaagagaggaccggcttacataatcgtgctagcttcatattcagcatatggaaaatacacaccacagtaccaatggctcgaagaggagttcccaaaggttaacagaacggaaactccgtggttgattgttctgatgcattcaccatggtgcaacagctatgattaccattacatggaatgtgaaacaatgatgttaatgtatgaggct

SEQ ID NO: 155906 - DNA, 380 bp, Arabidopsis thaliana columbia
aaaaaaaagaaaacacaaaaacaaagattataatttcttcctcaaccatggctttgtcctcccgtgccttcgccggaaaggctgggaagcctgccgcatcagatgtcctcggaagcggccgtgtgaccatgaggaagactgtcgccaagccaaagggtccatcaggcagcccatggtacggatctgaccgagtcaagtacttgggtccattcttcggcgagcccccgagctaccttaccggtgagttccccggtgactacggatgggacaccgttggtctatccgccgacccagagaccttcgtcaggaaccgtgagctataatttatccacagcatattggccatgctcggagtcctaggctgcgttttccctgagcta

SEQ ID NO: 155907 - DNA, 364 bp, Arabidopsis thaliana columbia
  unsure (1)..(364): unsure at all n locations
aaaaccgggccggccgacgcgnccggncctngggacaaccatcggcgacagggtttattctagagtcttcttcttcttcggcggggggttttccccggcttgaggagggggtctatccttcggaaagttgttcagcaagctctttgcaaagaaagagatgcgtatcctcatggtgggtctcgatgcagctggtaagactacgatcttgtacaagctcaagcttggagagatcgtgactacgattccaaccattggtttcaatgtggagactgtggaatacaagaacattagctttaccgtgtgggatgtctggggtcaagacaagaggcgggcattgtggaatcacttctttcagaacactcat

SEQ ID NO: 155908 - DNA, 356 bp, Arabidopsis thaliana columbia
  unsure (1)..(356): unsure at all n locations
aatctataatgnnatctattgtcgaacgtgatcattgtggccaagctaacctctacatcattcgcaatacaaaagaaacttgaatctatgattctgttcattgatgaacaaaacataagtgatgtaataaaactcttagtaagatagacaagaatcacagtacttattcggcagcctcttccatcacatgttccgcggtgattggagccacggggtaataatggtaatgtagctcgccaacgtcgtctccagagagtttgcgccatccttgctgcccaacgttttacacgctagcaactccaccactagcttcatcacggaatgtagcatggtagattgatctccttgcttactct

SEQ ID NO: 155909 - DNA, 311 bp, Arabidopsis thaliana columbia
  unsure (1)..(311): unsure at all n locations
cgccagagaagnacctagacgagaaaaccattttttacttgaacccttcaggccgattcgtgatgggtttaccccatggagaggctggtctcaccngncgtaatatcatcatcgacacttacggtggatggggagctcacggaggcggtgcattctcaggtaaagacccaaccaaggtcgacagaagctgagcctacattgtgagacaagcagctaatagcgttgtggctaacgggatggctcgtatggctcttgttcaggtctcatacgccattggagtccctgaaccattatttgtatttggggacact

SEQ ID NO: 155910 - DNA, 305 bp, Arabidopsis thaliana columbia
  unsure (1)..(305): unsure at all n locations
ggatcgacacatgacgccnngaccaanaattatctctcagcaggcatanacggaattcaggatggtattttgattatgtggagggcggacaacccnaacaagctccttcttctggtaccaaaggccgtgttctcccagctgatccgtttgtgattaaccatccagactaacatctaatttctgtagaaagttggtatagccctgaaggtatcattcaaggaattaatttcatttccaacaagaagacttctgatgtcattggatcccatgagggtactttactcactctacatgttaaagacaag

SEQ ID NO: 155911 - DNA, 433 bp, Arabidopsis thaliana columbia
atttctcacattttcgtagccgcaagacttctttcagattcttacttgcagctatggggaaagagaagtttcacatgagcattgtggtcattggtcatgttgattctggaaaatcgaccacaactggtcacttgatctataagcttggtggtattgacaagcgtgtcatcgagaggttcgagaaggaggctgctgagatgaacaagaggtccttcaagttcgcatgggtgttggacaaacttaaggccgtgcgtgagcgtggtattaccatcgatattgctctatggaagttcgagaccaccaagtactactgcacagtcatttgatgccccaggacatcgtgatttcatcaagaacatgattactggtaccttccaggctgattgagctgttttttataattgactccaccactggaggttttgaggctttt

SEQ ID NO: 155912 - DNA, 374 bp, Arabidopsis thaliana columbia
  unsure (1)..(374): unsure at all n locations
aacaaatcttaaacgttttactttgtgctttactactcaacctcaatggccgcctgaacgatggctctctcctcccgttgcgtcnccgataaggccgtcaagctttcccccgcggcatctgaagtccttggaagcggccgtgtgacaatgaggaagactgttgccaagccaaagggcccatcatgcagcccatggtacggatctgaccgtgtcaagtacttgggtccattctctggcgaatcaccgagctaccttaccggagagttccccggagactacagatggtacaccgccggactttcagctgaccccgagacattctcaaggaaccgttaactagaagttattcacagcatgtgtgccattctcgtatc

SEQ ID NO: 155913 - DNA, 385 bp, Arabidopsis thaliana columbia
  unsure (1)..(385): unsure at all n locations
gttttgaccgggtcacgagtcatcgttgcttcggagtattgtcacgcgaacttcggtcggtatttcacttccggggtctggtcagacccnnctttaccgggtctaatctcgggtcaaaagccttgctatttcaacacaggagtgatggtgatggatcttgttagatggagagaagggaattacagagagaagttagagcaatggatgcaattgcagaagaagatgagaatctacgatcttggatcattaccaccgtttcttttggtgtttgcgggtaatgttgaagctattgagcatagagggaaccaacatggtttaggaggagacattttacgaagaagtttttggtcatttgcattcttgttctgtgagcttgtttgcattg

SEQ ID NO: 155914 - DNA, 434 bp, Arabidopsis thaliana columbia
ttccttttcagagttcaatcacacatcactctctcttcaatagcaataaccatggcgcacactctcggtctcactcggccgagactccactgagcctcacaagatctcgttcactgcgaaggagatcgatgtaattgaatggaaaggagacatactcgtagttggtgtgacagagaaggacttagccaaagacggtaactcaaagtttgagaatccgatcttgagcaaggtcgatgctcacttaagtggacttttagctcaagtctcttccgaggaagatttcactgggaaacctggtcaatcgactgttctcaggcttccgggtttaggatcaaagagaatcgctttgatcggtcttggacagtctgtttcgacttcggtggcttttcatagccttggtgaagctgtagctacagtttcaaaagcttcttaat

SEQ ID NO: 155915 - DNA, 437 bp, Arabidopsis thaliana columbia
  unsure (1)..(437): unsure at all n locations
cgggccggacgcacgcgtccggggcacagagaaaacacccaccacatcacttttttcttcaacaaaatttaccaccananatggcagatatttcttcattcggtctctctcttttagatccgattcgatgccgtcccgtagacgtaccctcctcaaggtcatcatcctcggtgatagcggggtgggaaaaacctctttgatgaatcagtatgttaataaaaagttcagcaaccagtacaaggcaaccattgtagcctacttcttgaccaatgaagtacagtttgaagatcgacttttcactttacagatctgttatacagctggacaggaaaggttttagagccttggtgtatccttttaccgtggtgctgattgctgtgttcttgtatatgatgtcaattttcatgaaaatatttttatattttaacatctttttt

SEQ ID NO: 155916 - DNA, 378 bp, Arabidopsis thaliana columbia
  unsure (1)..(378): unsure at all n locations
cgtccgatttctcacattttcgtagccgcaagacttttttcagattcttacttgcanctatgggtaagtanaagtttcacattaacgttgtgntcattgntcatgttgattctggaaaatcgaccacaactggtcacttgatctataagcttggtggtattgacaagcgtgtcatcgagaggttcgagaaggaggctgctgagatgaacaagaggtccttcaagtacgcatgggtgttggacaaacttaaggccgagcgtgagcgttgtattaccatcgatattgctctatggaagttcgagaccagcgagggctactgtacattcattgattccccaagacaatctgatttcatcaagaacatgtttactggtacct

SEQ ID NO: 155917 - DNA, 286 bp, Arabidopsis thaliana columbia
  unsure (1)..(286): unsure at all n locations
actataatggaaggcgaccaagtttcttttgtttatactttggtgncaaggaagccgggcttttatctcccaacagcgggccctaattnncttcctncttatatatacctgaaattagcccagctaccttttgaacttgcgttcaattcaaccttccctgattcagatgaactgccgtactttgaaagtgatacatatgttgcatataacaatgaagatggaggagttatttgaaaaactgaagaaagatgggattgtttatctggactctcagctacagtctctt

SEQ ID NO: 155918 - DNA, 459 bp, Arabidopsis thaliana columbia
  unsure (1)..(459): unsure at all n locations
gaagggccgggccgacgcgtccggcctggaatggctaagaacgttatgagcgtgttcaaacccgaagtcttaccgntttacagcgagttagcgaacgagttcggagtgttcnatcgatggttcgcttcaataccaacttcgactcaaccgaatcggttctacgttcactcagctacttctcatggatgctcaagcaacgtgaagaaagatctcgttaaagggtttcctcaaaagacgatctttgattcgttagatgagaacggactcagttttgggatttattaccaaaacatccctgcgacgttcttcttcaagtctcttcgtaggcttaagcatttggtgaaattccatagctatgcacttaagttcaagctcgacgctaagcttgggaagcttccgaattattctgtcgtggaacagagatatttctatatcgatcttttttcggctaatgatgat

SEQ ID NO: 155919 - DNA, 441 bp, Arabidopsis thaliana columbia
cgaaaggccaccattttcaatcttttcacattaatggcggctactagagtgttaacgtgggcgacggccgtgacccagaaccacctcctgtttcctcgccaagcaagctttcactcttccggcgaagaaatcctgcggcggatttggtggtctctgcttcagcagaagagctttggtgttgaaatctaagagacctttctcctgcagtgccatttacaatcctcaggttaaggttcaagaagaaggtccggccgaatccctagattatcgagttttcttcctcgatggttctggaaagaaggtttctccatggcatgatataccattgaccttaggcgatggagttttcaactttatagttgaaatacctaaagagtcaaaagcaaaaatggaggttgctactgatgaagatttcactcctattaagcaggatactaagaa

SEQ ID NO: 155920 - DNA, 307 bp, Arabidopsis thaliana columbia
cgtcatcatttcttgagatgtatatggccttactgtctccgagactccacaaagcgtacagagcgagatgtgttagcttaccgggtcggtctcatccgagtgttaggaggattcaagaagtggtctccaaggttagagctttggggtcttcttcgttagactcgaggacaatagtccgtgacagtctctctggtctcaccgagctttacagatgtttaagtgaagatctcttcaagtcttcttctggaacttaacaaggccttcttaatggtgatggtttgatggaagagcttcttgaagtatcact

SEQ ID NO: 155921 - DNA, 408 bp, Arabidopsis thaliana columbia
  unsure (1)..(408): unsure at all n locations
gtgctgagttgattgattctgttctcgatgttgtgaggaaggaagctganaacagcgagtgtcttcaaggtttccaagggtgtcattcattgcgaggaggaactggatctggaatgggaactctattgatttctaagataagagaagagtatccagatcgtatgatgatgactttctcagtgtttccttctcctaaggtctctgacactgttgttgagccatacaatgcaactctctctgtgcatcagcttgtcgaaaacgctgactagtgtatggttttggacaatgaggctctctacgatatctgattccgtaccctcaagctcgctaatcctacctttggtgatcttaaccatctcatctttgctacaatgatgtggtgtcacttgctttttttcttttccattc

SEQ ID NO: 155922 - DNA, 410 bp, Arabidopsis thaliana columbia
  unsure (1)..(410): unsure at all n locations
ccaaacananntctctacncnntcaaacnnccactcaaactnnncatttcannccaccttctcatgaaccaacccttcaccatcnnngccattgnnagattcgccccaatgcccttcaatnncgagatgnntcgcagaccacccaggaatnncagctattcnngcggaagctgaatctgacccgtcattgggtcttctcnncttagggaacccgaatcnngtctttctctggtaggtagtattcgaccgatttctgtcgcttgatgcctattntatgagtcagttgctttctcttagattgctaaangatccaaagaaaagatatcaaacctctttatcaatttcttctggtggttctctcagtgcaaccatggctatatacgatgtggttcagcttgtgagagctgatg

SEQ ID NO: 155923 - DNA, 449 bp, Arabidopsis thaliana columbia
  unsure (1)..(449): unsure at all n locations
acgcgtccggaaaagaggtctttcgctttgctgtcaaatgtgttcctcaatctattgaatctgctttacaaggagctggtcttcctgctggtgccatcnactggctcctcctccaccaggcgaaccagagaataatagactctgtggctacaaggctgcatttcccaccagagagagtcatatcgaatttggctaattatggtaacacgagcgctgcttcgattccgctggctcttgatgaggcagtgagaagcggaaaagttaaaccaggacataccatagcgacatccggttttggagccggtttaacgtggggatcagcaattatgcgatggaggtgaatggctaagtccaacaatgtaagttaacttcagagccaaagcttttttctccctcgaggaacactggaaattggtttaaccggtcttgtttagtccggttaaactaaa

SEQ ID NO: 155924 - DNA, 452 bp, Arabidopsis thaliana columbia
cgggggaccgacgcgtccggttttaacaatggtgtcccaatcgatgagaaattctttgttgagaacattgctggaaagggcgttctgaaattgctctggttgtgttccctgatgatgtttcaagagggttaaaattctgtgatgaaaaggaagctctttaccgcaaaattgttgcagagaagataaagccacttgatgggcttataaaactgaccaaatggatcgaagatcgtggattgaaacgagctgcggtaacaaacgctccaaaagaaaacgcagagctcatgatatcgaaacttggtctgactgatttctttcaagcagtgattcttggctctgaatgtgaatttcccaaaccacaccctggaccttacttgaaggctcttgaagtgcttaacgtgtcaaaggagcacacgctagttttcgaagactcgatctctgggataaaagct

SEQ ID NO: 155925 - DNA, 417 bp, Arabidopsis thaliana columbia
caataagacgattattacagggaaccataatgttgttgatggttggactacgtataattgctcgagcttcgctgtggttggagagcggttcatggcggttgatgttacattcagaaacacagccggacctgaaaaacatcaggcagtggctttgaggaacaatgcggaaggatcaagtttttatcggtgtagttttgaaggctatcaagatactctctacgtccattctcttagacaattctatcgcgaatgcgatatatatggtaccgtcgattttatattcagaaatgcagccgcaatttttcaaaactgcaacatatatgctcgaaaaccgatggccaagcaaaagaacgcaataacagcgcatggaagacttgatccaaaccagaataccgtattctctatcatcaattgtac

SEQ ID NO: 155926 - DNA, 468 bp, Arabidopsis thaliana columbia
  unsure (1)..(468): unsure at all n locations
ccggaacggaanggccgggccgacgcgtccgagaaaattcagcatttttgatagctcaagcacttgattctttccaaaggggtttcctgagatgacaaaggccaagtaacagtggggaaaggagttgcagttttgaacagcagtgagggtgttacggggactatctttttcacccaggaaggcgatggtgtgaccactgtgagtggaacagtttctggccttaagcctggtcttcatggtttccatgtccatgctcttggtgacaccactaacggttgcatgtctactggtccacatttcaaccccgatggtaaaacacacggtgcccctgaggatgctaatcgacatgctggtgatctaggaaacatcactgttggagatgatggaactgccaccttcacaatcactgattgccagattcctcttactggaccaaactctattgttggtagggctgttgttgtccat

SEQ ID NO: 155927 - DNA, 414 bp, Arabidopsis thaliana columbia
aaaaaaacacaaaaaagtttcaatggccgtctcaacaatggctctctcctcccctgcttgcgccggaaaggctgtgaaccggtcccctgcggcatcagaagtccttggaagcggccgtgtgacaatgaggaagactgttgccaagccaaagggtccatcaggcagcccatggtacggatccgaccgagtcaagtacttgggtccattctctggcgagtcacccagctaccttaccggagagttccctggagactacggatgggacacagctggtctatccgctgaccccgagacattcgcaaggaaccgtgagctagaagttatccacagcaggtgggccatgctcggagccctaagctgcgttttccctgagcttttggccaggaacggattctagtctggagaggcaatttt

SEQ ID NO: 155928 - DNA, 422 bp, Arabidopsis thaliana columbia
agaacaatggcttcctctatgctctcttcctctactatggttgcctctccggctcaggggcactatggtcgctccttgcaacggacttaagtcctccgctgccttcccagccacccgcaaggctaacaacgacattacttccatcacaagcaacggcggaagagttaactgcatgcaggtgtggcctccgattggaaagaagaagtttgagactctctcttaccttcctgaccttaccgattccgaattggctaaggaagttgactaccttatccgcaacaagtggattccttgtgttgaatgcgagttggagcacggatttgtgtacctggagcacggtaactcacccggatactatgatggacggaactggacaatgtggaagctttccgtgttcgggtgcaccgacttctctcaagtgt

SEQ ID NO: 155929 - DNA, 435 bp, Arabidopsis thaliana columbia
tttcttcaaagaacaaatctcccaaatctttaatctttctcttctctcttcgtttgcatggccatgtctgcgaagaagatggtgttgaagagttccgatggtgaatctttcgaggttgaggaggcggtggctctcgagtcacaaaccatagcgcatatggttgaagacgactgcgtcgacaacggagtccctcttcctaacgtcacgagcaagatcctcgccaaggtgatcgagtattgcaagaggcacgtcgaggctgctgcctctaaggccgaggccgtcgagggtgctgctacctccgatgacgatcttaaggcctgggacgctgattttatgaagatcgttcaagctactctctttgaactcattctggctgctaattacctgaatatcaagaacttgcttgatctaacatgtcagacagttgcggatatg

SEQ ID NO: 155930 - DNA, 415 bp, Arabidopsis thaliana columbia
ttttacgcacacaaagttctcttcttcgtcctattttcttctattccaggtgagaagaaaaaatggcgtttgtgaccactgcggaagtgtgtgacgcgaatcaagagatgattcgaagtggccagctccgagctctgcaacccgtttttcagatttatggtcgtcgtcaaatattttcaggtccagtagttactgttaaagtctttgaagacaatggcttaatccgtcacttcctcgaagagaaaggcaatggtagagttcttgtggtggatggtggagggagtttacgctgtgcgatactaggaggatacccggtcgtacaagctcataacaacggatgggcagggatcatatttgtatgggtgcatcagagactttttttagatcaagggtgcgacattgggatgagagcttt

SEQ ID NO: 155931 - DNA, 422 bp, Arabidopsis thaliana columbia
gccagaaccagtgagaacccacttgaggaacatgatcatcgtccctgaaatgattggaagcatcattggagtgtacaacggaaagactttcaaccaggttgagatcaagcctgagatgattggtcactacctggctgagttctctatctcatacaagccggtcaagcacggtaggcctggtgttggtgctacccactcttccagattcattccccttaagtgaaaagcttctattggggaatgtgtttacttgctcgttttatgtggatctaagtacgcggatctcttatgtttttgaagctttataatgacatttctttagaagctttctcatctctagcttttgcgtttttattatcattttacaagtgtgtcttaatttaaattatattggtttttgtattgtttatattgattttttt

SEQ ID NO: 155932 - DNA, 113 bp, Arabidopsis thaliana columbia
gacgaagttatgtttcccaatctgattatgatccgtatcgatggccgaaatttttccagaagttcttattttcacaagggggggtatcctaattatctttcatattaatattt

SEQ ID NO: 155933 - DNA, 375 bp, Arabidopsis thaliana columbia
gcggctctttcacgtccactagatgagaagcatctttttttggttcctgggtccaccggagcagaggaggaaagaagtccgtcgatctcgggtgtattatcgttaggccgcaagaatcttcgtctggactgttggtactcttgttgccgccgcgttactcgccggattcattaccttgatcgttaaaactgtgccgcgtcatcatcctaagactccggcgccggataattatactatagctctacacaaagctcttaagttcttcaatgctcagaaatctgggaaattgccaaagcataataacgtgtcatggagaggtaattctgggcttcaagatgggaaaggtgaaacatggagcttctatatagatttggt

SEQ ID NO: 155934 - DNA, 412 bp, Arabidopsis thaliana columbia
gcgatggtggagttcactctcgtttttatcatgttcagttgctgcttaagggttttgcagagcgtgtttctaagagaatccgggtccatattcttactgatggtcgtgatgttttagatggttcttgtgtcagatttgtttaaacttttttagctgtcctatctgcttttttttctaaattttttttatctcatgtatcatattttttgtattttttttttttttattcttttaactttttttttattttattttatttcttttatatattatatgtatttttatattttttttatataatattaatttatttgtgatttcttctatatcttattttttattatatttattatttattaatttttatttgtatatttatttttttcaaatatatactttgtatttatttatt

SEQ ID NO: 155935 - DNA, 263 bp, Arabidopsis thaliana columbia
aatttggataattggatctttgagtcttctttaattctctatggagaaaaaggtcacacttgtaacaatctatgagaagggaggtcactgattgatgaatgaatttgctcttcttcctcgctcaatcgtaagtttagtagaaattttcagagtcttcttctcgaatagtttctgatagttggggtagaatctcatttacactttatggtatcttgtttttatcttccttcttctattatatttttttattttttttctttatt

SEQ ID NO: 155936 - DNA, 405 bp, Arabidopsis thaliana columbia
gtcggaaattaggaggagctaaacggctttgtggtattgtcaatttcatcctagccgctggtttgggcatgacggttctcgttacgggattcgccgaggatcaccggaaaaccgccggtgatttagccggaccgagcgctagtgttaaagctggagctttaagtctctttgctgttcttggtatcccattagctattactttcagtactccttttgctctagcatccatattctcaagctgctccggtgcaggccaaggactttcattaggagttttaaatttggcgattgtgataccacaaatgatagtctcactaggaggtggacctttcgaccccttgttcggcggtggaaacttaccggcgtttatcgttggatcaattgcagcggcgattatgggagtat

SEQ ID NO: 155937 - DNA, 443 bp, Arabidopsis thaliana columbia
ccagacatcagcaagattcaggagattaaaaccttatattaaaacaatacaaactccaaattgaccggaggaaataacttaaaactggaatctgaaaagatgagctgcaatggttgccgtgttctccggaaaggttgcagcgagaattgtatcctccggccatgtattcaatggattgaaaccgccgatgctcaaggccacgccaccgtcttcgtcgctaaattcttcggccgtgctggtctcatgtcctttatctccgctgttccggattctcaacgtcctgctttgtttcagtcgttgctctacgaagcttgtggaagaactgtcaatccagttaacggagcaatcggaatgttatggactggaaactggaatatctgtcaagcggctgttgaaacagtgctttttcggcgggtctttaaaaccgttcccggagcttttac

SEQ ID NO: 155938 - DNA, 63 bp, Arabidopsis thaliana columbia
  unsure (1)..(63): unsure at all n locations
ggtcgagccagcgtncggttcaacgttgcgaatccaactactggatgctttattaagcacgag

SEQ ID NO: 155939 - DNA, 322 bp, Arabidopsis thaliana columbia
gcctcctttcggattcaaatctcagatctatctcaaccatggcgttgctcgtcgagaagacgtgaagtggccgtgaatacagggtcaaagacatgtctcaagccgatttcggtcgtctcgaactcgagctcgccgaagttgagatgcctggactcatggcttgtcgtaccgaattcggaccttctcagccattcaaaggcgctagaatcaccggatctcttcacatgaccatccaaaccgccgtactcatcgaaaccctaactgctctcggtgctgaagtcagatggtgttcctgcatcatcttttccactcaagaccactc

SEQ ID NO: 155940 - DNA, 447 bp, Arabidopsis thaliana columbia
gcgaaccaacaaaaagtcttcatctttaatcattcaatggcttcttcgtcttctatgcagatggttgacacttcccgctccattgcccagattgggttcggtgttaagtcgcaattagtttctgcaaatcgaacaactcaatcagtttgctttggagctcgttcctctggaattgcattatcttcgagattgcactatgcatcacccattaagcaattttctggggtttatgcgaccaccatgcatcagagaaccgcttgtgttaaatccatggctgctgaggaagaagaagtaatcgaacctcaagctaaagtgacaaacaaggtttactttgatgtggaaattggaggtgaagttgctggcagaattgtgatgggtctctttggagaagttgtgcctaaaaccgttgaaaacctccgtgccttgtgtactggtgagatgaaatac

SEQ ID NO: 155941 - DNA, 406 bp, Arabidopsis thaliana columbia
gaaaatgggtgcgtacaagtatgtatctgagtctatggaggaagaaacagtccgatgtgatgagattcctccagagggtgaggggctgggagtacagacagcaaccttcgattgttcgtctcgtcaggcctactcgtcctgataaggctcgtcgtttgggttacaaggccaagcagggctttgttgtgtaccgtgtacgtgtgagacgtggtggacgcaagatgccagtgcctaagggtattgtgtatggtaagccaacaaaccagggagtgacacaactcaagttccagcttatcaagcgttctgttgctgatgagcgtgcttgcatgaaattgggtgtgtctcaaagttgtcaactcttactgtctcaattaggattctacctacaagttctactatgtcattt

SEQ ID NO: 155942 - DNA, 376 bp, Arabidopsis thaliana columbia
attttccatagatcattcatagacgttctcttcatcaaatcaattcatcgtcgtctgtgcacggttgtcatcaccgatcgatgggcctactccgacgtacctcctcttccccgttaccttctcagagtttttagtagtcttcctttggaacaatgagtgacgtgtttgatggatatgagcgacaatactgtgagctctcggctagtctttcaaagaagtgttcctctgctatttcgctcgatggagaacaaaagaagcataatttgtcttattttaaatccggtctggtaaatgcatatgtattgtttaggaaaatttatctttttgcaaggtccctaccacctatatcttattttcagcctccttgtcaatatta

SEQ ID NO: 155943 - DNA, 431 bp, Arabidopsis thaliana columbia
ctcatttactgttctgtttcactttctctctctctgtatactctctaaatgatggcaaaaaactgtaatttagtcagtgttctatgtgtatttttggtattgaccctctttaacaaacccatcaccgtcgccgggcagaatattccggcggtgggcttgttcacctttggtgactccaacttcgacgccggaaacaaacagactctcaccaaaaccttactccctcaaactttctggccgtatggaaaatcccgagatgatcccaacggcaaattctccgacggcctcatcgctccagacttgctcgctaaattcatgaggattccgatcgtgatcccgccggcccttcaaccgaacgtcaatgtctcacgtggagctagtttcgccgtcgcttgatgcttctttactcgggagctccgtggaatctttgc

SEQ ID NO: 155944 - DNA, 174 bp, Arabidopsis thaliana columbia
cgcgtccggaaatatccattgcaaccagctttaaaaccatgttttaaccaattgattccccaaaatagccggggtattaattctggattgcggatcaggatcaccttttccgtttccatttcctcctcatacaagtcctgcttcctcgccattccaatctcaatcccagtcttc

SEQ ID NO: 155945 - DNA, 287 bp, Arabidopsis thaliana columbia
gcgatccgatctcatctctctaatttcgaatctcatgttggagccggcaaatactgttggggtgtccggtgaacccgactccggggctgaaaaattatctctatatcgtgattccgactatcagaaacctcgatttcctcgagatgtggaggccttttcttcaaccttaccatctgatcatcggccaggacggagatccatcgaagaagatccatgtccctgaatgttacgactacgagctttacaacaggaacgacattaaccgaattctctgacctaaagcttct

SEQ ID NO: 155946 - DNA, 429 bp, Arabidopsis thaliana columbia
gggcggccacgcgtcgcaagtaaacttgaacttgactaattttttttttttgattgtttcctaaatgcggggggctccccttaactgcagggcgagtttcaatatctcctgctccgttggcatcaagcccatccacgttcaagactgttgctctcttctctaagaaaaagccagctcctgctaagtccaaggctgtctctgagactatcgattatctcgccatagtgtttggccctgtcaggagaatcttcttgcctgtaggactcttgtatagatcatatatcccatatttctcataactgttattttactggtgattatttttattacctatttcgtcttgtaaagatgccacataacttttctcaataccaaacttttttattgatccattctatatcgcccttgttttcatcttcttcttcttca

SEQ ID NO: 155947 - DNA, 440 bp, Arabidopsis thaliana columbia
caatggagaagtgtacatcgatcggaagatcgttttactcgagttctatgggtggatctaaggagagtggaggaggagctgttggagtcagagggtttttccagagtcttagacatactcagcaaggtttagcacttaacatggatctctcaatcacagctttccatgaaagtattggagtaatagcttacttgcagaagcggctcgagtttcttacggaccttcctaggaacaaaggtagagaattgagtttagaggaaaagagagaagtggagaaagcacttaagaacataagagtctttgtttgccatagagaaacagttcaaaggtatcgagtttatgggttaacagaggaaattaccgggaatttatggtttcctgatagagaagggaaatatctatggcttttgagttacttcaaggataattttggtatgata

SEQ ID NO: 155948 - DNA, 431 bp, Arabidopsis thaliana columbia
agcaaatcgacgcagagcttgttctctcaatttagaagcttcaggagattcaagacgacctcgagaagattaacgaagaggccagtgactaggtcttggaagtagagcagaaatataacgtgatacggaaacctgtctatgacaagcgcaatgaagttatccaatcgattcctggcttttggatgactgcttttttgagtcatcctgccttaggcgacctcttgactgaagaagaccaaaagatttttaagtacttgaactctctggaagtggaggatgccaaagatgtgaaatctggatactctataacttttcacttcacttcaaacccgttctttgaggatgccaagcttaccaagacatttacttttcttgaagaaggaacaacataaatcactgcaacttctattaaatggaatgagggcaagggc

SEQ ID NO: 155949 - DNA, 448 bp, Arabidopsis thaliana columbia
atccgctttgttgcagaggatcacaatctattggctattccaatgtccatggcaatggcgactcctacagattccgtgagcagaggctggagtatgtcttctctcaaatcagctcttccctccaccgcatcactccgattaccttcctcgtcttctcgccgtccggttactcttcgtctcccaatctcttctccttcactcccatctttctccggtctctctccggtcaatcctctcctctcaatcggacttccagattggcaaagctttgagaatggattcaaaattgttgacggtggtggtcgtatctacgcgatgagacacggacgacttgttccgaagctgaacagaccaccggtccagcgcatagctcttctgcgaggactcacgactcaacttcttaagcattggagaatcaagacgactcgagcttgagctagtgcgatta

SEQ ID NO: 155950 - DNA, 360 bp, Arabidopsis thaliana columbia
aaaaaaaatggttttgcaaaaccttcctctatttgttctgctttggctcctgaccatcgtggcctgtccagcaaatgcagatggacctgtttgcccgccgtcgaacaaactaagccgggcaggtttccctgaaggttttttatttggcacggctactgcggcataccatgtcgaaggtgcgattaatgaaacttgtcgtggaccagccttatgggacatctactgtagaagatatccagagaggtgcaataacgataacggcgatgtggccgttgatttcttccatcgttataaggaagatatccaactaatgaagaatctaaacacagacccctttagaatgtctatcgcatggccaag

SEQ ID NO: 155951 - DNA, 438 bp, Arabidopsis thaliana columbia
cgtccgcgcttcttttattctcctttctcctcaaatttaatttctttgaatgaaattatccaatttgggtggggccaaagcgtctctaggaggaaaacccatcttcttcttcttaagattctgaatcattcattgattgatttagcttctcttcgacttcttaattttacagttttttttgttttttaaactttaattgatgcaaataagcaaacttggatcgctgtgagcctgtgataatgatttcttttaggtttgtaggatctgaaggaagctacggtttattttttttatgggcaatctctaacaggtacatatcttctcttagcttctctcttacaagatctttaagttttgtctcgttcttttggagttgctatctttctttcatgttccataggtttgccttattttatcacttttgtcataataatttat

SEQ ID NO: 155952 - DNA, 390 bp, Arabidopsis thaliana columbia
cagtaaagctagacgagtggacagatgatcaggttttcatgcttgtaggttacggtggaaggacggcagtgaacgaaagaggggaagcttgcaacatcgaccagtcaaagaaaccaaaaccagattctactaatgaggaacgaaatgatttcattagaaaaaaatatgagcagcaccagtttatggatccaaaggatggtgctttgtgcacttatcagcagcctagcagaacaaacacttcaccaccgtctttatgttctgcaagccaccgttctacaaaaaaccgtattggtcatgcatttaggaatagctggggaagaagagaatctgatcacaaaggaccaaagaagagcaattccatggcaggtatggttgaagttgtggggtgat

SEQ ID NO: 155953 - DNA, 442 bp, Arabidopsis thaliana columbia
aacaaatcttaaacgttttactttgtgctgcactactcaacctcaatggccgcctcaacaatggctgtctcctcccctgccttcgccggtaaggccgtcaagctttcccccgcggcatctgaagtccttggaagcggccgtgtgacaatgaggaagactgttgccaagccaaagggcccatcaggcagcccatggtacggatctgaccgtgtcaagtacttgggtccattctctggcgaatcaccgagctaccttaccggagagttccccggagactacggatgggacaccgccggactttcagctgaccccgagacattcgcaaggaaccgtgaactagaagttatccacagcaggtgggccatgctcggagccctaggctgcgtcttccctgagcttttggctagaaacggagtcaagttcggagaggcgtgttggttca

SEQ ID NO: 155954 - DNA, 307 bp, Arabidopsis thaliana columbia
  unsure (1)..(307): unsure at all n locations
aaagcctgcagatggtgtatgtggttgttnctacatggataaagatggtcttcagggggacactgattcttcgattagagatagcgcacatactctcataataattcaaatttcaggtcttatgtacctttcgtctcaccacatcattgaacaatcttgttgttactcatagtaaagaaacgtcctcataagtattgctcattcctttgcttatttttattattttactttaccataattcttatcatcttctacattcttattgcattttttgctttaatcattctcttaggtatctttttctttt

SEQ ID NO: 155955 - DNA, 182 bp, Arabidopsis thaliana columbia
cattcttcttcactaatctcccatctttctttttctattaataataaacatggatctcaccgacagagtcatattctaggtcgcgctctatttcatcaacctatgttggcgccggtacttttcctccttaagcagccattttatcttgatcattccacctataccaaaattttgtccactat

SEQ ID NO: 155956 - DNA, 396 bp, Arabidopsis thaliana columbia
gagaggacaaaaactccgttcgtggactacctaaagcccatcatcgccgacggagacaccggctttggcggcaccaccgccaccgtgaaactctgcaagcttttcgttgaaagaggcgccgctggggtccacatcgaggaccagtcctccgtcaccaagaagtgtggccacatggccggaaaggtcctcgtggcagtcagcgaacacatcaaccgccttgtcgcggctcggctccagttcgacgtgatgggtacagagaccgtccttgttgctagaacagatgcggtcgcagctactctgatccagtcgaacattgacgcgagggaccaccagttcatcctcggtgccactaacccgagccttaaaggcaagagtttgtcctcgcttctggctgag

SEQ ID NO: 155957 - DNA, 421 bp, Arabidopsis thaliana columbia
ggctaagaccgccaccgttggagtctggatcttcgctggatctcggtttgagtccgatgaggccaactgaacggctcatttgggggatcatatgatattcaaaggcacggataggcgtacagtgagagcgttggaggaagagatcgaagatattggtggtcacctgaacgcgtatacattgagggaacagaccacttattatgctaaggtattggatttcaatgtgaaccaggctttgtatgtcttgtttgatttcctacagaattctatgttcgagtaacagataatttaccgtgtacgggatgggggtgtgggttaatgctagtggtgctgtgtcatacctttattattgtatcttttccttttacatttttttatatatattttcatttttatttgttattttttttatttttttttt

SEQ ID NO: 155958 - DNA, 431 bp, Arabidopsis thaliana columbia
acctcatccactcctccatctcccggattcgttttcccagaatcatgcccatggagaacgacattggcccacacgttggcaacgtggtcgtcaccgctgagcaagcgaccaagattaacgagactgatggacggttgccggagaatcggcagaccggtgttgtctctgacaccggaagtggtagcgagagaggagagcaaggggttggagagtcggcagttgctgtggcggtgccggtggtggagagcggatcgatttcggtgggagagctacctgctccccgatcttcctctgctagagttccgtttactaatctaagccaaattgattgcggatcttgctcttgctcgcacactccagtaacaggagcggtcgtatatgatgtttgccatgaatagtgaaatcagtgtctttgggtgctgggaatactg

SEQ ID NO: 155959 - DNA, 361 bp, Arabidopsis thaliana columbia
aaaaaaagctattgtttgaaagaagaagaagttaactatggcaaaggatgtggaagccgtgcgccggagaaggatttcagacaggagactatcaagatccgccaccagctccgtttattgatggagcggagctaaagaagtggtctttctacagagcagttatcgcagagttcgtagccactctcctcttcttatacatcaccgttttgacagtcatcggttacaagattcagtccgatactgatgccggtggcgtagattgcggcggagttggaatcctcggtatcgcttgggcctttggtggtatgatctgtatcctcgtctactgcaccgacttttttctttggttgacacattttac

SEQ ID NO: 155960 - DNA, 360 bp, Arabidopsis thaliana columbia
gaactttccaactgttggtctctttgatggttattttagacaaaatcttgaggagacaggaatgggatatggtcttgagagttaaaatgatctcagaagcgcacaaaatggggctgttgaccactccatatgctttcaacccaaaagaaggagaagaaatggcaaaagcgggagctgatatcatagtagcccacatgggtctaacgacatccggaaatattggggcgaaaaccgcagtttcagtggaagaaagcgttgttcgtgtacatgctattgcagatgctgctcgtagattcaacccagacattatcgttctctgccacgtatgtcctaatattttttccagatgaggcagtgttt

SEQ ID NO: 155961 - DNA, 172 bp, Arabidopsis thaliana columbia
gctttttggccgaggaaggataaaaagagactccatgttaagaagacctgcgaggtgttaccgtcgtatcattgttaagccataccgaaagtctcgctactgtcgtggtgtgccagatccaaaaatcaggatctacgatgttggtatgaatagtaagggtgttgatgatttt

SEQ ID NO: 155962 - DNA, 439 bp, Arabidopsis thaliana columbia
  unsure (1)..(439): unsure at all n locations
ctcacatttctctttcaaatttcttcgagtctctttcgctctctccgtttcttcgcggtctctgtggctcatatctctccgaaacgggcttctgaagcaaaatggggttgagtttcgccaagctgtttagcaggctttttgccaagaaggagatgcgaattctgatggttggtcttgatgctgctggtaagaccacaatcttgtacaagctcaagctcggagagattgtcaccaccatccctactattggtttcaatgtggaaactgtggaatacaagaacattagtttcaccgtgtgggatgtcggtggtcaggacaagatccgtcccttgtggagacactacttccagaacactcaaggtctaatctttgttgntgatagcaatgacagagacagagtttgtgaggctcgagatgaactccacaggatgctttatga

SEQ ID NO: 155963 - DNA, 445 bp, Arabidopsis thaliana columbia
  unsure (1)..(445): unsure at all n locations
ctgcgagaaagctcacatgaacaaaggagcttggttctaaagaagaagatcagcttcttgttgattacatccgtaaacacggtgaaggttgctggcnatctctccctcgcgccgctggattacaaagatgtggtaagagttgtagattgagatggatgaattatctaagaccagatctcaaaagaggcaattttactgaagaagaagatgaactcatcatcaagctccatagcttgctcggtaacaaatggtctttaatagctgggagattaccaggaagaacagataacgagatcaagaactattggaacactcatatcaagaggaagcttctcagccgtgggattgatccaaactctcaccgtctgatcaacgaatccgtcgtgtctccgtcgtctttttaaaacgatgtcggtgagactatacatcttgatttctctggacc

SEQ ID NO: 155964 - DNA, 248 bp, Arabidopsis thaliana columbia
ggaaagatgagtctctctccgagagattttttctctatcatcttatcttcttccgtgtaatgctctgagccaaaacccaatagctaaatcaacaacaatatagaagagaagagaaagatcttatctttcttctcattcttgagtttagtcccccacaatggctattcgtaaggaggaagaaagtatagaagaacatagcaattcgtttcttcttgatgctctctactgcgattattagaattgggacg

SEQ ID NO: 155965 - DNA, 295 bp, Arabidopsis thaliana columbia
ctctccgtcctcttgttcgcgctgcatctgtttatactgttgagccaaccactgattcggggattgtttacaaatcggtcaagtcgattaggtttttggctatcgatgcggtggagaaggccaaatcaggtcatcctggtcttcctatgggttgtgctccgatggcttcacattttgtatgatgaggtcatgaggttttaccccaatatccctttttgtatcaaccgtgacctatttcgttctatctgctggacatgttagtttgttgcttttactctttacttaatcttgtctt

SEQ ID NO: 155966 - DNA, 449 bp, Arabidopsis thaliana columbia
gcctcttccattagagtcatccccgacttccttaaaccaggaatcatgtttcaggacataacgacggttcttctcgacactgaggcgtgtaaggatactattgctttgtttgttgatagatacaaagataaaggcatatctgttgttgcaggtgttgaagctagaggtttcatttttggccctcctattgcgttggctattggtgccaaatttgttcccatgaggaagcccaagaagctacctgggaaggttatttcggaggagtattcgttggagtatggaacagatacgattgagatgcacgtaggtgcagtagagcctggtgagcgtgctattattattgatgacctcattgccacgggtgggactctcgctgctgcaatccgactacttgaacgagtaggagtgaagattgttgaatgtgcttgcgtaattgagttaccagagct

SEQ ID NO: 155967 - DNA, 441 bp, Arabidopsis thaliana columbia
tgaagctctttgttcatctctctatcttcttctccatcctcttcatcactctcccatgttgttacagctgcaccgaaggtgagaagaatgccctccttcaaatcaagaaagcacttggcaatcctccccttctatcctcctggaacccccgaaccgactgttgtaccggctggaccggcgtcgaatgcactaaccgtcgcgttaccggtctcagcgttacctccggcgaagtctccggtcagatctcgtaccagatcggcgacctcgttgacctccgtacactagatttcagctacctgccacacctcaccggaaacatcccacgcaccatcaccaaactcaagaacctcaacactctctacttgaagcacactagtctctccggtccgattcctgattacatcagcgagctcaagagcctcacgttcttggacctttctt

SEQ ID NO: 155968 - DNA, 429 bp, Arabidopsis thaliana columbia
gacgacgagcaccactttgaggccagttaatccggagcttccaagacctatcctcaatcagccggtaacatccgtaaaggtggtcacatcgtcatcaaaaaccgtccctgcaaggttgttgaggtttcgacttccaaaactggcaagcacggtcacgccaaatgtcactttgttgctattgatatcttcactgctaagaagcttgaagatattgttccatcttcccacaattgtgatgttccacatgtgaaccgtgttgattaccagttgattgatatcactgaggatggcttcgtgagccttctcactgacagtggtgtgcaccaaggatgatctcaagctttccaccgatgatggtctcaccgcccagatgaggcttggattctatgagggaaaggatattgtggtgtctgtcatgtcttccatggg

SEQ ID NO: 155969 - DNA, 423 bp, Arabidopsis thaliana columbia
ctcagccatggccgtcgggaaaaacaagagattctttaagggtaggaagggaggaaagaagaagggtgttgatcctttctccaagagagattggtatgatgttaaggctccttcaatcttcactcacaggaatgttggaaagacacttgtttccagaactcatggtaccaaaattgcctcagaaggcttgaaacacagagtttttgaggtttctcttgctgatcttcaaggtgatgaggataacgcttacaggaagatccgtctcagagctgaagatgtccagggcaggaacgttctgtgccaattctggggcatggacttcaccaccgataaacttaggtcattggttaagaagtggcagactttgattgaggctcatgttgatgttaaaaccaccgacagttacactctcaggctattctg

SEQ ID NO: 155970 - DNA, 249 bp, Arabidopsis thaliana columbia
gggtcgaccaggcgtccgcactgcgccagtgttgtgcggctctgcgaatcttcttaaatgggtgcgtacaagtatgtatgtgagctatggaggaagaaacgttcgaatgttattagattcctccagagggttaggtgctgggagtacatacagcaaccttcgattgttcgtcttgtcaggcctactcttcctgataaggctcgttgtttgtattacaaggccaagcatggctttgttgtttaccttgta

SEQ ID NO: 155971 - DNA, 433 bp, Arabidopsis thaliana columbia
cggtggataacgacggaggcgggcgacgtttgtgtttctaatcatttctctctcttagacggttatggcagtgaagaaagccggcgaaatgttcccgaagagtttgatcgaagatgttcacaaatggggttgcatgaagcaaaccggtgttagccttagatacatgatggagtttggttccaaacctactgagaggaatcttttgatttctgctcagtttttgcataaggagcttccgattcgcgtcgccaggagagcgatcgaactccagacgcttccttatggtctctctgataaacctgccgttttgaaggtgcgggattggtatttggaatctttcagggacatgagagcatttcctgagattaaggattcgggtgacgagaaagattttactcagatgattaatgctgtcaaagttaggcttaacaat

SEQ ID NO: 155972 - DNA, 342 bp, Arabidopsis thaliana columbia
atttgggggatcatcaaccttctatcatcactttggatccttacaagtatcgtccttgaagcgcgtacaacgccccattctagaccacaaacggtggtgctccagtctccaacaacatctcttccctcaccatcggagaaagaggtccggttcttcttgaggattatcatttgatcgagaaggttgctaatttcaccagagagaggatccctgagagagtggttcatgctatatgaatcagtgctaatggtttctttgaagtcacccatgacatttctaacctcacttgttctgtattctctcagagcccctggtgttcaaactccggttatttgccgtttc

SEQ ID NO: 155973 - DNA, 382 bp, Arabidopsis thaliana columbia
gtatgctaccatgattgacattctcggtaaatctaaccgtgtgttggaaatgaaatatgtcattgagagaatgaaggaagattcttgtgaatgtaaagattcggtttttgcatcggttattcgtacattctccagagctggaaggctggaagatgctatttctctcttcaagagccttcatgagttcaattgtgtgaattggagtctatctttcgatactcttttacaggagatggttaaagaatccgagctcgaagctgcttgtcatatcttcagaaagtattgttatggttgggaggtgaattctcgaattacggctccgaatttgcttatgaaggttctttgccaggtcaatcgctctgaccttgcgtctcatgttttt

SEQ ID NO: 155974 - DNA, 433 bp, Arabidopsis thaliana columbia
ctctatcaaagccgcccaatcctcctctccaaaaatggcttatctccggcgagcaggcgccgcattggttctcattttggcagctccatctctttctctctctctcaaatgcacataacataacccgaatcttggccaaagaccctgatttctccactttcaaccactatctctcagcgactcatctcgccgacgagatcaaccgccggcaaacaatcaccgtcttggccgtcgataactcagcaatgtcctccatcctctctaacggatactcactctaccaaatccgcaacattctctctctccacgtcctggtcgattacttcggcaccaagaaacttcaccagatcaccgacggctccaccttcactggcttcatgtttcaatccaccggatccgccaccggtacttctggatacatcaacatcaccga

SEQ ID NO: 155975 - DNA, 385 bp, Arabidopsis thaliana columbia
gctgatgtctctgcgattcatatccctaagatcaatcttgagagggcagatattgttgtggatgtgcttgtcaagaacccgagtccagttcctatccctctcatcgatgtcaactacctggtcgagagcgatgggaggaaactggtttctggtttgatcccggatgctggaacactcaaggctcatggagaagaaactgtgaagataccattgacgttgatctatgatgacatcaagagcacttacaacgatatcaaccccgggatgatcataccttacagaatcaaggttgatctgattgtggatgtgccagtattgggaagactgacattgccgctggagaaatgtggagagatcccaattccaaagaaacctgttgttgata

SEQ ID NO: 155976 - DNA, 397 bp, Arabidopsis thaliana columbia
aattgatccaacatgggtaacacagataagctttttaatcagatattcgatttgaaatttacggcaaagtctctgcaaaggcggtcaaggaagtgtgagaaggaagagaaagcatagaaattgaaggtgaagaaggctatcgagaagggtaatatggatggtgctcggatctacgctgagaacgccattcgtaagcgttgcgagcagatgaactatctccgtctcgcttctcgccttgacgctgttgttgctcgtcttgatactcaggctaagatgaccaccatcaccaaatccatgaccaatatcgtcaaatcccttgagtcttctcttgccacagggaatctacataagatgtcatagacaatggattcattctagaagcagtttgtgaacatgg

SEQ ID NO: 155977 - DNA, 427 bp, Arabidopsis thaliana columbia
cacggatctgtgagatctagaagaagaagattatgtagaagctaagacaatggcatccatggcaggaccagatcatctcttcaatttgagaaaccatttctacttgggtgcttatcaagctgcgatcaacaacagcgagatccctaatctttcgcaggaagatatcgtcgagcgagactgtctcgtccatcgcgcttacatcgctctcggaagttaccagcttgtcatcagtgagatcgatgaagccgctgctactcctctacaggcagtgaaactccttgctatgtatctatcgagtcctgaaatcaaggaatcaaccatttcgagcttgagggaatggttggcatatccaactgtatgaaacaatgctattatcaggttgattgctggtactatatttatgcatgatgaagactataatgaggct

SEQ ID NO: 155978 - DNA, 136 bp, Arabidopsis thaliana columbia
caatacccaaccattatttttattttccaagatgataggattgattgcgggggctttaccgagttcaggacctctccttctctgaccttatattttttgttgcgccactctggattgctgttgctgccgatgtttt

SEQ ID NO: 155979 - DNA, 229 bp, Arabidopsis thaliana columbia
taaatcttcaaatcgaaaaatttccgatatatttattcaagttcctttagaaaatgtcaggtggtgtaaagggaggcaaaggttgtggcaaaggtggagccaaacgtcatatgaaggttctgagagacaacatccaaggaatcactaaaccggcgattcggagattgtctcgtataggtggagctcaacatatatagtggtctgatctacgtaatgtgacacctgattt

SEQ ID NO: 155980 - DNA, 62 bp, Arabidopsis thaliana columbia
gcatcctaatttcctcactcccgtaattttctccttatttttcttccccaattccttcaatt

SEQ ID NO: 155981 - DNA, 435 bp, Arabidopsis thaliana columbia
  unsure (1)..(435): unsure at all n locations
gtaaatttgtgatccaaaccctagctccattgggttgcttacccatcntcagacaggaggtcaacaccgggatggagcagtgctatgagaaactcaacgatttggctaaacaacacaacgaaaaaattggaccgatgttgaacgaattggctagaacagctcctgcatcagctcctttccaattcaccgtctttgatttctacaacgcgattcttactaggacgcagaggaaccaaaacttccgatttttcgttacgaacgcatcgtgctgcggagttgggacacatgatgcttatggttgcggttttcctaacgtacattcgaggctatgcgagtaccaacggtcttacctattcttcgacggacgtcacaacactgagaaggcgcaagagatgtttggtcatcttctttttggagccgatacatatgttatcc

SEQ ID NO: 155982 - DNA, 435 bp, Arabidopsis thaliana columbia
ctttctgcttctctatattttaacactttcttccgaatttgcccctcaagttttagttggattgctaaaatggctggaagcctagttaactccgccgggagattctcaccgggaaattgtattcttcctcaacagagaacagccagattctacagcggaaccgcgagatttcccaccggagctccgtcgtttaaggcttcagctcagacgcttaacgccgagccagctgtaacggaatccgttcgtcggagagtttctagcctctacgaattactgaaagtgaatgaaacggcgtccttgacggagatcaagacggcgtaccggagcttagctaaagtatatcatccagatgcgtcggaatcggacggtcgagattttatggagattcacaaagcttacgcgacacttgcggatccgactacaagagcgatttac

SEQ ID NO: 155983 - DNA, 456 bp, Arabidopsis thaliana columbia
  unsure (1)..(456): unsure at all n locations
cggggtgggccgacgcgtccgcccaactctcaagattccaattttcttcttcctcaccgaacccacttttccttcnacctgggagtcanattctgagtatggccatgaacaagtcgccgtctttagtggtggttgcggctactactgcggcagagaagcagaagaagaggtatcctggagaatcaaagggttttgtggaggagatgaggtttgtggctatgagacttcatactaaagatcaagctaaggaaggtgagaaagagactaaatctattgaggaacgtcctgttgctaaatgggaacctactgttgaaggttacttgaggtttcttgtggatagtaaattggtttatgatactcttgaactgattattcaagactccaatttcccaacttatgccgagttcaagaacacggggctggaaagagcggagaaattatccacggatttggagt

SEQ ID NO: 155984 - DNA, 427 bp, Arabidopsis thaliana columbia
gcgtccgatctctgaatctctccaagctctcttcttatcaaaccatggatccttacaagtatcggcgagggagttcttacaactctggctgcttcaccaccaactctggtgctcctgtatggaacaacaactcctccatgaccgttggacccagaggtcctatccttcttgaggattaccatctcgttgagaagcttgccaatttcgacagggaacggattccagagcgtgtggttcatgccagaggagccagtgctaaaggtttctttgaggtcactcatgatatctctaacctcacttgtgctgactttctccgagctcccggtgttcagactcctgtcattgtccggttcttcaccgttatccatgaacgtggaagtcccgagaccctgagagacccctgtggttttgcagtcaagttcttcac

SEQ ID NO: 155985 - DNA, 346 bp, Arabidopsis thaliana columbia
  unsure (1)..(346): unsure at all n locations
aaaaaagaaaacacaaaaacaaagtatattttggcttcctcaaccatnnctttgggctcgccttccttcaccggaagggcggtnaaacctgccncatcanatgtcctcggaagcggccgtgtgaccatgaggaagactgtcgccaagccaaagggtccatcatgcagcccatggtacggatctgaccgagtcaagtacttgggtccattctccggcgagcccccgatctaccttaccggtgagttccccggtgactacggatgggacaccgcttttctatcctccgacccatagaccttctccaggaaccgtgagctataagttattcacaacatattgtccattc

SEQ ID NO: 155986 - DNA, 336 bp, Arabidopsis thaliana columbia
  unsure (1)..(336): unsure at all n locations
ggaaaccggggtggacccacgcatccgctcacacacacactttctcttctcttattttctcagttcttttaactcttttctgtacgtatattcaaatggccagcatggacattnaacaagttactccagtagcagctgagaacatctaggtgccaccaccaaatgctgtggagtcggaggaagtcaccaccgtctccgagtctcttccagctcctgtaacagaatctcatgcgcctgtcgaagtaacaactaaagattttgtcgtgtaagagacagagaaaccaatcgaagaaacacaggaagctcaagtttaaacttctgatgttgtggagatca

SEQ ID NO: 155987 - DNA, 309 bp, Arabidopsis thaliana columbia
  unsure (1)..(309): unsure at all n locations
ctctcatcctcagaaagaatggctcaaaccatgctgcttacttcaggcgtcaccggcgggcattttttgaggaacgggagcccttttnctcagcccaaagttcaccatctcttcctctctggaaactctccggttgcactaccatctaggagacaatcattcgttcctctcgctctcttcaaacccaaaaccaaagctgctcctaaaaaggttgagaagccgaatagcaaggttgaggatggcatctttggaacgtctggtgggattggtttcacaaaggctaattaactattcgttggtcgtgtttct

SEQ ID NO: 155988 - DNA, 337 bp, Arabidopsis thaliana columbia
ggggggacgacgcgtccgcggacgcgtgggctgcaaccatgtcgaatcgatgtaagaggaggaacctctggtaacaaggtcagcatgtcactgggtctggggagtggcagccactgtgaactgtgctgacaacaccgaagctaagaacctttacatcatttcggttaaaggaatcaagggtcgtcttaaccgtttgccatcagcgtgtgttggtgatatggttatggctactgttaagaaaggtaagcctgatctccgtaagaaggtgctttctgctgtcattgataggcagaggaagccttgtcgcctaaaggacggcggcttgatgtatttttaa

SEQ ID NO: 155989 - DNA, 284 bp, Arabidopsis thaliana columbia
ctccaaaggatcaacagttaaaagtataatgttgctttcatttgcaaagctttttagccggctttttgccaagaaggagaggcgaatccttatggttggtcttgatgctgctggtaagaccaccattttgtacaagctcaagcttggtgagattgtcaccaccattcccaccatcgggtttaatgtggagacggttgagtacaagaacatcagcttcacggtttgggatgtcgggggtcaggacaagatccgtcccttgtggatacacttcttccaaaacactc

SEQ ID NO: 155990 - DNA, 303 bp, Arabidopsis thaliana columbia
  unsure (1)..(303): unsure at all n locations
cactcatatataaacacatattcttactgtcactaatgcttctctctctgtctgtttctcttgtcctatagatggacaagcttncnatctctgttcgctagatctgtctgaaacagtgaggggattcctaggtttcagagcaaagtaatgtctccactcaagtacttgtgttttagaaaggtactcttgttgttgctctattccagtctcttcctattctcttcttcttctttctttgcctcatcagttgatgatcatgatctacaacgaatagaacctcatttgcgagtgagaagattgttt

SEQ ID NO: 155991 - DNA, 272 bp, Arabidopsis thaliana columbia
  unsure (1)..(272): unsure at all n locations
accttcttccaatcttcccttcactanctttagacactcttctctctctgcgctggttcttttttactcaagctgtctctttcaatctctaaaactttcacttcctctctaattatttaacccaaaccctaaattccccccttcatcttctctacttcccacacttttcttttttacaaaccctttaaaaaataaaactttttccaacttttttctctctttaacaaccctcttcttcctctccctcttttctctttcatttcaaacttcac

SEQ ID NO: 155992 - DNA, 430 bp, Arabidopsis thaliana columbia
  unsure (1)..(430): unsure at all n locations
cgtccgttctctcttactctcacagtgactattcttcttttcagatctaaaagagagnaanataggccgtttggattcaatatcggttgaggaaaccttttgacttcacaagaatggcagtgacagaagcagaaaatcctcttcttggtgaaatcacttgtggcaccttactacagaagttgcaggaaatctgggatgaggttggggagagtgatgaagaacgagacaaactgcttctacagattgaggaagagtgtctgaatgtttacaaaaagaaagttgagctagccgcaaaatctcgtgcagagcttcttcagactttgtcagatgccactgttgaactttccaatctcacaactgctctcggggaaaaaagctatttcgacattcctgataagacttcaggaacgatcaaagaacaacttttttc

SEQ ID NO: 155993 - DNA, 464 bp, Arabidopsis thaliana columbia
  unsure (1)..(464): unsure at all n locations
cgtccgaacaggaaggctcatttcacagcttcctctatcttgaggcgtgtgataataaactctccgctgtgcacctatcttcgtgagaagtacaatntcanatccatgccnatccgtaaagacgacgaggttcagatcgttcgtggtacttacaagggacgtgaaggcaaagttttttaggtttaccgtcacaaatgggtgattcacatcgagagaatcacgagggagaaggtgtattgaacaaccgtgaacttttggatttattcgtttatagtattgataatttatcttcttttttattaagggggggaatcttttttctttaattattacttatagttctatttctttttttaatatattattatcgtacttatttttttttttttgttatttatttatttctattttttttttttattattttttttttttacttatttattttttattttttaattttt

SEQ ID NO: 155994 - DNA, 441 bp, Arabidopsis thaliana columbia
  unsure (1)..(441): unsure at all n locations
gagaaaaacaaaaatggcggttctttgcttgtcttcaacggtgatactctcttcttcttgcgtgaaatcctccggaagtgagagaaantctccntttttagggttctctttaacggctatctcgaagccgtcggtactagtcgtcatttatgcgaattcgaaaatattattgcaagtgaagtgtgaaactgatcctactactacgacttctcttgttcctgcgaatcaactatggatgttcgacgaagaagaatctaatggccctgacatctttaacacgacatgttatccaaaagcttcagaccatgttaacactgacaagcccttttttttggtttatgcaacttaaaaattctttgtttatttacttctacaatttctaatcacatccattttaagaatcttgcctcttacactcctaatttcgacattttaactttt

SEQ ID NO: 155995 - DNA, 306 bp, Arabidopsis thaliana columbia
attgaattagccatggagaagaatactttttaaaccatcttctccaacttttttcttctccttctcctttcttcatgggggtcttctcaacttccgaccagtttcttccaaaacctaatttccaaccttgaaaccaattgtccttacccctgtccgtaaaaaattccaccaaactttcgtaaccgttccggccacttttcgcttttttttcaacaattgcttcgtccgggattttattccttcattattattaccttaacaatcgaaaaagaccattcaaaatacatttcatttgcccgagaccga

SEQ ID NO: 155996 - DNA, 322 bp, Arabidopsis thaliana columbia
  unsure (1)..(322): unsure at all n locations
gtagactctaagctaaagccaccgttttattttcagatctcagatctcanctctggatgcgactccatggccgagaagggcaaanaaaaggtaactattatgaagttgaaggtggatcttgattgtgccaaatgttacaagaaagtgaagaaggttctttgcaagttccctcaaataagagaccaattgttcgatgaaaagtccaacattgttatcatcaaggtggtttgctgtagtcctgagaggatcatggacaaactctgttccaaaggcggcggctcgataaagaccattgagatcgtcgagccacccaagccttctt

SEQ ID NO: 155997 - DNA, 337 bp, Arabidopsis thaliana columbia
gatcaacatactctaatcagcagcaaatttttagcgtcaccggagcattgactgtggcggttccttctaccgccggcgcgtgccatacaaaaccctttctcatctcctcttcctttcccaagcagacaaagaaactccatctctcttcgccttctctgtctctaccatcatcacatttctcctcctctttcaaaaccgcagctacctccatcgagcaacagtcttctgttaacaagggagagagcaccaagtaccatttcctggtatcaaacgctaaattcatgcttgacgaagaggagcacttccaagaacaattgttttaacgtctcctttactt

SEQ ID NO: 155998 - DNA, 408 bp, Arabidopsis thaliana columbia
  unsure (1)..(408): unsure at all n locations
gggtccgaaggaagcaaactttcaagctccgccggtttatttggaaaaccnatcgaaattcacgtntttaaatgttgggcgggggggtcaaattacttgattcttcaaacaatggatgtgattaagacgcaacagatttcancaaggacgatcgagaaagtggttgttcatccactagtcttgcttagtatcgtcgaccattacaatcgcgtcgctaaggattcaagcaagcgtgtcgtcggtgttcttctggggagcagctctcgtggtgttgttgatgtcaccaacagctatgcagtgccgtttgaggaggatgacaaagacccaagcatttggtttcttgatcacaactaccatgagtcaatgtttcacatggtcaagagaattaatgccatagagcatgtttta

SEQ ID NO: 155999 - DNA, 394 bp, Arabidopsis thaliana columbia
  unsure (1)..(394): unsure at all n locations
cacaatttttgacagacaccaagccggtannataatgaaacatataaacaaactggggtgtcattcctcgagggcgggagggatacttacananattattgctccacagcatctgctgctgtgttggtggggaaccatttgtatgttgcaaatgttggagactctattacaatattttctaaagcttggaaagctatcgcgctatctgatgaccataacccaaatacaatctattaaagaaaaccaatttaaagtgcttttgtttttatcattttttcaataacattttaagtattgttgtgtgttttctatttttcctccatttttatactacatttttttaatatatattatttctcttatcctaatttcctattacttcttttcttttatt

SEQ ID NO: 156000 - DNA, 259 bp, Arabidopsis thaliana columbia
  unsure (1)..(259): unsure at all n locations
gcaaatcttaaacgttttactttgtgcgtcactactcaacctcaatnnccncctcaacgatggctctactactgccgttgcttcnccaaaaaannccttcaanctttccccctcggcatctgaaatccttggaagcggccgtgtgacaatgaggaatactgtttccaatccaaatgtcccatcaaacaacccatggtactgatcttacctttttatttacccggcnccatacactggccaatcacctatctaccttacc

SEQ ID NO: 156001 - DNA, 405 bp, Arabidopsis thaliana columbia
  unsure (1)..(405): unsure at all n locations
agatctcnctcaccgctctcattttttcatttctccgtccgtcnaanaacccaagggcgcgaaattagggtttctggtggganaanatncnanaaatcataancattcacatcngacaagctgggatccangtcggaaattcgtgttgggagctttactgtctctaacatggaatccagcctgactgaatgatgccgagtgatactacagttggtgtttcacacgatgctttcaatactttctttagcgagacttgtgcttggaaacatgtccctaaggctgtcttcgttgatctcgagcctacccttatcgactaagttcgtactgctacttaccgtcaacttttccatccaaagcaactcatttcttgcaaagaagattcttctaacaacttctctagatgac

SEQ ID NO: 156002 - DNA, 253 bp, Arabidopsis thaliana columbia
  unsure (1)..(253): unsure at all n locations
cgacgcattacattttcttccgatctatacatagagatcagtttctnananagaatgatatgtctatagaggaagagaaggttccaacnactgttgactcatgagctgccgatacaacggtgaaatctccgtagaagaaacctgcggcgaaaggtggtaattctaataagacgactactgctaaagcaactaataatccttttaaagcttcttcttcaactaataataaaacaacttccttttaccctaccta

SEQ ID NO: 156003 - DNA, 222 bp, Arabidopsis thaliana columbia
  unsure (1)..(222): unsure at all n locations
gaaaacccggcccgaccgcacgcatacgcgcaaatcctgaaattattatcatttaaatcttatatggagaagaactannngccgcagattcttttgctaagggggccgctcatcataacacnaaatattatcttcanagtcatcttttgagtattcaagaagcttttttcattgacaaaattaatctttctttatactctatatactcataatataataact

SEQ ID NO: 156004 - DNA, 418 bp, Arabidopsis thaliana columbia
  unsure (1)..(418): unsure at all n locations
cagccaattccagcgttctttttctctgccggagtcggatcattaaactggtcgcgtcttcgagatcggtgtgaccttcganctcgtctacaccgtctacgccacagccgttgaccccaagaacggtagtctcggaacaatcgcaccaatcgccataggtttcatcgttggagctaacatcctcgccggtggagctttcattttttcttccatgaacccagccgttgctttcggaccagccgtcgtaagctggacgtggaccaaccactgggtttactgggctggtcctcttattggtggtggacttcccggaattatctacgactttgtcttcatcgatgaaaatgcccacgagcaattgcctaccaccgattactgaaaacgtcaaattcaacgttgttaatctgatgaatttttc

SEQ ID NO: 156005 - DNA, 358 bp, Arabidopsis thaliana columbia
  unsure (1)..(358): unsure at all n locations
atttcatagctcctaacaaagcaatatcatttccaatttataaaanttaaanccatcgctgcatctttctctgtccggtggatnataatanaanaanaangnagattcnaagcggaggttgcggaagtgcagacttggtggagctcagagaggttcaagctaacaaggcgcccttacactgcccgtgacgtggtggctctacgtggccatctcaagcaaggctatgcttctaacgagatggctaagaaactgttgagaacgctcaaaaccatcaaaccaactgtacggcctctcgcaccttcggagcgtttgacccttgtcaagtgaccattatggcttaacatttgtacaccatcta

SEQ ID NO: 156006 - DNA, 376 bp, Arabidopsis thaliana columbia
  unsure (1)..(376): unsure at all n locations
gagaaaccttcttcttctttcttcttcttctacaaaatttcacaaaacnagagagaggggagattcaaacaaacgaggtgacaggtganaaattcgaaatctttgcgagctcgtctcgcccagaatctcgatttctccacctttcctcttcaattcatcttccaaatccctaaaaaaaagactcaaactttttaattttggtccaaaaaagactcaaactttcttcatcaatggcggagaaaatcacgagagagacgtcgttacctaaagagagaagcagcccacaagctctaatcctgggacgatacgaaatgggtaagcttctcggccatggtaccttcgctaaagtttacctcgcacgtaacgtgaaaacaaa

SEQ ID NO: 156007 - DNA, 311 bp, Arabidopsis thaliana columbia
attggcggtacgaatataaacgcgattcaatatccaaaagggagaagaaaagagaaagagaggcgaggatgggagatttgggagaagggtacaagctagtgttcttgggggatcaaggcgtagggaaaacgagcatcatcacttgtttcatgtacggtaaattcgacaccagttatcaggcaacaattggaatagactttttgtcaaaaacaacgcggtatgaagataggacttttcgtctgcaattgtgggatactgcaagacaagagagatttaaaagcctagtaccaagttatatcagagatgcttct

SEQ ID NO: 156008 - DNA, 440 bp, Arabidopsis thaliana columbia
  unsure (1)..(440): unsure at all n locations
gttcttgtttagaagaagcaatggccacttcagcaatccaacactcttctttcggtngccaaactaccctaaaggcggcgaacnatctcctccgcaaaatcggagcctccaatggcggtggccgcatcatcatgcgtcgtaccgtcaagtctactcctcagagcatctggtacggaccagaccgtcccaaatacctaggaccattttccgaaaacacaccatcatacctaaccggagaataccctggagactacggttgggacaccgctggtctctcagccgatccagaaacattcgcaaagaatcgtgagctcgaagtgatccacagtagatgggcaatgttgggagctttaggctgcaccttccctgaaattctctcaaaaaacggagtcaaattcggtgaaaccgtgtggttcaaggcaggatctcaaatcttctca

SEQ ID NO: 156009 - DNA, 436 bp, Arabidopsis thaliana columbia
ggtcctcgtggcagtcagcgaacacatcatccgccttgtcgcggctcggctccaggtggacgtgatgggtacagagaccgtccttgttgctagaacagatgcggtcgcagctactctgatccagtcgaacattgacgcgagggaccaccagttcatcctcggtgccactaacccgagccttagaggcaagagtttgtcctcgcttctggctgagggaatgactgtaggcaagaatggtccggcgttgcaatccattgaagatcagtggcttggctcggccggtcttatgactttctcggaagctgtcgtgcaggccatcaagcgcatgaacctcaacgagaacgagaagaatcagagactgagcgagtggttaacccatgcaaggtatgagaactgcctgtcaaatgagcaaggccgagtgttagcagcaaaactt

SEQ ID NO: 156010 - DNA, 438 bp, Arabidopsis thaliana columbia
  unsure (1)..(438): unsure at all n locations
cgcggacggacgcgtnccgcacgnaagaagcagcatgcagcacgcacactttctcaagaaatctctctctgtctttgtcatcacgactgctatcgtctactaggagggaagagatcatcattctacagtttcaagaagataccatttccaagacttgaaactgtggaagaagcaaaaatggggactttgagtaaggtgctatgtctcatgctgctttgctgtatcgtggctgctgctgagggtactttgaagtacaaggacccaaagcagcctttgggtgcaagaatcagagatttgatgaaccgtatgactctacaagagaagattggtcagatggttcatatcgaacgcagcgtcgctacacctgaagtcatgaagaaatacttcattgggagtgttttgagtggtggaggaagtgtgccctcggtaaaagcttct

SEQ ID NO: 156011 - DNA, 310 bp, Arabidopsis thaliana columbia
acttacgccgcttcaaggttggagatattaatgcgacattgtctatacatgacatgtggagtccacatcattaagagaacagcttgaccttatctgatctgatagaaaatgtattgaaggtgcctgcttcgtttcccttctcttcttgaccagaaaaacatataagaagaagaataagaagaatttaattcaaggttattgttattgtggttttgattctgaatctgtctacgaatttgatacaacttaaacatatgataaaatcagacaagctatctcatttcttcttaaaggcttcataaacactccc

SEQ ID NO: 156012 - DNA, 301 bp, Arabidopsis thaliana columbia
  unsure (1)..(301): unsure at all n locations
gcgtccgcccagctcaagtctccttcatgactaaattttttcacatctacatgacatctaacnggaggtagaatcattgctggtctgggttcgaaaactatacctcaccttgcaaaccctatccatgctgttgtcaccaaagccgtctgagaaactgaacaccaccatgacaccaaagcttaataataaagattttgttcttttctttctattataacatttccggcagtgacaagataaatgtcgtgactcatcttttcagttcattgaagatcagtggcttgtctctgccggtcttatt

SEQ ID NO: 156013 - DNA, 448 bp, Arabidopsis thaliana columbia
  unsure (1)..(448): unsure at all n locations
gcgtccgggagaatcatttcttcgattgagcagaaataatatagcaaagggaacgaanatcatggggctgttatcaaggattacagaggaaagattgaatcccagcttagcaaaatctgtgatgggattttgaatgttcttgaagctcatcttattccttctgcttcaccagctgaatctaaagtgttttatcttaagatgaagggtgattatcataggtatcttgctgagtttaaggctggtgctgaaaggaaagaagctgctgaaagcactttggttgcttacaagtctgcttccgacattgccactgctgagttagctcctactcacccgataaggcttggtcttgcactcaacttctctgtgttttactatgaaatcctcaactcgcctgatcgtgcttgcagcctcgcaaagcaggcgtttgatgatgcaatcgctgagttag

SEQ ID NO: 156014 - DNA, 355 bp, Arabidopsis thaliana columbia
cttctactaaaccactcctctttttcactctctctctctctatatactctttaaaggaggcctaaaaactggcatgagaggcaactatctatgtgtattttaaacattaaccctctttaacacacccatcacccacacactccataatatctctaacacctgcattgtcacctttggttacaacaactccaactcaccaaacaaacagactcttaccaaaacctcactccctcaaacttttattccttctacaaaatcccaagacaatcccaacaacaaatactccaactttcccattgatgcaaacttcctcgctaaaaacatcatgattcccatcgaaaaacactccttcctt

SEQ ID NO: 156015 - DNA, 346 bp, Arabidopsis thaliana columbia
  unsure (1)..(346): unsure at all n locations
ggccgtcctcgccacactggagtgattgtttgaatgggacagaaggatgcatatgggggggattaagctcaatgcgggcgtggtattcttacccttaaataccctattgagcacggtattgtcaacaattgggatgatatggaaaaaatctggcatcatactttctacaatgagctccgtgttgctcccgaggagcatcctattctgctcactgaagcgcctcttaacccaaaggctaaccgtgagaagatgactcagatcatgtttgaaacctttaacgctccngctatgtatgtcgccattcaagctgtcctgtcgctttatgctagtggtcgtactacttgta

SEQ ID NO: 156016 - DNA, 397 bp, Arabidopsis thaliana columbia
  unsure (1)..(397): unsure at all n locations
cggacgcgtggggttcttgttgctttaatcacaaacagaacaaacaaaaaatcgagttgagagtctctcagtcggtaggggaagcaaatanagaaatggctagctttactgcctccgcttccaccgtctccgccgctcgtccggctctccttctcaagcctaccgtcgccatctctgctcctgttcttggtttgcctccaatgggtaagaagaagggaggagtgagatgttcaatggagacaaagcaaggaaacgtctcagtcatgggtgctggattttcatcttcagcaacagctgctttgacagcacttattatcaatccctctttggcttttcttgattagatgttttcctcacattgaacacgttttcctctttttcttatctacaacctttt

SEQ ID NO: 156017 - DNA, 251 bp, Arabidopsis thaliana columbia
  unsure (1)..(251): unsure at all n locations
atgggtaacgtgaacgcgagagaagaagcgaatattaacaacgcttctgctgttnaagacgaagacgctgagatttgttctcgtgaagctatntctgctgcttctgatggtaaccatgtcgctcctcctgagcttatgggtcaatctcctcctcatagccctcgagctactcagtctcctctcatgtttgctcctcaagttccggtgcttccacttcaaagacctgatgaaattcatatccctaatccttc

SEQ ID NO: 156018 - DNA, 417 bp, Arabidopsis thaliana columbia
  unsure (1)..(417): unsure at all n locations
ccgtcatccattaccgactttaaaaacaagatttctctaagggtaccaactctgcaaataagaaggcttattatactatatggaaggacaactgaattnatctaaaccctcattcaatcactactcacactaatcattacaaaacactatcttccaaacctcaccgtcccaaaaatcactcagaagacttcaaacacaaagtatcttaactcaatcaatctaaactcaaatgaactaatcataacccttactactcaattcaaaaccgaaacatattataacaatagcacttacgtcaatcatctatccaagactcagaccccaaacatccttaaacttacttgctctgattctaaagtttatacatctaacatctctaattttcaacctaaagacacttttagttacacaatcata

SEQ ID NO: 156019 - DNA, 286 bp, Arabidopsis thaliana columbia
  unsure (1)..(286): unsure at all n locations
tggattttcttcaaacttcncatttttattgtataactttgccgctantcctttgtttgcttctcacaagaatccggtgtgacnacctcaantttctncccctccaatattttctgctcccaacatgctacctcctcctgtcttctcgtcacatgaaatanttttcctatcatcanatactacactatgaaatctatttcttgactttacttcatttaataattcatttcaaataccaccttccattttatatttaaaatctttcaattaatttttacattttttt

SEQ ID NO: 156020 - DNA, 266 bp, Arabidopsis thaliana columbia
  unsure (1)..(266): unsure at all n locations
gagaacccaacatggagcttctctgtcactacttgtcacagcttctcgtanctccttgcatgtttttaaaatagtnttgcccccacaaaaaanttttccattattcctccaatttttataccatttacttattctatctaattaattaattatactaatataatctaaatctttttttttatatatatatacttataaaaaaacaattaaatttttatctatcttaatatacttatatctaataacttatattatattatttttat

SEQ ID NO: 156021 - DNA, 406 bp, Arabidopsis thaliana columbia
  unsure (1)..(406): unsure at all n locations
ctcgtccgttgttgcataagtgctatttatctctcgtcgaatcttgntnnnaagatcgataaatcctatgttgtcgcgctgcgccnaaaagtatnaccaatatcatgtcttccatggaggaaacgaggaagagagaaaagccaattatactgacatggttaataatttactatgaccttgctactagcttttatgagtacggatggggagaatccttccatttttcacaaatatggaaaggagaatctcttctagagattattaatcgacactatcactttcttgcttcttagttgggcgggcgaccagtacaaaatatttctttatttcttattttataatttattttttccttttcttatttttccataattccatcacttttatttttttctttcttttactt

SEQ ID NO: 156022 - DNA, 419 bp, Arabidopsis thaliana columbia
  unsure (1)..(419): unsure at all n locations
gtgctttcaggtttcaccagtaccatttatctggaagagctctcccnacagagaaggagttgcatcctaaggtttgcggggtgaaactctgggctacnaacgaggttcgtgccaagtccaagttctggtatttcttgaggaagctcaagaaggtgaagaattttaatggacagatgctcgccatcaacgagatctattagaagaacccaacaacgatcaagaacttctgtatttggttgaggtaccatagtataactgggtaccacaacattttcaaggagtaccttgacaccattcttaacggagctttttatcatattttcacttagttttcattccttcaccgtttcatattccttttctatttagatcattaaaacagtcttttttcctacactacttttttattatattatttc

SEQ ID NO: 156023 - DNA, 261 bp, Arabidopsis thaliana columbia
  unsure (1)..(261): unsure at all n locations
caaaaaaaaaaatctctctcaatctttcatatatctgaatccatccatcaccnagtgtctgatgacttcaccaccaacagcatcctcnncaagggaagagttcgtgtacctcgcaaagctcgcagagcaagctgaacgttacgaagaaatggttgaattcatgtaaaaagtcgctgaagccgtttacaaagacnaacataacctctaataacgtaatctcctttcctacatttacaaaaacttaatcttcgctttttcttt

SEQ ID NO: 156024 - DNA, 259 bp, Arabidopsis thaliana columbia
ctgatctgagaaaaaaaatggctaatggagctaatagagtggatctcgacgggaaaccgatacaaccgtggggaatatgcatgatcggcgccggaggtttcatcggttcacatctctgtgaaaagctcttgaccgagacgccacataaggtgcttgcgctcgatgtttacaacgataagatcaaacacttgcttgagcctgataccgttgaatggagtggtcggatccagtttcattcgttcaatattaaccttgtttc

SEQ ID NO: 156025 - DNA, 316 bp, Arabidopsis thaliana columbia
  unsure (1)..(316): unsure at all n locations
cgggggcgaccgacgcgtacgaagaacctaaaaagaagagaagagaaagattgattctaaatgtcggtgacatcaacggtggaggggtataccaccagagaaagccagcaacaccnncnnctttntangaaaataagaagaggagatgggtgttttgtgatagaatgtgtaggatttttgattatttttttttttttttttttttcattattcattctctttctttttttactttttttttatttctctttattttattttttttttttattcccttttattttttttattttttatttttctttttttttttttt

SEQ ID NO: 156026 - DNA, 171 bp, Arabidopsis thaliana columbia
  unsure (1)..(171): unsure at all n locations
cttatctacagaaatggagatgagtttatctaatcgcgtgcgatgctatntnatagcaatcaccatgctttaatttgcaacttttttacttctatagacctttttcttataattcattttcaattacaacattcaatcacatttaactttttaaacacataattttttttt

SEQ ID NO: 156027 - DNA, 387 bp, Arabidopsis thaliana columbia
ctttgctgagcagggcaaagctctgaacatagttttctctcctaactcaaggttcttggggtgggaaacccttgcaacaggaaggcctttatttgtcttaaaaatgctcccaacattcctgcaaagaacttccatgccctcacgaggttagacgaaaatcgtgccaaatgccagcttgctcttaaagccggtgttttctatgacaaagtgtctaatatgaccatatggggaaatcactccacgactcaagtgccagactttttaaatgccagaattaatggccttcctttgaaagaggttattacagatcacaaattgttataaaaaggattcactttaagtgtgcataaataaaggttggtttttatttattaattggttctatcc

SEQ ID NO: 156028 - DNA, 439 bp, Arabidopsis thaliana columbia
ttttgcttcctccctctttttcgccaatgttttctttagatctagctaatatggcgacgattttgttctttctcggttgtaatcaccgtagagatcctcccgatctgcaaatccgatccgaattctcaacgaatttgtagatctgatctgtgattccatcgttgacgacggatcttcgcttacatcgtttgatctgtcgcagatctgccgttttctatagatctagatctggatcgtccttcgcggcttcttcacatgcaagattctgtgaattgttcaagttgaggcatcatttctggattactaggagacgaatctgttgcatactgattgattgtgtgtgtattgtaatgaaatatgattttatatattagctattgaactattttatttcttatttggttttattaataatatactgtatctatttattttgttt

SEQ ID NO: 156029 - DNA, 444 bp, Arabidopsis thaliana columbia
agaaaatcggatccgaaatctcctccttatccctcgaagaagctcgtatcctcggcgaggatctccaagacagatgcggtgtctccccactctccttagcccccgcagcagcggccgttgcagctccagccgacggtggcgcggcggctgtagtggaggagcaaacagagttcgatgtggttatcaatgaagttccgagtagttctcgtattgcagtaattaaagctgttagggctttgactagcttggcgttgaaggaagctaaggagctaatcgaaggattaccaaagaagtttaaagaaggtatcactaaagatgaagctgaagaagctaagaagactcttgaagaagctggtgctaaagtctccattgcttaagtttcttcaacaatcggaaaaaaaaaaatgtgatattttcggaatttatgagtctttttgttgttta

SEQ ID NO: 156030 - DNA, 429 bp, Arabidopsis thaliana columbia
aaccatttgtcatacaaaatcaaacaatttattattctaaagatggatttcacacactcaggagcgatcttttgaggagttgcagtattgatccaaatgctaatgatcttcaagtcgagagtctcgctcgtttcgctgtcgatgagcataacaagaacgagaacttgactctggagtacaagaggctccttggtgcgaaaacacaggttgtggcaggaacaatgcaccatctaactgtggaggtggctgatggtgagaccaataaggtctatgatgccaacgttttggagaaagcttgggagaatctcaagcagtttgagagtttcaaccaccttcacgatgtttaatcccatgccctgagctttctctgctgcttgagtgaggtccttgtgtgctctcagaccacgtgataagagttcttgtttaacc

SEQ ID NO: 156031 - DNA, 337 bp, Arabidopsis thaliana columbia
  unsure (1)..(337): unsure at all n locations
gtttttagtttgttttacgaagaatcaactatttctacgaagagaagcgttggaactttgaaggaagcggatctgaagggaaagagtgtgttcnttagggttgatctcaacgttcctttggatgataactctaacatcaccgatgacaccaggattcgtgccgctgttcccaccatcaagtacttgatgggtaatggatctagggttgttctctgcagtcacttgggccgcccaaaaggtgttactcctaagtacagcttaaagcctcttgtgcccagattgtctgaacttcttggtgttgaggttgtaatggcaaaagactctattggtgaggaag

SEQ ID NO: 156032 - DNA, 438 bp, Arabidopsis thaliana columbia
cgcgtccggtcaatttgctacaacttagaaaatggcgttttttacttcatccatcgctccttctctgtatgcccatctccttcttgttcaggcgcaaaaccctttggtcttccaaagccagaaccttggctctacccaatatcggtttcctctcgtcttcttccaagtctctgaggtcgcttactgccaccgtcgctggaaatggcgccactggatcctcccttgccgctcgcatggtttcttcgtctgcggtcaaagcccctgtttctctcgattttgagacatctgtcttcaaaaaggagaaagtttctcttgctggttacgaagagtacattgtgagaggaggaagagacttgttcaagcatcttccagatgctttcaaggggattaagcagattggtgtgattggctggggatctcagggacctgcccaggctc

SEQ ID NO: 156033 - DNA, 438 bp, Arabidopsis thaliana columbia
  unsure (1)..(438): unsure at all n locations
cgtccggccatggctaagctctctctttcctccatctttttcgtcttccctctcctcctctgtttgtttgccccttcttcttctggatcgaatggcttanaatcctacatcgtccatgtgcagagatctcataagccttccctcttctcctcccacaacaactggcacgtctctctccttcgctctctcccttcttctccccaaccagcaacgctgctctactcttattcacgcgccgttcatggcttctccgctcgtctctcccctatccaaaccgccgccctccgccgtcatccttcagtcatctccgttatacctgatcaagcgcgtgagatccacacaactcacacgcctgccttcctcggtttctcccaaaactctggactctggagcaactcaaattacggggaagacgtgatcgtcggcgttttagatact

SEQ ID NO: 156034 - DNA, 439 bp, Arabidopsis thaliana columbia
catttctcaacaagaaggaaccctttatctctataaagagggatttcacacactggggagcagtgtttacaaagatgcagtattactccaaatgctaataatcttcaagtccagagtctcgctcgtttcgctgtcgatgagcttagcaagcacttacccttgacttttaactacatcaggctacttcttgcgaaaacacatgttgtggcaggaacaatgcaccatctaactgtggaggtggctgatggtgagaccaataaggtctatgatgccaacgttttgtagaaagcttgggagaatctcaagcagttgtagagttttaaccaccttcacgatgtttaatcccatgccctgaactttctctgctgcttgagtgatgttcttttatgctctcaaaccacattattaaaacttttgtttaaccattttacctttttta

SEQ ID NO: 156035 - DNA, 311 bp, Arabidopsis thaliana columbia
cagagagaagatgactcaaatcatgtttgtgacctttaactctcccgctatgtatgtcggcatccaagctgttctgtccgtgtacgccagtggtcgtacaaccggtattgtgctggattctggtgatggtgtgtctcacactgtgccaatctacgagggtttctctctttctcatgccatcctccgtcttgaccttgctggacgtgaccttactgattacctcatgaagatccttacagagagaggttacatgttcaccacaacagcatagcggtaaattgtaagagacatctaggagtagctcttctttg

SEQ ID NO: 156036 - DNA, 402 bp, Arabidopsis thaliana columbia
  unsure (1)..(402): unsure at all n locations
ctttgaccagaagattggtgtccagtttattcagaacgcattgaagactcctgtgtacacaatcgcttcaaatgctggagttgaaggtnctgttattgttggcaagctcttggagcaagataacccagacctcggttatgatgctgctaaaggtgaatatgtggatatggtgaaagctggaatcatagaccctctgaaagtgatcaggacagctttggttgatgctgcgagtgtgtcatctttgttgacgacaacggaagctgtagtggttgatcttccgaaagacgaaagcgagtcaggagcagcaagagcaggcatgggtggaatgggaggcatggactactagatccactaaattctgtcttttgttttcaccaatcaccatcttaacttgagaagaga

SEQ ID NO: 156037 - DNA, 429 bp, Arabidopsis thaliana columbia
  unsure (1)..(429): unsure at all n locations
cacaaaatggattcttcgaatgttgaagaaaacctaaacccagaaacaaaatccgcagaagaacaaaacccacttgccattttccattcttctctaccaatcgcatctctttctctgaccttgttcccatcctcgactcaatttctcaaattgtttgctcatcatccaaacaaggttaagatccctacgcaggcttcttctctcactcatctctctctttcttctgtctctccttttccttcttccagaatctctttcaaatccaccatcgctgctaaccctcttcaatcccctctctccatcgtccctcgtcgtcccggtgatccttncttcgccgccgctctccgccgtgctgctgtcgtctggttccgcaatgacctccgtgtccacgacaacgagtgtctcaactccgccaacgacgagtgcgtc

SEQ ID NO: 156038 - DNA, 406 bp, Arabidopsis thaliana columbia
cggacgcgtgggttcagatcgccgaatttgcagtaaggagacgaaaatatggtgcacgtttgctactaccgcaactatggaaagaccttcaagggaccacgtcgtccttacgagaaggagcgtcttgattctgaattgaagctggttggtgagtatggtctgcgtaacaagcgtgagctctggagagtgcagtactctcttagccgtatccgtaatgctgctagagatcttttgactcttgatgagaagagtccaagaaggatctttgaaggtgaggctttgctccgtaggatgaaccgttacgggcttcttgatgagagccagaacaagctcgattacgtcttggctttgactgttgagaacttttttgagcgtcgtctttagacttttgtgttcaagtttggta

SEQ ID NO: 156039 - DNA, 422 bp, Arabidopsis thaliana columbia
caattttggcctctcgatttagttttttgaaaccctaagctcgatttcgatcctccggcatactcggtttcgccgccgaatctctgcttgtagcgagtgttactattcaatcggcgagaatgtcgatgtcgaagagttcaaagatgcttcagttcatcaactacaggatgcgagtgacgatccaagacggaagacagctcgttgggaagttcatggcgtttgaccgtcacatgaacctcgttctcggcgattgcgaggagtttcgtaagcttccaccagctaaaggggaagaaaatcaccgaaaagcgtgaaaatcgccgaccgctaggttaagggtgcttaaaaggggaaaaagtattttaaatgactgtcgaaggacaccttcttcctgaagaatctcgtgctaaagcttgctctgcagc

SEQ ID NO: 156040 - DNA, 430 bp, Arabidopsis thaliana columbia
acgtcgtctatatcaccgaatattctcgagctttccacgaaatcccgtcaaagatcggagagtttcgtctaagtcttgccgatttctcgagtttttctttatctacacgtggcactgtgtttgctgtaagagctctgagtacagtcgcggtagaagagtcgtccgagaagaagatggtgaaagggattagggtttatgagcatggcggtcctgaggttctgaaatgggaagatgtggaagtaggggaaccaaaggagggtgagatacgtgtgaagaacaaggctatcgggcttaactttattgatgtttacttcaggaaaggtgtttacaagccagcttctatgcccttcacaccaggtatggaggctgttggagaggtggtagctgttgggtcgggattgactggcagaatgatcggtgatctcgttgc

SEQ ID NO: 156041 - DNA, 429 bp, Arabidopsis thaliana columbia
aagaggaacaatggctttctctatgctctcttccgctactatggttgcctctccggctcaggccactatggtcgctcctttcaacggacttaagtcctccgctgccttcccagccacccgcaaggctaacaacgacattacttccatcacaagcaacggcggaagagttaactgcatgcaggtgtggcctccgattggaaagaagaagtttgagactctctcttaccttcctgaccttaccgattccgaattggctaaggaagttgactaccttatccgcaacaagtggattccttgtgttgaattcgagttggagcacggatttgtgtaccgtgagcacggtaactcacccggatactatgatggacggtactggacaatgtggaagcttcccttgttcggttgcaccgactccgctcaagtgttgaa

SEQ ID NO: 156042 - DNA, 471 bp, Arabidopsis thaliana columbia
cctgccgtaccggaacggcagggccgacccacgcgacccacgagcttcaatgatatgggcattaaggaagatgtgcttcgcggggtctacgaatatggattcgagaagccttccgcgattcagcagagggctgttatgccgattcttcaaggacgtgatgttattgctcaagctcagtccggtaccgggaagacatctatgattgctctctccgtttgtcaagtcgttgatacttcttctagagaggttcaggccttgatattatccccaacaagagagctggctacacaaacagagaagacgatacaagctattggattacatgccaatattcaggcacatgcttgcatcggtgggaatagtgttggagaagacatcaggaagctggagcatggtgttcatgttgtgtctgggacacctggtcgtgtctgtgacatgataaagaggagaagtcttcgtaccagagctatt

SEQ ID NO: 156043 - DNA, 402 bp, Arabidopsis thaliana columbia
  unsure (1)..(402): unsure at all n locations
atggattcttcgaatgttgaagaaaacctaaacccagaaacaaaatccgcagaagaacaaaacccacttgccattttccattcttctctaccaatcgcatctctttctctgaccttgttcccatcctcgactcaatttctcaaattgtttgctcatcatccaaacaaggttaagatccctacgcaggcttcttctctcactcatctctctctttcttctgtctctccttttccttcttccagaatctctttcaaatccaccatcgctgctaaccctcttcaatcccctctctccatcgtccctcgtcgtcccggtgatcctttcttcgncgccgttctccgncgtgctgctgtcgtctggttccggaatgacctccgtgtccacgacaacgagtgtcttaac

SEQ ID NO: 156044 - DNA, 440 bp, Arabidopsis thaliana columbia
gaaacaagttttttccacctactaaaacaaccaacccggtgtgttgatccaggtgtacgaaggggagagagccagaaccaaggacaacaaccttcttggtaaatttgagctctccggaattcctccagctcctcgtggtgtcccccagatcacagtctgctttgacattgatgccaatggtatcctcaatgtctctgctgaggacaagaccaccggacagaagaacaagatcaccatcaccaatgacaagggtcgtctctccaaggatgagattgagaagatggttcaagaggctgagaagtacaagtccgaagacgaggagcacaagaagaaggttgaagccaagaacgctctcgagaactacgcttacaacatgaggaacaccatccaagacgagaagattggtgagaagcttccggctgcagacaagaagaagatcg

SEQ ID NO: 156045 - DNA, 440 bp, Arabidopsis thaliana columbia
cgatctaccaccgccgcttctcttctcctccgttcctcctcctcctcctccagatccactgggggtctctccgcttcctcctgtctctccttcgtcagatctctcgtctcttctccacgtctctcttcttcttcatccctctctcagaagaaatatcgaattgcgtcggtgaatcggagtttcaactccaccaccgccgctactaaatcttcatcttcagatcctgatcagttgaagaacgctagagaagatatcaaagagcttctcagcaccaaattctgccatccgattttggttagattaggttggcatgatgctggtacgtataacaagaacattaaggaatggccacaaagaggtggagctaatggaagtttgagattcgatattgagcttaaacatgctgctaacgctggtcttgtgaatgctttaaacttgat

SEQ ID NO: 156046 - DNA, 426 bp, Arabidopsis thaliana columbia
ttcatctctctctctctcgccagattttcatcgactcgatttcagatttaagatctcagatacaaaactccgacatgtctacgttcagcggcgatgaaacagctcccttcttcggcttcctcggcgctgcagccgcactcgttttctcctgtatgggagctgcttatggaaccgcaaagagtggtgttggtgtggcttctatgggagttatgagacctgagttggtgatgaaatctattgtccctgttgttatggctggagtgttgggtatctatggattgatcattgctgttatcatcagtaccgggattaaccccaaggctaagtcttactacctctttgatggatacgcacatctctcgtctggtcttgcttgtggtcttgctggtctctcagctggaatggccattgggattgttggtgatg

SEQ ID NO: 156047 - DNA, 426 bp, Arabidopsis thaliana columbia
ctttctttatccaactttcttcaccaaatcgattcttcttcaaccatgtcttccttcacctccaaattcgccgatgagctgattgctaacgctgcttacatcggaacacctggaaaaggtatccttgcggcagatgaatcaactggtactattgggaaacgtctcgctagcatcaacgttgagaacgttgaatccaacagacgtgctcttcgtgagcttctcttcactactcctggagctcttccttgcctcagtggtgttatcctctttgaagaaactctttaccagaagagctctgatggtacgccttttgttgatatgttgaagagtgcaggagttttgcctggtattaaggttgataagggtaccgttgagcttgctggaaccaatggtgagactactactcaaggtcttgatggtcttggt

SEQ ID NO: 156048 - DNA, 431 bp, Arabidopsis thaliana columbia
gaaaaaaaaaatgcagatcttcgtcaaaaccctcaccggaaaaaccataaccctgaggggcgaaagcagcgacaccagcgacaatgtcaaagccaaaattcaggacaaagagggaataccacctgatcaacagaggttgatatttgctggtaagcagcttgaagatggtagaacattagcggattacaacattcagaaagaatcgactcttcacttggtattgaggcttaggggtgggactatgattaaggtgaagactctcacagggaaggaaattgagattgatatcgaaccaaccgatactattgatcggattaaggaacgtgttgaggagaaagaaggtatccctcctgttcaacaaaggctaatctacgccggaaaacagctagctgatgacaaaacggcaaaggactacaacatagagggaggct

SEQ ID NO: 156049 - DNA, 431 bp, Arabidopsis thaliana columbia
gacgacatcaacgtctgacttcgcttctcctctcacatggctctacctaaccaacaaacggggagagttatcctagcttcaagctcgtcatcgttggtgatggaggcacagggaaaacgacctttgtgaagagacatcttactggggagtttgagaagaagtatgaacctactattggggtgaggttcatcctttggatttcttcacaaactgcggaaagatccgtttttactgctgggatactgctggacaagagaaatttggtggccttagggatggatactacatccatggtcaatgtgcgataataatgtttgacgtcacagcaaggctcacatacaagaatgttccgacatggcattgtgatctttgcagggtgtgtgaaaacatcccgattgttctgtgtggaaacaaagtcgatgtgaagaaca

SEQ ID NO: 156050 - DNA, 430 bp, Arabidopsis thaliana columbia
aaatgagactatcttgtctgcaaccacaccttcattttaccagtagcagatcaatagcgagggctctagcttttccaagctgagagcataaggaacagaacatcatgtcttgttcggtgtggctcagccagaagaagattgactacgaaaagtagcagaaacagcaagcttgaaagagcacaacctcctcctctgggtttggaacggcactggagatatgctgtggttggtggagtctctgtagggttgatgatggttttggtattgggaatggatgcagagaaagctatggcgcttggaccagaaggtcctttaatggaagagttttgggacaacgttagaaggtacggtctttacgctctcacggttagcactggagctctctttgctgtctttgagcccattctttgagctccttaagaacccaatc

SEQ ID NO: 156051 - DNA, 435 bp, Arabidopsis thaliana columbia
gtcttcacaatttcccttctcttggttgctttccaagcagtccatgcagactattagcgtgagaggccaccggttacccctgccccttacgttcctaagccacggtacccacttccgagcccgagccccaagcctgtttatcgaccacctactacccctagtctacccgctggctcaatcgctagactattccttgatccacataacgctcttcggtccggactaggtttgcctccattgatttgggacggtaaactagcgagctacgcaacatggtgggctaaccagaggcgttacgactgctccttaacccattccaccggcccatacggtgagaacttgttctggggaagcggctcgagctgggcaccaggtttcgcggtgcagtcatggatcgttgaaggaaggtcatacaaccacaacaccaactcgtgt

SEQ ID NO: 156052 - DNA, 271 bp, Arabidopsis thaliana columbia
ggagaaacgtctccttgcaaaaaggaaaaacgccgccattgaaaaagcttctaaatcgatgtctgatattagtttcgaaggcggcagactcgccggacaggtgtcggcgtttgagacggtgattaataaaggaggtaaagttgaagagaagagtcttgtgaatctgatagagatgttgatgaatcagttattgagacttgatgctattattgctgatggtgatgtcaaattgatgaggaagatgcaggtgcaaagagttcagaagtacctt

SEQ ID NO: 156053 - DNA, 447 bp, Arabidopsis thaliana columbia
  unsure (1)..(447): unsure at all n locations
ctttaagaccagctaaaactataatacaaagtaatcagtatgatgggtttggttacagagganggggagaggctaaggccagagatgtacacccggcagatnaaatatgtagagaggaagacaaagtgtttcctcaaggaaatatctatgcccaatgtttattaccattgaaggatatagaagaggttgggtatgacagagagtcaggtgttgtatggctgaagcagaagaagagcatcactcacaagttcacagagatagataagcttgtctcctatggaaccgaagtcacagccattgttgagaccgggaaaatcaagaagctcactggagtcaaagccaaggaacttcttatttgggtcactatcaatgagatctataccgaggaaccccctaccaagatcacgttcaagacaccgaccacactgtccaggactttcccggtca

SEQ ID NO: 156054 - DNA, 436 bp, Arabidopsis thaliana columbia
accagatctgaacctcttccctttcctcgaaaatccttctaacatcatcatccatggcttgctcggatttcgatggaatccttttgggaatgggaaacccactcctcgacgtctctgccgtcgtcgaccaacagtttctcgacaaatacgacatcaaattgaacaatgcgattctcgcagaggacaaacatttgcccatgtacgatgaaatgagccagaagttcaatgttgaatacattgctggaggtgctacccagaactcaatcaaagtggcccagtggatgcttcaagttcctggggcaaccagttacatgggatccattggaaaggacaaatacggagaggcaatgaagaaggatgctacagcagctggtgtctatgtccactattacgaagatgaggcaacacctaccggaacttgcggtgtctgtgttct

SEQ ID NO: 156055 - DNA, 376 bp, Arabidopsis thaliana columbia
acccgggccgaccacgcgtccggagaaatcaagaatggatttgcagagaggctttgtgttcttgcctttggttctatcttttagggggatcgaaacgacggcgtgtcgagagagacagctgctgctgctgcaaccaccgcaagaaacggcgatagataccgcaaacgcggtggtgacggttcaagatcgaggtttgaagacgcggcgaccggagcataagaacgcatacgcaacgatgatgtacatggggacgccaagagactacgagttctacgttgcgacacgtgttttgatcagatcgttgagaagtcttcacgtggaagctgatctcgccttcatcccttttctcgacgctacttttcgatgggttcaaacc

SEQ ID NO: 156056 - DNA, 440 bp, Arabidopsis thaliana columbia
gaattttattgttacatggggtaaagatcacatgttcatgaatggtaccaaccttcgacgggtcgtagacaaatctgcagggtctggtattaaatcaaaggtggctcatttgtttggaagcgtagaaatgctcatcaaacttgtgccagggaattctgctggaaccgttgcagcctattacttatcgtctacgggaagtacacacgatgagatagacttcgagttcctaggaaatgcgactggtcagccgtacacgatccacaccaacttatatgctcaagggaaaggaaaccgcgaacaacaattccggccatggttcaacccgaccaatggtttccacaactataccatccattggaacccatccgaagttgtgtggttcgtcgatggaactccgatcagagtttttagaaactacgaaagtgaaggaatcgcatacc

SEQ ID NO: 156057 - DNA, 470 bp, Arabidopsis thaliana columbia
tcctgaaaacccggggcggcccaagccgtccggttaagtctgaaagaatgacaaaggatgatttgacggaggaagagtcgttttccgccaggggctgcttaaacccaccgcctgtgaggactttcaaggtgagagagctcaagaagtggtccttctacagagctgtcatcgctgagttcatagctactttgctctttctatacgtgactgttttgacagtcatcggctttaagagccagactgatatcaacgccggcggcggagcttgtgccagtgtcggcctcctaggcatctcttgggcctttggtggcatgatattcatcctcgtctactgcactgccggcatctctggtggacacatcaatcccgcggtgacgtttgggctattcctagctagcaaggtatcattggttagagctgtgtcgtacatggtggctcagtgtctcggagccactttgggagttggtttg

SEQ ID NO: 156058 - DNA, 431 bp, Arabidopsis thaliana columbia
aacaaaacagatattgttcaggtatacatttcatatgcttgcaaattactctttcaaggtcttatgtcaatggctattgcacgcaaggatgctcactaaacacctgaagggcgatcacgtgatggtggtctccgttttggagaaatggagcgcgattgcatgattgcacatggtgctgctcactttttgaaagagaggctgtttgatcagagtgatgcgtatagggtacatgtgtgtgaagtctgcgggctcattgccattgcaaatctgaagaagaattcttttgaatgcacaggttgcatgaacaaaacagatattgttcaggtatacattccatatgcttgcaaattactctatcaagagcttatgtcaattgctattgcaccaaggatgctcactaaacacctgaaattcgctaaaggcatacatgt

SEQ ID NO: 156059 - DNA, 432 bp, Arabidopsis thaliana columbia
gaaaattaagaaaaacaaagtctattccatacgaataagagcctcaggttaattttgtaagatatgggttattggaagtcgaaggttgttccaaggatgaagaaattgttcgagaagagtccagcaaaaaaggaagttgttgaggaggagaagccacgagaggtggaagtcgtggaggaggtcgtcgtgaaaaccgaagaaccggccaaggaaggagaaactaaaccggaggaaataattgcaaccggcgagaaagagatagaaatagttgaagagaagaaagaagaggctaaaccggtggaggttccggtcctcgcagctgcggaggagaagaagccagccgtagaagaggagaagaagacggcgccggtggaagagaagaagccagctgtggaagaggagaagaagcctgccttggaagagaagaaacct

SEQ ID NO: 156060 - DNA, 432 bp, Arabidopsis thaliana columbia
aaacaaacgagaaaaccaactctggagaatggcgaatctaccttcttctctctccatggggacacctttcggtggtcctagcacctccgcacaaaatcctaccggagctccggccaacaaagatcgcaatttggcctctgctgaacagttggtactcgatctcagcaatcctgaactcagagaaaatgctcttctcgagctttccaagaaaagagaattgtttcaggatctggcgcctttgttgtggaactcttttggtaccattgctgccttgttacaggagattgtatcaatctactctgttcttgcacctccaaatctgactcctgctcagtccaaccgtgtttgcaactcgctcgctcttcttcagtgcgtagcatctcattctgacacgagaatgttatttctcaaggctcatatcccgttgtacct

SEQ ID NO: 156061 - DNA, 434 bp, Arabidopsis thaliana columbia
ctgagagaaagcttttgacaatgggccacagacacagcaagtccaaatcctccgatccgcgagcgtcctcctcctcctgttggtccggcaacgtagtccaccatgttaaacctgccggagaacgccgcggatcatccggttccggaaccgtcggatcgtcaggctccggaacaggcggatctcgttccaccacatctactcagcagaatggtcggatcttaggtcggccgatggaggaagtacggagaacctatgagtttggtcgtgagcttggtcgtggccagtttggtgtcacgtacctcgtaactcacaaagagacgaaacaacaggtcgcttgcaagtcaatccctacgcgccgccttgttcacaaagacgacattgaagatgttcgccgtgaagtccagattatgcaccatctcagcggtcaccggaac

SEQ ID NO: 156062 - DNA, 370 bp, Arabidopsis thaliana columbia
gaactcttaccaatctcgatcgagatggctatagaggaacctaaggggaatattgaacttcgccaatccaggagtggtgagcgacaaccagatattaaagatgtacaagagttacatcgagcctgatttcaaatggtccaacttcaatttggaagaacaggctaaggtcattgttgctccacggagcaacaacgagatggatggtgccaagctcagcaaggagtttccagagatgctttccatcaaagattcgttgatcaaatacgtcttcgaacctaacaagagaacgtaaaacacagacacacacacgcacttccccgctctgtgttcactataatgtttctactatagttttatctgattcatttac

SEQ ID NO: 156063 - DNA, 432 bp, Arabidopsis thaliana columbia
agcaaatcgacgcagagcttgttctctcaattgagaagcttcaggagattcaagacgacctcgagaagattaacgaaaaggccagtgacgaggtcttggaagtagagcagaaatataacgtgatacggaaacctgtctatgacaagcgcaatgaagttatccaatcgattcctggcttttggatgactgcttttttgagtcatcctgccttaggcgacctcttgactgaagaagaccaaaagatttttaagtacttgaactctctggaagtggaggatgccaaagatgtgaaatctggatactctataacttttcacttcacttcaaacccgttctttgaggatgccaagcttaccaagacatttactttccttgaagaaggaacaacaaaaatcactgcaactcctatcaaatggaaggagggcaagggct

SEQ ID NO: 156064 - DNA, 435 bp, Arabidopsis thaliana columbia
cgacgagtgaacgaaaggagggaagaaaaaagttttgttcgaaacgaaagtaaactagtgaggtgaaaagcgaaacaacacgggacagagcaatggcccctgctctcgccgttacacgagatctcaccgccgtcggatctccggagaatgctcctgcgaaaggacgtgcttcggtttacagtgaagttcaatcaagccgtattaacaacactcttcctttgccttctgttctcaaaggagctttcaaaatcgtcgaaggtcccgctagttccgccgccgggaatccagatgagatagcgaagttgtttccgggtctatatggccagccatcagtagcagtggttccagatcaggatgcaccttcgtcggcaccgaaattgaagattggtgttgttttgtctggaggtcatgcacctggtgggcacaatgttattt

SEQ ID NO: 156065 - DNA, 452 bp, Arabidopsis thaliana columbia
cggggggaccgacgcgtccgaccaatctccagaaaaggggagaagcaaaattggtttctctgaagctccaaaagcggctcgcccgatcagtgatgaagtgcgggaggggcaaagtttggctcgatcccaacgaaagctccgacatctccatggccaattcccgccaaaacatcaggaagcttgtgaaggatggtttcatcatcaggaagccaaccaagattcactctcgttccagagctcgcaaaatgaagattgccaagatgaagggtcgtcactctggatacggtaagaggaagggtacccgtgaagctaggttgccaacaaaggtactgtggatgcgtaggatgcgtgttcttaggcgtctgttgaagaaatacagagagacgaagaagattgacaagcacatgtaccatgacatgtacatgcgtgttaagggtaatgtgttcaagaac

SEQ ID NO: 156066 - DNA, 403 bp, Arabidopsis thaliana columbia
aagaagatcaaacttgatcatgagccatcatattactctcaaaggcttgctgctctcactcccgggtttgcaggagctgacattgggaatgtctgtaacgaagcagctcttattgctgctagacacgaaggagcaacggttactatggcacactttgaatctgcgattgatcgtgttattggtggtcttgagaagaaaaaccgggtgataagcaagttggagcgacgtacagttgcatatcatgaatctggtcacgcagttgtagggtggttccttgaacatgcagagccgttactgaaagtgactattgtaccacgtggcacagcggctctcggatttgcacaatacgttccaaacgaaaaccttccatgaccaagagcaactctttacatgacttgatgac

SEQ ID NO: 156067 - DNA, 435 bp, Arabidopsis thaliana columbia
ctctatcctaccgccgacgtccgtgatcgccgaaatgactgaagcagagtccaagactgttgttcctgagtcagtgttgaagaagagaaagagggaggaagaatgggcacttgccaagaaacaggagcttgaggctgccaaaaagcagaatgctgagaagaggaaactcatatttaaccgggctaaacagtactccaaggagtaccaggagaaagaaagggaattaatccagctgaagcgtgaggcaaaattgaaaggaggcttttatgttgacccagaagctaaactgcttttcattatccgtatccgtggtatcaatgccattgacccaaagacaaagaagattttgcaacttttgcgtttaagacagattttcaatggtgtgttcttgaaggtcaacaaggcaaccattaacatgcttcgccgtgttgaacc

SEQ ID NO: 156068 - DNA, 424 bp, Arabidopsis thaliana columbia
ccatttaccagatctgaacctcttttttgattcttaaatccatctaacatcatcagccagggcttcctctgattgggggggaatccttttgggaatgggaaacccactcctcgacgtctctgccgtcgtcgaccaacagtttctcgacaaatacgacatcaaattgaacaatgcgattctcgcagaggacaaacatttgcccatgtacgatgaaatgagccataatttcaatgttgaatacattgctggaggtgctacccataactcaatcaaagtggcccagtggatgcttcaagttcctggggcaaccagttacatgtgatccattggaaaggacaaatactgagagtcaatgaataaggatgctacagcagctgttgtctatgtccactattacgaagatgaggcaacacctaccggaact

SEQ ID NO: 156069 - DNA, 433 bp, Arabidopsis thaliana columbia
gtgggactcagaactactttgaccctcctcatttctttaacactcactctcgtccctcttcagctggctccattcccgccttgtccttaccaatcctaacgccgacggcggcaactacatcttacgctgttattgaattaccggcgaacgtagcagaagctcctcgttccaaacgccattccaattcatacctggcgagaaaatccgccatttctgaagttcaacgctcctcgagttttctcttttctctgcagagattagcaacagttttgaaggtacaagatttgaatgtaattctgcgtgattttggaatctctggaagatggcaggatcttatacagctctatgaatggatgcaacaacatggaaagattagtgtttcaacttacagtacctgcataaagtttgttggtgccaaaaatgtcttcaaggc

SEQ ID NO: 156070 - DNA, 219 bp, Arabidopsis thaliana columbia
  unsure (1)..(219): unsure at all n locations
cggtaagcgaagtttcctcttactcttcttcttcttcaaacttcgcgtctctgtctcgtcgcaatcacaaatcatctgggagattgcnaaactcttctctttacaaaggaagcttcttctctgtttcgacaaagaccaggaggaacacttgtaaagccaaatcatggaatctcggtcttgttatcaactctagaagctctgaggcttttgtttttgatc

SEQ ID NO: 156071 - DNA, 402 bp, Arabidopsis thaliana columbia
ccggaggagctcgatccattgattagaagatgacaactccacaagtgaagaccggtgtgtgcgttgggttgaacaagggacgtgttgttaccagacgtgaattagctcctcgtcctcgttctcgcaaaggaaaaacgagcaagaggacaatctttatcagaaacttgataaaggaagttgctggtcaagctccctatgagaagagaatcactgagcttttgaaggttggtaaagacaaacgtgctcttaaggttgctaagaggaagttgggaacccacaagagagccaagcgaaagagagaggagatgtccagtgttctccgcaagatgaggtctggcggtggtggtgcaactgataagaagaagtgaacgtcatcttaagtttgtgaatcgctcgtaaaga

SEQ ID NO: 156072 - DNA, 427 bp, Arabidopsis thaliana columbia
aaaaattctcacttccgtgcaagcaaatgcagtcttgtttcgagtttgattcacacaagattggaatagaggagacattgtgtctttgattcttgagcttatttgggggagagaaagagagagcgagaggatctgatgtgtatctcaatctcgcaagtctctagattgagaatccattcatttggaagttcttgctgtgagcgtgttcatggatggatcaagaacagctctagcttgaagctgcttgatgttagagcttcttctgttgatggtaaagcaagatggatcagacgtaacgtgagtacaactacacaaggtagtagaagcaacactaagagcagtgtgttgggaggaacagttcctgtaaccaggattatagatgaagagagtagaaccaaggtacagccttttggtaatcttcagcaac

SEQ ID NO: 156073 - DNA, 508 bp, Arabidopsis thaliana columbia
  unsure (1)..(508): unsure at all n locations
cgaggctttcagaactggtattgaggaggtggcttttttggtatatagcttttgggtacctttgtgccttcgtgttgcgtagttggaccaaggttcttttggtgctggtgtcgttgcaagggggatgcccanntggtcaccatgcctcnnaagaggctcnnttcgtcgtgccttaagttcaaaagttccctgggggtcgtcaaaaggattattgggtcagcnnaggaaatgggggctttcaaacgaagtttaacccagagctgnnacttcaccannagttgaggcaagaagaanngcgtgttgtccctttgatggtgtcaaccgctannagttcctctcatgnnccatggacctttgtgcttaaccgtcaagccgggaaggtgcctttttgcccagcccacttactgaagagtatcnagaactgaagtatnccttctcattccggtgaagaagaattataatcagcctgaatctttttacttatcgntatctctggtgttgttttaag

SEQ ID NO: 156074 - DNA, 425 bp, Arabidopsis thaliana columbia
gtcaggtcagggaacaacaatggcttcttctgcaacagcaccaaattcgctatctttctggtcagcttctctctttttatcctgctctcaccaaatccctaaaacctacatttccgtttcaaaactcggctccggcagagtctcgaagccgctttctgtctcttcccagctagcgactctaccgattctatcattcgaaggagagaaggtcggagagacgtatctagacctcaaagcggcgccggaggataccgcgcgtgccgttgtgcaccgagccatcgtgacggacctgaataacaagcggcgaggtactgcttccacactgactcgcggtgaagttcgtggtggtggaattaaaccttactcacagaagaaaactggccacgcgaggcgtggatctcagagaacaccgttacgtcccggtg

SEQ ID NO: 156075 - DNA, 438 bp, Arabidopsis thaliana columbia
atgctatatttgaaaaagctttggccatctatgctgggaagaacctggaaattcactgtgatgggctgtatcttgctacagatggggacaactatgtcatagtggactggcatgtggtagacactatcaagaaagcaacgaaaatgattctgccactccagaaaggctttttaacagtagagaagccagtgaatgctataggtgcggggaagaagggcatttctcacgtgaatgtacgaattcaccgtgcatgagcactacacatgcgaaagagtcacagactttatgctacagatgtaatggatcaggacatttatctcgtgaatgcacccaattcctgccatgcttctaagagagaccgtgaaacatctacatcatcacataaatctggcaagaaaaacatagagaactcagaacacgattctactccccatgagt

SEQ ID NO: 156076 - DNA, 456 bp, Arabidopsis thaliana columbia
ggccgaccgacgcgtccgctcgagttgatatgtctagtactaaagatatttcaactgtccaaaacgcaactccttttaacggggttgccccatccaccaccgtgcgagttacaatcgtccaatcctccaccgtctataacgatactcctgccactatagacaaagcggagaagtatattgtggaggcggcaagcaagggagcagagctagtgttgttcccggaggggtttatcggtggctatcctcgaggttttaggttcggtttagcggttggcgttcataacgaagaagggcgtgatgagtttcggaagtaccatgcttctgctattcatgttcctggccctgaagtagcaagattggctgacgtggctaggaaaaaccatgtgtacttggtaatgggagccatagagaaggaagggtataccctctattgcacagttcttttctttagtccac

SEQ ID NO: 156077 - DNA, 432 bp, Arabidopsis thaliana columbia
gagatttatcaggttcggtgattctttgtggagaagaagctcgcgataagtcaacatgagcaagccaatggaagaggataccaatggcaagactgaggaagaggaattcaacaccgggccactctctgttcttatgatgagcgtcaagaataacactcaggttttaatcaattgccggaacaacaggaaacttcttgggcgagtgagggcgtttgacagacactgcaacatggttcttgaaaatgtcagagagatgtggactgaggttccgaaaactgggaaaggcaagaagaaagcacttccggtgaacagagatcggttcataagcaagatgtttctacgtggagactcggtcattatcgtcctcaggaatccaaaatgagaggaagagagacttagagacatgttccttgtttgttgtgctaaaactga

SEQ ID NO: 156078 - DNA, 435 bp, Arabidopsis thaliana columbia
cggacgcgtgggggccggtttggccttcattcgtaaatggcagaacaagcgcaaagctgaaggcaaacccgtcgataaacccaacattgtcaccggagccaatgttcaagtgtgttgggagaaattcgctaggtactttgaggttgaacttaaggaagtgaaattgagtgaaggatactatgtgatggaccctcaacaagctgttgatatggttgatgagaacaccatttgtgttgcggccattcttggttccactcttaatggagaattcgaagatgttaaactcttgaacgatctcttggtcgaaaagaacaaagaaaccggatgggatacaccaatccacgtggatgcggcaagtggaggattcattgcaccgtttttgtatccggaattggaatgggactttagacttcccttggtgaagagtatcaatgt

SEQ ID NO: 156079 - DNA, 343 bp, Arabidopsis thaliana columbia
ctaaatatgaagaagccgtcaaggtcgctgatcaagttttgtcgattgtacctaccgatgaggatgcgatccgatgcaaaggtgtggctctgataaaagacgataagttcgatgattatctaatcaaagacgttaagatcaatggtgctctctccgtcattaactcgttccagaagcttccaatcgatctaggttttcacaaggcgtattgcttataccgtgtaaacaagctagatgaggctttggtgtgtttaaaaggtctcgagagagatacagatactttggttttggaagctcaaattttgtaccgtttggggaaagcagatgcgtgtgtggatgtgta

SEQ ID NO: 156080 - DNA, 423 bp, Arabidopsis thaliana columbia
  unsure (1)..(423): unsure at all n locations
atcatacggtaaaagcaacaccgaggttgtgatctacagtaatccaactgactctaaggggtacttccacttgtcgttgacgagtattaangatctagcttactgtcgtgtcaagctctacttatctccggtcgagacttgcaagaacccgaccaatgttaacaagggtctcacaggagttcccttggcgttgtacggataccgtttctacccggacaagaacttggagctctttagcgtcggacctttctactacactggtcccaaggctgcccccgccactcccaaatactgatcgtgatgatcatattatgatgatgatgattatgattttgcatgcattatataagaggtcactttaatcaatttattatttggaattttttcccttgaaaatgttcttttgtttgtttgttccgattt

SEQ ID NO: 156081 - DNA, 439 bp, Arabidopsis thaliana columbia
gcctctaaaaggttttggagaacacaatttacacaactggagaagtcagattacttctctgtatggtgggccattggagtggctttttgttgtaaaaagtacggaagaccctgcatatcacgctgtttcccgtctattatctatgtatcaggatcatgttgaagctaaggtcgtggttgctggtttatcaacaacatgtagccagaaaattcataatcagttgattggagttgaaaaaatgcacaaagataccaaatatgtgttatttttggatgatgatgttagactgcatcctggaacaatcggagctctcacgactgagatgagaaaaatccagagatatttattcaaactgggtatcctctagacttgccgtctgggactcttgggagttattgcatctatgagtaccacatgccttgctcaatgggatttgcga

SEQ ID NO: 156082 - DNA, 436 bp, Arabidopsis thaliana columbia
gccgcgcaagaagacgattctctctcttgagttgaagaaatgaagcacaacaatgttatccccagtggtcacttcaaaaagcactggcagaattatgtcaagacatggttcaaccagcctgccaggaaaaccagaagaagaattgcgaggcaaaagaaggctgtgaagatcttccctcgtccaacttctggacctctccgccctgttgtgcatggtcagactcttaagtacaacatgaaggtcagaaccggtaaaggattcactcttgaagagctcaaggctgctggtatcccaaagaagttggcgcctacaattggtattgctgttgaccatcgtcgcaagaaccgatctttggagggtcttcaaacaaatgtccagaggctgaaaacctacaagaccaagttagtcattttcccgcgtcgtgcccgcaaggtca

SEQ ID NO: 156083 - DNA, 437 bp, Arabidopsis thaliana columbia
tctctctctaaaaacagagctcaacaataatgatccactaaaaaagattctcttttctcttcttgtgcggtgatttacttacttagcaatcatggcgtcgtcggagggattagcaagcgttgatccttggtcattccgtcaaaacttcaacatcgattcgtggctactctctgattccttctcacacgacagtgatatactcgctaaagctcttcacagatccatctccactttcaccgaatcatctcctctttctccttcatctttcttcgactcttcaaccgccgccgtcgatttttctcctcctcaaactctctccaacgtctctttcggctcagatccagaaatccccgccgctagtgctcttggtctcgggaaacgaaaacgtggtcctggtgtttccggtggtaaacaaacgaaacgccgatctcgagttt

SEQ ID NO: 156084 - DNA, 438 bp, Arabidopsis thaliana columbia
gttcgattacagctccacagaggattcggaaatggttgagtcaaaggttgtagttcgagagtcggtgttgaagaagaggaagagagaggaggaatgggctttggagaagaagcagaatgttgaagccgccaagaagaagaacgccgagaacaggaagcttatcttcaaaagagccgagcaatactccaaggaatatgccgagaaggagaaggagttgatctcgttgaaacgcgaggccaagcttaagggaggtttctatgttgaccctgaagctaagctcttgttcatcatccgtatccgtggtatcaatgccattgaccctaagactaagaagattctccagctcttgcgtttgagacagattttcaatggtgttttccttaaagtcaacaaggctacgatgaacatgcttcgccgtgttgagccctatgtcactta

SEQ ID NO: 156085 - DNA, 354 bp, Arabidopsis thaliana columbia
cacgagcgtatctgcttcttcaatcgagaaagggcaaaatcgcgtgattgatgcttgggtaactcttattcgtgaaagggcaaaactcaaaggagagttagtgcgtcttttaggtggagctaaagcttcaacatctcttcttggtgtaccacttggtcacaactcttcttttcttcaaggtcctgcttttgctcctcctcgtattcgagaagctatttggtgtggtagcacaaactctgccactgaagaagggaaggagttgaaggatccacgggttctaactgatgttggggatgttccggtacaagagattagagattgtggggttgatgattatagactgatgaatgtcat

SEQ ID NO: 156086 - DNA, 424 bp, Arabidopsis thaliana columbia
gcgagagaaagagaaacgatctgtgagagagaatggatcagatcttgaacaaggtaggctcgtactggttaggtaagaaggcgaacaagcagctcgattccgtcggtgacgatatcaactctttgtcttcgagcatcgaaggaggaacaaaatggttggtgaacaaaatcaaaggaaaaatgcagaagccattgcccgagttactaaaggagtttggtttgcctgtggggatctttccacgtgatgcaaccaactacgagttcaatgaacagacgaggaagttaactgtctttattccatcaatctgcgaagttggttacaaagatacatcagtcttgagattcaccactacagttaccggatttctcgagaagggaaagctagctgatgttgaagggatgaagacaaaagtaatgatatgggt

SEQ ID NO: 156087 - DNA, 434 bp, Arabidopsis thaliana columbia
cttttgtcactcatcttcacaggaaacaatggtgtttgtgaagtcctccaaatcgaatggttacttcaagaggtaccaagtgaagttcaggagaaggagagatgggaagactgattacagggcaaggatccgtcttatcaatcaagacaagaacaagtacaacacccctaagtaccgttttgttgttcgatttaccaacaaagacattgtggcacagattgtatctgcaagcatagctggtgacattgttaaagcttcggcttacgcacatgagcttcctcagtatggactcactgttggtcttaccaactatgctgcagcttactgtactggccttcttttggctcgtcgtgttctgaaaatgctggaaatggatgatgagtacgagggaaacgtagaggccactggagaggacttttttgtggaaccaactg

SEQ ID NO: 156088 - DNA, 428 bp, Arabidopsis thaliana columbia
cttcatcatcttcttctatatatacctctttaagcttgcttctctttgtctttatcttgtgcgatggttcaaacagaaaccgatcaaaggatgggtcttaatctgaatttgtctatctactctttaccaaaacccttatctcaatttctcgatgaagtgtcgaggatcaaagacaatcattccaaactgtctgaaatcgatggttatgtcggaaaattagaggaagaaaggaacaaaatcgatgtttttaaacgagaactccctttatgcatgctcttattgaacgaagagattgtttttctctgtgtagcgattggggcgttgaaggatgaggctagaaaagggttatcactgatggcatctaatgggaaattcgatgatgttgaaagggcaaaaccggaaactgataagaagagctggatgagctc

SEQ ID NO: 156089 - DNA, 433 bp, Arabidopsis thaliana columbia
cggacgcgtgggctgatgtgtcgtttcctctagcagggctgagtacagcccatatcgaagctatatctttccatccatgtgcccaagttccagcacatgggattgacaagcagaacattgttttccagcctcccttgggtaactttgttctcatgcgataccaggcaggttgtggactcggaccaccagtgaaagggttctatcagctatcaatggtttcagaagacgagggtgcattcctcttcaaggtgcacctcatggaaggttacaaggctcctctgtcaatggaattttgcactattactatgccctttccacggagacggatagtggcatttgatgggactccgtcagctgggactgttttaaccacagaacactctgttgagtggaggattctgggcagcggacgtagtctttctgggaaaagcct

SEQ ID NO: 156090 - DNA, 292 bp, Arabidopsis thaliana columbia
  unsure (1)..(292): unsure at all n locations
gtttcactttctctctctctgtatactctctaaatgatggcaaaaaactgtaatttagtcaggggtctatgtgtatttttggtattgaccctctttaacaaacccatcaccgtcgccgggcagaatattccggcggtgggcttgttcacctttggtgactccaacttcgacgccggaaacaaacagactctcaccaaaaccttactccctcaaactntctggccgtatggaaaatcccgagatgatcccaacggcaaattctccgacggcctcatcgctccagactttctcg

SEQ ID NO: 156091 - DNA, 442 bp, Arabidopsis thaliana columbia
gttttgaatttcagattgtgatttgaaattgcaatcaattcctcgaattgagcatctaattcttcgaaagaaatcgataatgccgaagcgaaaagcaaaggagtgtgtcaaactcactgaagaagataggaacgacgagaaacgaattcgaatcgaagagaagaaagaagacttcgtcgacgaagaagtcgaaagacaaattgctgcgattagagcaatccgtgatgttgagattgaacaaatgttaactgcaatgcggttgcttcgttcgtattttactgaggaacagctacacactcctgtgttagacttctttaaagagaatcttccggatttatcgatatcgagaaacgaagaaactggggagattgagttaaagtggagagacgaaaatggtgattcgtttgctggaaatgagaatggcgttgacatgaattattct

SEQ ID NO: 156092 - DNA, 429 bp, Arabidopsis thaliana columbia
ctctcatcctcagaaagaatggctcaaaccatgctgcttacttcaggcgtcaccgccggccattgtttgaggaacaagagccctttggctcagcccaaagttcaccatctcttcctctctggaaactctccggttgcactaccatctaggagacaatcattcgttcctctcgctctcttcaaacccaaaaccaaagctgctcctaaaaaggttgagaagccgaagagcaaggttgaggatggcatctttggaacgtctggtgggattggtttcacaaaggcgaatgagctattcgttggtcgtgttgctatgatcggtttcgctgcatcgttgcttggtgaggcgttgacgggaaaagggatattagctcagctgaatctggagacagggataccgatttacgaagcagagccattgcttctcttcttc

SEQ ID NO: 156093 - DNA, 436 bp, Arabidopsis thaliana columbia
  unsure (1)..(436): unsure at all n locations
ggctgcagctgtcatgctcggatcaattttctggaaagttggcacaaaaagggaaaacgctaatgatcttacaaaggttattggagcaatgtatgctgctgttttattcgtgggcgtaaacaactcttcatctgtccaaccgctaatagccgtggaaagatctgtattctatagagaaagagctgctgaaatgtactctgctttaccttatgccctagcacaggtggtatgcgaaataccgtatgtgctgatccaaactacatattatacactaattatatacgccatgatgtgtttcgaatggacattggccaaattcttttggttttacttcgtatcatttatgtccttcctctacttcacatactatgggatgatgacagntgcccttaccccaaatcagcaagttgcagctgtttttgccggagctttctac

SEQ ID NO: 156094 - DNA, 437 bp, Arabidopsis thaliana columbia
ctaacatcatcatccatggcttcctctgatttcgatggaatccttttgggaatgggaaacgcactcctcgacgtctctgccggcgtcgaccaacagtttctcgacaaatacgacatcaaattgaacaatgcgattctcgcagaggacaaacatttgcccatgtacgatgaaatgagccagaagttcaatgttgaatacattgctggaggtgctacccagaactcaatcaaagtggcccagtggatgcttcaagttcctggggcaaccagttacatgggatccattggaaaggacaaatacggagaggcaatgaagaaggatgctacagcagctggtgtctatgtccactattacgaagatgaggcaacacctaccggaacttgcggtgtctgtgttcttggtggagaaagatcgctcattgccaatctttctgctgc

SEQ ID NO: 156095 - DNA, 443 bp, Arabidopsis thaliana columbia
  unsure (1)..(443): unsure at all n locations
agaaaatcaaccttacaacagcatccggaaaaggaacttcaccattcagaacctaagatatggccggcatgaagtggtggcggtggagtggctgnttcaagaagtcctcaacttcaaatgcttcacacccacaatcttcaacttcttgtggttctacttaaaagctgctcgagccaatccagaagttgaaaggaaagccaaatccttggctgttacctcactatccgaccaaactcaactctgtttttggccctcaactgtagcagctgcactcgtggttctcgcctgcatcgaacacaacaaaatctctgcataccaacgagtcataaaggtccatgttagaacaacagataacgagttgcctgaatgcgttaagagtctggactggttgcttgggcagtaagcaatcaaaaagaacaaaaaccctaaaaccaggacacagt

SEQ ID NO: 156096 - DNA, 426 bp, Arabidopsis thaliana columbia
gtagtgatgtttcactgtgcgtttcagagtgtgaagaagtcgattcaggcttatgtctctcgtgtgggaggttctactgttgaggttaggttacctttccctgtaaattcgaacgaagagattatctccaagtttagagaaggactagagaaaggtagagcgaatggtagaacggttaggttagctatcattgatcatataacgtcgatgccgtgtgttttgatgccggtacgagaattggttaagatctgcagagaggaaggtgtggagcaggtttttgttgatgcagctcatgccattggtagtgttaaagttgatgtgaaagaaatcggagctgattactatgtgagtaatctgcataaatgtgtcttttgtccaccgtctatcgcgtttttctattggaagaaacgtggttctgagactgat

SEQ ID NO: 156097 - DNA, 426 bp, Arabidopsis thaliana columbia
cgccagcagccttccattgttcgtcttgttcgtcccactcgtcccgacaaggctcgtcgtgtcggctacaaggccaagcaggggtttgttgtctaccgtgttcgagtcagacgtggtggacgcaagaggccagtgcctaagggtatcgtgtacggtaaacccaccaaccagggagtgacacagctcaaattccagcgtagtaagagatctgttgctgaggaacgtgctggtcgcaaactgggaggccttagggttgttaactcctactggctcaatgaggactctacctacaagtactacgagattatccttgtagaccctgcacacaatgccgtccgaaatgatccaaggatcaactggatctgcaaccctgtgcacaagcacagagaactcagaggtctcacctccgaaggaaagaagaatcgt

SEQ ID NO: 156098 - DNA, 441 bp, Arabidopsis thaliana columbia
ctttctttcatttttttatcagtttctcatttctctctcagtcgcatataaatttgaaacgcgcgattcgtttttgctctttgagctttcttcttgatttcgacggtgtctctcaatctccgtcaagcttgacgaatttcaggagctatatataccatggcgctcttgtctcaagcaggaggatcatacactgttgttccttctggagtttgttcaaaggctggaactaaagctgttgtttcgggtggcgtgaggaatttggatgttttgaggatgaaagaagcttttggtagctcctactctaggagtctatctaccaaatcaatgcttctccattctgttaagaggagtaagagagggcatcaattgattgttgcggcaagtcctccaacggaagaggctgtagttgcaactgagccgttgacgagagaggatctcatt

SEQ ID NO: 156099 - DNA, 441 bp, Arabidopsis thaliana columbia
  unsure (1)..(441): unsure at all n locations
aaacgttacaatggcttctaaggctcttgcagttacagctcttcttattacacttaatctgctgtgtcttcacctttgtaacgtccgagaaaatgtccaccaactactcctaaacccccaaaaaccccgaaatcgcctaagaaggctcctgccgtgaaacccacttgtcctaccgacacacttaagcttggtgtttgcgcagacttattgggcctagttaacgttgttgttggttctccaccaaagactccttgttgtacacttcttcaaggtcttgctaatcttgaagctgcggtttgtctctgcaccgctcttaaagccaatgtcttggggattaatctcaatgttcctattgatctaaccttgctgttgaactattgtggcaaganagttcctcatgttttccaatgttcttgaagatttgagaccttaaaagagaaa

SEQ ID NO: 156100 - DNA, 434 bp, Arabidopsis thaliana columbia
cccacgcgtccgctggtatctctaaggatggtcagacccgtgagcacgctcttcttgctttcacccttggtgtcaagcggatgatttgctgttgtaacaagatggatgccaccacccccaaatactccaaggctaggtacgatgaaatcatcaaggaggtgtcttcatacctgaagaaggtcggatacaaccctgacaaaatcccatttgtgccaatctctggattcgagggagacaacatgattgagaggtcaaccaaccttgactggtacaagggaccaactcttcttgaggctcttgaccagatcaacgagcccaagaggccatcagacaagccccttcgtcttccacttcaggatgtctacaagattggtggtattggaacggtgccagtgggacgtgttgagactggtatgatcaagcctggtatggtt

SEQ ID NO: 156101 - DNA, 435 bp, Arabidopsis thaliana columbia
aaaacattctaaagaaaaatgaagatgataatccaaattttcttcatcatctccctcatttgaaccatctcttttgccggtggtcaagacttttgtgtagctgacccaaagggtcctcaaagcccatcaggttactcttgcaagaaccctgaccaagtcaccgaaaatgactttgcatttaccggcctcggcacagctggaaacacttccaacatcattaaagccgcagtgactccagcctttgctcctgcttacgcaggcatcaatggccttggcgtatctctggctcgtcttgacttagccggtggtggtgtcatccctctccacactcatcctggtgcttctgaggtccttgtagtcattcaaggcaccatttgcgccggatttatctcctccgccaacaaagtttacttgaagactctcaacagaggagat

SEQ ID NO: 156102 - DNA, 442 bp, Arabidopsis thaliana columbia
cacagatcttttacagagaatcttgtaagaagaaagaagatgattgagaggtgtttaggagcttagcggtgccggagaatccaaagagctttacgccaattaaaggtaacgattctctgtcttcttcttaccgttgttgtcctacgtagcacaatcggcgccggtaaattcggaactccggagcaagatcttgacgagatccgtcaacatttccacgcacgcaaacgaggtgagcctcaccgtgtcctcgaagaaattcagaccggaggagattcttcttccggtgacggtggaggtaattccggtgggagtaataactacgagacgtttgacatcaacaagattttcgttgacgaaggtgaagaagagaaacccgacccgaataaaccttacactctcggacccaagatatcagattgggatgagcagagatctgattggt

SEQ ID NO: 156103 - DNA, 400 bp, Arabidopsis thaliana columbia
gaattgctcaagactgctatcgagaaggctggatacactggaaaggttgtcattggaatggatgttgccgcttcagagttgtactcagaagacaagacctacgacttgaacttcaaagaagagaacaacaatggctctcagaagatttctggtgatgctctaaaggacctgtacaagtcctttgtcgctgagtacccaatcgtgtccattgaggacccatttgaccaagatgactgggagcactatgctaagatgaccactgagtgtggaaccgaggttcagattgtcggtgatgatttgttggtcactaaccccaagagagttgctaaggcaatcgcagagaagtcttgcaatgctcttcttttgaaggttaaccaaatcggatctgtaaccgagagta

SEQ ID NO: 156104 - DNA, 431 bp, Arabidopsis thaliana columbia
  unsure (1)..(431): unsure at all n locations
tgaccaggtcaaatcctcgttgacagaccgtattgacatatcaggtcagaactctggggttgagaaaaggggaagttgtgaatccttgtctagaaaccgggattctcaatacggtggtggtggtggttctgaatcggatacctggggaagaagaagagaagaaagcggtgctgctaatggctcgccaccaccgagcggtggttcacgcccaagattggtgttacagccacgtacacttcccgtggccgttgtggaggtcgtgaagccggagagtccggtcttggtcattgtggagaaacctaaaggtgctaatccttttgggaacgncagacctagagaggaagttctggctgagaaaggccaggattggaaagagattgacgagaagctcgaggcttgaaagcttaaggacattgctgcagccatggaga

SEQ ID NO: 156105 - DNA, 434 bp, Arabidopsis thaliana columbia
ttcacttaaaaaaaaaaaccggaggccggaaaaaaccaaaaaaaaaaggaaaaggaaaattgaccagaattttctttttttttttttcctctaaagtttctattttgtctattcgggtttttttttttacttcctgataatgggagcctatgaaacagaaaaaccaactaaagatccggcggctctagagacacagtcgccggaagatttcgatcaaccatctccgcttcgtaaaatcatctccgtcgcttccatcgccgccggtgtacagttcgggtgggccttacagctctctcttcttactccgtacgttcaactcctcggaatccctcacaaatggtcatctctcatttggctctgtggtccagtctccggcatgattgttcaaccaatcgtcggtttccacagtgaccgatgtaggtccaaatttggtc

SEQ ID NO: 156106 - DNA, 260 bp, Arabidopsis thaliana columbia
accgacgcgtccgcaaactctaaaatcaatctctaaaatttttaaccgtgatcaagatgcaaatcttcgttaagacggtcaccggaaagactatgaccggcgaggtggaaagctctgacaccatcgacaacgttaaggccaagatccaggataaggaaggtattcctccggatcagcagaggcttatcttcgccggaaagcagttggaggatggccgcacgttggcggattacaatatccagaaggaatccaccctccac

SEQ ID NO: 156107 - DNA, 413 bp, Arabidopsis thaliana columbia
tgaccaggaaaaatgctcgttctatcaacaagcagaagatgcacgacaaaactctggcggagggagggaaaggagccggcctatcttacgatggatcgacacatgacgccgtgaccaagattcagctcgcagcaggcatagacggaattcaatatgttcagtttgattatgtcaagaacggacaacccgaacaagctcctcttcgtggtaccaaaggccgtgttctcccagctgatccgtttgtgattaaccatccagacgaacatctagtttctgtagaaggttggtatagccctgaaggtatcattcaaggaattaagttcatctccaacatgaagacttctgatgtcattggatccgatgagggtactcacttcactctacaagttaaagacaagaagatcattggcttt

SEQ ID NO: 156108 - DNA, 395 bp, Arabidopsis thaliana columbia
gagataatgtttacatataaatgatcttcataggaacattgtttgtttttagagcttcttgagtaactcaataaggttaacaccaaaagcgtcgcagacaactttgatgcccttgaagcctgatgctttggctaatgcctcaaactctttctcggttcgttctttgcctccgggattgtgagccaacataatgcaatcgacatggactacttgtttggttgagaggcttgagtctggtgtctctggaagtatacactctgctaatatcacttttccatcctctggaagtgactcgtagcagttcttcaagaatttcacgcaatgttcgtcactccagtcatgacatatccacttcatgaatatggcatcacctttagggacacttacaaacatat

SEQ ID NO: 156109 - DNA, 438 bp, Arabidopsis thaliana columbia
gggatgccggtgttcaacaacctcaaagtgttaagtatttggagtgacatgaataggggatggcaagctatgccagttcttctaaggaactgtccacatttagaaactctcatcattgagggactcttacactatgcgacggataaatgcggggatgtttgtgactgcatttctcgggattacaaagaccattcgctcacatcttgtccagtgaagaagttacagatatatgagtttcgaggaacaattagagagttagagatgatcaagcatttcttgaagatttttccatgtttgaaggagatggatatatatgctcatgagaatagtcatacactatttaaagaccctacaatttttgaacgtgttgggaaggtgatgaatttctacaatatgttatcgagttgcagtgttcaattactagtgcgcggtccattg

SEQ ID NO: 156110 - DNA, 444 bp, Arabidopsis thaliana columbia
agggacgatcttttctataactgaaacactactcgaggccaagttgctttagccgtaatcgtcgtcgtccctcttcccgatattatctcttctctgttcttcgatttcgaaaccctaacctcctctctttaattcgcgttttctggatcgaagatggtggcggctggtaaatccgacctttccttgcccaaaactttcgcctgcagtgccttcgctgcttgcgtcggcgaggtatgcacaattccattggacactgctaaagttaggcttcagctccaaaagtctgctcttgctggtgatgttactctgcctaaatatcgaggattgttgggaactgttggtaccatagcaagggaagaagggttacgttcactatggaaaggtgttgtacctggattgcatcgtcaatgcctatttggaggtcttaggattggaatgtatgag

SEQ ID NO: 156111 - DNA, 426 bp, Arabidopsis thaliana columbia
ctcaacggaaccctcctttctcctcctcccacaacaacaacaacaacaatgtcttcttctctccgatctaccaccggcgcttctcttctcctccgctcctcctcctcctcctccagatccactctcactctctccgcttcctcctctctctccttcgtcagatctctcgtctcttctccacgtctctcttcttcttcatccctctctcagaagaaatatcgaattgcgtcggtgaatcggagtttcaactccaccaccgccgctactaaatcttcatcttcagatcctgatcagttgaagaacgctagagaagatatcaaagagcttctcagcaccaaattctgccatccgattttggttagattaggttggcatgatgctggtacgtataacatgaacattaaggaatggccacaaagaggtgga

SEQ ID NO: 156112 - DNA, 445 bp, Arabidopsis thaliana columbia
caagaaggcattggcggcgacaggaggagatcttgagaaagcacaagaattcctcagaaagaagggtctctcatcagctgataaaaaatcaagccggcttgcatcagaagggagaatcggttcgtacatccacgattctcggattggagttctgatagaagtgaactgtgagactgactttgtcggaagaagcgaaaaattcaaggaattggttgatgatcttgcaatgcaagcagtggctaatccacaggtgcaatatgtttcaatagaggacattccagaggagataaagcagaaagaaaaagagattgagatgcaaagagaggatcttttgtcgaaaccagagaacataagggagaagattgtggaaggaagaatctcaaagaggcttggagaatgggcattgcttgagcagccctacatcaaagacgacagtgttctggtg

SEQ ID NO: 156113 - DNA, 445 bp, Arabidopsis thaliana columbia
gagaagggaaggaggattagggaattgacatctcttgtacaaaagagattcaaatttcctcaggacagtgttgagctttatgctgagaaggttgctaacagaggtctttgtgctattgctcaggctgagtctcttcgttacaagcttcttggtggtcttgctgttcgtagggcgtgctatggtgttttaaggtttgttatggagagtggagctaaaggatgcgaagtcattgtgagtggaaaactccgtgctgcacgtgctaagtcgatgaagttcaaggatggttacatggtttcctcaggtcagccaaccaaggaatacattgatgctgcagttaggcatgttcttcttagacagggtgtgcttggtctcaaggtgaagatcatgcttgactgggaccccaagggcaaacaatgaccgatgacaccattgcctgttgttgtga

SEQ ID NO: 156114 - DNA, 432 bp, Arabidopsis thaliana columbia
cgacggcgtggtgttcctccttcctgctctgaaaaatggcgaagagaacgaagaaggttggaatcgtcggcaaatacggaacacgttatggtgcgagtatcaggaagcagattaagaagatggaggtcagccagcacagcaagtacttctgtgagttctgtggcaagtacggagtgaagcgaaaggctgttggtatctggggttgcaaggattgtggcaaggtcaaggcaggtggtgcttacacaatgaacaccgccagtgcggtcactgttagaagcacgatcagaaggttgagggagcagatcgagggttaaaagtctgctggctttttatatttggtttccttgttttgacaatttaagttttgcaaactctatgcttgtgattttgaatcaagacttatacattgagcagtttaagcaggtttttatt

SEQ ID NO: 156115 - DNA, 450 bp, Arabidopsis thaliana columbia
atcaacactcgctctgcgctgcgttcgaatccagaactctctgaccatcccaaagcaaaagcttcaccgatcttcctcgtttggtctcgaatattaagtgaaatatgggtttcataatggaattcgcggagaatttggtgttaaggttaatggagaatccagaggaacgagacaggaaagcgagggaacacatatatgagatgcatgagaggtgcaagaagattaaggagatgtgggcattgcctattcgtccttatggattctggacatttgagcgtcacaatgctcagcttcgttgggatcctcagatcagtcaggttgctggtcgaagggatccttatgatgatcttctcgaggacaactacactcctccttcttcctcttcctcatcttcagactaatcaaacaatgaaagaagatgtgttatgctgtctggatggatgcatgttt

SEQ ID NO: 156116 - DNA, 449 bp, Arabidopsis thaliana columbia
cattactaatctccttttaaggtttctttcgtgaatcagatcggaaaaatggaatcttttttgttcacatctgaatccgtcaacgagggacatcccgacaagctttgtgatcagatctccgacgctatcctcgatgcttgccttgaacaagaccctgagagcaaagttgcttgtgagacttgtaccaagactaacatggtcatggtttttggagaaatcaccaccaaggctaacgttgattacgagcagattgttcgtaaaacatgccgtgagattggattcgtctctgctgacgttggtctagatgctgacaattgcaaggttctggttaacattgagcaacagagtcctgacattgcacaaggtgttcatggtcatctcaccaagaagccagaggaggttggagctggtgaccaaggtcacatgtttgggtatgctactgatgagac

SEQ ID NO: 156117 - DNA, 451 bp, Arabidopsis thaliana columbia
gttccgtcttctccgattcgctttacactacttcttccctcgtctctctctctcgcgcttcactgtgaattaatcgagagatctaaatatccgccatggacagagcacaattgatcttgttaggtctacctatattcttgttttgttcggatctcttcaacctcttcactcctccgcctcctaaacctcagcctcaccgtcctcatcagccaccgcatattcctcaccagcatcgtcctaatgcgatcatccccgaaaccctagactttccttcacagaagacaagtggcttaggaggagcaattggatatggaaatacagtagagatcaacttctgcgtctcctgttcttacaagggaactgcagtcaccatgaagaagatgttagagacggcttttcccggtttagatgtgattctcgcaaattacccaccaccagcaccaaaacgcct

SEQ ID NO: 156118 - DNA, 453 bp, Arabidopsis thaliana columbia
cagtcatggacgatcgaaaaatcgagacttgcgaattcaacacggaagcgagacagtaaccgacttaacaatggctgcttcatcgtctccgtgcatcttcttcgccactaccttactggtgctgcttctcactttctcatccgggaaattaccatttcaccctcgagacctgcttccgctttttccgaggcaagtctcgtggccggtagtcaattctctcaacactgccgtcgatctcctccctactttcatcggctccgcttctgttagaaacgacgccgtggagtggaaaggtgcttgcttttatgagaacaaagcttggttggagctcaataacaagtccggttccgaattcggcggcggcacacttcacattaaggtcgataaggcacatagttggacgtgcatggatatttatgtctttgtcacaccatatcgtgtgacatgggattg

SEQ ID NO: 156119 - DNA, 346 bp, Arabidopsis thaliana columbia
acgcgaccgcatgtttttgattctgccaccatttgtcgtttgcacagtcgaggaaagggtatttcagcctgtgccttgccttacaagagatcgtctccgagctggctcaagaccacctgtcaggatgttgatgaatcaatctgcaagatttgccaaaaagggattgaccccttcccagattggtgtgattctccgtgactctcacggtatccctcaggtcaagagtgttactggaagcaagatcttgaggatactcaaagctcatgggcttgctcctgagatccctgaggatctgttccatctaatgaagaaggctgttgccatccgggaacatctcgtgaggaac

SEQ ID NO: 156120 - DNA, 430 bp, Arabidopsis thaliana columbia
ctttggttagaaacttgaagaacacgttatctgcacacttctgtcgaaagaaagacaaagcaaggatcgcttctgaaaagttctctgagatttacagggatgttacgatgaacaatctgatgggaatgtcgataacattggcgattgtatactcgagaggattgaagtgggaatactcaatagaatctcttcttgttgtggtagttggcattgcaattggcttaccggcttatgtgagatcgacttatccgttctggatctgtgtaatggcctttgctatgtatatcttctctcttgtccttatctatatccattttcatcttcgaggtcagagctaaagctttcaccttttagctctgatcagactaaaagagtatatcaacttcaaagtgtactttttcattttcattaagaccatgttcttttgatt

SEQ ID NO: 156121 - DNA, 449 bp, Arabidopsis thaliana columbia
ggaggataaaaaccctagggtgagtgagacagagagaagcgaaaatggtgcagcgccttgtttaccgatcacgacacagttacgccaccaaatccaaccagcacaggatcgtcaaaactccaggaggtaaattgacgtaccagaccactaagaagagagctagtggacctaaatgtcccgttaccggcaagcgtattcagggtattcctcacttgaggccaactgagtacaagaggtcacgtttatcaagaaacaggaggaccgtgaaccgtgcttatggtggggttttgtctggttctgctgttagggaaagaatcattcgtgccttccttgtggaggagcaaaagattgtgaagaaggttttgaagcttcagaaggcaaaggaaaaggttgctcccaagtgatctagaccctattagtttttatgttttatggctctgttctagcga

SEQ ID NO: 156122 - DNA, 452 bp, Arabidopsis thaliana columbia
gctccgtcttttttgaagactggaacaaccattgttggtttgattttcaaggatggtgtgatactaggggcagatacccgagcaactgaggggccaattgttgctgataagaactgtgagaagattcactatatggcaccaaacatatattgctgtggtgcaggaactgcggctgatactgaagcagtcactgatatggtcagctcacagctgcgattgcatcgttaccagactggtcgagactctcgggtcattactgctttgacccttctcaaaaaacatcttttcagctaccaaggtcatgtctctgctgctcttgtactcggtggagttgatatcactggtccacatctgcatactatatacccacacggttcaactgacactcttccattcgccacaatgggttcgggttctcttgctgctatgtctgtgtttgaggcaaagtataa

SEQ ID NO: 156123 - DNA, 444 bp, Arabidopsis thaliana columbia
cttgtttctcttcccaattttctcatcgttttctgaatcttcttcttcttcttcttcctgctctcaagaacagattggttgtaaacgagcttgatcaataaattctctcaagatctatggcggaagagcatcgatgtcagacaccagaaagcaaccgtctctgtgttaacaactgtggcttcctcggcagctccgccaccatgaatctctgttctaattgttacggcgatctttgtctcaaacaacaacaacaatcctcctccatcaaatccaccgttgaatcttccctctctgtatctcctccgtcgtcatcatcatcggagatctcttctccgatcatccctcctctccttaaaaatccatcagtcaagctagaggtaccggagaaaaaggcggtgatttcgctgccgacgacggagcagaatcagcaacagaggccgaatc

SEQ ID NO: 156124 - DNA, 452 bp, Arabidopsis thaliana columbia
aaaaggtctgcttcgcctcttctacgacgttgcataaactaagaagagatgggtcttctgtccaacagaatcgatagatcgagtgtgaaacctggagatcatatctactcctggaggactgcttacatctatgcccatcacggcatctatgttggagatgatagagtcatccatttcactagacgaggccaagaagttggaaccgggactgttctagatctcatactagtcagctcaggtccatcccgaaaccacacccactgtccaacctgtgttccacctaacgaaggtcacggtgttgtttcctcatgccttaactgtttcctagccggtggtgtcttgtaccggtttgagtactcagtcaacgctgctcacttcctcgtcaaagccagaggaggaacttgcacactcgctgtcgctgaccctaatgagattgttgttcaccgggccaa

SEQ ID NO: 156125 - DNA, 451 bp, Arabidopsis thaliana columbia
cagagagctgatggacctgcaggcatcttggctattggcactgctaaccctgagaaccatgtgcttcaggcggagtatcctgactactacttccgcatcaccaacagtgaacacatgaccgacctcaaggagaagttcaagcgcatgtgcgacaagtcgacaattcggaaacgtcacatgcatctgacggaggaattcctcaaggaaaacccacacatgtgtgcttacatggctccttctctggacaccagacaggacatcgtggtggtcgaagtccctaagctaggcaaagaagcggcagtgaaggccatcaaggagtggggccagcccaagtcaaagatcactcatgtcgtcttctgcactacctccggcgtcgacatgcctggtgctgactaccagctcaccaagcttcttggtctccgtccttccgtcaagcgtctcatgatgtacc

SEQ ID NO: 156126 - DNA, 432 bp, Arabidopsis thaliana columbia
ctaaaaaatggaataaaaaaaggaagaagcccgttcaggaacaagaaaaaaccatcgccatttcaactgaatctcgatgaaaaaaaaaaaatatcaatgaatcaatcatttttttagaggattttaatatctaataaaaggcgccaaaactcaaaatttcttttacttttggggcaagcccttccgttataagttagaaagaaaaaccctctatgaaaaaagggtaggttggaatcaacacattgattttttcacaatttttattgaaccgtatgcaccaaaaggtgcctgtacggctcctaaggaataaaaaattatcctaatcaaccgactttatcgagaaagattattttttttaggccaagaggttgataccgaaatctcgaatcaacttattagtcttatgatatatctcagtatagaaaaggatac

SEQ ID NO: 156127 - DNA, 446 bp, Arabidopsis thaliana columbia
aagcagatatcggtattgctgtggccgatgctacagatgctgctcgtggtgcttcagatatcgtcctcacggaacctgggctgagtgtcatcatcagtgccgttctcactagcagagctatcttccagagaatgaagaactacaccatttatgcagtctcaatcacaatccgtattgtgtttggtttcatgcttattgctttgatatgggaatttgacttctcagcgttcatggttctgattattgccatccttaatgatggtactatcatgacaatctcaaaggacagagtcaagccatctcccacacctgatagctggaagctcaaagaaattttcgccactggaattgtgctgggaggctaccaagccattatgagtgttattttcttctgggctgctcacaagaccgactttttctcggacaagttcggtgtgaggtcaatc

SEQ ID NO: 156128 - DNA, 450 bp, Arabidopsis thaliana columbia
  unsure (1)..(450): unsure at all n locations
caaaagccatagcaaccaccaccggtaccatcatctatcatcccggagccacgagcaaaaccagcgtggcctaatttcgagaaatgccataatcatcattggcacctccattatctccatattcataatccttgcaattctcctaataatcattttacttcatcgacttaaatccgcaagagtcaaagcacaagaattatcttgcaaagaaagcttcaacaacatgaacaatggtggagcttccaccaactacagctacacttctagccctgatgacatcaagagagattgtctatactcaagaaacccaacatcgttcagacaattacccccacagacaaaaagttgtaggagaagccgagccgaaggagtagaagtgtacacatacaaggaattagagattgcaacaaataatttcagcgaggagaagaaaatcggaaatgnggatgt

SEQ ID NO: 156129 - DNA, 438 bp, Arabidopsis thaliana columbia
tttggatacagggaggttgaatcctgagacgtatcggtttttcgatgcggtggagaagcactatgggattaggattgagtatatgtttcctgattctgttgaggttcaaggtttggttaggagcaagggattgttctctttttatgaggatggtcatcaggagtgttgccgtgttcgaaaggtgagacctttgaggcgtgctctcaagggtttaaaggcttggattactggtcagaggaaagatcaatctccggggacaaggtctgagattccggttgttcaggttgatccggtgtttgaaggtttggatggtggagttggtagtttggtgaagtggaatccggttgcgaatgtcgaagggaatgatgtttggaactccctgaggactattgatgtttcggatcacacattgcatgcgggagggtatattatcgattg

SEQ ID NO: 156130 - DNA, 455 bp, Arabidopsis thaliana columbia
ctcagcagtaccatgacagaaagcagagggaggcaagaatgagcatgagcagagaagagaggacaaaaactccgttcgtggactacctaaagcccatcatcgccgacggagacaccggctttggcggcaccaccgccaccgtcaaactctgcaagcttttcgttgaaagaggcgccgctggggtccacatcgaggaccagtcctccgtcaccaagaagtgtggccacatggccggaaaggtcctcgtggcagtcagcgaacacatcaaccgccttgtcgcggctcggctccagttcgacgtgatgggtacagagaccgtccttgttgctagaacagatgcggtcgcagctactctgatccagtcgaacattgacgcgagggaccaccagttcatcctcggtgccactaacccgagccttagaggcaagagtttgtcctcgcttctggctgagggg

SEQ ID NO: 156131 - DNA, 446 bp, Arabidopsis thaliana columbia
cccacgcgtccgcgtttttatatttactcctcccattcccttctccttcaatccttccttcctcctcctcccttcttcttcttcccctctttcattttccagccactacaaacttttctatctctactttttttcctctcgatttcaggtagaagaaaatggctgatggtgaagacattcaacctcttgtttgcgacaatggaactggaatggttaaggctggttttgctggggatgatgcacctagagctgtgtttcctagtattgtgggtcgtcctcgtcacaccggtgtgatggttgggatggggcaaaaggatgcttatgttggcgatgaagctcaatccaaacgaggtattttaactctcaagtaccctattgagcatggaattgtcaacaattgggatgacatggagaagatttggcatcacactttctacaatgagctc

SEQ ID NO: 156132 - DNA, 389 bp, Arabidopsis thaliana columbia
ttccaatctctctccctctctacttccttcaacagaaatggaaacgttcctatttacctgtgaatccgtcaatgaaggacgacccagacaagctttgtgaccagatttctgatgcgatccttgatgcttgcttagagcaagatcctgaaagcaaagtggcgtgtgagacatgcaccaagaccaacatggtgatggtgtttggtgagatcactaccgctgcgaaagttgactatgagaagattgttagatccacttgcagggagattggttttatctctgctgatgtaggtcttgacgctgacaaatgcaacgatttggttaacattgagcaacagagccctgacattgctcagggtgttcatggtcatttgaccatgtagcctgtagat

SEQ ID NO: 156133 - DNA, 452 bp, Arabidopsis thaliana columbia
attgacacttatggtggttggggtgctcatggtggaggtgccttctcaggaaaggacccaaccaaggttgacagaagcggtgcctatatcgtgaggcaggctgcaaagagcgtggcagcaggactcgcacgccgttgtatcgtgcaggtatcatacgccattggtgtccctgagccgctctcagtgtttgttgacacctacaagaccgggaccatcccagacaaggatatccttgtgttgatcaaggaagcatttgacttcaggccgggaatgatggccattaaccttgaccttaagaggggaggtaacttcaggttccagaaaaccgctgcgtatggccatttcgggcgtgatgaccctgacttcacttgggaggttgtcaagccgctcaagccaaatgcctagacagaaacaaagctggcaattgcaagaactgagttgagtcactcccc

SEQ ID NO: 156134 - DNA, 295 bp, Arabidopsis thaliana columbia
agaattacaaacaaaaatggttttgcaaaagcttcctctcattgggctgcttttgctcctgaccatcgtcgcctctccagcaaatgcagatggacctgtttgcccgccgtcgaacaaactaagccgggcaagtttccctgaaggttttttatttggcacggctactgcggcataccaggtcgaaggtgcgattaatgaaacttgtcgtggaccagccttatgggacatctactgtagaagatatccagagaggtgcaataacgataacggcgatgtggtcagtgatttcttccat

SEQ ID NO: 156135 - DNA, 299 bp, Arabidopsis thaliana columbia
gtcagctttgctggatgtggcttccattgcatctttcaagatccttctattagatccatatcgggagtgttgtctgccttccatgcgatgactatatcgcaatggccaaacatgggttatcatcatcagcctgaacatgaggcctttgctcacttattgcaagctccgcaagaggattcccagatgttagtccgggagcgtttcccagtcccgagattagttgtgtgtgatcaacattgatcacaggcaaggtttttattggctaatctgaatccattatcgacttacaacaatgcaaa

SEQ ID NO: 156136 - DNA, 448 bp, Arabidopsis thaliana columbia
gttggatgagagcaaagacgttggtgcatccaatcgtcgccatctcgctgcactatactgtggtgctacttctggatttgagcttatccatggcctggtcgataggatcatggaagtgatggcaataccatttctaacaatccatgaaaataacgtaccaatcaatgaaaaagacggatactatgtaaagctctcccaagaacccgagtttctaccgggcaggcaagctagcatcattgtcagagggaaacatattggtaactttggaatcgtgcatcctgaggttttgaacaactttgacatccctgatccatgctcttacttggagttagacatcgaagctatcttatagaaaaagaaaccaaccaaaatgttttcttctctttgtgcaatatcgttatctggattatttgaagttgttgattttgtttggttagaggatctagaa

SEQ ID NO: 156137 - DNA, 438 bp, Arabidopsis thaliana columbia
aagacgagaagattggtgagaagctcccgtctgcagacaagaagaagatcgaggattctattgagcaggcgattcaatggctcgagggtaaccagttggctgaggctgatgagttcgaagacaagatgaaggaattggagagcatctgcaacccaatcattgccaagatgtaccaaggagctggtggtgaagccggtggtccaggtgcctctggtatggacgatgatgctccccctgcttcaggcggtgctggacctaagatcgaggaggtcgactaatttgttggacattgacctctctctttctcctatctctatctcttttacttgcttttttttgatctgttaagactttttatgttgggcttttttaaagaagcccattttgtggtgttttttggttagtactattttgaacaaaaaaaataaaaaagggcgg

SEQ ID NO: 156138 - DNA, 352 bp, Arabidopsis thaliana columbia
ggcaattggtaccattttatgtgcatcttattggtctgcatggagtgcccgagaagcagctattgaacatgataagctactgaaggatgctatagatgaaatccctaacacaaatgatgggggtagtggtgttgtagagatcaattctatttcagctatttttttcgtagttcttgcttcgggattcctggtgattctttacaagcttatgtcttattggtttgtggagcttcttgtggtcgttttctgcattggtggtgttgagggtttgcaaacttgcctcgtcgcgttactatcaagatggttccaacgtgctgcagttacttatgttaaagtccctttccttggtcct

SEQ ID NO: 156139 - DNA, 446 bp, Arabidopsis thaliana columbia
gaaacaagcactgcatgaacgtcgtttgtctcttgaacaagatgtgtcaagattacaagagcagctgcaagctgaaagagatctccgagcagcactggaggttggtttgagcatgtcttctggacaattcagttcacatggtgtagattcaaaaacaagggctgagcttgaggaaattgctcttgctgaggctgatgtggccaggctgaagcagaaagttgcagaacttcaccatcagcttaaccagcaacgtcagactcattttggttccttctcagatgcacgtgatactcatcagtatctccagaatcacaatcctcaaaaaaggtttcttcagcaagattttgattccactcttgcctatgtaaatcatgaaaggaaacaaagacacgaggagaatgtactgtgagcggagtggagaaatagtaaaggggcaggatcttttg

SEQ ID NO: 156140 - DNA, 439 bp, Arabidopsis thaliana columbia
cggacgcgtggggacaaaaagaacaatggcagcgagtgcatctccaatggcgagccagctaaggagcagcttctcctccgcttctctttctcagcgtctcgccgtcccgaagggcatctccggtgctcctttcggtgtttctccgaccaaaagagtctcttccttcactgtccgagctgttaaatccgacaagacaacattccaagtagttcaaccaatcaacggtgatccattcatcggaagtttggaaactccggtgacatcaagcccattgatcgcgtggtacctttccaacctccctggataccgtaccgccgtcaaccctctcctccgcggtgtggaagtgggcctggcccatggtttcttcttagtgggcccattcgtcaaagctggcccattaaggaacactgcttacgccgggtcagccggttctttagcc

SEQ ID NO: 156141 - DNA, 420 bp, Arabidopsis thaliana columbia
ggcacggttaggattgattctttatggaccaggactaaagtcagcagcagtgttttctccactgaccctgttgcggtttaccaagtgaaccgcgtgcttctacccgaagcaatctttggtactgatgtccctccaatgcctgctccagctcctgctcctatcgttagtgctccttcggattctccttcagttgctgattctgaaggagcttcttcaccaaagtcctcacacaagaactccggacaaaagctgctacttgcaccaatctccatggttatttccggtttggtggcattgttcttgtgatcagatggttttgcagattgagttatgtttttaagttacaatgtgaaagattgtattacatcaattggattgtccttttgatttttgaaacccatttcttattatacattttta

SEQ ID NO: 156142 - DNA, 457 bp, Arabidopsis thaliana columbia
  unsure (1)..(457): unsure at all n locations
acccttccgagattctggcccattctaacagcactacggttgttggtccaggccctgcaaataggaaactctatgtgggtaacctgcatttcaacatgtcggaactgcagcttagacagatttttgaggcatttggtcccgttgagcttgttcagctaccacttgatcctgaaactgggcagtgcaaaggatttggatttattcagtttgttcaacttgaacattcaaaggcagcacaaattgccttaaatggaaagctggagattgctggtaggacaatcaaggtttcttccgtctctgatcatattggtacacaagattctgctccaaaatctgctgattntgatgatgatgaatggagtggactggctntaaatgcacaatctagggctatgcttatgcagaagctggatcgttcaggtatcgctacaagcattgtgggctctcttggatacca

SEQ ID NO: 156143 - DNA, 451 bp, Arabidopsis thaliana columbia
gaagccatgtctgtgaaactaaacctatcttcctcaatcctatggattctctttgcggcggcggcgagtaaagagatcggattcgatgaatctaatccaatcaaaatggtctccgacaatctccatgagcttgaagacaccgtcgtccagatcctaggacagtcccgtcatgttctatccttttctcgcttcactcacaggtatgggaagaagtatcagagtgtggaggagatgaagttaagattctctgtttttaaggagaatcttgatttaatcagatccactaataagaaaggcttatcctataaactctctcttaatcagtttgctgacttgacatggcaagagtttcaaagatacaagcttggagctgctcaaaactgttctgctactttaaagggtagccacaagatcactgaagctacagttccagacacaaaagattggagag

SEQ ID NO: 156144 - DNA, 262 bp, Arabidopsis thaliana columbia
gcttggtgatggagcagctgagagccttcacgtgaaggattacaagtactgagcatcgtccacgggttgaattgtgacgtttgtcatcttcctggatatatttctagggatttttcgtttttctacttgacattatcggattataagtgttttttcttcattttccttttggatttgtgttttgattttgattgggttttgttttttagaattgagtattttaaaaacacgcccaaataaaaaagtcatttgaggttaaaaa

SEQ ID NO: 156145 - DNA, 382 bp, Arabidopsis thaliana columbia
gaacatgattactggtacctcccaggctgattgtgctgttcttatcattgactccaccactggaggttttgaggctggtatctctaaggatggtcagacccgtgagcacgctcttcttgctttcacccttggtgtcaagcagatgatttgctgttgtaacaagatggatgccaccacccccaaatactccaaggctaggtacgatgaaatcatcaaggaggtgtcttcatacctgaagaaggtcggatacaaccctgacaaaatcccatttgtgccaatctctggattcgagggagacaacatgattgagaggtcaaccaaccttgactggtacaagggaccaactcttcttgaggctcttgaccagatcaacgagcccaag

SEQ ID NO: 156146 - DNA, 455 bp, Arabidopsis thaliana columbia
ccaatgcgaatgttgtcaagaagaagattccagtcctcctttgctgtaacaagaccgataaactcactgcacacaccaaggagtttatccggaagcaaatggagaaagaaattgagaaactgagggcttcaaggagtgcagtctctactgctgatatagcgaatgacttcaccattggaattgagggagaagtgttctccttcacgcattgctccaacaaagtcactgtcgctgaggcatctggacttaccggagaaaccatccagattgaagacttcattcgagaatacatcaagccatgagctccaacatgccttcatagattgaatctaccacaagtttcttatgctttgggctgtgactttgatttgagtttagagatccttttgtatatgagatctttggatgatttagggtgttcaaaactgagtagctgtattttcgagttagataat

SEQ ID NO: 156147 - DNA, 447 bp, Arabidopsis thaliana columbia
ctttttgaagacatgggtgaatcttccgatggctattgggtttatgttgctatacaccaaactttccaatgttctctccaaaaaggctctcttttacactgttattgttcctttcattgtctactttggagcctttggtttcgtgatgtaccctctcagcaatttgattcatcctgaagctcttgctgataagcttcttgcaacactcggccccagattcatgggtcctctcgcaatcatgaggatttggagtttctgtttgttctatgtcatggctgagctttggggtagtgttgtcgtttcagttctcttctggggatttgccaaccagattacaactgttgacgaagccaaaaagttctatcctctgtttggacttggggccaatgttgcacttatcttctcaggaagaactgtgaaatatttctctaatatgagaaagaatct

SEQ ID NO: 156148 - DNA, 429 bp, Arabidopsis thaliana columbia
gcagattttcgttaaaaccctaacgttaaagacgattactcttgaggtggagagttctgacaccatcgacaacgtaaggccaagatccaagacaaagagggtattcctccggaccagcagaggctgatcttcgccggaaagcagttggaggatggcagaactcttgctgactacaatatccagaaggagtccacccttcatcttgttctcaggctccgtggtggtatgcagattttcgttaagacgttgactgggaaaactatcactttggaggtggagagttctgacaccattgataacgtgaaagccaagatccaagacaaagagggtattcctccggaccagcagagattgatctttgtctgaaaacaacttgaagatggcagaactttgtcctactacaacatttagaaggagtccacactccac

SEQ ID NO: 156149 - DNA, 451 bp, Arabidopsis thaliana columbia
aatttctcaaactctgaaatcgttctttcaaatctctcaatcgggatcaagatgcagatctttgttaagactctcaccggaaagactatcaccctcgaggtggaaagctctgacaccatcgacaacgttaaggccaagatccaggataaggaaggcattcctccggatcagcagaggcttattttcgccggaaaacagctagaggatggccgtacgttggctgattacaatatccagaaggaatccaccctccacttggttctcaggctccgtggtggtatgcagattttcgtcaagaccttaacgggaaagacgattactcttgaggtggagagttctgacaccatcgacaacgtcaaggccaagatccaagacaaggagggtattcctccggaccagcagaggttgatcttcgctggaaagcagttggaggatggcagaactcttgctg

SEQ ID NO: 156150 - DNA, 455 bp, Arabidopsis thaliana columbia
ggaaaaaggcagcagcagaagttctcgccctgcaaaagcgggtattgtcagttcttaatgaagccacttgtaaagatccggtagagccattgacactggaagagatagctgatcgttgtcatgctcctgaggaaatagaaatgatatacaagatcatagcgcacatgtctgcaaacgacagagttctgatagcagaaggaaactgtggatcgccacgaagtatcaaagtgtatttgggcgagtgcaatgtggatgacctgtacgcataacaaaacccaacactttctcaaactccaaactctcattctctccattccttatttctttctgccatgtctatgattttgaaaaagaaaaagattgcaataagagccaggaaacacttgtgtacttgttttgaaataaagataatttcagaatgttacaaatgttgattgtaatgataacattggaga

SEQ ID NO: 156151 - DNA, 423 bp, Arabidopsis thaliana columbia
atcaaaaagcttttaacctcagccgttaaatctttctccgatcatgccgaccagaaacatcgccattggtggagtccaagaagaggtctatcaccccaacgcacttagggcggcgctcgctgagtttatctcgactttgatcttcgtcttcgccggctcaggctccggaattgctttcaacaagatcactgacaatggagcaaccactccttccggcctcgtcgccgctgccttagctcatgctttcggtctctttgtcgctgtctctgttggcgctaacatttccggtggccacgttaaccctgccgttaccttcggtgtcttactcggtggtaacatcactctccttcgtggtattctctactggattgctcagcttcttggctccgtcgccgcttgtttccttcttagctttgccaccgg

SEQ ID NO: 156152 - DNA, 259 bp, Arabidopsis thaliana columbia
gtaattcacaggagaaagctattttagaagttaatcttgctgctgccagacaaattgcaagggagattcggctgagagatattggcggtatcattgtggtagatttcatcgacatggcagatgaatcaaataagagactcgtttatgaagaggttaagaaagccgcggagagagattggtcactggttaatgtatcagagctgtctagacactgtctttttgtgataacaagaaaatgggtttcttccgtgtgtatcat

SEQ ID NO: 156153 - DNA, 412 bp, Arabidopsis thaliana columbia
gtgaaattgggtactccgggaatgagattcatggtggcgcttgatacaggaagcgacctcttttgggtcccttgtgattgcggcaaatgcgcaccaaccgaaggagccacttatgcttctgagtttgaactcagcatttacaatcctaaagtttcaactacaaataagaaggtcacctgcaacaacagtctatgtgcacagcgtaatcagtgccttggaacattcagcacttgcccttatatggtgtcttatgtctctgctcagacttcgacatctggtattcttatggaagatgttatgcacttaacaacagaagataagaatccagagcgtgttgaggcatatgtcacatttggatgtggacagggtcaaagtgtgtcttttctttgacattgcagtaccaattggttta

SEQ ID NO: 156154 - DNA, 454 bp, Arabidopsis thaliana columbia
ggagaaagaggcagcagtgaaaaaagagtttggacagacttgtgactggataaagaaacgattgggtgacaaggttgccagtgttcaaatttccaaccgtcttagttcttccccctgtgttcttgtatctggtaaatttggttggtcagccaatatggagaggctaatgaaggcacaatcaactggtgacacaataagcctcgactacatgaaagggagaagagtgtttgagatcaatcccgaccactcaattatcaagaacataaatgctgcttacaatagtaacccaaatgacgaagatgcaatgagagccatagatcttatgtatgacgcagcactagtttctagtgggttcacgcccgataatccagcagagctgggtgggaagatatatgagatgaatgatgtagctctttccgggaaatggtcaagccctgaggtgcagccgcagcat

SEQ ID NO: 156155 - DNA, 455 bp, Arabidopsis thaliana columbia
aaccattcagtggtttcctaaaggatctcttgaacctcaaaagtatgagggtccacgcaatgctgaagctttggctgaatacgtgaacaaggaaggaggcaccaacgtaaaattagctgcagttccacaaaacgtggttgttttgacacctgacaatttcgatgagattgttctggatcaaaacaaagatgtcctagtcgaattttatgcaccatggtgtggccactgcaaatcactcgctcccacatacgaaaaggtagccacagtgtttaaacaggaagaaggtgtagtcatcgccaatttggatgctgatgcacacaaagcccttggcgagaaatatggagtgagtggattcccaacattgaaattcttcccaaaggacaacaaagctggtcacgattatgacggtggcagggatttagatgactttgtaagcttcatcaacgagaaatctg

SEQ ID NO: 156156 - DNA, 312 bp, Arabidopsis thaliana columbia
gtttcggtaaaggtttgggcggtggaggctttctagtcggcggaggtggtctaggaggcggtggtgacctatgagtcgatggtggtctattcaatgagtcaccaacttaaatttatttgctattcataaaactattttttatttacacctaacaatttctattatattttttttcattaaaacaaagatttactaattaatttttattcatcattgataatcctctttaaattactttattccacattctttaattttatcacatttttttaacattaataaatattttataatcgtctatttatattctta

SEQ ID NO: 156157 - DNA, 450 bp, Arabidopsis thaliana columbia
gcttttcgctgatacaaccccaaacacggcggagaatttccgtgctctctgtaccggcgagaaaggaatgggaaagctaggtaagccacttcacttcaaaggatcgatcttccaccgtgtgattcccggattcatgtgtcaaggaggtgatttcaccgccaagaacggaaccggtggtgaatcgatctacggtgctaagttcaaggacgagaactttatcaagaagcatacaggagctgggattctctcaatggctaactctggtcctaacactaacggatctcagttcttcatctgtaccgataagacgtcgtggttagatggtaagcacgttgtgtttggacaagttgttaaaggcttggacgtcgtgaaggcgattgagaaagttggatctgattctggaaagacttccaaagtcgttaccatcactgattgtggtcagctttctta

SEQ ID NO: 156158 - DNA, 385 bp, Arabidopsis thaliana columbia
gaatcagtggcggttaactcggtcttcgagcttcatcgcctcttagctcatcccggttccatcgataagtttttatcgacaatcaaatcaatccgaccggatataatgactgtggtcgagcaagaagcaaaccataacggtaccgtatttctcgatcggttcacggaatcgctacattactattcgagcttattcgactcgctcgagggcccgccaagccaagaccgagtgatgtcggagttattcctaggacggcagatactaaaccttgtggcatgcgatggagaagaccgggttgagaggcatgagactttaaatcagtggagaaaccggttcggtttacgaggttttaaaccgttttgtattcgtttgtacgcgtataaac

SEQ ID NO: 156159 - DNA, 360 bp, Arabidopsis thaliana columbia
gcatttctctctttctctgcttgaatccattacagagggattgtggagtggtttggttgatttgattcatctgtgacaaggtggagactagtatcgacatgagaggaactctgagatcgaaggagtatagaactgctccggagttgctggaccttgtcatcttgacaaagtgaagggtcaaagaccagagatgttaatattcctaggagatggatcaacgagacgtgtcaggtcttggaggttgtggggagaaagctgtgtacaggttttgaaggaacatctgagattgacatcatgttaccaccgtgcatttaagtagaggactgtattccctttgtattggacattcttgtcatatat

SEQ ID NO: 156160 - DNA, 441 bp, Arabidopsis thaliana columbia
  unsure (1)..(441): unsure at all n locations
ctactttgtcaattcctatactttcactctcttccaattatataatctctggtccatagaaaacatcggtctcttgtcaccgttgattttatttggtcaaaatcattcttcttctcgctgaataatcgttgatttcacttcttcttctggtcttaaaaaaattcaagatctatacgagaaaacacaaaacaagtaaaactttttcaaccgtttttcctgtcggtaaagtttggattcttcttagtaaattttggtcttattgtcgaccaaaagaagaagatggtcgttcagaatgttcaagatnttgatgttcttccgaaacatagctcggattcattcgatgatgatggtcgtcccaagcgaaccgggacggtgtggacagcaagtgcacacataataacagcagtaattgggtcaggagtgttgtcattggcatgggcc

SEQ ID NO: 156161 - DNA, 451 bp, Arabidopsis thaliana columbia
ccatctcgttgagaagcttgccaatttcgacagggaacggattccagagcgtgtggttcatgccagaggagccagtgctaaaggtttctttgaggtcactcatgatatctctaacctcacttgtgctgactttctccgagctcccggtgttcagactcctgtcattgtccggttctccaccgttatccatgagcgtggaagtcccgagaccttgagagaccctcgtggttttgcagtcaagttctacaccagagaggggaactttgatcttgttggaaacaactttcctgttttcttcatccgcgatgggatgaagttccctgacatggtccacgctcttaagccgaacccaaaatctcacatccaagagaactggagaatccttgacttcttctcccaccaccctgaaagtttgaacatgttcactttcctcttcgatgatatcggtatc

SEQ ID NO: 156162 - DNA, 446 bp, Arabidopsis thaliana columbia
ttcgagattgatctgatttgctttgttgttttctttctgctacaagtagataaaaaatggcatggcgcagtgcagcacgctctttcgtctccgctacagctagagctccgtctctccgatctccgccgccaacgcttccccgcctccgtccttcccaatcctctttgccccgccgccgatttgcctctttcactaatcccaggaatttgggagagctaggatgcacagagtcattcttgcctctgtacaatgttgtggctgcagcgagactcacatctcaccttaatgttaatctgcgagctttctgcgaactctctaacggtacttgaatgcacaaagtggatgcatcagttatcttgaagcagttggagacttgagaaaaggggtgtaccaagaagaactcattggttgtttgtgttccattaggaaccaaaaactatatacat

SEQ ID NO: 156163 - DNA, 442 bp, Arabidopsis thaliana columbia
cttttgtcactcatcttcacaggaaacaatggtgtttgtgaagtcctccaaatcgaatgcttacttcaagaggtaccaagtgaagttcaggagaaggagagatgggaagactgattacagggcaaggatccgtcttatcaatcaagacaagaacaagtacaacacccctaagtaccgttttgttgttcgatttaccaacaaagacattgtggcacagattgtatctgcaagcatagctggtgacattgttaaagcttcggcttacgcacatgagcttcctcagtatggactcactgttggtcttaccaactatgctgcagcttactgtactggccttcttttggctcgtcgtgttctgaaaatgctggaaatggatgatgagtacgagggaaacgtagaggccactggagaggacttttctgtggaaccaactgattccaga

SEQ ID NO: 156164 - DNA, 438 bp, Arabidopsis thaliana columbia
agctttgtgaccagatttctgatgcgatccttgatgcttgcttagagcaagatcctgaaagcaaagtggcgtgtgagacatgcaccaagaccaacatggtgatggtgtttggtgagatcactaccgctgcgaaagttgactatgagaagattgttagatccacttgcagggagattggttttatctctgctgatgttggtcttgacgctgacaaatgcaatgttttggttaacattgagcaacagagccctgacattgctcagggtgttcatggtcatttgaccaagaagcctgaagatattggtgctggtgatcagggacatatgtttgggtatgctactgatgagactcctgagctcatgccgttgactcatgtcctagccaccaagcttggtgctaagcttactgaagtgaggaagaacaagacttgcccatggt

SEQ ID NO: 156165 - DNA, 453 bp, Arabidopsis thaliana columbia
ggagagggagagagcgatccaacggttgagatgtttctacgggcaatcggacggccattattggctaaagtgaagcagacgacggggatcgtcgggcttgacgttgttcccaacgcgagagcggtgctgatcgatctctacagcaaaaccctaaaggagatccaagctgtgccggaggatgaagggtaccgtaaagcggtggaatcattcacgcgccaacgtctcaatgtgtgcaaggaagaagaagattgggagatgattgagaagcggcttggttgtggtcaagtcgaagagcttatcgaagaggctcgcgatgagctcacactcattgggaaaatgattgagtgggatccttggggtgtaccagatgattacgagtgtgaagtgattgagaatgatgcgccgattccaaagcatgttcctcagcaccgacctggtcctcttcctgagcag

SEQ ID NO: 156166 - DNA, 450 bp, Arabidopsis thaliana columbia
ctctaatcaaaaagcttttaacctcagccgttaaatctttctccgatcatgccgaccagaaacatcgccattggtggagtccaagaagaggtctatcaccccaacgcacttagggcggcgctcgctgagtttatctcgactttgatcttcgtcttcgccggctcaggctccggaattgctttcaacaagatcactgacaatggagcaaccactccttccggcctcgtcgccgctgccttagctcatgctttcggtctctttgtcgctgtctctgttggcgctaacatttccggtggccacgttaaccctgccgttaccttcggtgtcttactcggtggtaacatcactctcctccgtggtattctctactggattgctcagcttcttggctccgtcgccgcttgtttcctccttagctttgccaccggtggcgagccaattccagcgttc

SEQ ID NO: 156167 - DNA, 450 bp, Arabidopsis thaliana columbia
gaacagcgcttttgaatacaccctcaaaaccggagggctcatgaaagaagaagactatccttacaccggaaaggacggcaagacctgcaagctagacaagtccaagatcgttgcctctgtctccaacttcagtgttatctccattgatgaagaacagattgctgcaaaccttgtcaagaacggacctcttgctgtagccatcaacgctggctatatgcagacttacattggaggagtctcatgcccttacatatgcaccaggaggctcaaccacggtgtcttattggttggctatggagcggcaggttacgctccggctaggttcaaggagaagccttactggatcatcaagaactcgtggggagagacttggggtgaaaatggtttctacaaaatctgcaaaggccgtaacatttgtggtgttgacagtatggtctccactgttgcagc

SEQ ID NO: 156168 - DNA, 446 bp, Arabidopsis thaliana columbia
gtgtcattgagaggttcgagaaggaggctgctgagatgaacaagaggtccttcaagtacgcatgggttttggacaaacttaaggctgagcgtgagcgtggtatcaccattgacattgctctctggaagttcgagaccaccaagtactactgcactgtcattgatgctcctggccatcgtgatttcatcaagaacatgatcactggtacctcccaggctgattgtgctgtccttatcattgactccaccactggtggttttgaggctggtatctccaaggatggtcagacccgtgagcacgctctacttgctttcacccttggtgtcaagcagatgatctgctgttgtaacaagatggatgccactacccccaagtactccaaggccaggtacgatgaaatcatcaaggaggtgtcttcctacttgaagaaggttggttacaacccc

SEQ ID NO: 156169 - DNA, 449 bp, Arabidopsis thaliana columbia
attagatctgtttcgataatcacgaggtttccctcacttcctttccattgctaaaccaggatttgcctcctgcatttggaaatggacgcttctatgattaccaattccaaatccattacttctccaccctctttagccttagggaagtcaggaggaggaggagttatcagaagttcactatgtaacttaatgatgccaagcaaagttaacttccctagacaaagaactcaaactctaaaggttagccagaagaaactcaagagagctactagtggtggtcttggtgttacatgcagtggtggtgataagattctcgtagcgaatcgaggtgaaattgcagttcgtgttatcagaactgctcatgaaatggggattccttgtgttgctgtgtattctactatagataaagatgctcttcatgttaaattagctgatgaagctgtttgtat

SEQ ID NO: 156170 - DNA, 429 bp, Arabidopsis thaliana columbia
aaagaacgcgaaacagtgagagagacagagagaagatatagagatgggtgtggagaagcaagtcatcagacccggcaacggtcccaaacccgctccgggccaaaccgtcaccgtccattgcaccggattcgggaaagatggtgatctatcccagaagttctggagtacaaaggacgagggacaaaaacctttctcgttccaaatcggtaaaggtgctgtgatcaaaggatgggatgaaggcgttatcggaatgcaaattggagaggttgctcgcttgcggtgctcatcggattacgcatatggcgctggtggatttccggcatgggggatccagccaaactctgttctcgactttgaaatcgaagtactgagcgtgcagtaatgatctccccagcttctaaactgtgggtagattatttaacaaccctt

SEQ ID NO: 156171 - DNA, 357 bp, Arabidopsis thaliana columbia
gttcattttccatggacggaccttgacctctctgcttcccttcgtgcattttctctctctcactatcctctctctttctagtgtttgtttgatcctctgcgtactctgttcttcttctctcttcagataaaacaagtcctgcatattgaagatctgatgtcttatcgattgctaagtgtggataaggatgaactggttacgtcaccttgtttgaaagaacgtaactacttgggtctctctgattgttcctctgttgatagctcaactattcccaatgttgttgggaagagcaatctcaatttcaaagctactgaactgaggctaggtcttcctgagtcttaatctcctgagagagag

SEQ ID NO: 156172 - DNA, 450 bp, Arabidopsis thaliana columbia
ctttcttgagcgtcgtcttcagactattgtgttcaagtctggtatggctaagtctatccatcactctcgtgtcctcatcaggcagaggcatatcagggttggaaagcaattggtgaacattccatcattcatggtgagacttgattcacagaagcacattgactttgccctcaccagtcccttcggtggtggccgtccaggaagagtgaagagaaggaacgagaagtctgcctccaagaaagcctcaggtggcggtgatgcagacggtgatgacgaagagtaaatctgaagtcgcaccgttttagctatgaatcaatctgctttttgatattttgtagtaagcaactttgttgttcgttttcagaggattgttttatggtttctttcttttactctcgagattgctaaacctttgggttatcatctatttctcacaattatcttttaaag

SEQ ID NO: 156173 - DNA, 455 bp, Arabidopsis thaliana columbia
agaagaagaagaagcagagacaacaagaagaagaagaaacagtctcatctcgccggagaagaagaaagatgtcgtggcaatcatacgtcgatgaccatctcatgtgcgaggtcgaaggcaaccacctcacacacgccgccatcttcggccaagacggcagtgtctgggctcagagctcagctttccctcagttgaagcctgcagagatagcaggaatcaacaaagactttgaagaagccggacatcttgccccaaccgggctattccttggcggtgagaagtacatggttgtccaaggtgaggctggagccgtcatccgagggaaaaagggacctggtggagtcactatcaagaagactactcaagctctagtctttggtatctatgatgaaccgatgaccggagggcaatgcaacttggtcgtggagaggctcggcgattaccttatcgagtct

SEQ ID NO: 156174 - DNA, 312 bp, Arabidopsis thaliana columbia
gaagagggcctatgggtggcggcggaggtatgttacgcgccgccggtcgtgcgatgacgaggaccggtgtagccaacggtggtattcaagatccctttgcttcttcatcatcatcgtccacgtcgtctccggctggaaacgcctctgtttcgcatgtccagaaacagagatcttcttcttctgggtcgaataatctgacgtattccgcggcttctgggttgttgttgaatcttccggtggctgcaacctccggatggagcggcggcggtcctttttactttgttaattctggaggttatgatgatttcgagt

SEQ ID NO: 156175 - DNA, 457 bp, Arabidopsis thaliana columbia
gtttcagccgtttcaaaagcgcgttttggagactgatttgcaaccggcggtgaaagtagctagttcgatgccagcgacgacgacgagttctacgacggaaacttgtggtggtaaaagtgatttgattaaagctggagatgaggaaagacggatagagcagcagcaatcgcagtcgcatacgcatagaaaacaaaggcggtgctggtcgccggaattacaccgtcgattcctaaacgcgcttcagcagcttggaggatctcatgttgctacaccaaagcaaatcagggatcacatgaaggttgatggattaacaaacgacgaagttaaaagccatttacagaaatatagacttcacacaagaaggccagcagcaacatccgtggcggcacaaagtaccgggaatcagcaacaaccacaaattgtggtggttggaggcatatgggtaccatcgtcacat

SEQ ID NO: 156176 - DNA, 432 bp, Arabidopsis thaliana columbia
cggacgcgtgggttcttcttcctcttcaactctcaaacaatctcttcctttatcatcttctatctcttcctctgttccttcttctggttttgccaatcaccaaacctgactaacccttctcctcctcctctctccgtcgctccccttcgcggggatgccaattctccaccgccggaatcttcttcttctccggcgacgaaatcttctttaatgatttcttctagagatcccaatgccctctttagcggcggtggaatcagctttttagcaggagttagaactgtgaagtttagttatggttattctagtcttaaaggtaaaagagcaacaatggaggattacttcgaaactagaatctctgatgttaatggacaaatggttgctttctttggtgtctttgatggtcatggtggagcaagaactgcagaatat

SEQ ID NO: 156177 - DNA, 450 bp, Arabidopsis thaliana columbia
aaacagtctcatctcgccggagaagaagaaagatgtcgtggcaatcatacgtcgatgaccatctcatgtgcgaggtcgaaggcaaccacctcacacacgccgccatcttcggccaagacggcagtgtctgggctcagagctcagctttccctcagttgaagcctgcagagatagcaggaatcaacaaagactttgaagaagccggacatcttgccccaaccgggctattccttggcggtgagaagtacatggttgtccaaggtgaggctggagccgtcatccgagggaaaaagggacctggtggagtcactatcaagaagactactcaagctctagtctttggtatctatgatgaaccgatgaccggagggcaatgcaacttggtcgtggagaggctcggcgattaccttatcgagtctggtctctaagttcactcaaagtgcttcaaac

SEQ ID NO: 156178 - DNA, 437 bp, Arabidopsis thaliana columbia
ttctctgagaaaaaacaacagatccgaattttatctttaatcagccggaaaaaatggagaaagcgatcgagagacaacgcgttcttcttgagcatctccgaccttcttcttcttcttcgcacaattacgaggcttctctatctgcttctgcttgcttggctggggacagtgctgcatatcagaggacctctctctatggagatgatgttgtcattgtcgcggcacataggactccactatgcaagtccaaacgtggcaatttcaaggatacatatcccgatgatttgctcgcacctgttttgagggcattgatagagaagacgaatctaaacccaagtgaagtaggtgacattgttgtgggtactgttttggcacctgtatctcagagagccagtgaatgcaggatggctgcgttctatgctggtttccctgaaacc

SEQ ID NO: 156179 - DNA, 450 bp, Arabidopsis thaliana columbia
gaatatctaaaccaacatgaactcttcttatctccaagcgagccgcgtcatggtgctcggatctaaatctccggtagaccgccgccggaaatcacttgaaagagtggataaagaactcttaagaggcaattacgaaactgctctctcactcgtcaaacaactcaagagcaaacatggctgcttatctgcttttggctctgctaaattggtttctctcgcatctctctcttaatgcttatttgccaataaatcatctctaattcctttttttttttaattagcttccgaagaaattagacatgagtagcaaaactgatctcaggtcgttgattgattctgtctccagaagtattgaatctgtttatgtccaagaggattcagtgagaacatccaaagagatggaaattaaaacttcacctgaagaagattggttctctgttgttcagcatg

SEQ ID NO: 156180 - DNA, 249 bp, Arabidopsis thaliana columbia
taagttagtaaacctcataactttttactttttttccgaagcccaagactactaagactgcggtctaattactttgggaatgagcacatacatcattgctatcttcatcctccttccattataagccacactctacttcctcatctacctctgagacactctttcatattccaagtccttttagatacgtcctaccttacactactcgaatgttccctatgtcaccaaactgcttactgatattgattc

SEQ ID NO: 156181 - DNA, 345 bp, Arabidopsis thaliana columbia
tcgctgaccaccgccgtacaactgaagttagcgcaaggctagatgctcagcagaagaagcttaaccttccaatcctcccaaccacaaccattggatccttcccacagaccgtggaactcaggagagttcgccgtgaatacaaggccaagaaaatctctgaagaggattacgtcaaggccatcaaggaagagatcaagaaagttgttgacatccaagaggaccttgacattgatgttcttgttcacggagagcctgagagaaacgacatggttgagtactttggagagcaattgtcaggtttcgcattcacagcaaacggatgggtgcaatcctatggatctcgct

SEQ ID NO: 156182 - DNA, 446 bp, Arabidopsis thaliana columbia
acccttccgtgaaagcttgcacaggaggaaagcaaatctgtgaaagaaaggattctgaatcggagaagcaatcgaggtttacgattaccaaattctgatctaatctgattaattgtggtgatttccgatggaagaagacggtggtggcggcggtgcgaaagttggaatgctggagaatttcatgaagacgcatcagagttctttgaaatcgttattccagagaaagaaatcatcctctggtcgtgatggagatgcttctccgtcgcctatcgcttccccgaaacctattccgcagctctctcttctcgccaattccgtcgtctaccgctgttcaaagatcctgaacattcaaacagaagatctgcagcatcattttgatgtagagttgcctgagagtggttagcatctattgacatatgcatagaactttttagagttctgctctt

SEQ ID NO: 156183 - DNA, 453 bp, Arabidopsis thaliana columbia
  unsure (1)..(453): unsure at all n locations
aagtttggaaccccttttctttcanntccatctcttctttccgtcgctttctttcgctaaccgnnattccttcacttcgagatcgagggntttgtgaagagggttttttcttagggtntnntcgaaaaggatgnnccggcgacaagcatggaatgagtggcgtattgcnnccgcaaacccaatcgtggtgcattatgtagttgcagntngcttcagacctcactnnngaatatgtgcagagtggcgatttggtgtatgtatccttattgcaccaactatgtaatagaagtagcctaagacgacacaaccagaaaaccgaagatccccgagaacctcgtaccgcgagttttcagaggacttttggcttcttgctaggattacggggttcgaataacgatgaggctcgtggttcttgtaagaagtgtggccgtgttgggcatttgacgtttcagt

SEQ ID NO: 156184 - DNA, 437 bp, Arabidopsis thaliana columbia
aaaaaaaatctgggatttctaaaaaaaggtaagatggaaaatggcggatcagctcaccgatgaccagatctcagagttcaaggaagcctttagcctcttcgataaggatggtgatggttgtatcaccaccaaggagctcggaaccgtgatgaggtctctggggcaaaacccaacagaagctgagcttcaagacatgatcaatgaagttgatgcagatgggaacgggaccattgatttcccggagttcctgaacctgatggcaaggaaaatgaaggacactgattcagaggaagagctcaaggaagcttttagggtttttgataaagaccagaatggtttcatatctgcagcagagcttcgacatgtcatgacaaatctcggtgagaagctatccgatgaggaagttgatgggatgatccgagaagcggatgttgatt

SEQ ID NO: 156185 - DNA, 419 bp, Arabidopsis thaliana columbia
caagcataccccatcatctcccttcttcttcttcttcttccacttccctttgtaactttcaatctcagctaatatcaagtaacgtggaaaggatttgttccgtcaaaggttggtgattatacagagactgagttcctgataagttggattgagcttgttttcatttgcggatctttgagaaaaaagtttgcaactttatggctctggaacaacaacatgtttgtgaaaagcggcttcaagccaagaccttttctacccaagagtttcagttgactctcaattgggatgatttaacttgtcccatttgtttggatttccctcacaatggtgtgcttctccagtgttcttcttacggaaacggttgccgtgcttttgtctgcaatactgatcaccttcactctaactggttggatcgtttc

SEQ ID NO: 156186 - DNA, 447 bp, Arabidopsis thaliana columbia
cgtttggattcgacgtttgccttatccgttcagctcatcttcttcttcttcttcgtgacctctgaattagtttccgagaatccgaaattcctaggaagagaacataacaatggcgcagatggttgcgatgcccgtagcgcactcgctctcactcatttgcaattgggcaaaatccaatcctctctctcgcaacactcttgccctcccagcttcaaacactcccaataagcagagtctaagcatcagatgtgctcgtgttggtggagtggagattccggctaataagagaattgagtactctcttcagtacattcatgggattggtcgaactagggctcgtcagattcttgttgatcttcagatggagaacaagattactaaagacatggctgaggaagaactcatcattcttcgtgatgaagtctccaagtacatgattgagggtga

SEQ ID NO: 156187 - DNA, 450 bp, Arabidopsis thaliana columbia
cattcctgtaaacacaaaaacttgtaatttccaacgaaatggcgcggttcagtctggttgtagtcgtgactcttagtgttgccatctctatgttccctgacacaaccactgctcaactcaaaaccaatttctacggaaactcatgtccgaatgttgaacaaatcgtgaaaaaagtcgtccaagaaaaaatcaaacagaccttcgtcaccatcccagctactctccgcctcttcttccacgattgcttcgtcaatggatgtgatgcgtcggtcatgattcaatcaacgcctaccaacaaagccgagaaggatcatccagacaatatttctttggccggagatggatttgacgttgtgatcaaagccaagaaagctcttgacgctatcccaagttgcaaaaacaaagtctcttgtgctgatattcttgctttagccacccgtgatgttgttg

SEQ ID NO: 156188 - DNA, 446 bp, Arabidopsis thaliana columbia
cttaacggtttctttattattcttcccattctacccctcttcttccttctaattccccctcaaatgccactgtcttgtcactaaactccaaaacccaccggaaaaaatgattacgtggcacgacttgtacaccgtcctcaccgccgtggtaccactttacgtagctatgattctcgcctacggatccgtacagtggtggaagatattctcaccagaccagtgctccggcatcaaccgcttcgtcgctatcttcgccgtccctctcctctccttccacttcatctccaccaacgatccttacgccatgaatttccgcttcgtcgccgccgacacgcttcaaaaaatcatcatgctcgtcttacttgctctatgggctaacctaaccaagaacggtagcttggagtggatgatcacaatcttctctctcagcactctcccaaacactc

SEQ ID NO: 156189 - DNA, 400 bp, Arabidopsis thaliana columbia
gagagagaagaatggcgtcgtcatcatcgagaggagagatggagaagatgggaatcgatcagctaggagctttgaaggagcaagcagatctggaagtgaatcttcttcaagatagtctcaacaacatccgtacagctaccgttcgtctcgatgccgccgccgcagctctcaacgatctctctgttcgacctcaaggtaagaagatgcttgtaccactgactgcttctctatacgtgcctgggacacttgatgaagctgataaggttttagttgatattggcactggttacttcattgagaaaacaatggatgatggaaaagattattgtcagaggaagatcaacttgctcaaatccaactttgatcaactttttgaggtcgcagcgaaaaagaaaagcgt

SEQ ID NO: 156190 - DNA, 410 bp, Arabidopsis thaliana columbia
cggacgcgtgggctcacattttcgtagccgcaagactcctttcagattcttacttgcaggtatgggtaaagagaagtttcacattaacattgtggtcattggtcatgtcgattctggaaaatcgaccacaactggtcacttgatctataagcttggtggtattgacaagcgtgtcatcgagaggttcgagaaggaggctgctgagatgaacaagaggtccttcaagtacgcatgggtgttggacaaacttaaggccgagcgtgagcgtggtattaccatcgatattgctctatggaagttcgagaccaccaagtactactgcacagtcattgatgccccaggacatcgtgattttatcaagaacatgattactggttcctcccaagctgattgtgctggtcttatcattg

SEQ ID NO: 156191 - DNA, 401 bp, Arabidopsis thaliana columbia
tacacgccaaacccgacgacatggcagctacctctctcactgcccctccttctttctccggtcggcgccgcatttctcccaagctcgacgctgccgccgtctcctcccaccaatccttcttccaccgcgtcaattcctctacccgtctcgtttcttcctcttcttcttctcatcgctcccccagaggtgttgttgccatggctggatccggaaagtttttcgttggaggaaactggaagtgtaacgggactaaggactccatcgccaagcttatctccgatctcaacagtgcaaccttggaagcagatgtagatgttgttgtgtcacctccatttgtctacatcgaccaggtcaaatcctcgttgacagaccggattgacatatcaagtcagaactcttgg

SEQ ID NO: 156192 - DNA, 456 bp, Arabidopsis thaliana columbia
taccggtatttcatggctggacccacgcgtccgcccacgcgtccgctcattttgttttcttttctcgcacaactaaaaaaaaagaacattggaagcttcttcttcctattcttcttctgccaaacaggaatcggtccttctttgcgcacaagcaaaaatccaagagacatcgagatatgagagagatctcgatctcgacgattactctttcatggtcgcatcttctactctgcgcttcgatttgtctccacttcttcttaggtatatctggtgatcccaatagttcaagtactggagcaaaggctgaatctcatacttcttccagcaaaacaggcacgaaagtgatctttatactgctcgggtttggtgctgtagcgggactttcgttcttcttgtacaaactgtggcaaaagaagaaaagagatgagcagtatgctcggctattgaaactgtttg

SEQ ID NO: 156193 - DNA, 404 bp, Arabidopsis thaliana columbia
ttttgcttaatcttaaaatcttccctccccatcttgttcaaaagaagaaaaagaaattccgaggctttcttcttcaagatatttcaaaatcaaactttggtttaagggtcccattttttttgtttttgtttttcttgcctgattctttaattcttgattctcattaatgcttcatgggttttatatgaatcccctgaaagcttataggctccgttgaacagttataacttgtgaaagttgaatccttttaaaccgacagaggaagatctcagatggcaaacaagataagtgaaactgcttccaagatggacgattatgaggtcgtggaacagatcggacgaggcgcttttggttctgcttttcttgtaattcacaagtccgagagacgaaaatcaaaattcatt

SEQ ID NO: 156194 - DNA, 400 bp, Arabidopsis thaliana columbia
agccgcaaaccattttttgtcaatctagggttcttcttcgtacttgcagatttcgcctccgtttggactacgatctgtgaagatgttctccgctcagaacaagatcaagaaggacaagaatgctgagccaacagaatgcgaggagcaagttgctcaggctttgtttgatttggagaacactaaccaggagttgaaaagcgagttgaaagatctctacatcaaccaagctgttcacatggatatctctggaaaccgcaaagctgttgtgatttacgttccattcagattgaggaaagctttccgcaagattcatccccgtctcgtcagagagcttgagaagaagttcagtggaaaggatgttatctttgttaccacaagaaggatcatgcgtccccccaag

SEQ ID NO: 156195 - DNA, 331 bp, Arabidopsis thaliana columbia
catagctcctaacaaagcaatatcatttccaatttataaaagttaaagccatggctgcatgtttctctgtcccctctatgataatggaagaagaagggagattcgaagcggaggttgcggaagtgcagacttggtggagctcagagaggttcaagctaacaaggcgcccttacactgcccgtgacctggtgggtcttcctggcccatttaaagcaaggctatgcttcgaacgagatggctaataagctgtggagaacgctcaaaagcatcaagccaacggtacggcctattgcaccttacggagcgtgggaccctgttcaggtgaccatga

SEQ ID NO: 156196 - DNA, 356 bp, Arabidopsis thaliana columbia
gaatctctaagggtaggaagggaggaaagaagaaggctgttgatcctttctccaagaaagagtggtatgatgttaaggctccttcaatcttcactcacaggaatgttggaaagacacttgtttccagaactcagggtaccaaaattgcctcagaaggcttgaaacacagagtttttgaggtttctcttgctgatcttcaaggtgatgaggataacgcttacaggaagatccgtctcagagctgaagatgtccagggcaggaacgttctgtgccaattctggggcatggacttcaccaccgataaacttaagtcattggttaagaagtggcagactttgattgaggctcatgttgat

SEQ ID NO: 156197 - DNA, 331 bp, Arabidopsis thaliana columbia
actgttcgctctttcctacgccatctgcgtccttgccgggaagagttactacgatgtgtggcaagtcccgaaaggtgcatctgatgaacagatcaagagagcttataggaaactagctttgaagtatcatcccgataagaatcaaggaaatgaggaagcgactcgcaaattcgctgagatcaacaatgcttatgaagtgttatcggatgaggagaagagggagatatataacaagtatggtgaagagggacttaaacagttttctgcaaatggaggaagaggaggaggaggaggccgcatgaatatgcaggacatcttcagctcgtttttt

SEQ ID NO: 156198 - DNA, 421 bp, Arabidopsis thaliana columbia
gacgaaatcacgaaaccatgttcttgttcgattggttctacggaatcttagcttcgttagggttatggcaaaaagaagcaaagatcttgtttctcggtctcgataatgctggcaaaactacattacttcacatgctcaaagacgagagattagttcagcatcagccgacgcaacatccaacgtctgaagaacttagcattggaaaaatcaagttcaaggcttttgatttgggtggtcatcagattgctcgtagggtttggaaagattactatgccaaggttgatgctgttgtctaccttgtggatgcttatgacaaagaaagatttgcagagtcaaaaagagagcttgatgctcttctctcggatgaagcccttgcaactgtcccgtttctgattcttgggaacaagattgatatccctta

SEQ ID NO: 156199 - DNA, 170 bp, Arabidopsis thaliana columbia
tatgctacacactttgcggttgctttcttttttcctgtctggaataacgagaaagaaggagtcactttcactgttctcgagatgcttattttattaatatttctatactcttctttaggttctgtaatatgaatgcatactattctttatcgtcgttatctaaacttaat

SEQ ID NO: 156200 - DNA, 417 bp, Arabidopsis thaliana columbia
ggaaaatcaggaattttctcggagaaaattctcgtaatcatgaactgtgtttctgcatttgaatttgttccttcaagtgctctatttccatgtgcacaatcatcaatccctgcgaaatttcttcacattttgagctcaaaagcctcgatttctcccagatgtcgtagtttcgcttcttcttcttcttccacaattcggaggaagcctctaactctagtatcttcaaaatcttcagacgcggaggaggtgtcagatacggaggacgaatggctgaagaagctaccagagaagaacaagccactgtattcgcatagcttaccttgtatcgaagcgtggctgaggaaattagggttttaccaaagtaaagacgatagagctgtttggttgattcagaaacctgattggcatgctcaacta

SEQ ID NO: 156201 - DNA, 413 bp, Arabidopsis thaliana columbia
gaagaatcagagaaaatgccgccgaaattggatccatctcaaatcgtcgacgtctacgtccgagtcaccggaggtgaggtcggagcagcgtcttcactcgctccaaagatcggtccactcggtctggcaccaaagaagatcggagaagacatcgccaaagagacagcgaaagaatggaaaggtcttcgagtcaccgtgaagcttacggtacagaatcgtcaagctaaggtcacagtggttccatccgcagcggctctagtcatcaaagccctcaaggagccagagagagataggaagaaagtgaagaacatcaaacataatggcaacatttcgtttgatgatgtgattgagattgctaagataatgcgtcctagatctatcgctaaggaattgagtggaacagtgaaggagat

SEQ ID NO: 156202 - DNA, 398 bp, Arabidopsis thaliana columbia
aagaaactttctacataatataaaaagtcacacattctctctattaattaaacatgttgcttgttgcgtttgtgactcttttggtagcagtagctttgcagccactaccgtcagtgttgtctttggacgttcaccttcttcggcagctagccgcaaagcacaatgtgacatcgatacttgtgtttggagattctagtgtcgatccagggaacaataatttcattaaaaccgaaatgaaagggaattttccaccttatggtgaaaatttcatcaaccataaacccaccggtagattatgcgatggattactcgctcccgattatattgcggaggccatgggttacccttccataccggcttttcttgatccatccctaacccaagctgatctaactcgc

SEQ ID NO: 156203 - DNA, 411 bp, Arabidopsis thaliana columbia
ctcagagcttttgagtcttctaaatctctatcgaatttttctagggttagggctcctgatcgatttcgcgagctctgcgattattttaagtattaggatccgaaattagaaatgggtggagagggagattcaagtcagccgcagagtggtgaaggagaagctgtggctgtgaacatcaggtgctctaatggcacgaaatttagtgtgaagacgagtctcgattcaacggtggagtctttcaaagagttggtggctcagagcagcgatgttccagctaatcagcagcgcttgatttacaagggtcgtatcctcaaggacgatcaaactctcctcagctatggtttgcaggctgatcacaccattcatatggatagaggctctgcaccttctttaacaccacctcctgcttcg

SEQ ID NO: 156204 - DNA, 195 bp, Arabidopsis thaliana columbia
gttcatgaagaagttcatggtccaaaagctgcttggaccacaagcactccaacggtcccgaaatatccgtgcagatgagctggaacggttctacaaaaccctgcttgataaggcgatgaagaagcagactgttgagattcgtaatgaagcaatgaagctcacttacaacaccatttgcaagatgattatggggag

SEQ ID NO: 156205 - DNA, 424 bp, Arabidopsis thaliana columbia
gagaaactatcaggtggtaagaataattcatcggttcacatcaaaaagagcaaagagggcaaaagtgcagatgctaaagtggcagcatcaaatggttctgttgctcctaatgtacagacaacaaatcctcttaagagcaaatcattcaatgggcgagaggcacaagtcacaaagcaagggaagcatgactctgcacctgctgaaagcgctgatggggagaaggtgaaaccaaagtctcaaaagaaacaagcccatgagacatctgaagatgatactcagtcttctaatccgaaagcagacgatggaaaacctcgtaaagttggtgcacttccaaattatggattcagtttcaaatgtgaccaacgggctgaaaagagaaaagagttctatgttaagcttgaggagaagactcatgcaaaagaag

SEQ ID NO: 156206 - DNA, 381 bp, Arabidopsis thaliana columbia
caagactcctttcagattcttacttgcagctatgggtaaagagaagtttcacattaacattgtgggcattggtcatgttgattctggaaaatcgaccacaactggtcacttgatctataagcttggtggtattgacaagcgtgtcatcgagaggttcgagaaggaggctgctgagatgaacaagaggtccttcaagtacgcatgggtgttggacaaacttaaggccgagcgtgagcgtggtattaccatcgatattgctctatggaagttcgagaccaccaagtactactgcacagtcattgttgccctaatacatcttgttttcatcaagaacatgattactgtcaccttccagtctgtttgtgctgttcttatcattta

SEQ ID NO: 156207 - DNA, 420 bp, Arabidopsis thaliana columbia
gaagaagaagacaacgacgacgactttgaagaagaacaaactcttccttcaatctcaatctctctctcagatgggttgtggtggaactttgttctacccacttctcataactctctccgttgctctaatcacttacaacatcatcatctccgctaatgctcctctcaaacaaggcttcccaggccgatcttcttcctccgatatctccattgacccagtcatcgaattaccacgtggcggcggatccagaaacaacgatggtaaaaggataagacttttccacacggcggtgacggcgtctgattccgtctataacacttggcaatgtagagttatgtactattggttcaaaaagattcaagcttctgctggacccggttctgaaatgggtgggtttactcggatcttgcattccggtat

SEQ ID NO: 156208 - DNA, 408 bp, Arabidopsis thaliana columbia
gaggctacacactttgcggttgctttcgaggtgcctggctggaataacgagaaagaagcagtcaccgccactgttctccagatgcttatgggaggaggtggctcattctctgcgggaggtcctggaaaaggaatgcactcgtggctttatcgccgtgttctaaacgaatatcaggaggttcagtcatgcactgcattcactagcatctttaacgacaccgggttgtttggaatctatggttgctcgagtcctcaattcgctgcaaaagcaattgaattagcagctaaagaactcaaagatgttgcaggaggaaaagttaaccaggcacatcttgatcgtgccaaggcagccacaaaatctgcagttctgatgaatttggaatctcggatgattgcagcaaaagacatt

SEQ ID NO: 156209 - DNA, 410 bp, Arabidopsis thaliana columbia
ggaaggtaaagaagaagatgttagagtcggagtctaacaagtttccggagaggcaaccgatcgtaacttctgctcagagtgacaaggactacaaagagccaccacctgcgccgttgttcgagcccggcgagctagcttcatggtccttctggagagctgggattgctgagtttatagctacgtttttgttcctgtacatcactgttttgactgttatgggtgtgaagaggtcaccgaacatgtgtgcttccgtcggaatccaaggtatcgcttgggctttcggtggtatgatcttcgctctcgtctactgcaccgctggtatctccggtggacacatcaacccagcggttacgttcggtttgttcttagctaggaagcttttgttcacactagctgtgttctacatattg

SEQ ID NO: 156210 - DNA, 411 bp, Arabidopsis thaliana columbia
aaaaatctcaaagttttgccctcatttccctttgtttagatcccttacccctacaaatacgggcggaatttttgagggcgagagagctgattgatatctttggtatctggagccagggacatggggttcgacgacaacaacaacaacaagaacaacaaggatggagatgatgagaactccttctccagaacaagagccgacgacgatgctcttagtcgacagatgagcgaatcttctctttgtgctaccgaggaggaagaagacgacgattccaaattgcaattgggtcctcagtacactatcaaagaacatctcgagaaggacaaggatgatgagagtctgaggaaatggaaggaacagcttctcggaagtgttgatgtaccaacattggagagactcttgatccggaag

SEQ ID NO: 156211 - DNA, 408 bp, Arabidopsis thaliana columbia
gaagctgatcatcagattgaatcaaagacagactttgacttttctttgtgatcgaagatatgggggatgctttcacagatgaacagatccaagagttttacgaagccttctgtctcatagacaaagattccgatgggttcatcacgaaggagaagctaacgaaagtgatgaagtcgatggggaagaatccaaaggcggaacaactgcaacagatgatgagcgatgttgacatctttggcaacggtggcatcacttttgatgatttcttgtatattatggctcaaaacacttctcaggaatcagcatcggatgagttaattgaggtattcagagtgttcgacagagacggagatggtctcatatctcaacttgagttgggagaaggaatgaaggacatggggatgaaga

SEQ ID NO: 156212 - DNA, 419 bp, Arabidopsis thaliana columbia
tgaattcagatattttttttaaaattttttgagaggaagaaatggagatttcgcagagagtgaaggctagattagccgttctcaccgcgcatttggcggtgtctgataccgtcggattggaacaggtgttgccggcgatcgcgccatggtgtacatcggctcacattaccgctgcacctcatggatcactcaaaggaaacttgacgatcgtcgatgagcgtacggggaagaaatatcaggtccctgtctcagagcatggtaccgttaaagccgttgatctcaagaagataacgacggggaaggatgataaggggctgaagttgtacgatcctggttacttgaacacggctccggttcgatcttcgatttgttacatcgacggagatgaaggaatcttacgttatcggggatacccaatt

SEQ ID NO: 156213 - DNA, 419 bp, Arabidopsis thaliana columbia
caagtccccgtttcttcgttctcatcatcttcatcgccgattttgcaacgaccacctgtgggactcccgtcgatcaatctacgaagaagaagaagagatgagtaacacaccagcagcggcggcgtcatcatcgtctaaatcgaaagctgcgggaacttctcagccacaggaaaagcgcaaaactctctttcaaaaagaattgcagcatatgatgtatggatttggcgacgagcaaaaccctcttccagagtctgtggcgcttgtagaagacattgttgtggaatacgtcacagatttgacacataaagctcaagaaattggttcaaagcgaggaagacttctagttgatgatttcttgtatcttatccgcaaggatttgccaaaactgaaccgctgtagagaactgttggcgatgcagg

SEQ ID NO: 156214 - DNA, 413 bp, Arabidopsis thaliana columbia
aacttttcttcactctcttgtctcttcaaacttcggttactccgttttagtcgacaacagtggcctctgtttcaaggaggttactgaggagagagacgatcccctgtttcagccacaccgtgaggaaactcttctccaccgttggatctccttcttttgctcagagactcagagatctccccaaagacttcccctctaccaacgccaaacgtgacgcctctctgcttattgggaaaacgcctcttgtgttcctcaacaaagtcactgaaggttgtgaagcgtatgttgcagccaaacaagaacatttccagccaacttgtagcattaaagacagaccagctatagccatgattgcagatgcagagaagaaaaaactaatcatccctggaaaaacaacactgatagagcctact

SEQ ID NO: 156215 - DNA, 415 bp, Arabidopsis thaliana columbia
gggcattcctccggatcagcagaggcttattttcgccggcaagcagctagaggatggccgtgcgttgtctgattacaatatccagaaggaatccaccctccacttggtcctcaggctccgtggtggtatgcagattttcgttaaaaccctaacgggaaagacgattactcttgaggtggagagttctgacaccatcgacaacgtcaaggccaagatccaagacaaagagggtattcctccggaccagcagaggctgatcttcgccggaaagcagttggaggatggcagaactcttgctgactacaatatccagaaggagtccacccttcatcttgttctcaggctccgtggtggtatgcagattttcgttaagacgttgactgggaaagaccatcacccttgtagtggtaagctc

SEQ ID NO: 156216 - DNA, 287 bp, Arabidopsis thaliana columbia
cttagaaagaaaagaacttaaatcattatatttaattgcatggcgatacatttatacaaaggtgttacctctagcacacgcagtgtaaccgtatacagtcaagtgaaatccaatccacgtaataatttgatctgtgggcagcatcattgttgtaaaggttgtaatgccatatgtataattacctcaaggcatagaggcggaggtcattagcgtttataccgtatattagatttgcgactaaatgcagatgactttaatttttgaattttatccatattattcttcct

SEQ ID NO: 156217 - DNA, 420 bp, Arabidopsis thaliana columbia
cttactcatttctactatacagtataatggcaaaccaaatctacataatctccttgatcttcttgtctgtgttactttatcaatccactaccgtcttatctttccgacaaccattcaacctagcgaaaccatgcaagcgtttcgtcttctacctccataatgttgcctacgacggtgataacacggataatgctacatcagcagcaattgttaaccctttaggtctaggagacttcagttttgggaagtttgtgatcatggacaaccctgtgacaatggaccagaacatgctctcggaacaggtggctcgtgttcaaggcttcttcttctatcacggtaagacgaaatacgacacttggctctcttggtcagtagtattcaattcaacacaacacaagggggcattgaacataatgggtg

SEQ ID NO: 156218 - DNA, 367 bp, Arabidopsis thaliana columbia
ttttagctaaaataatttagttcatgcaggaatcaacacaagttgttcgtgtatgtatttcataacaaaacgccatagttcatgtaggaatttgcattcttcctcaaaattttcactctttctttaaagtgttacagcttcataactaaagcgattcaaaactgcaaaagctttatctcttcttctttgcaatacctccttttctagagctactactagcttcaggtccttctgcttcttcagccttttgctcggcctcaagtattgccaactcatctagaatgggtttgagttcaagataccgagtttctgcaagatcaaaaccatcctttcgcagcttcttgccagtatgttgggtatgctcgta

SEQ ID NO: 156219 - DNA, 410 bp, Arabidopsis thaliana columbia
gctgtcttccagaaggatgaaatgattgatatcattggtgtgaccaagggtaagggttatgaaggtgttgttactcgttggggtgttacccgtcttcctcgtaagactcacagaggtctgcgtaaggttgcttgtattggtgcgtggcatcctgctagagtgtcctacactgttgctagggctggtcagaacggttaccatcaccgtactgagcttaacaagaagatttacaggttgggtaaggttggtactgaggcacacacagccatgactgaatatgacaggactgagaaggatgtgactccaatgggaggcttcccacactacggtattgtgaaggatgactacttgatgattaaggggtgctgtgttggtcccaagaagagagttgtaacttttagacagtcact

SEQ ID NO: 156220 - DNA, 416 bp, Arabidopsis thaliana columbia
agatgggttcttacctagctgttgctgctgcgtcggctaatcctcctcacttcatccaccttgtctataaacctccgaatggctctgttaagaccaaacttgctcttgttggaaaaggattgacctttgacagtggtggctacaacattaagactggacctggctgctcaattgagctcatgaaattcgacatgggcggttcagctgctgttcttggcgctgcgaaagctattggtgagattaagcctcctggtgttgaggttcatttcatcgttgcagcctgtgaaaatatgattagtggaaccggaatgagacctggagatgtcatcactgcctcaaacggaaagaccattgaggtcaacaacacagatgctgaaggtcgtctaacactcgcagatgctctagtgtatgcttgt

SEQ ID NO: 156221 - DNA, 417 bp, Arabidopsis thaliana columbia
ctctgactaacattcttcttcacttatctcccatctttctctcttcaataataataaacatggatctcaccgacgtaatcatattcttgttcgctctctatttcatcaacctatggtggcgccggtacttttccgccggaagcagccagtgtagcttgaacattccaccgggaccaaaaggatggccactagtcggaaacctactccaagtcatattccaacgtcgccatttcgtcttcttaatgcgtgacctacgtaaaaagtatggtccaatattcaccatgcagatgggacaacgtacgatgattatcatcacggacgaaaaactcatccacgaggcactagtccaacgcggccctacattcgcttcccggcctccggactcgccgatccggctcatgtttagtgttgggaaat

SEQ ID NO: 156222 - DNA, 406 bp, Arabidopsis thaliana columbia
gtaaaaaacaaagactcgagttgatatgtcttgtactaaagatatgtcaactgtccaaaacgcaactccttttaacggcgttgccccatccaccaccgtgcgagttacaatcgtccaatcctccaccgtctataacgatactcctgccactatagacaaagcggagaagtatattgtggaggcggcaagcaagggagcagagctagtgttgttcccggaggggtttatcggtggctatcctcgaggttttaggttcggtttagcggttggcgttcataacgaataagggcgtgatgagtttcggaagtaccatgcttctgctattcatgttcctggccctgaagtagcaagattggctgacgtggctaggaaaaaccatgtgtacttggtaatgggagccatatag

SEQ ID NO: 156223 - DNA, 413 bp, Arabidopsis thaliana columbia
tttagaaagaaaagaacttaaatcaaaatacttaatagcatggcgatacatttatacaaaacttctaccccgagcacacgcaatggagccgtagacagtcaagtgaaatccaatccacgaaataatttgatctgtgggcagcatcattgtggtaaaggtcgtaatgccagaggaataattaccgcaaggcatagagggggaggtcataagcgtctataccgtaaaatagattttcgacgaaatgcaaaagacatatatggtagaatcgtaaccatagaatacgaccctaatcgaaatgcatacatttgtctcatacactatggggatggtgagaagagatatattttacatcccagaggggctataattggagataccattgtttctggtacagaagttcctataaaaatggg

SEQ ID NO: 156224 - DNA, 420 bp, Arabidopsis thaliana columbia
gttaagctcttgttcatcatccgtatccgtggtatcaatgccattgaccctaagactaagaagattctccagctcttgcgtttgagacagattttcaatggtgttttccttaaagtcaacaaggctacgatgaacatgcttcgccgtgttgagccctatgtcacttacggattccctaacttgaagagtgtcaaggaattgatctacaagagaggttacggaaagcttaaccaccagaggatagctttgactgacaactctattgtagagcaggctcttggaaagcatggtatcatttgcactgaggatttgatccacgagattctaacagtaggacctcatttcaaggaagccaacaacttcctttggccattccagcttaaggcaccactaggtggcctcaagaagaagagaaatcac

SEQ ID NO: 156225 - DNA, 374 bp, Arabidopsis thaliana columbia
agaagatgttagagtcggagctaacaagtttccggagaggcaaccgatcggaacttcggctcagagtgacaaggactacaaagagccaccacctgcgccgttgttcgagcccggcgagctagcttcatggtccttctggagagctgggattgctgagtttatagctacgtttttgttcctgtacatcactgttttgactgttatgggtgtgaagaggtcaccgaacatgtgtgcttccgtcggaatccaaggtatcgcttgggctttcggtggtatgatctttgctctcgtctactgcaccgctggtatcttctgtggacacatcaacccaacggtttcctttggtttgttcttagctaggatagcttttgtta

SEQ ID NO: 156226 - DNA, 237 bp, Arabidopsis thaliana columbia
agaagatgttagagtcggagctaacatgtttttcttagaggcaaccgatcggaacttggggtgagattgacaaggactacaaagagccaccacctgcgccgttgttcgagcccggcgagctagcttcatggtccttctggagagctggtattgctgagtttatagctacgtttttgtttctgtacatcactggtttgactgatatgggtgtaataaggtaaccgatcatgtgtactt

SEQ ID NO: 156227 - DNA, 163 bp, Arabidopsis thaliana columbia
gccatcttcatcctctgagatgtggagattctgcttcttcttatcgtactattcttggatgtagcgcggtgaaatcgggaatcatttctcccaagtcaaatcgagttgaagattccgcgttttaatctctatctagcctgttgcttcgtctgtccaacctaac

SEQ ID NO: 156228 - DNA, 419 bp, Arabidopsis thaliana columbia
cattgcttcatcattaccaaatcatcaacttaatcgtttctctcaaatttagggttttctcttttctcgaaagtcttgcggttttctgaatcatctctatctggtttgagggtttcgtttgatatctggagaaaggggtttctggaaacaaggagttcataattcgcgatcttgatctatcgatcttcatttatatataaaagcgtgaatgagattatgatggagtcgaaaggtggtaaaaagaagtccagcagtagtagttccttattttacgaagctcccctcggttacagcattgaagacgttcgtccaaacggtggaatcaagaaattcaaatcttctgtctactcaaactgctccaagaggccatcctgagtaccagcgtgcaccgatcttcataatatagttatagctttctt

SEQ ID NO: 156229 - DNA, 423 bp, Arabidopsis thaliana columbia
aaaagaacttaaatcaaaatacttaatagcatggcgatacatttatacaaaacttctaccccgagcacacgcaatggagccgtagacagtcaagtgaaatccaatccacgaaataatttgatctgtgggcagcatcattgtggtaaaggtcgtaatgccagaggaataattaccgcaaggcatagagggggaggtcataagcgtctataccgtaaaatagattttcgacgaaatgcaaaagacatatatggtagaatcgtaaccatagaatacgaccctaatcgaaatgcatacatttgtctcatacactatggggatggtgagaagagatatattttacatcccagaggggctataattggagataccattgtttctggtacagaagttcctataaaaatgggaaatgccctacctttgacc

SEQ ID NO: 156230 - DNA, 422 bp, Arabidopsis thaliana columbia
ctcctctctcctcctccgtctctcttctccgatcatgtcccctgatcccaaatccaataccttcttcttctctttttccagttgattaccggagaatttcagatcgcgatctccgatttattaataattacagaaaaaaataattaaaccctagagagagagagagatatatatatacatggagagttcattaggtttcatggcggttttcgccgtctcaggaagcgttgtgttcttagcgagtcaatttcacaagcgtcttctctccgattacatggacaagttcgaattcgaaatccgagcgcagaaaaaaatggtgatgaagaagaaggtgagattcgcggcggatgtggtggagccgtcggggaataacaaagagtatcgccggagacattcttccaaggctaaatcgaattcgaaga

SEQ ID NO: 156231 - DNA, 422 bp, Arabidopsis thaliana columbia
ggcgtgctctcatgtgggaccggaaatccaattgacgactgttggagatgcgacccgaaatgggagaaaaaccgacaacggttagccgattgcgcgatcgggtttggcaaacacgcaatcggtggtcgtgacggtaaaatctacgtggtgactgactcgagtgacaaagacgtggttaaccctaaacccggaacccttagacacgcggtgatccaagacgagccactatggatcatcttcgcgcgtgacatggtcataaaactaaaagaagagctgattatgaactctttcaagactatagacggccgtggagcgagcgtccacattgctggtggcgcgtgtatcaccgtccagtacgtgaccaacatcatcatccacggtgttaacatccatgactgtaaaagaaaggggaatgcttacgt

SEQ ID NO: 156232 - DNA, 422 bp, Arabidopsis thaliana columbia
cttgtcatcatggcaacttctctccaagccgccgcaacttttcttcaaccggcgaagattgccgcttctccttctcgtaatgtccatctccgatcaaaccaaaccgtgggcaagtcctttgggttagactcttcacaagctaggctcacgtgctctctccactctgacctcaaagacttcgctggaaaatgctccgacgccgccaagatcgccggttttgctctagccacctctgctctcgttgtctcgggggccggtgcggagggagcaccaaagaggctaacgtacgacgagatacagagcaagacttacatggaggtaaagggtaccggtacggcaaaccagtgtccaactatcgatggtggctctgagacattctcgttcaaagctggtaagtacacaggcaagaagttctgcttcga

SEQ ID NO: 156233 - DNA, 404 bp, Arabidopsis thaliana columbia
ggaagagaaggggcctttaggggcggatagagagatctacacgtctttctactagatctcggattcattcccagaatcctctttcctcaccggctcaattctaccaagtttctaagaggtttattcatattcggcatagaaactcagaaatggtggaggatgtgtcctcctatcactaggggattagctgcacgagctcatgaggttatgactcatgagctacctccaactctgagctatctctggatcaagtagtttttttttttttttggagcctgttataagtttgtagattagatggaaaataagccaagtgttttgactgataaatatgatgttgggaggttattgggtcaaggtacttttgccaaggtggtttatggaaggagtattcttactaacca

SEQ ID NO: 156234 - DNA, 408 bp, Arabidopsis thaliana columbia
attgcagtcaagttctctgagatcttgaccaagattgacaggcgttctggtaaggagattgagaaggagcccaagtttttgaagaatggtgacgctggtatggttaagatgaccccaaccaagcccatggttgttgagactttctccgagtacccacctttgggacgtttcgctgttagggacatgaggcagaccgttgctgttggtgttattaagagcgtggacaagaaggacccaactggatccaaggtcaccaaggctgcagtgaagaaaggtgccaaatgatgagactttcgttatgatcgactctcttatggatttctttggtacttaaaactttgatggcgtttgagcctttttcttttttttatttattactgtgacttactctttaccttctttttggat

SEQ ID NO: 156235 - DNA, 418 bp, Arabidopsis thaliana columbia
gcgaaaagtgtcaaggatgaaagatcggatttggtcatagtcctgcttggttcgaagcacatgaccttgctgattcacacgacggagcgtccatcgaccgtgcacttgactctattttgggatggcatctagacacaactacatttggagattatccacagatcatgaaagacattgttggacatagattgcctaaatttacaactgagcagtaagcaaaactgaaagcttctaccgatttcgttgggctcaactactatacttcagtgttttcaaaccatttggagaaacctgatccttcaaaaccaagatggatgcaagattctcttattacatgggagtctaagaatgcgcaaaattacgccattggtagcaagcctttgaccgctgcattgaacgtttactcgagaggttttag

SEQ ID NO: 156236 - DNA, 413 bp, Arabidopsis thaliana columbia
aaaataccctaatcacattttgtaacaataatacaattatacattaaaactctccggcgatgcctcatgcaccgatgccagagttctctagctcggtgaagctcaagtacgtgaaacttggttaccaatatttggttaaccatttcttgagttttcttttgatcccgatcatggctattgtcgccgttgagcttcttcggatgggtcctgaagagatccttaatgtttggaattcactccagtttgacctagttcaggttctatgttcttccttctttgtcatcttcatctccactgtttacttcatgtccaagccacgcaccatctacctcgttgactattcttgttacaagccacctgtcacgtgtcgtgtccccttcgcaactttcatggaacactctcgtttgatcctc

SEQ ID NO: 156237 - DNA, 446 bp, Arabidopsis thaliana columbia
ttccggtctcgccccacgcttccgaccagatctagatctaaaagaagagcgtcttcataaacgcccttcttcttcttcgtcttcttgcctgcaaatctagtttctagatcttttctttcttccgcgaaacgaaaatgagagagtgcatttcgatccacattggtcaggccggtatccaggtcggaaatgcttgctgggagctttactgtcttgaacatggcattcagcctgatggccagatgccgagtgacaagactgttggcggaggtgacgatgctttcaacaccttcttcagtgagaccggtgcagggaagcacgtcccacgtgctgtctttgttgatcttgagccaactgtgatcgatgaggtcaggactggtacttaccgtcagcttttccaccctgagcaactcatcagcggtaaagaagacgcagctaacaatttcgcc

SEQ ID NO: 156238 - DNA, 419 bp, Arabidopsis thaliana columbia
gttgtctaaagcgaaccaacaaaaagtcttcatctttaatcattcaatggcttcttcgtcttctatgcagatggttcacacttcccgctccattgcccagattgggttcggtgttaagtcgcaattagtttctgcaaatcgaacaactcaatcagtttgctttggagctcgttcctctggaattgcattatcttcgagattgcactatgcatcacccattaagcaattttctggggtttatgcgaccaccaagcatcagagaaccgcttgtgttaaatccatggctgctgaggaagaagaagtaatcgaacctcaagctaaagtgacaaacaaggtttactttgatgtggaaattggaggtgaagttgctggcagaattgtgatgggtctctttggagaagttgtgcctaaaaccgttg

SEQ ID NO: 156239 - DNA, 423 bp, Arabidopsis thaliana columbia
aaaagctagcattttctattctctctcaactccgttagtacaaaaccccaaattaacaaaacatgtggcgtttcgtggtactctctctaactctcatggttttcatcaactcatcaaactttccaaagacagcagccaccccaccaggcacgtaccaaaaccacacaacgtacgtaaaaacggcatgcaactcaacaacataccctacaatgtgctacaactgtctgtcctcctattcctccaccatcaagtccgacccaatcaaactatgcacaacatcgctaaatctcaacgtcaaatccgctaaaaacgccacattagtcgtctctaaccttctccaaaaggccaaagccgcgaaaagccatgaggtctcgatccttaaggactgcgtggacgagatgaaggacactatcgacgagctta

SEQ ID NO: 156240 - DNA, 289 bp, Arabidopsis thaliana columbia
atgacgttgaagaaggtggacgcgaatccatcaaccttggaatcgagtttacaagaactgggagtcagacgaaacaagccgtagcaagatcaatttcatactcttcctcgccgacaatgatcccaccaccggtcaaagctggtgtccagactgtgttagagctgaacctgtgatttacaagactctagaggaatttccagaggaggtgaagctaattcgtgcttacgccggaaacagacccgcgtggcggactcccgcgcatccttggagagttgattctcggtttaaa

SEQ ID NO: 156241 - DNA, 363 bp, Arabidopsis thaliana columbia
acgtttatacaaaggagggctcgattaccttaactacactaacttgacccacgctcaaaggaggtgggccatctgggctgttcaagttgtgctcatggggttcattgaaggctacagaatcggaggtggaccactcggagaaggacttgacccgctttatcccggaggtgcgttcgacccattgaacttggctgaggatccagaggctttctctgagctgaaggtgaaggagctcaagaacggtcgtcttgccatgttccctatgtttggattctttgtccaagccattgttactggtaaaggtcccattgagaacttatttgatcatttggctgatcctgtgggtaacaacgcctggtccta

SEQ ID NO: 156242 - DNA, 229 bp, Arabidopsis thaliana columbia
gcccgttcttaactcactcgcaaagctttgttcatgtgagctgaagccttagtaatggaagatgtaaaagggacctctaaagatggaagtgagaatcaatcctttacttccatctgtcacactgatctcacgcatggaaaggcgagacgaggctcacggcataccctcaatccttggccatgaggcagcaggataggggagcgttgggaggtgtggaagagatgatggc

SEQ ID NO: 156243 - DNA, 422 bp, Arabidopsis thaliana columbia
ctgctctcaagataattttgttctctcaatttcattcttaaaccctagttcttcgatttttggcgatctacgacaatggcggacgctgaaacctttgctttccaagctgagatcaaccagttgctttccctcatcatcaataccttttactctaacaaggagatcttcctccgtgaactcatcagtaactcttctgatgctttggacaagattagattcgagtccttgacggacaagagcaagctcgatggtcagcctgagctcttcattcacatcattcccgacaagactaacaacaccttgaccattattgatagtggtattggcatgaccaaggctgatttggtcaacaaccttggaacaattgcaagatctggaaccaaggaattcatggaagcactggctgctggagctgatgttag

SEQ ID NO: 156244 - DNA, 418 bp, Arabidopsis thaliana columbia
tattggtcggtctctctcgttacggtgaggctgaggctgaggcggagattgagagagaccggcggtgatacgacgaatcaccgagagagcttctggtttcgctaagaatattccgattctcaaatcgtctcgatttcacggcgagtccctcgattcctccgtctcccctgttctcattcccggcgtccatgtcttccattgtcaggatgctgttgggattgtagctaaactatcagattgcatagcagcaaaaggtggcaacattcttggctacgatgtttttgttcctgaaaacaacaacgtcttctactctcgcagcgagtttatctttgatccggttaaatggccgagaagccaagtggatgaagattttcaaactattgcacaaagatacggtgccttgaattcagttgtgcgt

SEQ ID NO: 156245 - DNA, 421 bp, Arabidopsis thaliana columbia
actagctcaaaacataaaaaacaagtggaagctttaaaacgagagggagagagcaaaaatggcgacggggggaacgtacgtgacggaagttccgctaaaaggatcggccgagaaatactacaagaggtggaagaacgagaaccatgtcttccctgatgctatcggccaccacatccaaaatgttaccgttcacgaaggcgaacatgactctcacgggtctatcaggagttggaactacacatgggatggaaaggaggaggtgttcaaggagagaagagagatagacgatgagaccaaaacgttgacgttaagaggacttgagggtcacgtgatggagcagctcaaagtgtacgacgtcgtctaccaattcattcccaaatctgaggatacctgcatcggcaaaatcactttaatatgggag

SEQ ID NO: 156246 - DNA, 409 bp, Arabidopsis thaliana columbia
acggcaaaccaataatggctaccactcgtctaactctagctcctctcctcctcatcgcaggcgggctactcgcaaccaaggcaacggctcatccggcagcccccgctccagagcctgctggtcccatcaacctcactgcgatcctcgaaaaaggtggtcaattcactactttcatccatcttctaaacatcactcaagtcggtagtcaagtgaacattcaagtcaatagttcatccgaaggtatgacggtgttcgcaccaacagacaatgcttttcaaaaccttaaacccggaaccctaaaccagttaagccctgacgatcaagttaaactcattctctaccacgttagccccaaatattacagtatggatgatctcctctccgtgagtaacccggttaggactcaagc

SEQ ID NO: 156247 - DNA, 399 bp, Arabidopsis thaliana columbia
gataagtcgtctcttgaatcgccaaatatatattctttttttttcgatttttcgatagatggcaaatcgacaaatccaaaagaaaaagtaagttgacctaacccatcgaatcatgactatatccactattctgatattcaaattcgatagagattaaattgaaacagtagattttttttatttcatatttttgtattaggaaatccgtccatatctcttattgaatcttcttggttctatatatttcataggaaatatattgcgttcctgcctagagaaagagagtatttttgcaaagtaataactaaaagggcgattcaatattttttttgattctagaacataacaagatcccacattctttttgtattaagaatcaaatttttttttaaaatttac

SEQ ID NO: 156248 - DNA, 347 bp, Arabidopsis thaliana columbia
ccgttcgaattcggtcgcccacgctccgccaaacgtgcgttatgatttcgatggtgtggaggtcaggacgtcgacaaggttttcagattttgacgagagaactttactttgggtggttcagagagagtttgtggccattaagatgccatggagtgccggagagaggcaagacgggtttaactccgtgccgtctgggtttgatccttcactaattcataagacgtattggagctgtgctccgccctcctgcgttgtgaccgtgagttggatcaccgtcggtcagaggaagatgatcataacgctcttaacttcgagctaagttttatgttgtttgaggacgctttgtt

SEQ ID NO: 156249 - DNA, 443 bp, Arabidopsis thaliana columbia
cggtatttcctggctggaccgacgcgtccgggaagagtttcctacattttcactacaagtgaagctgtcgcagccgaagttgccgatctttctccgcttttagccttttccatcctcatgaatagtgttcaacccgttctctctggagttgccgtcggagctggatggcaaggatatgttacttacgttaaccttgcttgctattaccttgtcggaattcctattggtattatccttggttatgtcgttggtttgcaagtgaaaggcgtatggatcggaatgctctttggaatattcgttcagacttgtgtgcttaccgtcatgactctgagaacagattgggatcaacaggtgtcaacgtcgttgagacgtttaaatcggtgggttgtccagaatctagagacggtaaccaagtatcatcagaggaataaattggattctag

SEQ ID NO: 156250 - DNA, 419 bp, Arabidopsis thaliana columbia
cgttccgttgtgtttcaggacgacgcaaaggggaaaaaaaattgaattctttctctccaagcgaaactagggtttcgaaagtctctgtctcatcaaagcttcgaaaagaaagtgattgcattaagagaaacattgggataaaagatgagctttactcaggctaattgttttcgaccatcctactatcctgcaaggataacacgaccaaattgcatctccagtgtacctattaggtcttcagtacgctttgatcacttcccgcgtacctcgtttactcttcgagctactgctgcagtgtctactcagttttcgcctcttcttgatcatcgccgtcgtttacctactgggaaatcgaaacaaagttctgctgtgtgcttatttggtgggaaagataaacctgatggtagtgatgagatatc

SEQ ID NO: 156251 - DNA, 442 bp, Arabidopsis thaliana columbia
cagttcgggcacgcgcacgctctcttttgtaaacctgcgatctgaatcttcccgtcggtgaaaaatggttgcggagaagaaggcggagaagtcccatgaaggaatcaacagcagattagctcttgtgatgaagagtggaaagtacactcttggatacaagtctgttctcaaatcccttcgcagctccaaaggtaagctgatattgatatctagcaattgcccaccgttgagaaggtcagagattgaatactatgcgatgcttgctaaagttggagttcatcgctacaatggcaacaatgttgatttgggtactgcttgtggtaaatacttccgagtttcttgcctcagcatcgttgatcctggtgattccgacatcatcaagacacttcctggagatcagtgattctgattttgatgattttgccatgttgttctctatgct

SEQ ID NO: 156252 - DNA, 380 bp, Arabidopsis thaliana columbia
ggaatcgtaaacatttacaagaaatctgagtttgtgggaggcaaaagaaagccgataaagacagtggacaatctcacatccaagatagatttcatgaagttcaaccatgatgctcagattctagctatagtctctacaatgaacaaaaacagtgtaaagctagtccatgttccatccctaaccgtcttctcaaactggccgccaccaaacagcacaatgcattaccctcgctgcctagacttcagccccggaagtggcttcatggctatggggaacgctgccggaaaagttttgctgtataaactccatcattaccagaatgcttggaggggtctttaacaagggcaagtttgggaatggtggggttcccttttttttgg

SEQ ID NO: 156253 - DNA, 419 bp, Arabidopsis thaliana columbia
cccgcttcttcaactccaaacctaaccctctcaatttccctccttcgccggtccacggcgtcatttcacggtggcgcttcacctctctccgacacctactctcctaaaaatccaatctttacaaaatccagaccaatatagaaatgactttaatcgcttctctgtctctcccaccaccagctatacaaagacaatcactttctgaatttcataatcttcccgctaaatctcaatccttcaattgtcaattccggtcttctagttcacctttatcttctctccattcttcatcgcttagtaactttctagattttagactaaggcggagaaacagcggattggttccagtggtggcgtgttcaacgacgccgtttatgggcagagttggattacattggagagatgggaatatgtctctg

SEQ ID NO: 156254 - DNA, 183 bp, Arabidopsis thaliana columbia
cgttcgacagagtgaaatcctcaagggttatttaatgtctaccctcttttatgagccttctacgcgtgccaggctttcatttgaatctgctatgaaacgccttggaggtgaagtcttaactactgacaacgctagagagtattagtttttcgctatgggtggaacattttttgtctcttgatt

SEQ ID NO: 156255 - DNA, 392 bp, Arabidopsis thaliana columbia
tttggactctctgatcatccagtttcttattttttacattgctttttcacttcaggcaaagcttctcaaagggaagctccggatggtgtctaaagactactcaggtgcaatttctgagactggttatattctcaaggaagatgaaaataacctcgaggcgttgctccttcgtggccgtgcctactactatttggcggatcatgatatcgcccaaaggcattaccaaaaagggcttcgtcttgatccggaacacagtgaactgaagaaagcatacttcggattgaaaaaactgctcaagaaaacaaaaagcgcagaagataatgcaaacaaaggaaagttgcgagtttcagcagaggaatataaagaagctattgcttttgaccctgaacaca

SEQ ID NO: 156256 - DNA, 251 bp, Arabidopsis thaliana columbia
gggggggggggggggataggggagctccttggaattaaaagaaacctttttttttcttaactttgtccgtcgccgcctgaaaacggggtagttttttcacttaagctttccaattaaagggaacaaagctttgttttttgccgcagtcagaagcattactttgcaagaacaagtgtgtaaacaaagatgaggagctcccaaaacggcggcgcaatgggtggacgagctgccggaaccggcggaggaggacc

SEQ ID NO: 156257 - DNA, 212 bp, Arabidopsis thaliana columbia
ttttactctttttttttttacaaatcttaaactaatctcgtactttttttaattcctgggaggggggttaaaagaagccatggataccgagtttctccgaaccctagatcgtcagattcttttgggtgtcttcgtagctttagtcgccgatggtgctggtgctgattattttttatacatctttcacgatactcaaagtgtgtttgggttcc

SEQ ID NO: 156258 - DNA, 370 bp, Arabidopsis thaliana columbia
  unsure (1)..(370): unsure at all n locations
cctaaatttcgtcaactccacagcatcttgtttcgatcaacgaaatctcttacgcggccgcgtttttttacagatcggggcggctatcaataaatcttttcattttccatcaacaacatgctatttcaattcnagcttttgctaaagaagctgttctttcaacctttaaattatataatatattaaacattctcttttttgatattaataacaaattccatgctgcttttcatattcttcttaacgaaaatatcacccttgatccatattacccatctttcttaaaacataatgcaaatgtaatgaataccattattcaaaatacatacattttctcaaaatcttatcgcattaaacattacattgatac

SEQ ID NO: 156259 - DNA, 441 bp, Arabidopsis thaliana columbia
  unsure (1)..(441): unsure at all n locations
cttctctctcgatatcatctaaatctttctttatctcaatttcgcaaaatggctcggacggggatcagaatcgggggggacggtttcngaagaatcggtcgtttggttgctagagttgttcttcagagggatgatgttgagctcgtcgctgttaacgatcctttcatcaccaccgagtacatgacatacatgtttaagtatgacagtgttcacggtcagtggaagcaccatgagcttaaggtgaaggatgacaaaactcttctcttcggtgagaagccagtcactgttttcggcatcaggaaccctgaggacatcccatggggtgaggctggagctgactttgttgttgagtctactggtgtcttcactgacaaagacaaggctgttgctcacttgaagggtggtgcttaaaaggttgtcatctctgccccaagcaaagat

SEQ ID NO: 156260 - DNA, 134 bp, Arabidopsis thaliana columbia
caggaagcgaatagattcattttcaaataaaaccagctttctctctgtatgttttcctggaatatcgtgttatattatacaatgtctctgtttcaacattgtatctgttgcatctgaaactattatcttgggtc

SEQ ID NO: 156261 - DNA, 464 bp, Arabidopsis thaliana columbia
caacgaccaaaacaaaagattcaatattttcaaagacaacttaagattcatcgatctacagaacggaaacaacaagaacgcggctgacaagcttggtctcaccaaatttaccgatctcactaacgatgagtaccgcaagttgtacctcggggcaagaactgagcccgcccgccgcatcgctaaggccaagaatgtcaaccagaaatactcagccgctgtaaacggcaaggaggttccagagacggttgattggagacagaaaggagccgttaaccccatcaaagaccaaggaacttgcggaagttgttgggcgttttcgactactgcagcagtagaaggtataaacaagatcgtaacaggagaactcatatctctatcagaacaagaacttgttgactgcgacaaatcctacaatcaaggttgcaacggcggttaatggactacgcttttcaattcatcatgaa

SEQ ID NO: 156262 - DNA, 436 bp, Arabidopsis thaliana columbia
  unsure (1)..(436): unsure at all n locations
gctactgattgggtcccagaaagagagtgcgacggtggacgatgacgctttttcacttgtgcaactgtgcgattctcacatgcggtcctcacgcggtctactactccgccactcccttatctgaatatgatacacttggaacctccgtgaaagctgctgttgtttaccttgctactgcattggttaagcttgtttgtttggcgacttttctgcaagtgtctgagactgaagtgtttgacccataccaggaagcattgaaagcgatgattggattcatagatgtcgctggtctgtattatgctctggcccagctgactcacaggaacatctcccaaaaccataagtttcaggctgttggtctcgggtgggcattcgcggattctgttttgcacaggttggcaccccttttgngttggtgctcgaggactggagttca

SEQ ID NO: 156263 - DNA, 376 bp, Arabidopsis thaliana columbia
atcgtagtctgagaagacaattttcacaggctttgtacctggttggcacttcccctgtttgggccgttgataacaagggcatggccggcatttttgataaaattgcgcctttggccaaagcggttgtggttaaaattgagtcttactgcccaaggttattcgccaagatggttgccaagagaaatgtaacataccttatcatgaatgtcggtcctgacggtgtgggagcgcaccatcagcttaatgtgacggatcacaaaactcttttattagctgagaagccattcactgttttcggcatgaggaaccctgactacatcccatggagtgaggctggagctgactttgttgttgagtctactggtgtttttactta

SEQ ID NO: 156264 - DNA, 337 bp, Arabidopsis thaliana columbia
acgatttttatcaccaatcccaattttttctcttttacgaggaagggaaaggctctggactcgactgtcccaatgaatatgagtattcaggaatcacggtcgccgttagctgtagccacacaaacacgcggttcactgtaacaactgacaagaagggtgacttcatatcggaacttccctcaaagatcgaatcaaactgtgaagcagaactccaaggcagcgtatagcaactttatgcttgcaagaataaccttaaggcgaagattgttaagcttggctgtgacaaatatggtctctttttcaaggtgttctatttgtaatcatgttcaagaagctt

SEQ ID NO: 156265 - DNA, 162 bp, Arabidopsis thaliana columbia
aggaagcgaatagattcattttcaaataaaaccagctttctctctgtatgttttcctggaatatcgtgttatattatacaatgtctctgtttcaacattgtatctgttgcatctgaaactattatcttggatcaaaaaaaaaaaaaaaaaaaaaaaacaaaa

SEQ ID NO: 156266 - DNA, 437 bp, Arabidopsis thaliana columbia
ccaaaactcttctttcaaacatggaccgatccacgtgtctttccctgacaatagcctcactcttggtcggagtcgcctcagctggcgactggaacatcttgaaccaactcagaggactcggctcatcgtcaagccaaaatggtatcgtttctaaaggtatcaagacggacctgaaaggatactgtgaaagctggaggatcaacgtggaagctcacaacatcagaaagttcgatgtggtgcctcaagagtgtgtatcgcacattaaggattacatgacgtcatcgcaagacaaggatgacgtggcgagaacccatgatgaggtcattcttcatttcgggagcatgtgctgcagcaagtctaagtgtgacggcatggacgcttggatctttgatatcgatgacacgcttctctctaccatgccttaccacatgaaaaat

SEQ ID NO: 156267 - DNA, 457 bp, Arabidopsis thaliana columbia
gtcagctgctgacctatgggcgtagaatcccaaccgctgaactctttgctaggatcgatgctgttgatgccagcacggtgaaacgtgttgccaacaaatatatctatgacaaagacattgcaatctcagctattggtccaatccaagatttgccagactacaacaaattcagacgcagaacctactggaaccggtactaaggctctgaaataaaggtcactgaatcgcaaggttcgcccacggggagattccgtaggcggagagagcagaacgaggtgatgatggattcattatttttgagtttttcttactgtatcttcataatttaccatcatcgctggtaaaataagtgtaccatttactctttgtcctctactggaaaaatgctagagatcctctgggtgtgttttttttgttctcttcataattttcccatacacatactaataagttcttt

SEQ ID NO: 156268 - DNA, 460 bp, Arabidopsis thaliana columbia
catcttctacgcgacttacttatccgagaaaatcgggtactggagatacatcacaatctacagacacctcaaggaaaaccctgagttccaatgttacccaatcttcaagtactttgagaactggtgtcaagacgagaaccgtcatggtgatttcttctctgctttgatgaaagctcagcctcagttcctcaatgactggcaagccaagctctggtctcgcttcttctgcctctcggtttatgtgacaatgtacctcaatgactgccaaagaactaatttctacgagggtatcgggttaaacacaaaggagttcgatatgcatgtcatcatcgagacaaaccgaaccacggcaagaatattccctgcggtgctggatgttgagaaccctgagttcaagaggaaactggatagaaatggtgtgagctatgagaagctgctggctataggagaaacagatgat

SEQ ID NO: 156269 - DNA, 441 bp, Arabidopsis thaliana columbia
ccggaggagctcgatccattgattttaagatgacaactccacaagtgaagaccgggttggtcgttgggttgaacaagggacatgtttttactagactttaattatctcctcgtttcttgttctcgcaaaggaaaaactagcaataggacaatctttattataatcttgataaaggtatttgctttttatttctatatattataagttttttattgttctatttaatgttgtttatagtattattgtttttatatatttttattatttattattttatctattttttatttttgtttttttgtttttatttcatctattttttttttatatattctttgttatttattcttatttttaattttttattatatttatgatatttttcttttttattgttctgattttattgtatatcttttatttttttatttattttatttt

SEQ ID NO: 156270 - DNA, 434 bp, Arabidopsis thaliana columbia
gatttgatcaccaactctcacatatttcgaaatcgttacactttgttgcgcgtcgacttctctctctcataattctggagggtcacgtctcaagatttgatcacttctgccaattttccagatagatctctctaattatggcttccatgagtttcgccttgaatcgcttctctggactctcctctaaaaccaccttatcagctgacttcgatccatcctctcgccggagttttctaccgccgactagagttggacttaagatctcttccgccgccgaatcggagcctgatctcagtgtcactgtaaatggcctgaaaatgcccaatcctttcgtgatcgggtcgggtccaccgggtaccaactacaccgtcatgaagagagcctttgatgaaggttggggggccgtcatcgccaaaaccgtatctttagatgca

SEQ ID NO: 156271 - DNA, 248 bp, Arabidopsis thaliana columbia
  unsure (1)..(248): unsure at all n locations
atttctcttcgatttcttcaaactctcattttatcttttatctgttctaaatttcnaagagaacggattagtacaggcgcagaagcgaaacaaccaaaggtggcagaggaaagccaaaggccaccaaatccgtctctcgatcatctaaagccggtcttcaattccccgtcggaagaatcgctagattcctcaaatccggtaaatacgccgagcgtgtcggtgccggagctccggtctatctctccgtt

SEQ ID NO: 156272 - DNA, 376 bp, Arabidopsis thaliana columbia
  unsure (1)..(376): unsure at all n locations
catggcgttagcatcaaccacgttgccgactaagtccggattatctctttggtgtccggcgtctgcgtctctcgctcgccgatttcccgctcgtttttctccgatcggttctagaatcgcttccagaagcctcgtcactgcttcgttcgctaacgagaatcgcgagtttgtgattgttggtggaggaaatgctgctggttatgctgctagaacttntgtggaaaatggaatggctgatggtcggctatgcattgtgaccaaagaggcttacgcaccttatgagagaccgtttttgacaaaagcttacttgttcccaccagagaagaagccagctcgctaaccaggatttatacttgcgttggatgtggtggagtaa

SEQ ID NO: 156273 - DNA, 414 bp, Arabidopsis thaliana columbia
ctccgaagcttaacgaaaacaatggcggcagaacctaaccctaagaatttccctgtcctctcttatgtcttggctcgtctcccttctttcaccgccaaatccccttcctcctccgttcctcccttcgacatcgaacaaccaccaccatcatcatcatcatcatcgattgagatcgtcactcagatgcctcacttaacacaaccagatgttctcgcttcaatgacaagtgcgatctctgacgtcgccgagactcgatctatccttcgaaccctaggacctagaccagatcacgaatcagtcgataaggctcgtgctaaactctcggaaatcgaatcgttcttatctgaatcgttcgaggatatcgcgttaaccgatgcggcggcgaaagatgagaagaggagacaagagatggat

SEQ ID NO: 156274 - DNA, 364 bp, Arabidopsis thaliana columbia
gtgaagttgctcttccactaaagttgaaatcagaaaaaccatcaatggcttcttcatcatctctctttctcctccctctgggtcttcttgtctcccaagcttcagcttcaacggttatattttacaacaagtgcacgtacactgtctggcctgggatccaacctagctccggtcagtcattactcgccggcggcggatttaaactgtcgccgaacagagcttacactctccaacttccaccgctctggtccggtcgcttctggggccgccacggttgctcctttgacagatctggccgtggtcgctgcgccaccggagactgtggtggttctttcctctgtaacggagctggctgtgtaccttc

SEQ ID NO: 156275 - DNA, 445 bp, Arabidopsis thaliana columbia
gaagatttctggtgatgctctaaaggacctgtacaagtcctttgtcgctgagtacccaatcgtgtccattgaggacccatttgaccaagatgactgggagcactatgctaagatgaccactgagtgtggaaccgaggttcagattgtcggtgatgatttgttggtcactaaccccaagagagttgctaaggcaatcgcagagaagtcttgcaatgctcttcttttgaaggttaaccaaatcggatctgtaaccgagagtatcgaggcagttaagatgtcgaagaaagcaggttggggagtgatgaccagccacagaagtggtgaaaccgaggacacattcattgctgacttagccgttggcttgtccactggacaaatcaaaaccggtgctccttgcagatccgagcgtcttgccaagtacaaccagcttttgcgtattgaggag

SEQ ID NO: 156276 - DNA, 452 bp, Arabidopsis thaliana columbia
atttaatcgggaaaaagttcagtcagtgacactaatgttcgaatcgaacatggttcttcggacactatcttcttcttgtcgtccaattcaccgtctctatcttcaccattctcagattctcccttcttctgggtcacccagcaagatttctcttcagatacatggaaggactttggccattcgatcttttcatgaaatttctgctagaggtttaccggctttgaacaaagcttccttgaagaagctaccaatcaaaggatctacctttctgctggggcagagcttgttgatggtttctgctcacccacagttggcagcagcagcagaaatcataaagcctgaaccgatttacgaagttggagagttatttgaacttagtattcagctttcttacttgctgttactactggggttgcttggagttggtactttctatgtgatccgtcaagtac

SEQ ID NO: 156277 - DNA, 458 bp, Arabidopsis thaliana columbia
aaaaaaaaaactcagagagacaaatctaaatggcgatgattacgcgcaacaccggcgcgcgcctccctctcctcctgcgatctcaacgcgccgtcgccgctgcctcggtctctcacctccacacatcccttcccgctctctctccctccacatcaccgacttcctacaccagacctggtcctccttcgacctcccctcctcctcctggtctctctaaagcggccgaatttgtgatctccaaggtcgatgatctcatgaactgggctcgtaccggatcgatctggcctatgacctttggtctcgcttgctgcgccgtcgaaatgatgcataccggtgctgctcgctacgatctcgatcgattcggtatcatcttcaggcctagtcctcgccagtctgattgtatgattgtcgccggtactcttaccaataagatggctccggctcttcgcaaggtttat

SEQ ID NO: 156278 - DNA, 459 bp, Arabidopsis thaliana columbia
cgaccaggttcttgacaccaccgccatgctcggtgctgttccacctaggtatgggtacactggtggtgagatcggccttgatgtttacttctccatggctagaggaaatgcctctgtgcctgccatggaaatgaccaagtggttcgacaccaactaccattacatcgtccctgagttgggccctgaggttaacttctcttacgcatcccacaaggcggtgaatgagtacaaggaggccaaggctcttggtgttgacaccgtccctgtacttgttggcccagtctcttacttgctgctttccaaggctgccaagggtgttgacaagtcattcgaacttctttctcttctccctaagattctcccgatctacaaggaagtgattaccgagcttaaggctgctggtgccacctggattcagcttgacgagcctgtccttgttatggatcttgagggtcagaa

SEQ ID NO: 156279 - DNA, 466 bp, Arabidopsis thaliana columbia
caacaacaaaccgtgatcaaaagaggaactcacagtaagacactaatccttaacaatgaaagggcttggtcattgcctagtgtgtatatcctggtctttagtgtcattgctgctatagtgacagcatacgactcaccctcttcaacaccacaatacacttccccttatccacctaaaaactattctccttatctctcagaatcacccccacccccaccaccacaatatagaagacaagagcctaagtacacaccacacccagagccaaatgtctacgattccccgacacctctaccatattactttccttttcctaaactagacatcaagtctccaccaccaccatccgtctacaccttctcaccacctcaactatattactccccttctcctaaggtagagtacaaatctccgccgccaccatacgtttatagctctctgccacctctaacatattattctcctt

SEQ ID NO: 156280 - DNA, 406 bp, Arabidopsis thaliana columbia
ctacggtcctcctggatgtgggaaaacccttttgttcataagctattgccaacgagtgccaagctgatttcatcagtgtcaagggtgccgagcttctgacaatgtggtttggagagagtgaagcaaatgttcgtgaaatcttcgacaaggcccgtcaatccgctccatgtgttcttttctttgatgagctcgactccattgcaactcagagaggaggtggaagtggtggcgatggaagtggtgctgcctacatagtcttgaaccagcttatgactgagatgacttgatatttgcctttatgaccggctgcttattttatctaccaacagacctgacattatcgattcagctcttcttcgtcctggaaggcttgaccagctcatttacattccactaccatatcatg

SEQ ID NO: 156281 - DNA, 420 bp, Arabidopsis thaliana columbia
gcatctttcttcaacctgcgccgctttctcactcttttttatctctcaaatttgaccttctgcggtgttctttcgcatcgctcaggagcagaagcttcaatctttgataatgtcgaggaacaagggtttggctgagcaagatcttaaaaaattggatgtaactgtgctacatcctctgtctcctgaggtcatttctcgccaggccactattaatataggaaccattggtcatgtcgctcatggaaagtccactgttgttaaagctatttctggtgtccagactgtccgttttaaaaatgaattggagcgtaacattaccattaagcttggatatgcaaacgccaagatttacaaatgtgaggatgagaaatgccctagaccaatgtgctacaaggcctaccggagtggaaaggaagacac

SEQ ID NO: 156282 - DNA, 451 bp, Arabidopsis thaliana columbia
  unsure (1)..(451): unsure at all n locations
cgaattcagactgtggaaattgcaatggacccgttagctcacgtgggtccaggtcaattagccggtggaacttttgcattggacacagaaacnttgcaatgggagaggctggataagtttggtggagaggaagagactccgagtagcagaggatggaccgcgttcacgactgctaccattgatggtaagaaaggacttgtgatgcatggtggtaaagcttcaaccaatgaccggtttgatgatctttttctttaacggattgactctgcctaattaagggagattttgttaatatgggggggggggggtgggtttttttttttttattcttttattatatattattataaaatttttgatgttctatctttacatttatattttctattattttctttatctttttatattttttttatcttttatattttttttattattttttttatat

SEQ ID NO: 156283 - DNA, 334 bp, Arabidopsis thaliana columbia
ccggactcggaagggccggccgacgcgtccggaacttaacactcgtcaatgagatgtacttttccattattctggaccgtaaatctgctccagccttgatcattgcctggagaaagggtggtaccagtattgaagatcttgctgagaagttccctgacatgatcatcaaggtaccaattgatgtatttgcaggaatcactgatgaagatgctgctaaggttgtggatgttctttctcccaaagcttctcatcttaaaatattcttttgaacaagttaagaagctatactaactctttcctaagacttactgtacaaattttataatgggggggg

SEQ ID NO: 156284 - DNA, 284 bp, Arabidopsis thaliana columbia
gatagagagatagagttatggctttggcgatgatgatccgaaacgcagcttcgaagcgaggaatgactccgatctccgggcatttcggtggtttgagatctatgtcttcatggtggaagagcgttgagcctgctcctaaagatccgatcctcggagttaccgaagcttttctcgctgatcctagtcctgaaaaagttaatgttggtgtgggagcatttcgttatgattatgggtagcccgttgttttgttatgtgttagatgtagctttacaaattttttgctt

SEQ ID NO: 156285 - DNA, 440 bp, Arabidopsis thaliana columbia
atcggctctgaagaggaacaaagaagcgtttaatggaattgctcgaggattcaccacttggtctcatcgagttttcacttgtaacattacagctgcttctgtaacctctgcttcgtcttctcctttagctggaaactccttctatggcttgcgatctctgctcaagggtcaaaatgcttcaatgtttaggaggatgtcaactgtagcgtcgataagctcagagagtaaagagggtttgaagcttcttgtcactggaggacctcaagctcagaaatgggttggaatttggctttttggttcggctgcttgggttttcagcatggttgtacttggcggtgtaacccgattaactcgatctggtttatcgatgactgattggaaatttactggtgaattccctcctctgtcagatgaagcttgggctaaggagtttgagaaat

SEQ ID NO: 156286 - DNA, 449 bp, Arabidopsis thaliana columbia
tttcttcaaagaacaaatctcccaaatctaaaatctttctcttctctcttcgtttccataaccatgtctgcgaagaagattgtgttgaagagttccgatggtgaatctttcgaggttgaggaggcggtggctctcgagtcacaaaccatagcgcatatggttgaagacgactgcgtcgacaacggagtccctcttcctaacgtcacgagcaagatcctcgccaaggtgatcgagtattgcaagaggcacgtcgaggctgctgcctctaaggccgaggccgtcgagggtgctgctacctccgatgacgatcttaaggcctgggacgctgattttatgaagatcgatcaagctactctctttgaactcattctggctgctaattacctgaatatcaagaacttgcttgatctaacatgtcagacaagtgcggatatgatcaaaggaaagac

SEQ ID NO: 156287 - DNA, 282 bp, Arabidopsis thaliana columbia
tcggcacgctacgacaagtgtgatgggtctctttggagaagtcgtgcctaaaaccggtgaaaacttccgtgccttgtgtactggtgagaagaaatacgggtacaagggttcctctttccatcgtattattaaggatttcatgatccaaggaggtgattttaccgtgggaaatggtactggaggtattagtatttacggtgccaggttcgaagatgaaaacttcaccctgaagtatacttggactctgaatcttgagcttggtttttcttggttctaaattct

SEQ ID NO: 156288 - DNA, 457 bp, Arabidopsis thaliana columbia
ctggcgtggtcgggtttaagttggatggaaagttgaaggaaggggttactgctactgatgtagttctcactgtgaccgaaggattgaggaagcatggtgttgtcggcaagtttgttgaattttatggtgaggggatgagtgaactttcactggctgatagagccacaattgcaaatatgtctcccgagtatggagcaactatgggtttcttcccagtggatcatgttacactggagtacctgaagttgacaggaagaagcgatgaaactgtgtcaatgatagaatcatatttgcgcgcaaacaatatgtttgttgactacaacgagcctcagcaagaaagagcatacacatcttatctgcagttagatttgggacatgttgaaccatgtatttctggtcctaaaaggccttatgaccgagtgcctttgaaagatatgaaggctgactggcatgcatg

SEQ ID NO: 156289 - DNA, 308 bp, Arabidopsis thaliana columbia
acccatacgagcggatggatggcgacgacaccatttgtttcgatgcggaccggatgttctactactgctaacgattgggcccgtggcacgacactgttaattacactatggcatggaccactggtgtgaactactgaggttgcgctaccgataagactttgaggggtggtgacattctaaaggtcaagtttggttcttgccacacaggggaggtggctgacaaagcccgatatgatggctgctacgcactcctgctcgactgagaaccattccgagggagacaccaaactagtttttaagagatgggg

SEQ ID NO: 156290 - DNA, 412 bp, Arabidopsis thaliana columbia
  unsure (1)..(412): unsure at all n locations
ctttcattggcacaaaagagggaaaaatctgaaattgaaagagccagaaaaaaatggcgtcgcttgtgaaagcattcatcgatccaaagaagaacttcctcgctcgtatgcatatgaaagccatatctactcgccttcgcagatacggtctgaggtacgatgatctgtacgatcagtattacagtatggacatcaaagaggctatgaacagattgcccagggaggtcgttgatgctcgtaaccagcgtctcaagcgggccatggacctctccatgaagcacgagtacctncccaaggatcttcaggcggtgcagaccccattcccgggctatcttcaggacatgctngctcttgttgagagggaaagcatggaacgagaggccttgggagctctaccactataccagcgcac

SEQ ID NO: 156291 - DNA, 281 bp, Arabidopsis thaliana columbia
ggtgaagttgctggcagaattgtgatgggtctctttggagaagttgtgcctaaaaccggtgaaaacttccgtgccttgtgtactggtgagaataaatacgggtacaagggttcctctttccatcgtattattaaggatttcatgatccaaggaggtgatttcaccgagggaaatggtactggaggtattagtatttacggtgccaagtttgtagatgaaaacttcaccctgaagcatactggacctggaagtctgagcatggcaaacgcttgtcctaatac

SEQ ID NO: 156292 - DNA, 468 bp, Arabidopsis thaliana columbia
gaaaaaatgttgggaagcataagcctcatctcctgcaacttctctcgccttccacgtctgcttaaaccctccactcgacctgaaaccctaacacaatcctcaagcctccttcttcttcttcaatcacgagcttcttcttcaccacatagaattgcccttttcccgaaatacgagaagaaagtcacattcttccatatctgcaaaagctcttcaaacaacccagaagaaccagagaagactcaaattcaagatgaaggaagagactggtctagctcaattttgctttttgcgctttggggtgcgctcttgtactattgcttcaatctcgctcctgatcaaacacccacacaagacttgtactttttgaaaaagcttttgaatttgaaaggtgatgatggttttagaatgaatcagatccttgttgggttatggtacatccatgggtttgtggcctttggtttatgccat

SEQ ID NO: 156293 - DNA, 448 bp, Arabidopsis thaliana columbia
cacatttgaagaaagaaatggcatccaaccaacagagctacaaagctggtgagaccagaggcaaggcccaggagaagactggacaagctatgggaacgatgagggacaaggctgaggagggccgggacaagacttctcaaacggcccaaacagcccaacagaaggcccatgagacagcccagtcagctaaagataagacatctcaaactgcccaagcggctcagcagaaggcccatgaaacggcccagtcagcaaaagagaagacatctcaaactgcccaaacggcacagcaaaaggcccatgagacgacgcaagcagcaaaagaaaagacatctcaagctggcgacaaagctcgcgaggccaaggacaaggccgggagctacttatcggagacaggcgaagccataaagaacaaggctcaagacgctgctcagtatacaaaggagac

SEQ ID NO: 156294 - DNA, 409 bp, Arabidopsis thaliana columbia
acgagcggatggagggcggggacacgatctgtgtagacgccgaaccggctattctgctacgtcggacgattgggcggggcgcaggacctgtgacattacactattgaatggaccactggtgtggactactgaggttgcgctaccggaaagactttcagggttggtgacattctaaaggtcaagtatggtttttaccacacggtggatgtggttgacaaagccggatatgatggctgcgacgcctcctgctcgagtgagaaccattccgatggagacaccaaaagcgatcttaagactggaggaatgaactatttcatctgttctacacctggtcactgcagaaccaatggcggtatgaagctagacgttaatgtcgtagccggttctgtcggaccttcgggcacttcca

SEQ ID NO: 156295 - DNA, 450 bp, Arabidopsis thaliana columbia
caaaacaaaaacaagaatgggtagatccaacgagcaagatctgctctctaccgagatcgtgaatcgtgggatcgaaccatgcggtcctaacgccggctcaccaacgttctcggttagggtcaggagacgtttgcctgattttcttcagtcggtgaacttgaagtacgtgaaacttggttaccactacctcataaaccatgcggtttatttggcgaccataccggttcttgtgctggtttttagtgctgaggttgggagtttaagcagagaagagatttggaagaagctttgggactatgatcttgcaactgttatcggattcttcggtgtctttgttttaaccgcttgtgtctacttcatgtctcggcctcgctctgtttatcttattgatttcgcttgttacaagccctccgatgaacacatggtgacaaaagaagagttcatagaact

SEQ ID NO: 156296 - DNA, 462 bp, Arabidopsis thaliana columbia
aagcaaaaaagaaaagctcaagccgagagagacaatggcatcaacattcacgagctcaagcagtgttcttaccccaacaacattccttggccagactaaagcctcaagctttaacccccttcgtgatgttgtctctctcggatctcccaagtacactatgggaaatgatctttggtatggacctgacagagtgaagtacttaggacccttttccgttcaaactccgtcttacctcaccggagaattccctggcgattatggttgggacaccgccggtttatccgcagaccctgaagcctttgccaaaaacagagctcttgaggtgatccatgggagatgggcaatgttgggagcttttggttgcataacccctgaagttcttcaaaagtgggtccgtgtggacttcaaagaaccagtctggttcaaagccggttcacaaatcttctccgaaggcggtttgga

SEQ ID NO: 156297 - DNA, 459 bp, Arabidopsis thaliana columbia
aagacacttagtaaagaaggtctgtgtgctgttctctccgaaattcctttttttggtctcgagggtttttcagactgtgaagagacatagctgtggcaaagatgagaggacctttaggagcagtgattggaagatatacttcaagtgatgggagtgctccaaatgatgggatcatcaagcacaatagaaagtgcagagatattacgtttctcatcatcttcattgccttttgggtttcaatgattgtcaattccagctttggtttcaaccaaggcaacccattaagactcacatatggattggactatgaagggaatgtgtgtggtagcaagcatcgtcaccgtgaccttactcaacttgagcttagatattggttaaaccctaaccaagtttatgaaagtggtttgaaagatggggaacttaaattggctaatgctagaactatttgtctcttggatt

SEQ ID NO: 156298 - DNA, 471 bp, Arabidopsis thaliana columbia
  unsure (1)..(471): unsure at all n locations
tcgaatntattataggtatcaactcgattcaacaanttagatttttggagtttntcgtattatgtaggcttgcgatttatcgtttggtaaccgtcggcanttctttcaggagcctgtctgggctaatgagacatggggttcatattggaactgggacccaaaagaaacttgggcatttattacttggactatattcgcaatttatttacatattaaaacaaataggaatgttaggggtataaattctgcaattgtggctttgatcggttttattttaatttggatatgctattttggcgtcaatcttttaggaataggtttacatagttatggttcatttacatcgaattaaagtaacaaataagaaggaatcgaaatctaaataaaaaaataaaaaaatagcatctatatctaacttcatataagttaagaaatctcatttagttttagtagtaaatcataaagaacctt

SEQ ID NO: 156299 - DNA, 454 bp, Arabidopsis thaliana columbia
atttgctagctgatccttcgtcatatgggctccatggcttcttgtagattgatgtgtgcgcgtctttccgatagctcgtgagttgtgtaatgttaagtaccgtcaccagaaaatctgctctttggtctaattcctctcctatcactttcattaaggttttgctgcagtctgatggccaatggttcatgtcttggatcggtgtcgtttgattgtaaaaattctttccttgttcgcctccccaatcctcgatcctggtcacggaggtagaaaagatgaaacctctgtattctagggctctgttacgagctaaatcttattctggtttctacttgtggatcatgtcaaggccacatttacttgaactattaaagataaaccggatccttctaaaccccattactcatttcatttaataccaaatccggactatattattctaagccatcttctccct

SEQ ID NO: 156300 - DNA, 451 bp, Arabidopsis thaliana columbia
tattaataaaaagcattttcttctttcgattgcttcagattcggcagctcactctttcctctcgagaagaaaccctagacatctgagtcgccaaaatgttcagatctatgctcgtccgatcttctgcctccgcgaagcaggcggttatccgccgtagcttctcctccggctccgtccccgagcgtaaagtcgccatccttggtgccgccggtggaattggtcagcctcttgctctcctcatgaagcttaatcctcttgtctcttccctctccctctacgatatcgctaacactcctggagttgctgctgatgttggtcacatcaacaccagatctgaggttgttggatacatgggcgatgataacttggccaaagctcttgaaggagctgatctcgttatcattccagctggtgtaccaaggaagcctggtatgacctgtgacgatctttt

SEQ ID NO: 156301 - DNA, 414 bp, Arabidopsis thaliana columbia
tcgaccacgcgtccggttcggagcttgtttttaaaaaaccaccaggtagttcgaatcggagctacccttccaaacctcaaaacatgtcgagggggtgggagggaccatctgaagaggcttaatgcgcctaagcattggatgcttgacaaacttgggggtcaatttcccccaaagccgttttctggcccaattaagtcaagggagtgccttcccctcgtccttatcatcaggaccgggtggaagtatcctcttcctaaccgggaagggatttaaatcttgatgcaaaggcatttccaagttgatgggaaagtcaggacggacaagacctaccctgctgtttcatggatgttgtgtttatcccaaacccaatgagaacttccttttctttattattccaagggccgtttccctttt

SEQ ID NO: 156302 - DNA, 278 bp, Arabidopsis thaliana columbia
tcagtcaccaaatctcttgttctgtttttctgtctctctgcttcagtgttcttcgcgggggttgccagtttttcaggtctggggcgagcttttttcattggtcctgaactcagggttagagcagcatttgcatatatacaaggtgttttggtgacaattgatagactctaatatgggttctggaaatttgattaaggcaattatttagattgaagaagtgtaaacaaggaacttgaaatgaaaattactagtgcttgttaaaccaaaaaaaggtttcc

SEQ ID NO: 156303 - DNA, 398 bp, Arabidopsis thaliana columbia
gtggactctgatgatcttcctcttaatgtttctcgtgaaattctccaagaaagcagaattgtaagaatcatgagaaagaggctcattagaaaaacctttgacatgatacaagaaatctctgagagtgaaaacaaagaggattacaagaaattctgggagaactttggtagattccttaaattgggttgtattgaagacaccggtaaccacaagcgtatcacaccgctacttagattcttcagttccaagaatgaagaggaattgacaagcttggatgattatatcgagaacatgggagagaaccaaaaggcgatctactacctcgtaactgatagtcttaaaagtgccaagtctgcccctttcttggggaaactaatccaaaaagattttgaggttct

SEQ ID NO: 156304 - DNA, 489 bp, Arabidopsis thaliana columbia
cggaacggaaggtccggcgccagagcgacgcgttcgagcgatatgaaccaatggaaccagtttaggttggtttggaagagccactcaagcaggttcgcgaagatcaggattactgtctcctccaaaaatgtcaagaaccttgagaaagtgtgcactgatttggttcgtggagctaaggacaagagacttagagtcaagggaccagtgagaatgcccactaaggttctcaagatcactacccgaaaagctccctgtggtgaaggaaccaatacatgggacagatttgaacttagggtgcacaaggcgagtgattgatctcttcagctctcctgatgtggtcaagcaaatcacatccatcaccattgaacctggtggtgaggttgaggtcaccatcgccgactcgtagatcgactctcttacttctgtttttgctctttctcttttaagaaacaaatgttttgttgtactgaaaactaagttctttgtttt

SEQ ID NO: 156305 - DNA, 403 bp, Arabidopsis thaliana columbia
  unsure (1)..(403): unsure at all n locations
ccggaangnaaggcccgacccaggcgtccggatccatccagagtatgaataggtggttctttattatggaatgccactccagaaagatcagacagagaaagggaacttaaggatcgagttcaatatcaagtttccagcgagattaactgcggaacagaaagctgggtttaagaagcttattgggtgatgattaaagcatctctgtcttgtgatgtgtggagattgggataaatttggtaatatacaatttatagggaattatctccctcttcattaaatttcgtgttgttaaacaagtcttctttttaaagaatagttttttcaagaaaaaaaagtggggattaaaattaaataaataaaaattatatattttattcctttttattataaaaaaaaatttttt

SEQ ID NO: 156306 - DNA, 370 bp, Arabidopsis thaliana columbia
gcgattctcactaaaaccctcgaacacatttcctttatctctttctctagatctagtccgtatggctactatcaccgcgggtaaggctagacagatcttcgacagtcgtggtaatcccaccgttgaggttgatatccacacgtcaaatggtattaaggttacagcagctgttccaagtggagcttccactggtatctatgaggctcttgagctgagggatggaggatctgactaccttggaaagggtgtatctaaggctgttggcaatgtgaacaacattatctttccagcactgatgggaggggacctaacttattatactgttattgacaacttcatggttcattaacttgactgaacctaaatctag

SEQ ID NO: 156307 - DNA, 484 bp, Arabidopsis thaliana columbia
  unsure (1)..(484): unsure at all n locations
cgnncaatggcttnncctctatgctctcttctcgctactttatggttgccnntctcccggctcaggcggactgagtggtcgctccttgtcagcgggacgttaagtcctccgcttgccttcccagcccacccgcaaggctaacaacgacattacttccatcacaagcaacggcggaagagttaactgcatgcaggtgtggcctccgattggaaagaagaagtttgagactctctcttaccttcctgaccttaccgattccgaattggctaaggaagttgactaccttatccgcaacaagtggattccttgtgttgaattcgagttggagcacggatttgtgtaccgtgagcacggtaactcacccggatactatgatggacggtactggacaatgtggaagcttcccttgttcggttgcaccgactccgctcaagtgttgaaggaagtggaagagtgcaagaaggagtaccccaatgccttcatt

SEQ ID NO: 156308 - DNA, 464 bp, Arabidopsis thaliana columbia
atgggggtctgcgcttatcttgccaatctcgtatacttacattgccatgatgggagctggaggactcaccgatgccgtgaaagattgcaattttgaacgctaactacatggcaaagcgtctggagagccactacccagttcttttccgtggtgtcaatggaacagtcgctcacgaattcatcattgacttgagaggattcaagaacactgctggaattgaaccagaggatgtggccaaacgattgatggattatggtttccatggaccgacaatgtcttggcctgtccctggaacgcttatgatcgagccaaccgaaagcgaaagcaaggctgagttagataggttctgtgatgctctcatctcgatcagggaagagatttcacagattgagaaaggaaacgcagatccaaacaacaacgttctgaagggtgctccacatcctccgtcattgctaatggcagat

SEQ ID NO: 156309 - DNA, 418 bp, Arabidopsis thaliana columbia
cacgcgcctctcgggtaattttcgcaggtgggtgtctctgttgatgatatgaaccaagaaaatggcttcaaattattgaacacaagaggtaagaaaaaagtgagataataaggaaattaaaacaataaattatcctttcggtgggattttttttgtcgtcttctattgtttttgtgagtgtgtgtgtttatataatggtaagagatctctgatctctcaagcttctctatagagagagtttcttctcatgctctttctaccaaggagaagattttctcgttaattttgtttgacttgcctcttcgaagcaacctgattctgtggtctgaatcttttcaagggaagagaagataagctaaacaagagaatggtgacaggttgtgttgatcttcatcaatctttcaaatctgcagattca

SEQ ID NO: 156310 - DNA, 454 bp, Arabidopsis thaliana columbia
gctggacattcagcacaactggagctcttgaggcagcttaccatcaggcatttggaaaaggaatttctctctctgagcaggagcttgtggattgtgctggagctttcaataactatggttgcaatggtggccttccttctcaagcctttgaatacatcaaatccaacggtggcctcgacacagagaaagcttatccttataccggtaaagatgaaacctgcaaattttcagctgaaaacgttggtgtacaagtcctcaactcagtcaacattactctgggtgctgaagatgaactgaagcatgcggttggattggtacggccagtaagcatagcatttgaggttatacactcgttccggctttacaagagtggagtttacactgatagtcactggtgaagtactccaatggatgtgaaccccgcggttttggcccgtggttatggagttgaaga

SEQ ID NO: 156311 - DNA, 458 bp, Arabidopsis thaliana columbia
  unsure (1)..(458): unsure at all n locations
tctcactctctctctcctttggattcttcagtgaggagaggaaatgtcggatcttcagacaccgcttgtgaggcccaagaggaagaagacttgggttgattactttgtcaagttcagatggatcattgtcatcttcatcgtccttccattctcagccacattctacttcctcatctacctcggggacatgtggtcagagtccaagtcctttgagaaacgtcagaaggaacacgacgagaatgtcaagaaagtcatcaaaaggcttaagggtagggatgcttccaaggacgggcttgtctgcactgctcgtaagccctggatcgctgttggaatgaggaacgttgactacaagagagcccggcattttgaggttgacttgngggagttccgtaacatccttgagatcaacaaggagaagatgactgctagagtggagcctcttgttaacatgggacaga

SEQ ID NO: 156312 - DNA, 405 bp, Arabidopsis thaliana columbia
gagatttctaagaagtctctccggttcagatctggtcatctaaagcccttcttccgagagctacgactttcttcctcaagggcgggtctgaattctctttttttccgaaaacagacaccacctgagtctgctgtctgaagcctcggcggagggagatgatgaagaatcttccggaggttggtaatggcggtggctcgggttttccggcggtcttctgtcggaaataagaagaataagtatcagagaatggactccgacgcggaggaatcgcagaatcatcgtgaagcataggctagaaacagtagaaccagaaaatacgttatggcttgtgccttttttgcatccttgaacaatgttcttctcggctacgatgttggggtaatgagcggtgcggtgttgttcata

SEQ ID NO: 156313 - DNA, 446 bp, Arabidopsis thaliana columbia
caatttataaacgtttcttctcattcgtcatctagtcccattctctgtccataacaatgggtatcaattgttctccattagggtttctaatttcactcttcttcattgttacttttcttgcaccacaagtcaaatctagggctttctttgtctttggtgactctctcgtcgacaatggaaacaacgactacctcgtcaccactgcccgtgccgacaattacccgtatggtatcgactacccgacccgtagacccaccggacgtttctctaacggccttaacattcccgacattatcagtgaggctataggcatgccgtcgactttgccgtaccttagcccgcatcttacccggagaaaatcttctagtcggtgctaattttgcctccgcaggaattggaatcctcaacgacactggaattcaattcgtaaacataattagaatttc

SEQ ID NO: 156314 - DNA, 446 bp, Arabidopsis thaliana columbia
gttgtatatgtaaatcctagatatgacaatatgcggaattcatccatgaaaatgaaaaacaggggggggttgctaaagggatgaataaatgggacgcataaccggatatgctaaaatgaaaatacgaaaaaaaaggctaatgagatcgaaataatgaatcataactaaagttccgtttcgaattcgctagataaaacaaaggcttgcctattcctattatgataaaaaaataaaagactttccgcaaaaaatttttttattcatatattttttattttaaaactaggtttcagttagttgagcttgaaaatgactattccttcattgaatgaataaaaaattgaattccacatccgcttgggtgggaccaacgaaatcgagtgcttactcccactttttattgaattaaccgattaaattgctatcgaagattttttctgtattcg

SEQ ID NO: 156315 - DNA, 451 bp, Arabidopsis thaliana columbia
cattttcttccgatcaatacagagagatcagtttctgagagagaagaagatgtctatagaggaagaaaacgttccaacgacgtgttgactcaggagctgccgatacaacggtgaaatctccggagaagaaaccggcggcgaaaggtggtaaatctaagaagacgacgacggctaaagcaacgaagaagcctgtgaaagctgctgctccaacgaagaagaaaacaacttcctctcaccctacctatgaagagatgattaaagatgcgattgtaacgttgaaggagagaactggatctagtcaatacgcgattcagaaattcatagaggagaaacataaatcactgcctcctacttttaggaagcttttgcttgtgaatctcaagagacttgttgcttctgagaaattggttaaagtcaaagcttcttttaagattccttctgctagatccgc

SEQ ID NO: 156316 - DNA, 420 bp, Arabidopsis thaliana columbia
actagatcgatctaatcttttcagctctctccatcgtcggcgtatctgtgactctcgtgagcatcgcctgaaaaaaatttgagataatggccagaaagttcttcgtcggaggcaactggaaatgtaacggaactgctgaggaggtgaagaagattgtgaacactcttaatgaagctcaggttccttcacaggatgttgtagaggttgtggttagccctccatatgtttttcttcccctggttaagagcacattgaggtctgacttttttgttgcggcacaaaactgttgggttaagaaaggaggtgctttcactggtgaagtgagtgcggagatgcttgtgaacttggatattccatgggttatccttggtcactctgaaaggagggcaatccttaatgaatcaagcgagttcgtcggag

SEQ ID NO: 156317 - DNA, 466 bp, Arabidopsis thaliana columbia
tctcaaaggaccctttttttacaattatacccttctccttcccagttctctcatggtccgcctaacatttctgctggagagctgagaaatcaccatgggagtcgctgttcttcatcctcatgattctataatcaatcatttctccacaaacacgtcccctcctctccgtcataaaaaaccgatcaccaatcgccgtcgccggagtccgtcaagtcaccaatcccagatctctcatcctcctccgtctcctcataaccacaccaatcatgtacgaattctgaagcgtggcgaagatatcaacgttaagataccgattgaaaaaccagatctgaaatctaatcgtcagatcggatcagatccgatgaaaatttcgactccgatcagaatttcaaatcggaaatccatgccggctttgttttacgctggtccagtcacatcaacatctccgccgccgagtgaagtccct

SEQ ID NO: 156318 - DNA, 467 bp, Arabidopsis thaliana columbia
gcaatcggtcaggttactcaggtacgaccgacgttaccaatggcgacgacgatgtcaaatccgccgtcacagtcacaaatcgttaacgcgccaattaggcatccgataccggaatctccaaaagctagaggtccaaggcctaatgtggaaggtagagatggaacccctcaaaagaagaagcagtgtaactgtaaacactcacgctgcttgaaattgtactgtgaatgctttgcatccggaacatattgtgacggttgtaactgtgtaaattgtttcaacaatgttgataatgaacctgctagacgagaagctgtggaagcaactctggagcggaatccatttgcgttcaggcctaaaattgctagcagtccacatggtgggcgggataaaagggaggatatcggtgaagttgtgttgttagggaaacataacaaaggatgccactgcaaaaaatcaggatgccttaa

SEQ ID NO: 156319 - DNA, 460 bp, Arabidopsis thaliana columbia
tctgaggccaccagaaatggctcccataccatgtttaggtggcggaccaccagaaatgggtcccgtaccatttcaaggtggcggggcacctcccaattataatggactacctcctcctcctccttatcatacaaatccagctgctccaccaagtggtaatttcaacaatccaaacctcaacaatccgaatcccagtgctgaatctcctgaaagcaatgagtagagttagtaggtctgaatgaatcatttttctcctgccaaaaaattctcagagctcttgtttaacacaatatcctaccttttctactccaatttttatgaagaggtttagaactaacgtatgtgaaatgagttttatgtgttagatgattgtatccattagagtcatgaaaaggaaaatctgaggtttcttatctctaaaacaaactggtttatgaaagatttattaaaaggcttcatt

SEQ ID NO: 156320 - DNA, 409 bp, Arabidopsis thaliana columbia
atggactccaaaacaacttttctcacatttctcctctgtattttcattttctctcatttggcaccctcaacttccaaatctgggacagaaaagcccttatctttctcaccgtcggcgagtttgccgactctcacggcggagagacttatcaaaggattcaatttgatgcctacacgcgacgtcaatgtcatcgatgaagaaagttctgaggctccgagactggtcgagagagcattcgatttgcccgccggcggttgaccgtcgtggcttccggggttctctcgcggttcaagaatttggtcaccatgctggttactacaaactccctaactcaaaagcagcaaagatgttctacttttttttcgagtcaaggacgaacaaagccgatccagtggtgatttggctaacc

SEQ ID NO: 156321 - DNA, 462 bp, Arabidopsis thaliana columbia
  unsure (1)..(462): unsure at all n locations
aatctacccaaatttttgattttgcgataagggtttttcttaatttcgtctacggatatagaaaatgtcttccatcaattggtcctcatcatctccttccaccatctctctttcccgctcaagactaagccaaagctctactacattactccatggactacatcgtgttactttaccatctaaccatccattgtcaaccttttccattaaaaccaatactggaaaagttaaggctgcagtgatctctagagaagatgatctgctctcattcaccaacggaaacactcctctctcaaatgggtctctcattgatgatcggaccgaagagccattagaggctgattcggtttcacttggaacacttgctgctgattctgctcctgcaccagccaatgngtttgttgctgaagatgatgactntgagttggatttaccaactcctggtttctcttctatccctga

SEQ ID NO: 156322 - DNA, 470 bp, Arabidopsis thaliana columbia
cagaagagaaaaccctagctagaaacgactttccaaagatgacgcagaagagcaatcaggggaagggccaacagaagaggaggacgtattgctcctaatcgccatggcaaatccattcaaactcgcaaagggaagagaaatgtgaaaccaacaaagatgacgaaagagatggacactgatcgggagcttacgaaattcataaaccattgcaatgaagtgaaagcaactaatgcagcttgtaaagaaggtggtcaactcaatatcatcaaagctgaatctcaacctgagccatccaagaaatccgccaaatagacaacaaacccttctttttttgtttccagtgtttcaacttttgtagctcttacacaatccaatcggttttgtctttaaatcaatcatttataatgctattgttaccaatttcgtcacttacaaacacgtttattgttactttacgagagattgaactt

SEQ ID NO: 156323 - DNA, 434 bp, Arabidopsis thaliana columbia
gccgcatcatccttctcccttgtgcgatatcgtttgcgtgagatttgtctgaaaagtagggaaccatgggtaaagagaaggggcacatcaacattgtggtcattggccacgtcgattctggaaagtcgacaaccactggacacttgatctacaagttgggtggtattgacaagcgtgtgatcgagaggttcgagaaggaggctgctgagatgaacaagaggtccttcaagtacgcatgggtgttggacaaacttaaggctgagcgtgagcgtggtatcaccattgacattgctctctggaagttcgagaccaccaagtactactgcactgtcattgatgctcctggtcatcgtgatttcatcaagaacatgatcactggtacctcccaggctgattgtgctgtccttatcattgactccaccactggtggtttt

SEQ ID NO: 156324 - DNA, 454 bp, Arabidopsis thaliana columbia
cacaaatcctaaacgagtaggagctatggctgcaccgattgttgatgcggagtacttgggggagatcactaaggctggccgggagctccgttctctcatcgcgaacaagaactgtgctcctatcatgctccgattggcatggcacgatgctggaacctatgatgctcaatcgaagaccggtggacctaatggctctatcaggaacgaagaagagcacactcatggtgccaacagtggtttgaagatcgctctcgatctctgtgagggcgtgaaagctaagcatcccaaaatcacatacgcagacctgtatcagcttgctggtgtggtagcagttgaggttactggtggacctgacatcgtgttcgttcccgggagaaaggattcaaatgtctgccccaaggaaggaagacttcctgatgccaaacaaggtttccaacatctcagagatgtcttc

SEQ ID NO: 156325 - DNA, 465 bp, Arabidopsis thaliana columbia
  unsure (1)..(465): unsure at all n locations
cagtttcgatttcgaatcaaatatgaagctgaaagagtttttctgaatctttgtctttggatccgttatctgaattgtattcgccatggaagctgtgcttctctgctcgaagcttgttcctagagcggcgtcgttggaagggaaccaaaagttttcgttcaggcatttgaacaaacaccttaagtgcaattcccttcgtgctgattccagagacactccgttgctccgaggttttgaagcgataaagagtccgtctatctggagttgtgcgccgttcccagtgagaaaaggttcatgggttccacccagatgctcgatttctagctcgactgtttccgattccgataaccctttccttagccaatttcgaaccttctcttttgggtcaatggtgaagaaagttcgtgagttgaaagtgaagcccatggatgtntggaagttaactcttttgctatcgattttgac

SEQ ID NO: 156326 - DNA, 459 bp, Arabidopsis thaliana columbia
gtgtctgagagactgtagtcactgtactctacagtagcactacttactcaacttttgaagagagaaaacagaaatgggaagtgtagatccttcaagactatcattggtcttgtttgcgagactgtccggtttagtagtcgcagtttcggttctgtactgggctctcttcctgcctaatctaggactcagctactctactcttcatcctctgctgatggtgattggcttcattcttgtaagtggagaagatggttgcctggttcaaggaaaacaaagaaagctgttcatttatggctacaaggaatggcattggcctctgcagtgtttgggatttggacaaagttccattaccaacgtggagttttcgccaatttctacagtctccattcttggatgggtttgctctctgtttctctcttcgctgcccagtgggtgactgggttcatgagcttctggcat

SEQ ID NO: 156327 - DNA, 446 bp, Arabidopsis thaliana columbia
taaaaaccaggtggaggctttaaaacgagagggagagagcaaaaatggcgacgtcggaaacgtacgtgacggaagttccgctaaagggatcggccgagaaatactacaagaggtggaagaacgagaaccatgtcttccctgatgctatcggccaccacatccaaaatgttaccgttcacgaaggcgaacatgactctcacgggtctatcaggagttggaactacacatgggatggaaaggaggaggtgttcaaggagagaagagagatagacgatgagaccaaaacgttgacgttaagaggacttgagggtcacgtgatggagcagctcaaagtgtacgacgtcgtctaccaattcattcccaaatctgaggatacctgcatcggcaaaatcactttaatatgggagaagcgcaacgatgattccccagaaccaaacgggtacatg

SEQ ID NO: 156328 - DNA, 456 bp, Arabidopsis thaliana columbia; identical to SEQ ID NO: 131195

SEQ ID NO: 156329 - DNA, 473 bp, Arabidopsis thaliana columbia
aatctccagaaaaggggagaagcaaaaatggtttctctgaagctccagaagcggctcgccgcatcagtgatgaagtgcgggaagggcaaagtttggctcgatcccaacgaaagctccgacatctccatggccaattcccgccaaaacatcaggaagcttgtgaaggatggtttcatcatcaggaagccaaccaagattcactctcgttccagagctcgcaaaatgaagattgccaagatgaagggtcgtcactctggatacggtaagaggaagggtacccgtgaagctaggttgccaacaaaggtactgtggatgcgtaggatgcgtgttcttaggcgtctgttgaagaaatacagagagacgaagaagattgacaagcacatgtaccatgacatgtacatgcgtgttaagggtaatgtgttcaagaacaagcgtgtcttgatggagagtatccacaagtcaaaggctgagaa

SEQ ID NO: 156330 - DNA, 452 bp, Arabidopsis thaliana columbia
atctgatccataatctaaaaaattgagctttcatcagtaaccgaagcaatggcacggaggtctggaaattgcatgagatgtctagtgatattctcggtggtttcagcattattagtgtgtggacctgctctttactggaaattgaataagggtttcgttggatctgctcgtagcaccaactccatttgtcctccttgtgtctgcgattttcctcctcctttgtctctcctccagattgctcccgggcttgcaaacctctctattacaggttgtggcagcgatgatccagagctcaaagaggagatggagaagccgtttgtggatcttctcacagaagagctgaagcttcaagaagcagtggcagacgagcatagtcgtcatatgaatgttacacttgccgaagctaaaagagttgcttcacagtaccaaaaggaggctgagaagtgtaacgc

SEQ ID NO: 156331 - DNA, 456 bp, Arabidopsis thaliana columbia
tctcacatcgtgctacttctagggtttggctaatttagattcaacatctcctttaaaattctctggtcttttgtattcctagtctgtaacaatttaagaagaaatggattcgaattcatggatcaattgtccccctgtgttttcatcatcgccttcttcacgccgttaccaatctcgatcagatttgtatttgggagatgttgaaggagaagacgatttgaaagctgagtttatgtgtcctttttgtgcagatgagtttgatattgttggtctttggtgtcatattgatgtgaatcatcctgatgaagctaacaatggggtttgttctttgggatttggacaaagttccattaccaacgtggagttttcgccaatttctacagtctccattcttggatgggtttgctctctgtttctctcttcgctgcccagtgggtgactgggttcatgagcttc

SEQ ID NO: 156332 - DNA, 456 bp, Arabidopsis thaliana columbia
gttctgtaacctaagcgataatcacttagctactccaagtttcttcttaatttctctcacgctagtagttctaagctgtagaaatggcaacagcatcgttcaacatgcaatcagtcttcgccggtggattaaccactcgcaagatcaacaccaacaagcttttctccgccggtagcttccctaacctcaagaggaattatccggtgggagtgagatgcatggctgagggaggacccacgaatgaagactcttcaccagcaccatctacctcggccgctcagccgttgccgaagtcaccatctcctcctcctcctatgaaacctaaggtgagcacaaagtttagcgacttgctagcgtttagcggtccagcaccagagaggattaacggacgtttagcgatggttggattcgttgcggcgttggctgtcgagctatccaagggtgaaaacgttttag

SEQ ID NO: 156333 - DNA, 428 bp, Arabidopsis thaliana columbia
  unsure (1)..(428): unsure at all n locations
ttcttgtctgcagtcagcttcctctttatggaatccattccaccaccggtgcggatccaggctattggatgcgtgggattgttgcgtccaaccgtggaactgtcatggagctcggtattactcctattgttacatctggacttgtgatgcaactcttggctggttccaagattattgaggttgacaacaatgttcgtgaggatcgtgccctcttgaatggtgctcagaagcttctaggtattctgattgccattggtgaggctgttgcatatgttctttctggaatgtatggtcccgttggacagcttggtgttggaaatgccattctgatcatacttcagcttttttttgctggaatcattgttatctgccttgatntactccttcaaaaaggatatggtgtcggatcaggaaatttccttttcatt

SEQ ID NO: 156334 - DNA, 330 bp, Arabidopsis thaliana columbia
ctcgttttgataaaaatctctgaatctctccaagctctcttctcatcaaaccatggatccttacaagtatcgtccagctaggtcttacaactctcccttcttcaccaccaactctggtgctcctgtatggaacaacaactcctccatgaccgttggacccagaggtcctatccttcttgaggattaccatctcgttgagaagcttgccaatttcgacagggaacggattccagagcgtgtggttcatgccagaggagccagtgctaaaggtttctttgaggtcactcatgatatctctaacctcacttgtgctgactttcttcgagcttc

SEQ ID NO: 156335 - DNA, 378 bp, Arabidopsis thaliana columbia
gtccgcggccgcgtgggctggttcatcaatggcaagtctttgtttccaatctccttccaaacccatttcctatttccaacccaaatccaatccatcgccaccgttattcgccaaagtctccgtctttcgatgcagagcttccgtacaaaccctcgtcgccgttgagccggagccagttttcgtctccgtcaagacttttgcgccagccaccgtcgctaatttgggaccagggtttgatttcttaggatgtgccgtcgatggtctcggagaccatgtgactctccgtgtagatccctctgtacgagccggtgaggtctcaatctcggagatcaccggaaccacaacaaaactcagcacgaaccctcttcggaactgcgc

SEQ ID NO: 156336 - DNA, 407 bp, Arabidopsis thaliana columbia
gtggttccttgtgaccatggttactccacttttaatctcatcaaatcctctcacctcccgccattgttaccgtctccacttatcttctacttcattcaagggaaatgtaagtgttttggtggcaaacccaagtcagattctatctctgaaactcaaccaaacccttaaaacgagaaaccaacagcaatttgcgagaccccttgttgtggttagccaaacggcggctacgtcgtcggcagttgtagctccggagagattccgtttggataatcttggaccacagccaggttcgaggaagaagcagaagagaaaaggtagaggtatctctgcaggacaaggagcaagttgtggttttggtatgagaggtcagaaatcaagatcgggtcctgggattatgagaggctttg

SEQ ID NO: 156337 - DNA, 385 bp, Arabidopsis thaliana columbia
  unsure (1)..(385): unsure at all n locations
tccgttttaatttttctctgatttctcgacctctccgtccaactatgtctgccttcacaagccaaattcgccattgagttgatcgccaacgctgcctacatcggcacacctggaaaaggtattttggctgctgatgagtccactggtaccattggaaagcgtcttgcgagcatcaacgtcgagaacgttgagaccaacagacgtaacctncgtgagcttctcttcaccgcccctggtgctcttcatgcctcagaggtgtcatccttttcgaagagactctgtaccaaaagagttccgatggtaagcttttcgttgatatcttgaaggaaggaggagttcttcccggtatcaaggttgacaagggtaccgttgagctagctggaac

SEQ ID NO: 156338 - DNA, 455 bp, Arabidopsis thaliana columbia
cggacgcgtgggttcttgctcacaccaacatctctctaagcttcttcttctaccaatctaattcctctcttcagcttcttgtgttgtgacgcatactcgtcgcagtcttgagatatggccgccgcagtttccaccgtcggtgccatcaacagagctccgttgagcttgaacgggtcaggatcaggagctgtatcagccccagcttcaaccttcttgggaaagaaagttgtaactgtgtcgagattcgcacagagcaacaagaagagcaacggatcattcaaggtgttggctgtgaaagaagacaaacaaaccgatggagacagatggagaggtcttgcctacgacacttctgatgatcaacaagacatcaccagaggcaagggtatggttgactctgtcttccaagctcctatgggaaccggaactcaccacgctgtccttagctcatacgaata

SEQ ID NO: 156339 - DNA, 458 bp, Arabidopsis thaliana columbia
caaatctcagatctagctcaaccatggcgttgctcgtcgagaagacctcaagtggccgtgaatacaaggtcaaagacatgtctcaagccgatttcggtcgtctcgaactcgagctcgccgaagttgagatgcctggactcatggcttgtcgtaccgaattcggaccttctcagccattcaaaggcgctagaatcaccggatctcttcacatgaccatccaaaccgccgtactcatcgaaaccctaactgctctcggtgctgaagtcagatggtgttcctgcaacatcttttccactcaagaccacgccgccgcagccatcgctcgtgactccgccgctgttttcgcctggaaaggtgagactcttcaggagtactggtggtgtaccgagcgtgctctagattggggtccaggtggtggtcctgatctgattgttgatgatgggggtgacgctactttt

SEQ ID NO: 156340 - DNA, 337 bp, Arabidopsis thaliana columbia
gaccacgcgtccggtactcgtgcatatttgcagagcttgtttttctttttccctatacaactctcatgggggatcgatacagatggcaggttcatcagcttgtcttgtgggaaatggtttgtcagtgaacacatcaaccaaacagaggttaagtaaacattttttcggcagacagacaagcttttctttagtgattaggacatctaaggttaatgtagtgaatgcttctttggatgggaagaagaagcaagaaggaagaagaaattttctcaaaaatctgttatgaaatgctggggtcggtttggttgctagcgtgaaagcaaatgctgattaacaa

SEQ ID NO: 156341 - DNA, 439 bp, Arabidopsis thaliana columbia
tgccaatctcatcttcaacctctctctaactctcgttttcgattctacaatggctgacaagaagattaggatcggaatcaacggattcggaagaattggtcgtttggttgctagagttgttctccagagggacgatgttgagctcgtcgctgtcaacgaccccttcatcactactgagtacatgacctacatgttcaagtacgacagtgttcacggtcaatggaaacacaatgaactcaagatcaaggatgagaagacccttctcttcggtgagaagccagtcactgttttcggcatcaggaaccctgaggatatcccatgggccgaggctggagctgactacgttgttgagtctactggtgtcttcactgacaaagacaaggctgcagctcacttgaagggtggtgccaagaagggtgttatctctgcccccagcaaa

SEQ ID NO: 156342 - DNA, 374 bp, Arabidopsis thaliana columbia
acaagactcaaatagtttctatttaattactaaaaagaaaaatgggtcgtggttacaatttgctattcgttctagtaacgtttttagtattggttgcagctgtaaccgcacaagggaaccgtggctcaaacagcggtggtggtcgaagaccacatgttgggttttatgggaatagatgccgaaacgtagagtctattgtgagatctgtagttcagtctcatgtccggtctattccggctaatgcacctggaattttgcgaatgcatttccacgattgctttgtccatggctgcgatggctcggttctcctcgctggttacaccttaaaaagaaaccgaatttccaaccggtcattgagagggttcgattttatt

SEQ ID NO: 156343 - DNA, 335 bp, Arabidopsis thaliana columbia
atttaatcgaaaatggcggaaagaggaggagaaggcggcgcagagcgtggcggtgaccgtggtgacttcggacgtggattcggcggtggacgtggaggtggccgtggccgcgatcgtggtccaagaggccgtggaagacgtggaggccgcgcctcggaagaaacgaaatgggtttcagtgaccaaactaggtcgtctagtggctgacaataaaataacgaagctagagcagatctatctccattctctcccagtaaaggagtaccaaatcatagatcattttgttggtcctaacgttaaagacgaggttttgaaaaacattgcctgttcagaaac

SEQ ID NO: 156344 - DNA, 448 bp, Arabidopsis thaliana columbia
attctctcttcttagaaccatcaccgattcgaacagatctaataaatcgtttttttcaccagattttttttcgccggagtttgttttgatccattctgttatggcggaagaacacagacttcaagaaccacgattatgtgctaacaattgtggcttcttcggaagcacagctacacaaaatctctgttccaaatgttttcgagatcttcaacatcaagaacaaaactcttccaccgccaaacatgctcttacccaatccttagccgccgttggcgctgctgcgtcttcctccgtgtcgccaccgccttcgcctccagctgattcgaaagaaatcgttgaagcgaaatcagagaaacgagcggcggctgaaccggaggaggcggatggtccgccgcaagatccgtagcggtgttgacttgttcgcggcgcgtgggaattacgggggttc

SEQ ID NO: 156345 - DNA, 460 bp, Arabidopsis thaliana columbia
atgggcacgtgtgaccccaaccggaacacctaacatcatctacacatgtgtgtctcctcgaggctattctgcataaaggtcttctaaaagaacatcaggtgcagattctcccacaaaggcaacactctggtgcccgtcaagtcagcaatcatcggctgcgaattattcttctcgcaaccgcacactcccagcttgtacaccgcggatggatggtaaagaattcttccggcaagccaggagccgattatcctatgaacaattcagttccttcttagctaacatcaaagagctcaacgcccagaagcaaacccgagaggaaactctgaggaaagcagatgagatatttggggaagagaacaaagatctttatttatctttccaaggtctccttaacagaaacatgcgttaaactttcataagccggtatcttgaatctgggccaatgtgataggatggatat

SEQ ID NO: 156346 - DNA, 461 bp, Arabidopsis thaliana columbia
ctcatcttcacaggaaacaatggtgtttgtgaagtcctccaaatcgaatgcttacttcaagaggtaccaagtgaagttcaggagaaggagagatgggaagactgattacagggcaaggatccgtcttatcaatcaagacaagaacaagtacaacacccctaagtaccgttttgttgttcgatttaccaacaaagacattgtggcacagattgtatctgcaagcatagctggtgacattgttaaagcttcggcttacgcacatgagcttcctcagtatggactcactgttggtcttaccaactatgctgcagcttactgtactggccttcttttggctcgtcgtgttctgaaaatgctggaaatggatgatgagtacgagggaaacgtagaggccactggagaggacttttctgtggaaccaactgattccagaagacctttccgtgctcttcttgatgttg

SEQ ID NO: 156347 - DNA, 171 bp, Arabidopsis thaliana columbia
cacaaaaataaaatagacttaatatttatttactttctaatcacacggagtctctggggtgaagtatggacgtacgtgtcatcttcttcctccatcataagaccttaacttaaacgggagaaaccaaacgaaactccgatcttctccgttctcgtgtattccatatctggc

SEQ ID NO: 156348 - DNA, 438 bp, Arabidopsis thaliana columbia
gtgcgctcttgttatctctgctttgaagtgaaatcagctttggctatggcttcttcgacagctttgtctctctcatggagctcctctccttgttggtcacacagcttcaatggcggtgcaaatgaaaccctaaaagtatctgagcgaaggttcaattttgaagttgtttcccagaagaaagctaagaaacttcgcaaggtaattttgaaagaggatgtgacggatttgggtaagcaagggcaattacttgatgtgaaagctggatttttcagaaacttcctcttgcctactggaaaggctcagcttatgactccacttctgctcaaggaattgaagatggaagacgaacggattgaggcagagaagcaaagggtgaaagaagaggcacaacaactggcgatggtattccaaaccgttggtgctttcaagggtaaacgc

SEQ ID NO: 156349 - DNA, 454 bp, Arabidopsis thaliana columbia
gtcgttttcctctgagagcaggtctaatggcgaaccagtttcttcctcttctcattcgttttcttccaatgcctcttcttcactaccgttgctgtttctctggaaacgatgccgttctgtagtttctttcaggaaatgcagaaactggtttctctacaaacttcttcttcttcttctccttcgtttttcttctcctaaatctgccgatttgaatctcgcaacgacgccgttttagattttatagacgaaattaagaaggaggtgaatttcagagtttgtcaatggagaattacgaggttcttgagcaaattggaaaaggttcctttgggtcagctcttcttgtgagacataaacatgagaagaaactgtatgttttgaagaaaatccggcttgctcggcagactggtaggacaagaagatctgctcatcaagagatggagttgatttcaaagat

SEQ ID NO: 156350 - DNA, 441 bp, Arabidopsis thaliana columbia
agtttttgtgcggctgccattttcgattttcaaaggttttgagctttgaaaaatggtgggaatcagtgtgcttaacgatgctcttaagagtatgtacaatgctgagaagagagggaagaggcaagtcatgatcaggccttcctctaaagtgatcatcaagtttcttatcgtcatgcagaaacacggttacattggtgagtttgagtacgttgatgaccacaggtctggaaagatcgtggtcgagcttaatggaagacttaacaaatgtggagtcatcagtcctcgtttcgatgttggagttaaggagattgaaggctggaccgctcgtcttcttccttccagacagtttgggtacattgttcttacgacctcggctggtattatggaccacgaagaagccaggagaaagaatgttggtggcaaggttcttggcttctttta

SEQ ID NO: 156351 - DNA, 417 bp, Arabidopsis thaliana columbia
gaaatatttgtctgttacagatggtttatttaagcgatacaacgattcaaaaaaagaggggggattcacacaattgattggtcttccaacattctacaacgcgaacgaagggtaccttgtgcaggacacagcttcttttgttgcttagatcttcatcgttaaccctacagaaaaacaagagaaagtcacattcatatcaaaccctccagacaatgttttcacttggaagatacttcgtttttttaccttggaagataaattctattactcttatgattttcttgtttgagaccgatactggagactaggatataacccgtaaggatctggtggaggaagaccacatgcacttccaatctttctatatgctcaaggccattatgcaaacgcagatgttacaaacacttgtggagcggt

SEQ ID NO: 156352 - DNA, 448 bp, Arabidopsis thaliana columbia
aagaatcttccgttgtctacgtttctggtgcttcccccgaaatccccatttctcaggcttctccacgaatgggagctcaatccccaggacctcccattgttaaagtggtgcttcgccaggacttgaacaagaagattctaattgctcttatagtctcatcatctctgctctgtgtcacagtcatgttccttgtgtatctcttgctatggaggtacaggaatatgaagaacagcttcaccggtatcaaacgcaaatccgattcggtgaagagtgtaaccacgaaaccgactgtacacaagattgattctgtgaggaaaggaaccatccctgtgtatgaatatcaattgctggaatctgcaacaaacaagtttagtgatagtaatgtgttgagccgaggtggtcgtggatgcctttacagagcttgtctcgatgaaaaatcctcagtcac

SEQ ID NO: 156353 - DNA, 388 bp, Arabidopsis thaliana columbia
  unsure (1)..(388): unsure at all n locations
gtccgcaggcttacannaagctgtcaaaggaccaatctgactacgtcagcattccaattgagggaccatacaagcctcctcactacaggtactgagagagagagagagtcgacaaagcggttcaggttcggatctacttgtggttttgtgttgggttgtggtgggagagtggaacagtttgagatattggtcttctgatgaagttgaccaaatatcaggattaataagggttattggcttttgaaggttgtgcttgttttctccatttttcatgaaacttaaattagtttttggtttagattccctcttgattttattttgagaggtacgtttagcgtggtactcttcaaacaaatgagaaaccaaaaaacaaggggaaacttgtttt

SEQ ID NO: 156354 - DNA, 463 bp, Arabidopsis thaliana columbia
ctccatctcatcatcctcctccatttctctcccattttttcttctgtgtatctgcgggagagagtgaaatagagagatggaagctgtgattcaaaccagagggcttctctctttacccaccaaacccatcggagtgagaagccaacttcagccttcccatggcttaaagcagagacttttcgccgcgaagccaagaaatctacatgggttgtctctatcctttaacgggcacaagaaatttcaaacctttgagccaaccctgcatgggatttcgatttcccacaaagagagaagcaccgagttcatatgcaaggcggaggccgcggctgctggcgacggagctgtcttcggcgaaggcgattccgcagctgttgtagcctcgccgaagattttcggtggggaggttgcaaccttgaaaaagattatccctttaggatggatgttcttttgtattcttttcaat

SEQ ID NO: 156355 - DNA, 419 bp, Arabidopsis thaliana columbia
cacgcgtccgtaatatgagaaaaatggcgtgtttcgcatctcttttagcctctgttgttgactctcctccgtgggattaattaatttgtggtggctgtatctgcaccaaacttctatgagagctttgatatcactcggggtaatggtcgagccaacatattcgagaatggacagtttttcacttgtactcttgacaaggtctccgtctcaggttttcaatccaagaatgagttctctgtttggtatgaacgacatgaatctcaagctagtctctagaaactctgcttgcaccgtcaccgactactacctatcgtcaaaaggcacggcatgggatgagattgacttcaagtttttgggaaatcgcacaggacatccttacactattcacaccaatgtgttcaccggatgtaaatgctacc

SEQ ID NO: 156356 - DNA, 376 bp, Arabidopsis thaliana columbia
gcgtccgacacttaaaacaaaacaaatcaaaacatattctttgcacacataaagagaaaccaagttttgttaaaaatggtactagaatcgtgtccttctctacctcctcatgtgatgctcgtatcttttccagggcaaggccactttaatccactttttcgtcttggtaagctcttagctttaaagggtttgctcataaccttcgtcaccactgagacatggggcaaaaagatgcgaatctccaacaaaatccatgaccgtgtcctcaaaccggttggtaaaggctatctccggaatgatttctttgacgacggtctttcttaagactactaaactatcagtaccaacttatccattctccgtccacatttagagc

SEQ ID NO: 156357 - DNA, 369 bp, Arabidopsis thaliana columbia
aagaactactttggcattgcagattttatagagctgtgatttgtgctatcttaaaaacggacaagttctatgttgtggcggatgagatgagggatgctatctgggttgatgaattttctgaatgcctgtctctggccacggtcagatcagcaggctcgttctgcctcagattctggtggccgccaagagggtttgctctggttcagagactccggccagcacgtctttggtgacttcttcatggccgtcgttcaagccaacagcttgctagaggaccagagccagctcgagtctggctctcttagctcccacgactctggtccctttggcacctttgttggcgtctactacggccacggggggcctgag

SEQ ID NO: 156358 - DNA, 293 bp, Arabidopsis thaliana columbia
atctcatcttactcacaagagagagtttttgtgagaaaaaggctctgctttctacggtggttactattatacacttggcaacatggctatctttgtagataatcgccaatacgctcgtctcgagccaggtttgaacggtgtggtttgttcttacaaaccttccgtttcaggccggttcgatttccctaaggcgcaccagaaccaaaccaccaaccaaaccgtgttcttgaaaccagccaaggttcatgacgatgacgaagacgttgttgagcgaagacttgaacgagacacac

SEQ ID NO: 156359 - DNA, 442 bp, Arabidopsis thaliana columbia
ctctgcgccacagaattgtgcgatttacgaaaatctctgaaacctccgatcgttaacggcgaccgccgattttcccggtaaaaatgaacgacggagatgtatcgaggcagatccagcagatggtgagatttatccgccaagaagcggaagagaaagcaaacgagatctcggtttctgctgaagaagaattcaacattgagaaactccagcttgttgaggcggagaagaagaagatcaggcaagattatgagaagaaggagaagcaagctgatgttcgcaagaagattgattactctatgcagctaaatgcatcaaggatcaaagttcttcaagcgcaagacgatattgtcaatgccatgaaagaccaagcagctaaggatcttctgaacgttagtcgcgatgagtatgcctacaaacagctcctcaaggatctaattgttca

SEQ ID NO: 156360 - DNA, 438 bp, Arabidopsis thaliana columbia
ccggcgcgagcccacgcgtccggtcgctagtctctctcgtcctctctctttgttttcgtagcttctgcagcacgatctctgcttggggccttcttctctccctcagatgatctatggcactagcaggtaagctatgtccttcccctggtgcttgaggttgttggtcgttgcccttgtggagcaatactatcatattcttcaccaatcttccggtttagttcatcggttttatcaagattcgagctttttaacccgacctgatgttaccggtgctgtgactactgtcacaactatgcaagcgatcaacgacaagattctgtcgtttgaaatatgaagactacacggctgatatagaaactgctgatgctcatgagtctcatgagagaggttgtattgtgctggttacaggacgcttaaccgggaacgataatgttagga

SEQ ID NO: 156361 - DNA, 425 bp, Arabidopsis thaliana columbia
aaaacttgttttgcctttagcatctccgagtaaggaatccaggtccaaagcctcttctgttcctcctcctcgcttccttctcacgcaaccttggatccaccgcagctatgaagatcaccgccttgctcgttctcaagtgcgctcccgaagcttctgatcccgtcatcctctccaacgcttcggacgtctctcacttcggttatttccagcgatctagcgtcaaggagttcgtcgtctttgtcggtcgcactgtcgctagccgaacccctccttcccaacgccagtctgttcaacacgaagagtacaaggttcacgcttacaatagaaatggcctttgcgcggtgggtttcatggacgatcattaccctgttcgaagtgctttctctcttctcaatcaggtcctagatgagtaccagaagagtttt

SEQ ID NO: 156362 - DNA, 399 bp, Arabidopsis thaliana columbia
atttgaatctctcttctctctctctatcaaatatgcaaaacccttcaacggtaacccaggaatcagccgcaccggtctttgatttcttcccacggctcagaggtttaacctctagaaatcgatccccgtgttcgaattcagatgggtatgctctctcatcgtccaatgccttgtacttcaatggtttccggactttaccctcccgaaggatgggaaaaaccctagcttccttgagcttcaacactaagagcagtgctggttcgagtctccgtaggtttatcagcgatttcaatagctttattaggtttcactgcgataaagtggttccggagagctttgcctccgtcggaggagtcggattatcgagtgatgagaatgggattagggaaaatgggactg

SEQ ID NO: 156363 - DNA, 257 bp, Arabidopsis thaliana columbia
gcgtccgatttgaatctctcttttttctctctattatattttcacaaccctacaacgattacccaggagggggtcttaccggtcttggggtacttcccacacctcataggtttaacctctagaaatcgatccccgcgttcgaatttagatgggtatgctctttcatcgttcaatgtcttgaacttgaatggtttacggactttacccctccacaggatgggaaaaaccctaccattcgcgagcttcaacactaagag

SEQ ID NO: 156364 - DNA, 340 bp, Arabidopsis thaliana columbia
cgcatctcttttcatttctctctgattttttgtatctctccgtccaactatgtctgccttcaggagcaaattcgccgatgagttgatcgccaacgctgcctacatcggcacacctggaaaaggtattttggctgctgatgagtccactggtaccattggaaagcgtcttgcgagcatcaacgtcgagaacgttgagaccaacagacgtaacctccgtgagcttctcttcaccgcccctggtgctcttccatgcctcagtggtgtcatccttttcgtagagactctgtaccaaaagagttccgatggtaagcttattgttgatatcttgaaggaaggagga

SEQ ID NO: 156365 - DNA, 338 bp, Arabidopsis thaliana columbia
tcgaaaatggcaggaaccggagttgtgtttttttacggcgaaggagccatgatctagagggggcataaatcttccttctgcgtgaaagttgttctcgctcagatgctttgtggcggtgtaatcatggatgtcgtcatcgcatagcaagctcgaatcgctgaagaagctggcgcatgcgccgtgatggctcttgaacgtgttcccgccgtttttcgagctcaaggcggtgttgctcgaatgagcgatccagagatgatcaatttattcaactacgccgtgacgattcctgtgatggcgaaggctagagttggtcattttgttgaagctcatatcctgga

SEQ ID NO: 156366 - DNA, 452 bp, Arabidopsis thaliana columbia
ggagcaatgctctgctagatctatctttttttcaattcttcaccagagatcgtcgaggcgtgaccattgaaatcgaagaaacagcaccaatttccacttcaccaccgaaagagagagacagagaggataataaaaggccgccatggatttagatcaatggatttccaaggttaaagacggccaacatctctctgaggacgagcttcaacttctctgcgaatacgtgaaagaaattcttattgaggaatcaaatgtacaacctgtcaacagtcctgtcaccgtctgtggtgatatccatggccagtttcatgatcttatgaaacttttccagaccggaggtcatgttcccgagaccaattacatatttatgggggatttcgttgatagaggttacaacagtcttgaagttttcaccattcttttgcttcttaaagcaagacatccagccaata

SEQ ID NO: 156367 - DNA, 448 bp, Arabidopsis thaliana columbia
aacggacgagagagaagtagtctgtgtcaccggcgccagtggctgcatcggctcgtggctggtccatcagctcctcctccgcggctactccgtccacgccaccgtgaaaaacctccaggatgagaaagagacgaaacatctagaaggtctcgaaggtgcagccacacgcctccatctattcgagatggatctcctacaatacgacaccgtttccgccgccatcaatggttgctccggcgtattccacctcgcatcaccttgtatcgtcgatgaagtccaagatccccagaagcaactacttgacccggcggttaaaggaaccataaatgttctgacggcggcaaaagaagccagtgttaagagagttgttgtgacgtcttcgatatcggcgattactccaagtcccaactggcctgctgataagatcaagaatgaggaatgttgggct

SEQ ID NO: 156368 - DNA, 312 bp, Arabidopsis thaliana columbia
gcgtacgataggagaatacgaagaaattcactttttttatttctgaggaagctttcaatgctgtggggaacttaatgcctggaggtgtgaactcacctgtacttgcttttaaatctgtaggtggacaaccatgtggtgattggattctcgcaaagggcttacgaattagatacattgatggaaatgaatacattgtctatgttggatcttggggacctgctataattggccatgctgatgatgaggttcttgctgctttggctgtgacaatgaagaaaggaacaagctttttttctccttgtctcttagaga

SEQ ID NO: 156369 - DNA, 456 bp, Arabidopsis thaliana columbia
ggaggattcattattcccagctcaaaaacgacaacttgaatcaaatctcgccttcttctgctccttctccaatcaccctgaatcatcaattaaccgactcttcttcttcttcttcctccggtggtaataatcgaataagccccatcattctcttcatcatcgttctcttatccgtaatcttcttcatctgtagcattctacatttgttggtcagatattacttaaagaagaaaagatcaaacctttcgtcatcaccaaacgaatctaatcaaaacccagaattttccgactccgatacttaccaaagacagcttcaacagctctttcatctccatgattcaggtctagatcaagctttaatcgatgctcttcctgtgtttctttacaaagagatcaaaggtacgaaagagccttttgattgtgcagtgtgtctctgtgaattctcggaagatgata

SEQ ID NO: 156370 - DNA, 449 bp, Arabidopsis thaliana columbia
gcgaaaagatgttcggtagaggaccctcgaagaagagcgacaacactaagttctacgagatcttaggtgttcctaagagcgcttcaccagaagatctcaagaaagcttacaaaaaagccgctatcaagaatcatcctgataagggtggagatcccgagaagtttaaggagttagcacaagcttatgaagtgcttagtgacccggagaagcgtgagatttatgaccagtatggagaggatgcactcaaggaaggaatgggtggtgggagaggtggacacgatccatttgatattttctcatccttctttggcggaggcccctttggaggtaataccagccggcaaaagaggcacaggcgtggtgaggatgttgttcatgccttgttggaatcttttgaggatgtgtaccgtggtccaatgaagaagctttcactttttaggaatgcttct

SEQ ID NO: 156371 - DNA, 461 bp, Arabidopsis thaliana columbia
gagcgagtcaccttatcgtctctctatcttcttcttcctatatccccttgctctctgggtttttgctcagtgtgctacgtgagagatagagagatggaaggtctgattcaaaccagaggaattctctctttacccgcgaagcccatcggagtgagaaggcttctccaaccctcacatggcttaaagcaaagacttttcaccacaaacttacctgccttgtccttatcctctaatggtcacaagaaatttcaagcctttcagcaaatcccacttgggatttcggtttcccacaaggagagaagcagaggattcatctgcaaggcggaagctgcggcggccggaggcggaaatgtgttcgacgaaggagacacagcggcgatggcggtgtcgcctaagattttcggtgtggaggttacgactctgaagaagattgttcctttagggctaatgttcttttgcat

SEQ ID NO: 156372 - DNA, 412 bp, Arabidopsis thaliana columbia
atttcacacacacatttgtcgaaatcttatcacctatcccaaatcagaaaaatcaaaactttggattttattttatcaaaatggcgcttatgaatggaagcatgaatctatcatcggtcaaatcatcgatgatcaaccaccgtcaaccaaacttctcctccgccgtctccagacccacttctttccggatctccgccgtgcaaaccgacccaaaaacaccagctgcttcatcggcgtcggcggcgacgacgactccggcaacgttgacgaagcccgttggagttaatgtgggtaaaggaaaatgggcaccacagagttggaggacgaagaaagctttacagcaaccggactatccagatttagctgcgcttgaagctgtgctagagacgatcgaagcttttcctcctatcgt

SEQ ID NO: 156373 - DNA, 403 bp, Arabidopsis thaliana columbia
atttgcatttgtttttttttggtttgtttttggagcgtgcaaggagacttgcttacagagggatcgtgaaacgtctcgtcaactagacaaaacgccaccgtaacggcgaatcctctcttcttccgacgacgactgttactccctcaaggtatgactcctccgtctccttctttttccatcgccgtcgtgatgcctctggatcggcttttaccacctccggtagaaatcaacaccagacacgatcgatctccgttgatgcgttgaatccaagcgacactttcccgcgcctgcacatctcagcaacactcggatgaacaagctcagatggcgaattactgcggattcgatattctcaacactttgattgatttgactgtttcgaaatgtatctgttagattcgat

SEQ ID NO: 156374 - DNA, 402 bp, Arabidopsis thaliana columbia
cggatcttataaaatatattgaacttggtataaaattatacaacatgtggtcataagttaaagaatgatgatatatgatacaaaactctaatgaaagctcaaatttaaatgacataaacaagccctctttcatgaaagaatgaacacacacgcaacagcaagtgtaatatgcaccaaaccttccctctcggccctgccaaatggctttaacaatgtcaaaccaagagcttgtcgatgctggaatgaaaaggatggacgagactgaccaggctattgaacgttctaaacaggttgtgcatcagacactctaagttggcactcaaactgcatctaacttaaagggacagacggttcaaatgggccgcgttgtaaaccacctaaacacaattcagttttctctta

SEQ ID NO: 156375 - DNA, 457 bp, Arabidopsis thaliana columbia
gctccccttttcttatccggaaaccaaaaacttccggtgataaaacctccttcgtcatctctctacttcttggataaaatggcgtcaactttcactgccacatcttctattggttcaatggttgctccgaatggtcacaaatctgataagaaacttatcagcaagttgtcttcaagctcatttggaaggagacaaagtgtgtgtcctagacccagaagatccagttctgcaattgtgtgcgcagcaaaggaattacatttcaacaaagatgggactaccattaggagacttcaagctggtgtcaacaagctcgcagatcttgttggtgttacacttggacccaaaggacgaaatgttgttcttgagagcaagtatggatcaccacgaattgttaatgatggtgtgactgttgcaagagaggttgagttggaagacccggttgagaacattggcgcta

SEQ ID NO: 156376 - DNA, 463 bp, Arabidopsis thaliana columbia
tgaaaagcttatctcccaagactgcaagaatgtcaaggcaaccactaacgtatggcttcaagttgaaggtcaacagtttgaccctaacgcctctaagcttgccttcgagcgtgtctttaaaggcatgttcggcatgaccactgaccctgccgctgtccaagagctcgaaggtaagctccagaaagtcttggatgtctacgaggctaggctcgccaaatctgagttcttggctggtgattccttcactcttgctgatcttcaccacctcccagccatccattacttgttgggtactgactccaaggtgctctttgactctcgccctaaggttagcgagtggattaagaagatctctgccaggcctgcttgggctaaggttattgacctccagaagcagtagtgaccctctctctttcttcacttcttttcttttccttttgcccaaataaacgagtccagtgat

SEQ ID NO: 156377 - DNA, 454 bp, Arabidopsis thaliana columbia
ctcaaaaactacacacccgtaccacaccaccaccctcctcgtttcctcagagatcccctctctaacttctaaggatatagaaaatggcagatggtgaagacattcagcctctcgtctgtgacaatggaaccggaatggttaaggctggatttgctggagatgatgcaccaagagctgtattccctagcatcgttggtcgtcctcgacacactggtgtcatggttggtatgggacaaaaagatgcttacgttggtgatgaggctcagtctaagagaggtattttgacattgaaatatcctattgagcatggtattgttagcaactgggatgatatggagaagatatggcatcacactttctacaatgagctccgtgttgcacctgaagaacaccctgttcttttcactgaggctccttttaaccccaagggcaattgtgagaaaatgactcagat

SEQ ID NO: 156378 - DNA, 321 bp, Arabidopsis thaliana columbia
gaccacgcgtccgggagcttataagccgtcggcacaagaagatttttaagaagaatgtctcacaggaagtttgagcacccaagacatggttctcttggtttccttccaaggaagagagctaaccgtcacagaggaaaggtgaaggcgtttcctaaggatgaccaaaccaagccttgcaagttcacagctttcatgggttacaaagctggtatgactcacattgtcagagaagtggagaaacctggatccaagcttcacaagaaggagacatgtgaggcttgtaccatcattgagacacctgctatggtggttgttgtgagt

SEQ ID NO: 156379 - DNA, 358 bp, Arabidopsis thaliana columbia
aaagagtgaaacaaaaatggcgtcgacgactctctcaatcgcaacaacaatccgttcctgatcttatcctactctcgcttccatcaatcacttcccttcccgaaccaccaccatcgaattcccctctcgcttcggtggtggttcatcatccacattgacccaccgtgcaacccatcttcgtccaatcgccgccgtcgaagctccggagaaaatcgagaagatcggatccgaaatctcatccctaaccctcgaagaagcttcgtatcctcgtcgactatcttcaagacaaattcggtgtctccccactctctttagcccccgcagcattcggcggttgctgcttcagccgaccgtggcg

SEQ ID NO: 156380 - DNA, 380 bp, Arabidopsis thaliana columbia
atttcatcgaaaatggcggaaagaggaggagaaggcggcgcagagcgtggcggtgaccgtggtgacttcggacgtggattcggcggtggacgtggaggtggccgtggccgtgatcgtggtccaagaggccgtggaagacgtggaggccgtgcctcggaagaaacgaaatgggttccagtgaccaaactaggtcgtttagtggctgacaattaaataactaatcttgtgcagatctatttccattctctttcagtaatggtgtaccaaatcatatatcatatcgttgggcctacggtgaaagacgaggttttgaagatcatgcctgtttagaaacaaaccatagcttgtttaaggactagatttatagctctttgttgttt

SEQ ID NO: 156381 - DNA, 411 bp, Arabidopsis thaliana columbia
ttcgatttcgaacccctaatcttgagatggcatcggagaagaagctctcgaaccctatgagggatattaaggtccagaagctagttcttaacatctctgttggtgagagtggtgatcgtctcactcgtgcctccaaggtgttggaacagctcagtggtcagactcctgtcttctctaaggcgaggtacactgtgaggtctttcggtatcaggcgtaatgaaaagattgcgtgctatgtcaccgtgagaggtgagaaggcaatgcagcttcttgagagtggcttgaaagtgaaggaatacgagctgttgaggaggaacttcagtgacactggctgcttcggattcggtatccaggagcacattgatcttggaatcaagtatgatccttctaccggtatctacggtatggatt

SEQ ID NO: 156382 - DNA, 414 bp, Arabidopsis thaliana columbia
  unsure (1)..(414): unsure at all n locations
gaagcgtacgattaaagtcaatggcgttacgtctatttctactccttctcgncgcgtgtatcgcgggaggatttttcggagacgtgatcgaactcaatctatctcagagggagtttgattatttcgctctatctcttcaatggcctggaacctattgccgtggaactcgccattgttgctccaaaaacgcttgctgcagaggctccgatgctccaactcaattcacaattcatgggttatggcctgactataacgatggttcgtggccttcatgttgttatcgatctgacttttaagagaaggagatttcaacgttgatggatggtcttgagaagaactggcctagtcttaattgtggttcttcatcatcatgcaattggtgggaaagggtcattttgttgccacgagggggag

SEQ ID NO: 156383 - DNA, 440 bp, Arabidopsis thaliana columbia
cgcgtccgagtgaacgctctggccatggctttgtctgtccagaaggacgaggctcttttctctgccggtgcttctgctatggcttcaaggacatcttccccaacagtcaccaacgagggcgtccagaaggctgctgctgctttgaagggatctgaccaccgtcgcgcaaccaatgttagtgctaggctagatgctcagcagaagaagctcaatctcccaatcctaccaaccacaaccattggatccttcccacagactgtagagctcaggagagttcgtcgtgagtacaaagtcaaaaagggttgagaggaggactactttaaagccatcaatgaagagatcaagaaagtagttgacctccaagaggtacttgacatatatgtttttgtccaccgagagccttaaagaaacaacatggttgagtacttttgtttagcttt

SEQ ID NO: 156384 - DNA, 456 bp, Arabidopsis thaliana columbia
cttccgttaaaatcagaattccaaacaaaaatggttttgcaaaagcttcctctcattgggctgcttttgctcctgaccatcgtcgcctctccagcaaatgcagatggacctgtttgcccgccgtcgaacaaactaagccgggcaagtttccctgaaggttttttatttggcacggctactgcggcataccaggtcgaaggtgcgattaatgaaacttgtcgtggaccagccttatgggacatctactgtagaagatatccagagaggtgcaataacgataacggcgatgtggccgttgatttctttcatcgttataaggaagatatccaactaatgaagaatctaaacacagacgcctttagaatgtctatcgcatggccaagaatatttcctcatgggagaaaggagaaaggagtgagtcaagctggtgtgcaattctaccacgacctcatcgac

SEQ ID NO: 156385 - DNA, 435 bp, Arabidopsis thaliana columbia
cgcgtccgaagaaaaatatatcacattctaagccgggtttttttcactattctcttatggtgctcttgtgaggctttgttcataccatggtgtacattcaaagccagtccaccggtccagctgcaaccactgaaaatagtcccatcaagctcacagcgatgcttgaagctggtcaccaatttaccacattaatacaactcctgaacacaactcaagtcggggttcaggtaagtgtacaactcactagctctgaccaagggatgactatatttgccccaacagataacgcatttaacaagcttaaacccggaacccttaacaggctgacatatcaacaacaaatccagctcatgctctaccatatcatttcaaaatactactctctaagcgatcttctcttacaagtaatcccgtttgaactcatgctaccggaca

SEQ ID NO: 156386 - DNA, 456 bp, Arabidopsis thaliana columbia
cgcgtccgctctctctctctctctctctctcgctcgtgttgttatccgcgtagagagattggatttggggaggaacggtgcaatgtctcgctaccagtctcattcctttgatgacggagaaattaatccttttgcgaatcctacaagtgtcccagctgcaacgtcaaagctttctcctcttccccctgagccgtacgaccgtggtgccacaatggatattcctcttgactctggaaaggatctgaaagctaaggagaaggaactccgggaaaaggaggctgaattgaagaggcgggagcaggaaatcaagcggaaagaagatgctttagcacaagccggaattgtgatagaagagaaaaactggccaccgttttttcctctcatccatcatgacatttcaaatgagatacccatccatctgcagagaatccaatatgttgctttcacatcaaagct

SEQ ID NO: 156387 - DNA, 442 bp, Arabidopsis thaliana columbia
  unsure (1)..(442): unsure at all n locations
cgtncgggcggcaccaccagcattatcctcggcgtttgtttagttcgcgtacctcgcaaagctcggagggcaagcttaacgttacgaagaaatgcttgaattcatggaaaaagtcgctgaagccgttgacaaagacgaactcaccgtcgaagaacgtaatctcctctccgtcgcttacaaaaacgtaatcggcgctcgttgtgcttcctggagaatcatctctttcattgaacaaaaagaagagagtcgtggtaacgatgaccatgtgaccacgatccgtgattacagaagcaagatcgaatcttggttatcgaaaatctgtgacggtatttttaagcttcttgatactagacttgttcctgcttctgctaatggagattctaaggatttttaccttaagatgaagggagattatcataggtattttggctgagtttaagac

SEQ ID NO: 156388 - DNA, 453 bp, Arabidopsis thaliana columbia
cacaaaactaacaaaagatcaaaagcaagttcttcactgttgataatgtctaccaccggacagattattcgatgcaaagctgctgtggcatgggaagccggaaagccactggtgatcgaggaagtggaggttgctccaccgcagaaacacgaagttcgtatcaagattctcttcacttctctctgtcacaccgatgtttacttctgggaagctaagggacaaacaccgttgtttccacgtatcttcggccatgaagctggagggattgttgagagtgttggagaaggagtgactgatcttcagccaggagatcatgtgttgccgatctttaccggagaatgtggggagtgtcgtcattgccacttggaggaatcaaacatgtgtgatcttttcaggatcaacacctagcgtggtgggatgatttacgatggtgtaataagattttccatttat

SEQ ID NO: 156389 - DNA, 452 bp, Arabidopsis thaliana columbia
  unsure (1)..(452): unsure at all n locations
aaagtgtgagaatctgccaccatggtncttatgcacagncgaggaaagggtatttcggggtctgctttgccttacaagagatcgtctccgagctggctcaagaccacctctcaggatgttgatgaatcaatctgcaaatttgccaaaaagggattgaccccttcccagattggtgtgattctccgtgactctcacggtatccctcaggtcaagagtgttactggaagcaagatcttgaggatactcaaagctcatggccttgctcctgagatccctgaggatctgtaccatctaattaagaaggctgttgccatccgtaaacatctctagaggaacaggaaggacaaggatttcaagttcaggctcatcttggttgagagcatgatttaccggctttgttcgtattacaagaagaccaagaagctccctcccgtctggaagtacgtattcac

SEQ ID NO: 156390 - DNA, 426 bp, Arabidopsis thaliana columbia
gagacaacggtgtttacgggcttaacttttctcggccaaacaaaccaaatcaatgtgtgtactggttatgtggagacacggattagcaattcgttgaggcaacaacgtcctctcgcagtttatgttgtcgacatggttttgttgcccggtgagatgttcggagagcacaagctttcgccgattgctcctgcccctaaatctaaatccggtggggttaccgatgactccggctccactaagaaggcagcgtcaccgtcggataagtcaggctccggtgagaagaaagtcggactagggtttggtcttggacttattgtcttatgtttgaaatttctcttttgaaaatttaatagcaaagatttgttttgctttctattgattctattctgcgatgtgaggtataaatatgaaatttgttgattaagt

SEQ ID NO: 156391 - DNA, 462 bp, Arabidopsis thaliana columbia
gtcgttcttggagcagattttgtggaaagactaaccaggaaagtgactcacttgatatgcaactttgcaaaaggagataagtatgtgagagcttccaagtggggaataatttccgtgacacctgactggctttatgaatgtgttagacagaatcaagttgtttgtacagataacttccatccaagggaattgaccactcaagatcgagaagcagggtctcagtttcatacacagtttgtaccaatggcctcaagggacagtatgtctctacctgtaagtcactctgaagacagggaaaaaattcaaagttttgctggcaaaagtggttgcgggaaaggtgaaatatataacagacttggagaaattggaaaggaacaaacttttccgtctaagaaggcaaaacttttgagagatggtcaagaaagtgatgtgtttcctgtgagagaacttccaagcaattgt

SEQ ID NO: 156392 - DNA, 469 bp, Arabidopsis thaliana columbia
ggccgccccacgcgtccgctaatgagtcttcagagcagtttagtgaagttatatattacaaaggcttgtgccctcatgttgctagaaagatatgaggtagcccgtgacactatcctctcaggtctacagattgatccctttagcggtcctctacgatccaatcttcaggaattggagaaagtgatgcctaattcgatgcgtaaaacccatggaatggctgagcggtctgatgattttgattgcactgtttgcctgaaattgctgtacgaacctgctacaactccatgtgggcatacattctgccgatcatgcctctttcagtcaatggatcgcggcaacaaatgtccactatgtcgaactgtcatttttatgactccaagaacatgcgctgtcagtgtgacactgaataacatcatagagtaaaactttccagaggagtatgctgaaaggaaatcagagcatgacactc

SEQ ID NO: 156393 - DNA, 280 bp, Arabidopsis thaliana columbia
gaccacgcgtccggcttgaccgtccaattccccgttccgataacttacctcgccgtcaagtaacggaagcccaaccgaccgatgaggctgataagaagacgacggcgatcgacgtggaggtaacggcgggaaagtctatatatttggtttccgacggaactgggtggacggcagagcattccgttaacgccgctttgggacaattcgaagatttttcgttgaatcgtggctcttttgtgaatacccatctcttctcctgggttgaggttgaggagaggtt

SEQ ID NO: 156394 - DNA, 460 bp, Arabidopsis thaliana columbia
gccgaccacgcgtccggcactcctcgagaaaagtgtaacaatggctgttgaccggacgaagaatacgactacttggggagaagtggttttgatcggagactccgacgtcggcaagtctaatctcctctctagattcactcgcaacgagttctgcttagaatccaaatccaccattggtgtcgaattcgctactcgtactctccaagtggaaggaaggactgtgaaagctcagatatgggacacggctgggcaagaacgatacagagccataactagcgcctattacagaggtgcacttggagctcttttggtctatgatgtcaccaagccaacaacgtttgagaatgtaagcaggtggttaaaagaactaagagaccatgcagattccaatatagtgatcatgttgattgggaacaagacagatctgaagcatctcatagcagttgccacagaggatgct

SEQ ID NO: 156395 - DNA, 461 bp, Arabidopsis thaliana columbia
ggaaaaccggccggcccacgcgtccgttaaaacccaaatcctatcactactttataatattcttcatcatggcctcagtaaccgtgtgcactgttgcaatcccatggtccaccacccttaaagccttaaccatcaaaacatccgccaccgtcagaatccaaactgctgctgttgcatcacctaagcttacagtgaagtcatttttaaagaactacggagtctcggtcgtatctgctgcagcttcaattgctttggccgtaaacgccatggcaatataatatctcttgggaggaggggatgggtctgtagcttttattcccaacgtcttctttatagcttaatgagacattattgttttcaataacaactctttttacctactcaatttttctcttcgtactaatactacttttccaattttcatttacgtttctattatttttttctaatcttccttattt

SEQ ID NO: 156396 - DNA, 446 bp, Arabidopsis thaliana columbia
gacgggctttgaatcttggtgttaacgttatgatgatcactggtgaccaacttgctattggtaaggaaactggtcgcagacttggaatgggaacaaacatgtatccatcttcggctcttcttggtacacacaaagacgcaaacctcgcatccattcctgttgaggagttgattgaaaaggctgatggatttgccggagtcttcccagagcacaaatactaaattgtgaaaaagttgcaggagaggaagcatattgttggaatgactggtgatggtgtcaatgatgcccctgctctaaagaaagctgatatcggtattgctgttgctgatgctacagatgctgctcgtggtgcttcagatatcgtgctcactgagcctggactcagcgtattatcagtgctgtcttaccagcagagctatttttcagagaatgaagaactatactat

SEQ ID NO: 156397 - DNA, 200 bp, Arabidopsis thaliana columbia
aaaagctgcagctactgccaatatacctgttattaatgcaggtgatggtcctggagagcatcctactcaagctctattggacgtctataccatccaaagtggaattgggaaaatagatgggatcagagtggccccagatggagacgacctcgacaacgggagggctgggcggcttgtatactactttgtcgcgatgaaaa

SEQ ID NO: 156398 - DNA, 433 bp, Arabidopsis thaliana columbia
cggacgcgtgggcacgaacgctacacgatccatctcccaaccgatatctgcgtcttcaccggacttaaagcacaatgggatgattcccattcccaccaagttgcttcggtgaatcctctcaaaactctttgcaatcaccgctttaacaccctgtagcatgggtcccttggcagcccaatcacgtgagctaccacttccatactcagctccagccagaataagctgtctgttcctgagaataccctctactcatgggatcccaactcaacttacattcacgagcctccatacttcaaggacatgaccatggatcctcctggtccacacaatgtgaaggatgcttactgtttactcaattttggggacagtatcaccactgatcacatctcaccagctggaaacatccaaaaggacagtcctgctgcaaagtttc

SEQ ID NO: 156399 - DNA, 433 bp, Arabidopsis thaliana columbia
cggacgcgtgggcacgaacgctacacgatccattttccaaccgatatctgcgtcttcaccgggcttaaagcacaatgggatgattcccattcccaccaagttgcttcggtgaatcctctcaaaactctttgcaatcaccgctttaacaccctgtagcatgggtcccttggcagcccaatcacgtgagctaccactttcatactcagctccagccagaataagctgtgtgttcctgagaataccctctactcatgggatcccaactcaacttacattcacgagccttcatacttcaaggacatgaccatggatcctcctggtccacacaatgtgaaggatgcttactgtctactcaattttggggacagtatcaccactgatcacattttaccagctggaaacatccataaggacagtcctgctgcaaagttct

SEQ ID NO: 156400 - DNA, 435 bp, Arabidopsis thaliana columbia
caaccacccggccgggacggtgaaatggttattgatgatgtgcaagatcccagaatcgctgggattgcctcttccattagaggcatccccgacttccctaaaccaggaatcatgtttcaggacataacgacgcttcttctcgacactgaggcctttaaggatactattgctttgtttgttgatagatacaaagataaaggcatatctgttgttgcaggtgttgaagctagaggtttcattttcggccctcctattgcgttggctattggtgccaaatttgttcccatgaggaagcccaagaagctacctgggaaggttatttcggcggagtattcgctggagtctggaacagaaacgattgagatgcacgtaggtgcagtagagcctggcgagcgggctattattattgatgaccttattgccacaggttgggac

SEQ ID NO: 156401 - DNA, 424 bp, Arabidopsis thaliana columbia
cggacgcgtgggccggtttcgtcgagtacatctccggcggtcctcagccaggaggcatgtacttcccagtggctcatggagtccacgccgtgaggctcggaaacgaagctacaatctctcagaagttagaagtgaagccaggttctctctacgcactcacgtttggtgcgtcgagaacttgtgcacaagacgaagttcttagagtctctgtaccttctcagtccggtgacttgccacttcaaacactttacaacagtttcggaggtgacgtgtacgcttgggccttcgtcgccaagacttctcaagttactgtgactttccacaatcctggagttcaagaagatcctgcttgtggtcctttgttggacgctgtcgccattaaagagcttgttcaatccaatctacaccagagggaacttggtga

SEQ ID NO: 156402 - DNA, 437 bp, Arabidopsis thaliana columbia
ctctctactcaaagctcttcttcttcgatcaaaaaacctcgagcttctaacaatggagaccagcatcgcgtgctactcacgtgggatccttcccccaagtgtctcttctcaacgatcctctacattggtctctcctccttcctactccacatcctccagcttcaagcgtctaaaatcgagctcaatcttcggagattcactacgattagcaccaaaatcgcaacttaaagccacaaaagctaagagcaatggtgcttcaactgtgaccaaatgtgaaattggccaaagcttggaagagtttttggcacaagcaactcctgacaagggattgagaactttgctgatgtgtatgggagaagcattgagaacaatagcttttaaagttagaacagcttcttgcggtggaacagcttgtgttaattcctttggtgatgaac

SEQ ID NO: 156403 - DNA, 225 bp, Arabidopsis thaliana columbia
acgacagaatctacaaccacctatcgttttttttttacaccggatgatcctcgagggcggcctactcaaaaactattgggccactttttcacactcagagtcattggccaaatatttgtgatcaagagcgccttattggtggacctcaccaacgtaaagactgtgcggactctttcatacttgtttctcaactttaaagacgtgaaaatcttcttcgtttcccct

SEQ ID NO: 156404 - DNA, 435 bp, Arabidopsis thaliana columbia
tcccgctccattcttcactctcccacaacttaaggccagttttcaaaatgttggacttgaccgtccctctgatctcgttgcactctctggtggtcacacatttggtaaaaaccagtgccaatttattatggatagactatacaactttagcaacactggtttacccgaccctactcttaatactacatacctccagacacttcgtggacaatgtccccgcaatggtaaccagaccgtcttagttgatttcgatctacgcacaccgacggtttttgacaataaatactatgtgaatctgaaagagctaaagggacttatccagacggatcaagagttgttttccagccctaatgccactgacacaatccccttggtgagagaatacgctgatggcactcaaaaattcttcaatgcttttgtggaagcaatgaatag

SEQ ID NO: 156405 - DNA, 392 bp, Arabidopsis thaliana columbia
  unsure (1)..(392): unsure at all n locations
gaaaaacngggcgggacccacgcgtccgaccacgcgtacgctcattttcacaggatattattgtgttcgngaagtcctccaaatgtgatgcttacttcaagaggtgcggagtgaaattcatgagaaggagagatgggaagactgattacagggcaaggatccgtcttatcaatcaagacaagaacatgtacaacacccctaagtaccgatttgttgttcgatttaccaacaaagacattgtggcacagattgtatctgcaagcatagttggtgacattgataaagcttcggcttactgcacatgtagcttcctaatatttgactaccgttgtttttactaattatgctgctttcttactgttctgaccaatcttaagacattgttaacattt

SEQ ID NO: 156406 - DNA, 473 bp, Arabidopsis thaliana columbia
cgcccggccggattcccgggtgcccacccgtccgaccgcacagatccaagacattttgattacactccatcgccggcgaaaatggtgacggaaaagaaaacgaagaagtctcatgagggtatcaacagtaggttggctcttgttatgaagagtggtaaatacactcttggttacaagtctgttctcaaatccctccgtggctccaaagggaaactgattctaatctccaccaattgcccaccgttgagaagatcagagattgagtactacgcaatgctcgctaaagttggtgtccaccattacaatggaagtaagttcctttcttctttagctcgtccagtttttaaagattcattgttctcttgtttttgtgaaggttttcattgtgtataataactgagaatgtataatcttaagtagatgaaagtgttaaaatctgcttctatagaccattaaactgatgatggaagtat

SEQ ID NO: 156407 - DNA, 421 bp, Arabidopsis thaliana columbia
gacgagatcatgcaagacgttgaccttacacttgatcttgacataaatttttttgtgcacggagagccataaagaaacatcatggtatgatcctttggtgagctgttgttatgaataggcttcactcacacttgtgtgcaacaatgttatggatctcgttgtgtgatgccaccagatatttattgtgatgtgagccaatcgacgacagtgaccaagttcagatattgagtgcttcacagtgttagctattgctcaaggaaagcattactttctgagccagttacttttttctattgctccttagtatttaaagatcaattgatctcttaatctgtgacagattgattttgtcttaaagacggaatgtttaatttaagtaggtgaaattgtttaatttattttatgagcttacactgattat

SEQ ID NO: 156408 - DNA, 439 bp, Arabidopsis thaliana columbia
ctcctcttgcaaaccaacgtaaaacactaactaagagatcaatatggctggagtgatgaagttggcatgcatggtcttggcttgcatgattgtggccggtccaatcacagcgaacgcgcttatgagttgtggcaccgtcaacggcaacctggcagggtgcattgcctacttgacccgaggtgctccacttacccaagggtgctgcaacggcgttactaaccttaaaaacatggccagtacaaccccagaccgtcagcaagcttgccgttgccttcaatctgccgctaaagccgttggtcccggtctcaacactgcccgtgcagctggacttcctagcgcatgcaaagtcaatattccttacaaaatcagcgccagcaccaactgcaacaccgtgaggtgatgagcgacggtcaaatgaagctactagcggatgtttcga

SEQ ID NO: 156409 - DNA, 438 bp, Arabidopsis thaliana columbia
tccatttccactctcacattcagacgcaccaatcctctgttttggattttgaagagaaaatggcaagcagcgacgtgaagctgatcggtgcatgggcgagtccctttgtgatgaggccgaggattgctctaaacctcaagtctgtcccctacgagttcctccaagagacgtttgggtctaagagcgagttgcttcttaaatcaaacccggttcacaagaagatcccggttctgcttcatgctgataaaccggtgagtgagtccaacatcatcgttgagtatatcgatgacacttggagctcatctggaccgttcattctcccttccgatccttacgatcgggccatggctcggttctgggctgcttacatcgacgaaaagtggtttgtcgctctaagaggtttcctaaaagccggaggagaagaagagaagaaagctg

SEQ ID NO: 156410 - DNA, 437 bp, Arabidopsis thaliana columbia
cacaattagggttagggatttcaactccccaatcttgcgaattgctcatttctcggaggcggcgcagcaatcaacgatgacaggcaaagcaaagccaaagaagcacacagcgaaggagctccaagctaaagccgatgcagcgttgaccaatcgcggtggaggaaaggcagggctcgccgatagaaccggtaaggagaaaggtggtcacgcaaagtacgagtgttctcactgcaagatcactgtaccggatctaaagacgatgcacatccatcatgaatcgaagcatccaaagctgacttatgaagagccgaggaatcttcatgaggctttagctgctcctgctgcatcatctaagcctaagcctggaatcagaggaagccttaagatgtgaagtgaaaatggtttgcgtattgatcgaatttctactagaaaattga

SEQ ID NO: 156411 - DNA, 438 bp, Arabidopsis thaliana columbia
tttttaattccggcagctgtacgacaggtggaagatttctcaccggagtggtggcaattggtgacaacttcgacttggtaccctgattactggatcagtcagcagcagcaaggcgcggatggtttctatgacaacggagagaatgagaatggtggaggtcatatcgatgtagctgatcttcttccagaatcatttgattttgatgatatggaagatttctttgacactgatgctgctgagtttgatcaaggattcgatggaagaatgtattaccaagcaccttccgaatttggctttggaaagaatggtgagatggttaagaaatcaagtggaaacaggagcccgagatcgattgtggaaccagctaagtatgcggtaaagccagcgaaatggggaaaccagagggttgttgctgcttcgagaaacattcaccagcct

SEQ ID NO: 156412 - DNA, 419 bp, Arabidopsis thaliana columbia
aggtaagcacgtcccacgtgctgtcttttttgatcttgagccaactgtgatcgacgaggtcaggactggtacttaccgggcagtttttccaccctgaacaactcatcagaggtgaagaagacgctgctaacaatttcgcccgtggtcattacaccattgggaaagagattgttgatctctgctaggaccggatcagaaagctcgctgataactgtactggtcttcaaggattccttgttttcaacactgttggtggtggcactggatctgggcttggatctcttctccttgagagactttctgttgactattttaaaaagtccaagttggtgttcactgtttacccatttccacaggtgtatacctttgtgggttgaacatacaacagtggccaatacactcactatttcttggaacac

SEQ ID NO: 156413 - DNA, 262 bp, Arabidopsis thaliana columbia
ctttctttcatttttttatcagtttctcatttctctctcagtcgcatataaatttgaaacgccgattcgtttttgctctttaagctttcttcttgatttcgacggtgtctctcaatctccgtcaagcttgacgaatttcaggagctatatataccatggcgctcttgtctcaagcaggaggatcatacactgttgttccttctggagtttgttcaaaggctggaactaaagctgttgtttcgggtggcgtgaggaatttgga

SEQ ID NO: 156414 - DNA, 286 bp, Arabidopsis thaliana columbia
atcatctttaaacctctcttgattccaattcattctccttcaagagccgggttctggggtcggatcttctaagcctggctagggataatggctactgtcactacttatgcctcggcctcgattatccaaccttgtactctcaaagccaagattcctcaccggttcttccggtaggttgaaccgtgacttgtcgtttacattgatcgggtcatcggccaaaacgttttcgctcaacgctgaatgctaataaaggagaatggctgcccgacttggcatatactgaata

SEQ ID NO: 156415 - DNA, 439 bp, Arabidopsis thaliana columbia
gtcaatgtgactttgatgattacacatttgctagcccccataacgtaagcacggcctgcaatgaagctattagtgaaactgaaaacattatcactgagtatgtcaacaactatgatgttctcctcgatgtatgttatccgtctatcgtccagcaagagctgaggctcaagaaaatggctactaaaatgagcatgggagtggatgtgtgtatgacctatgaaagacggttctactttaatcttccagaggtacaaaaggcgcttcatgcgaaccgtactcatctgccttattcatggtcaatgtgcagcggcgtgttaaactactctgatatcgatgggaacatcgacatgcttccgattctgaagagaattatactgaacaaaactcctatttggatcttcagtggagatcaagattctgtagttccattcgggggttc

SEQ ID NO: 156416 - DNA, 443 bp, Arabidopsis thaliana columbia
gcaatatcatttccaatttataaaagttaaagccatggctgcatctttctctgtcccctctatgataatggaagaagaagggagattcgaagcggaggttgcggaagtgcagacttggtggagctcagagaggttcaagctaacaaggcgcccttacactgcccgtgacgtggtggctctacgtggccatctcaagcaaggctatgcttcgaacgagatggctaagaagctgtggagaacgctcaaaagccatcaagccaacggtacggcctctcgcaccttcggagcgttggaccctgttcaggtgaccatgatggctaaacatttggacaccatctatgtctctggttggcagtgctcgtccactcacacatccactaatgagcctggtcctgatcttgctgattatccgtacgacaccgttcctaacaaggttgaacacc

SEQ ID NO: 156417 - DNA, 443 bp, Arabidopsis thaliana columbia
gcaatatcatttccaatttataaaagtttatgccatggctgcatctttctctgtccggtgtatgataatggaagaagaggggagattcgaagcggaggttgcggaagtgcagacttggtggagctcagagaggttcaagctaacaaggcgcccttacactgcccgtgacgtggtggctctacgtggccatctcaagcaaggctatgcttcgaacgagatggctaagaagctgtggagaacgctcaaaagccatcaagccaacggtacggcctctcgcaccttctgagcgttggaccctgttcaggtgaccatgatggcttaactattggacaccatctatgtctctggttggcagtgctcgtccactcacacattcactaatgagcctggtcctgaatctgctgattatacgtacgacaccgttactaacaaggttgacacct

SEQ ID NO: 156418 - DNA, 453 bp, Arabidopsis thaliana columbia
cggaaaccgggtcgcccacgcgttcgacaacttcccgccggggggaaaaaaaaattttagagggacaaatctaaatggcgatgattacgcgcaacaccgccacgcgcctccctctcctcctccaatctcaacgcgccgtcgccgctgcctcggtctctcacctccacacatcccttcccgctctctctccctccacatcaccgacttcctacaccagacctggtcctccttcgacctcccctcctcctcctggtctctctaaagcggccgaatttgtgatctccaaggtcgatgatctcatgaactgggctcgtaccggatcgatctggcctatgacctttggtctcgcttgctgcgccgtcgaaatgatgcataccggtgctgctcgctacgatctcgatcgattcggtatcatcttcaggcctagtcctcgccagtctgattgtatgattg

SEQ ID NO: 156419 - DNA, 372 bp, Arabidopsis thaliana columbia
gctaaacattgttagagagaaagagttgttgttaatggcgatgaggggcttcacggggggttctatccttgtgttggggttgtgcgcttcgtctatcagaagcgaagagacggagacgaaggagttcgtgttgaccttggatcacactaacttcacctataccatcaacaaacacgatttcatcgtcgtcgagttctacgccccatggtgtggacactgcaagcagcttgctcctgagtatgagaaggttgcgtcagctttgagcagtaacgtcctaccagtggttcttgctaagattgatgccagtgaggaaacaaacagagatatttgcaactcaatacgaggttcaggtgttcccaacattcaatattt

SEQ ID NO: 156420 - DNA, 380 bp, Arabidopsis thaliana columbia
atcgggaagtggcaaatctacactatgatattcagtcgcagggagactccatggatggaaccttaccggaaaaatagtgataaactacggttaaataacgaaacaaacattaaaacgcaccggatttgtagcacaagacgatcttctttaccctcacttaaccgcacgtgaaaccttagttttcgtggctttgcttcgacttcctcggagtctaacaagagacgttaaactcagagccgctgaatcgggtatatcggagcttggtttaacttaatgtgagaacacagtcgttgggaacactctcattagaggtatctctgttggtgtacggaaacgagaaagtatagctcatgaattgcttataaacccgagttttatgg

SEQ ID NO: 156421 - DNA, 437 bp, Arabidopsis thaliana columbia
aattaattgatccgtcatctgtgcttcatgacaagattgggtctccacgtgccatcctcagtgatgacgaagatgcatctcgcgctagcatatcctctacctacaggtctgctgatggtgaggaggctcaacatggagataatttagggactgaaagctctggatcacgttctagtcatgttcgggttgctttcatagttgatgctaatataacatcgtatctaatgatgggttctgtgtcaccaggattgaaatctcatgctgtgacactctatgaagcgggaaaactcggacacactagtatcccagacctttgccaggatttgagcacattagagggagcgaaatttgagggtgaactgcaagaatttgcaaatcatgcctttagccttcgttgtgtcctggaatgtttgatatctggtggagttgctactgat

SEQ ID NO: 156422 - DNA, 419 bp, Arabidopsis thaliana columbia
gcaatatcatttccaatttataaaatttatgccatggctgcatctttctctgtccggtctatgataatggaagaaggagggagattctaagcggaggttgcggaagtgcatacttggtggagctcagagaggttcaagctaacaaggcgcccttacactgcccgtgacgtggtggctctacgtggccatctcaagcaaggctatgcttcgaacgagatggctaagaagctgtggagaacgctcaaaagccatcaagccaacggtacggcctcttacaccttctgagcgttggaccctgttcaggtgaccatgatggctaaacatttggacaccatctatgtctttggttggcagtgctttgtcacttacacattcactaatgagcctggtcctgttcttgctgattatccgtacgacac

SEQ ID NO: 156423 - DNA, 433 bp, Arabidopsis thaliana columbia
cttccgaatggggggacccattgcccaaaaggttgattttgcctacagtttctttgagaagcagatcccaattgaagctgtcttccagaaggatgaaatgattgatatcattggtgtgaccaagggtaagggttatgaaggtgttgttactcgttggggtgttacccgtcttcctcgtaagactcacagaggtctgcgtaaggttgcttgtattggtgcgtggcatcctgctagagtgtcctacactgttgctagggctggtcagaacggttaccatcaccgtactgagcttaacaagaagatttacaggttgggtaaggttggtactgaggcacacacagccatgactgaatatgacaggactgagaaggatgtgactccaatgggaggctttccacactacggtattgtgaaggatgactacttgatgatt

SEQ ID NO: 156424 - DNA, 443 bp, Arabidopsis thaliana columbia
ctaatttcttacaccggacgattcgacaaaaatggtgaacggacgccaaggagaacgtgtcagactctatgtcaggggaaccatacttggctacaaaaggtcgaagtcaaaccagtatcccaacacgtcactagtgcaagtcgagggagttaacaccactgaggaagtgtcatggtacaaaggtaaaaggatggcttacatctacaaagccaagaccaagaagaacggtagtcactaccgatgcatttggggcaaagtcacaaggcctcacggtaacagtggcgttgttcgagccaaattcacatcaaacttgcctcctaaatcaatgggatctcgagttcgagtgtttatgtatccgagtaacatttaaagcagtgtgtactcgtcatcaagtggtttattatctgcaagcctttgtttatggaccttgtttattatttgac

SEQ ID NO: 156425 - DNA, 447 bp, Arabidopsis thaliana columbia
cactctatttggaaacgtgaatgtaaagttctttctccgtgatgtggatgctcctaaaggcgagccttgtgagccagaaaacaccaaggaagatgatgaaccacagagccagtggttggaccaagcaccaccgcttcaccaaccaacattaccgccaccaaacgtcaacctcaaatcctgtttgaagaaaccagttgatgacccgagcagtagtagcaacaatggaaacggtaaccgcgcagccgtaagagtcaaattcatgttaggtggtgaagaaaactcgagtaaagcaaacaccgagccaccacaggtcacaatgaccttgaatagaaacagtggaccttcttcatcatcatcatctgttccaatggaatttgttagtaagaagtttcaaaacgttgttcatcatcaacaagtttcttcttctacattgccttcaattttttc

SEQ ID NO: 156426 - DNA, 450 bp, Arabidopsis thaliana columbia
tgtcctcctccgccaccgttatctccgtcgctaagccgttactttcccccaccgtatccttcaccgcgccgctctccttcacacgctctctcgctcctaatctctctctcaaattccgcaaccgccgcaccaattccgcctccgccaccaccagatccttcgctacgacacccgtcaccgcctccatttccgtcggagacaagctcccagactccactctctcctacctcgatccatccaccggagacgtcaaaacagtaaccgtctcatccctaaccgccgggaagaaaacaatcctattcgccgttcccggcgcattcacaccaacatgctcacaaaaacacgtccctggattcgtatccaaagccggagaactcagatctaaaggcatcgatgtaatcgcatgtatctccgtcaacgacgcgttcgtgatggaagcgtggaggaaag

SEQ ID NO: 156427 - DNA, 384 bp, Arabidopsis thaliana columbia
gagaaaactacgtctctcttatctgcttttttctctcatttcctgtgagataaagggggggtatctctccagttattgtgctcatccatctattcttagagttcaaaatgggtgatcaagttcagcaccccactattgcgcacaaagctgccgggcagttcatgcgttcaagtgtttccaaggactttcaagtgggttaccagaggccttctatgtatcaaagacatgcaacctacctaaactactccaatgctgtattacaatttcctccgacatccccgatgttgccaacaactgcttgtcccgtgcttgtccaaaccccccaagagaatgggttaactaactttgcccatgtctttccgatgggtggtgtatctgctgcac

SEQ ID NO: 156428 - DNA, 436 bp, Arabidopsis thaliana columbia
gacgaaaagacttacctggagcgggtgtatacggaggcgatgacgatgatgatacagaggcattgttccctttggacagcctattatcgttgaattattatgataggatttgtccagattttgagaaaatcgttgttacgaaagtgagggaatggactaagagtgactcttcccttggtcccgccctcctccgccttatcttccacgattgtggcgtcacgggatgtgatgcgtctgttcttctagactacgaagggacagagagaagatctccggctagcaaaacactaaaaggcttcgagctaattgacgatatcaagtccgagatggagaaatcatgccccggcaaagtatcctgcgccgacatcctaacattagccagccgtgccgccaccgtccaacttggtggtccttactggcccaacgtctacggacg

SEQ ID NO: 156429 - DNA, 441 bp, Arabidopsis thaliana columbia
gaagccgtcttcttcctccttcaatctctctcgttcgtatcatctgctctgcgatttcaatggcgagccgttggttgagacctgaggtgtatcctttgttcgctgctaccggagttgccgttgggatctgtgcgttttccttgatcagaaacatcaccggaaaccctgaagtcagatgcaccaaggagaacagggctgctggaattttggataaccatgcagagggagagaagtataaggaaaatttcctgaggaagtttgttcgcaacaagaaacctgaaatcatgcctggactcaacaagttcttcactgatcctacatactgaaaccatctttgcacaccgctttgtcgtattgtttctggaattgaatctctttgtgatataaaaccgcatttgtcaatttcacattgttgatgtatcctccagctgaagacacttg

SEQ ID NO: 156430 - DNA, 246 bp, Arabidopsis thaliana columbia
atatcatttccaatttataaaatttatattcatgccccgcacctttctctatccccgcgattattataaaagaagaggggccattcaaaacatacttttcataattacaaactttctaaatctcatatattttcaatctaacaaggctcccttacacttccccttaccttatgactctactcttccatctcaagcaaggctattctttcaactacatccatattaaactttttataactctcaaaa

SEQ ID NO: 156431 - DNA, 440 bp, Arabidopsis thaliana columbia
gcaatcttcgctcttctctttgctctctctctctcaacgcggttcagatccgagtttgggagattcaagctccctgaaaaaagccctttactctcgcttaccaactttgctccagcatggcaggatctgcaccagaaggcacacagtttgatgcacgtcagtttgaccagaaactcaatgaagtacttgagggacaagatgagttcttcacatcctatgatgatgttcatgagagctttgatgccatgggtcttcaagagaaccttctcaggggtatttatgcttatggttttgagaagccttctgctattcagcaaagaggaatcgtccccttctgtaagggtcttgatgtgattcaacaggctcagtctggtactgggaaaacagcaactttctgctctggtgtcttgcagcagctggacttctcccttatccagtgt

SEQ ID NO: 156432 - DNA, 382 bp, Arabidopsis thaliana columbia
cacgaccatcttttcgttgtcgttttagctttttatctaccgtaatcatgccaacatcagcgacagcggtggcttcatcaacgggatctgctcagaaaaacgatcaagactggcgtgcgattttgtctcccgcgcaatgtacagatctcagggaaaagggcacagacaaccgacgtaatggagagtataccaaactggacgacgactgaatatataattgtgctggttgtgcaacttctgtttatatgtgcaccactaagatcgactctgggtgtggttgggcttacttcttcgatgctatccctggtgccattaaacaaacgcccgaggcaggagtggagaagaatggagatcacgtgcgcggcatgtgacggacatttag

SEQ ID NO: 156433 - DNA, 398 bp, Arabidopsis thaliana columbia
  unsure (1)..(398): unsure at all n locations
gaaaaaaaataaatatggagctcgagacctcattttatcgaccaaacgtcgccgtttatgagggtcctgatggtgtggaggggggaggacggtacnaccaaatcttcgccaagattttgacgagagaagctcttagctttgtggctgagttacagagagagtttcgtggccatgtgaagtatgccatggagtgccggagagaggcaagacggcgttataactccggtgccgttcctgggtttgatccttccactaagttcatcagagacggtgattggagctgtgcctccgtccctcctgccgttgctgaccggagagttgagatcaccggtccggtcgagaggaagatgatcattaacgctcttaacttcggagctaaagtttttatggctgttttc

SEQ ID NO: 156434 - DNA, 164 bp, Arabidopsis thaliana columbia
gtttgcttatatgtaataattggctgatttttccggtagttttgccggcgacgttggtgtttctcttcttctgtgtgtgtttttatggtttggtcattaagatatctctgcaaagatttatctttgtgactttattaatcctaagactattatgggtttgtttt

SEQ ID NO: 156435 - DNA, 440 bp, Arabidopsis thaliana columbia
acggtggatacctaggcacccagagacgaggaagggcgtagtaagcgacgaaatgcttcgggaagctgccacaggtcgtggtgtagtatttgccaccgaagctcttcttgctgagtacgggaaatcgattcagggtttgacatttgttattcaaggttttgggaatgttggaacatgggctgcgaagctgatccacgagaaaggcggtaaagtggttgcagtaagcgacattactggtgcaatcaggaaccctgaaggtatcgacatcaacgctctcataaaacacaaggacgcaactggaagtctcaatgatttcaatggtggagacgctatgaattcagatgaattgctcattcatgagtgtgatgttctcattccatgcgctcttggtggtgtcctgaacaaggaaaatgctggagatgtgaaggcaaagtttatag

SEQ ID NO: 156436 - DNA, 439 bp, Arabidopsis thaliana columbia
gaaagcgagagacaacaaggtgttgtgtgtattttacaggatgcaacacattcaccagacctatgactttgtgaagaagatgaggaaagagtatggaaaacttaacaagatggaaatgagtatatgggaatgttgtgagttattgaacaatgttgttgatgaaagcgatccggatcttgatgagcctcaaattcaacaccttcttcaaaccgctgaagccattcgaagggactatcccgacgaagattggctccatctcactgccctaatccatgatcttggcaaggttctccttctgccagaattcggtggtcttccccagtgggctgtcgttggcgatacatttccagttggatgtaccttcgactcagccaatattcaccacaagtatttcaaaggaaaccatgatattaacaacccacagtacaacacataaaat

SEQ ID NO: 156437 - DNA, 443 bp, Arabidopsis thaliana columbia
tcgcagcattgtgtgctacttacgtgggaacctttcccccaggggtttcttttaaacgatcctgtacattggtctctcctcctgcctactccacatcctccagcttcaagcgtctaaaatcgagctcaatcttcggagattcactacgattagcaccaaaatcgcaacttaaagccacaaaagctaagagcaatggtgcttcaactgtgaccaaatgtgaaattggccaaagcttggaagagtttttggcacaagcaactcctgacaagggattgagaactttgctgatgtgtatgggagaagcattgagaacaatagcttttaaagttagaacagcttcttgcggtggaacagcttgtgttaattcctttggtgatgaacaactcgctgttgatatgcttgctgataagcttctctttgaggctttgcaatactcgcatgtg

SEQ ID NO: 156438 - DNA, 429 bp, Arabidopsis thaliana columbia
ataaaaagcttttaacctcagccgttaaatctttctccgatcatgccgaccagaaacatcgccattggtggagtccaagaagaggtctatcaccccaacgcacttagggcggcgctcgctgagtttatctcgactttgatcttcgtcttcgccggctcaggctccggaattgctttcaacaagatcactgacaatggagcaaccactccttccggcctcgtcgccgctgccttagctcatgctttcgggctctttgtcgctgtctctgttggcgctaacatttccggtggccacgttaaccctgccgataccttcggtgtcttactacggggtaacatcactctactccgtggtattctctactggattgctcagcttcttggctccgacgccgcttgtttcctccttagctttgccaccggtggcgag

SEQ ID NO: 156439 - DNA, 447 bp, Arabidopsis thaliana columbia
cggacgcgtgggattcgatttgattcgtttctcgaatcgaagcgatggttttctacttcaaggcccgtcctgatgctggcgactacaccatcttcatggggcttgataagttcgagaacgaggagctcatcaagtacggcttccctgaagatgtctggtttcacgtggataaaatgtcgtcagctcatgtttacttgaggcttcatagaggccaaagttttgatgacattagtgaaggtgtgctggaggactgtgctcagcttgtgaaagctaactccattcaaggcaacaaggtgaacaacgttgatgttgtgtacactccgtggtccaacttgaagaaaactgcctccatggatgttggtcaagttggtttccacaattcaaagatggtccggactatcagagtggagaagcgagtcaatgaaatagttaacagactgaacaaaa

SEQ ID NO: 156440 - DNA, 449 bp, Arabidopsis thaliana columbia
cgatcttacgaagaagcaaatatggcggttccattgcttaccaagaaggttgtgaagaagaggtctgctaagttcatcagaccccagagtgaccgtagaatcaccgtcaaggaaagctggaggaggccaaagggtattgattcaagggtgagaagaaagttcaaaggtgtgactttgatgcccaatgttggttacggatctgacaagaagactcgtcactatcttcccaatggattcaagaaattcgttgttcacaacacaagtgagctcgagttgttgatgatgcacaacaggacttactgtgctgagattgctcacaacgtctccactaagaagagaaaggcaattgttgagagagcttctcagctagacgttgttgttaccaacaggcttgctaggctccgtagccaagaagacgagtgaagaagaatcttgcctactacttagtt

SEQ ID NO: 156441 - DNA, 379 bp, Arabidopsis thaliana columbia
cagatcacaaaaccctaatttcgaatctttattcttcagaatggctttctgtaacaaactcggtggtctattgagacagaacatttcttctaacggaaatgttccggttacgtctatgctcggatctctccggttgatgtctaccaagcttttcatcggaggtctctcatggggaaccgatgacgcatccttaagggatgcttttgctcacttcggtgacgttgttgatgctaaagttatcgttgatagagagacaggaagatcaagggggtttggatttgtcaacttcaatgatgagggtgctgctactgctgtcatttcagagttggacggaatggaactgattggtcgtgacattctaatgtattctgctaatgat

SEQ ID NO: 156442 - DNA, 437 bp, Arabidopsis thaliana columbia
  unsure (1)..(437): unsure at all n locations
cggacgcgtggggtgacagtgaggtgctaatgactatgcttgagcttctcaatcagcgggactgattcgaggcgtcgggcaaaatcaaggttttgatggctacaaatcgtattgatattctggatcaagctcttctccggcctggaaggattgataggaaaattgaatttcctaatcctaatgaagagtcacgttttgatatcttgaagatacactcaaggaaaatgaatttgatgcgtggaatcgatctgaaaaagattgcagagaagatgaatggtgcttcaggtgctgagctgaaggctgtatgcacggaggcgggcatgtttgcacttcgtgagaggagagtacatgtgactcangaagactttgagatggctgtggcgaatgtattgaagaatgacacagtgaagaacatgtctctgcttaagctcttgtag

SEQ ID NO: 156443 - DNA, 434 bp, Arabidopsis thaliana columbia
cgaaacacaaagcaatgggctcttctttttcattaacaaggagaaacagagcaccgggagtgcctttgtttcctctggtgatctaatctttctctgtttcttcctctactttttaaatttctcaaacgctcaatcatcgccggttttcgcctgcgacgtagctgcaaacccttctctcgccgcctatggtttctgcaacaccgttttgaagatcgaataccgagtcgctgatctggtcgcgaggctcacgttgcaagaaaagatcgggttttagtgagtaaagctaacggcgtgactcgtcttgggattccaacgtatgaatggtggtctgaagcacttcacggcgtttcttacatcggacccggcacgcatttttctagccaagttcccggagctacgagtttcccgcatgttatactcaccgtcgctttttt

SEQ ID NO: 156444 - DNA, 229 bp, Arabidopsis thaliana columbia
aaaagagctttggaggttgttggtgatgttagacagaccaaatcacttaaattaatgggtttttcgattatctatgagagcgattcttctgactattcattgagtggtggggaggagcaagctgttgctgctattggtgatggctcatcatcaaggcaggagcaagaacagtattctgattttaatgacattggaggtgattcttcagattctcactctcttatcaatg

SEQ ID NO: 156445 - DNA, 269 bp, Arabidopsis thaliana columbia
caatttccaagcagagatgacggtgaattttatgttctcgcgtcttgtgtgtaaacacggacccttctatcgtgtagtgggggccgattaaaaatcgtgcatggacggttaacatattgtggtgtttggcttatatgatccacttcaaggcattagaagatgctgatagagtgagtctcaaaatttacagtattaagttctggttttctgttggagctcaaccattatacacagtggaaagctattcttttcagggccgttttgatacc

SEQ ID NO: 156446 - DNA, 427 bp, Arabidopsis thaliana columbia
  unsure (1)..(427): unsure at all n locations
ctccgacttcgtcttcctcatctatcatcgtcgtcgtcaaccttatttatctcttaatttgtcattaaaaccaaaaaaccagaaaaaaagccttagctttcgtttcttcaatcccagcaaaaaaaatggctcaggttcaagctccttcttcacattctcctcctcctcctgctgttgttaacgacggggctgcgacggcttctgctacccctggaatcggcgtcggcggcggtggagacggagtcactcacggngctctttgttctctctatgtcggagatctggatttcaatgtcaccgattctcagctttatgactatttcaccgaggtgtgtcaggttgtatctgttcgtgtttgtcgtgatgctgctaccaatacttctcttggttatggttatgtcaactacagcaacaccgacgatgcgga

SEQ ID NO: 156447 - DNA, 424 bp, Arabidopsis thaliana columbia
ttaaaagagaattttgacccggtcacgattgttcaacattataaaaaactagaaactgcgtgcgctcaacgttttgacagaccagaaatattttcagggaggcttttaaaactttgaagcaataaagagcgctgttgtgaagtgtccactattatgcaaagagtttgttgtagatccatggcagatctactatgctcggactaaaggcgcacatgcagaactgcttattgctgctgtattggctgacctagaaataaccttcttgcttaagattttcaagaagcttaacttggcttcccttgttgaggtacattatgagagagagatgggtcgtgtacttcgaatagaaagaatcgagcttgtttgcatcaataaccgaagtcttgaaacattttaagtggacattatttatacaaagaagctt

SEQ ID NO: 156448 - DNA, 418 bp, Arabidopsis thaliana columbia
gagcgagggtccaagatgcagtctccgtagttaaaaggtgtatagtgatctcgctgtagaggatttcaaaatgttattgttgagtgtggcagcaaccgttgttgctctcggactctttttcttcctggacgacattacaggttttgagatcacatacatcatggagcttccagaaccatacagtttcatattcacttggttcgctgctgtgcctgtgattgtatatctggctttatcaatcaccaaattgatcatcaaggacttcttgatcttgaagggtccttgtccgaattgtggaacggaaaacacctccttctttggaacaattctgtcaatctccagcggcggcaaaaccaacactgtcaaatgcaccaactgcggaaccgtgatggtgtatgacttgggttttaggttgatc

SEQ ID NO: 156449 - DNA, 409 bp, Arabidopsis thaliana columbia
ctaaacgagaatacctgccagtcagcgataattcaacaattcaaaaccctagagaatgtgtgcttcctttctccatccgacgtggtcgattctccgaggaagttagaggctctttccttgacaaatctgaggtcacagatcgagttctctctgtcgtcaaaaacttccaaaaagctgatccttctaaggtaacaccaaaagccaatttccaaaatgatctagggttggacagtttggacagtgtggaagttgtgatggcattggaggaggaatttgggtttgtgatccctgatgacgtagctgacgagcaccattccagagatctagccgttgactttattgcttctcatcctcaggcttattgaaaaagagaaacaaattcttcggtgcttatgcgtgcctcatctgt

SEQ ID NO: 156450 - DNA, 425 bp, Arabidopsis thaliana columbia
atttgcttcttctccattctttgcaatttgcatgcattgctcatcaaaaaaattcctttctgggtgttgttggaaaatagctgtgtaacttcaaatgttgaaactttgcttttcttcttcttctcttttggtcaaattttgtgttctctctagagcaaaaccctaattctctcaattctactcaaaattaatatctcttgcttccttgagaaagataaagatttgtgtttactaaggttgaggaaatgataatagcaaagcaatatcgttgcattcactcggcgacttgtcattgcacgaaaggacatcttagcgaagaagtattgtttcttatggttcagcatctaaactggaaccctaatgtgattgccactctatcttgtgtttgtaaatggattgctgatctcgctaagcggttattgtgg

SEQ ID NO: 156451 - DNA, 271 bp, Arabidopsis thaliana columbia
aaaacccaaacgctggatggaaagctgctataaatgatcgattttcaaacgccactggtgcagagtttaagcgtctgctcggtgttaaaccaacaccaaagaagcatttcttaggtgttcctattgtgagccatgatccatctttgaagctacctaaagcttttgatgctagaactgcttggccacagtgcactagtattggaaacatcttagatcagggacattgtggttcttgctgggcatttggtgctgttgaatcactatcagatag

SEQ ID NO: 156452 - DNA, 254 bp, Arabidopsis thaliana columbia
caccggtaaaaatggcgatgtgggtattcgggtacggatctttaatatggaaaacgggttttcctttcgacgaaagcgtgcgtggtttcattaaaggctatcgccgtgtcttccatcaaggtagtactgatcatagaggaactccggattttccgggaagaacagtgacattagaagctgctcatgaagaaacttgttgtggagttgcttacaagataactcaagaggaagatagaagagatgctttattgcat

SEQ ID NO: 156453 - DNA, 415 bp, Arabidopsis thaliana columbia
ctaagattaggatcctcttttcaaggaaaacaattaaaaaaatcttataatttacaatcaattcattcaatatttccctttttagaagacaaattaggacattttaattatgtgttagatgtactaataccttaccccatccatctagaaatcttggttcaaaccctacgttaccgggtaaaagatgcctcttctttgcttttttttcggttctgtttatacgagtattgtaattggaagaatttatataaaaaaaaaaaatcaattttgaatccaagatttttcttgttcttatataattcttatgtatgtgaatacgaatccatctttttttttctacgcaagcggtcttcgcatttacgatcgacatcttatgaagtcctttttgagcgaatttgtttttatgggaaaatac

SEQ ID NO: 156454 - DNA, 426 bp, Arabidopsis thaliana columbia
gctaatcatttgcaactccgacgaacgttttatcttctccaacaagtagatagcaatggagacttcaagtccttcaggtttggggaacggagctttgttgaggagattcattggccaaaaagtcagaactgtgattcaagtgactggttcagagattggatctgtggttggcaaatctactgatgatcttcagatcgttgttagaggatcgtctcctccttctcctcttactacttaccttgaggttattggaattgcagagagtgataacgctattcgagctgaaacttggaccaattttggcaacacttttgatacacagaactacaacgagctatgtaagctagcaaatggggtgttcaagcacttgttcatctaatggtgtgatgatgattatgatcatggaatcgtttccatttaaaacat

SEQ ID NO: 156455 - DNA, 430 bp, Arabidopsis thaliana columbia
aaagggtttactctgtcttcttcagacttctcagtgatcgaagctatgatgacgacaacaaccaatactatggctatgcttcaaaacctcgtcttctctgttccaatctctcgtatggtagttcggcgtcactccctcgctaccaccttctccgctgccgccacaaccgtcgtaccgtctcctaaaccggtatcagccaaaccggcgcgtactccacacgtggactcacatgttctcatcggaatgtcagagcctgagcttcaagagcttgctatcaacctcggtcaagaaggatacagaggaaagcagctccatcatcttatttacaagagaaaggttaataaagttgaagactttagcaatttgccactgacgtttcgtaaaggacttgtggatggtggatttaaagtgggaagatcacccatttacc

SEQ ID NO: 156456 - DNA, 395 bp, Arabidopsis thaliana columbia
  unsure (1)..(395): unsure at all n locations
gtaaagaggttagagaagaagtggatgcacataagtaaaatggagaagaagaaacacaaaatgatgaatcgaataacaatgacgaaggagcgaaaacaaggaatctgttggatgattcatcaccggcgacgaaagtgaagtctcagtcttacaaaacttatagaagctgtgtgccatctgcagacgaagagaagttatcagttcttggttttgagtcgattatgctaggactgtttctgttaagcggagctgctatttacatcagaaagagacagacggtaccgatgcttggtgtattattaagtggaagattgcaaggcaattctcgtttttgaaagaaccatttctcggnntnnaaaagctttcatctgttcacttatatacagatttaacaa

SEQ ID NO: 156457 - DNA, 294 bp, Arabidopsis thaliana columbia
gaaggtattgttccttttaatggtcgtttaagcaatgaatcatcgttatattctaatttggggtcacggttgggagtaccttctacttatgatgacatttcttattcatgagtgtgctttagttattcctactttttgctacattattttacaacaggttctgatttgttttgttacaaaacagccttttaatcttttttccttattttcattatatatttatttctttcttttctatttattttacatatttattttctttcttccttttttttttttttattttttttttta

SEQ ID NO: 156458 - DNA, 373 bp, Arabidopsis thaliana columbia
cacagagaaaacttcgtctctcttctctgtttttccctctcatttcctgtgagataaaggcggagtctctctccagttattgggctcatccatcgattcttagagttcaaaatggttgatcaagttcagcaccccactattgcgcagaaagctgccgggcagttcatgcgttcaagtgtttccaaggacgttcaagtgggttaccagaggccttctatgtatcaaagacatgcaacctacggaaactactccaatgctgcatttcaatttcctccgacatcccggatgttggcaacaactgcttctcccgtgtttgtccaaaccccaggagagaaggggttcactaactttgtccttgactttctgatgggtg

SEQ ID NO: 156459 - DNA, 423 bp, Arabidopsis thaliana columbia
atttcaaggatgttttagcagatgatgtttatatagtttcgtctttaccttctacacatggtgatgactagacctgttgaagggaagaggactccacttcatgcttctcctcaatggattcgtgctcattatcttaagcgaattaacagagaaagagttttacttctccgtgactcgattcaagactctccaaagacctcccttcagatcttcagaaactccgatgcaaggttgctttccaagcgcttagattttctccgaggattcttgaactcggtaataaactagcttcaagaatgcgtaaccaaggacagtattttctcccttcatctaagaatggagaaagatgtttgggttagaactggttgtctccctggtttaactcccgagtacgatgaaatagtcaacagcgaaagagaacga

SEQ ID NO: 156460 - DNA, 350 bp, Arabidopsis thaliana columbia
ctccttctccttcttccttgcaaatggatactttatcttcaaactcttcggatctcacgaccaagtcaagtctcggaatgtcgtcgtttaccaacatgtatctcctcacaacgcttcaagcccttgcggccctttgcttcttgatgattctcaacaaaataaagtcatcttcacgaaacaagaagttgcatcctctcccgccaggacccaccggttttccaattgttggaatgattccggcgatgcttaaaaaccgtccagttttccggtggctccacagcctcatgaaggagcttaacacggagatagcttgtgtgcgtctaggaaacactcacgtgatccctgtgaca

SEQ ID NO: 156461 - DNA, 414 bp, Arabidopsis thaliana columbia
cttcgataaggattttactctccagagaaagtaaaaaaaaaaaaacctcctctgcttttgtgagccgttaaggaaaaagacggagtggcaccgaaatcctccaaacccccctttaaggacttaattgtttttttaagtccaaagccggtcttcgaaaccttccccgccgcaaaaatcaaaccgttaccgccgaacttaaggagcttggcttaagccatttaaaccccattggaccaattaagaccgcgtttacttaattcaaaacccgaaaaatttttgaggatatggcctttgtgccaataatttggccaagtctcacaccccaaagtttctggtgttggctcgctctgattctcgagtttgcccatctcacatcttgaatttccaacctggtgaggttttttttgtcagaaa

SEQ ID NO: 156462 - DNA, 372 bp, Arabidopsis thaliana columbia
gaccaaaccaagaagaagaagatggtgaaactgtttaactcgaggaaacccgaaaaaatttcgagcaagaacatccccatgtgcgagttcgtggtcaatctggatcatggtgatccaacggcgtacgaagaatactggaggaagatgggtgacaggtgtacggtgacgatacgtggttgtgatctcatgagttacttcagcgacatgacgaacttgtgttggttccttgagccagagcttgaagatgcgatcaaggacttgcacggtgttgttggtaacgctgcgacggaggatcggtacatagtggttgggaccggttcgacgcagttttgttaagccgtcgttcacgcacttttttttctagcctggtgt

SEQ ID NO: 156463 - DNA, 395 bp, Arabidopsis thaliana columbia
cgccggcgcgccgcccaatcccacatggccctaacctctttctttttcatcaaatgtcaaccgccaccctcggcgggggccctcctccacctgcggggcctatccctacctatataactagcctcggccttggctactccatagccatagctctaggtttcctcgttcttatctccacaatcattctctcttcttacatctgttgccgcgcctcacgcctccgcttttctgcctccgccgcaaacgcaaacgcaaacgcattgtttagcgaccgtggcgttatcgtcccaagaatcatattcgtagctgaagactactatcttgagtttggaaacgacttctttggaggacttgatcattcagtcattaaattcttaccctaaattccattttac

SEQ ID NO: 156464 - DNA, 282 bp, Arabidopsis thaliana columbia
cgggccggcccacgcgtccggttggcgcattctcttataccaccattaacgtgcgtcaacaccggaaccgttgaatcaggcggtgctggtatcaggttcgagcggtgcctcgataccgattctctcgccaagatctctctttccaccgtcatgtcgaaagctcgtgtttataccgatgttaacgtgatccgacctaaggattattgggattacgaatctctcaatgttcagtggggggagcaagatgattacgaggtagtgaggaaggtggggagagggaaa

SEQ ID NO: 156465 - DNA, 415 bp, Arabidopsis thaliana columbia
  unsure (1)..(415): unsure at all n locations
ctcgtccttgaaacttgagcttcaattacatagaatggctgcttcaagtgctgtcaggcgggaactacgtcctcaaggcgccgccattcgcactggatgctttggagcctcatatgagcaaacaaactctggagtttcactggggaaaacatcacagagcttacgtggacaacctcaagaaacaggttcttggaaccgagcttgaaggcaagcccttagagcacattatccacagcacttacaacaatggtgatctcctccctgctttcaacaacgctgctcaggcgtggaaccacgagttcttctgggagtcaatgaaaccaggtggtggaggaaaaccatcaggagagcttcttgctttgcttgaaagagatttcacttcttatgagaagttctatgaagagtntaatgctgc

SEQ ID NO: 156466 - DNA, 427 bp, Arabidopsis thaliana columbia
cacttgtgtcttcttctccaacactaaaccctaattaaatgagattcttccgcaaaacctggctttatctttctctcttcgtgtacttctttctttatgaatcttccatggctgcaaatacaatcagaagaggcgaatctttaagagacggaatcaatcacaaacctttagtctctccacaaaagacattcgagctaggtttcttcagtcctggaagctctacgcatcgtttcctagggatttggtatgggaacatcgaggataaagctgtggtatgggtagcaaacagagcaactccaatttcagaccaatctggagttctcatgataagcaacgatggtaatctcgtgttattagacgggaagaacatcactgtctggtctttaaacatcgagtcaagcactaccaacaacaacaacagagtctt

SEQ ID NO: 156467 - DNA, 436 bp, Arabidopsis thaliana columbia
ccgggccgagccgacgcgtccggctattttccagagaatgaagaactatactatctatgcagtctcaatcaccatccgtattgtgggtggtttcatgcttattggtttgatatgggaatttgacttctcagccttcatggttctgatcattgccattcttaacgacggtaccatcatgacaatctcaaaggacagagttaagccatctcccacacctgatagctggaaacttaaagaaatttttgctactggagtcgttctaggaggctaccaggccatcatgactgttattttcttctgggcggcgcacaagactgactttttctcggacacattcggtgtgaggttcattagggacaataaccacgagctaatgggtgcggtgtacttacaagttagtattattagtcaagctctgatcttcgtcacaagatca

SEQ ID NO: 156468 - DNA, 332 bp, Arabidopsis thaliana columbia
tcagctctctccatcgtcgtcgtatctgtgactctcgtgatcatcgcctgaaaaaaatttgagataatggccagaaagttcttcgtgggaggcaactggaaatgtaacggaactgctgaggaggtgaagaagattgtgaacactcttaatgaagctcaggttccttcacaggatgttgtagaggttgtggttagccctccatatgtttttcttcccctggttaagagcacattgaggtctgacttttttgttgcggcacaaaactgttgggttaagaaaggaggtgctttcactggtgaagtgagtgcggagatgcttgtgaacttggatat

SEQ ID NO: 156469 - DNA, 428 bp, Arabidopsis thaliana columbia
ccggttggctctgacaaaaaaatggcctgatattttttaaaataaaggcatagggttctactgagtccaccctggctgggctgaggcaccattttttgccaagagtttaccgagtttcagtgaatcgttcgcgggtaagcttagaacaagcgaacaaggagccgatacaatcgtttggttagcactgcatccaaaagagaagcttgtctctggtgcattctatttcgatagagctgaagcaccaaaacatctaaagcttgcaggtacaagcaagtctcatgaccttattgactcagtcattgattctgtgcattccattggcatctcttaatccttaaatgtccatcttttacatagtttttttcttgaaaataaaatgtgattgcacgtaacaatattagttttttctcattattgtggaaatatta

SEQ ID NO: 156470 - DNA, 403 bp, Arabidopsis thaliana columbia
acaaattcgaaaacagcacacggcgtttgcgtcgcttatactcggagctcctccgggagtgaccgtcgcattaccttggtcacggttatcatcttctcactctgaaactgccggtgtctctctctcttgcttcactcatcaattctctctctccacttcctcatccagctcaattccactcgtgtactgtggcagaggtgaccggaaaacagctaaaggaaagcgtttcaatcactcttttgggaatgcgaggccaagaaacaagagcaaaggaagaggaccggagagagtaccggttcctccagcaccaccgaggaaagataagtttgagaacgacgagaagatcaaaatcgatatcgacgagtctctcttctctaattagaaatatgagattcttcacttg

SEQ ID NO: 156471 - DNA, 420 bp, Arabidopsis thaliana columbia
gtgagtttgagaggaaccggcgaaggtagagtttaaggaatgggacagagtatatggcgatggttactacaatgatttaggcgtcccaccaaagaacccacggcctgtacttggagggacacaggagtatccttacccaagaagaggaagaaccgggcggaaaccaactaaagaagatcctcaaaccgagagcaggctaccgatcacatcgagcctagacatatatgttccacgagatgagagatttggacacttgaagatgtctgatttccttgcttatgctctaaaagcgattgctcagttcatccaacctgcacttgaggctgtattcgacgatactcctaaagagtttgattcttttgaagatgttcttaagatctatgaagaaggaatcgatctaccaaaccaagcttttattga

SEQ ID NO: 156472 - DNA, 387 bp, Arabidopsis thaliana columbia
  unsure (1)..(387): unsure at all n locations
aatggcgacgacaacaacagaagcgacgaagacatcatcgaccaatggagaagatcagaagcagtctcagaatcttcgacatcaagaagttggtcacaagagtctcttacagagcgatgatctctaccagtatatactggagacaagtgtgtatcctagagaaccagaatcaatgaaggaactcagggaagtgacagcaaaacatccatggaacataatgaccacatcagctgatgaaggacagttcttaaacatgcttatcaagctcgttaacgccaagaacacaatggagatcggagtttacactggctactctcttctcgccaccgctcttgctctccctgaagacggncaaattctggctatggatgtcaacagagagaatta

SEQ ID NO: 156473 - DNA, 398 bp, Arabidopsis thaliana columbia
accagcaccagccccagccccagtaccggaatcctgagtttgtgcaccttttaaataccaggcatcttcttcgtgcaatagaggtgggttctttgttcatacaaagtgagaattatactctgatttgggaaaaacatagacatgatcttactattagttttcattttggtgttaaagaagagtgcttaatatttctcatttgttatgtgaggtattggaaacaggctttttttacttgattggcgtggagaacaaacatgttttgcatttggtgtcttttttttttgttctccttttctgaatatattgacaagctctgtttaagggtttctgaaaaaaattaattctatataattgtcattaatttatgttaatatggggcggccgctctagaggat

SEQ ID NO: 156474 - DNA, 382 bp, Arabidopsis thaliana columbia
gagaaatcagcttcaagcttaagagagcttttaaagcgaaagcgacgatttcttctgcatggtgagagcaaatctccagagccgttttctcttcttcttcttcctcctcgcgccgtctctgaaactccatcatcgtatcaatcaaattgcttcctcctccaaattgaaaaacaatggaattggattcggagaacaaattgttgaagacgggtttggttatagtggcgacacttgttatagccaaactcatcttctctttcttcacttctgattctaagaagaagcgtcttcctcctactcttaaagcttggcctccattggttggaagtcttatcaaattcttgaatggacctattattatgcttagagaggtattccctat

SEQ ID NO: 156475 - DNA, 389 bp, Arabidopsis thaliana columbia
  unsure (1)..(389): unsure at all n locations
caactaatgaataatctaaacacagacgccttttttttgtctatcgcatggccaanaatagggggtcatgtgagaaaggagaggggagtcattcaagctggtgtgcaattctaccacgacctcatcgactagctcataaaaaatggtataactccattcgttactgtttttcactgggacactccacatgatttataagatgaatatggcggcttttaaagcgaaaggattgtgaaggatttccgagagtatgcatattttgttttccaagaatacggtgtaaaagtgaaacattggatcactttcaatgatccatggttttttttgcacgctggcttattacgtaagcaaaaaggcacctgttctgtgctctacttacgtcaaatgct

SEQ ID NO: 156476 - DNA, 435 bp, Arabidopsis thaliana columbia
ccgtgatgagagctgcattggagtgctgttttaagggatggggaacttcggtcatagttggtgttgcagcatcaggacaagagatatcaactcgtccgttccaactcgtgactggccgtgtgtggaaaggaacagcttttggtggtttcaagagtcgaacccaagtgccttggcttgtagaaaagtacatgaacaaggagataaaagtggatgaatacataacacacaacttgaccttgggagaaatcaataaggctttcgatctattgcacgaaggtacttgccttcgttgtgtcctcgataccagcaaatgactatatgggtcctctctgctttaatctatgtgttcttgtgactttcgtcttttatcggtattgacatttcctaagagcaacagactactctactcgtgtgtgtctcgtttctatcttatgc

SEQ ID NO: 156477 - DNA, 322 bp, Arabidopsis thaliana columbia
ggcgttgctctctcgtccccaagaaaatcttttcttttatttttttgtttactaaatgtggacattatctttttaaagggagaaagtcctaaatttcatatgattcgatgttcttttcagacatggagcgaaaaaccctagcgattacgcctccttccttcttcttccaccttgtaggaggagcatttggttcatcaaaggcgtttcattgtcttctccttctctcatgtctattgctttcatcagtcaattcatagcatatcttatcttgaatatgtgtacaacactgtttctgctgcttttgtttttcagggctttatta

SEQ ID NO: 156478 - DNA, 427 bp, Arabidopsis thaliana columbia
ggctgaagcagcgagaagacaaggtggtgggtgaccattaccgccacctccgagaggcgtggaccaacaacctcctcgccctagacctgaacctgtcgatcgtgaaaagacatgtccccttcttcttcgtgttttcaccaagagtggtggtcatcatactagtgaagattatgctgtgagaggcaaagaaccaaaggatgaagttcaaatctacacttggaaagatgccagtcttcgcgagctaacagatttggttaaagaagtttctgtagcagctaggagaaggaatgctagattgtcttttgcgtttgtttatcctaacaataaaggtggctataatgtgagagaggttggggagacgatggcttatccaaaccgaaaacaaccagatgacagtaaaacgctttccgaacttccgtttgagatt

SEQ ID NO: 156479 - DNA, 386 bp, Arabidopsis thaliana columbia
cttgtctcttagagaatgttcttgctgagatggtgatttcagctgttccaagtattgaagtggttcggtttgttaactccggtacagaggcatgtatgggtgtgctacgtcttgctcgtgccttcacagggaaacaaaagttcatcaagtttgaaggttgttatcatggtcatgcaaactctttccttgtcaaagcaggtagtggtgtagctactttgggtctacctgactcgcctggggtccccaaagcagctacttcagatactttaacagcttcatacaatgatattgctgctgttgagatgctttttgaggcaaacaaaggagagattgctgtcataattcttgaacctgttgttggtaactttgggtttattacaccttaa

SEQ ID NO: 156480 - DNA, 401 bp, Arabidopsis thaliana columbia
ggggcgggcccacgcgtccgcgcactctccgccaccttcttccctaattttttctttctcgctacctctctacgtgataaggaagaatttcgactgtacgaagctcctccactagcatgaccaaggccgttcttagaagccagacaaccaacaagctcattactaacaagagctacaacttatctgttggatcaacgaaaagggtttcgagatcttttggtttgaaatgctcagcgaattctggtggtgctacgatgtcggcggtatacaaggtcaagctcttaggacctgatggtcaagaagatgagtttgaggttcaagatgatcagtacatcttggatgcagctgaagaggcaggagttgacttgccttactcttgcagagcccgtgcgtgttctact

SEQ ID NO: 156481 - DNA, 382 bp, Arabidopsis thaliana columbia
cgtccgctcagtcaccttctctcgcttgcaagtcaattccattccctaagctttgccgtacgatcctgaacgctgtcaaatcctcaccggcagatccttaccgttacggcaaattcactataaagcaatgcctcaagcaagcaagccgtttatccaaagtcatcaccagttactcgcggcgcgtggaaagcaaaccaggctcggccacggtcgaggaaataggggcggtggcggactgcggcgagttatcggagctgagtgtgaactaccttgaaaccgtcacgacggagcttaagacggcgcatgtgatgacggcagctctcgtctagcatgtgaacagtcttctcagtggtgtagtgacgaatcatcagacgtttcttga

SEQ ID NO: 156482 - DNA, 451 bp, Arabidopsis thaliana columbia
  unsure (1)..(451): unsure at all n locations
accgggcgtccgatcccaagtaatcctaactatacaaaacacataattatatggctccttcaacaaanaatcgctcgttacttctcttatatgtcgagggggtcattaaccctccggtgatgagtccatcatcaacgaccatctccaacttccatcggacggcaagtggagaaccgatgaagaagtgaggtccatctacttacaatggtccgcagaacacgggaaatctaacaacaacaacaacggtatcatcaacgaccaagacaaaagattcaatattttcaaagacaccttaagattcatcgatctacacaacgaaaacaacaagaacgctacttacaagcttggtctcaccaaatttaccgatctcactaacgatgagtaccgcaagttgtacctcgtcgcaagaactgtacctccccgccacatcttttatgccaagaatgttaac

SEQ ID NO: 156483 - DNA, 402 bp, Arabidopsis thaliana columbia
ctctattgctctgtctactcctcttcatctttttaatatcatcctctctccatgaaaccggggctggaaaacacaataaatataaacccgcaccgatcatgagcctagtcccaagaactctctacgaccaaatcttcatccacaaggacaacaacgcatgccctgcaaaaggtttctacccctatgaagctttcgtggaggctacaagatccttcccgaagttcgggagcgtaggaaacttttggacaaggcgacgcgaagtggctgcgtttttggcgcagatatcttacgagacaacaggtggttgggccacggtaccagacggaccatatgcgtggggattgtgttttaatgaggatgtgtgttcacagagtaattattgtgatgcttctaataaggttt

SEQ ID NO: 156484 - DNA, 375 bp, Arabidopsis thaliana columbia
aagtgatttaccagatgacatgccactagacagctatgtttttgaagttcctcctggtcctaattcacctcaacaggttcatgtaacgcaagggaaccatgaaggtaatggagtgatcatttcttgggtgactccggttaagcccggttctaagactgttcaatattggtgtgagaatgagaaatcgaggaaacaagcagaagcaacagttaatacttaccggttctttaattacacgtctggttatattcaccattgtctcatcgatgatttggaatttgatacgaaatactactacgaaattgggagtggcaagtggtccagactgttctggttctttattccgtctaaatcaggccctgacgtaccttacac

SEQ ID NO: 156485 - DNA, 357 bp, Arabidopsis thaliana columbia
gagagattcaaaaatccgattccagttccattcctgggcaaacaaaggttggtgtttgtcgggtctcaaagctttttgcaaagtgccaaaaagcaaatcgtgggaagagattcatcttctctctgtgcgttcatcggatctcttagcttttggttcgtcgtcaatggcggaagagacggagaaaaagtacattacgaactaagatcttaaaaaacacaacaaatctggagatctatggatcgcgattcaaggcaaggtctacaacgtctccgattggattaaaactcatcccggaggcgacacggtgattttcaatcttgttgtcaagacgttacctatgctttcatcgcatttcat

SEQ ID NO: 156486 - DNA, 431 bp, Arabidopsis thaliana columbia
ccccaggcgtccggttcaattacacaggctcttgagttcctcattcctgcttataagggacatccacgtgtcatggcatatgtcctacgagttttagagtcctaccctcctgaacgagttacttttttcatgccgcagttggtgcagtctttgcgctatgatgatgggaggctagttgaagggtatcttcttagagctacccaaagaagtgacatatttgcccacattctcatttggcatttgcaaggtgaggatgtgcaggaaactccgaaggatggttctatcgataagaatgcggcattccaagaaattttgccacaggttcggcagcatatcattgatggtttcagccccaacgccttggacatgttcactagagagtttgacttctttgacaaggttacttctatatctggggtgttattccctct

SEQ ID NO: 156487 - DNA, 317 bp, Arabidopsis thaliana columbia
cggatgcggtgtttgctttccagctgaggaatcctgttcataatggtcatgctcttcttatgactgatactcgtaggagacttgttgagatgggttacaaaaaccctattcttttgcttcatccgttaggtgggtttacaaaggctgatgatgttcctttagattggaggatgaagcaacacgagaaggttctagaggatggtgttctcgatccggagactacagtggttttgatatttccgttacctatgcattacgctggttcaaccgaagtgcagtggcacgcataggctagaattaatgctggtgctaacttt

SEQ ID NO: 156488 - DNA, 423 bp, Arabidopsis thaliana columbia
ctctcttctcttacaatggagaattcaccgagatacatagaagcgacgaatctgattccggggccgagatgtcacaacagcagcaacagttgcggtatgagcagtagcagtgaaagtaacaaaccaccaacaactccgacccgacacgtaaccacaagatccgaatccggtaacccgtacccgacaacattcgtccaagcagatacttcttccttcaaacaagtcgtccagatgctaaccggatccgccgagagacccaaacacgggtcatctttcaaaccaaacccgacccatcatcaacccgacccaagatccactcctttttctttctcaattccaccaatcaaagccgtacctaacaagaaacagtctttttctttaacattagggtttcgtctctaccagcgttgttattcaatgaag

SEQ ID NO: 156489 - DNA, 443 bp, Arabidopsis thaliana columbia
tcccgaccaacaacaacaaaaccctaaaatcaagcttcgaaaatgggagagatgatgtacaggctggttcgcttcagcgtcactactgaccctaggattgtatcatctcatctgcactttcttccatctccttaaatctccccaatcctacgccgcgaaacccttttacccttttccacgtctctcctccgtcaccggaaacaaccaccacaatcacaaccgcctccaaaatctaccactgttcatcctcatactctctctattcgtcgctttccttcacgaaaccctaatctccttctactccgatcctctcgtcaaaggaagtactcctgttcaccgattctcatctctcaattccgccgccgggttcttcctctttctcatcatcgccatttactatctcctctccgattcaacctcgttaatccctctcccttccgatc

SEQ ID NO: 156490 - DNA, 439 bp, Arabidopsis thaliana columbia
gaattacaaacaaaaatggttttgcaaaagcttcctctcattgggctgcttttgctcctgaccagggtcgcctctccagcaaatgcagatggacctgtttgcccgccgtcgaacaaactaagccgggcaagtttccctgaaggttttttatttggcacggctactgcggcataccaggtcgaaggtgcgattaatgaaacttgtcgtggaccagccttatgggacatctactgtagaagatatccagagaggtgcaataacgataacggcgatgtggccgttgatttcttccatcgttataaggaagatatccaactaatgaagaatctaaacacagacgcctttagaatgtctatcgcatggccaagaatatttcctcatgggagaaaggagaaaggagtgagtcaagctggtgtgcaattctaccacgacctcatcg

SEQ ID NO: 156491 - DNA, 351 bp, Arabidopsis thaliana columbia
ttgggccaccggatggccccataatcaatgtgattgacactcctggtctcttcgacctggccgtgtccgctgagtttattagtaaggaaatcgtcaactgccttattcttgctagagaagggctacatgctgtggtgttagttctatccttgtcgactcggatttcacaagaggaagaaaacgcactttgtacgttacagatgttgttcgggggtaaaatcgttgactatttgatcgttgtattcacttgtggtgatatgttggaagatcgaaatatgactttagaagattatttgtccaatggttgccctgaatttctaaagaatgttctcagactatgtggaggcagaa

SEQ ID NO: 156492 - DNA, 312 bp, Arabidopsis thaliana columbia
  unsure (1)..(312): unsure at all n locations
aaccacttncttatccacaccaaatttcgaacttttctcaaaaagctcccttctttggtttcaaaatggcgtctgcgggggctttttttttccccttccttctctgttcttcccgtcagaattagttgggaggaggaaattatcagcaaaggtcaaagttagctccaccaggaggacattcatccgtttaattgttagacctaatgtaaaggaaatatctttagaccagctctataaatcttcttcacaagctgtttataataaacttgcatattgtgtggctcacactctcgcccctagagggaggaatgt

SEQ ID NO: 156493 - DNA, 428 bp, Arabidopsis thaliana columbia
  unsure (1)..(428): unsure at all n locations
attcngggtcgaccaggcgtccggggagcancctgagcaggaggaagaagacttagaataagaggagcagctactaccatgggtctcgagacggagctttgtggtttcagtggacagaagatttacccaggaagaggaattaggtttatccgatctgattctcaggttttcttgtttcttaactcaaaatgtaagaggtacttccataacaagttgaagccatccaagcttgcatggactgccatgtacagaaagcaacacaagaaggatgcagcacaagaggctgtgaagagaaggagacgtgccaccaagaagccatactcaaggtccattgttggtgctaccttggaagtaattcagaagaagagagctgagaagcctgaagttcgtgatgcagccagggaagctgctcttcgtgagatcaagga

SEQ ID NO: 156494 - DNA, 405 bp, Arabidopsis thaliana columbia
aacaaatcccaaagcttcagaggaagaagaagaagagagtgagaaacaatggcgtcgacggctctctcaatcgcaacaacgagccgttcctcttctcctctcacttccgcttccactcatcacttcctttccaaacccaccgcaatcgaattcccatttcgtctcagctcttcttctagccaccgtgcaatcaacctccgtcctatctccgccgtcgaagctccggagaaaatcgagaaaatcggatccgaaatctcctccttaaccctcgaagaagctcgtatcctcgtcgactatctccaagacaaattcggtgtctccccactctccttagcccccgcaacagcggccgttgcagctccagccgaccgtggcgcggcggctgtagtggaagagcaaacagag

SEQ ID NO: 156495 - DNA, 414 bp, Arabidopsis thaliana columbia
cactcttcatcttcaaagactgcgccttttagctcagtgaaaaaggttcgagcttcggaaactatggcagcattccctaaccttaacgctgatgctggattgaagaagctcgacgagcatcttctcactcgcagttacattactggataccaggcttcaaaggatgatatcaccgtctttgcagctcttgcaaagcccccaacttcacagtatgtgaacgcttctcgttggtacaatcacattgatgccctcttgaggatctctggtgtctctgctgaaggaagcggtgtcattgttgagggatcagctcctatcactgaggaggctgttgctactccccctgcagctgattctaaggatgctgcggctgatgaagaaaaagatgattatgttgaccttttcggagaggagacc

SEQ ID NO: 156496 - DNA, 413 bp, Arabidopsis thaliana columbia
cagtgttaccatcaaggttcacgctaaagtgatcgaagtcgaaggacctcgcgggaagcttgttcgcgatttcaagcatctgagcctcgatttccagctgatcaaggatccagagactggaaagaagaagcttaagatcgattcgtggtttggaacacgcaaaaccagcgcctccatcagaaccgctcttagccacgtcgataacttgatctccggtgttaccagaggtttccgttacaagatgaggttcgtgtacgcccattttcccatcaacgcctccatcggcggtgacggaaagtctatcgagatccgtaacttccttggcgagaagaaggtgaggaaggtagagatgttggatggtgtaaccattgttcgatctgagaaggtgaaggatgagattgttcttgacggta

SEQ ID NO: 156497 - DNA, 375 bp, Arabidopsis thaliana columbia
gggcgacccactcatcccttataaacaaatccaacaacgattttgtttctctctctggctctctttcttttgacgtgttcataacgttattcgaacattctatatatatatgtttcttgttgtatcttcatccctctggaaaaggatgttagaatatcatttcatgattctattttttatctcccccctgtagtcaccttccatattactatctattacaagcttcttcctccataatatcattatcttctaattcttcctacttcttcccatctttttaatcatcttcttccttatctcttcttctctctttctttttattattcttttttctcaaaacctctcaaaataatttattctttttatattctactt

SEQ ID NO: 156498 - DNA, 356 bp, Arabidopsis thaliana columbia
ccagtgtgtttcttcatcgcccgtttatttcatttgcttctagaacgaatcatgctgtgggaaaatacggtaagggtcgcgtgttaatttcatgggcattgggacacgtcgtcttccggtggttttatccatgactgcgatggctgattccggtgaggaggccgtgaaatctgttttgcctggaaatggcatatccatcatggtgaatggatgtagtggcataatggtgaaagcttgtattaaagcagttcactctttaagagtaaatattgtttccatatcttttttatctgctgttgaggttgtttatgagattcttagttcttcttttatgttatatttacttttttaccttt

SEQ ID NO: 156499 - DNA, 331 bp, Arabidopsis thaliana columbia
aaaaatcttatctttctgacaacggtggtggtgtgtgatgttgtcagccatggcaaagacagagctacaacgatctctctctcttttcttcttcttctgtgtctgtctttaaatagagtctctttgaaacgaagcagctttgtcctgttctgatatccatggctttaccttcgtgcttaaagactggagctttaatgtctccggccactggatttaatttttccggcagtcttatgaagtcagacagcggcttcgccgttccgacaaagttacagagtactcgaaaaggtgatcgagagagattgagagtccaagctattttcagtttccc

SEQ ID NO: 156500 - DNA, 400 bp, Arabidopsis thaliana columbia
gccatttccacctctggtaaactcaaaaccctaactctctcttcctccttcctcccttgttactgggtaaccaccacctgcgcttgtcaatccactcgtcgctccttcaccgtccgcgccgctcgtggaaagttcgagaggaagaagcctcatgtcaacatcggaaccatcggtcatgttgaccatgggaaaactactttaaccgcagctctaaccatggctctcgcttccattggttccagcgtcgctaaaaagtacgacgagattgacgctgcgccggaggagagagctcgtggtatcacaatcaacactgctactgttgagtacgagactgagaatcgtcactacgctcacgttgattgtcctggtcacgctgattacttttagaatttgattaccg

SEQ ID NO: 156501 - DNA, 407 bp, Arabidopsis thaliana columbia
cacacacacttggatttaaagaaaaaaaggttttttccttcttcttttgggtgtgtcaagtttctgttcttccttttctcgtgctgccatcacgagatatctcacaaggctctcgcgactcaagaaaggtaaagataaagaaagaagaagcaaagattccataaatggacttgaaaagcaacaaccaccagcaacagcaacaagtacttgatggctcggacatagttgagctggtggaaaacgagaaagtgttcgacaagtttgtggaacaaaagtttcaacagttagaccaagatgaagatggtaagctctccgtgactgagttacaacccgccgttgctgatatcggcgctgctcttggtttgcctgctcaaggaacttcttctgattccgatcacatttacttc

SEQ ID NO: 156502 - DNA, 412 bp, Arabidopsis thaliana columbia
  unsure (1)..(412): unsure at all n locations
gcccacgcgtcgagacatcttataccccaaatgttcttctctatgttcttggaaactgttcctctatacgggtgggatcagaaacaaaggtctgtcacaacagagtccattttgcaaagttcctgaggcaatggctgctacttcatctaacgtcctttgcaatgctagcgagtcagatncttttcgtgatgattccgcncatttctacttaaatttgagccattgcttcgattctcttagctggagctgctggtgtaactataccactcattggcaggaaccgtcgtttccttcaaactgatggtaatctctttgtgactgctaaagcttttgcagctggtgtgattctcgccacgggttttgttcatatgttggcgggtggcactgaagctttgaagaacccgtgcttacc

SEQ ID NO: 156503 - DNA, 424 bp, Arabidopsis thaliana columbia
aaaaaccggtccggccgacgcgtccgataaaagttctcttctccgatcgatctctatcatattttcaacttcaaattccctttctgagattgtattatccgccatgggcggaacacaattgatcttgttaggacttaccgattttcctgctttgttccgatctcttcaatctcttcacgccttcaccgccgaaatttcatcaccaatcaccaccgtctatctcagaaaccctagatttccccgcacagaagtcaactggtgttggatatggaaacaccgtagagatcaacttctgcatctcctgctcgtacaagggaactgctgtatcaatgaagaagatgttagagagtgttttttctggattatatgtattttcttgctaattaccctgcaccagctccaaaactttttcttgctatagttg

SEQ ID NO: 156504 - DNA, 257 bp, Arabidopsis thaliana columbia
cttttatcaagagaataagtctgttcagattccaccattggttgatacaaaggggctgggtacttcattgtcgaggaatctactttctccaccatcttatctacataagtcttttgatgactatgatttaacattgagaaaaccttttgatgtaaataaagtcttttgttgttgtttttatttaatatttaacatcatatctattttttttatattttatagattttatcaataactttttttctattttatttttt

SEQ ID NO: 156505 - DNA, 372 bp, Arabidopsis thaliana columbia
ctctctcattcgcgcgacgcaaattatctttatccatggccaccgacccagatgttgacgcttagattcaataagcgcgtggctaacaaaataaagcttttaaaacgttggaccgtatgaccactttacggtcacagacatcaggcttgttggctacattggagttcaggcagctaaacatgctacctttgtttcccacaccgctggaagatactctgtgaagagattcaggaaggctcagtgccccattgttgagaggctcaccaactctcttatgatgcacgggaggaacaacggtatgaaattgatggctgtcatgatcgtcaagcacgccatggagattattcacctattgtctgacttgaacccaat

SEQ ID NO: 156506 - DNA, 408 bp, Arabidopsis thaliana columbia
atcactttcgattctctcaaaaaatcccataacttttccaacgaaaaatgttccgatcaatgattggtcgatctgcttccccagtgaagcagggtcttctccgcagaggattcgcctctgaatctgttcccgatcgcaaagtcgtcatcctcggtgccgccggtgggatcggccagccactttctcttctcatgaagcttaaccctctcgtctcttctctctccctctatgatatcgccaacactcccggcgttgctgctgacgtcggtcacatcaacacccgatctcaggtttttgggtacatgggtgatgatgatttggggaaagctctagaaggcgctgacctcgtcattattccagctgttgttccaaggaagcctggcatgacccgtgatgatctttttaaca

SEQ ID NO: 156507 - DNA, 290 bp, Arabidopsis thaliana columbia
aagaagagaaacaacaagaagtagtaatggcttcctctatgctctcctccgccgcgggggttacatccccggctcaggccaccatggtcgctccattcaccggcttgaagtcatccgctgcattcccggtcacccgcaagaccaacaaggacatcacttccatcgcaagcaacgggggaagagttagctgcatgaaggtgtggccaccaattggaaagaagaagtttgagactttatcttaccttcctgaccttattgacgtctaattggcttatgaagttgtctacctt

SEQ ID NO: 156508 - DNA, 363 bp, Arabidopsis thaliana columbia
cgaaactaaccggagcatgaagagacgaatatcggttaagaaatctccggcgatggtgacggttaccgattggaaagggttagattgcggctaatagacgagaatcgtaaggagattgatgaagttcgaagacttgcctgagtatttgaaggacaacgagtttatacacaaccattatcgatgtcaatggtctctcaaagatacttttctcagtgctttctcttggcacaacgagactctcaacatttggacgcatttaattggatttggtatatttctgtggatgacggtggtgagttgcttggagacgactgagattagtctcgccggcgtttttaacggctatggtcggagtgaggattt

SEQ ID NO: 156509 - DNA, 406 bp, Arabidopsis thaliana columbia
caattccattcacaaagttttagtgtttaataatatctgacactctctttctttgaccgtcgccgccgcaatgaccgtcggagttttagctttgcaaggttctttcaatgagcacatcgcggctctgcggcggctcggtgtccaaggcgtcgagattaggaaggctgaccagcttctcaccgtttcttctcttatcattcctggcggcgagagcaccaccatggccaaactcgccgagtatcataacttgtttccggctctacgtgagtttgttaagatggggaaacctgtttgggggacatgcgcaggtcttatattcttggcagacagagcagttggtcagaaagagggaggtcaggaattagttggtggccttgattgcaccgtacataggaacttcttcggt

SEQ ID NO: 156510 - DNA, 413 bp, Arabidopsis thaliana columbia
gttgagatatttttgagttttctgtgttgaattttggggaatcgaagaaattgaatttcaaaaatcaatggcggaagaaattgaaaaatctgtgccgacagaggaatctctgatggagaagatctccgagaagattcaccatcacgattcgtcgtcatcgtctgaatccgagtacgagaaacctgattctccttcggctgtgaaggcgaagatctatcgtatgtttggcagagagaagcctgttcacaaggttctcggtggtggaaagcctgctgatgtgttcttgtggagggataaaaaactatcaggtgctgttcttggtgtcgcgactgctatttgggttctgttcgagctggttgagtatcatttgttgagtcttttgtgtcacatttcgatactcgctcttggaggcc

SEQ ID NO: 156511 - DNA, 419 bp, Arabidopsis thaliana columbia
ctcgccttttcaccacatagaaaacttcgattctcttctctgcttcgccctctcatttcctgggagataaaggcggaatctctctccagttattttgctcatccatcgattcttagagttcaaaatggttgatcaagttcagcaccccactattgcgcagaaagctgccgggcacttcatgccttcaagtgtttccaaggacgttcaagtgggttaccatatgccttctatgtatcaaagacatgcaacctaccgaaactactccaatgctgcatttcaatttcctccgacatcccagatgctggcaacaactgctttttccgtgtttgcccaaaccccaggagaggaggggtctcactaactttgcccttgactttttgttgggctggctttttctgtttcctttctctcacagactt

SEQ ID NO: 156512 - DNA, 276 bp, Arabidopsis thaliana columbia
gtccaggagaggttttgttaggaacagacttacacacttgtactgctggagcatttggtgggtttgctacagggattggaagcactgatgcatgttttgtgttaggcactggaaaaatccttcttaaggttccaccaacgatgaggtttatcttggatggtgagatgcctagttatttgcaagcaaaggatctgattttacaaattattggtgaaatatctgttgttggtgcaacttacaagactatggagttcattggttcaactttctaaagtt

SEQ ID NO: 156513 - DNA, 395 bp, Arabidopsis thaliana columbia
tgaactctttcaagactatagactgtcgttgagcgagcgtccacattgctggtggcgcgggtatcaccgtccaggacgtgaccaacatcatcatccacggtgttaacattcatgactgtaaaagaaaggggaatgcttacgttagagactcttcgtcgcattatgggtggaggacagcgtctgacggtgacgccgtctcgatttttggtggctcccacgtgtgggtagaccattgcttgttgtccaactgtgcttacggtctgattgactccattcatggatcaacggccattactatctttaataactatttgagtcactctcattaagttatgcttttgtttcacattgatatttcctctatagacaataatattttattttttctttttttt

SEQ ID NO: 156514 - DNA, 409 bp, Arabidopsis thaliana columbia
ctctctctctgtgtgtgttctgtgttctctctctcgcgcgaagcggttctctttcttttggttatgtgtttttatttggtgttctcttatacggaggagagaagatggtggcgcctgctttgttaccggagctctggacggagatccttgtaccgatttgtgcggtgattggtatcgccttttcgcttttccaatggtacgttgtatctcgcgtgaaactcacctctgacctcggcgcatcgtcttccggtggagctaacaatgggaagaatggatacggtgattatctaatcgaggaagaggaaggtgttaatgaccagagtgttgtcgctaagtgcgctgagattcagactgctatttccgaaggtgcaacttcattcctattcacggagtacaaatatgttggtgt

SEQ ID NO: 156515 - DNA, 272 bp, Arabidopsis thaliana columbia
aggaattcgggggccggccgacgcgtactattcagtctcatctcgtctgagaattattatttatttcatggcaatcatacttttgggaccgggttatttgcaaggtggtagggaaccaccttacacactccttcattttctgtcaatacggtatcgtctgggctcatatcttatctttccctcagttaaagccttcatatatttcatgaatcaacaaagacttttaataatccgtacatctttccccaatctgtctatttctttacatttat

SEQ ID NO: 156516 - DNA, 406 bp, Arabidopsis thaliana columbia
cccacgcgtccgcggacgcgtgggctcaattcttgtatattcaacggagagagatctgctgtagaaagagagatcagattcgggtgttccaaggaagcacatattttaagatccagaatcgcctgagagatgtctaccttcagtggcgatgagaccgctcctttcttcggcttccttggcgctgccgctgcgctcgtcttctcatgtatgggagctgcgtacgggacagcaaagagtggtgtgggagtggcatctatgggtgtgatgaggccggagttggtgatgaagtctattgtcccagttgttatggctggtgtgttgggtatctatggtttgattattgctgttatcatcagtaccgggattaaccccaaggcttaatcctactaccttttcgactgatatg

SEQ ID NO: 156517 - DNA, 414 bp, Arabidopsis thaliana columbia
  unsure (1)..(414): unsure at all n locations
cgcgtccgtgaatctgactgacttcaaaggacacagcttttacttctataactgagcgaatcatgtgagaaaatggctaatcggaagtgagagaacatagcatcnattgatgttcatcttcgtcaactggttcctggcaaagttagtgaagacgacaagcttgttgagtatgatgctttgcttctagatcggtttctcgatatcctccaggatttgcacggtgaagatctccgtgaaactgttcaagagctttatgagcattctgcagaatacgaagggaagcatgaacctaataagctagaggagctagggagtgtgctaacgagtttagatccaggagattccattgttatcgctaaagctttctctcatatgcttaacttagccaatttggctgaggaagtgcagattgct

SEQ ID NO: 156518 - DNA, 411 bp, Arabidopsis thaliana columbia
gaaactaccactggtgttaagaggctttaccagatgcagcaaaatggaactcttttgttcgctgccgttaacgttaacgactctgtcaccaagagcaagttcgacaacttgtatggttgccgtcactcactccctgatggtctcatgagggccactgatgtcatgatcgctggaaaggttgctgttatctgtggatatggtgatgttggaaagggttgtgctgctgccatgaagactgctggtgctagagtcattgtgactgagattgatcccatctgtgcccttcaagctttgatggaaggacttcaggttcttacccttgaggatgtttgctcagaagctgatatctttgtcaccaccaccggtaacaaagacattatgatggtcgaccacatgcggaagattaataac

SEQ ID NO: 156519 - DNA, 409 bp, Arabidopsis thaliana columbia
gaaaaccgggccgacccacgcgtgcgaaaaaagaaaacacaataacaaagattatatttgcttttttaaccatggctttgtcctcccctgccggggccggaaaggctgtgaaggctgccacatcatatgttctcggaagcggccgtgtgaccatgaggaagactgtcgtcaagccaaagggtccatcaggcagcccatggtacggatctgaccgagtcaagtacttgggtccattctccggcgagccctcgagctaccttaccggtgagttccccggtgactacggatgggacaccgttggtctatccgccgacctagagaccttcgccaggaaccgtgagctagaagttatccacagcagatgggccatgctcggagccctaggctgcgttttccctgagctattggc

SEQ ID NO: 156520 - DNA, 367 bp, Arabidopsis thaliana columbia
  unsure (1)..(367): unsure at all n locations
gcaaaagaaaaaaaagctattgttttaaatattaagaagttaactatttcaaagtatgtgggagccattcccggaggaggatttcatacaaganactatcaatatcctccaccatctccgtttattgatggagcgtatctaaagaagtggtctttctacagatcagttatcgcatagttcgtagccactctcctcttcttatacatcaccgttttgacagtcatcggttacaagattcagtccgatactgatgcctgttgcgtatattgcgtccgatttataattctatgtatcacttgggcctttggtggttttatcttcatcctcgttctactgcaccgcctttattttttttgttaacattaac

SEQ ID NO: 156521 - DNA, 330 bp, Arabidopsis thaliana columbia
cagaaatgagtgcacttctctgttgttaacattaacacatcgttcttcttcatgtctttggatttcttttttggatggcgattctatatcaaccatatattttctttagataattttactagattcatctctttctctattaacaacattttaaataaatgacattttaagaaagtgattatatataagattttcttgattctgatttatccttttttttagtcataatatcttaaagatattataatttattcttttttttaacatattcacattcctactttatttttcccttcttctattaaactttttctttcttgaatatttaaa

SEQ ID NO: 156522 - DNA, 406 bp, Arabidopsis thaliana columbia
gaaccgctccacccttgtcgttcgctgcagtcatgtacggcggagatgaagtgtcagctattgtggttgacttgggttcgcacacttgcaaggctggttacgccggtgaagatgctcccaaggccgttttcccttccgttattggggcagtagatggtgtagaggcaatggatgtggatgttgattctacaaagactaattcgaactctgaggattcgaagaccgagtctgaaaaggaaaagagcaaacgcaagctctatgtaggatctcaagccatgagctaccgcagagatcatatggaggttttgtcacctataaaagatggcatcgtttctgactgggatttggtggacaatatatgggaacatgctttcaagagttgtctgatgattgatcctacggagca

SEQ ID NO: 156523 - DNA, 255 bp, Arabidopsis thaliana columbia
tatggacaaccacgtttatacactactcctcttacctgtcaaggccgcttttaattacacctatgtgctcgctaaaactcgtcacaacaatgacttttaacatacacacacatataactatagatgagatcaacccgactattacaaagcgtttgtcgttaattgcgctagagaacacggacgctaaccgtcaatcttacagtgacctgcttgagtcttctccagtacttggacagtacatctcctgagctatcc

SEQ ID NO: 156524 - DNA, 431 bp, Arabidopsis thaliana columbia
gaaaaccggtccggcccacgcgtccgcgcatctcttttcatttctctctgatttctcgatctctccgtccaactatgtctgccttcgcaagcaaattcgccgatgaggggatcgccaacgctgcctacatcggcacacctggaaaaggtattttggctgctgatgagtccactggtaccattggaaagcgtcttgcgagcatcaacgtcgagaacgttgagaccaacagacgtaacctccgtgagcttctcttcaccgcccctggtgctcttccatgcctcagtggtgtcatccttttcgaagagactctgtaccaaaagagttccgatggtaagcttttcgttgatatcttgaaggaaggaggagttcttcccggtatcaaggatgacaagggtaccgttgagctagctggaaccgactgtgagaccacc

SEQ ID NO: 156525 - DNA, 438 bp, Arabidopsis thaliana columbia
gaaaacccgggccggccgacgcgtccgaaaggctcgagccacagagatctgagtttctcttcttcgagatctgatcgccgaatctcatgatcggccatcgaagcagaatggagacttttctattcacatctgagtctgtaaacgagggacacccagacaagctctgtgaccagatctctgatgcagtcctcgatgcctgccttgaacaagaccctgacagcaaagttgcttgtgagacatgcaccaagaccaacatggtcatggtctttggtgagatcactaccaaggctactgttgactacgagaagattgtccgtgacacctgtcgcgccattggatttgtctctgatgatgttggtcttgatgctgacaaatgcaaagtcctagtcaacattgagcaacagagcccagacattgctcaaggagttcacggtcact

SEQ ID NO: 156526 - DNA, 430 bp, Arabidopsis thaliana columbia
  unsure (1)..(430): unsure at all n locations
cccggggcggcgcacgcgtgcgctcatcttctccgaaaacctttcttctctcaaatttctgtgaaaacatgtctgacnacgaggaccggttttaggccagcgagtccggagcttccaagacctatcctcaatcagccggtaacatccgtaaaggtggtcacatcgtcatcaaaaaccgtccctgcaaggttgttgaggtttcgacttccaaaactggcaagcacggtcacgccaaatgtcactttgttgctattgatatcttcactgctaagaagcttgaagatattgttccatcttcccacaattgtgatgttccacatgtgaaccgtgttgattaccagttgattgatatcactgaggatggcttcgtgagccttctcactgacagtggtggcaccaaggatgatcttaagctttccaccgatgatgg

SEQ ID NO: 156527 - DNA, 322 bp, Arabidopsis thaliana columbia
  unsure (1)..(322): unsure at all n locations
agctccctctggattgatttgggttagagttctgctgattctgataatgcangtgatctggacaagcaaaagagcggcttagtgnttcgaaaaaaccacaaacgaagaagctcgcctaaaccagcttcaaaggctaataatggcagcaacggtgggaggcatgttctctctttcgatgctgctgttttgtcagtatcacatgaagtgggtgaagaagtcatagaagaagaaaattctgaaatgaatcagatagacacaagtcgttgtttgcgagttactgatatcgaattatttagattaagaaggagggagcatttatcta

SEQ ID NO: 156528 - DNA, 409 bp, Arabidopsis thaliana columbia
acacctctcacattgcagtcaagttctctgagatcttgaccaagattgacaggcgttctggtaaggagattgagaaggagccgaagtttttgaagaatggtgacgctggtatggttaagatgaccccaaccaagcccatggttgttgagactttctccgagtacccacctttgggacgtttcgctgttagggacatgaggcagaccgttgctgttggtgttattaagagcgtggacaagaaggacccaactggagccaaggtcaccaaggctgcagtgaagaagggtgccaaatgatgagactttcgttatgatcgactctcttatggttttctttggttcttaaaactttgatggcgtttgagcctttttcttttttctctttatttctgtgactttctctttccctc

SEQ ID NO: 156529 - DNA, 414 bp, Arabidopsis thaliana columbia
  unsure (1)..(414): unsure at all n locations
caaattctctccgtgtttccttctgcttcatgtgatattttaacaaagttcttantacagggggatctgttgatgctgctagtggaagtgggaagaaacctacagttatatttgttcttggtggtccaggaagtggaaaaggtacccagtgtgcttatattgttgaacattatggttacacacatctgagtgctggagatcttcttagagctgagattaaatcaggttctgaaaatggaactatgatccagaatatgattaaagaggggaagattgtaccttctgaggttactatcaagcttctacagaaagctattcaggaaaacgggaatgacaagttcctcattgatggtttccctcgtaatgaggaaaaccgagcagcatttgaaaaagtttcttgagattgaaccaaag

SEQ ID NO: 156530 - DNA, 397 bp, Arabidopsis thaliana columbia
ttctgagatatggaacaagtttttgtctggtcaagctgctaccactatcggcttttctcagtgccaagaagcgctcgattggcggtttcttgtacgttctgatttccttgtgggctctttcgttaactgcacttagtggtcaaaccctcttctatgatctttaggggaaggtgtgaggcaaatttctgagacagggctgaagtctgcaaattcttccttcgcatagtcctagagaaacctctttgttcctctctttcatatcttgttcttatgggtgctggttgaagaaagatacatcaatttcttttctttttcagtttacaaatgtcgtttccttgagtctgaacccctgagtgagatgttgtgagcataagggccttcctattatccaaaacag

SEQ ID NO: 156531 - DNA, 414 bp, Arabidopsis thaliana columbia
cgatgccggctccgacgacggagatcgaacccatcgaagcacagtcactgaaaaagctcagtctcaaatccctcaaacgatcacttggactcttctctcccgtccatggccaattccctcctcctgacccggaagccaagcagattcgtctcagccataagatgaaagttgcgtttggaggtgtagaacctgttgtgagtcaacctccacgtcaacctgaccgcatcaatgagcagccaggaccttcaaatgctctttccctcgcagctcctgaagggtctaagagtacgcaaaagggtgcgacagagagtgctattgttgttggtccaactttactgcgtccaatactgcctaaaggcttgaactatacaggttcctcagggaagagcaccaccattatacctgcaaatgtat

SEQ ID NO: 156532 - DNA, 366 bp, Arabidopsis thaliana columbia
atgaagagaagtgttgcactgcaaaaaggacttcctgttcttggtgtattcaggacattaggtgcaggtggtgttgaccctgcaatcatgggtatcgttccagcagttgccattcctgctgcagttaaggcggctggtttagaacttgatgacatcgacttgtatgagatcaatgaggcatttgcatcttagtttgagtattgccttaacaaattgtgacttgacccatagaaatatcaatgtcatctgatgtgcattggccataggccatcctttgggctcttcatgagcactttgtgttgctacattggtgattgtgattaaacgcctttttttgactttttattgttagtattttttattttt

SEQ ID NO: 156533 - DNA, 407 bp, Arabidopsis thaliana columbia
gaggtagcagcagcgactgcgactagcttcacaacgcttcgagctcgtacgtcagggattatcccgtcttctacacggaatctgagatctaaaccgagattttcttcatcttcatctctcagagcttctctttcgaatggctttctttcgccgtataccggaggaagcatctctagtgacttatgcggcgctaagcttcgtgcggaatcgcttaatccgttaaatttttccagttccaagcctaaacgcggagttgtcactatggttatacctttctcaaagggaagtgcacacgaacaacctcctcctgatttggcatcatatttgttcaagaaccgaattgtatatttgggaatgtctctcgtacctttagttactgagttgatacttgcggagtttctttacct

SEQ ID NO: 156534 - DNA, 369 bp, Arabidopsis thaliana columbia
aagctatatcccgtcttcaacctttatatgtcccctgcatcgaaatcactctcctcgcattgaggctcagagaccaaggctaccctcaaaggaacatccacagttgcaccaagctccaaagattcaaaagctttctcaaagacatctggagtgttccatctcttaggtgatgatgaaaacatagcaaacaagaagcctttggctggttctcaggtctcaggtgttcctgctgcatccactgcccataaggatttggaggttccgaaacttctaactgcacacaggttacttgattacaacccgcgtcgatgagaacatacaagctcctgttcggacatagagagttctttttgcgttctttgttaaaca

SEQ ID NO: 156535 - DNA, 417 bp, Arabidopsis thaliana columbia
agtggatctaatgtgaagtggagccagaaacgttatggaccaggaagcctgaaacgtacccaatgcccatcggaatgtgataggaggtgtaaaaagacacagtaccacaaggcttgcattacgttctgcaacaaatgctgcaggaagtgtctctgtgtgcctccgggttactatgggaacaaacaagtttgctcctgctacaacaactggaaaactcaagagggtggaccaaaatgcccttgaaaaaatctcccttcgttccctttttataataaaaattttcaactataactaaatttcctttgatcaatgttttatctactttattcctaatgttgtaatgttatgtcactccttttcggattttgttctaaatcctaaaaaaaaagagagtggccctattgaatgattattttt

SEQ ID NO: 156536 - DNA, 413 bp, Arabidopsis thaliana columbia
ttcgataaataattgaaaagaacaaaagaaacaaatgagacgagaaagagttttggcgatggagaagaacgcactttggctactgtgcattctggtgttaccggcgatagcctgtggtaggaaaccggagaagaaggtaacaatttcatcctctgggaggaaggaagatgaccttgtaaccggtttgcccggccaaccaccggttaacttcaaacactacgccggttacgtgaatctggggcctgaacagaagcaaaaggcacttttctattggttcttcgaagctcaacaaaactcttctcgtcgtcctctcgtcctttggctcaatggaggaccgggttgctcatcaatagcctatggagctgcacaagaactaggcccttttcttgttcacgacaacggtggcaaactta

SEQ ID NO: 156537 - DNA, 340 bp, Arabidopsis thaliana columbia
gacccacgcgtgcgggcagatgtcagtatacatgtctgagaaccttccatttcagacccttcgttccatattggcaaggcgtgaacaggcatactggggggggatcgcatttgagtatatgcacattgcatatcgagataaatgtaactggttgagagaaaagattgagacaccaactctttggcggtacaacagggagcgccgtgaggtgattctcgatcgtcttgcatggagtactcagctcgagaatttcttatctaccaagtggacaacaaccaaaagatttggacttgagggaggagaatcattaattcctggaatgatggagatgttttacata

SEQ ID NO: 156538 - DNA, 403 bp, Arabidopsis thaliana columbia
tccttctctgagaaaaaacaacagatccgatttttattttaatcagccggaaaaaatggagggaggggtcgatagacaacgcgtgctggttgagcatctccgaccttcttcttcttcttcgcacaattacgaggcttctctatctgcttctgcttgcttggctggggacagtgctgcatatcagaggacctctctctatggagatgatgttgtcattgtcgcggcacataggactccactatgcaagtccaaacgtggcaatttcaaggatacatatcccgatgatttgctcgcacctgttttgagggcattgatagagaagactaatctaaacccaagtgaagtaggtgacattgttgtgggtactgttttggcacctggatctcagagagccagtgaatgc

SEQ ID NO: 156539 - DNA, 354 bp, Arabidopsis thaliana columbia
cgacccacgcgtcgcatgacacagtgaacgaaggagggttaattgtaggtcaaacaaataaggtgggggtaaaaggagcgcggacagacaatggcccctgctctcgccgtcacgagatctaccgcgtggatctccggagaatgctcctgcgaaaggacgtgcttggtttacaggaagttcaataagccgataacaacactttctttgcctttgttctcaaaggagctttcaaaatcgcaagtcccgctagttccgcgccgggaatccacatgagaagcgaagtggtccgggtctattggccagccatcagtagcagggtcagataggatcaccttgtcggcccgaaatgaaatt

SEQ ID NO: 156540 - DNA, 425 bp, Arabidopsis thaliana columbia
gcccacgcgtccgcactcttctagcatcttgaagcttaaatcttttccttccgatcatgccgatcataaacatgggccaggggtcttccagatggaggcacgggtcccgatgccttaaaggcggcgttggctgagttcatttcaactttgatctttgtcgtctccggttcaggctctggcatggttttcaacaagctcactgaaaacggagccaccactccttttggtctcgtagctgctgcagtggctcatgcctttggactcttcgtcgctgtctcagttggtgccaacatctctggtggacacgttaaccctgccgtcactttctgtgctttcattggtggtaacatcactctcctccgtggtatcctttactggattgctcagcttttctgctccgtcgtcgtttgcctcattcttaaatt

SEQ ID NO: 156541 - DNA, 408 bp, Arabidopsis thaliana columbia
gtttaaagcttcagtggacgaaaagagtttgttttttgtgtgacaatgggaggagtggtgcatcttagcacggcgaagttagctagaggtttcttagtgtgtttatgtctttggggttttttctcgctatcatacgccgcaaggtccggcgtatcaaagcagaagtttgaagtgaagaaacatttgaacaggctgaacaaacctgctgtcaaaagcattcagagttcagatggtgatgtgattgactgtgttccaatctcaaagcaaccagcttttgatcatccgttcctcaaagatcacaagattcagatgaagcctaattaccaccctgaaggactctttgatgacaacaaagtgtctgctcctaaatcaaatgagaaagaagggcatattcctcagttgtggcat

SEQ ID NO: 156542 - DNA, 417 bp, Arabidopsis thaliana columbia
ggacgacccacgcgtgcggccaaacctttctcataacctaaatattcttcttttttcgatacatttttaaaactaaagcgtaagggtgcataacaacgcggtagaggtcacatagctctacattccatgtaaatgctcttcaacaaacaatacgatcacatcaaacgatcatgcttataatcagcttaacatttatcatcttgatgctaatgttctctacactggccaatataccacttttgctctctgcggatttgttcgtgctcaagtagacacatacagtggcctggacagtcttcttctgaagaagaatgtctcagtttaacaactatgacagacaatctgacaatttcattagctctttgttgttttttgaggtttccattcattaacctatgttggctttttcatttaatt

SEQ ID NO: 156543 - DNA, 422 bp, Arabidopsis thaliana columbia
  unsure (1)..(422): unsure at all n locations
cacgcgtgccgggtcaacaaccgtcgagaataataggcatctatttctttgtgcnttcttctgccattcgctgcccatttcttgggccaagtttctatgggtggtggggaaanctgatgtctgaataagaagttgactgttccagctgtgtccaggccagatgcgtcggtgcgcgccgtcgcagctgatccagatagaccaatctggttcccgggaagcactcctccagagtggctagacggtagcctccctggtgacttcggatttgatcctcttggtctttcatcggacccggacagtctaaaatggaacgtacaagccgagatagtccactgccgatgggctatgctaggagccgccgggatattcatcccagagttcctaacgaagatcggaattctcaacacttcgtcatggtacac

SEQ ID NO: 156544 - DNA, 422 bp, Arabidopsis thaliana columbia
atttattttttttaaaagaaattcgtaggtcttttcattaaccaaaagagggcccaaaaggtggaggcccaaggggggaagggggccaacctatgggccgttggatcgccacatgaccccgggcccaaaattaagttggcagcaggcttaaacggaattaaatttgttcagttggattttgtaaagaacggccaacccgaccaggttctttttgggggtaccaaaggccgggttttcccagctgatccgttggtgattaaccatccagacaaacatttagttttttgagaaggttggtttagccctgaaggtttcattaaaggaattaagttcatttccaacaagaaaacttttgatgtcattggatccgatgggggtcctaactttactttacaggttaaggccaagaagatcattggttt

SEQ ID NO: 156545 - DNA, 343 bp, Arabidopsis thaliana columbia
accgaattttttggggatttacccaagggctttggcttcttcgttgagttggaacctaatgggggctttcaagggctggctttttttttcacctccgccttttttaagaggcgattggggtttttcccccaaaccctctttaacggggccttttcctttggaaaattttaaagctccgtttccgtggccaatggattcggcccataaaaaaggggctggtaccaccaaaaccggccgtgtttttcctgggcaccgactcggcgtaaagacctacggggcccaagttgctaaaccggtggctatcatggttcgtaaccggggcactaagttccatcctgggaaa

SEQ ID NO: 156546 - DNA, 434 bp, Arabidopsis thaliana columbia
  unsure (1)..(434): unsure at all n locations
cggggcggccccacccgcccgaccgaggccaaaagggccccgggccgnggccttcctaccgcaaaggcaaaaggccaaaacggccgaccaggaaccgaggctaacctggcaaccaacaaccccctaacctccaacccaaaaccagtggaggctaaccggaaaggcaaaaggggaaagggggggaagaccggaatggcccaaagcccggctgggtccgaagcccaggacctggcggatcaacaggacggggcgcccaccgaccgggcactggacttaatttggggagggcaccaaaccacaacaccattgggggataacccacagaccaggaaagacatggtgggccaaagatggccaaaattaccaacggaccagaaggcaaaacggaaggctccaaccgattccggggggcccaacaccaaaactcaaggggg

SEQ ID NO: 156547 - DNA, 432 bp, Arabidopsis thaliana columbia
  unsure (1)..(432): unsure at all n locations
gaatncccgggcggccccacccgtccgttccttttttaaaaggaaatccgtttttttttatatgaggcagaggagggcccaaaggggggaggcccaaggtgggaagggggccaacttttggaccaatggatcaccacttgaccccgtgcccaaaattaaccttccaccaggcttaaacggatttaattttgttaagttggtatttttaaagaccggccaacccttaccaggctccttttagtggtcccaaaggccgggtcttcccagttgacccgtttgggattaaccatccaaacaaccatttagtttttgtagaaggtgggtttatccctgaaggtttcattcatggaattaagttaattttcaccagaaaaacttttattgccattggtcccgatagggttccttaatttaactttcaaagttaaggac

SEQ ID NO: 156548 - DNA, 371 bp, Arabidopsis thaliana columbia
cggaatcccggggccgccccacccttccgttgccaaaactccattccttaacatgttctttttcgggggattggttcagcataagccgccgcaccttccaccgtttgaggaccttacctttggaaaaatcaagttcagggttttggattgggggggccataaaattgctcgtagggttgggaaggattcctttcccagggtggatgctgtggcctacctgggggatgctaatgccaaagaaggatttgcagagccaaaaagggggctggttgcttttttttgggatgaagccctggcacctgtcccgtttttgattctggggaccaggatggaattccctaatgcagcttctgaagccaacctgaggttta

SEQ ID NO: 156549 - DNA, 238 bp, Arabidopsis thaliana columbia
accatcttaaaaccggttccctccttgtgtttgttccggagctacggtccatcttgaatgccttttttctctggtaaaaatcactttaagaacctttgttaagctttgatgggagtgggtttaactttttagggtttggttggagttggaccttaatggtatagaggtggggaccttgtgcccctctatattggtttccaggggtttctatgtggcgtctccttgctaaattttttct

SEQ ID NO: 156550 - DNA, 362 bp, Arabidopsis thaliana columbia
gggaatcccggggccgccccagccgtccgatttaaacgcctttttttctcccggattatttttttttggggattccagggcaaagctttttaatttcctcgaaatggccggcgaatcttactaaagggttggtggggcaatgaagggggcgcctttggtggttttggccgccccaatcggcatttttttccagggttgggccaatgccaccatggttggggctttggttattttcaccaaagactggattttaccacccttggttcagggcctggtcgtggctttgtcatggatcggggcaccggtcataacaactggttcaggaccgatttttgtttggttcggcggaccccccatgctca

SEQ ID NO: 156551 - DNA, 443 bp, Arabidopsis thaliana columbia
  unsure (1)..(443): unsure at all n locations
aaatnccggggcggcccaagccttccgagggaatcaagggaaccacggcttgcgggttttgtttttagcaggatgggccagttgggggtgggtttttactttgttaactgggtggctgccaaggtggtggttactcccaagcccattgccattgagcagaccttgggggagtttaaggccgggggatttttaattgtgaccagagacacttttggggggactttgggtgaaggaccaaaaatggttttttacctaagggaagaccagtgggggtccctgggggggcgaaggctaaaggattgggggaagaaccactttgggttaataagtttcccaatttttttttggattgagaggaccattgaaaaggaaatcttttttgataaaaaggaggaagagaaaatggttgaggaaggcaaggttaaggaatttgattaggtaaa

SEQ ID NO: 156552 - DNA, 419 bp, Arabidopsis thaliana columbia
caatggaagaagggctttttaacctggaaattttgaaacctaaccttcctaagtggttgtttgaataaaagttgtccaaagttttccaggggggacctggctttccaaccgttaaatggtttggggttgaaggggcctttaatgtcctcgggttagactggtgggggcctacccttgaagattttttcattttttgtggtaggaaactttaattaaggactgtcctaatgctggcggatcaaatgatcaatcgctttgggtttgtccttaaaaggtaatttttccttggggccatcaggcctgccacctttttgttgggttttggagggcgtgcaaataaggtttccgtaatcgactttggtttgccaaagaagtccagggcctcaattcttcagctttttccttttagggaaaccaaa

SEQ ID NO: 156553 - DNA, 441 bp, Arabidopsis thaliana columbia
  unsure (1)..(441): unsure at all n locations
gaatnccggggcggccccagccgtccgaaccaagggaaacccctccggtccaaacagattcaaaggggacttttaaccaccccattccaggaggaggaccaagggggggctttttaactatgcccttaataatggcaaacaaggggttcgggaaaggggcaggctttggatttttccagaccatgatttttaatctgatgagggattccagatggggcctggttaaaggccaaactgcttggtcaatgggggtggctgttcctaatttaatgcctttggtgggagcttttttttaaaattaatattggggtcgttttttaaccatggcaatggtttttttttccagtttcctggggatgggggttttatggttaacggcaatgttgccgcaggtaaaaccataaccggttgtagcaccagccggacccaactgcagttccg

SEQ ID NO: 156554 - DNA, 286 bp, Arabidopsis thaliana columbia
gggccgccccagccgtcctatcggaacctaaaaatcctaaaagggaccttttttttaccagtcctgaaaatggaggggggattgggctaaattggaaatggattcgcattcttggcggcggttccataagcagttaacagttttctttttaccaggaccaaaggggccaggatcatgactttggcctttaacaagcccgtctccgttggggtgaagcctggtacccgggttcagttaccggagtttgtccaaaaaaatggttcacggattcagtttcgtaagggga

SEQ ID NO: 156555 - DNA, 344 bp, Arabidopsis thaliana columbia
gggccgccccacccgtccgttaagaaccgtaccggccgaaaatttttttttggacaaaaatcggggagggcatggaggggggtggttccttcctggaaggcgccgggaataccaattatttcgaattcaaccatttgtgcaattttttgagggaactgtcttatggggccacccaaggtggaacctctaactcgcaagagggtcaacttttctctttccaaatggcttgttggaatgccccataaccctgttttgcggtcagccccacttgaagtttgaagtaacttttaagtctttgtctttaagggattcaaaagtacctgagttcccaagacttgtttcct

SEQ ID NO: 156556 - DNA, 297 bp, Arabidopsis thaliana columbia
aaaaaaaaaagttcctttttagtttttagggaatattatttttgaccgattatgtaataaataatttacgggttaaggtagctttttaataaatgggaaggggcccaagttaatttccctaataactttccgcccccttcccaaaaaaatccccccaaatccaccccccacccaattaaaccttttattttggatttaaataaactattccggggcctccaatcaaatgggttcgattctccggcgtaaccttttccggggatcgggaattttctcaagcccatgccctaatttgac

SEQ ID NO: 156557 - DNA, 357 bp, Arabidopsis thaliana columbia
  unsure (1)..(357): unsure at all n locations
ggaaacaaaagggggaagaccggnggaatgggagcgggatttgtaggaggaccaacaagggcggggatggcatggaaaggtccagatatggaaggggcagtggtggaaatttcggtccttagaataaacgctgggaacagggatcagcttccgattaacaggccaggtttggacgatttcgtaaagcattgcaagggaaggaatttttctttaagaccggagggggggaaccaggttagggaggcggttttggccttggcctttgttaacacaccgactaaaacgactggtttgggggctgggaaagttgctgatctaactaatggggagagggttgttcgaatgaccgcggttgta

SEQ ID NO: 156558 - DNA, 354 bp, Arabidopsis thaliana columbia
aaaatttccaaaaggaggtcgaacctttttttttttttcgccatgagtttaaccggtcctccaatcggccggaccgagagggaccttttcgctgttccaaccccaaccacgggggaaattttccgggctctttgtcccggcaggaaaggaatgggaaagctgggtaggccacttaacttaaaaggatcgaccttccaccgggtgattcccggtttcaggtgtcaaggaggggatttaaccgccaagaacggaaccgggggggaatcgatctacggtgctaagttcaaggacgggactctttttaggaagcttccaggaccttgggattttttcaagggtaaacttttggtccta

SEQ ID NO: 156559 - DNA, 367 bp, Arabidopsis thaliana columbia
  unsure (1)..(367): unsure at all n locations
aaaaccaagcaccaagggcggagcccttncaagaccaacacacaggggagggggcaaaaaccgggggggggcacctggccggaaaaaccaacatctccggggaccaatggtcgggggatgtggtaagggttaacgctgccgttccagggaaaccaagggaggcctcccccaaggctggcagggggtccaggtccggggcttcccaactggctaaaagtttcctgggaagggccgtgggagaccaattcgggggctttgcggcggctgttccagttgtggaagctgaggccccgtgcacttgcagtggaggatgatgatgacatggatcttttgggggccgggaccgaaaaagaaaagaaggctgcaa

SEQ ID NO: 156560 - DNA, 423 bp, Arabidopsis thaliana columbia
aatcccggggtggcccaaggcttcgggccgaccggacttaatttttttaattcggaatccttgttgggcccggcaaatccggtggggtttcgggggaacccgcttccgtggttgaaggatgagctcgatttcgggattccgcctttaaaaaacctggatttcctggagaggggggggcctttttttaagcctaaccatttgatcatggtccaggacggagatccatcgaagaagatccatgtccttgaaggttacaactccaagctttacaccaggaccgccattaaccgaatcctgggacctaaggcttttggtttttggttaaaggattttgttggtcgatgcttggggaccatggggtttaagaggaagttttttttaaccatggatgacgatggtttcgttgccaaggatccataaggc

SEQ ID NO: 156561 - DNA, 427 bp, Arabidopsis thaliana columbia
ggtccgcccgccgcccaaaattttaaggggggggggctggttaatttttttttttccagttggacccggattgggtgatatcctggcttttatgcgggaccaataatttccgattccatatgggatctttggttcccgactatgaccggccttttttccgttttaaacggacctggatcttaatctccatggtggttaacccatggacctaaacgtttttttccaggaccttggtggcctccatttcttcggggataaacatcttcgtaacctccgatggttcaggacccaggagcaaaaagggcctttagactccatcaggatggatgtaatcggggggggggtttcccgaaactggggattccaaagaattggggaggcagttttaccttttaatccggaaaaggatttcgaggctcttttggat

SEQ ID NO: 156562 - DNA, 409 bp, Arabidopsis thaliana columbia
cccagccgcccgaaaacccgttttttttttttggaccaaactttattttttcccctcttggatcctcctccgtaggaccgattttttttaaaaccaccattgccgcctggccttgaaaagtccgattccttggttaacctcgcggaccaggcggaagggtccaaaaggatggtaaagttaatggaaaaggtttccgccgccgtggatggcaataacctaaccgtaaaaaaccgaaatcttttttccgccgttaataaaaaggtgattggggctcgccggccctgggggcgtatcatttaatcatccgaccaaaaggaaaagagccgtggtaccaataaccacttcccggcaatccgggaatttaggtttaagaccgagacggacctttccggaatctgcaacggaatcc

SEQ ID NO: 156563 - DNA, 363 bp, Arabidopsis thaliana columbia
  unsure (1)..(363): unsure at all n locations
cggggnggacccaggcgtccgaaggaaaggtggggtcctatctccctcttaaaccaacttttcaaaaggtggggtcctatctccctttaatctttttttttggctttatccaaggcctttgttaaggatttttgggtcgaaaacctgaaacgcgctgaaccccctgcgggttaccctggctttcgtccaattaatgtaaaagttccagacttggttttttttggcttaggccctcttggaaccactccaaacttattaaacgccgttgtaacacccgttttggcagttaatttccgggttttgaacggtttaggcctttttccagttggactggccttagttcctaagggggtgatcccaatg

SEQ ID NO: 156564 - DNA, 440 bp, Arabidopsis thaliana columbia
cggacgcgtgggcagagctcgagattctccttccctatacaactctcatctgtaatcgatacagatggcagcttcatcagcttgtcttgtgggaaatggtttgtcagtgaacacaacaaccaaacagaggttaagtaaacatttttccggcagacagacaagcttttcttcagtgattaggacatctaaggttaatgtagtgaaggcttctttggatgggaagaagaagcaagaaggaagaagagattttctcaaaatcttgttaggaaatgctggggtcggtttggttgcaagtgggaaagcaaatgctgatgaacaaggtgtttcttcgtcgaggatgtcgtattctaggtttctagagtacttggataaggatagggtgaataaagttgatttgtatgagaatgggactatagctattgtggaagcttgttcttctg

SEQ ID NO: 156565 - DNA, 220 bp, Arabidopsis thaliana columbia
aagaaaacatcaggttgttcggatctgattttcgcttgctaaactcaaaacatggcgaggggtattaagaagcatctgaagaggcttaatgctcctaatctttttgatgcttgacaaacttgtagttgcatttgccccaaatccttcatttggaccacataagttattgtagtgccttcctctctttcttatcatcatgaacaggttaatttattgtttt

SEQ ID NO: 156566 - DNA, 421 bp, Arabidopsis thaliana columbia
attataacttcgtctccgtgtctgttcaagctcccattcttgtggccttcacgcttcaggaacaaagaccagtatctctctgaaagactacttctcggaaattttcgtctccatggcacccgtgagggggattcttggcttgcaaagggcagtgtccatttggaaggaaagtaacagactgactccagctttgagatcattcagcactcaagctgcatccacttccaccactccacagcctcctccacctcctccgcctccggaaaagactcatttcggtggtctcaaggatgaagatcggatttttactaatctctatggtctgcatgacccatttctcaaaggcgcgatgaagagaggtgattggcataggaccaaagatttggtgctcaagggtactgattggattgtcaatgaaatg

SEQ ID NO: 156567 - DNA, 439 bp, Arabidopsis thaliana columbia
cccaaattgaacaaccaaagaagttgcagagcacacacacacactttcaagtttcaatacagagatggcgagcactgagccagagcgtgagaaccgtgaagatgaaaccgaagtcaacgaagatgaagacaccggagctcaggtagctccgatcgttaggcttgaagaggttgcagtcaccaccggcgaagaagatgaagacgccgtcctcgatctgaaatcgaagatgtatcgattcgataaagaagggaaccaatggaaggagagaggagctggaactgtgaagttattgaagcataaggaaactggaaaagttcgtcttgttatgagacaatctaaaaccctaaagatctgtgccaatcacctcatttcgtctgggatgagtgttcaggaacatagtgggaatgaaaagtcttgtttatggcacgctactgatttc

SEQ ID NO: 156568 - DNA, 445 bp, Arabidopsis thaliana columbia
tcgaacaaacaattctaaatccccaaaaaaaatctatgactagccaatagcaacctcagagattgatatttcaagataagacagtatttagatttctgtattatatatagcgaaaatcgcatcaataccaaaccacccatttcttggcttacaacaacaaatcttaaacgttttactttgtgctgcactactcaacctcaatggccgcctcaacaatggctctctcctcccctgccttcgccggtaaggccgtcaagctttcccccgcggcatctgaagtccttggaagcggccgtgtgacaatgaggaagactgttgccaagccaaagggcccatcatgcagtccatggtacggatctgaccgtgtcaagtacttgggtccattctctggcgaatcaccgagctaccttaccggagagtttcccggagactaccgatgggacac

SEQ ID NO: 156569 - DNA, 357 bp, Arabidopsis thaliana columbia
tcgcttcaaccccacagagtcagatcatagaacacatcttcttattcaaaaccaaagacgacgctggctccaccaaaatcaccttcatgatcaacaacctcaacgctcttgcatatctcgatcaagtgcttcacatctccacctctcctctccaccgtatcttcttcgttaccgccttcactcacgtactccatagccgttacgaatctaaagaagatctagcctcctacgctgcacattcagatcacgttcgtgttgttaaggaatttgtgttaccgatctgtgatgatatcatggctgttgattggatcgctgatcgaattccctgaaccttatcgacgcttcctggtttcggtt

SEQ ID NO: 156570 - DNA, 396 bp, Arabidopsis thaliana columbia
cgattattactttgcttacctcgagattctctttccttattcaactctcatctgtaatcaatagagggggcagcttcatcagctggtgttgtcgtaaatggtttgtcagtgtacacaacaaccaaacagaggttaattaaacatttttccggcagacagactagctaggaatgagacatacttacatccactgttgagtgtattgatcgctcatgttgttgttactaacaagcatgaattaatatgtgattttcctaaagttcttgttaagaaatgatggtgtcggtttgattgctagtgggaaatcaattgctgatgaacatggtgtttctttcccagaggatgtcatgttctatgtttatagagtacttgtataaggatagggtgtatattctt

SEQ ID NO: 156571 - DNA, 321 bp, Arabidopsis thaliana columbia
atataacttcaactccatgtctgttcattctcccattcttgtgtccttgacgctttacggacagagaccattctttttcggagcgactacttctctaatattttcctctccatggctcccgtgtagggggcttcttgtcttgcaaaggacattgtcctttttgaaggaaagtaacatactgtctcctgctattagatcattcaccactcaagcttcattcacttctaccactccacagatttctccacctactacttctccggaaaagactcatttctttggtctcaatgatgtaaatcggattttgactaatctttatgg

SEQ ID NO: 156572 - DNA, 264 bp, Arabidopsis thaliana columbia
ctcggcgaagctttgtcccggagtttgtgcttatccgttcgccgtaccggcgtttataccgggattaaaaccggttaaatcgcctaacggagatgttggagtagatgggatgataagtgtgatagctcacgagattgctgagctggcgacgaatccgttggttaatgcttggtacgcaggacccgacccggtagctccggttgagatagcggatcttagagagggtatttttggaacaggaggtggtggtctaatcacagagga

SEQ ID NO: 156573 - DNA, 321 bp, Arabidopsis thaliana columbia
cgtatcgtctcttccaaatcttccaaaagattactttctcttgagttcacttctacatgaggctgggcggtactcccattgggcggggctatatttatcttttttctgatacaaccccaatcacggcggagattttccgtgctctttgtaccggcgagaaaggaatgggaaagctagtttagccacttcacttcaaaggatcgatctttcaccgtgtgatttccggtttcatgtgtcaaggtggtgattttaccgtcaagaacggtacctgtggtgaattcgatctactgtgctatgttctatggtcgagaacgttatcat

SEQ ID NO: 156574 - DNA, 437 bp, Arabidopsis thaliana columbia
agaaaaacagatctgaaatcccgcttgatactccaccgactttaaactactggtttttgtttgatttaagtatagtgttaatgactcctctctccaccttcctttgattctacctatcacttcccttgccgttgctccatcttcatcactagtcactatacaccaatcttagatccgggaagctaatttctcttctccgatcggtgaatgcagttacattgacctcggatctaaccaagctcttctggtttccagctctctggaattcaaaaaaatggaggagaaatccaagtcaagaggttggtgcggttggttcatcgccattattgtgctagcttctgttatcctcgccgtcgtttacactgttaaattgagaacgaagaaatccggtgacgatgacggtggcggtcccgttcctggacctcccggcgccattg

SEQ ID NO: 156575 - DNA, 437 bp, Arabidopsis thaliana columbia
agaagtgtggccacatggccggaaaggtcctcgtggcagtcagcgaacacatcaaccgccttgtcgcggctcggctccagttcgacgtgatgggtacagagaccgtccttgttgctagaacagatgcggtcgcagctactctgatccagtcgaacattgacgcgagggaccaccagttcatcctcggtgccactaacccgagccttagaggcaagagtttgtcctcgcttctggctgagggaatgactgtaggcaagaatggtccggcgttgcaatccattgaagatcagtggcttggctcggccggtcttatgactttctcggaagctgtcgtgcaggccatcaagcgcatgaacctcaacgagaacgagaagaatcagagactgagcgagtggttaacccatgcaaggtatgagaactgcctgtcaaatgagcaa

SEQ ID NO: 156576 - DNA, 261 bp, Arabidopsis thaliana columbia
gaaacccaaacccttattccaaaaaatggtgtttttgctctcaaaacctctactttctcgggcggggtctacttggcttcgttggcggctactattctttgagactgtaccccttctaaaccattaccagcacctaactaaccaccaaaacatccagtcttaccgtctaaaccatctgacgactaaaccatcttaactaccgtctgtaaaacctcctactgcaatattttttctctttttaacaccattctattctaccaa

SEQ ID NO: 156577 - DNA, 441 bp, Arabidopsis thaliana columbia
cagcttcccacttccatcctcaaaacttcttctcaccacgttaaccccagcctttcttccaaagagaaaactgggtttgtaacggacgatgattttaggcatctatggaagttggttgaggtcaaagatggcggtccttgttggattcaaatgatggaccgatcaaccccaaccttctcatatcaagcttggaggcgagatcctgagaatgggcctccccagtaccgtagcagaactgtgtttgaggatgccactcccgagatggtcagggacttcttttgggatgatgagttccgttccaagtgggatgatatgcttttgtattctttctactctcgagcgttgcaaggacacgggcactatggttgtgcaatgggtgcgaaagttccccttcttttgtagcgacagggagtatattataggccgtcgtatatgggatgc

SEQ ID NO: 156578 - DNA, 241 bp, Arabidopsis thaliana columbia
tcatgtctattctgatgctggaattccattgatgagtatctgataggacttttgttatacagaatgtggctcagtacattgtatgagtgtgtaaggaacagactgctggtgttgatgcctgatcttagatacagctatctgatgaacactagcattcagtggacttgaaaacgccgatctcttacttttcatcggttcccagcctagggtggaagctgcattggtgaatgctaggatctgc

SEQ ID NO: 156579 - DNA, 539 bp, Arabidopsis thaliana columbia
  unsure (1)..(539): unsure at all n locations
cggtttcggaattncccgggctcgatcccacgtcgtctcgtcccacgtcgtctcgtctatgtttgtaaaccgcgccgtagtaatcgaaccgtnnatgagagncctttgaanngaaatnncaagagnncggctataagggctgcngnntctgccccgcttcnnnttctttagagcgaatagtnnattggcccacntnncttttcacncnngctattttnncttctttgtcccctcgttttccaaggggattgtcatccgagatgcagcccggtagcttccgggaatatctcacttagtnagtcgccggcaaagnccaatggtggtttntgtttcggttcaatatgncgggaatatccgtcggcgatgcgaacccggatggaggttatacccggaccagttttagcacagagaccaaatttactaaaaccggtgtccggtttggagaatgaaaagaagagttcacagtgaaagcgtaacgaaatggttaagaattggacagttccatactggtttgctcaaaccatttatcggtttagatt

SEQ ID NO: 156580 - DNA, 433 bp, Arabidopsis thaliana columbia
attcatggacagatctcaacgtgtaggcatcttcacagaagacaacttagctttccaacaaaagatcctcgaaagatccggtctaggtcagaaaacttacttccctgaagctcttcttcgtgttcctcctaatccttgtatggaagaagcgagaaaagaggcagaaacagttatgttcggagctattgacgcggttcttgagaagaccggtgtgaaacctaaagatattggaatccttgtggtgaattgtagcttgtttaatccaacaccgtcactttctgctatgattgtgaataagtataagcttagaggcaacattttgagctataatcttggtggaatgggatgtagtgctggccttatctccattgatctcgctaaacagatgcttcaggtaaaatatcttattattcggtttggtttaatccggttt

SEQ ID NO: 156581 - DNA, 434 bp, Arabidopsis thaliana columbia
ggacgtagagatgaaagataaccaaaccccaacgcaatccgtcgtctctgctcctacctccacgctacagaatttgaaggagattgcagctctgattgatactggatcttatacaaaggaagtccgtcgtattgctcgtgctgtgcgtctcaccgttggactacgaaggaagctcacgggttccgtgatctcttctttccttgatttcgctttggttcctggatctgaagctcacactcgtctctcttcttttgtgccgaagagtgatgaacatgacatggaagttgatacagcatcatcgaattcccaagctcctcctaagcatctacctgcagagctcgagatttactgctacttcattgttcttctttttctcattgatcagaaaaagtacaacgaggccaaagtttgttctaccgctagcattgctcgcc

SEQ ID NO: 156582 - DNA, 375 bp, Arabidopsis thaliana columbia
caaaaagtcttcatctttaatcattcaatggctttttcgtcttctatgcagatggttcacactggccgctccattgcccagattgggttcggtgttaagtcgcaattagtttctgcaaatcgaacaactcaatcagtttgctttggagctcgttcctctggaattgcattatcttcgagattgcactatgcatcacccattaagcaattttctggggtttatgcgaccaccaagcatcagagaaccgcttgtgttaaatccatggctgctgaggaagaagaagtaatcgaacctcaagctaaagtgacaaacaaggtttactttgatgtggaaattggaggagaagttgctggcagaattgtgttgggtcttttt

SEQ ID NO: 156583 - DNA, 416 bp, Arabidopsis thaliana columbia
ctcgcatctccaaatcgaaatcgctctctgcctctcttcgtctccgtctccgtctccgtctccatctctgtctccggtaagtcactgaaagatggggcgtgttagaaccaagacggtgaagaaatcttcacgtcaagtcattgagaagtactactctcgcatgactcttgactttcacactaacaagaagatccttgaagaggttgccatcatcccatcaaagagactccgcaacaagattgctggattctccacccacttgatgaaacgtatccagaagggaccagtccgtggaatctcactcaagcttcaagaagaagagcgtgaacgccgtatggactttgttcccgatgagtctgctatcaagactgatgagatcaaggtcgacaaagagactcttgagatgcttgcttctc

SEQ ID NO: 156584 - DNA, 432 bp, Arabidopsis thaliana columbia
ctttttccttcctcctctccgattcttcctccgtcagtaaaagaaaatcaaaatggcttcacacattgttggatacccacgtatgggccctaagagagagctcaagtttgcattggaatctttctgggatggtaagagcactgctgaggatcttcagaaggtgtctgctgatctcaggtcatccatctggaaacagatgtctgccgctgggactaagttcatccctagcaacacctttgctcactacgaccaggttcttgacaccaccgccatgctcggtgctgttccacctaggtatggatacactggtggtgagatcggccttgatgtttacttctccatggctagaggaaatgcctctgtgcctgccatggaaatgaccaagtggttcgacaccaactaccattacatcgtccctgagttgggccctga

SEQ ID NO: 156585 - DNA, 433 bp, Arabidopsis thaliana columbia
gcaaaagaagaagagaaacaacaagaagttgtaatggcttcctctatgctctcctgcgccgctgtggttacatccccggctcaggccaccatggtcgctccattcaccggcttgaagtcatccgctgcattcccggtcacccgcaagaccaacaaggacatcacttccatcgcaagcaacgggggaagagttagctgcatgaaggtgtggccaccaattggaaagaagaagtttgagactctatcttacctccctgaccttagtgacgtcgaattggctaaggaagttgactaccttctccgcaacaagtggattccttgtgttgaattcgagttagagcacggatttgtgtaccgtgagcacggaaacactcccggattctacgattgacggttctggtcattgtggaagcttccattgttcggatgcaccg

SEQ ID NO: 156586 - DNA, 439 bp, Arabidopsis thaliana columbia
caagttagtcataaaaaaaaaaaaaacacataaaagtttcaatggccgcctcaacaatggctctctcctcccctgctttcgccggaaaggctgtgaacctttcccctgcggcatcagaagtccttggaagcggccgtgtgacaatgaggaagactgttgccaagccaaagggtccatcaggcagcccatggtacggatccgaccgagtcaagtacttgggtccattctctggcgagtcacccagctaccttaccggagagttccctggagactacggatgggacacagctggtctatccgctgaccccgagacattcgcaaggaaccgtgagctagaagttatccacagcaggtgggccatgctcggagccctaggctgcgtcttccctgagcttttggccaggaacggagtcaagtttggagaggcagtttggttcaa

SEQ ID NO: 156587 - DNA, 438 bp, Arabidopsis thaliana columbia
ctaatttcatagctcctaacaaagcaatatcatttccaatttataaaagttaaagccatggctgcatctttctctgtcccctctatgataatggaagaagaagggagattcgaagcggaggttgcggaagtgcagacttggtggagctcagagaggttcaagctaacaaggcgcccttacactgcccgtgacgtggtggctctacgtggccatctcaagcaaggctatgcttcgaacgagatggctaagaagctgtggagaacgctcaaaagccatcaagccaacggtacggcctctcgcaccttcggagcgttggaccctgttcaggtgaccatgatggctaaacatttggacaccatctatgtctctggttggcagtgctcgtccactcacacatccactaatgagcctggtcctgatcttgctgattatccgtac

SEQ ID NO: 156588 - DNA, 421 bp, Arabidopsis thaliana columbia
ctcactctttgcttgtgccactcacagtctatggcggatgagatggcgctagcgaaaccgatgtccaagttctttggcccaaagctctcaaaccctatcaaattcctttccgtccgacagtcatccaccgtgatcagaatgccagcctcttcctgaccggctgctacaaccaccgtcacctacaagcccaagaagggaacgaagaatgcgattcaatgagcagcttcttactccgaggatctacactacggacgttgaggaaatggaacagatctttaacacggagatcaacaggaaccttgacgaagcagagttggtggctctgttttaagagtttaagaccgattacaaccagacacattttgtgtggaacacggagtttaatgtagctgccgacaaattgtaaggacctctgcgacag

SEQ ID NO: 156589 - DNA, 436 bp, Arabidopsis thaliana columbia
acgaaaaccagagagagagagagagagagggagatgcaatcgctgcaagataaggcatcggtgttaagcggcgtcgatcaggctgaggcgttcgccatcgacgagtccaatctgttcgacaagcttggtcttcagacattcatcaacctatccaccaatttctataccagggtatatgatgacgaagaagaatggtttcaatcaatattttctaactctaacaaagaagatgccatccaaaaccagtatgagttctttgtccagcgtatgggaggccctcctttgtattctcagagaaaaggtcatcctgctttgatcggacgtcaccgtccatttccagtgacccatcaagctgctgagagatggctagagcacatgcaaaatgctctggacgattcggttgacattgaccaggactcaaaaatcaaaatgatga

SEQ ID NO: 156590 - DNA, 438 bp, Arabidopsis thaliana columbia
atctaatcttttcagctctctccatcgtcgtcgtatctgtgactctcgtgatcatcgcctgaaaaaaatttgagataatggccagaaagttcttcgtcggaggcaactggaaatgtaacggaactgctgaggaggtgaagaagattgtgaacactcttaatgaagctcaggttccttcacaggatgttgtagaggttgtggttagccctccatatgtttttcttcccctggttaagagcacattgaggtctgacttttttgttgcggcacaaaactgttgggttaagaaaggaggtgctttcactggtgaagtgagtgcggagatgcttgtgaacttggatattccatgggttatccttggtcactctgaaaggagggcaatccttaatgaatcaagcgagttcgtcggagacaaggttgcctatgcacttgctcaag

SEQ ID NO: 156591 - DNA, 436 bp, Arabidopsis thaliana columbia
tccttatctttctcttcgcgacattgacaaaagaaaaattgctcaatctttgaaaaaccagaacaattaacgccggtgattgtttgtatttcgctatgttatctgagactttcaacgatgattcatcaaggcaacaaacgatgttcacatcggcggaagtttgcttaaatcgaaaaatagcaaattggattcggagagttatcgccgacgccttccccaaattagtgttaatggcggataagcaagtggttgtgagttaaggagaaactgtaaaggaattcgtctatgcacttcaatgaagtttatcatcaccggttggagacaaagatagacaaagacacgtaacttgcaactcatgttccacttgatgccaaaagagacatatgattcgtttgctttgttgcttttttttagctttgtatgtttccaccacatg

SEQ ID NO: 156592 - DNA, 437 bp, Arabidopsis thaliana columbia
agagagtatacgaaacgcacaaccgaagaatcaccaaagagaaagggaattatagcttccgtttcgtggattataaatgcactgtggaattctatgttactcatttcttggttcgtgagggtagagcaagaataggaaagaagcgaagagaaacacttagaatcgatgctatggatcgaacctcttccagatggaaaggtgctaatatcttagtgttcaatacagctcattggtggtctcattacaaaaccaaatcaggggtcaactactaccaagaaggagacctgattcatcccaaactcgatgtatcaaccgcttttaagaaagctttgcagacttggtcatcatgggttgacaaaaatgtcgatccgaagaaaactcgcgttttctttagaagcgctgcaccttctcattttagtggaggagaatggaactca

SEQ ID NO: 156593 - DNA, 441 bp, Arabidopsis thaliana columbia
ctcacattttcgtagccgcaagactcctttcagattcttacttgcagctatgggtaaagagaagtttcacattaacattgtggtcattggtcatgttgattctggaaaatcgaccacaactggtcacttgatctataagcttggtggtattgacaagcgtgtcatcgagaggttcgagaaggaggctgctgagatgaacaagaggtccttcaagtacgcatgggtgttggacaaacttaaggccgagcgtgagcgtggtattaccatcgatattgctctatggaagttcgtgaccaccaagtactactgcacagtcattgatgccccaggacatcgtgatttcatcaagaacatgattactggtacctcccaggctgattgtgctgctcttatcattgactccaccactggaggttttgaggctggtttctctaaagatgg

SEQ ID NO: 156594 - DNA, 438 bp, Arabidopsis thaliana columbia
ctcgctggctattgggcaaaattaccaatgattaggaggttgatgttgtctcatccagaagttgagtggatctggtggatggatagtgatgctttgttcactgatatactgtttcagatccctttggctaggtatcagaagcataatctagtgattcatggttatccggacttgttgttcgatcagaagtcgtggattgctttgaacacaggtagttttctgctgaggaattgtcagtggtcgttggatttgttagatgcttgggcgcctatgggacctaaagggccaattcgtgatgaggccgggaaggtattgacggcttatctgaaaggtagaccagcttttgaggcagatgatcagtcatgcattgatctatctcctgctttctcagtaagatacatggatggagaaagtgtttgtggagaatccattctattt

SEQ ID NO: 156595 - DNA, 255 bp, Arabidopsis thaliana columbia
tgagaaatctcgccgccgtttgaagaaagaagaagagatgggagttttctcattcgtgtgcaaaagcaaaggcggagaatggaccgcaaagcaacacgaaggagatcttgaagcttcagcttcttccacctacgatctccagcgcaagcttgttcagactgctctctccgtcgattcatctggcggcgttcagtcttctttctctcttgtctctcctacctccgccgtcttcgtggtggtcattggtggtggtgg

SEQ ID NO: 156596 - DNA, 235 bp, Arabidopsis thaliana columbia
caaaatcttcatcgatcatcatcattatgtgagaaatcctccacgtccaaggtgggcaatgctgtaaccaaatcgggtccaaattctgggtagatatctgtgacgaacacggcgttgatccctccgttcgtttcaacggtgatttcgccgatcttaatctagtacgttccaattgttttttacaatgaagctattggttggttgtatcgtatcttgttttgtctttattgatctt

SEQ ID NO: 156597 - DNA, 439 bp, Arabidopsis thaliana columbia
aaaaagatgaagcaaaaaaaaaaaagagagagagaaaaagacaattcagagataatacaaaggaatggttttgttttaagagagaaagagaaagagagaactcgacgaagaatgatggtgggaggttaaattccccaaacccccagagctcttcattttcttcatatcgacgatatgctaaatggctgctgctaccattactgatctcttctcttaagctctctttgtttggggcatggaagaagagcttgccatgcttagacagctcatcggtcagcttcaagagctcttgcacaacggctctcctcctcctccttcttcttcttcatctctgtcgtcttcttctccgtcatttttggttctccaccatcctcagtatcagaacggatggtgtttgccctgtattgaggatacttctgctgatgattgttgtgatatt

SEQ ID NO: 156598 - DNA, 438 bp, Arabidopsis thaliana columbia
atggactcctccaaactctcatctctctctctttgcctcttcctcatttgcattatctatctcccccaacattctctcgcatgcggctcttgcaacccacggaagggcggaaagcactcccctaaagcccctaagctaccagttcctccggtgaccgtccctaagctaccagttcctccggtgaccgtccctaagctaccagtccctccggtgaccgtccctaagctacccgttcctcctgtgaccatccctaagctacccgttccaccagtgactgtacctaagctacccgttcctcctgtgaccgtccccaagctacccgttcctccagtgaccgtccccaagctacccgttccttcagtgacagtccctaagctacccgttcccccggtaactgtacctaaactacccgtatcctcagtgaccggtcctatgcta

SEQ ID NO: 156599 - DNA, 427 bp, Arabidopsis thaliana columbia
caaaaaattcacaaacatcaaacattctccacctactgcccaaaaacgacagcattccttttccagcaacaaagaaaaaacacatttccttgccaatggcccgttgtaccaaccttgttaccgttttcctattatgggctcttttgatgttctcatggtgtaaagcttcaagaatcagccctaatgtatatgaccattcttataaaaggttcaaatccgatagcttaatcaagcgaagagaggacatcacgggattgagaagttttgtaagagcctctttgcggactccaaccaccgttagtgtttctgattttggagctaaaggagatggaaaaaccgatgacacgcaggcgttcgtgaatgcgtggaagaaagcatgttcttcaaatggagctgttaatctcctagttcctaaagggaatactta

SEQ ID NO: 156600 - DNA, 437 bp, Arabidopsis thaliana columbia
cggacgcgtgggatttctcacattttcgtagccgcaagactcctttcagattcttacttgcagctatgggtaaagagaagtttcacattaacattgtggtcattggtcatgttgattctggaaaatcgaccacaactggtcacttgatctataagcttggtggtattgacaagcgtgtcatcgagaggttcgagaaggaggctgctgagatgaacaagaggtccttcaagtacgcatgggtgttggacaaacttaaggccgagcgtgagcgtggtattaccatcgatattgctctatggaagttcgagaccaccaagtactactgcacagtcattgatgccccaggacatcgtgatttcatcaagaacatgattactggtacctcccaggctgattgtgctgttcttatcattgactccaccactggaggttttgag

SEQ ID NO: 156601 - DNA, 433 bp, Arabidopsis thaliana columbia
ctcctgttctcaagggctgaaccaaaacacaaacaagagattgtcaggttactgaaagaagatggagaagtggttgccatgactggagatggagtcaatgatgctcctgccctgaagttggctgatattggtgtggctatgggcatttccgggacagaggtagcaaaggaggcatctgacttggtgttggcagatgataatttcagcaccattgttgcagctgttggtgaaggcaggtccatctataacaacatgaaggccttcatcaggtacatgatctcttccaacatcggtgaggttgcatcgatattcttgacagctgctcttggaattccagaaggcatgatacccgttcaacttctgtgggtgaatctcgtaacagatggtccttcagctactgctttgggattcaacccccctgacaaggatttta

SEQ ID NO: 156602 - DNA, 353 bp, Arabidopsis thaliana columbia
attacacaaaaatgggacacctaattcctcaaaccggagatgaagagaccgagcttggtttagctgcggttaggctagctaactgtgcagccttcccaatggttttcaaagctgccatcgagctcggtgtcatcgacactctctacttagctgctcgtgatgacgtcaccggatccagttcctttctcacaccttctgagatagctattaggctccccacaaaacctagtaaccctgaagcaccagctctgttggatcgtattcttcgtttacttgctagctactccatggtcaagtgccaaattatcgattggtacagagtctacaaagcattgccgatttgtcgatatttt

SEQ ID NO: 156603 - DNA, 387 bp, Arabidopsis thaliana columbia
attacacaaaaatgggacacctaattcctcaaaccggagatgaagagaccgagcttggtttagctgcggttaggctagctaactgtgcagccttcccaatggttttcaaagctgccatcgagctcggtgtcatcgacactctctacttagctgctcgtgatgacgtcaccggatccagttccttcctcacaccttctgagatagctattaggctccccacaaaacctagtaaccctgaagcaccagctctgttggatcgtattcttcgtttacttgctagctactccatggtcaagtgccatattatcgatggtaacagagtctacaaagcagagccgatttgtcgatatttcttgaaagataatgttgatgaagaattaggaacac

SEQ ID NO: 156604 - DNA, 411 bp, Arabidopsis thaliana columbia
gtgaatgttcttgcatccaagagaagtcttctcctttttcttcttattgtaagtctctctttgagccagaaggtcagacatatctctgcctttaacgacaccaaaccatacagacaagtcagtagcttgagacttgcgaggatccaaaagcacttgaacaagatcaacaagtctcctgtcttcaccattcagagtccagatggtgatgtaatagattgtgtacccaaaagaaagcagccagctttggatcattcactcttaaagcattacaagattcagaaagcaccgaagaaaatgccgttgatgaagggttttgatgatgatgttaaagaagcatataattgttttgtgaggttcatgtgtattgtggcacgtgtacatctcgtggtgctctattgttttctatttcta

SEQ ID NO: 156605 - DNA, 435 bp, Arabidopsis thaliana columbia
caagaactcaaacacttcataactaaacatcctttaaagccttttcaaaaactcaatcatgtcaagcaactgcggaagctgcgactgtgctgacaagacccagtgcgtaaagaagggaaccagctacaccttcgacatcgtcgagactcaggagagctacaaggaggccatgatcatggacgttggtgccgaggagaacaacgcaaattgcaagtgcaagtgcggctcctcttgcagctgcgtcaactgcacttgctgccccaactaatgaagcttctttaatcaaaatgtaatatgaataaaagttgatgtgggctcatctattgagctcatgtctctcttattactactctctagtatggtgtgatgtaatgggttatgacccttctttccctttcctattaaactaaagaaacttgcaagataattgaaaag

SEQ ID NO: 156606 - DNA, 435 bp, Arabidopsis thaliana columbia
ggtagtgcaagtgcaacgaataaagagtttgatgttgatgtcgatgttgatgttgatgttgatgttgatgtcgatgtcgatgtcgaggttgaatatgaaggtgatgtgtatgttgaagaggctaatgacgagggagaagacgttgatggtaacgacgagggagaagatgttgatggtaacgggcttgaaattgtggcttgtgtcgataatttaagtgttgcttatagtgagagtgattttggaagcagtagtgatgctcgtagccaatgtaatgatttgtctgatgctgatctatatccactgtctctggataacacacaaggaccaagaccggttcgtatgaaccaaggctcgggtggcggaaggaagaaaaacacgaaccagaatggtcaggcttctcggtctaagaaaatagttggtaatggcccacgtggt

SEQ ID NO: 156607 - DNA, 440 bp, Arabidopsis thaliana columbia
gttacaggactgttgagtttttctacagtagcatctgctgatgaggctgaacatggattggagagtccagagtacccttggcctcatgatggcattcttagctcatatgaccatgcttcgatccgtcgtgggcatcaagtttatcagcaagtctgtgcatcatgccattcaatgtctctgatctcataccgagacttggtgggtgtcgcctacacagaggaagaggcaaaggcaatggcagctgaaatcgaggtagtagatggacctaatgatgagggtgagatgttcacccgccctggtaaactcagtgaccggtttcctcagccatatgcaaatgaatcagctgcaaggtttgctaatggtggagcgtttcctcctgatctaagtcttataaactagggacgtcacaatggtccaaactatggctttgcgcttctgac

SEQ ID NO: 156608 - DNA, 359 bp, Arabidopsis thaliana columbia
gttctttacaggaaaaagttgaacgtctttttagtactaatggagatgcagcagggggggccgtaaccagagggggcatgtttagtgtagttgtaattcagaggttgtatggaagtgtaagatagttctatgaactgtccatttgaaagcattaaaaaaactcatgtaagcgattgtgaggcgtcaactgctgtggaacctgatttagttaaccaaggcgctatggattttcatggtgaagcccatggtaacatgtatggtgcaattgtgtggagatactgatacttataaggatcttgctattttattttattctgaggagctgacattaaatttaaagaggtttatttgatactttt

SEQ ID NO: 156609 - DNA, 436 bp, Arabidopsis thaliana columbia
gtggacttgaaaacgccgatctcttccttctcatcggtacccagcctagggtggaagctgcaatggtgaatgctaggatctgcaagacagtccgtgcatcaaatgccaaggttggatatgttggtccacctgcagagttcaattacgactgcaaacacctcgggactgggcctgatactctcaaggaaattgctgagggacggcatccattctgtacggctctcaagaacgccaaaaaccctgcaatcattgttggtgctgggctcttcaacagaactgataaaaatgctatcctctcttctgtggagtccattgcacaagccaacaatgttgtccgaccagactggaacggtctcaactttctccttcagtatgctgcccaagcggctgctcttgatcttggtctcattcaacagtccgccaaagccctcgagtc

SEQ ID NO: 156610 - DNA, 445 bp, Arabidopsis thaliana columbia
ctaagacagagtcagaaacaatggcgaaatctccagaaacagagcatccgaacaaagtctttggttggggtgctagagacaaatccggtgttctctctccttttcacttctctagaagagacaatggtgaaaatgatgtgacagtgaagatcttgttctgtggagtttgccacactgatttacacaccatcaaaaacgactggggatactcgtattacccagtagttccagggcatgaaatcgttgggatcgctacaaaagttggtaagaacgtgactaaattcaaagaaggagatcgtgtcggagtaggagtgatcagtggctcgtgccaatcttgcgaatcttgtgaccaagatcttgaaaactactgtcctcaaatgtctttcacatacaatgcgattggatccgttggaaccaagaatttacggtggcttattcggagaac

SEQ ID NO: 156611 - DNA, 440 bp, Arabidopsis thaliana columbia
ggtggactgccatgatttcgatcgggtttaacgctgcgattagtgtgagagtatcgaatgagctgggtgcaggaaacgcagcgttagccaaattctcagtgatagtcgtctccataacttcaactcttatcgggatagtgtgcatgattgttgtcttagccacaaaagacagcttcccttatcttttcacttcaagcgaagctgtggcagcagaaaccacgagaatagccgtcttgttgggcttcactgtcctcttgaacagcctccagcccgtcttgtcaggggttgcggttggagcggggtggcaggctctggttgcatacgtgaacattgcgtgttattacattatcggactacctgctggtcttgttcttggattcacactagacctcggcgttcagggaatatggtgaggtatggtagctggaatatgcttgcag

SEQ ID NO: 156612 - DNA, 430 bp, Arabidopsis thaliana columbia
ggtggactgccatgatttcgatcgggtttaacgctgcgattagtgtgagagtatcgaatgagctgggtgcaggaaacgcagcgttagccaaattctcagtgatagtcgtctccataacttcaactcttatcgggatagtgtgcatgattgttgtcttagccacaaaagacagcttcccttatcttttcacttcaagcgaagctgtggcagcagaaaccacgagaatagccgtcttgttgggcttcactgtcctcttgaacagcctccagcccgtcttgtcaggggttgcggttggagcggggtggcaggctctggttgcatacgtgaacattgcgtgttattacattatcggactacctgctggtcttgttcttggattcacactagacctcggcgttcagggaatatggggaggtatggtagctggaat

SEQ ID NO: 156613 - DNA, 434 bp, Arabidopsis thaliana columbia
  unsure (1)..(434): unsure at all n locations
cgcatctccaaatcgaaatcgctctctgcctctcttcgtctccgtctccgtctccggctgcatctctgtctccggtaagtcactgaaagatggggcgtgttagaaccaagacggtgaagaaatcttcacgtcaagtcattgagaagtactactctcgcatgactcttgactttcacactaacaagaagatccttgaagaggttgccatcatcccatcaaagagactccgcaacaagtatgctggattctccacccacttgatgaaacgtatccagaatggaccagttcgtggaatcttactcaagcttcaagaagaagagcgtgaacgccgtatggactntgttcccgatgagtctgctatcaagactgatgagatcaagtgtgacatatagactcctgtgattgcttgcttctttatgtatgtttgacacatc

SEQ ID NO: 156614 - DNA, 408 bp, Arabidopsis thaliana columbia
ggaaccaagggtaaacggtttatgattcctcatgccaaagcgatgattcagtaacggcgtgtaccttcttttgggttgatgcctgccagtgatgtcctgatttggtccaaagaggtcattacaaatagggatatacttgtggaactactatcaaagcatactgggaatttcgtgtgagactgttgctaacgtaatgagaaggccattttacatggatgcaccaaaagctaaagaatttggagtcattgactggattctttggcgcggacaagaaaagattattgcggacgtggtctcttcagaggaatttgacatgattgcatggattaaaagcgttgtatgagtctagtcttatatttttttgggctatatcatactgtgttatggtgaagaactatttgaacttgc

SEQ ID NO: 156615 - DNA, 434 bp, Arabidopsis thaliana columbia
gaaaatggtgggagcgactgtagttagtaaatggactcccctatgtgtggcttcgccgccggagagaaactcggcaagtctcaatccacactgttctccagccagggttaattttagaacagcgttggccgcatttcgtcctcagttccgtcttttctctcgcaattccgcgtctcgccgccgtcttcgcgcttccagctccgccgaatcgggaatcttccttcctcaccttgtagcttctatggaggacgttgaggagacttacattatggtgaaacctgatggcatacaacgaggccttgtaggagaaatcatttctcgctttgagaaaaaggggtttaaacttattgggctcaagatgtttcagtgcccaaaagaattggctgaggagcattataaggatcttagtgctaaatcattctttcctaacctga

SEQ ID NO: 156616 - DNA, 379 bp, Arabidopsis thaliana columbia
caaatcttaaacgttttactttgtgctgcactactcaacctcaatggccgcctcaacaatggctctctcctcccctgccttcgccggtaaggccgtcaagctttcccccgcggcatctgaagtccttggaagcggccgtgtgacaatgaggaagactgttgccaagccaaagggcccatcaggcagcccatggtacggatctgaccgtgtcaagtacttgggtccattctctggcgaatcaccgagctaccttaccggagagttccccggagactacggatgggacaccgtcggactttcagctgaccccgagacattcgcatggaaccgtgtactataagttatcacagcaggtgggccatgctcggaagcctaggct

SEQ ID NO: 156617 - DNA, 348 bp, Arabidopsis thaliana columbia
gaaaaatggtgctaaaggtgtacggacctcactttgcttcaccaaagagagctttggtcacactgatcgagaagggcgttgccttcgagaccatccccgtcgatcttatgaaaggggaacacaagccggctggttattttggttttcaagcctttggtactgttcctgctgttgttgacggtgactacaaaatcttcgagtcccgtgccgtgatgagggacctagcttagaagaacacaggacaagggcccgagcttttgggggaaaccgcgggagacagagaggaaggtggacacagtgctgatgtggaagcgaccacttaccacccaccggtattgaacttaacgc

SEQ ID NO: 156618 - DNA, 391 bp, Arabidopsis thaliana columbia
ttagctaaaaagctcatatttcgaaggctgttcgaaatgatatatagcttccagtctcctaacgaatttaacattaaacagaaagataagtcaaagtaaatttgctgtaacttatagtaacttacacaagtcttggccaaaagaaagtttgaaaatttaaaaaaacaaaaaaggggttagaagggactgtttgttgttcatttggaaacaaaattgtattcctttttggtccatatattaagacacatttatgtgtatatttttttttctgtgcccttctttttcgattttgtcttattcattatgagctttattaacacttctcacttgtctttgattcatcattcgttgcttactttttctttgatttattatatttcttacaaccttt

SEQ ID NO: 156619 - DNA, 440 bp, Arabidopsis thaliana columbia
gtcactgctttgataatgcaggtcctcgtcgtctctcctccgctcatcgccgccgcatctgtgtgtaaacctctcaattctctctctaaagccgcactctctttcttcagagccaaacccatttgtcctttccctcaaacctctcgacgaccaatctccgtatacaaatccccaatgaacaaccttttcaacagactcggattcgggtctcgttctcaagcccaagctgacccatcttccgccgcaatcgcccaaggacccgacgatgatgttccgtcttcaggtcagcaattcgcgcaatttggcgccggttgtttctggggagtggagctagcttaccagagagttcctggtgtgaccaagaccgaggttgggtatagccatggcatcgtgcacaatccgagttacgaggatgtctgtactggcactacgggacataa

SEQ ID NO: 156620 - DNA, 394 bp, Arabidopsis thaliana columbia
cttttcatttctctctgatttctcgatctctccgtccaactatgtctgccttcacaagcgaattcgccgatgagttgatcgccaacgctgcctacatcggcacacctggaaaaggtattttggctgctgatgagtccactggtaccattggaaagcgtcttgcgagcatcaacgtcgagaacgttgagaccaacagacgtaacctccgtgagcttctcttcaccgcccctggtgctcttccatgcctcagtggtgtcatccttttcgaagagactctgtaccaaaagagttccgatggtaagcttttcgttgatatcttgaaggaaggaggagtttttcccggtatcaaggttgacaagggtaccgttgagctagctggaaccgtctgtgagac

SEQ ID NO: 156621 - DNA, 390 bp, Arabidopsis thaliana columbia
taaagattttcaccattatgctattctttgtagccctagagaaatcatatttttggtggaggatattcccataagaagatgcccaatgaagagtgcgtctacatttcctttaagaccaatgtggctttatggttccatatgggatgcttcttcttgtgcaacggatgacggtaaatacaaagccgactataaatatcaacctttcactgctaaatacaccaattttaaagcgctcgtctgcaccgcctactcgtcagctcggtgctatcctgtgtcggcttcgtcataccgttctggcggattaaccctgcttcatcactattgcatgagatggcgtcaaacacatagtttggtttacaattattgctaagtttttagccagtccatttt

SEQ ID NO: 156622 - DNA, 356 bp, Arabidopsis thaliana columbia
cctaacttaggttttatcaatctctcattttcaaccatggcttcctccgccgcccaaattgacatcctcggcggaatcggattccctacttcgtcttcttcctcctccaccaaaaacctcgacaacaaaaccaattccattccacgaagcgtcttcttcggcaacagaacaagtcctttcactactccaacctccgccttccttcgtatgggacgaagaaacaacaacgcttcccgatacaccgttggtccagtccgtgtggttaacgagaaagtcgtcggaatcgatttaagcacgacgaattcagctgttgctgctttggaaggaggtgaacccacgattgtgacttacgctga

SEQ ID NO: 156623 - DNA, 405 bp, Arabidopsis thaliana columbia
tagggtttctaatctctctctctttctctcgagatttttcttcacttagttcttgattctgattaaaagttgatcttatagttccggtaacttcgttttctgggtttaattttcgattcaatcttcatctccttgatccacagccatgactgagtattgggtaagtcaagggaacaaatggtgtgaattctgtaagatatggatacagaacaatccaacaagtattagaaaccatgaccttggtaagcgtcaccgagaatgtgttgataagaagctcactgatatgcgtgagaggagtgcagccaaagacaaagagctcaagaaaaacgaaaaactgcttcaacagatcgaagctaaagcaactcgtagctatcagaaagatattgcaactgctcaacaagtagc

SEQ ID NO: 156624 - DNA, 200 bp, Arabidopsis thaliana columbia
gcgctcgaccgcgacggccgccctcttagatgttttataactaaaagagcccattaatactaaagagtctcactctgagtctaagacataaaaacttgcatcaaaagaaacaataaactttccaagaacacacatgtctttcttatccctaactgtgaaaaaagagagccagtcgtctgccttgattggctgatgataac

SEQ ID NO: 156625 - DNA, 177 bp, Arabidopsis thaliana columbia
gcggttgttcgggaagacgattctgggatcatctgtggttttcttgatcggttttggtttgttgttgctcacgctccgttccctagatcctaattcgtctttcatctacgacaactttttcttgtccgcattccaggtggcttctagattgaacacctcttctttctttgttgtggc

SEQ ID NO: 156626 - DNA, 405 bp, Arabidopsis thaliana columbia
acgagacacgaaagcgagagccaaatcctaaaatcgcagctcttctcgtcatcgatatgcagaatcactgctactctatgggtgaaccaatcctccaaaacgctctcaccaccatcgacatctgccgacgcgcttcaatccccgtattcttcacgcgccacaaccacaaatccccaaccgaccacggcatgctcggagagtggtggaacggcgatctaatcctcgacggaaccactgattccgaaatcatcccggaaatcaatcgccaggtcaccggaccagacgaaatcgtggagaagagcacgtacagtgcgtttaacaacacgcaccttcaggagaagctggacaagatcggagtgaaggaggtgatcgttttcggagtgatgacgaacctatgctgtgaga

SEQ ID NO: 156627 - DNA, 424 bp, Arabidopsis thaliana columbia
gcgcggacgcgtgggttcgaacatttacaccctcaagaatcgccgccatgtgtggaggagctgtgaatatccgatttcattccacgggcgaggtgtcgccatgttactagcgagtttatttggccggatctgaagaagaatttgaaaggatcgaagaaaagctcgaagaatcgttcgaatttcttcgattttgacgctgagttcgaagctgatttccaaggtttcaaagatgattcgtctatcgattgcgatgatgatttcgacgtcggggatgttttcgcccatgtgaaaccattcggtttcactttgactccaaaacccgccgtttccgccgctgcggaaggttcaatttttggtaagaaaaggaccggcctggatggggacgcctagaaatctgcgcatagggagagggagaatcagtgcc

SEQ ID NO: 156628 - DNA, 424 bp, Arabidopsis thaliana columbia
cccaaatcttatcactactctaaaagaatcttcatcatggcctcagtaacctcagccaccgttgcaatcgcatctttcaccggccttaaagcctcaaccatcaaatcatccgccaccgtcagaatccaaactgctgctgttgcatcaccgaagcttacagtgaagtcatctctaaagaacttcggagtcgcggccgtagcggctgcagcttcaattgctttggccggaaacgccatggcaatagaagttctcttgggaggaggggatgggtcgttagcttttattcccaacgacttctctatagctaaaggagagaagattgtgttcaagaacaacgctggatacccacacaatgttgtcttcgatgaagacgagatcccaagtggcgtcgacgtggccaagatctcgatggacgagcatgatc

SEQ ID NO: 156629 - DNA, 441 bp, Arabidopsis thaliana columbia
ccggtgcggagtcccaggcgtgacgctaggaccgcgacggtcgtcctcttagatgttttataaaaaaaagagccgttaatactgatgggacgggatgtacatctacgagttggatccatacataaaagagatgtataaatttcaacagcacggaggtcgacgactgcatgcagaaatgggaaagaaagaaaaaaaggagacacgcttaggtaccaaaaaactcacagatttacaccaaagagtcttgttaaaacttgttcagcatatgcatcttccttaccaaagcatttaaatcccgaggtttctcaggagctgaccccatcttggagtatcctcatcaaaaatgtaggtcaaaggtgaaactaataccccactgcctccggccggtttaagttgctttacagagtcgtatagggccttttttggtacacaaatcacgat

SEQ ID NO: 156630 - DNA, 435 bp, Arabidopsis thaliana columbia
gaaccggcgcggagacccaggctcgacccagcgacagacacgtaacccgcacagacacgtcattcgctcaaggaaatggcgtacgcttctggttttctctgcagatctaagcagctacaggggggtctggtcattttgcagcagcaacatgctattccagtccgagcttttgctaaggaagctgctcgtccaacctttaaaggagatgagatgttgaagggtgtcttttttgatatcaagaacaaattccaggctgctgttgatattctccgtaaggaaaagatcacccttgatccagaggacccagctgccgtaaaacagtatgcaaatgtaatgaagaccatcaggcaaaaggcagacatgttctcagaatctcagcgcattaaacatgacattgatactgagactcaagacattccagatgctcgtgcatac

SEQ ID NO: 156631 - DNA, 380 bp, Arabidopsis thaliana columbia
gcggcgacagagagagataacgagagagagagagatggagaagatgagaggacatgtattagcagtgccatttgcaagccaaggacacatcacgccgattcgccaattctgcaaacgacttcactccaaaggtttcaaaaccactcacactctcaccacttttatcttcaacacaatccacctcgacccatctagtcctatctccatagccacaatctccgatggctatgaccagggagggttctcatcaaccggttctgtcccggagtacctacaaaacttcaaaaccttcggctccaaaaccgtcgctgatatcatccgcaaacaccagagtactgataaccctattacttgtatcagctatgattctttcatgccct

SEQ ID NO: 156632 - DNA, 415 bp, Arabidopsis thaliana columbia
gttcagcaccccactattgcgcagaaagctgccgggcagttcatgcgttcaagtgtttccaaggacgttcaagtgggttaccagaggccttctatgtatcaaagacatgcaacctacggaaactactccaatgctgcatttcaatttcctccgacatcccggatgttggcaacaactgcttctcccgtgtttgtccaaaccccaggagagaaggggttcactaactttgcccttgactttctgatgggtggtgtttctgctgccgtctccaagactgctgctgctcctattgaacgtgttaagcttttgatccagaaccaggatgagatgattaaagctggcaggctttctgaaccctacaagggtattggtgactgtttcggcaggacgattaatgatgaaggttttggttctc

SEQ ID NO: 156633 - DNA, 400 bp, Arabidopsis thaliana columbia
gcgtgctactctgcaaccatgtcgaagcgaggaagaggaggaacctctggtaacaagttcaggatgtcactgggtcttccagtggcagccactgtgaactgtgctgacaacaccggagctaagaacctttacatcatttcggttaaaggaatcaagggtcgtcttaaccgtttgccatcagcgtgtgttggtgatatggttatggctactgttaagaaaggtaagcctgatctccgtaagaaggtgcttcctgctgtcattgttaggcagaggaagccttggcgccgaaaggacggtgtcttcatgtatttcgaagataatgctggtgtcattgtcaatcccaagggtgaaatgaaaggatctgctatcactggaccaatcggaaaggagtgtgctgatc

SEQ ID NO: 156634 - DNA, 409 bp, Arabidopsis thaliana columbia
cctctatgctgctgcttcggaacttctctacggtgggaagagttgctcaatctgttcgagtgacttcgaggatcttcttgtggaccggagaattgattagggttcttccttatactcgttctaaaagattgatctgttctactcgtgctgctcataatgaagaagccgccgcgaaagctgcggcttctgttgctgacaccggagctccgaccatatttgacaagattctagcaaaagagattccctcagatattgtctatgaagatgaaaacgtctttggcattcagagacattaaccctcaggctcctgttcatgttttgcgtcattcccaagttgagagatggcttgacctcccttggcaaggctgtaccaagacacgcacaggttcttggccaacctttacatgca

SEQ ID NO: 156635 - DNA, 426 bp, Arabidopsis thaliana columbia
gcgttgaatggcaccatgcgtgcacacactgacttggtgacggcaatcgccaccccaatcgataacgcagacgatcatcgtctcagcttcccgcgacaaatccatcattttgtggaaactcaccaaggacgacaaagcctacggtgtagctcagaggcgtctcactggtcactctcacttcgttgaggatgttgttctctcctccgatggacaattcgcgctttccggcagctgggacggcgagctccgtctttgggatcttgctgctggtgtctccactcgtagattcgttggacacaccaaggacgtgctctccgtcgccttctcactcgacaaccgttagatcgtctctgcatctcgtgaccgtacgatcaagctgtggaacactcttggtgagtgcaagtacaccatttcagaaagtggtga

SEQ ID NO: 156636 - DNA, 424 bp, Arabidopsis thaliana columbia
aagaaatggaggtagcagcagcgactgcgacgagcttcacaacgcttcgagctcgtacgtgagcgattatcccgtcttctacacgtaatctgagatctaaaccgagattttcttcatcttcatctctcagagcttctctttcgaatggctttctttcgccgtataccggaggaagcatctctagtgacttatgcggcgctaagcttcgtgcggaatcgcttaatccgttaaatttttccagttccaagcctaaacgcggagttgtcactatggttatacctttctcaaagggaagtgcacacgaacaacctcctcctgatttggcatcatatttgttcaagaaccgaattgtatatttgggaatgtctctcgtaccttcagttactgagttgatacttgcggagtttctttaccttcagtatga

SEQ ID NO: 156637 - DNA, 425 bp, Arabidopsis thaliana columbia
cgtttttcctctgcaacttctcgttgcctcacactatatgaatcatctgtaatttgtagcttctttaacaaccaaaaagtttcaagattcctatatcctaagcaaaaaatgaagttaccatcgattctttcacttgttgtttcttccatctttctctgcatgagcttttgctcctctctcaattccgacggtttatctctcctagctctcaaatccgccgtcgataacgacccgacccgagtaatgacccactggtctgaatccgacccgactccttgccattggtccggaatcgtctgcacaaacggccgagtcacaactcttgtactcttcggaaaaagtctctccggttacattccatcagaactcggtttactcaactcgctaaaccggcttgatctagctcacaacaatttctctaaaac

SEQ ID NO: 156638 - DNA, 384 bp, Arabidopsis thaliana columbia
aaatagttgcaacttcaccttttcggatatctcgtcgtggtggtggtggatattgcagcagggcttgtatcccttatcgggggaaatttacttgttatgcaacactatctgctgtggtaaaggagcaagcatcagactttagtggaaaagaagcagctttgcttgtagatgagctcagaagcaacttcaactctggcagaacgaagagctacgagtggagaatttctcagcttcaaaacattgctaggatgattgatgagaaggagaaatgcatcaccgaagctttgtatcaagatctttctaagcctgagcttgaagcttttctagctgagatttcgaatacaaaatcatcctgtatgcttgcaatcaaagagttaaagaact

SEQ ID NO: 156639 - DNA, 406 bp, Arabidopsis thaliana columbia
ctcttgttctctccgcccatctctgctctcttttattttcccagaaagttgttttttttgttttccgaattgcgttaatctcattggggtttccattgatagcaatggcgacggctttcgctcccactaagctcactgccacggttcctctgcatggatcccatgagaatcgtctcttgctcccgatccgattggctcctccttcttctttcctcggatccacccgttccctctcccttcgcagactcaatcactccaacgccacccgtcgatctcccgtcgtctctgtccaggaagttgtcaaggagaagcaatccaccaataataccagcctgttgataaccaaagaggaaggattggagttgtatgaagatatgatactaggtagatctttcgaagacatgtg

SEQ ID NO: 156640 - DNA, 395 bp, Arabidopsis thaliana columbia
acccacgcttccgatctactctctttaaaagattttcgcaattattatcaacaagcagaagatgagccttaaaggggaatctcaaagaattaaaggagccaacctatttctccattaatcgtcacatgacaccgtgaccaatatttagctcgcagcaggcatagactgaattcaatatgttcagtttgattatgtcatgaacgaacatccctaacaagctccttttctttgtaccaaaagccatgttctcccatctgatccgtttatgattaaccattcagacgaacatctattttctgtagaatgttgatttagcccttatagtatcattcaatgaattaagttcatcttcaacaatataacttttttttttatttaatcctttaattgtactt

SEQ ID NO: 156641 - DNA, 360 bp, Arabidopsis thaliana columbia
gcggactacgaccagtcaaactcatgggcagccgcttacaaaacggttgcagccggggctgctcttgctgctggacttggagttttggtgtaccttaagcgcaactcaaactaacagattcattttggggagatacaaaagtgaatgcttttgcaaaccaatttttaaacctaagcttgtgaagtgtatacctcttcattgattcgtgtttttttttttttttttatctgggggcttatttgtttctcaaccttacacatgaattgtatataaataagtaaacattttatttgtaaaaaaaaaaaaaaaaaaaaaaaaaaaaaaaaaaaataaataaaaaaaaaaaaaaaattataaaaa

SEQ ID NO: 156642 - DNA, 416 bp, Arabidopsis thaliana columbia
atttgattgaagtacagatccatcggagaagaagacagagagattgaagatcaatgacttcgagatattgggtggtgtctcttccagtgaaagactctgcttcttcgttatggaatcgattacaagagcagatctctaagcattcctttgatactccagtttatcggtttaacattcctaatcttcgtgttggaaccttagattctctactcgctctcggcgatgatctgcttaagtcgaacagctttgtggaaggagtttcgcaaaagatcaggagacagatcgaagaattggagaggatttctggtgttgagagcaacgctcttacagttgatggagttcctgttgattcttatctcaccaggtttgtgtgggatgaagctaagtacccaacaatgtcacctctgaaggaggtt

SEQ ID NO: 156643 - DNA, 374 bp, Arabidopsis thaliana columbia
cttaattctcggtcactcgctttccttctctactctctggttctttcttccatggagctcttctcactctcttctcttctcctactctccactctcttcgttttctacatcttcaagtttgttttcaaaagaagaaaccagagaaactgctacatgcttcactacgagtgctacaagggcatggaagagagaaaactcgacaccgagacttgtgctaaggtcgttcaacgaaacaagaacttgggtcttgaagagtacaggtttctccttcgtactatggctagttccgggataggagaggaaacgtacggcccaagaaatgtgcttgaaggtagagaagactctcctactctccttgacgctcactccgaaat

SEQ ID NO: 156644 - DNA, 408 bp, Arabidopsis thaliana columbia
attacattttcttccgatcaatacagagagatcagtttctgagagagaagaagatgtctgtagaggaagaaaacgttccaacgactgttgactcaagagctgccgatacaacggtgaaatctccggagaagaaaccggcggcgaaaggtggtaaatctaagaagacgacgacggctaaagcaacgaagaagcctgtgaaagctgctgctccaacgaagaagaaaacaacttcctctcaccctacctatgaagagatgattaaagatgcgattgtaacgttgaaggagagaactggatctagtcaatacgcgattcagaaattcatagaggagaaacataaatcactgcctcctacttttaggaagcttttgcttgtgaatctcaagagactagttgcttctgagaaat

SEQ ID NO: 156645 - DNA, 409 bp, Arabidopsis thaliana columbia
  unsure (1)..(409): unsure at all n locations
aagtaactgaaagttggggcgtgttttatccaattccgngaagaaatcttctcgtgaagtcatggagaagtactactgtcgcatgactcttgactttcacactaacaagaagatccttgaagaggttgccatcatcccatcaaagagactccgcaacaagattgctggattctccacccacttgatgaaacgtatccagaagggaccagtccgtggaatctcactcaagcttcaagaagaagagcgtgaacgccgtatggattttgttcccgatgagtctgctatcaagactgatgagatcaaagtcgacaaaaagactcttgagatgcttgcttctctaggaatgtctgacactctcggcatctctgcagtcgacccacaacaagctatggcaccaatccctgctttc

SEQ ID NO: 156646 - DNA, 415 bp, Arabidopsis thaliana columbia
ctagtagtggtcacagccaacgttctccttcaccgggatactacccgagttcccgagtaccgacttcaccttttgatcgtgaattccgtactttatggggctctcaacaccaacgtagagagcaagacgttgtcactctttggctcgacaaatccactgggagtgggttcaagtctcttcgtccataccggtcgggctactttggtgcttccattaagctccaaccaggcttcactgctggagtggatacatccctctatctctcaaacaaccaagagcatcctggagaccacgatgaggtcgatatcgagtttctagggacaacgccagggaagccttattcccttcaaacgaatgtcttcgttaggggaagtggcgaccgaaatgtcattggaagagaaatgaaatttacctt

SEQ ID NO: 156647 - DNA, 271 bp, Arabidopsis thaliana columbia
ctgttgggtcagtgaatatggtgcatcattcaggggtagctcaacgggtttagtcccgatgagaggttgtatgtttgctgttgggcaagcgtttgagaaaagtgaagagcatagtggtaataccataggtggaaagaatgtagtaggagggaaggtcgtttcaagtagccaaaagtatctctggagagataccatcaagtggtctagcgaatagctttaggttctcccaaaggagactgcttgtttcagctcatattcctacttgataagc

SEQ ID NO: 156648 - DNA, 410 bp, Arabidopsis thaliana columbia
ctcgtaaccaaaagccgtctcagaagaaaactcaactgcgaagaatatggcgaccgatgatgtgaacgagcctctcccggcggcggcggaattaccggcgacagaggcggagaaacaaccacacaagctcgaaagaaagtggagtttctggttcgataaccaatcaaagaaaggcgccgcctggggagcttctcttcgtaaagcctatactttcgacaccgtcgaagatttttggggattgcacgagactatatttcagactagcaaattgacagcgaatgctgaaattcacttgttcaaagctggtgttgagccaaagtgggaagatccagagtgtgctaatggaggaaagtggacttgggttgttactgctaataagaaggaagctttagacaaaggctggcttgaaa

SEQ ID NO: 156649 - DNA, 409 bp, Arabidopsis thaliana columbia
acccacgcgtccgaaaaaatgtcgaagaagaactttttagcctttagaaagaagcagcacgagtagaatctggggaaagagaaagagtgacaggagatgaagatcaagaagcttcatgccaacaagaataagatgaaagttgatggaagtgggaagaagaagaaaggtggattttctgttggcaagaagaaattaaagacaaaactgactccaactgctaaagctaaagctgctcaagcaatggagctagacaattgacaaggaacttcgttttttttcacttgtatgtaaaattgttcttcattgatcttcgtctttactttggagaaatcatgttgaagctagcttcttcttataggttaaactcttatgtatcactctctcttttgaatgcaagattttgctatct

SEQ ID NO: 156650 - DNA, 417 bp, Arabidopsis thaliana columbia
gaaaacgaccaagaggatcttgaattgcttctgtctctagacgatagggttctcgaaactcctcctggttctccttctgctgcacccggatatctcacggatgatgaatcccccaagcgtaggggtcactctgacttgtctgacttcagaagtgttgttcaagattgcattgactataatcctaaaccaatcgccaaaaacactaaacccaaaggctccaacaactccaataccaatgacattgagaagttttctggcttgcgcattaggaatcaattacttagccctgcagagataagtgatctgttttcagatatccgtttcgttcgattgccaacaataaagaacttgctaatgggtgacaaactctctggctgctgggcgacaatgggagtgataacagagaaaggacaaccc

SEQ ID NO: 156651 - DNA, 418 bp, Arabidopsis thaliana columbia
cagccatctctaatcacattttacaatcgcctcttcaaatttcccgataaagaaaaaatgagttccggcgccggcagtggaacaactaaaggtggcagaggaaagccaaaagctacaaagtccgtctctcgatcttctaaagctggtcttcaatttcccgttggaagaatcgctagattccttaaagccggtaaatacgccgaacgtgttggtgccggtgctcccgtttatctctccgccgttctcgaatacctcgccgctgaggtattggagctagctggaaatgcagcaagagataacaagaagacacgtatcgtaccacggcacattcagcttgcagtgaggaacgatgaagagcttagtaaacttcttggaagtgtaacaattgctaatggaggagttttgcccaacattcatc

SEQ ID NO: 156652 - DNA, 412 bp, Arabidopsis thaliana columbia
agagaacaaaaaatgggagagagcaaacgctccgagaaaacgcgcgttttggtggttggagcgactggatacatagggaagaggatagtaagggcgtgtttggctgaaggtcacgagacttacgttttgcagaggccagagattggtctcgaaatcgagaaagtccaactctttctttctttcaagaaactcggcgcacgtatcgttgaaggttctttctccgaccatcaaagcctcgtatccgccgtgaaacttgttgacgtcgttgtctccgccatgtccggtgttcacttccgtagccataacattctagtccagctcaagctcgtcgaagctatcaaagaggctggtaacgtaaagcggtttttaccatctgaatttggtatggatccaccacgtatgggacatgcgc

SEQ ID NO: 156653 - DNA, 416 bp, Arabidopsis thaliana columbia
gataattttgttctctcaatttcattcttaatccctagttcttcgattttttccgatctacgacaatggcggacgctgaaacctttgcgttccaagctgagatcaaccagttgctttccctcatcatcaataccttttactctaacaaggagatcttcctccgtgaactcatcagtaactcttctgatgctttggacaagattagattcgagtccttgacggacaagagcaagctcgatggtcagcctgagctcttcattcacatcattcccgacaagactaacaacaccttgaccattattgatagtggtattggcatgaccaaggctgatttggtcaacaaccttggaacaattgcaagatctggaaccaaggaattcatggaagcactggctgctggagctgatgttagcatg

SEQ ID NO: 156654 - DNA, 342 bp, Arabidopsis thaliana columbia
actgtggaggagagcttgagagagatgagagagacgtttgcgagtgggaggacgaggagtctgaagtggaggaaggcacagatcggagctatatacgagatggttaaagacaacgaagacaagatctgcaatgctctgtttcaagatttgggcaaacacagtactgaagcttttagagatgagcttggtgttgtcttgcgaacagctactgttgcaatcaactgtcttgataaatgggccgtccccaaacatagcaaacttcctctgttgttctacccagcaaaagggaaagtcatatcggaaccctatgggacggttcttgttctgtctagctggaatttt

SEQ ID NO: 156655 - DNA, 424 bp, Arabidopsis thaliana columbia
gagaaattcgctaggtactttgaggttgatcttaaggaagtgaaattgagtgaaggatagtatgtgatggaccctcaacaagctgttgatatggttgatgagaacaccatttgtgttgcggccattcttggttccactcttaatggagaattcgaagatgttaaactcttgaacgatctcttggtcgaaaagaccaaagaaaccggttgggttccaccattcacattggttccggcaggggaggatttattgcaccgtttttgtattcggaattggaatgggactttagacttcccttggtgaaaagtatcaatgtgagtggtcacaagtatggacttgtgtacgcagggattggttgggtgatctggagaaacaaagaggatttgcctgaggaactcatcttccatatcaattatcttggtgc

SEQ ID NO: 156656 - DNA, 375 bp, Arabidopsis thaliana columbia
gcttcactgataaagattatctttcaatcggctaaaaatgatacattgcgtgggactagtgagtcgacaagggaaagtaaggctcaccaagtggtattcgccgtatacacacaaggaaagatctaaggtcatacgtgaactcaatggagtgattctgaaccgaggtcccaagctctgcaattttattgaatggagaggatacaaggttgtctacaaatgatatgcaagcgctgaacttctgcatttagcattgatgagagcggataacgagttagaaggacttggacataataaatcactacgtggagatcatggaccgctacttcagccgtgcgagtaaactcggtttgatttttaacttttacatggcctttt

SEQ ID NO: 156657 - DNA, 326 bp, Arabidopsis thaliana columbia
ggcagattctcacatttgcaaacatgacgactcagatcagcaagaagagaaagtttgtagcggacggtgtgttgtacgctgaattgaatgaggttcttacaagagagctagcagaggatggttactctggtgttgaggttagggttactcctatgaggactgagattatcatcagagctacacgtactcagaatgttctcggtgagaaggggaggagaattagggaattgacttcccttgttcagaagagattcaagtttccagttgacagtgttgagctttatgccgtgttggttaacatcagaggttttttgtgccatttgttt

SEQ ID NO: 156658 - DNA, 429 bp, Arabidopsis thaliana columbia
  unsure (1)..(429): unsure at all n locations
ntncggttcattctagtgtcaatagtgttacctcatcatgtgnccttatgcnttctgagtttatcagctagatgcgtacaagaactacactgtgggagagtccacgggatggttcgatattcaagagagaccctctgctaattatcagaaatgggccgattccaaatccttttctttgggtgatttcctcatattcaacacagatagcaaccattcggtggttcagacatatgatttcaaaacatacaaagattgtgattacgacaacaatgaaaacaatgatacaacagagtggtcggctgcaaatccttcagcaacatctcctgttcccgtctcaataagtgttcctcttgttaaagaaagttccaattatttcttctcgggaaactatgatggcgaacaatgtaaattcggtcagcattttatgat

SEQ ID NO: 156659 - DNA, 419 bp, Arabidopsis thaliana columbia
ggtctctgcttcagcagaagagctttggtgttgaaatctaagagacctttgtcctgcagggccatttacaatgctcaggttgaggttcaagaagaaggtccggccgaatccctagattatcgagttttcttcctcgatggttctggaaagaaggtttctccatggcatgatataccattgaccttaggcgatggagttttcaactttatagttgaaatacctaaagagtcaaaagcaaaaatggaggttgctactgatgaagatttcactcctattaagcaggatactaagaaggggaagctcagatattatccgtataacattaactggaactatgggttgcttcctcaaacatgggaagatccatctcatgcaaattctgaagttgaaggatgttttggggataatgatccagttga

SEQ ID NO: 156660 - DNA, 417 bp, Arabidopsis thaliana columbia
cggacgcgtgggcggacgcgtgggattttggtgtgaggaacttatcatgaatccactggtttctgctgcttcggttattgctgctgggttggctgttgggcttgcttctattggacctggagtcggtcaaggtacagctgcgggtcaagctgtcgaaggtatcgcgagacaacctgaggcagaaggaaaaatacgaggtactttattgcttagtttggcttttatggaagctttaacaatttatggcctggttgtagcattagcgcttttatttgcgaatccttttgtttaagcccagaaatcacaaaattctggattttttttgtagtttttttaattctatcaagatttaactcctacaattattcattgagacaacaatccttgggaaggactaatttgaggatggggaattag

SEQ ID NO: 156661 - DNA, 422 bp, Arabidopsis thaliana columbia
gagagagcgaagagaagccatcatcagccatggcgatgaagaatctactgggcctagctcgccgatctcagaggcgtttattcctcactcaagccacacgatcttcctcttcgttttcagctatcgattcggtgccggcttccgcatctccgacggctctatctccaccgccgccgcatcttatgccatacgaccacgcggctgagattataaaaaataagatcaagaagctcgagaatcctgataagaggttccttaaatacgcatctccacatccgatcctcgcttcccacaatcacatcttgtcagctccggagactcgtgtcactaccttgcccaatggtctacgagtcgctactgagtcaaatctctcggctaagaccgccaccgttggagtctggatcgacgctggatctcggttt

SEQ ID NO: 156662 - DNA, 415 bp, Arabidopsis thaliana columbia
atccttctctgagaaaaaacaacagatccgaattttatctttaatcagccggaaaaaatggagaaagcgatcgagagacaacgcgttcttcttgagcatctccgaccttcttcttcttcttcgcacaattacgaggcttctctatctgcttctgcttgcttggctggggacagtgctgcatatcagaggacctctctctatggagatgatgttgtcattgtcgcggcacataggactccactatgcaagtccaaacgtggcaatttcaaggatacatatcccgatgatttgctcgcacctgttttgagggcattgatagagaagacgaatctaaacccaagtgaagtaggtgacattgttgtgggtactgttttggcacctggatctcagagagccagtgaatgcaagatggctg

SEQ ID NO: 156663 - DNA, 426 bp, Arabidopsis thaliana columbia
gctgattacaatatccagaaagaatccaccctccacttggtcctcaagctccgtggtggtgtgcagatgttcgttaaaacggtaacgggaaagactattactcttgaggtggagagttctgacaccatcgacaacgtcaaggccaagatccaagacaaagagggtattcctccggaccagcagaggctgatcttcgccggaaagcagttggaggatggcagaactcttgctgactacaatatccagaaggagtccacccttcatcttgttctcaggctccgtggtggtatgcagattttcgttaagacgttgactgggaaaactatcactttggaggtggagagttctgacaccattgataacgtgaaagccaagatccaagacaaagagggtattcctccggaccagcagagattgatcttcgcc

SEQ ID NO: 156664 - DNA, 432 bp, Arabidopsis thaliana columbia
  unsure (1)..(432): unsure at all n locations
gcgccaatttataaaagttaaagccatggctgcttctttctctgtcccctctatgataatgggagaagaagggagattctaagcggaggttgcggaagtgcanacttggtggagctcagagaggttcaagctaacaaggcgcccttacactgcccgtgacgtggtggctctacgtggccatctcaagcaaggctatgcttcgaacgagatggctaagaagctgtggagaacgctcaaaagccatcaagccaacggtacggcctctcgcaccttcggagcgttggaccctgttcaggtgaccatgatggctaaacatttggacaccatctatgtctctggttggcagtgctcgtccactcacacatccactaatgagcctggtcctgatcttgctgattatccgtacgacaccgttcctaacaaggttgaaca

SEQ ID NO: 156665 - DNA, 306 bp, Arabidopsis thaliana columbia
gcgtccgattccccagaaccaagcgggtacatgaaattcgtcaagagcttggttgctgacatgggaggccacgttagcaaaacttaatgatcattcccacagtcgtcgtcgtcatcatcatcatcatcatcatcactatctcgatttataagttatgatgttttcagtataataaatggggtcttgtggatcgttaatttctatgtgtaaaccgtttggttctgtatgatgcttcgatatattgttatgttcatgatcatatgtcgggttcgatataatgattcttaagattaatttacttcacat

SEQ ID NO: 156666 - DNA, 402 bp, Arabidopsis thaliana columbia
aaaaagccattctttttgccccttgagtgctttcagctcttcccacaaggttacagaagtagtgtcacgtgtggacgtcggaaatttggacccgcgagttactgagcgtgaacttgaggatgagttccgtgcctttggagttgtcaggagtgtttgggttgcccgtagaccacctggttacgcttttctagatttcgaagatcctagggatgcccgtgatgctatccgtgctttagatggcaagaatggctggagggttgaacagtctcacaatcgaggtgagcgtggtggcggcggtcgtggtggtgaccgtggaggtggtggctgctgccgtggtggttgaggtgtctcttatttgatatgctatgaatgggttgtgactggtcattttttcacggtaat

SEQ ID NO: 156667 - DNA, 423 bp, Arabidopsis thaliana columbia
gcggcaatgtgcttcctgatggacccaaacctcgggaagcaagtttgttatgttcagttcccacaaagatttgatggtatcgataagaacgatagatatgctaatcgtaataccgtgttctttgatattaacttgagaggtttagatgggattcaaggacctgtatatgtcggaactggatgtgttttcaacagaacagcattatacggttatgaacctccaataaaagtaaaacacaagaagccaagtcttttatctaagctctgtggtggatcaagaaagaagaattccaaagctaagaaagagtcggacaaaaagaaatcaggcaggcatactgactcaactgttcctgtattcaacctcgatgacatagaagagggagttgaaggtgctggttttgatgatgaaaaggcgctcttaatg

SEQ ID NO: 156668 - DNA, 423 bp, Arabidopsis thaliana columbia
caaagatggaagtcaaaggcaattaggtgttttccgggtgattccaactccagacatgtgggcaaccagaaatactattaaggttaacgacgcgaatgttgatggagctgaagatgttcctgaagaagaagctgtgtgtagaatctgccttgtagaattgggagaagattcagaagccttcaagatggaatgtttgtgtagaggggaactagctcttgcccacaaagaatgtacaatcaaatggttcaccattaaaggaaacagaacatgtgatgtgtgcaagcaagaggttcagaatctccctgtgacccttcttcgcatgcagaattctcggggtagtattggagctccagacgccgaggctgcacactacagtttatggcaggatgttccaattcttgtgattgtaagcatgcttgcata

SEQ ID NO: 156669 - DNA, 421 bp, Arabidopsis thaliana columbia
cccacgcgtccgctctatctctcttctctgtctctcactctccactttccgagcaccgacgattcaacaaaacatagtaaaaaacaaagcaaattctttttttctccttagttacttcttctacagattatctcaatcttacagagcaccatggatcgttgtatctatggttgctccgtcattactatcttcttctccttcttcttcctcctcaatgcatccgctttagaatcgggtcaccacaacataactgggtcgggtcaaataaactcaaactccgtcctcgtagctctcctcgattctcgttacactgaactcgccgagctagttgagaaggctcttcttctccaaaccctcgaagacgccgttggtcgtcacaatattactattttcgccccacgcaatgaagcactcgagcgtg

SEQ ID NO: 156670 - DNA, 418 bp, Arabidopsis thaliana columbia
gagattcaaaagagttctttctctctatcttattctccgttcatcatgatgcagcagccagcacccggaggtatccttccacgatcacgcgcctcctccttctgcgcaacaacagtacggttaccaacaaccttacgggattgctggagctgctccaccaccaccacagatgtggaatcctcaagcggcggcgccgccatcagttcagcctacgaccgctgacgagatccggactctttggatcggggacttacagtattggatggatgagaatttcctctacggttgctttgctcataccggagagatggtttctgctaaagtgattcgtaacaagcaaaccggtcaagttgaaagatacggtttcattgaattcgcatctcatgctgctggtgaaagagttctacaaacattcaac

SEQ ID NO: 156671 - DNA, 401 bp, Arabidopsis thaliana columbia
  unsure (1)..(401): unsure at all n locations
gggtctttaaaggtaaaagagctgggttcaatttacgaaaaggggttttggataggggaagagaggaaggnatagtggttccatgggcaccgcaagtggaactgctgaaacacgaagcaacgggtgtgtttgtgacgcattgtggatggaactcggtgttggagagtgtatcgggtggtgtaccgatgatttgcaggccattttttggggatcagagattgaacggaagagcggtggaggttgtgtgggagattggaatgacgattatcaatggagtcttcacgaaagatgggtttgagaagtgtttggataaagctttagttcaagatgatggtaagaagatgaaatgtaatgctaagaaacttaaagaactagcttacgaagcttgttttttttaagga

SEQ ID NO: 156672 - DNA, 419 bp, Arabidopsis thaliana columbia
  unsure (1)..(419): unsure at all n locations
tcaaacttacaatcaaatatggtttttcaaaagtttactctcatnggccttcaagaagcttctggccatcttcgaagatccaagaaatncatattnacctctttgccccccttcttacaaactattcctcacaagttttccttaaagttttttatttatcactgctacttcttcataccaggtcttaagtgctattaatgaaacttgttctttaccaaccttattggacatctactatagaacatatccatagaggttcattaactataacatcgatttttccgtttttttcttccatcattataagtaatattttcaactaatgaataatctaatcacatactcctttataatttctatcactatttcttaaatattttctcattttaaataatattaatgtattattaatctttttt

SEQ ID NO: 156673 - DNA, 406 bp, Arabidopsis thaliana columbia
acccacgcgtgcggaaaaaatggcaggaaccggagttgtggcgtgtgtacggctaaagagccatgacggagacgggacagaagagctcccttctccgagaaagggggtctcgctcagatgcttcgtggcggtgtaatcatggatgtcgtcaacgcagagcaagctcgaatcgctgaagaagctggcgcatgcgccgtgatggctcttgaacgtgttcccgccgatattcgagctcaaggcggtgttgctcgaatgagcgatccagagatgatcaaagaaatcaaaaacgccgtgacgattccggtgatggcgaaagctagaattggtcatttctttgaagctcatatcctggaagcaatcggagttgattacgtcttttatatttttattctcatttctttatttt

SEQ ID NO: 156674 - DNA, 373 bp, Arabidopsis thaliana columbia
ctccgagtggccgaaacagagatttcgcagtatgaaccatcactgattgtgtgaccgaacggttgatcttcaaggtccgatcgaatttcagatatgtcgaggattattggtagaaaagggattaactatatccatagactaaattctgcgtcgttcacgagcgtatctgcttcttcaatcgagaaagggcaaaatcgcgtgattgatgcttcgttaactcttattcgtgaaagggcaaaactcataggagagttagtgcgtcttttaggtggagctaaagcttcaacatctcttcttggggtaccacttggtcacaactcttcttttcttcaaggtcctgcttttgctcctcctcgtattcgagaagctattt

SEQ ID NO: 156675 - DNA, 402 bp, Arabidopsis thaliana columbia
tctcgatcgtgtaactgagaactaaggattctagtagtttccaggagattaggtcaacgggctctcgtcggaggagcttcggtctattcatcttcttctctcagatcgctctacggagtctctaatcacctgaatgggactgataattgtcgctattcgtcttccctcgctactaagggcgtgggacacctcgctcgcaagggtactggtgggagatcttccgcaagtggcattgtttctacagtatttggagccacaggatttctgggtcgttatcttgtgcagcagctagctaaaatgggatcacatgtgcttgttcctttccgaggctcagaggactctccttgacatttcaagttgatgggatgattaggacaggtgttaccaatgaaatttgatcca

SEQ ID NO: 156676 - DNA, 424 bp, Arabidopsis thaliana columbia
gcgcttcacgtcttttcctcttaattttttctaggaaaattctcaaatccatctccgcgatacgaacagagagaagaagacttagaaaaatggctgttcaacctacaagaataggtctagctggacttgctgtgatgggtcagaacctagctctcaacattgcagagaaaggcttcccaatctctgtttacaacagaactacttccaaagttgatgagaccgtcgaacgagccaaaaaggaaggcaatcttcctctttacggcttccatgaccccgagtcttttgtcaagtccattcagaagccacgcgttattatcatgcttgttaaggctggttctcccgttgaccagaccatcaagaccctctctgcttatttggagaaaggtgactgtattgtcgatggtggtaatgaatggtatgagaa

SEQ ID NO: 156677 - DNA, 421 bp, Arabidopsis thaliana columbia
atcttcgccatgtatcgcacgtcagcttcactagccagggctcttaagggagttcttacgggtagtttgagacgcagcgcgtgatgctagttctagtgctgttgcggagacgagttcgtcaacgccggcttacttgagctggttgagtggtgggtctcgtgctgcgcttacttcattggatatgcctctacaaggtgtttctcttcctccgccgcttgctgataaagtcgagccgagcaaacttcagatcactactcttccaaatggtcttaagatagcctcagagacgactccgaatccggcagcttcgattggtttatatgttgattgcggttctatttatgaggcgccttatttccatggagctacacatttgcttgaaagaatggctttcaagagcacgttgaacagaactcatttt

SEQ ID NO: 156678 - DNA, 423 bp, Arabidopsis thaliana columbia
aaccattcaaaatgttgcgttctatcttcctcttatctcttctctttgctggatccaatggctctgttcaagagttctgaggcgcaaacctgaaacgcgctgaaacccctgcgggttacccttgcattcgtcccattcatgtcaaagctacagactttgtcttctctggcttaggcactcctggaaacactacaaacatcatcaacgccgctgtcacacccgctttcgcagctcagttcccgggtctgaacggtctaggcctctctacagctagacttgacttagctcctaaaggtgtgatcccaatgcacactcaccctggtgcctctgaggttctctttgtccttactggctccattaccgctgggtttgtctcctcggcaaacgctgtctacgtgcagacactcaaaccaggacaggtca

SEQ ID NO: 156679 - DNA, 417 bp, Arabidopsis thaliana columbia
cagccatggagatagccgccgttagcactgtctccgtcgcgccacaatcgcgcagagtgtcgaatgcgttctccaggaatctaggatccgtatcttctctttcgtttggtttctttgagaaagaatattgctttaagagccctagccttcgtgtgtctgcagcagcttccatggacgccgtcacagctgagaaattttctccggcgagttttctagacaaaaaagaaaccggagttcttcactttgtgaaataccatggcctcggcaatgacttcattttggtcgataacagagactcatcggaacctaagattactcaagaacaggcggcgaagctgtgtgatcgaaacttcggtgttggtgccgatggagtgatttttgcaatgccaggagtcaatggtactgattacgcaatgc

SEQ ID NO: 156680 - DNA, 383 bp, Arabidopsis thaliana columbia
gtagcttttgcaggggacagtgacatggctctgagacatgtcctagaaggttgccctagactgcaaaagcttgagataagggacagtccctttggagatgttgcattacggtctggtatgcatcgctattacaacatgaggtttgtttggatgtcagcatgtagcttgtctaaaggatgctgcaaggatattgcacgagcaatgccgaatctagttgtggaagtaattggatcggatgatgatgatgacaatagggattatgtcgagactttatacatgtatcggtctcttgatggtccaaggaatgatgcaccaaagttcgtcacgattttatagaacgaggagcatttccgtgtttccgttttttaagacgggaatgaaat

SEQ ID NO: 156681 - DNA, 430 bp, Arabidopsis thaliana columbia
  unsure (1)..(430): unsure at all n locations
gcgcactcttctagcatcttgaagcttaaatctcagncagccgatcatgccgatcagaaacatggncattggccgtccagatggagccacccgtcccgatgccttaaaggcggcgttggctgagttcatttcaactttgatctttgtcgtcgccggttcaggctctggcatggctttcaacaagctcactgaaaacggagccaccactccttctggtctcgtagctgctgcagtggctcatgcctttggactcttcgtcgctgtctcagttggtgccaacatctctggtggacacgttaaccctgccgtcactttcggtgctttcattggtggtaacatcactctcctccgtggtatcctctactggattgctcagcttctcggctccgtcgtcgcttgcctcatccttaaattcgccaccggtggcttg

SEQ ID NO: 156682 - DNA, 443 bp, Arabidopsis thaliana columbia
acccacgcgtgcgagactatcgtcatcgatccttaatccaaattttcgcgctcgattcgtcttttctgtatctgccggagcgccgggacttgggcggaagaggagatgaggagcttgttgttgtggattgcggtggtcgtgtgcttgctatgttcagtcgcggcggtggttcaaagcggatctagcgacggatttgggaaacccagagatactgagactgcgatatcttttctggagtataaattgatggcgccttcggttccaatgatacctctcaccttgattcacggagctgactctaaaggagctgtgtgcttagatgggacgctacctggttatcatctagatcgtggttttggatcaggtgctaacagttggcttatccagcttgagggtggaggatggtgtaacaaccataggagctgtgtgtatcgcaaaacaag

SEQ ID NO: 156683 - DNA, 386 bp, Arabidopsis thaliana columbia
aagaacaatggcttcctctatgctctcttccgctactatggttgcctctccggctcaagcgactatggtcgctcctttcaacggacttaagtcctccgctgccttcccagccacccgcaaggctaacaacgacattacttccatcacaagcaacggcggaagagttaactgcatgcaggtgtggcctccgattggaaagaagaagtttgagactctctcttaccttcctgaccttaccgattccgaattggctaaggaagttgactaccttatccgcaacaagtggattccttgtgttgaattcgagttggagcacggatttgtgtaccgtgagcacggtaactcacccggatactatgatggacggtactggacaatgtgggagc

SEQ ID NO: 156684 - DNA, 395 bp, Arabidopsis thaliana columbia
cttggattcactgttctgtggttacctccaccgacagaatctgtgtcacctgaagggtacgatgcctaaagacctgtataacttgaattccagatatggaacaattgatgagctaaaagatacagtgaagaaatttcacaaggtcgggatcaaagttttaggcgatgctgttctgaatcaccgctgtgcacacttcaaaaatcaaaatggtgtatggaatctatttggaggacgtctaaactgggacgatagggcagtagttgcagatgaccctcatttccagggtagaggaaacaagagcagtggagataatttccatgctgctccaaacatagatcactcgcaagactttgttaggaaggatatcaaggaatggctatgctggatgattgaag

SEQ ID NO: 156685 - DNA, 418 bp, Arabidopsis thaliana columbia
catctttgtgcttcctgcaaatagctctttgctgttgatctttctcctccatcaacaaacatgggtaagacacgtggtatgggagctgggcgtaagctgaagagactccgaattaaccagaggtgggctgacaagcagtacaagaagtctcacttgggaaatgagggggaaaaagcctttgctgggtcttctcaccctaaaagaattggtcttgagaaaattggtattgaggctaagcagcctaactctgctatccgtaagtgtgctagagttcaacttatcaagaatggaaagaagattgctgcctttgtccccaatgatggttgtttgaactacatcgaggaaaacgatgaggtcttgattgctggatttggtcgtaagggtcacgctgtgggagatattcccggagttaggttca

SEQ ID NO: 156686 - DNA, 417 bp, Arabidopsis thaliana columbia
aagaagtaatggcttcctctatgctctcctctgccgctgaggttacctccgcggctcaagccaccatggtcgctccattcactggtttgaagtcatccgcttctttcccggtcacccgcaaggccaacaacgacattacttccatcacaagcaatgggggaagagttagctgcatgaaggtgtggccaccaatcggaaagaagaagtttgagactctatcttacctccctgaccttactgacgtcgaattggctaaggaagttgactaccttctccgcaacaaatggattccttgtgttgaattcgagttggagcacggatttgtgtaccgtgagcacggtaacactcccggatactacgatggacggtactggacaatgtggaagctttcattgttcggatgcaccgactccgctc

SEQ ID NO: 156687 - DNA, 347 bp, Arabidopsis thaliana columbia
gctttcttctggtcaacccccacgagattccttcttatgtgattgtaaagagaagattggtcagagatggggctcttcgaatcggtgaaatcaatcgattgggaacaagaatcgttcccaacttatcaagatttagggtttttgcctctctttgcagtgttcttccctacaattcgatttctacttgacagattcgtcttcgagaaattggcaagtcttgtgatctatggaaggatgagttcgaataagagtgacatcattaaagtcaggatgataaattgtccattgtctcaataattatagaatcagcttgtaagtgtatttactatctatcagcttatctactt

SEQ ID NO: 156688 - DNA, 418 bp, Arabidopsis thaliana columbia
gttgtaatgacggtgccatctcatgttgctagtggtctcttgcgccctctttctgaatcagctgcaaatgcactctcaaaggtatattacccaccagttgcagcagtatctatctcgtacccgaaagaagcaatccgaacagaatgtttgatagatggtgaactaaagggttttgggcaattgcatccacgcacgcaaggagttgaaacattaggaactatctacagctcctcactctttccaaatcgcgcaccgcccggaagaattttgctgttgaactacattggcgggtctacaaacaccggaattctgtccaagtctgaaggtgagttagtggaagcagttgacagagatttgaggaaaatgctaattaagcctaattcgaccgatccacttaaattatgagttagggtatggc

SEQ ID NO: 156689 - DNA, 424 bp, Arabidopsis thaliana columbia
aaaagctagcattttctattctctctcaactccgaaagtacaaaaccccaaattaacaaaacatgttgcgtttcgtggtactctctctaactctcatggttttcatcaactcatcaaactttccaaagacagcagccaccccaccaggcacgtaccaaaaccacacaacgtacgtaaaaacggcatgcaactcaacaacataccctacaatgtgctacaactgtctgtcctcctattcctccaccatcaagtccgacccaatcaaactatgcacaacatcgctaaatctcaacgtcaaatccgctaaaaacgccacattagtcgtctctaaccttctccaaaaggccaaagccgcgaaaagccatgaggtctcgatccttaaagactgcgtggacgagatgaaggacactatcgacgagcttaa

SEQ ID NO: 156690 - DNA, 434 bp, Arabidopsis thaliana columbia
gcgcgattgtgagatcaattattaatattcatctggagaattatcgtctcttttctccattgctatggctctctcaactactcgttctcagatgtccgttgcacttccaactagaattgatgggtcgagccgatctatgattaaggttcaaagtataagcttcactgataagtcatggggtcctcctctgctgagactagattcgaaatctagaagcttaggtgtgaaaaaaaggtccacaatatgcatgtcacttcagcaatcaagcaaatccaaagtcttggttactcctctagaacttgaagatcccaaagagactcccttaaacttgtttaggcctaaggagccttatactgcaactattgtttcggttgagagaattgttggtccacaagcacctggagagacttgccacattgttatagatcatgatg

SEQ ID NO: 156691 - DNA, 458 bp, Arabidopsis thaliana columbia
  unsure (1)..(458): unsure at all n locations
ccggngcggagacccaggcgtgcgcgttctttgaggatgccaagcttaccaagacatttactttccttgaagaaggaacaacaaaaatcactgcaactcctatcaaatggaaggagggcaagggcttgccaaatggagtgaaccatgatgataagaaaggaaataaacgtgcattgccagaggagagtttctttacttggtttactgatgctcaacataaggaagatgctggggatgagattcatgatgaggttgctgatattatcaaggaagatctctggtccaaccctctcacctacttcaacaatgatgctgatgaagaggattttgatggagatgatgatggtgacgaagagggagaagaagacgatgacgatgaagaggaggaagatggtgaggaatgatgggagcccaaagataacacattgctggcttgcttctataacagatgtgtaaag

SEQ ID NO: 156692 - DNA, 392 bp, Arabidopsis thaliana columbia
ctcgatcgaaccaaagctaaactaaaaacttaaaacccaaatcttatcactactctaaaagaatcttcatcatggcctcagtaacctcagccaccgttgcaatcccatctttcaccggccttaaagcctcaaccatcaaatcatccgccaccgtcagaatccaaactgctgctgttgcatcaccgaagcttacagtgaagtcatctctaaagaacttcggagtcgcggccgtagcggctgcagcttcaattgctttggccggaaacgccatggcaatagaagttctcttgggaggaggggatgggtcgatagcttttatttccaacgacttctctatagctaaaggagagaagatttgtgttcaagaacaacgctggatacccacacaatgt

SEQ ID NO: 156693 - DNA, 412 bp, Arabidopsis thaliana columbia
agactcctttcagattcttacttgcagctatgggtaaagagaagtttcacattaacattgtggtcattggtcatgttgattctggaaaatcgaccacaactggtcacttgatctataagcttggtggtattgacaagcgtgtcatcgagaggttcgagaaggaggctgctgagatgaacaagaggtccttcaagtacgcatgggtgttggacaaacttaaggccgagcgtgagcgtggtattaccatcgatattgctctatggaagttcgagaccaccaagtactactgcacagtcattgatgccccaagacatcgtgatttcatcaagaacatgattactggtacctcccaggctgattgtgctgttcttatcattgactccaccactggaggttttgaggctggtatctc

SEQ ID NO: 156694 - DNA, 403 bp, Arabidopsis thaliana columbia
cggacgcgtgggcaaagactcgagttgatatgtctagtactaaagatatgtcaactgtccaaaacgcaactccttttaacggcgttgccccatccaccaccgtgcgagttacaatcgtccaatcctccaccgtctataacgatactcctgccactatagacaaagcggagaagtatattgtggaggcggcaagcaagggagcagagctagtgttgttcccggaggggtttatcggtggctatcctcgaggttttaggttcggtttagcggttggcgttcataacgaagaagggcgtgatgagtttcggaagtaccatgcttctgctattcatgttcctggccctgaagtagcaagattggctgacgtggctaggaaaaaccatgtgtacttggtaatgggagc

SEQ ID NO: 156695 - DNA, 318 bp, Arabidopsis thaliana columbia
  unsure (1)..(318): unsure at all n locations
cggctaaaaagcaaattctctggaagatgtttaagacgaagatgcaaccgacaganacgggggagtcttctccgtcggaggcggggcctccatcttaatgatcagttatcggagagtatgagcttcagtagccaaatgaagaaggaagacgatgagttgtcgatgaaagctttgtcggcgttcaaggccaaagaagaggagatcgagaagaataagatggagatcagagaaagagttcaagctcagcttggtcgtgttgaagatgagtccaagcgtctcgctatgattctcgaggaacttgaaggttttgctgatccc

SEQ ID NO: 156696 - DNA, 452 bp, Arabidopsis thaliana columbia
gagttgagagacgagcgaccatcaagttagttagtgacaatcacaagcttctctgtgagggaggacattatgagaaccctgtgaatcatctatttttgaggctgccggttacaaatggagattagttttgtacgtgaagggtaatccgaaaggcggtataaataatcatatttcactttacgcgaggatagaagagacagaaactcttccaagagggtgggaagtgaatgttgatctcaaactctttgtccacaatcggaaagtaaagaaatatttgtttgttacagatggaacagttaagcgattcaacgatgcaaaaaaagagtggtgatttacacaattgatattttctttcaacatttttacaactcgtactgaggggtacctttgtgcacgacacaaatttcttttggtagctgatatcttcatctgttaacccgtcagaaaaacaa

SEQ ID NO: 156697 - DNA, 453 bp, Arabidopsis thaliana columbia
cgcgtccgagagtatcctgatcggattctgattgcttcagttatggaggaatataacaaaactgcttgggaagagcttatcgaccgtgttgagcaaactggtgttgatgctttagaaatcaacttctcgtgtcctcatggtatgccagagcgcagaatgggtgccgctgttggacaagattgtgcgcttctcgacgaggtttgcggatggattaatgctaaagctacagttcctgtatgggctaagatgactcctaatattactgacataactgagcctgctagggtgtcactaaaatcctgatgtgaaggaattgcagcgatcaatacaattatgagtgtaatgggaattgatatgaagacgttgcgtcctgagccatgcgttgaaaggttctccacttccaggggatactcttataaagtcgttcgcccaattgcactggcaaaagttttt

SEQ ID NO: 156698 - DNA, 416 bp, Arabidopsis thaliana columbia
gtttgcgtgagatttgtctgaaaagtagctaaccatgggtaaagagaagtttcacatcaacattgtggtcattggccacgtcgattctggaaagtcgacaaccactggacacttgatctacaagttgggtggtattgacaagcgtgtgatcgaggttcgagaaggaggctgctgagatgaacaagaggtccttcaagtacgcatgggtgttggacaaacttaaggctgagcgtgagcgtggtatcaccattgacattgctctctggaagttcgagaccaccaagtactactgcactgtcattgatgctcctggtcatcgtgatttcatcaagaacatgatcactggtacctcccaagctgattgtgctgtccttatcattgactccaccactggtggttttgaggctggtatcttc

SEQ ID NO: 156699 - DNA, 273 bp, Arabidopsis thaliana columbia
cgaagaatcaactatggcgacgaagagaagcgttgtaactttgaaggaagcggatctgaagggaaagagtgtgttcgtgagggttgatctcaacgttcctttggatgataactctaacatcaccgatgacaccaggattcgtgccgctgttcccaccatcaagtacttgatgggtaatggatctagggttgttctctgcagtcacttgggccgaccaaaaggtgtttctcctaagtacagcttaaagctctttgtgcccagattgtctgaact

SEQ ID NO: 156700 - DNA, 353 bp, Arabidopsis thaliana columbia
  unsure (1)..(353): unsure at all n locations
gagaaaacntnntctctcttctctgctttgttttctcatttcctgtgaaataaaagcggaggctctcttcagttattttgctggtccatcgattcttagagttcaaaatggttgatcaagttcagcaccccactattgcgcagaaagctgccgggcagttcatgcgttcaagtgtttccaaggacgttcaagtgggttaccagaggccttctatgtatcaaagacatgcaacctacggaaactacttcaatgctgcattttaattacctccgacattccggatgttgtcaacaactgctttttcccgtgtttgtccaaaccccatgagagaaggggttcacttaactttgccc

SEQ ID NO: 156701 - DNA, 322 bp, Arabidopsis thaliana columbia
cgtccgatctctctctgccaatctcatcttcatctatactttaactctcgttttcgattctacaatggctgacaagaagattaggaggggtatcaacttattctgaagaataggtcgtttggttgctagagttgttctccagagggacgatgttgagctcgtctctgtcaacgaccccttcatcactactgagttcatgacctacatgtttaagtacgacagtgttcacggtcaattgaaacacaatgaactcaagatcaaagatgagaagacccttttcttccttgagaagccactcactgtttttggcatcaggatccct

SEQ ID NO: 156702 - DNA, 429 bp, Arabidopsis thaliana columbia
cgttcgttttatcctctccatcggattctttttatatcttcgatttctcgtcattggatgggtttcaggtcaaattcgggggtgacaccgttggtaagctatctttcagcaaacatgcatggttatgaagatgaccttgatgaggaagctgggtatgatgactattacagcggtgatgaggatgagtatgaagatgaggaagaggaggatgaagaacctcctaaggaagaattggaatttcttgagtcacgccaaatgttgaaggaatcaattcggaagaaaatgggaaatggaagtgctaatgctcaatcttcacaagagagaagaagaaaacttccttataacgactttggttctttctttggtccttcaccgcctgttatttcctcaagggttatacaagaaagcaaatccttgcttgaaaaccag

SEQ ID NO: 156703 - DNA, 406 bp, Arabidopsis thaliana columbia
  unsure (1)..(406): unsure at all n locations
cnatggaccaatcatatcggtctggatcggttcaattctaaacgtggtcgtatctagcgccgagctagcaaaagaagttctgaaagaacacgaccagaaactcgccgaccggcaccggaacagatcgacggaagcatttagccgcaacggtcaggatcttatatgggccgattatgggcctcattacgtgaaggtgagaaaagtttgcacgcttgagctcttcacaccgaaacgactcgagtctctcagacctatccgtgaagatgaagtcaccgccatggttgaatccgtcttcagagactgtaaccttcctgaaaacagagcaaaaggtttacaactgaggaagtacttaagagcggttgcgttcaacaacataacgcggctagcctttgggaaagcgtttatg

SEQ ID NO: 156704 - DNA, 439 bp, Arabidopsis thaliana columbia
aaacgcccttcgtcttcttccctgcaaatctattttctagatctttctttcttccgcgaaacgacaatgagagagtgcatttcgatccacattggtcaggctggtattcaagtcggaaatgcttgctgggagctttactgtcttgaacatggcattcagcctgatggccagatgcctggtgacaagactgttggtggaggtgatgatgctttcaacaccttcttcagtgaaaccggtgcaggtaagcacgttccacgtgctgtctttgttgatcttgagccaactgtgatcgactaggtcaggactggttcttacccgtagctttttcaccctggacaactcattagtggtaaagaagacgctgctaaacaattcgcccgtggtcattacaccattgtgaaagagaattgtgatctctgtttggaccggatcagaaagc

SEQ ID NO: 156705 - DNA, 438 bp, Arabidopsis thaliana columbia
ttcatagctcctaacaaagcaatatcattttcaatttataaaagttaaagccatggctgcatctttctctgtcccctctatgataatggaagaagaagggagattcgaagcggaggttgcggaagtgcagacttggtggagctcagagaggttcaagctaacaaggcgcccttacactgcccgtgacgtggtggctctacgtggccatctcaagcaaggctatgcttcgaacgagatggctaagaagctgtggagaacgctcaaaagccatcaagccaacggtacggcctctcgcaccttcggagcggtggaccctgttcaggtgaccatgatggctaaacatttggacaccatctatgtctctggttggcagtgctcgtccactcacacatccactaatgagcctggtcctgatcttgctgattatccgtacgacac

SEQ ID NO: 156706 - DNA, 400 bp, Arabidopsis thaliana columbia
agatcctacacgtccaatgtccgccgcatggtccgtgttccgctccgccgcaagccgagcatcgtccaccgcatttagagtctccgccggacccaagcctatgccgtcatcggcacggaccgcgtttcggatgcctaaacagagtcctctaacaaatcgcattttcagatctccggtagaactaagctgttgcgtggagacgatgctcccttaccacactgccactgcttccgctttgctcaattcaatgctctcagtttcacgccgtggttggatcgttgatgattgcaatgatgatgtatgatgaattactggggagaggtcagcgatgcatgcagtctaagacaagatggatgactcttgttctcaccattgcagtaagcaggaagattttcttaag

SEQ ID NO: 156707 - DNA, 352 bp, Arabidopsis thaliana columbia
cgcggatgtatcggtttctgacaagattgttgtttagaaatcgactgttccggtgaagacagctgaagctattgagaagattttgatgcataacagtaaaggaatcaagtttcagattctttcgaatccggagtttcttgctgaaggaactgctatcgctgatctttttaaccctgaccgtgttttgatcggagggcgagaaacacctgaaggattcaaagctgttcagacacttaaagaggtttatgctaattgggttcctgaaggtcagatcatcacaactaatctctggtctgctgagctttctaagttagctgcaaatgctttcttggctcagaggatttcatcagtc

SEQ ID NO: 156708 - DNA, 123 bp, Arabidopsis thaliana columbia
cggccggaatcccgggtcgcccaccccttccgttcgtaggattatcaacacaagcaaaaaagatgtcccaaaagctagaagcaaagggtggtgagatgggagatgtatgggatgatggtgctt

SEQ ID NO: 156709 - DNA, 451 bp, Arabidopsis thaliana columbia
ctctgctcttcttcttcttcctccgccatatttacaatgcttagtctctcaatcgctacgccggggacggcggcgatttttcgtagaggaactgcttcggcgacttcaacttcgtcttcattccatggtgtcagaatccagcaccaggtttctgctcgcgtccccgcggcggcgacgatatcgtcgtcgtctcctaaaccgtcggtggtgatgatgtcgaaaagagaggcggaattgaaagagataagatcgaagacgacggagcagttacaagaggaggttgttgaccttaaaggtgagctctttatgctttgtcttcagaaatcggcaaggaatgagttcaaatctagcgactttcgtcggatgaagaaacaagttgctcggatgttgacggtttaaagagagagggagatcaaagaagggataatgaaaaggttgtcgagggaacttg

SEQ ID NO: 156710 - DNA, 443 bp, Arabidopsis thaliana columbia
attgagaaggacgttgagcagattgtgttgttggatgatgaagaacaagaagctgttctggataagacggaatctgaaactccagtcgtggttactacgaaaagtcttgttggtaatcgaaacagttcagatgcgagtttgccaattactcccttcaggtcagatgaaatcaagaaccgtcaagctagaatcgaaatatcgatgaaagacaactgtaacaacggtgatcattcagcgaatggaggaacagaaagtggattagagcattgtgtgaagatcataagacaactctagtgttcaggacatatcgataagaatttcagacagaagtttctgacttggtatagcttgagagcaacgtcacaagagattagagttgtgaagatattcaatgatacatttattgatgatcccatggctttggttgagcagctcattgatac

SEQ ID NO: 156711 - DNA, 451 bp, Arabidopsis thaliana columbia
gcagctgcaaacatggcaagaggattgaagaagcatctaaagaggctcaatgctcctaagcattggatgcttgacaaacttggtggtgccttcgctcccaaaccatcttctggacctcacaagtcgagggagtgtcttcctcttgtcctgatcatcaggaacaggttgaagtatgctttgacttaccgtgaagttatctctatcttgatgcaaaggcatatccaagttgatggcaaagtcaggactgacaagacttaccctgctggtttcatggatgttgtatccatccccaagaccaatgagaacttccgtcttctctacgacaccaagggacgtttccgtcttcactccatcaaggatgaggaagcaaagttcaagctttgcaaggttagatctatccagtttggtcagaagggaattccatacctgaacacttatgatggtcgcacca

SEQ ID NO: 156712 - DNA, 131 bp, Arabidopsis thaliana columbia
catgaaaacgatgcagggacgcgtggtgttcgcaaccagtgacaagactgtggcgctggaggttgttttaataatattttctttcataacaattatttaaacaattttcatattttttctaatccataatt

SEQ ID NO: 156713 - DNA, 413 bp, Arabidopsis thaliana columbia
gtcagcgagtagcttgtggtatgttttggggtatatggaggcaaagaagaggctgaagagaggagatagagtgttcatgatcagctttggggcaggtttcaagtgcaatagttgcgtttgggaagttgtgagagatcttaacgttggagaagctgtagggaatgtgtggaattattgcattaatcaatactcatcaaaatcgattttgaatccgtttttcgagtagtttggttggattcatgaagaagaagatcctgattctttttaagtatgcccgaaggattttttttgtaattttttttgtgtatcatttgttaatattcatattcttttttctcatactcgtaaatttttacaaatgtgtttctttttagttccattttttcctttacttctctttattattaatttaa

SEQ ID NO: 156714 - DNA, 452 bp, Arabidopsis thaliana columbia
cgaagaccgactccgaggtgacaagccttttatcttcatcgccgactagatctccccggggaccagcctacttcgtccagagctccatcacgtgactcccacgatggggagaaaacagcaacatcattccactcaacaccggtactcaccagcccgatgggatctccaccacattctcactcttcctcaagccgcttcttcaagatcaacggctcaaaacgtaagggccacgctggagaaaaacagttcgctatgattgaagaagaaggtcttcttgatgatggagatagagaacaagaagctttgcctcgtcgatgttatgttttagctttcattgatggattctctctactctatgctttcttctctttgattctttatgcagctgctaaacctcagaaacctaagatctctgtttagagtttaacgtttgagcaacttaaggttcaagc

SEQ ID NO: 156715 - DNA, 432 bp, Arabidopsis thaliana columbia
ctgccattttcgatttccaaaggttttgatttttgaaaaatggtgagaatcagtgtgcttaacgatgctcttaagagtatgtacaatgctgagaagagagggaagaggcaagtcatgatcaggccttcctctaaagtgatcatcaagtttcttatcgtcatgcagaaacacggttacattggtgagtttgagtacgttgatgaccacaggtctggaaagatcgtggtcgagcttaatggaagacttaacaaatgtggagtcatcagtcctcgtttcgatgttggagttaaggagattgaaggctggaccgctcgtcttcttccttccagacagtttgggtacattgttcttacgacctcggctggtattatggaccacgaagaagccaggagaaagaatgttggtggcaaggttcttggcttcttttactga

SEQ ID NO: 156716 - DNA, 452 bp, Arabidopsis thaliana columbia
tgctcgttggcgatgtcccatgggaaatgtttgtcgagtcttgcaaacgtttgcgcattatgaagggatctgaagcagttggacttgctccgagagcaatggagaagtactgcaagaacagatcttgaattaataataaaaaaaaagaagcatcaatgatcaacaatatgacgggttcttgattttatatgtatttttatgattgtatgtggctatcacctatatatgtgtgttgtaattttaaatacttgatgggtatatagggcagtattttaccagtaagatgtggacaaacttgtaatgtgaccaaaagagaggaaacttcaatatctctgtgtttgtgtcatatttattgcccaacatgtgtctgtcggtttgatgatcaatcacaacttgatatgtgcatacatataaatgtgtgtatgtaggtgtgtgtacaattacatgtggtt

SEQ ID NO: 156717 - DNA, 313 bp, Arabidopsis thaliana columbia
cttttggcgagtatggaaagataacaagtgctgtcgtgatgaaagatggagaagggaagtgcaagggctttgggtttgtcaactttgaaaatgctgatgatgctgctagggctgtggagtctctcaatgggcacaaatttgatgataaggagtggtatgttggtagagcccagaagaagtcagagagggaaacagaattaagggtccgttatgaacagaatttgaaggaagctgcagacaagtttcaaagtttaaacttgtatgttaagaattttggtcctagcatttttagatgagtaacttaaagagatct

SEQ ID NO: 156718 - DNA, 307 bp, Arabidopsis thaliana columbia
aaaatcaggagaatcaacatcactcagcaattttttaagctcaagccgagagagacaatggcgtgaacatttacgagctcagagcagtgttcttaccccaacaacatttcttggccagactaaagccataagctttaacccccttcgtgatgttgtctctctcggatcttccaagtacactatgggaaatgatctttggtatggacctgacagagtgaagtacttaggaccctttttcgttcaaactccgtcttactttaccggtgaaattcttggcgtatttggttgggacaccttctgtttattc

SEQ ID NO: 156719 - DNA, 343 bp, Arabidopsis thaliana columbia
cggggggacccacgcgtccggaggtgttcaaggagagaagagagatagtcgtttagaccaaaacgttgacttaatggggagcgttttttcacgtgatggagcatctcaaactgtactactttatctaccaattcattcccaaatcttatgatacctgcatcggcataatcactttaatatggtagaagctcaacatatattccccataaccaagctgatacattaaatttgttaagagcttgtttgctgacatgttaaaccactttagcaaatcttaattattatttccctcagtctttgttttcattatcatcattcatcatcatcactatcttttatttat

SEQ ID NO: 156720 - DNA, 299 bp, Arabidopsis thaliana columbia
ctagactctcggtggctactagatgcttctttagcagcgtgtcgtcttcccggccatgggggcaacctaggttcattcagcacaagaaggatgcttactggttctacaggttcttatccatcgtatacgaccatgtaatcaatcctgggcattggaccgaggatatgagagacgacgcttttgagccagcggatcttagtcatcctgacatgcaagtggtcgatgtcggcggcggaactggctttactactctgggcatagtcaagacagtgttggccaagattgtgaccattctggac

SEQ ID NO: 156721 - DNA, 448 bp, Arabidopsis thaliana columbia
ggactcaacatcgctgacaatgtgtcttatctcattgggaaaactcctatggtgtacttgaacagtatagcaaaaggttgtgtagcaaatattgctgccaaactcgagatcatggagccatgttgcagtgtcaaggataggattgggtacagtatggttactgatgctgagcaaaaaggatttatatcacctggaaagagtgttcttgtggaacctacaagtggaaacacgggtattggcctagcattcatcgctgcttcaaggggctatagacttatcttgacaatgccagcatccatgagtatggaaagaagggttcttttaaaggcatttggagctgagcttgtattaacagatcctgctaaaggcatgactggagcggttcagaaggctgaagagatcttgaaaaacactcctgatgcatacatgctccaacagtttgacaacc

SEQ ID NO: 156722 - DNA, 450 bp, Arabidopsis thaliana columbia
gttctgtttcactttctctctctctgtatactctctaaatgatggcaaaaaactgtaatttagtcagtgttctatgtgtatttttggtattgaccctctttaacaaacccatcaccgtcgccgggcagaatattccggcggtgggcttgttcacctttggtgactccaacttcgacgccggaaacaaacagactctcaccaaaaccttactccctcaaactttctggccgtatggaaaatcccgagatgatcccaacggcaaattctccgacggcctcatcgctccagacttcctcgctaaattcatgaggattccgatcgtgatcccgccggcccttcaaccgaacgtcaatgtctcacgtggagctagtttcgccgtcgctgatgctactctactcggagctccggtgggaatcttgactctgaatcaacaagtgagaaagttcaatc

SEQ ID NO: 156723 - DNA, 202 bp, Arabidopsis thaliana columbia
aaaagacttgtgatggttcgtctttgttgtttcatttctgattcggttagcaatttggtcgaacatctttgtttctccacttttttgaggctatttctttttacctttctctgagccataaacaatgttgcttcacatctataatttgagacgtttatgtctaataaataatttattaaattaaaaaaatttaattataatt

SEQ ID NO: 156724 - DNA, 448 bp, Arabidopsis thaliana columbia
cttgtttctccaccattgattgacagaacttctggtgaatatctggcacacaatggcgttcgtacttttgcttgcagtgagactgtgaagtttggccatgtaaccttcttctggaatggcaaccgctctggatatttcaatgaaaagttagaagagtacgttgagattccaagtgatagtggaatatcattcaatgtccagccaaagatgaaagcactggaaattgccgagaaagcaagggatgctatccttagtggcaagtttgaccaggtgcgtgtaaacctgccaaatggagatatggtggggcatactggtgatattgaagcaactgttgttgcctgtgaagctgctgatcgtgctgtgaggacaatccttgatgccataaaacaggtcggagggatatacgttgtgactgcagatcacggaaatgctgaagacattgttaaaa

SEQ ID NO: 156725 - DNA, 449 bp, Arabidopsis thaliana columbia
gaaaaactgataatgaagggtcttcatctccacctcgtcctagtcaccatgacgatcgttgcctccatcgccgccgctgcaccggctgctcccggaggagctctggctgatgaatgcaaccaggattttcaaaaggtgactttgtgtttggactttgcgaccgggaaggcaacaattccgtctaagaagtgttgtgacgctgttgaagatatcaaagaaagagatccaaagtgtttgtgtttcgttatacaacaagcgaagacaggaggacaagccttgaaggatcttggtgttcaagaagacaaactcattcaactcccaacttcttgtcagctccacaacgctagcattaccaactgtccaaagcttctagggatttcacctagctcgccagacgcagccgttttcacaaacaatgccacaacaacaccggtggcaccagcaggaaa

SEQ ID NO: 156726 - DNA, 448 bp, Arabidopsis thaliana columbia
cgagaaccagatctactaattacctgagagtataaaagatctgctctgtttgtctgaaacagacagaagtcaacaaatctttgatttgttttttagcaaatcaaagaaatggccggagggttcgtcagtcaaacgccgggtgttcggaactacaattacaaactgacaccgaaagtgtttgtgacatgtttcatcggtgcttttggtggtctcatcttcggatacgatctcgggatctcaggaggggtaacctcaatggagccattcttggaagagtttttcccttacgtctacaagaagatgaagagcgcacatgagaacgagtactgtcgatttgatagtcagcttcttactctcttcacttcgtctctttatgtggcggctttggggtcttctctctttgccttcaccattactagggttttcggaaggaaatggtcgatgtttt

SEQ ID NO: 156727 - DNA, 447 bp, Arabidopsis thaliana columbia
cttggtgaagggaagcctgagaatcaaaatttttttatcgtgtttacgcggggagaagctgtccagaccatagatatgaatcaggacaattatctggaggaagcaatcaaaatgagaaatctacttgaggagtttcatggaaaacatggaattcgacgtcctactattttgggagttagagagcatgttttcacgggaagtgtttcatcactggcgtggttcattgtctaatcaagagaccagttttgtaacgttgggtcaacgggttctagcatattcactaaaagtttgaatgcactatgggcattcagatgttgtcgatagaatatatcatattactcgcggatgaaacagcatagtatcccgtgtttttaacaactgttaagatttattttgctggtattaaacttgacacttaatgctggggaatatcacccaccctgagtt

SEQ ID NO: 156728 - DNA, 437 bp, Arabidopsis thaliana columbia
cccgtccgtaattttcataagagaacaaccaagacaaatttatcaatggcagcgagtgcatctccaatggcgagccagctaaggagcagcttctcctccgcttctctttctcagcgtctcgccgtcccgaagggcatctccggtgctcctttcggtgtttctccgaccaaaagagtctcttccttcactgtccgagctgttaaatccgacaagacaacattccaagtagttcaaccaatcaacggtgatccattcatcggaagtttggaaactccggtgacatcaagcccattgatcgcgtggtacctttccaacctccctggataccgtaccgccgtcaaccctctcctccgcggtgtggaagtgggcctggcccatggtttctttttagtgggcccattcgtcaaagctggcccattaaggaacactgcttacgc

SEQ ID NO: 156729 - DNA, 401 bp, Arabidopsis thaliana columbia
gttggggcgaacagactttattcgggttccatggtcaaaactataaaagtttggagtttggataatctacagtgtatacaaacactcactgatcattcatcagttgtgatgtctctcatttgctgggatcaattccttttgtcttgttcattggacaacacggttaagatatgggctgcaatcgaaggtggcaatttggaagtaacatatactcacaaagaagaacatggagtgctagctctatgtggtgtacatgatgcagaagccaagcctgttttgttatgcgcttgcaatgacaacaccttgcgcctctacgacttaccatcatttactgagaggggaaatatttttgcaaagcaagagatacgggcgatccatataggtccccggggcatattttt

SEQ ID NO: 156730 - DNA, 302 bp, Arabidopsis thaliana columbia
gcaagttctataattcaagtatgtattgtgtatgagttcatttggggtggtgcttggagggattatgctaccggaaatgtaacgtatctcaatctaatcacccaacctactatggccaagcatgctggtgccttctggggtggcccttactatggtgtatttagctgggacaacaagcttgctggtgctcagatgctgttgagccggttgaggttgtttttgagtcctggatattcatatttaagaaattctaaggacctttcactatctgacctagattgtcaatgtgctcatacttgcct

SEQ ID NO: 156731 - DNA, 396 bp, Arabidopsis thaliana columbia
aacaaaccctagaccgttaaaacccttatcaatttcgctgaaacggcaaatggaagaagtgtcgtcggagatggaagtggaggttcaaaatcgtcagctttcggattcttctccggctcaaaacgtgaagaaatttgggctcaagaactctattcagaccaacttcggctctgactacgtcttccagattgtcccaaaaatcgattggacagcaatcgcggtttccttatcaaccaacaccgtcaagctttactcgccggtgactggtcagtactactgcgaatgtaaaggccactccgataccgtcaatcatattgcgttttccttcgactcggcggcgtctccttacgttttgcactcttgttcctccgatggtaccattagatcttgggacac

SEQ ID NO: 156732 - DNA, 455 bp, Arabidopsis thaliana columbia
ccgagagcttggttaaagccgagccaaaatctgttggtcatattcgaggagcttggtggaaacccatcaactgtctctttggtcaaaagatcagtatcaggagtttgtgctgaagtttctgaataccacccgaatatcaagaactggcaaatcgaaagctacggaaagggacagacatttcatagacccaaggttcatttgaaatgtagtccaggtcaagcaattgcatccatcaaatttgcaagctttggaactcctttaggaacctgcgggagttaccaacaaggagagtgtcacgcagctacctcatacgctatcttagagaggaagtgtgtagggaaagcgagatgcgcagtgacgatatccaacagcaatttcgggaaagacccgtgtccaaatgtgctgaaacggttgactgttgaagcagtttgtgccccagagacatctgtaagcac

SEQ ID NO: 156733 - DNA, 404 bp, Arabidopsis thaliana columbia
gcagcgactgatgctcaaaatggaggttctgttaaccagcagagcactattgtttttgcggaaggaaatcctattcctagggtcaaggctctaacattttatcgatctggaacattctctattgatgtgcattacagtgatgtgaacgatttgcaagcaccttctaaaatcagcacatacacgattggtcccttccagtcatcaaaaggcgagagggcaaagctgaaagtgaaagttagattgaacctgcatggaattgtctctgttgaatcagcaactcttctggaagaggaagaagttgaagtatcggtcacaaaagatcaatcataggaaactgctaagatggacactgacaaagtttctgccgaggcagattctgcttttggtgactctgatgttaacat

SEQ ID NO: 156734 - DNA, 260 bp, Arabidopsis thaliana columbia
aacttatcttatgaatctattaagattatttctaatctctttcctactatatatatggagggcttttgttgtagcctagtggttgcatattaaccccttgtgtctctcacaatcccactattactgaaacatacatatagacttagctcaagatatgttaatttgttttcactctaatatagatagagagagaaagagatcggtgaggaataaatggcgctaggaataggtctgggatgacactacatacacgaaggtgt

SEQ ID NO: 156735 - DNA, 451 bp, Arabidopsis thaliana columbia
ctttctttgccatctgttacaaacaccaaactctcctgattcatcagttttaagtcttcttcaagtcccagggatcatcaatccaatggctcagatcttagcagcttctccaacatgtcagatgagagtgcctaaacactcatcagtcattgcatcatcatccaagttatggagctctgttgtgttgaaacagaagaagcagagcaacaacaaagtcagaggctttagagttcttgctctccaatctgataacagtactgtcaatagagttgagactcttctcaatttagacaccaaaccttactctgacaggatcattgctgaatacatttggatcggaggatctggaattgaccttagaagcaagtcaaggactatcgaaaagccggtggaggatccttctgagctacctaagtggaactatgatggttcgagtaccggtcaagcacct

SEQ ID NO: 156736 - DNA, 435 bp, Arabidopsis thaliana columbia
ttctagtcctactgtccttgatgttttcaagctcttacaagtcattagagctgggagaaagatcagctctttctctttctgtgccgacagctccaaaagaatccttaggaacattagctctctctttgaacaataactcactggaattctattcccttaaaagcagcgaaaacgcgaaaactgttaccattgaacaccaaggacatcgctctgatgtgaggagtgttaccctcagtgaagacaacacccttttgatgtcaaccagtcacagtgaagtaaaaatttggaatcccagtacaggttcctgcctccggaccattgattcaggatatggattatgcagtttgattgttccccaaaacaagtatggtattgttggaaccaagagtggggtacttgaaaacattgatatagggagcgctaccaaagtgggag

SEQ ID NO: 156737 - DNA, 396 bp, Arabidopsis thaliana columbia
cacacatctcctattgcaaacgaacataaaacactacctaagagatcaatatggctggagtgatgaagttggcatgcttgctcttggcctgcatgattgtggccggtccaatcacatcgaacgctgcgctaagctgtggctcagttaacagcaacttggcagcgtgcattggctacgtgctccaaggtggtgtcattcccccagcgtgttgctccggcgttaaaaacctcaacagcatagccaagacgaccccagaccgtcagcaagcttgcaattgcattcaaggtgccgctagagccttaggctctggtctcaacgctggccgcgcagctggaatttctaaggcatgtggagtcaatatttccttacaaaatcagtaccagctccaactgcaaa

SEQ ID NO: 156738 - DNA, 434 bp, Arabidopsis thaliana columbia
cttcgttggtttactcttcacaagatttcttaagttgattctataattttgactcatgaacatgctgatgcagtacttggcctggatgatatacgttcagtgcaaccatttagtcctactaatgatattgatcctactccaatttttgtaagccaatacgctatggaaagccttgctgtgaagttcccgtatttggttcagaagaaacttaaagaaggccaagaagttaggcgagtagcacagctagattggagagtaattgaagaagattgtgagaagccatttgtagcttcaggtttatcattcacgccacttccagtgatgcatggagaagactatgtatgtcttggcttcctttttggtgaaaaatcaagagtggcttatatattcgatgtttcacgggtttcttcaaacaccgagtatgctatatcaaa

SEQ ID NO: 156739 - DNA, 453 bp, Arabidopsis thaliana columbia
ctcacctgctgccaaaacgtccacaaccactttcttctctacttccgccaccgcaaaaacgaatggaatcaagtcttcctcttccgatctgtccaagccatacatcccggactacaagctcgccttcgagcatttttgcttccacgcggcaagcaaagtagtgcttgaagagcttcaaaagaatctaggcttgagtgaagagaatatggaggcttctaggatgacacttcacaggtttggaaacacttctagcagtggaatctggtatgagttggcttacatggaggccaaggaaagtgttcgtagaggcgatagggtttggcagatcgctttcggttctggttttaagtgtaacagtgtggtgtggaaggcaatgaggaaggtgaagaagccaaccaggaacaatccttgggtggattgcatcaaccgttaccctgtgcctctctaaattat

SEQ ID NO: 156740 - DNA, 425 bp, Arabidopsis thaliana columbia
cttgcatttcactttaacaaaacctcaagttagagttgtgagtgttcagagttcagatcgattgaaactctcagttgctactcaacagaaattggacttttggtttgttgagatgtattgtttgaagttgctttgttccactagtgtaaaataacattctcttctctgcatctttagacttatcaaggaatcaaacccattttatcattgcaggtgacgtggatatatgaagcagatgttttggggaaccagagttctgtaaatagaaaccttcacgcgacgttgaaaggtttttgagacgaatataggaggagaagatgggatgtgtttctttttgctttcgggtcgaggacattgatgagtacatgaattcaaacagctctgtctataggaactgtccctgcataagatgccttgctcataat

SEQ ID NO: 156741 - DNA, 387 bp, Arabidopsis thaliana columbia
caaactccatagctagctagagagtatattgtatcaaagatgtcgaaagaagtgagcggggagggcaaaacccaccatggaaaagactacatggatcctccaccagctcctcttctcgacatgggtgagctcaaatcctggtctttctacagagctctcatcgctgagttcatcgctacactcctcttcctctacgtcaccgtcgctactgtcatcggccacaagaagcaaaccggtccttgtgacggcgacggtttacttggtatcgcttgggctttcggtggtatgatcttctgtcttgtctactgcaccgccggaatctctggtggtcacattaacccagctgtgactttcggtctgttcttggcccgtaaggtctttttggtg

SEQ ID NO: 156742 - DNA, 439 bp, Arabidopsis thaliana columbia
aaggaaaagctttttattctgaattcttgggttcaagaattcctatataatttaagtgatacaattaaagctttttcgattcttttattaactgatttatgtatcggattccattcgcctcacggttgggaactaatgattggttatatttacaaagattttgggtttgctcattatgagcaaattttatctggtctagtttctacctttccagtaattcttgatacaatttttaaatattggatttttcgttatttaaatcgtgtatctccgtcacttgtagtgatttatcatgcaataaacgactaaaaaaagattcactgatccaattttaatctttcgtaccttatacatcataaccaaatcaaagtcgtatttactttactttttttacccatgagggattccttgtatatttcaacaaaaaaaattgattttt

SEQ ID NO: 156743 - DNA, 411 bp, Arabidopsis thaliana columbia
ccgttgctcctcctgctgatcaagctacagatctgttgcagaaactatccttggactcgccagcaaaagcttcagagatccctgagcctaacaagaagactgccgtctaccagtatggaggcgttgatgttcatggtcaagttccttcttatgatcgatctttgacaccaatgcttcccagtgatgctgctgacccttcagtttgctatgttcctaatccttacaatccctaccagtattacaatgtatatgggagtggtcaagagtggactgactacccagcttacacaaatcctgagggtgttgacatgaattctggaatttatggagagaatgggactgttgtgtattctcagggttatgggtatgcagcgtattcttactcgccagcaactagccctgcttcacagc

SEQ ID NO: 156744 - DNA, 393 bp, Arabidopsis thaliana columbia
cttttccccaaaaaaaaatgtctgaagttgagtaccggtgctttgtcggcggccttgcctgggccaccaatgatgaagatcttcaaaggacgttctcacagttcggcgacgttatcgattctaagatcattaacgaccgcgagagtggaagatcaaggggattcggattcgtcaccttcaaggacgagaaagccatgagggatgcgattgaagagatgaacggtaaagagctcgatggacgtgtcatcaccgtgaacgaggctcagtcgagaggtagcggcggtggcggaggaggccgtggtggaagcggtggtggttaccgcagcggaggcggtggtggatactcaggaggcggtggcggcggatactcaagaggaggcggtggtggttaca

SEQ ID NO: 156745 - DNA, 370 bp, Arabidopsis thaliana columbia
aaagactcataaatctagggctttcttctatatatcgaagaagaagagttcacatagagagagggtgttcgtttcgagatgttcttcagtcccaatggcgtcaaacaccagcaacgacaatttccagcatagaccacggcaaagaaacggaccacctcctccgcggcgacagggaagaaatccgccgcctccgtcttcgtcaacgcgaacttctcagaatcagccaccacagcatacgccgcaggagaagaagaaaccggtgtttgtcaaagtggatcagcttaaacctggaacgagcggtcacactttgactgttaaagtctttgatcagaatttcggtccttataaactcggtagctgtttttttttc

SEQ ID NO: 156746 - DNA, 313 bp, Arabidopsis thaliana columbia
gcgaggaagaggaggaacctctggtaacatgttcaggatgtcactgggtcttccagtggcagccactgtgaactgtgctgacaacaccggagctaagaacctttacatcatttcggttaaaggaatcaagggtcgtcttaaccgtttgccatcagcgtgtgttggtgatatggttatggctactgttaagaaaggtaagcctgatctccgtaagaaggtgctttctgctgtcattgataggcagaggaagccttggcgccgaaaggacggtgtttttatgtatttcgaagataatgttggtgttattgttaat

SEQ ID NO: 156747 - DNA, 200 bp, Arabidopsis thaliana columbia
cccacactaatatatttgactttcttttctttcttatatatttagctaaaagcagacctagggtttttgtatccgttccagccacggacgacttcttcgttctctgaactcttctaaagcctctatattcatcggattgttcatttccagttaaccaatttccagtttggtgaatttgtaagaatgagtatactaaaacg

SEQ ID NO: 156748 - DNA, 347 bp, Arabidopsis thaliana columbia
caccaacccactcgacggagtctccaactcttttctcctcattctccactctcacacggccgacttctgattccagatgtgagcgatgcaaagctccgccgtattctccctctctccgtcgcttcctctcctaaaaccacgtcggctctctctccgccaccatcccataaccaccgccgcttcttcaagcgatctaaacgtttctccaaatgttgtctctattccttctttatctcgtcgatcttggcgtctcgcttcgtctgattcgcctctccgtgcttggtccggtgttccttcttcgagctctcacttcttagacacgaatcgtttcagaaccgccgctactg

SEQ ID NO: 156749 - DNA, 398 bp, Arabidopsis thaliana columbia
ggcgggcccacgcgtccgctctcttttactcctcttcccaaatttttttttctcgccctcaaggtgttgctaaagggggggttaaaaaaggcaaggcacagctcttcaaagacggaagtccaatggtgtacagtggagctgtcgacaggatcatcggaaaaccacctcctcagacaggagatgttgtcattgtagctgatggcactgagaatcccattggttggggtttgtataactctgtttctatgttctgtgttcgccttatgcagcttcaacacgaatccaccagagatccttcttgtgcattgaacattgagaagcttctccaaacaagaatcgctgaagcagtttagttgctaaagagattggcactttccctcgtctatacttaatgctta

SEQ ID NO: 156750 - DNA, 257 bp, Arabidopsis thaliana columbia
  unsure (1)..(257): unsure at all n locations
ggggggggangcgtacgatttcttctgatccgatctgactctgttctctacccatcaatggcctccagatctcgtgaagggctattccgacattgtgaaggccatcaatattgcactggtcaccggaatcactgtccaagatggatcttacctgaccgagttcctgctcgagaaaggctaccaagttcacggtctcatccgacgatccttcaattttaacacttcaccgactcaaccatatctactttgatccccac

SEQ ID NO: 156751 - DNA, 440 bp, Arabidopsis thaliana columbia
attggaacggtgccagtgggacgtgttgagactggtatgatcaagcctggtatggttgtgagcgttgctcccacaggattgaccactgaggtcaagtctgttgagatgcaccacgagtctcttcttgaggcacttccaggtgacaacgttgggttcaatgttaagaatgttgccgtgaaggatcttaagagagggtacgtcgcctccaactccaaggatgaccctgccaagggtgctgctaacttcacctcccaggtcatcatcatgaaccaccctggtcagattggtaacggttacgccccagtcttggattgccacacctctcacattgcagtcaagttctctgagatcttgaccaagattgacaggcgttctggtaaggagaatgagaaggagcccaaattcttgaagaatggtgatgctggtatggtgaagatgac

SEQ ID NO: 156752 - DNA, 414 bp, Arabidopsis thaliana columbia
agcttctctaatttcatagctcctaacaaagcaatatcatttccaatttataaaagttaaagccatggctgcatctttctctgtcccctctatgataatggaagaagaagggagattcgaagcggaggttgcggaagtgcagacttggtggagctcagagaggttcaagctaacaaggcgcccttacactgcccgtgacgtggtggctctacgtggccatctcaagcaaggctatgcttcgaacgagatggctaagaagctgtggagaacgctcaaaagccatcaagccaacggtacggcctctcgcaccttcggagcgttggaccctgttcaggtgaccatgatggctaaacatttggacaccatctatgtctctggttggcagtgctcgtccactcacacatccactaatga

SEQ ID NO: 156753 - DNA, 184 bp, Arabidopsis thaliana columbia
cgaacaaagaagtcaacgtttggtctccttttttttattgaactgcggttcccatcgcacctgacgactctttcgctttgggagaggggaaatatctttaatttgtagggttgatgatactctccgatgggacctacaggtgtaaagtgaggactcttatcaccgataattattataatcatgt

SEQ ID NO: 156754 - DNA, 436 bp, Arabidopsis thaliana columbia
cgttaaacaaatttcgccgacctacgtttgttccgtcgcctccaatataaaccaaaggcgtgcctaatcctcgaattgggcgtctctgagtttttattctgagatagagaaagatgtcaggtttagcttgtaattcgtgtaacaaagacttcgaagacgacgctgagcagaagtttcactacaaatccgaatggcaccgttacaatctcaagcgcaagatagctggtgttcctggagtaacagaggcactatttgaagctagacaagctgctatagctcaagagaaggttaaagctgttgaagcaccgatgctttatagttgtggaatctgtaacaaaggttacaggagtttcaaggcttatgagcagcatcttaagtcgaagagtcatgttttgaaagcttcgacgagttctggagaggaggattaagcgattca

SEQ ID NO: 156755 - DNA, 362 bp, Arabidopsis thaliana columbia
  unsure (1)..(362): unsure at all n locations
tttctttgcagtttgagattgatgcgtttgtctacatcgtatacgtggaaggttaccgtgggaaagttaacgatatgacgtcagaaatgatcacgtttctttctattaagacttttaaaggcaaaacctctcatcctatcgaaaaaagacctggggttaagtttgtgctacatggtggaaaaatcgttgggtttcacggacgttcaacagatgttttacactcccttggggcctatgtttctttgtcatccactatcaaattgcttgggaagtggattaaggtggagcaaaaaggagaaggttcagggctaanattcttacatggcatatctacaagtaggcaacaagtatttactcctttg

SEQ ID NO: 156756 - DNA, 444 bp, Arabidopsis thaliana columbia
ggaagctggtacagtggttaaagattttcttttccacgttctcttggaatcctaagcgggggagcgtttaggaatcagagcggagcccttggagcctcaccaaaacttggaattcaaaaggatttacttcatggttgaacttccaagaacatggaaagagagaactccaagaagggttcggtcgggaattcaaatgagtgctaaggagagattagagaatctgaagctgtctcgtagatcatcatctgatctcttggtaatgaagaagaagacagatgttaatgattaataaagagaagtgagttgcgtgaagtttaatttaccaaagtggtaaattgagaaactgaggtaagagagtgagagtggctttgatttctcaacaagatcacacaacttttgcttcttcacatcccagtggtttgattaataaagaaacatttgctt

SEQ ID NO: 156757 - DNA, 323 bp, Arabidopsis thaliana columbia
gaaccgtggagcgtcagtgagagtgggacgtgacacagagaaggaaggtaaagggtacttcgaagacagaaggccagcttctaacatggatccttacgttgtcacctccatgatcgctgagacgaccatactcggttgatgacacatttcatgatttgatttctctccaatttggttttttttttttcccttttgattgcacttttcgataataaaaaaataattcttattatgggcgtattgttgtgacattttgtgttttgtttcgaataattaaataagcgcttcttaaggtgaaaataaataataattagtgattttta

SEQ ID NO: 156758 - DNA, 223 bp, Arabidopsis thaliana columbia
  unsure (1)..(223): unsure at all n locations
gacgcacgcgttcagtcattgcatccgctaccgactggtttttgtttctttgacaaaaccttcanttcttggcggtgattaaaacccaaatgcgggggttaacaaatccaatactctactccctttgatagtattctccaaacggaacaaactataaaccgagagaacgcagcaacgatattgctttctctatgtaaaagagacactgacaaactgatcacta

SEQ ID NO: 156759 - DNA, 392 bp, Arabidopsis thaliana columbia
cttctactcatttactgctctgtttcactttctctctctctgtatactctctaaatgatggcaaaaaactgtaatttagtcagtgttctatgtgtatttttggtattgaccctctttaacaaacccatcaccgtcgccgggcagaatattccggcggtgggcttgttcacctttggtgacttcaacttcgacgccggaaacaaacagactctcaccaaaaccttactccctcaaactttctggccgtatggaaaatcccgagatgatcccaacggcaaattctccgacggcctcattgctccagactttctcgctaaattcatgaggattccgatcgtgatcccgtcggccctttaaccgaacgttaatgtcttacgtggagctagttttcc

SEQ ID NO: 156760 - DNA, 450 bp, Arabidopsis thaliana columbia
acgaaggcgagagagagagagaaagaaaaatgcgaagaatacgcagaatccatccaatttagggttagggctgcccctaatctggaaacctttgcctcgtttctgatctgttttccggatccgacttgaaggaaagaagacgacgacgcactaccaaaaacatgggcgcgaattcgcttccaacggatgcaaccctcgatctagatgagcagatctcgcagctcatgcagtgcaagcctctctccgagcaacaggtcagagcattatgtgagaaagctaaggagatcttaatggatgaaagcaacgttcagcctgttaaaagccctgtgacaatctgcggtgatattcatggacagttccatgatcttgcagagcttttccgtattgggggaaagtgtcctgataccaactatctgtttatgggagactatgtcgaccgtggatattatt

SEQ ID NO: 156761 - DNA, 460 bp, Arabidopsis thaliana columbia
cgaccacgcgtccgctgtagctaccccaatggctctccatctcttctagataaactcccggtcgaaaccagcagagaaaacgaggacctgtcgtccaaagctatggcaaggttcaacatattgctaagaagtttgtcacagccgatgtcgctcaaagacatagccaagacatgggacgcctgtgctcgggcagtgatctgtgagtacgcacagcaatttggcggtggaactttcagctcaaaatacggcacttgggagaaatatgtagcagcttcctgaatctgacggatctctctcgtcttcaatagcagctctgtgattcacttgcaggttcatgtcaaaactaaagaaaaaaagccaaaaagttttttcctcactttttgttgatagtataagttgttttcccacacacgtgattgggattttttgttatctgtttgcaaaagcttatgctatatta

SEQ ID NO: 156762 - DNA, 354 bp, Arabidopsis thaliana columbia
acccacgcgtccggttccaaggcgggaagagatgaaagcaagatctataaccgaaatacatactgaggcagagaagaagcttggtctccgaccaggtgccactgcaaatatgagaaggggtatggtttctagtggtgggcctgtgagccctggccctgtctaccctggtgggcgacctggtgcgggtggcttgatgcctggtatgcctgggacgcgaaggatgcctgggatgcccggagtggacaatgataactgggaggtaccccggacaagatcaatgtttagacgcgatgggccaggacctctacattctccagcagtgagcaagtcggtctcaatgaacacgaggctttt

SEQ ID NO: 156763 - DNA, 443 bp, Arabidopsis thaliana columbia
ctcagtgattccacccgccaccggatggttgttgaagctttgacaattctctcagttcttgcaaataatcaagacgcgaaatgcgcgatagtaaaagcgaatactctacccgcgttgatagtattctccaaacggatcaaactagaaaccgagagaacgcagcagcgatattgctttcgctgtgtaaaagagacactgagaaactgatcactatcggtagactcggtgcggttgtcccgttaatggatttatcgaagaatggaacagagagaggcaaaaggaaagccatatttttgttagagcttcttcgtaaagcatgccaataataactagtcttctgacaaaaaaggttcatcaagctctcatttttattgagtttattaaattatgttaatattcttgtttaaatgatttgaatttttttggaattccattttgggaat

SEQ ID NO: 156764 - DNA, 364 bp, Arabidopsis thaliana columbia
gtttaatctcacccaagaagacaaaaacacatagagagaaagagagagaaatggcgacgacaacaacagaagcaacgaagacatcatcgaccaatggagaagatcagaagcagtctcagaatcttcgacatcaagaagttggtcacaagagtctcttacagagcgatgatctctaccagtatatactggagacaagtgtgtatcctagagaaccagaatcaatgaaggaactcagggaagtgacagcaaaacattcatggaacataatgaccacatcagctgatgaaggacagttcttaaacatgcttatcaagctcgttaacgccaagaacacattggagatcggagtttacactggctactc

SEQ ID NO: 156765 - DNA, 451 bp, Arabidopsis thaliana columbia
ctctgctcttcttcttcttcctccgccatagctacaatgcttagtctctcaatcgctacgccggggacggcggcgatttttcgtagaggaactgcttcggcgacttcaacttcgtcttcattccatggtgtcagaatccagcaccaggtttctgctcgcgtccccgcggcggcgacgatatcgtcgtcgtctcctaaaccgtcggtggtgatgatgtcgaaaagagaggcggaattgaaagagataagatcgaagacgacggagcagttacaagaggaggttgttgaccttaaaggtgagctctttatgcttcgtctccagaaatcggcaaggaatgagttcaaatctagcgactttcgtcgtatgaagaaacaagttgctcggatgttgacggttaaaagagagagggagatcaaagaagggataaagaaaaggttgtcgaggaaacttg

SEQ ID NO: 156766 - DNA, 446 bp, Arabidopsis thaliana columbia
ctcagaaagaatggctcaaaccatgctgttttcttcaggcgtcaccgccggccattttttgaggaacaagagccctttggcggagcccaaagttcaccatctctttctctctggaaactctccggttgcactaccatctaggagacaatcattcgttcctctcgctctcttcaaacccaaaaccaaagctgctcctaaaaaggttgagaagccgaagagcaaggttgaggatggcatctttggaacgtctggtgggattggtttcacaaaggcgaatgagctattcgttggtcgtgtttgctatgatcaggttcgctgcatcgtagcttggtgaggcgttgactggaaaagggatattagctcagctgaatctggagacagggataccgatttacgaagcagagccattgcttctcttcttcatctttgtcactctggtgggagcc

SEQ ID NO: 156767 - DNA, 436 bp, Arabidopsis thaliana columbia
cggacgcgtgggctttcttttttggtaacccccaaaccctactttgtccagcgagaaaggaagaggggtttcgtctgattccgctaaatctctagtctttatctaaagatcatggattccgatgatgatatgcacgatatggactcggtagattatgattattacagcggcggcacctatgatgacaccattgtgaggaaaccggttccggggtggggaggcggacaccgacgataccgccatcatcgcctcctatcgctctaagagtaattatgttgttctcaaggaagaagatattcgcaggcatcagaacgatgatgttgggcgagtttccgcggtcctctccataaccgatgtcgaagcaagtactttgcttcttcactatcactggagtgtcaagaaagttaatgatgaatggtttgcggatgaggagaga

SEQ ID NO: 156768 - DNA, 442 bp, Arabidopsis thaliana columbia
agaggatagaagaagcatctaaagaggctcaatgctcctaagcattggatgcttgacaaacttggtggtgccttcgctcccaaaccatcttctggacctcacaagtcgagggagtgtcttcctcttgtcctgatcatcaggaacaggttgaagtatgctttgacttaccgagaagttatctctatcttgagcaaaggcatatcaagttgatggcaaagtcaggactgacaagacttaccctgctggtttcatggatgttgtatccatccccaagaccaatgagaacttccgtcttctctacgacaccaagggacgtttccgtctccactccatcaaggatgaggaagcaaagttcaagctttgcaaggttagatctatccagtttggtcagaaaggaattccatacctgaacacttatgatggtcgcaccatccggtaccct

SEQ ID NO: 156769 - DNA, 392 bp, Arabidopsis thaliana columbia
gcttgaccgtccaattccccgttccgatttctcacctcgccgtcaagtaacggaagccgaaccgaccgatgaggctgataagaagacgacggcgatcgacgtggaggtaacggcgggaaagtctatatatttggtttccgacggaactgggtggacggcagagcattccgttaacgccgctttgggacaatcgaagatttttgttgaatcgtggctcttctgtgaatacccatctcttctcctgggttgaggatgaggagaggcttattgggattattaaacaagcaggtaaagaaggggcaatgtgtttctacactgtaacaaattcttctatggtaaaattctcatagctagcttgtgatcagttgggggatgctttcggttgatatttt

SEQ ID NO: 156770 - DNA, 416 bp, Arabidopsis thaliana columbia
  unsure (1)..(416): unsure at all n locations
gggactcggagagggnnnaggaagagcaagacgaagganccgagccanagaggtctatnaacacaccaaaagcnncnncnncnncttcctctcgtctctaaaaatccttcctttctttctgggttttctcgaatcttcatctctcattcaaacccacaagtccgactcgcgatccaacaccatggaagaggttgaagaagaagtgagacgaatcgtcgaacaagttaaagagcttcatgactcttccacatccttcgtctcttcttcttctcaagaagagctttctctccgtaacagagcctccgtcgttgactcatcaatccgccgtcttcattctactcttgcctctgacaaacatctcgatcccaagcttttcgaaaagctagaagaggatctgcaacgagctagatgcatgc

SEQ ID NO: 156771 - DNA, 382 bp, Arabidopsis thaliana columbia
gaagaaactgactcgcttgtggaatcaactacttgacgatgtggcgctgcgtctctcggggctgtctagctcctgcttggaagacctcttcactctttgatggcgtctctggatctcgcttttccagattcttctccactggttctaccgatacgagatcctcttatactattgtggatcacacttatgatcggttgtggtggagctggtggtgctggccttatggcggctattgggttatcgtagcatggctttaacaccgcttgcattactaagcttttccccacaaggtcacatactgttgctgctcaaggaggtattaatgctgctctgtgatatatgtccgttgatgactggagaatgctcatgtatgtcactgtca

SEQ ID NO: 156772 - DNA, 407 bp, Arabidopsis thaliana columbia
aaaagatatcatggatacacttcccaaattggtgtttgagattgatgatcttaaagcagggaagtctgtgttgatatcggggacttcatacactttggggctcttcatgattgcaaaatcgccgtggtatctgctaccgttggcttgggcatggacaggaactgcaattaccgggttctttgtgataggtttgattgtgcactaagtcattttcaaagaacaaattggcggaagacattgtgggtactctcgccttcctaccacttgtctacccatattatccatggcggtttaagcactaccgtcatcactccaaaaccaacatgttatttcatgacacatcttgtcagtcagttccgtcagaagagtttgtgtcatcactccgtgatgagataagctttcatttt

SEQ ID NO: 156773 - DNA, 425 bp, Arabidopsis thaliana columbia
  unsure (1)..(425): unsure at all n locations
aaaagcctnagagcctggnnngttttcttaagctaatagagggattctttatggggaggaagttaatctctaggaggagcatttccttgatgttcttttggattcagctgcttctggttggaatacggttgagagagaacggatttcgatttctcacccggcgaggtttatcttgatcggttcagaaatccggaagaggagagcttaggccacagcttcttgatcggtttgatatgcatgcacaagtagggacggttagagatgctgatttacaggtcaagattgtagaagagagagctcgtttcaatagttacccaaaagtttttcgcgacacttacataacctagccagacaagcttcaagaccagatttcaacttcttggacaaaccttttctcagttcagattgttagggaattgatggtt

SEQ ID NO: 156774 - DNA, 441 bp, Arabidopsis thaliana columbia
atctctcgctccgtccttcctcagatcttatcgtccgccggttttcacgatgccgtggtcctcctccgccgccgggctggtgttccttcttctcgtttcccttctcactcctacgttcgcatccgattcagatcacaagtatcaagccgaggagcaggtcaccctatgggtaaacaaagttggcccaataacaatccacagaaacatacaactattacaggcttccattttgccgcccatctggaaacaatgttcacaaatggggtggtcttggtgaagttctaggaggaaatgagctgattgacagtgagattgcgataaaattcatgaagaatgtcgagagaagtgtcatctgtccgcttgaactcgatgaagctaaggtcaagcattctaaagatgccattgaatctagctactgggtcgaattttttatggatgatc

SEQ ID NO: 156775 - DNA, 446 bp, Arabidopsis thaliana columbia
aaaaaaaagaaaacacaaaaacaaagattataatggcttcctcaaccatggctttgtcctcccgtgccttcgccggaaaggctgtgaagcctgccgcatcagatgtcctcggaagcggccgtgtgaccatgaggaagactgtcgccaagccaaagggtccatcaggcagcccatggtacggatctgaccgagcaagtacttggtccattctccggcgagcccccgagctaccttaccggtgagttccccggtgactacggatgggacaccgctggtctatccgccgacccagagaccttcgccaggaaccgtgagctagaagttatccacagcagatgggccatgctcggagccctaggctgcgttttccctgagctattggctaggaacggagtgaagttcggagaagcggtttggttcaaagcccgttcacaaatcttcagcga

SEQ ID NO: 156776 - DNA, 413 bp, Arabidopsis thaliana columbia
ccaacttcagcgacaagataacaaaacgctttcacacgatcggataaaatggcggagaagagctttaagtacatcatcctcggcggcggcgtctctgccggatacgcagctaaagagtttgccaatcaaggggttcaaccaggagaattggctgttatctcgaaagaggcggtggctccatatgaacgccctcacttagcaagggtatttgtttcctgaaggggctgctagacttccaggtttccattgctgtgttggtagaggtggagaaaaactgcttcctgaatcctacaagcagaaaggaattgagttgatactaagcacagaaatagtgaaagctgatctctttgtcaagagtcttgtcagtgcaactggggatgtcttcaagtattagacccccttaattgccactg

SEQ ID NO: 156777 - DNA, 393 bp, Arabidopsis thaliana columbia
cccacgcgtccgggaggtccattcggaacaatgtggtttgacgctgagcaagctcatggagccaacagtggtatccacattgctcttaggttgttggaccccatcagggagcaattccctaccatctcttttgctgatttccatcagcttgctggtgttgtggccgttgaagttactggtggccctgacatcctttccacccggaagagaggacaagccccaaccaccttcagagggtcgtcttcctgatgctaccaagggttgtgaccatttgagagatgtctttgctaagcagatgggcttatctgacaaagacattgtcgctttatctggtgcccacactctgggacgatgccacatgagtaggtctggcttcttaagtgcatggacatt

SEQ ID NO: 156778 - DNA, 367 bp, Arabidopsis thaliana columbia
gcgtccgagaagaatcaatactcaaatctcaatcatttttctttcttatcttcttctccgatatgaagcgcgccgctagcctcaaccggcgcagccccaaacgtctcttccgtaccaaatcaaaagcttccgtctccagatctgagccttcttccttcagctccaatgcttcttcctcttcctctgatggatcttacggaacctcaaacaggtccaaccgcgactccgatcagtgttctccctcaaaactccggcgatttttacactgagcttgttcaagcttttaaactgatcgatcgtgatgacgacggcgttgtttccagaggagatctcgcggcggtgatttgctggtttagtcatgaaccac

SEQ ID NO: 156779 - DNA, 432 bp, Arabidopsis thaliana columbia
  unsure (1)..(432): unsure at all n locations
gtttggaattccgtctagaccactcgtccaccagtttctccttccctactcatttttttcttttgtgtcttcatttcttgcggagtccttttactggtagctggtgattttcttacatcctccaagaaacgcagagtgtgttttgatccaattaatttcaaagtattcaagcttagtaagagacattaacttattcacaatgtggccaattnttttttgaactccaacatctacttctgtgttgggtctttccattggacatcacattatttgcatatgaaagtatggtcaatgtaaagttattatttatccattcacccctactacgttaaactctttcaattttacttttccatcttgaatatttatttatttctcattgtctgttttcttatattttttttcttgatattttgttgattactatttttt

SEQ ID NO: 156780 - DNA, 445 bp, Arabidopsis thaliana columbia
cgctgagctcactgctgccttagagcctatttaggataatgacgaggctgttaaagcctatggaattcactttgcaacagaaatgtgcaaaaagattttggcccatggaatcacttcccttcatctctacacattgaacgtggacaaatcagctattgggatattaatgaaccttggtctgattgatgagtaaaaatttctcgtctctaccttggagacgccctgcaaatgttttccgtactaaggaagatgttcgcccaattttctgggcaaaccgtccaaagagctacatatctagaacaaagggctggaatgacttcccacatggacgttggggtgattcacacagtgcagcatacagtacactttcggattatcagtttgcgcgcccaaaaagacgtgacaagaagcttcagcaagaatgggtcgtcccactgaaaagcat

SEQ ID NO: 156781 - DNA, 438 bp, Arabidopsis thaliana columbia
gtggtctaggaacgactgcaacaaaggttttaggaggttggaaaattaatggacaaaagcgttggattgtaaacagcacctttgcagatctgttgatcatctttgcgaggaatacaacaactaaccaaatcaacggattcatagtcaagaaagatgcgcctggcctaaaggctactaagatcccaaataaaaaggtttacgtatgttcaaaatggagatattctactacagaatgtctttgttccagatgaggatcggttacctggggtaaattcttttcaggacaccagcaaggttctggctgtctcacgtgtaatggtggcctggcaaccaatcggcatatcaatgggaatctacgatatgtgccacaggtatttgaaggagaggtaacagtttggagcaccgttggctgctttccagttaaaccaacagaagctt

SEQ ID NO: 156782 - DNA, 370 bp, Arabidopsis thaliana columbia
cgcgtccggattaatagtgaaagtatgtggagttgtgctatattttaatctatttggtacagcaatgggaggttctattgcatcagctgtaggtttgttatcaatccaaaggacaagttgccaacagattaatggaccaaatgatccttgtcatgttaatggaaatgtttacatgattgcgtttgtttttgtacaaatcaattctctcagatcctgattttgatcagttatggtggctttccattgtcgctgcggtcatgtcttttgcttattctgccattggacttgtccttagtgtctttaaagtggtagagaacatagaaatttaaggtagtctcactggagtttcttttgggacagtgacactgat

SEQ ID NO: 156783 - DNA, 418 bp, Arabidopsis thaliana columbia
gcgttcgctctgacagctctgttcatagtgacatgattttttggccattcaagattcaatccggaggtgccgatattccaatgttggacggcgaattcaagggtgaagagaaagagttctcagctgaggagatttcttccatggttcttattaagaagcgtgagattgctgatgcttaccttgttgtcacaatcaatacatccttgttacgttccagcttactttaactactctcatcgtctggctacaaaggatgcttgtgtcatcgctggtttgtacgttatgcgaattatcaacgagcctacagtcggcgttattgcctactgtcttgacaaaaaggctaccatcgttggagagaagaaagttcttattcttaatctaggtggtggcacttttgatgtctctttttttaccatta

SEQ ID NO: 156784 - DNA, 357 bp, Arabidopsis thaliana columbia
gtattccattcccgacccacgcgtcctgtaccttcttctctttatgataattttcttttaatctctccaagctcttttctaaggaaactatttatccttacaggggtgcttccatctacttcttacaactctcccttcttcaccaccaactctagatctcctgtattgaacaacaactccttcataacctttttacccatatgtcctatccttcttaggattacctattttttagtagctttccatatttgacagtgaacatattccatagctcttttttcattccttattaccattgcttatattttcttatttgtcactcttgatatctctatccttacttgtgctttctttatt

SEQ ID NO: 156785 - DNA, 430 bp, Arabidopsis thaliana columbia
aaaaaactatctgcaattggtggtgatgaaggaactgcatgggacgacggtgcgtacgatggtgtcaagaaggtgtacgtaggacaaggccaagatgggatatcagccgttaagtttgagtacaacaaaggcgcggagaatatcgtaggaggtgaacatggaaagcctactttactcggattcgaggagttgagattgactatcaagtgaatacatcaccgcagttgaaggcacctatgataaaatctttgggagtgatggcctaatcataactatgcttaggttcaagactaataaacaaacgtctgctccctttggacttgaagctggcacagccttcgaacttaaagaggaagggcacatgatcgttggcttccatggaaaagccagtgagttgctttatcagtttggagtccattgtttgccactc

SEQ ID NO: 156786 - DNA, 272 bp, Arabidopsis thaliana columbia
gtagccgcaagactcctttcagattcttacttgcagctatgggtaaagagaagtttcacattaacattgtggtcattggtcatgttgattctggaaaatcgaccacaactggtcacttgatctataagcttggtggtattgacaagcgtgtcatcgagaggttcgagaaggaggctgctgagatgaacaaaggtccttctagacgcatgggtgttggacaaacttatagccgagcgtgagcgtggtattaccatcgtttttgctctatggaa

SEQ ID NO: 156787 - DNA, 165 bp, Arabidopsis thaliana columbia
caatatcttccaagacccaaccatcggtgtgagggggcgagatgatgggattgagttcctgggtctttaccgagtttcacaggctcgtcttctctgaccttatagtttttgttgcgccactctggattgctgtggctgccggagttttggttggttgggtatggt

SEQ ID NO: 156788 - DNA, 415 bp, Arabidopsis thaliana columbia
aaacagagatgggtttggttacagaggaggtgtgagctaaagcagagatgtacaccggagatgagatatgtagagagaagacaaagtgtttcctcaaggaaatatctatgcccaatggtttattaccattgaaggatatagaagaggttgggtatgacagagagtcaggtgttgtatggctgaagcagaagagagcatcactacaagttcacagagatagataagcttgtctcctatggaaccgaagtcacagccattgttgagaccgggaaaatcaagaagctcactggagtcaaagccaaggaacttcttatttgggtcactatcaatgagatctataccgaggaaccccctaccaagatcacgttcaagacaccgaccacactgtccaagactttcccggtcacagctttta

SEQ ID NO: 156789 - DNA, 305 bp, Arabidopsis thaliana columbia
tcgctgtgaacgaaagatgcaagtagtttccatgtttttagttcaacggcctctcgtcggaggagcttctatctattcatctggttctctcatatcgctctactgagtctctaatcacctgaatgggactgataatagtcgctattcgtcttccctcgctactaaaggcgtgggtcacctctctcgcaagggactggtgggagccttccgtaagtggcattgtagctacagtattttgagccacaggatttctggttctgtatcttgtgctgttgttagctaaaatgggatcacatgtgcttagt

SEQ ID NO: 156790 - DNA, 350 bp, Arabidopsis thaliana columbia
tctctctctctctaaacccattaaagttatttagctcctcatagattctcgagaagaacacttccatggcgactaaagtatatatcgtgtactactctatgtatggtcatgttgagaaattggctgaagaaataaggaaaggagctgcttctgttgaaggtgttgaagctaaactatggcaggtaccaagacgcttcacaagaggcactctctaagatgagcgcaccaccaaagtgtgaatccccaatcataaccccgaatgagctagctgaagctgatgggtttgtctttggtttcccaacaagatttggtatgatggctgctcagttcaaagtccttttggatgcaac

SEQ ID NO: 156791 - DNA, 368 bp, Arabidopsis thaliana columbia
ttctaaacacataacaatatggcttttttaacaaaagttctctctttacttctcttaggtgtcgtcgtgtcattaggcggcggtgatgagtccatcatcaacgaccatctccaacttccatcggacggctagtggagatccgatgaagaagtgaggtccatctacttacaatggtccgcagtacacggaaaactaacataacaacaacggtttcatcaacgaccaatacaaatgattcaatattttcaaagacaacttaagattcatcgatctacacatcgatatcaactagtacgctacttacaagcttggtctcaccaaatttaccgttcttctctaatcgatgagttccgcatagttgttccttg

SEQ ID NO: 156792 - DNA, 408 bp, Arabidopsis thaliana columbia
gttgaaggaagtgaaagggaaagacttttctgttctaattgctgctggaagggagaaggtagcttcagtaccatcaggaggtggtggtggttttgcggtttcttttttttcttcttttgtgtttgttttttgtcctttttctttttttttctttatttttttttttattttgtattttttatttgctcctttttttcctatatatttcctcttcttttccttatgtttagtgattcttctgttcattgtgtatccttccttttttttttttttcttttcttttcttttctttttttctttatgtcttctttccttttcctttcttttattctttttttttatttatttttatttcttttttttttttctttatttctttttatattttttctttatttttattttttt

SEQ ID NO: 156793 - DNA, 389 bp, Arabidopsis thaliana columbia
cgcattgtctctctccagacgaaaaatgggtgctttcaggtttcaccagtaccaggttgggggaagagctctcccgacagagaaggatgtgcagcctaagatttacaggatgaagctctgggctacgaacgaggttcgtgccaagtccaagttctggtatttcttgaggaagctcaagaaggtgaagaagagaatggacagatctcgccatcaacgagatctatgagaagaacccaacaacgatcaagaacttcggtatttggttgaggtaccagagtagaactgggtaccacaacatgtacaaggagtaccgtgacaccactcttaacggagctgttgagcagatgtacactgagatggcattccgtcaccgcgtcagatatccttgc

SEQ ID NO: 156794 - DNA, 444 bp, Arabidopsis thaliana columbia
cgcgtccggcaagaccctgatagcaaagttgcttgttttgatattcaccaagaccaacatggtcatgggtgggtgttagatcaccaccgggggttctattgactaccagaagattgtccgtgacacttgccgttccattggattcatctctgacgatgttggtcttgatgctgacaaatgcaaagttcttgttaacattgtcaacagatccagacattgctcaaggtgttcacggtcacttcaccaaacgttctgaatacattggagctggtgaccaatgacacatgtttggttatgccactgatgaaacccctgagctcattcctttgagtcatgttcttgcaaccaagattggtgctcgtcttactgaagtcatgtagaatggaacttgccgttggttaagaccagatggcaagacccaagttacttttttgtcttcaatga

SEQ ID NO: 156795 - DNA, 415 bp, Arabidopsis thaliana columbia
gacgaggccacggtaaagagattgtgtttgtaaaggaaccatcacgggcaagttagggccaattctatgtggttcaggcgtgtaagaacaaaggagtgcagccattgctcgacgctgtggtcgattatctgccttcgcccgttgaagtcccgccgttgaatggaacagatcctgagaacccggaaattacattatacggaaccagatgatgacgtgccatttgctgggctagcattcaagatcatgagtgatccttttgtgggttctcttacatttgtgagggtttactcagggaaaatctcagctggttcttacgtgtcgaatgctaacaaaggaaagaaggagagaattggatagactcttggttaatgctcgcaaacagcagagaagatgttaaagtggttttgacaggtgt

SEQ ID NO: 156796 - DNA, 436 bp, Arabidopsis thaliana columbia
gtggtttgctccaagaatgggctatgctttcttctctgccccagctgaagaagcggcggtttctgcattgaagagaggacttgaggctctgaacacacatctcgcctccaacactttccttgttggacactctgtcacccttgctgatattgtcacaatctgcatcttgaacttgggatttgccaccggatgaccaagaatttacctctgcattccctcatgttgagagatacttctggacaatggttaaccagccagaattcaagaaggtgttgggtgatgccaaacaaaccgaagctgtccctccagttcctactaagaaagctccacagcctgcttagcccaaggaggagcccaagaaggcagtccctgtagcagatgcaccaaagcctgctgaggaggaggaagcaccaaatcctaaagccaagaatcctct

SEQ ID NO: 156797 - DNA, 417 bp, Arabidopsis thaliana columbia
gtttgcgtctcgcttcatcttcaacctcatacccaatttgtctactaaaccctggaaagaaccttaatttcccaatccggaaccatagaatccctaaaacttcgaaacccttttgcgttaggtcttcaatgagcttgtctaaaccacccagacaaaccttatctagtaactgggatgtatctagcttctccttgattccgttgtcaatctccttcaagactcccaagtttcgaagaactcgataccaccaacatgttgctccgtcaaagaatcgtctttttgggttctcaggttgatgatatgacggcggatttggttataagtcagctattgttactagatgctgaggactcagaaagagacattacgctttttatcaattcacccgggggatctatttctgctgggatgggaata

SEQ ID NO: 156798 - DNA, 444 bp, Arabidopsis thaliana columbia
attttgaaaagttgctacaaaatgtcaaagaggaaacggaacagaaaatctcagaagctgcgagcaaggcaataagccagagactgcagaagctgcaaaccaggtttgacagatgtgtcaaagagaagcaatttcttgaagatttgaacgaaaatcttgtgaaaaataaggacgtatggagcaccaagattacgaaatgaaagaagggagaagaaggcagttcgggcaaaggatgaaaagattcagggcttagaagaacagcttggaaacctaatggcccaaatggatggtgagagtgaagtctcagagacgaaagaggtccaggacgccactgtctcgaccaccaatacctcttcttctggggcagggaatgttatacatgcaaataaaaagaagagttacagaagaaagggttagatcaagattcaaactctaccaaatctc

SEQ ID NO: 156799 - DNA, 348 bp, Arabidopsis thaliana columbia
caaaaacgtcttatggtttagctctcaaatttctccttcgattccatcttcctccggcttcaagtcgccggatcttcttgatttccgattcacttggctttcctcttctcttccttttaacacacgacgacgcttcatagttttttgttgtgattcaggaagaggtatgtaattcaggattttccggtgatttggtgggaactttggagaaatttcgagcttagtagtattcgtaggaaagttttcttcttttatgatttgtagtttttgtggattaatggttgaaggtgagatatggggctctgatggatttgaaaagattttgtatcttcgtggttaatgagatcg

SEQ ID NO: 156800 - DNA, 422 bp, Arabidopsis thaliana columbia
gtggatgaagattattgattgcagcttataggaagctgctctttttgttttgaacaatgttgctaacttttcagattcttataattaatcagtcttatgatgagaagttggttcttgattacatactacaatcaagaagtaaacagtttatgcaatcttgtgacggttcttgtgttcaaagagtagatactgttcttcaaggggaggttaacagaggacaattgacggggtttttaatcgttgttgtattgctcgaataaacggaatcatggaaaggtataagattttggaagagcttggtgatggtacttgtggtagtgtatataaagcagtaaatttggaaacatatgatgttgttgctgttaagaagatgaagagaaagttttatttattggtagagtgtgtgattctgcgagaagttt

SEQ ID NO: 156801 - DNA, 297 bp, Arabidopsis thaliana columbia
atcagcttttgcaaagatagttcactccatctctagctcagaaatatgaagaacgggaccgtctaaatggtgttagagatggtcaaggtcacttccataaattacttggtagcaggttcggatgggcgtgtatcatctgttaagcttgcttatgggtcttctattgaggctgtcactgctgttttttgatttgagtcttttacttcttttggtccattattatctttgttttcatacatttcatttgtaattttttattctcttttgcttttttatgtcttgttctttctatatttt

SEQ ID NO: 156802 - DNA, 342 bp, Arabidopsis thaliana columbia
tcgcgatggattaagatcaaaccctattgttgtttaattgctaggaccaacaggggccgtggctacatcaatcaaagcatttaaatctataggttttaatgtaagcaccatggttgcacttattgttggtggccacactgtctgtgttgcacattgtattctttttctggatttgtttatggttcctatatgttcattttcttttttctttttttttgtttgtcttgtctttttctattcgtctcattagattctatgtacctttatttgtcttcttttgttggttttgtcttttttttgtttgttgtttttttgttattttcatatcttttatttttttta

SEQ ID NO: 156803 - DNA, 436 bp, Arabidopsis thaliana columbia
cggacgcgtggggagaaaacttcgtctctcttctctgcttcgccctctcatttcctgtgagagaaaggcggagtctctctccagttattttgctcatccatcgattcttagagttcaaaatggttgatcaagttcagcaccccactattgcgcagaaagctgccgggcagttcatgcgttcaagtgtttccaggacgttcaaggggttaccagaggccttctatgtatcaaagacatgcaacctacggaaactactccaatgctgcatttcaatttcctccgacatcccggatgttggcaacaactgcttctcccgtgtttgtccaaaccccaagagagaaggggttcactaactttgcccttgactttctgatgggaggtgtttctgctgccgtcttcaagactgctgctgctcctattgaacgtgtttagcttt

SEQ ID NO: 156804 - DNA, 441 bp, Arabidopsis thaliana columbia
gccctttctgaaggaaactttgatgaagcaattgagcatttaactcgggcaataacggggaagccgacttcagctattatgtatggaaacagagctagtgtctacattaagttgaagaagccaaacgctgctattcgagatgcaaacgcagcattggagattaaccctgattctgccaagggatacaagtccgaggtatggctgtgccatgcttggagaatgggcagaggctgcaaaagaccttcaccttgcatctacgatagactatgatgaggaaattagtgctgttctcaaaaaggttgaacctaatgcacataagcttgaggagcaccgtagaaagtatgacagattacgtaaggaaagagaggacaaaaaggctgaacgggatagattacgtcgccgtgctgaagcacaggctgcctatgataaagctaagaaaga

SEQ ID NO: 156805 - DNA, 372 bp, Arabidopsis thaliana columbia
atagtattgagactgttatgagtgctcatttgtttgatggtaacatatctattcccgggggagattaaaatatgcctggggcggttattgctttgggaaggcttaacagaccagggattatggtttatggtggaaccattaagcctggccatttttaagacaagacatatgacattgtatctgctttccaggttatggagatttgttagtggctccataagtgatgaacagagaaagactgtcctccatcattcatgatctggagcttgagcctgtggtggcatgtacacagcgaatacaatggcttctgctatcgtagcaatgggaatgttcctttcttacagttcttcaatacctgctgatgacccattg

SEQ ID NO: 156806 - DNA, 366 bp, Arabidopsis thaliana columbia
ggaaaagtgaaacattggatcactttcaatgtgccatgggttttctcgcacgctggctatgaggtatgcaaaaaggcacgagggcgttgctcttcttacgtcaatgctaaatgccaagacggacgatcaggatacgaggcttaccttgtcactcacaatctccttatctctcacgcagaagcagttgaagctaccggaaatgcaaaagtgttaaggtgggaagatcggaattgcacatagtcctgctttggtcgaaacacatgactcttgctgattcacaagacggtgcgtccatcgaccgagcacttgactttattttgggatggcatctagacacaactacatctggagagtatccacacatca

SEQ ID NO: 156807 - DNA, 281 bp, Arabidopsis thaliana columbia
gggggacgccacgcgttcggaccaaatagagttagttatggcgaagatcaatcctcaagcattgttgcagcaaatcaggaagaataaaggaccgtctgggataaacataaccaacatcgtcatttacactttggctgtgcttttgcttgtctttgttctcttctctgcttacagacgttggactcacagatctgagatcccaacgcacaatgtatgatcagtttttaggatgcatccttccctggaatgaataatgttgatctttcactggttgctacctt

SEQ ID NO: 156808 - DNA, 461 bp, Arabidopsis thaliana columbia
  unsure (1)..(461): unsure at all n locations
cccggcccgacccacgcgtccgcgctcatcaacctcaacaatctctctcctttctctctctgatatagaagaatctccatggtctttaatttctctccatttctctttctctcttccttcaaagttttctcttttcttgatgggtttaagagagtaaagatcatcaagtactatgcattaaattgagaagttattaaaaatttcgaaagtnataaagattgttgtgatgaagagattaagtagttcagattcagtgggtggtctcatctctttatgtcctacaacttccacagatgagcagagtccgaggagatacggtgggagagagtttcagtcgatgcttgaaggatacgaggaagaagaagaagctatagttgaagaaagaggacacgtgggcttgtcggagaagaagagaaggttaagcattaaccaagttaaagctttggagaagaattttgagt

SEQ ID NO: 156809 - DNA, 435 bp, Arabidopsis thaliana columbia
gcgtccgcggacgcgtgggcatgaccaaattctccgtgccaatcagagactcccacgtggcatttgtggcgtttttccccgttggcgctgatgccggtcctctcttagccgtcactcgccgtctcgccgccgcttctccctccaccatcttttctttcttcaacaccgcaagatcaaacgcgtcgttgttctcctctgacatcccgagaactcaaggtccacgacgtctctgacggtgttccggaaggaaccatgctcgggaatccactggagatggtcgagctgtttctcgtagcggctccacgtattttccggagcgaaatcgcggcggcagagatagaagttggaaagaaagtgacatgcatgctaacagatgccttcttctggttcgcatcgttcatagcggctgagctgaacgcgacttgtgttgccttt

SEQ ID NO: 156810 - DNA, 446 bp, Arabidopsis thaliana columbia
gcgtccgcttcgtttcatcgatgaacataacaccaataacctcagttataaacttggtttaacccggtgggctgatttaaccaatgaggagtaccgatctatgtaccttggtgctaaaccgaccaagaaggttttgaaaaccagtgatcggtatcaggcgcgtgttggtgacgcgcttcctgattcggttgactggagaaagaaggtgcctcgctgatgttaaagatcaaggaagctgtgggagttgttgggcattctcaactattggtgcagtggaaggaataaacaagattgtgacaggagatttaatatctctgtctgaacaagaattggttgattgtgacacatcttataaccaaggatgtaatggtggtttaatggactatgcgtttgagtttattatcaaaaatggtggtattgataccgaatcggattattcttacaag

SEQ ID NO: 156811 - DNA, 418 bp, Arabidopsis thaliana columbia
acgcggtattcaatattttcagtttgattttttcaagaacggacaacccgaacaagcaggaggtctttttaccaaaaggggagttctcccatcttatccgtttagtattaaccattcatacgtacatttagtttctgttaaaaggttgttataatccttaaaagtttcactcaatgaatttagtatatcttctaaagaagacttctatgtcatttgtatccgatgtgggtactcacttcactcttcatattaaattacaataagatcattggctttcatgattctgtctagagtctatcttaatttttttaggggctactttactccatttacttcttcaacttccgttgactccttccaagcagtttacttcattttgttattatttctatactatttgcttttttttcttactttt

SEQ ID NO: 156812 - DNA, 423 bp, Arabidopsis thaliana columbia
tgatattctcaaggttcatgccggcatttttttttcgacaatgatgtttcacttgaggtgagagcatattagaacacctgtatttatcttaccatatctcgctaacctctttaatgatgctgctatattgtccgtatagctatcacggacatctatatcatctaaagatactgattacttcattttttagaattgtttttttcattaaatgtacatatatttccgtttactgtttccataatctttatttcttaccttttattttattctttcatatattttttcatattattttttttcttggtggggggggtgtggttcaactttttatttttattttcttatttatttatttattaatttattttttttttcatcttattttcttttttcttttttttacttacttataatctcttttat

SEQ ID NO: 156813 - DNA, 165 bp, Arabidopsis thaliana columbia
aaaaacttgacactttttctgagagatttctaccgggcgtgagcggcgctcgctcctaacgttttttcatcttctttttctgcgacctcaagctctagcttcccttcttcagatctcaaagtaacaaaaatcggttcattgaggttattgaatcgtaccaatgtc

SEQ ID NO: 156814 - DNA, 373 bp, Arabidopsis thaliana columbia
ttctctttttttctccgcggaaggaatcttttcttctggttgcgttggagtccgtccgaaggcaaatgataagagagagatggcggaagagaataaagctccaatcagtgtctggactaccgtgaagcccttcgtcaatggcggtgcctctggtatgctcgctacttgcgttatccagccgatcgacatgattaaggtgaggattcaacttggtcagggatctgcagccagtttaaccaccaacatgcttaagaatgagggcgttggtgccttctacaagggattatctgctgggttgctgaggcaagcaacttacacgacagccccgtcttggatccattcaagttggttgactgcaaaggcaatttgagtc

SEQ ID NO: 156815 - DNA, 277 bp, Arabidopsis thaliana columbia
aaaactctgcacgaggcgttttccggttgtgttactatggtgtcctgtaaggttgctacggtccacatgggtcagcctagaggatatgggtttgtgcagtttgacactgaggattcagctaagaatgctattgagaagctgaatgggaaagtgttgaatgacaaacagatttttgttggaccttttcttcgtaaggaggaaagagagtctgctgctgataagatgaagtttactaatgtttatgtgaagaatctttcggaggcgactactgacgatg

SEQ ID NO: 156816 - DNA, 347 bp, Arabidopsis thaliana columbia
cagaattacaaacaaaaatggttttgcaaaagcttcctctcattgggctgcttttgctcctgaccatcgtcgcctctccagcaaatgcagatggacctgtttgcccgccgtcgaacaaactaagccgggcaagtttccctgaaggttttttatttggcacggctactgcggcataccaggtcgaaggtgcgattaatgaaacttgtcgtggaccagccttatgggacatctactgtagaagatatccagagaggtgcaataacgataacggcgatgtggccggtgatttcttccatcggtataaggaagatatccaacttatggaaaatcttaacacagaccccttt

SEQ ID NO: 156817 - DNA, 446 bp, Arabidopsis thaliana columbia
gtccgccgtatctgaaaaatggcgaacgaccaagttttttttctggattactggccaagcatgtgggggaggaggactaagatggctttggctgaaaaaggagtcaagtatgagtacatggaaacagatccatgggttaagactcctttactcatagagatgaacccgattcacaagaagattccggttctcatccacaacggtaaaccgatttgtgaatctcttattcagcttgagtacattgatgagggttggtccgatgcattcccaatcctttcctctgatccttaccaaaagtctcgagctagattttgggctgaattcatcgacaaaaagttttacgacccatcatggaaggtatgggcaacaatgggcgaagaacatgcagcagtgaagaaggaattgttggaacatttcaagacacttgagacagagctcggagacaa

SEQ ID NO: 156818 - DNA, 431 bp, Arabidopsis thaliana columbia
gcgtttttcttgaataaaatcagaattacaaacataaatggttttgcaaaagcttcctctcattgggctgcttttgctcctgaccatcgtcgcctctccagcaaatgcagatggacctgtttgcccgccgtcgaacaaactaagccgggcaagtttccctgaaggttttttatttggcacggctactgcggcataccatgtcgaaggtgcgattaatgaaacttgtcgtggaccagccttatgggacatctactgtagaagatattcaaagaggtgcaataacgataacggctattttgccgttgaattcttgcatcggtataaggaagatatccaccttatgaagaatctaaacacagacgcctttagaatgtctaatcgcatggccaagaatatctccttatgggagaaaggtgaaaggagtgagtcaa

SEQ ID NO: 156819 - DNA, 255 bp, Arabidopsis thaliana columbia
tccgttggggatttattcttttgttttatgggatcctctcagctcagctggtggggacgacgcttatctccgccgtctttgttcttaatcctcctgttaacgatctcttgaccggatctcctgggattcttctcttcctctgcatcgttcccttcatcttaatctggcctctgcacatttaccaccagatgcatcctgttaacctgatccttcttgccctcttcactggttcattgagtttcactggtggtgtca

SEQ ID NO: 156820 - DNA, 292 bp, Arabidopsis thaliana columbia
cggacgcgtgggtgaagctgttgtatcttctgttcgggttgtgtgtgaccggagcgtcagtgatacatccggtgatatgcagcgaaagcggtagagcgatagtctctcatcattctgtgctgatctttgaagctgtttcagcagataaaccaatggttcatcaagcaactcccggcgatattcaattcctgcttgaaggtaatgaggaagctcgagccaattttgaggatctatatgctgctgttatgcgtggataccacgaaagctgcctttcttaatatcgatcatctgt

SEQ ID NO: 156821 - DNA, 308 bp, Arabidopsis thaliana columbia
ctcgacttcggaatctttcaaagcttcttctatttttccagaggcaatcatggttaaagggccaggactctacactgaaatcggcaaaaaggccagagatcttctgtacagggattaccaaggagaccagaaattcagtgtcaccacttactcttcaactggtgttgcgatcactacaacgggaacaaacaaaggaagcttgtttttgggtgatgttgctacccaagtgaaaaacaacaacttcactgctgatgtcaaagtttccactgattcttttcttttgaccacctcttacctttgatgaggct

SEQ ID NO: 156822 - DNA, 411 bp, Arabidopsis thaliana columbia
tggaaacggcaagccctgatctcaatgaattcacccaattcgccgaaggtatcaaggccgggacaccggaggtcatgctcgcctacaatctctcgccgtccttcaactgggacgcttccggtatgacggatcagcagatggttgagttcattccgcggattgctaggctcggatattgttggcagttcataacgcttgcgggtttccatgcggatgctcttgtggttgatacatttgcaaaggattacgcttggcgcgggatgttggcttatgtggagaggattcaaatagatgagaggacccatggggtttacacttttgcttaccatgaatggtccggtgcttattactatgatccttttcttaagaccgttcaaaggggtatcttcttcacttcagccatgggaaaag

SEQ ID NO: 156823 - DNA, 395 bp, Arabidopsis thaliana columbia
gttttatcgagagagcaaggagagcgatttctcaaatcgactttaatggctgacgacgatgggaatgaagtcgatgacttgggatatgaagatgagccagcagagcctgagatcgaagaaggagtagaggaagatgctgatatcaaggagaacgatgatgttaatgttgaccctttggaaacagaagataaggttgaaacagaacctgtgcaacgcccacgtaaaacctctaagtttatgactaagtatgaacgtgcacgtatcctcggcactcgtgctttgcagattagcattaatgctcctgttatggttgagttggaaggtgagactgatccaattgagattgctattaaagagcttaggcaaaggaagattccttttaccatttaacgttt

SEQ ID NO: 156824 - DNA, 354 bp, Arabidopsis thaliana columbia
tatccttcctcttcctccgccagattcttttcttgcgaagatgagcaacgacaaggacaagatgaacatgtccgatctgtccaccgctcttaacgaggaggatcgtgccgggcttgttaatgctcttaagaacaagttgcagaatttggctggacaacactctgatgtccttgaaaacttgactccaccagtcaggaagcgtgtcgagtttctaagagagattcagaaccaatatgatgagatggaagcaaaattctttgaggagagagcagctcttgaagctaaatatcaaaagttatagcaggcgttatataccaagcgatatgagaatgggaatggtggggtcgaagttga

SEQ ID NO: 156825 - DNA, 430 bp, Arabidopsis thaliana columbia
cacaaaccacacaaaaacagaactcaccgttttcttcttcttcttcttctcttataagccgggccgtttcttgtttcgtctcgctaatctcaccggcgatttcacaacaggcttgcaaatcacagaacttgaactccgccggtccgttcgatagttgcgaagaccttccggtactcaattcctacctccattacacctacaattcctcaaattcatctctctccgtcgctttcgtcgccactccatctcaagccaacggtggctgggtcgcttgggctattaaccctacggggactaagatggctggttctcaagccttcctcgcttacagatccggcggtggtgcggctccggtcgtgaagacgtacaacattagcagctacagcagtctcgtcgaaggtaaacttgcttttgatttttggaatctacg

SEQ ID NO: 156826 - DNA, 443 bp, Arabidopsis thaliana columbia
  unsure (1)..(443): unsure at all n locations
gcgtccggagatgtgcaagatgctgatattcaattggttggtacatgagctttcagacttggatgtggctgggattaagccatgggtcatgcatgctgaantcgccgagaaattcatgtgttgtgagaacagagtgatacttgctggtgatgctgctcaccggttcccgcctgctggaggttttggaatgaacactggaattcaggatgctcataatcttgcatggaaaatagcagctcttgttcagggttctgcaaactcttcaattcttaaaacttatgaaacagaacgtaagccgattgcccttttcaatacttgactcagtgttcaaaacttcagagcagctatgtcagttccttcagcgctaggccttgacccaacagttgcaaactcagtgcataggtttattaacaaaacagttgggtcgattcttccaactgggc

SEQ ID NO: 156827 - DNA, 444 bp, Arabidopsis thaliana columbia
cgtccggctttcttcaccattcaggatcagagattctttacctgagaagacactcaatataattaagcgtgagagtgaggctgttagagaacccataacgactatcaagggaaaatctgaggagaagaagcgtaactttgttgagacagtggagcttcagattggtctgaagaactatgacccacaaaaggataagcgtttcagtggatctgtgaagctcccacatattcctcgcccaaaaatgaagatctgtatgcttggagatgctcagcatgttgaggaggcagagaaaatgggacttattaacatggatgttgaggctttgaaaaagcttaacaagaacaagaagcttgttaagaagcttgctaagtcttaccatgctttttttggcttctgagtctgtcattaagcatatttctcggcttcttggttccggtcttaaca

SEQ ID NO: 156828 - DNA, 291 bp, Arabidopsis thaliana columbia
cggaaggtcatttaacaaaagcggttagacgttttctttacaccgtcgttctattcgatgagggggggggagcccatccagttgtgttcaacatgatgcttcaaatccttgaagatggtagattaacagacagcaaaggaagaacagttgacttcaaaaacacacttctcatcatgacatcaaacgtcggaagcagcgtgattgagaaaggaggaagacgtatcggattcgacttagactacgacgagaaagacagcagttacaacagaattaagagccttgtaacatatg

SEQ ID NO: 156829 - DNA, 375 bp, Arabidopsis thaliana columbia
gaaattctatatattattattgtttgagcagtaaactaagacaaaattaagacttttgctctgttcttcttctccactgggtcgatctttacgaggttcacttgtacggattcactttaacaacagattcgccatggccgccgccgtcgcagcaccgagactcatctccttgaaagccgtcgcgaagctaggtttccgtgagatctctcaaatccgacaattggctcctctttactctgcgatacctcatttcggaatgctgcgatgtatatcgcggcagccgttttcttacctctggtgtgaaagctgaagcttcttgtctgtacaatcaccagtggatgttattcaaaaagttgtatctccagtggtcgttat

SEQ ID NO: 156830 - DNA, 298 bp, Arabidopsis thaliana columbia
gacccagcgtccgatctctcagccggaccggttgcgaaagtcttttaatcgagtctaagagaatgtcgacagtggagagctcgcttgcagctacgctgttatgatcctcaggatgagggtattgctatcacggctgacaaaatcccactttggtgaaagctgctggtgttccattgagtcatactggccaatgctattcgccaagatggctgagaaacgtaatgtcactgatctcattatgaaccgtggtgctggtggtggaatgtttttccccttatgaatctattttttctttatt

SEQ ID NO: 156831 - DNA, 283 bp, Arabidopsis thaliana columbia
ccgtttcattagaagctcaaatttcaaatctctcttccttatcacaatgtcttcctctatcggtcccctcctcacaaccgccatctccttcgcaatcctcctcttctccaccatctccacagcgtcgacaattccaaacatccaccgtccattcaacaaaatctacgccttcggagattctttcaccgacaccggaaactcacgctccggctaatgaccatccggattcggacacttgtcaagtcctccatacggcatgactttctttcgactaccaacaaac

SEQ ID NO: 156832 - DNA, 294 bp, Arabidopsis thaliana columbia
gcgtccgatgggagttccgtcgttctacaaatggcttatccataggtatccattgactatacaaggagttgttgaataagagccgctcgaatttaatggcttctgcttcactattccaatcgattcaagcaaacctaatcctaatgtttacgagtatgacaatctttatctctacatgaacggattcattcattcatttttccatccttaaaacaaaccttctccaactacatttacggaagttttctaatgtatgttctattacacttgataggcctttttgtttatggttct

SEQ ID NO: 156833 - DNA, 101 bp, Arabidopsis thaliana columbia
tatccttcctcttcctccgccagattcttttcttgcgaagatgagcaacgactacgacatggtgaacatgtacgatctctccacctctcttaactaggagg

SEQ ID NO: 156834 - DNA, 310 bp, Arabidopsis thaliana columbia
tttccggggcggacggaggcgtccggttgtgttacaatgcgaacactgtggtttttttctgaagaagccaaaggtcccgtctgaggggatgatttgcagagccaacaagttatcctgcatcgattgctgagaaatgtttgggagagatactgtgcaaggacataaccaatgcattactgaagctgagaagtatggtccaaaaaggcagtcaaagtcagcttatggaacacctgcaaagccaaaggacatcttttagcaagagcctgactttgatattaatgtcggcttattaaacccgaattcatggttt

SEQ ID NO: 156835 - DNA, 202 bp, Arabidopsis thaliana columbia
cgcgtccgtcaatcttcactcttctctttgctctctctttctcaacgcggttcatatccgagtttggtgtagtcaagctccctgaaaaaagccctttactctcgcttaccaactttgctccagcatggcaggatctgcaccagaaggcacacagtttgatgcacgttagcttgaccagaaacctaatgaagtacttgaggga

SEQ ID NO: 156836 - DNA, 465 bp, Arabidopsis thaliana columbia
  unsure (1)..(465): unsure at all n locations
tttccgggnnggacccaggcgtccgaaaaaaaggagctcccttttctatctctaagggaaattgggtagcaggatgttgtttagttggacaggtcctcgacttttctccgccgtttctcgcaaaccttcctcttctttctctccttctcctccgtcgccgtcttcgaggactcaatggactcagctcagccctggaaaatcgatttctttgagaagaagagtcttcttgttgcctgctaaagccacaacagagcaatcatgtccagtaggaggagacaacgtcgatagcaatgttttgccctattgtagcatcaacaaggctgagaagaaaacaattggtgaaatggaacaagagtttctccaagcgttgcaatctttctattatgatggcaaagcgatcatgtctaatgaagagtttgataaccttaaagaagagttaatgtgggaaggaagcagtgttgtgat

SEQ ID NO: 156837 - DNA, 294 bp, Arabidopsis thaliana columbia
gcagaaaggaattgagttgatactaatcacttaaatagtgaaagctgatctctctgccaagagtcttgtcagtgcaactggggatgtcttcaagtatcagacgctcataattgcaactggttctactgttctcagattgactgattttggagtaaaaggtgcagactctaagaatatcctctatctgagagagattgatgatgccgacaaattggttgaagcaattaaagctaagaaaggtggaaaggctgtagttgttggcggaggttacattggtcttgagcttaatgcagt

SEQ ID NO: 156838 - DNA, 242 bp, Arabidopsis thaliana columbia
agaaaatcaaagcagcagttatggcctacgtttcaacaaagcaccccatggaagatgagtgtgagaatacggaggcgtctagtttgttgtcgaagctagagacagacgtggagatcaaggctttggctgataagtttcaccacatgttcgctgggaaaccacaccatgtcttcaatgcaagttcagtcaacattcatggatgtgatctgcacgaaggcgactgtagcacagtcgactttatc

SEQ ID NO: 156839 - DNA, 307 bp, Arabidopsis thaliana columbia
ggaccgacgcgtccgtaagaatgtctcacaggaagtttgagcacctttttcatggttctcttggtttccttccaaggaagagagctaaccgtcacagaggaaaggtgaaggcgttccctaaggatgaccaaaccaagccttgcaagttcacagctttcatgggttacaaagctggtctgactcacattgtcagagaagtggagaaacctggatccaagcttcacaagaaggagacatgtgaggctgttaccattatttgaacacctgctatggtggttgttggagtttttccccttataatttctcc

SEQ ID NO: 156840 - DNA, 464 bp, Arabidopsis thaliana columbia
tttccgggttgggccgacgcgtccgggctgctgagatgaacaagaggtccttcaagtacgcatgggtgttggacaaacttaagggggagcgtgagcgtggtattaccatcgatattgctctatggaagttcgagaccaccaagtactactgcacagtcattgatgccccaggacatcgtgatttcatcaagaacatgattactggtacctcccaggctgattgtgctgttcttatcattgactccaccactggaggttttgaggctggtatctctaaggatggtcagacccgtgagcacgctcttcttgctttcaccctttgtgtcaagcagatgatttgcttgtttaacaagatggattccaccacccccaaatactccaaggctaggtacgatgaaatcatcaaggaggggtctttatacctgaagaaggtcgatacaaccctgacaaaaatccatttgtgc

SEQ ID NO: 156841 - DNA, 355 bp, Arabidopsis thaliana columbia
ggcgtccgctctctcttctctctctctgaagcgatgtcttcgacttttcgagctccggcggaagccggtgcggggtttacggcggatcagaaaatcaaacttgggaggctcgacgctctgagatcctctcattctgttttcttaggaagatatggacgcggcggcgtcccggttcctccttccgcttcttcgtcgagttcttcgcctattcaagccgtctccactcctgcgaagcctgagactgcgaccaagcggagcaaagtcgaaattatcaaggagaagagtaatttcataaggtatcctttgaacgaggagcttttaacagaggctccaaatgtcaacgagtcagccgtgc

SEQ ID NO: 156842 - DNA, 356 bp, Arabidopsis thaliana columbia
gggtccgaaagaacagtgacaggcaaaattcctcatgttagtctattcggaagacctcacaaaaaaaacgtgatgtggttctcagagaagaaaaattccacgtatgtacccctaaaacacctagcgttcgtgagaattgcaacgatccatattctggcttccgtctcaaatctctacgaatacgctaaacaaaactccggtcctttcaaatccgccgtggaaaaggtcgataggaccgtcaccaccgttgtcacccctttttatcataatatcaaagatgttcctgtttctctcctggtctttttaaatcacaaggggggttgaagtttcttcacaattttttttttcattgctcc

SEQ ID NO: 156843 - DNA, 349 bp, Arabidopsis thaliana columbia
cccacgcgtccggacaagggtaccgttgagctagctggaaccgacggtgagaccaccactgaaggtcttgacggtctcggtgacagatgcaagaagtactacgaagctggtgctcgtttcgccaagtggcgtgcagtcctcaagatcggagagaacgagccatctgagcattccattcatgagaacgcttacggattagctagatacgctgttatctgccaagagaacggtcttgtaccaattgtcgagcctgagatcctagtcgatggatcccatgacatccagaagtgtgctgccgtgactgagcgtgtccttgcagcttgctacaaggctcttagcgaccaccacg

SEQ ID NO: 156844 - DNA, 439 bp, Arabidopsis thaliana columbia
aaaaacacttatcgtttcgtctcttctctgttccattgttgaagatgtcgaagagagagacgaaggagccaaaggttgtgactgtgactcttggaccttctgttcgtgaaggagagcaagtttttggtgttgttcacatctttgcatctttcaatgacactttcattcatgtgactgatctctccggtagagaaactctcgtccgcatcaccggtggcatgaaggtgaaggctgaccgtgatgagtcctctccttatgctgctatgcttgcagctcaagatgttgctcaaagatgcaaggagcttggcatcactgtcatgcacgtgaagctccgtgctactgtgggtaacaaaaccaatacttcaggtcctggtgctcagtctgctcttatagcccttgcttgttctgtcatgaagattggtcgtattgaggatgtgac

SEQ ID NO: 156845 - DNA, 384 bp, Arabidopsis thaliana columbia
cagattccgattatcctcatctccctaacatcaagatccaccatccttcatctcctggtgggtctcaccaccactcttcctccactccttccgccgctactcctaccccaaccgccggtgctcgccgtaagatcggagtcgccgttgacctttccgaagaaagcgctttcgctgttcgctgggctgtcgatcattacatccgtcccggagacgccgtcgtcattctccacgtttctccaacctccgttctcttcggcgccgattggggacctctccctctccaaactcctccttctccttgcggcggtaccgatcccggagctcaacctaagcctaatcaggaagatttcgatgcggttacttcttccaaaggagcggatctag

SEQ ID NO: 156846 - DNA, 468 bp, Arabidopsis thaliana columbia
  unsure (1)..(468): unsure at all n locations
ttttgaatggttggaccgaggcgtccgcccacgcgtccgccaaattctcttctctctgaatcaatccaatcatggttgagccggcgagcacggttggaattccggtgaaccacatcccattgttgaaggatgagctcgatatcgtgatccccacgatccgtaacctcgatttcctggagatgtggagngcctttcttcagccttaccatctgattatcgtccaagatggagatccatcgaagaccattgctgtccctgaagggttcgattacgaactctacaacaggaacgacatcaaccgtatccttggtcctaaagcttcctgcatttcctttaaggactctgcttgtcgttgcttctgctacatggtctccaagaagaagtacatcttcactattgatgacgattgcttcgttgctaaggatccatctggaaaagctgtgaacgctcttgagcaacacatcaaga

SEQ ID NO: 156847 - DNA, 348 bp, Arabidopsis thaliana columbia
acaacttccaacgatcacacacaaatggctttgacgtcagcagctaccggatttatggtgacggccaacgtcccggcggcaataggcggtggttcttcaaagagcaccaccattgtgtctttcttgccgatgagaagcttcggttcaaggctagtagtcagagcggctgaagatacaccttcggcatccgcctcgtcggatagttcttccaccaccgctgctgctgctccggcgaaagttccggccgctaatgctaaacctccttcaattggcccaaagagaggatccaaggtactgatggatacataagctttgattcatggttattctttaaaattttgagtttat

SEQ ID NO: 156848 - DNA, 396 bp, Arabidopsis thaliana columbia
gaagcggtatacttttaagtttcgtacgagttgtaacccctatgccacataatggttgtagaccccctaaaaaaagacgtgtatagaactaaaaaaaggctaaaagggtttcaagagaaataaacgattcaacgatctgatcaaataaaattactatggttcgagagaaagtcaaagtatctactcggacactacagtggaagtgtgttgaatcaaaaagagacagtaagcgtctttattatggacgctttattctgtctccacttatgaaaggccaatccgacacaatatgcattgcgatgcgaagagctttacttgtccaaatttaaagaacatgttttacacgtgcaaaatttgattacattccacatgactattctaacatagcatgttttc

SEQ ID NO: 156849 - DNA, 293 bp, Arabidopsis thaliana columbia
aagatgcggtcgcagctactctgatccagtctaacattgacgcgagggaccaccagttcaggctgggtgccactaacccgagccttataggcaagagtttgtcctcgcttctggctgagggaatgactgtaggcaagaatggtccggcgttgcaatccattgaagatcagtggcttggctcggccggtcttatgactttctcggaagctgtcgtgcaggccatcaagcgcatgaacctcaacgagaacgagaagaatcagagactgagcgagtggttaacccattgcaagggt

SEQ ID NO: 156850 - DNA, 348 bp, Arabidopsis thaliana columbia
cgtccgcaaaagatgtctaaccctatagttttcttcttcattattctcagcggtactcccatcggacggagggagatggagctttttgctgatacaaccccaaacacggcggataatttccttgctctctgtaccggcgagaaaggaatgggaaatctaggtaagccactttacttcaaaggatcgatctttcaccgtgtgattcccggattcatgtgacaaggaggtgatttcaccgccaagaacggaacccgtagtgattcgatctaccttgctaagttcaaggacgagaactttatcaataagcatacaggagctgggtttttcttaatgtctaactttggtcct

SEQ ID NO: 156851 - DNA, 259 bp, Arabidopsis thaliana columbia
taagaagcaaagatgttcagaaaccaatacttcacatatgttacgacatggagtccaacagggcgggtattccaagtggaatacgccatggaagcagtgaagcaaggatctgcagcaattggactcagatctcgttctcatgtcgttctcgcttgtgttaacaaagctcaatcggagctttcttcgcatcagaggaagatctttaaagtcgatgaccatatcggtgttgcaatcgctggtctcacagtcgacggtcgtg

SEQ ID NO: 156852 - DNA, 364 bp, Arabidopsis thaliana columbia
gcgtccgtttgccattgaccgtgtatggaccgagtcttccattcccaacgtccgtagcccaccaccggtgggggatgattcctctcagctggacaagaacctcaaatccggctacaaagctccaacacctgggaaattcactgaggctctccgtctcttcctttctatcctgcacaccatccctctagtggtagtcgagacaagaagagaagtggatgaggtcaaggaattaatcgttatcgttaaagaatatgtccttggtcttcaaatggagctcaagaggagagagatgaaagatgatcccgtgaggcagcaagagctcgctgcttacttcactcacttgaaccttcaaaacacctactta

SEQ ID NO: 156853 - DNA, 222 bp, Arabidopsis thaliana columbia
cacgcatcatcagtccaaagataccgcaatttttactaagcgaaacaaaaggaaaggtttgggatggttttaaattccgtttggaatgacccgcttactataagtaaagcagataatcttgcagctcaaatagcaagagacttccatatcggatggtttattcacccaccagtatatggagagtttccaaagacattgcaaatacattgtgaaagagaggct

SEQ ID NO: 156854 - DNA, 389 bp, Arabidopsis thaliana columbia
agatgaagttcaacgttgcgaatccatctactggatgccagaagaagctcgagatcgacgaggaccagaaactacgtgcgttttacgacaagagaatctctcaagaagtcagtggagatgctttgggcgaggagttcaaaggatacgttttcaagatcaagggtggttgcgataagcaaggtttcccaatgaagcaaggagttttgactccaggccgtgttcgccttttgcttcaccgaggaactccttgctttaaaggacatggaaggagaactggtgagaggagaagaaagtctgttcgtggttgcatttggagccctgatctctctggttctgaccttgtcattgggaaagaaggggagaacgattttccttggctttccgattct

SEQ ID NO: 156855 - DNA, 369 bp, Arabidopsis thaliana columbia
gatttcgtgaagaagtcagtgtttatgatatacattggtgcaaacgattacttgaatttcggcaagaacaaccctaacgccgatgcatctactcaacaagcttttgtcacttccgtgaccaacaagttaaagaacgatatcagcttgttgtatttatcaggagcgagtaaatttgtgatccaaaccctagctccattgggttgcttacccatcgtcagacaagaattcaacaccgggatggatcaatgctatgagaaacttaacgattttggcttaacaacacaacgtaaaaaattgaccgattggtggacgaaattgctagaacagcttctgcatcaagcctcttttcaatttaaccgtctttggttt

SEQ ID NO: 156856 - DNA, 364 bp, Arabidopsis thaliana columbia
cgtccgttcgagagcaaaattctctcaagctttagccttgtttgcctctgcttctcccctctctggggggaggctttaaatcccttcctgtgtgcgtctccagacccgcttccgtttccgtcttacctccttccctctccttcaaacttcactccgaccacctcgtctctatcttcgcttcctccgcccttaaatgctcatcccccgccgggttcccgtcgggtttccgtagaaacgttgctgtatcttcggattttgaggtggaggaagatgatatgttcgctgacggtgacgattcatcgcctgtggagcgtggcgtgctgctttcttgacctaagctctttgttggtacccttcttttaac

SEQ ID NO: 156857 - DNA, 296 bp, Arabidopsis thaliana columbia
tagggttagacctcacggagaagcaccctttcatcagagaccaaatcaatttcctcctccgtgctcaccaaaacccttttgcctccgtcgcctccgtttaatccgtacaacattttcaccctcctcctccgccgtttttttaccaacagcagaatttgcattccggcgtcaatgttccttctattgctaaagggcttttcacacttatccatccttcgcaattctcttgttcttctcaatcacaacaatatcctttacatttcgctcttcagcctccttatcactcttatgaccta

SEQ ID NO: 156858 - DNA, 376 bp, Arabidopsis thaliana columbia
cagcgatcgtttattgcttgaagacggcttctttttctcacaaacctcatctctgctaatcaaaaggtctctggttgcaaatgaggagtttcaacacattcttcgtgtgttgaatactaatgttgatggtaagcagaagattatgtttgcccttacctctatcaaaggtattggtaggcgattggctaacattgtctgcaagaaggctgatgtcgacatgaacaaaagggctggtgagttatctgctgctgagattgataacctcatgacaatcgttgcaaacccacgtcagttcaagatcccagactggttcttgaacaggcataaagattacaaagatggcaagtattctcaagttgtcttcaatgctcttgac

SEQ ID NO: 156859 - DNA, 206 bp, Arabidopsis thaliana columbia
cgatttttaggaataagcctcttgtggtttttggttttggggattcacctatgaatgaagcgaggtttcttactaagtatggatctaaggtttatattattcataggagggatacgtttagggcgtctaagattatgcatcagatatctttgtctaaccctaagattgaaagtgatttggaacttctgccgtggtttgaagccgta

SEQ ID NO: 156860 - DNA, 442 bp, Arabidopsis thaliana columbia
  unsure (1)..(442): unsure at all n locations
tcttcttcttcttcttcttttcagacatgactcttccttatcgtttctcttccgntagaagccactgagttctacttaagacttctcatctctgcacacccagatcagctcttggttgttgtttctctcccaaggaatcccctttcttcaggaagaacactgcccaattcctttctcctcagaaacacacttctcttcctctgaaacttgtctgccctttagctagtttctcttcttatgcggattctgagggagaagagcaacaccatgctgatcaacccgttcagaacccttacgaatgtggtgccggtgaaacgaatcagatgggaaaggttatgcagaagctactggagacttttctggaatggctccagccctttacatttctttcacaacagctagggcaattttcttaggcaatgccttttttcttttacccttt

SEQ ID NO: 156861 - DNA, 377 bp, Arabidopsis thaliana columbia
gcggatcactgccctcgaataccaccgtctcgttttgctcatcaccatctcgattattccggagagtcactggagttagttttgccaccacttctgatcagcaaaagatggataaaaagcctgaaaatccaaacgagaaaaccggtgacgtgatgtcgcattcttatggagaagggtacgcaacaaggtctgacgaagaagggtttggaggaatctatggaggaaatcaaacacttcataaggaaaacgagatccatgataatcacccttgttactacaaaacgcaaggtagcttatccaatgagaaggtgaaagcaaggaaccatacacaattccactgcttaagaaaaaatgatgatttagtgtctttgttcttt

SEQ ID NO: 156862 - DNA, 395 bp, Arabidopsis thaliana columbia
caaatctgagccgtccggtgtgatataagtttttttaaagagagagagagcggttcgtttggctgcaacggcaccaagtctttgacaatggctgaagatgaaatagtagtcgaagaagagcaatcacagccacaggagattactccagttccaccatcttcttcgtcttcgccttcgttagtggtggaagacgacgatgagatgaagctcaagcacttggaattcattcaagtcgcggcggtttacttcggcgcctgtttctcgaccctctacgagttggctaaagacaacgctggtccacttaaactgggggtcgataacattgaaaattgggttcgaaccgtgcttgctccattatacgaaaaattccacgtcgtttcttttaaactttttct

SEQ ID NO: 156863 - DNA, 373 bp, Arabidopsis thaliana columbia
atttctctctctctctctcgcgatcaaaattgttaaacaatctcttagaagaaatgcgaaattctctctgtttcaattgcgattcaaatttcaaaaactgacaatggggaaaccaacggggaagaagaagaataataattataccgagatgccaccgactgaatcttccaccaccggcggaggtaagaccggcaaaagcttcgatcgatcagcaaccaaatcattcgacgacgacatgacgattctcataatcgagcattggagctaaaagaagaaggcaacaaattattccataaacgcgattgcgaaggaggcatgtttaagtatgataaaacccgtaagctattacctagagatcatgggagatgtatct

SEQ ID NO: 156864 - DNA, 303 bp, Arabidopsis thaliana columbia
tccgtttcacattacttgctgatttggattttttttatttgcggttttctcttccaagcaacaagggggtgggcaaacagagaaatggctgtttactgtttcgacactttggtctttcactacaacaatgaatagactccaccacctgcctttgaagaggccaatcatccattgtttgttacctggaagaaaatagtgaatggtggagagcctcggttgcgtggatgtattggtacactggaagcaccccgcttgatcagtggcttcaagattatgccttggcaagtgccttgagggatcgca

SEQ ID NO: 156865 - DNA, 276 bp, Arabidopsis thaliana columbia
  unsure (1)..(276): unsure at all n locations
gnngagctnnatgccgagaaggtttacaacttaggtctctgngccatcgctcaggctgaagctttacgttacaagcttcttggtggtctcactgttcgtagggcttgctatggtgtgttgaggattgttatggagagtggttcttatggattcttgtttatttttagttattagcttttttctgttattatccatttcttatgttgtactctattagttttttttgtttatttttttaatttttttcttttgtttattatttttttttcatttttt

SEQ ID NO: 156866 - DNA, 324 bp, Arabidopsis thaliana columbia
acgtccatatttgcagagctcgagattctccttttctatacaactctcatctgtaatcgatacggatggcagcttcatcagcttgtcttgtgggaaatggtttgtcagtgaacacaacaaccaaacagaggttaagtaaacatttttccggcagacagacaagcttttcttcagtgattaggacatctaaggttaatgtagtgaaggcttctttggatgggaagaagaagcaagaaggaagaagagattttctcaaaatcttgttaggaaatgctggggtcggtttggttgcaagtgggaaaagcaaatgctgatgaacaaggt

SEQ ID NO: 156867 - DNA, 372 bp, Arabidopsis thaliana columbia
tcgaccacgcgtccgatttcatcatcttctacaatgatcccatactctatcattcgaagaagcgtcgatcgcattagggcgaaacctcacatggctagagactctctttttcgattactccttcaccaaatccgattactacctctactgccacaacattctctttctcttcctcaatcttctctctcgttcctctccctctcgttttcatcgaatcatctcaatccaacctaaatttgtttcaatcgctacaaaaatcaaccaaaagtgaaaaactcatttctcatcgattgttcaaaagttacaaatacgtcattaaaatgttcatcctcgtcgtttgtccattaacaactcgttcttatccttcgattc

SEQ ID NO: 156868 - DNA, 318 bp, Arabidopsis thaliana columbia
  unsure (1)..(318): unsure at all n locations
gaattccgcctacgacccacgctacacacaaatgttaaattgggaggatttttnttttagtctggggataatatgatgggggagggtccccttgctcaacgatcttcaaataaccactatgacgaggctacggaggatagctgcagccgcaagctcgaagctgctgtttcgaaatgggatgagactgatgctatagtcgtctttggtgccaagcttacgggaagcgaagtacttgataaagattgcagtaaaaaaaatgtttgctgtaggcacagcttctctaggacatgtaccattgctggatgtgggcccgttttc

SEQ ID NO: 156869 - DNA, 283 bp, Arabidopsis thaliana columbia
gatagcatactccaaatgctgaaaaaagcctgatgttattagcattcctaccaagactgggcccgagtctccattcaggatttcttggcccactattggccaaaccacctgagcactaggtccaatgtgagtaggatcactcagccatgcttcataattggaaaaacgagcaccatggaaatacatgccactcatccaaagaaagatgatagagagttggccgaaatgggcactaaatacttttcgagaggattcctcccaatcactggtatgactatcaaaa

SEQ ID NO: 156870 - DNA, 327 bp, Arabidopsis thaliana columbia
ggaatggagaagaagctcctttcctacagactccatcattaacaacatcctcttaagcttctgcgattctctccgtttgtcggaagatttcacgacgattcttcaatccttatccgaaccggagaaatcatgtcggacgctttgatcaatggattggctggagctggtggtgggatcattgctcagcttctcacttatcctcttcaaactgtaaatacgcgccaacagacggagcgggatcttgagagggagaagaggaaacttggaactatcgtacacatgtgtcaggttgtcaaacaagaaggatgggagaggttattttgtgga

SEQ ID NO: 156871 - DNA, 434 bp, Arabidopsis thaliana columbia
atctcctcttgcaaaccaacgtaaaacacttactaagagatcaatatggctggagtgatgaagttggcatgcatggtcttggcttgcatgattgtggccggtccaatcacagcgaacgcgcttatgagttgtggcaccgtcaacggcaacctggcagggtgcattgcctacttgacccgaggtgctccacttacccaagggtgctgcaacggcgttactaaccttaaaaacatggccagtacaaccccagaccgtcagcaagcttgccgttgccttcaatctgccgctaaagccgttggtcccggtctcaacactgcccgtgcagctggacttcctagcgcatgcaaagtcaatattccttacaaaatcagcgccagcaccaactgcaacaccgtgaggtgatgagcgacggtcaaatgaagctactagcggat

SEQ ID NO: 156872 - DNA, 446 bp, Arabidopsis thaliana columbia
cgtccgctaaaacctatcattcgtctctttttcagttctccatgggaaagtctttttttgggaccaggcttgttgcagagattaatgccactaatcctttgaagaaaggcaagagagagcctgaagatgatattgacaccaaagtgagtcttaagaagcagaagaaagacgtgattgctgctgtccagaatgaaaaagctgtgaagaaggttcctaagaaggttgagagctctgatgattcagattctgaatctgaggaagaggagatggctaataaagtcccagccaataatgctgcttcatgcagtgatgagtgatctgatgactcttctttagatgatgaacctgcacccaataaggccgtagctgctactaacggaactgttgcaaagaagtctaaggttgactcatcattatctgtgatgatttttcagacgaggaagttg

SEQ ID NO: 156873 - DNA, 438 bp, Arabidopsis thaliana columbia
tgaaaactccttacaacactcttggtggattagctaacaccgtagctgacggttacagcagaggaactgctctcggagctgagattattggaactttcgtccttgtttacaccgttttctctgcaactgaccctaagagaagcgctcgtgactctcacatccccgttttggctccacttccaattggatttgctgtgttcatggtgcatttggctactatccccattactggaactggtatcaacccagctagaagctttggtgctgctgttatctacaacaacgagaaggcgtgggatgaccaatggatcttttgggttggtccgttcttgggagcactagctgcagcagcttaccaccaatacatattgagagcttcagcaattaaagccttgtgctcgttccgaaacaacgcaaccaattaatgaaggctttttt

SEQ ID NO: 156874 - DNA, 439 bp, Arabidopsis thaliana columbia
ctggtttattgttggtggcggtgataacattagtgggtcatcggagagtgttgtactaaacatgtcggctcttgcatggtcggtcgttgcttcagttcaaggacgtgtacctcttgctagcgagggattaagtttagtggtgagttcatacaatggtgaagatgtactagtcgcttttggtggatacaatggacgttacaataacgaaattaatcttcttaaaccaagccacaaatcaacattgcaaacaaagactctggaagcgcctttgccaggtagtctttctgctgttaataatgccacaaccagagacattgagtctgaggttgaggtgagccaagaaggcagggtacgggaaattgtcatggacaatgttaaccctggatcaaaggttgaaggaaacagcgaacgcattattgcgactattaaatctgagaag

SEQ ID NO: 156875 - DNA, 451 bp, Arabidopsis thaliana columbia
gcgcgaacataaaacactacctaagagatcaatttggctgtagtgatgaagttggcatgctgggtcttgggctgcatgattgtggccggtccaatcacatcgaacgctgcgctaagctgtggctcagttaacagcaacttggcagcgtgcattggctacgtgctccaaggtggtgtcattcccccagcgtgttgctccggcgttaaaaacctcaacagcatagccaagacgaccccagaccgtcagcaagcttgcaattgcattcaaggtgccgctagagccttaggctctggtctcaacgctggccgtgcagctggaattcctaaggcatgtggagtcaatattccttacaaaatcagcaccagcaccaactgcaaaaccgtgaggtgatgagctagcaacggtgagatgatgctactaccggaagtttcgaatccttattatataatgg

SEQ ID NO: 156876 - DNA, 295 bp, Arabidopsis thaliana columbia
ttttgaccgacgcgtgcgtgattctttcgtctctaatgaccaatttttcttttttatcaacgaggaaaactcgcgagtgggctcatgaatagatgctaaaatctcactggagaaatagataatactgctgtgaaatgcaacacacagctagaaattattctgttcatgctaacaataaaggtatccaaactagcgaggactacagattctacactttatcatactaattccctgagtacagcaacaaggataagaccttacactttcaattctctgtcaagcataagcataagct

SEQ ID NO: 156877 - DNA, 253 bp, Arabidopsis thaliana columbia
tgaaaactccttacaacactcttgtttgatttatctaacaccgtatctgacggttacagcggaggaacttctctgggagctgaaattattggaactttcgtacttgtttacacacgtttctctgcaactaagggagttcttactcgcattttgagaccagcacgttatgctagttctagtgctgttgcgaatacaatttcttcaacgccggcttacttgagcttgttaagtggtggttctcgtgctgcgctta

SEQ ID NO: 156878 - DNA, 435 bp, Arabidopsis thaliana columbia
aaagtatctaaaattaagctttgtgtttgatatcgaaatcgaatcgagaagaagagaatgggaatggaagctgatgacgatttctacagcggcaccgaaaactactccgattacgccgactccgacgaagatgacgccgacggcgagtacgagttcgttgacgacgctgctgatgattccgatgaccttatcttccgtcgccgccagcaaaattatagtgtgttaagcgaagcagatatttgtaagcttcaagaagatgatatttcaaggatttctactgttttgtccatttcgaggaattcatctgcgatcctgcttcgtcactacaattggtgtgtgagcagagttcatgatgaatggtttgctgatgaggaaaaggttcgagatgctgttggtttattagagaaacctgttgttgatttcccaactgatgga

SEQ ID NO: 156879 - DNA, 361 bp, Arabidopsis thaliana columbia
gaatggggggtcgaccacgcgtccgcaccattactcaacttacgttttttatatttcttttaaatggactaaagcagaggggatatgtgttcattggccacaccttttcaacaactagcacatgaggcatggaggatttaccaacactatcttgacatgactacacctgatgcaaattacagatggattgcaactcttgtcgtcgctcttatctactgtttgagggtctactatattcatgttttctacataatctactatattcttgtaatctaccttatcaatctgcttatcggattcttgtgctcttttgattatcctgaagctgtgggggtttctgattctcctcttctgtctacta

SEQ ID NO: 156880 - DNA, 441 bp, Arabidopsis thaliana columbia
gcggaagaacaatggcttcctctatgctctctttcgctactatggttgcctctccggctcagggcactatggtcgctcctttcaacggacttaagtcctccgctgccttcccagccacccgcaaggctaacaacgacattacttccatcacaagcaacggcggaagagttaactgcatgcaggtgtggcctccgattggaaagaagaagtttgagactctctcttaccttcctgaccttaccgattccgaattggctaaggaagttgactaccttatccgcaacaagtggattccttgtgttgaattcgagttggagcacggatttgtgtaccgtgagcacggttactcacccggatactatgatggacggtactggacaatgtggaagcttcccttgttcggttgcaccgactccgctcaagtgttgaaggaagtggaag

SEQ ID NO: 156881 - DNA, 390 bp, Arabidopsis thaliana columbia
ctccaccgaaaaatatccccgggacgggtgaatggggggatctgaaatatatatcaaacgcaaacccagtacactaccagtaccagtgactgatccatcaaagcttccaaagtgaaactacgacggatccagcacctgtcaggcttctggagaagacagtgaactcattctataccctcaggcaatattcaaggatcccttcaggaaaggcaacaacatcctgttgatgtgtgatgcttacacaccagctgttgatcctattccaaccagacaagaggcacaactctgctaatatcttcaaccaccccgacgttgccaaggatgagccttggtatgggattgagcaagaatacactttgatgcaaaaggatgtgaactggccaattggtt

SEQ ID NO: 156882 - DNA, 365 bp, Arabidopsis thaliana columbia
cggaatgatgtggcatgtgtatactcatgcttccattattgacttcttcttcaaaacgatgtatctcttagattttgtgttcttgaggaacaaaagaaaagaagataaagaacaacaacaaaaaaaaggtcatatcttttgtttagtatcataggacttcttgactaagagctaactgatgataattcatgtaatcaatcccatttaaccggatgcaacacaaaatctgctccggtaactcctccggtttattcccctgaattgtgagtccaacatcaagaacacagttctttagcctgtctaaaaatgcttcaaatcctttccgcgatatataactgaatctatgcatatcaatatcaatctca

SEQ ID NO: 156883 - DNA, 224 bp, Arabidopsis thaliana columbia
cctttttagccctcccctttttcctttataaatcagctctctctatttagggcggtttctttaaaaataagatccccacttcataaaaacccctaactttacttggaaaagttcttcacttatcatccttaaatcgttaacatccatgcctgatcaacaaaccctaaattcctttacttctcctcctactaaatccaatgatctatctcactcccactctactt

SEQ ID NO: 156884 - DNA, 426 bp, Arabidopsis thaliana columbia
ataaacctctctctatctggtggtgcgactccaaaaacaacaaagccttctcagtttcacagtttgggtaatcggagaatcacaaaaaaatgggtaccctaggacgagcaatttacactgtgggtaactggattcgtggaactggtcaagctcttgatcgcgttggttctcttcttcaaggaagtcaccgtatcgaggaacatctgtcgaggcatcggacgttgatgaatgtgtttgataaatcaccattggtggataaagatgtgtttgtggctccgagtgcttctgttattggtgatgttcagatcggaaaaggctcgtcgatttggtatggctgtgttcttcgaggcgatgtgaataacatcagtgttggatctgggacgaatatccaagataatacgcttgtacatgttgcaaagaccaaca

SEQ ID NO: 156885 - DNA, 444 bp, Arabidopsis thaliana columbia
  unsure (1)..(444): unsure at all n locations
cgtgaaaactccttacaacactcttggtggagtgtatgctatcttccgnagctgacggttacagcggaggaagtgctctcggagctgagattattggaactttcgtccttgtttacaccgttttctctgcaactgaccctaagagaagcgctcgtgactctcacatccccgttttggctccacttccaattggatttgctgtgttcatggtgcatttggctactatccccattactggaactggtatcaacccagctagaagctttggtgctgctgttatctacaacaacnagaaggcgtgggatgaccaatggatcttttgggttggtccgttcttgggagcactagctgcagcagcttaccaccaatacatattgagagcttcagcaattaaggccttgggctcgttccgaagcaacgcaaccaattaatgaaggctttttt

SEQ ID NO: 156886 - DNA, 443 bp, Arabidopsis thaliana columbia
gcgtgcgaaacttcatactggtgttaacaagctcgcttaccttgttggtgtcacacttgtaccaaaagggagaggtgttgttcttgagagcaagtattgatccccaagaattgttaatgatggtgtcactgttgcgagggaggtcgagttggaggacccggttgagaacattggtgcaaagcttgtaaggcaagcagctgcaaagaccaatgacttggctggtgacggtacaacaacatctgttgttcttgcacaaggttttattgctgagggtgtcaaggtggtggctgcaggtgcgaaccctgtattgatcactagggggattgataatactgcaaaggctttggttaacgagctgaaacttatgtctaaggaggttgaagacagtgtacttgctgatgtggcagctgttagtgcgggttataaccacgaagttggaagtt

SEQ ID NO: 156887 - DNA, 397 bp, Arabidopsis thaliana columbia
tctatcttatctacccgggcacgggtacacctctcagggcccgtgaaacctccattgttgaaccttcatcattgttcctagggtttccttccttcatcgacgaagacattgaagatctcttcgagttttcatcacctaatcctctcgatctattcgaaaccgtgacggatctggttaagattaagaaatctccgtcgtcttgcaagtacaaggtgattcgtcggagattagagccggagtatccattgaagtatctttgtgaccgtgtttctgatttggaatcaaagtttgatagattggttagtcctaagagtgataggaagtatacattgacgaaggagataaagggaagtggtgagaggaagtataaatgggaggcggagattcaaggaccgtt

SEQ ID NO: 156888 - DNA, 451 bp, Arabidopsis thaliana columbia
gggcggacgacgcgtccgagactggcttgcttagccgcggttatactcagttctcattcgctgcaaacatggggggaggggcgaagaagcatttgaagaggctcaatgctcctaagcattggatgcttgataaacttggtggtgcctttgcccccaagccgtcttctgggccacacaagtctagggagtgtttacccttggtccttatcatcaggaacaggttgaagtatgctctgacatacagagaagtgatttcgatcttgatgcaaaggcatattcaggttgatgggaaagtgaggactgacaagacttaccctgctggttggatggatgttgtgtctatccccaaaacaaatgagaacttccgtcttttgtatgacaccaagggacgtttccgtcttcactccatcaaggatgaggaggctaagttcaagctttgcaaagtgagatc

SEQ ID NO: 156889 - DNA, 476 bp, Arabidopsis thaliana columbia
  unsure (1)..(476): unsure at all n locations
ggaaacccggcggaccgcacgcgtccgctcttcttaatantcaatcatatatcaaattatttaaactcttcttgatcaatggcttcggcttctgctgctatgtctcttgaatccatctctatgacaactctcaacaatctctctcgtaatcatcaatctcaccgcagttctcttcttggtttctcaagatctttccaaaaccttggaatctcatctaacggtccagatttctcctcccgatcaagatctactacttccaagaacctcaacgttactcgagctttcttctggaattggggcaagaagacctaaaactccataccaagtgagagccaagaactaaacgtgtatgagctcaacgaatgagatagaaacagtccatcagttcttaaactcggcaagaaaccaacagtagcttgtctcggagatctcgttccattcacaaacaaactctacaccggctatctcaagaaacc

SEQ ID NO: 156890 - DNA, 277 bp, Arabidopsis thaliana columbia
gaaaggccgggcggacgcacgcgtccgcaacaatggccgtctcatcattccagtgccttaccatcttctcctcctcctcgggctccggctttcaatgccgttctgacccatatctcgtcggttctcccgtcggtggatcatctcgccgtcgtgtccatgcctccgccgggatttcttcctcattcaccggggacgctggattatcctccaggatcttaagatttcctcctaatttcgtccgtcagctgagcattaaagcccgtagaaactgtagcaa

SEQ ID NO: 156891 - DNA, 444 bp, Arabidopsis thaliana columbia
  unsure (1)..(444): unsure at all n locations
ggcggtcaacgattcccttttgcattanggttcaggttctcgatcgaattgattttgaaatgggttcgggttggggtgctttcgaggagaacgttgggcactgatatgcccgtcatggctcagattcggagtttgatggcggaattgacgaaccccatgtctctcgcccagggagtggtgcattggcagcctcctcaaaaggccttagagaaggtcaaggagcttgtctgggatcctatcattagttcttatggccccgatgaaggtcttcccgagttgagacaggctcttctcaaaaagctgcgtgaagaaaacaagctaaccaattcacaagtgatggttactgcaggtgccaatcaagcgtttgtgaaccttgttattacattatgtgatgctggtgattcggttgtcatgtttgagccatactacttcaactcctacatg

SEQ ID NO: 156892 - DNA, 330 bp, Arabidopsis thaliana columbia
  unsure (1)..(330): unsure at all n locations
tgattagaatgcattgataagcacactggggaaatcgcaaaaggaacatataaaattgtttaggaaagcaagcaaaagtttctttgttgaagatgaggaaagagcttttgagaaatgtcatgatcacttcttcagacacctcaagcttgagttctcccgcttcaatactgcggtggtgatgtgggcaatgcatccatggtagagagaggcagggtgggtgaagaaagcntttaataaaggataagaagcttacaacctcatcgttgaggtctcatgcacacgctctgctgaggatcttctttgtgcacgttaagcttaccactctctttt

SEQ ID NO: 156893 - DNA, 424 bp, Arabidopsis thaliana columbia
  unsure (1)..(424): unsure at all n locations
gcgtccgtaaaatggcctcaattacatcagttaccgtctccatcccttctttcaccttccgggagctgtccgtctgctcaaaacctaatacattatccaccatcagtagatccacttccgccaccagggcgccacctaagctcgctttgaagtcctctttgaaggatttcggtgtcatcgcagnggcaacagcagcttctatcgttttagctggaaatgcgatggccatggaggttcttttaggatccgacgacggttcccttgctttcgtaccatctgaattcacggtggctaaaggagagaagatcgtgggggggagcaactcatttttcccacataacgtggtgttcgacgaatactagatccctagtggtgtggacgcatgcaatatctctatggatgagacagcgcttctaaatggtgc

SEQ ID NO: 156894 - DNA, 441 bp, Arabidopsis thaliana columbia
  unsure (1)..(441): unsure at all n locations
cgtcgtgttcttcgttctctaattttttcctttttcttttttcttagatcccttgtanttgcgaaatggggcgataaaaatgtcgggtaaaggaaaaggaccagctatcggtatcgatcttggtaccacttactcttgcgtcggagtatggcaacacgaccgtgttgagatcattgctaatgatcaaggaaacagaaccacgccatcttacgttgctttcaccgactccgagaggttgatcggtgacgcagctaagaatcaggtcgccatgaaccccgttaacaccgttttctacgctaagaggttgatggggcgggggttctcttacagctctgttcagagtgacatgaaattgtggccattcaagattcaagccggacctgccgataagccaatgatctacgtcgaatacaagggtgaagagaaagagttcgcagctga

SEQ ID NO: 156895 - DNA, 312 bp, Arabidopsis thaliana columbia
  unsure (1)..(312): unsure at all n locations
gggggccgacccacgcgtacttttacctcatatttcaatgactttttattcttcatagcttcaatacttanctaatcctaggactattcatattcaatcatcttaccaacataaccaatatttcaactcttttatactaatcttatctctcaaaacttctgaagctttttatattctcaagcttatctcaacaacaatcctcttttctatttttcaatctctatatttaagacatttttattataatttttaacatacttttaataacactttttttcaagtgtcaaaaaaagttcttactaccttattcaa

SEQ ID NO: 156896 - DNA, 440 bp, Arabidopsis thaliana columbia
  unsure (1)..(440): unsure at all n locations
cgtccgtatctcttccccanatcctcctctttctttttcactcttttaacggacacttgggactgagctattcactcactgaaatcncctccggagctaaatcaatcaacaatgacgtcgacctacacgagattcgataccgtatttctcttttctaggttcgccggcgctaagtattcgccgntattgccgactccgtcgtttactttatctacttccggcattcatatcagaaccaaaccgaattctcgttttcactcgattatagcatcctcctcatcttcatctgtagtctccggaactgatggcagggggggtaaatcntttcctactaatcctattgaaggacaaaagactggtactagcggactccggaagaaggtgaaagttttcatggaagataattatttagccaactggattcatgcattgtttaattc

SEQ ID NO: 156897 - DNA, 310 bp, Arabidopsis thaliana columbia
cgacagaacctaatctttttttccaatcaatttctatattaaaaaagaaatggcaccaaacccggaagggtgcttttacatgaccgtcgttggcaaatccgccggtcgtttcgtgatggagctttacgccgacacaacaccagaaaccgccgagaatttcagagcactctgtaccggagagagaggaatcggtaaacaaggtaagccattacactacaaaggatcaagctttcaccgagtgattccgaaattcatgtgtcaaggaggtgatttcacagccgggaatggtacccgaggtgaatctatctat

SEQ ID NO: 156898 - DNA, 300 bp, Arabidopsis thaliana columbia
gcgaaaaaaaagagggaaaaaaaaaggaagttgtgtgaatccaaagggtggaaaccttttaagagggcaggaaaaaaggcggggggggtttccaaagccgaaaagaacccctaaagaagaggtttatgggtcctgtttcgatggagccgcttcctttaggttccagattcagacctaccgttgaagagctcgtcattcactacctccgtttcaagatcaacggacgtaactccgttgtccgtgtcatccctgttttcgatgtctgcaaatgggaaccttgggatcttcctgctttctcgt

SEQ ID NO: 156899 - DNA, 442 bp, Arabidopsis thaliana columbia
gcgtcctccaggttgaagattaatcggacataggattttagaagagtagaaaaaacgacaggaagagagaaacacagttgcaggagagaaagagatatggctgtccggataaacgcgatggcggtgacgtttgtggcgcacgcgctggcggtaatagcggcgattatggtactggtttggagtatcagttacagaggtggattggcctgggaagctactaacaagaatctcatcttcaatctgcatcctgttctgatgctcatcggatttataatcttgggaggagaagccatcataagttacaaatgggtggcgggggagaaaccagtgaagaagttgatccaccttatactccatgccattgctttggctcttgggatatttggcatctgtgcagcctttaagaaccacaatgtaagccatatccctaatctctacagtc

SEQ ID NO: 156900 - DNA, 444 bp, Arabidopsis thaliana columbia
  unsure (1)..(444): unsure at all n locations
gcgtccgctaatttcatagctcctaacaaagctatattatttccaatttataaaanttaaagccatgggtgcatctttctggggcccctctatgataatggaagaagaagggagattcgaagcggaggttgcggaagtgcagacttggtggagctcacagaggattaagctaacaaggcgcccttacactgcccgtgacgtggtggctctacgtggtcatctcaagcaaggctatgcttcgaacgagatggctaagaagctgtggagaacgctcaaaagccatcaagccaactttactatctctcgcacggggggagcgtgggaccctgttcatgttaccatgannnnnnaacatttggacaccatctatgtctctggttggcagtgctcgtccactcacacatccactaatgagcctggtcctgatcttgctgattatccgta

SEQ ID NO: 156901 - DNA, 430 bp, Arabidopsis thaliana columbia
  unsure (1)..(430): unsure at all n locations
gcgtactcccagaatgcacacattttatgtttccatgttttgaaaggccaatcatctatggcgttggggcactatcttacggttggtatancaccacttgtagtcatgatcttcatatggtgaaaattggattaagggttctcacacgtcccatgggtgaccgtttgcctcatatttaccgaacccttggctagaactacagcgaatgggttcttccttccatcatccatgaaaccctaaaagcagtggttgctcagtacaatgcaagccatctcattacccatatagaatcttttatctgagagaggcgggggagtgtttcatatctttcttttaactttgacatttctcttggatgatgtctccataacaactctgacattcttcaaataatttacctcaacttttcgggcataacaagtttcttttt

SEQ ID NO: 156902 - DNA, 323 bp, Arabidopsis thaliana columbia
  unsure (1)..(323): unsure at all n locations
cttttccttttcctnaattttccttttaacatcataatccatancttcggctgaggtctatttaatccttttataaatcttaaacccactcctcnacatcttttccgttttccaccaacattttctcgacatatacgacatcaaattgaacaatgcgattctcgcagaggacaaacatttgcccatgtacgatgaaatgagccataagttcaatgtttaatacattgctggaggtgctacccataactcaatcatagtggcccattggatgcttcaagtttccttttcaaccagttacatgggagtccattttaaatgacaaa

SEQ ID NO: 156903 - DNA, 389 bp, Arabidopsis thaliana columbia
tgcgcgcattttcttcatcctttttgcctaaattttccttgttgagcaccaatcattacccagggctgaggggactgagaaagcttttcttaaccaacccaaggtcttccttagctcgaagatatctgggaaaggaaagagacctggtaaaggtggaaaccgtttctggaagaacattggtttgggtttcaagactcctcgtgaagccattgatggagcttacattgacagtaaatgtccattcactggaaccgtttctatcagaggacgtatcttagctggtacttgccacagtgccaagatgcagagagcgatggtggttcgtaggaattaccttcactttgtgaagaagtatcaacgatttgagaagagacattccaacatccctg

SEQ ID NO: 156904 - DNA, 447 bp, Arabidopsis thaliana columbia
gacgcgtgcggtttggtttcaatgcaaaaactgtggagagtttctttttatgccaaaggtcccgtctcactggaaggggtgcatagccaacaagttatcttccatcgattgtggagaaatgtttgggagagatactgtgcaaggacataaccaatgcattactgaagctgagaagtatggtccaaaagggcagtcaaagtcagctaatggaacacctgcaaagccaaaggacatctctaagcaagagcctgactttgatattaatgtcggcttatcaaaccgatatccatggttttgcagtttatgtaacacataggctactagccagcagactttgcttgcccatgctgttgggaagaagcaccgaggaaaagctatagccttccatgctaggcaacaacaagaacaatccacgacttttgataacaaggatggaagtgaaaatgc

SEQ ID NO: 156905 - DNA, 371 bp, Arabidopsis thaliana columbia
  unsure (1)..(371): unsure at all n locations
tttcccacttatcnntctctctttcaacttctaaggacggcgctnaaccagggagcaaggggtgttttcttagaaaagatgatatcaagatggaagtcacaaagaagacgtacttcgaatctttcaccaaaagagtcggggaagatactattgaggaaatgaggaaaaccatacaaaccgaagaaaaaaatattcggaattgctatgaagaatcaactgaatggataccatctgaattattcgtagaccttatccttcaggattcgattttcattatggagttaattatcagacgtgggggggggggggggaatacattcagatgacataaatttaaactttgcaatcgttatgaatgatttactcttgct

SEQ ID NO: 156906 - DNA, 442 bp, Arabidopsis thaliana columbia
  unsure (1)..(442): unsure at all n locations
tttaagccatgtctccggctaaagttgattctaccaagaaggctgatcctaaggcgaagggcttgaatgcggcaaaggctgtgaantctggtcaagccttcaagaagaaggacaaaaagattaggaccaaggtcaccttccacaggccaaagactcttaccaagcctagaactggtaagtacccaaaaatcagcgctactccaaggaacaagttggatcactaccaaatccttaagtacccactcaccactgaatctgcgatgaagaagattgaagacaacaacactcttgttttcattgttgacattcgtgctgacaagaagaagattaaggatgctgttaagaagatgtatgacatccagaccaagaaagtgaacacactcatcaggcctgatggaaccaagaaggcttacgtgaggcttacaccagactatgatgcttt

SEQ ID NO: 156907 - DNA, 450 bp, Arabidopsis thaliana columbia
gaagaataacagataaaactctctgtgtgtgtgagtgagactcaaccatggcgtctttgggtcagcaattctcgggattgagatgttccccactctcttcttcttctaggttatcgaggagagcttcgaagaactttccccagaacaaatctgcctctgtttctccgactattgtcgccgcggttgcaatgtctagcggtcaaacaaaggagcgtcttgagctgaagaagatgttcgaagatgcttatgaacgatgtagaacttctcctatggaaggtgttgctttcaccgtcgacgatttcgctgctgctattgaacaatacgacttcaattccgaaatcggcactagggtaaaaggaacagtgttcaagactgatgcaaatggtgcattagttgacatttctgcaaagtcatcggcttacttgtcggtagaacaagcgtgtattcata

SEQ ID NO: 156908 - DNA, 260 bp, Arabidopsis thaliana columbia
ttacacacaaactcttaaacacacacaaaataaaaaaaacagacactaatacttcaataataatatcggtcttatatatcaattagtgttgtgtttatcttctttagatttagtctcctctacattaaaaaatctcagaaagacactatgacatttaaaatcgatcttcttatctccctttagagtaagatctctttctgctctctttatttccttttttctcaaattcttattttaaatgggaaagtcccataataaaa

SEQ ID NO: 156909 - DNA, 419 bp, Arabidopsis thaliana columbia
  unsure (1)..(419): unsure at all n locations
agtaggttcaaaattggagtttttttatgaaacgatcatatgataaaggggtaacgtggactgaaagagaacagcgggctcctgntattctcggtcctatcaaaaacaagcccattttgcttgaagacggtactctcctttgcggatcatctgttgagagttggaattcttggggagcatggatggaggtcacttcagatgcgggtagaacatggagaaagaaagggccaatatacattcaaggcaagagtcttagcgtgatccaaccagttccataccaaaccgcaactgggaacttacggattttactcatatcctttactggcatttacagaatctgtatctcaaagtctttggattgcggtgagaactggagtttgcagtaccaacgttctcccaaacccaaattcatgtattga

SEQ ID NO: 156910 - DNA, 322 bp, Arabidopsis thaliana columbia
gaattaccggccgaccaggcgtgcgattttgaaaccctaatttctcttcttttccccaataaaaaatgtctgaagttgagtaccggtgcgttgtcgtcggccttgcctgggccaccaatgattaagatcttcaaaggacgttctcacagttcgtcgacgttatcgattctaagatctttaacgaccgcgagagatttagatcaacttcattagcgttttaataacttaatggctgtgcaactattgaccaataaaattgatcaaataattatattggtgaagagatctcaagtgtttttagattatgattcttcatcttatt

SEQ ID NO: 156911 - DNA, 399 bp, Arabidopsis thaliana columbia
aagaaaaaaagcaaagaacacttgatctttttctagatagagatggaagggaaagaagaggatgttcgagtgggagctaacaggttcccggagaggcaaccgataggtacatcggctcatacggacaaagactacaaggagccaccaccagctccatttttcgagccaggcgagctgagttcgtggtccttctacagagccgtaatcgcctagttcatagccaccttcctgtttctatacataacagtattgacagtgatgggagtgaatagagcaccaaacatgtgtgcctctgttggaatccaaggctttgcttgggctatcggatgcatgatctttgcccttgtctactgtactgctggaatttatggtgggcacatatacccagcggttacattt

SEQ ID NO: 156912 - DNA, 434 bp, Arabidopsis thaliana columbia
atcgtcaagcacgccatggagattatccacctcttgtctgacttgaacccaattcaggtcatcattgacgccattgtcaacagtggtccacgtgaagatgctaccagaattggatctgctggtgttgttaggagacaagctgttgatatctctcctctaagacgtgttaaccaggctatcttcttgattaccactggtgctcgtgaagctgctttcagaaacatcaagactatagctgagtgccttgctgatgaattgatcaacgcagccaagggctcttccaacagctatgccatcaagaagaaggatgagattgaaagagttgccaaggctaatcgttaaggattttccctttgccctgtgcgttacaatctcgtatcaatgagtttaatgttttatcttcatttagattgaaatatgtatctcagatgttt

SEQ ID NO: 156913 - DNA, 439 bp, Arabidopsis thaliana columbia
ttctctattcgtcgtcgacctattttcctcagccatggccgtcgggaaaaacaagagaatctctaagggtaggaagggaggaaagaagaaggctgttgatcctttctccaagaaagattggtatgatgttaaggctccttcaatcttcactcacaggaatgttggaaagacacttgtttccagaactcagggtaccaaaattgcctcagaaggcttgaaacacagagtttttgaggtttctcttgctgatcttcaaggtgatgaggataacgcttacaggaagatccgtctcagagctgaagatgtccagggcaggaacgttctgtgccaattctggggcatggacttcaccaccgataaacttaagtcattggttaagaagtggcagactttgattgaggctcatgttgatgttaaaaccaccgacagttacactctc

SEQ ID NO: 156914 - DNA, 447 bp, Arabidopsis thaliana columbia
atcattttctcttgttgttcctgatcgcgtttctctagcgaaaaaaatggcgtcgtttgatgaagcaccaccaggaaacgccaaggccggtgagaagatcttcaggaccaagtgtgctcagtgtcacaccgtcgaagcaggcgccggtcacaaacaaggacccaatctaaacggtctatttggaagacaatctggtacaactgctggttactcttactctgctgctaacaagaacaaagctgtggaatgggaagagaaggccttgtacgattacttgctcaaccccaagaagtacataccaggtaccaagatggtgttccctgtgctaaagaagccgcaagaccgtgctgatctcatcgcctacttgaaggaatctactgcgcctaaatgaatctgatggtggattgattctgagttgtttagtctctcttagatgaggctttttta

SEQ ID NO: 156915 - DNA, 396 bp, Arabidopsis thaliana columbia
tgttaacaatggaggaagaagagaaccacatctattgaaagaacatgttttggctgaacgaaaacgtcgacaaaagctcaacgagcgtttgattgctctctctgctcttcttcctggcctcaaaaagacggacaaggcaacagttcttgaagatgccatcaaacatttgaaacaacttcaagagcgggtaaagaagctggaggaggagcgagtggtgaccaagaaaatggatcaatcaattatattggtgaagagatctcaagtgtatttagatgatgattcttcatcttattcttctacttgctctgctgcgtctcctctgtcttctttttcggacgaagtttcgatcttcaaacaaacaatgcctatgatcgaaacccgagtttcaaacagaga

SEQ ID NO: 156916 - DNA, 271 bp, Arabidopsis thaliana columbia
ctcatgtgctgaagaaaaacaggtgtatattgtctattttggagaacataaaggggatggggcctttcatgaaatggaagaacatcatcattcttatcttcaatcggttaaagaatccgaagaagacgctagagcatcgctcttgtatagctacaaacatagcatcaatggcttcgcggctgagctaacccctgaccaagcctctaaactagaaaaattagcagaggttgtttcagtattcaagagccatccaagaaaaatatgaagcaca

SEQ ID NO: 156917 - DNA, 438 bp, Arabidopsis thaliana columbia
cacgtattggtcgtagatagatcttaatcgataaccatctaggccttgatctaaccattgaatataaactttatttccttcttcttttcgatctcaattgttccgaccaaacaagatgaagagatcacgtggaagctccgattctttatccggtttcttaccaattcgccattctacaacagacaaacaaataagcccaagaccaacaactaccggctttctctattccggcgccggagactactcccagatgtttgacgcattagaagacgacggaagtctagaggacctcggcggcgttggacacgcgtcttctacggcggcggagaaaaaacggcggttgggtgtagagcaagtgaaagcgttagagaagaatttcgagattgataacaagttagagccagagaggaaagtgaagctggctcaagagcttgggtt

SEQ ID NO: 156918 - DNA, 434 bp, Arabidopsis thaliana columbia; identical to SEQ ID NO: 119601

SEQ ID NO: 156919 - DNA, 438 bp, Arabidopsis thaliana columbia
catctgtgttctgttcgtccttgaagcagtcaaattcttctctgaactccaaacatcgccatgtccgagattctctcttcgttgaggtcactaatggcctctcactctcctcctcttgatgctttggttgttccttccgaagactatcaccagagcgagtatgtttctgcacgagacaaacgccgtgagttcgtgtctggattcagtggaagtgcaggtttggcacttatcacgaagaaggaagcaagactttggacagatggtcgatacttcttgcaagcattgcaacagcttagcgatgagtggacactaatgcggatgggagaagatcctcttgttgaagtttggatgtctgataatctacctgaagaggcaaatataggtgttgattcatggtgtgtctcggtagacactgcgaatagatgggggaaatcgttt

SEQ ID NO: 156920 - DNA, 427 bp, Arabidopsis thaliana columbia
attactccttcaaccatatcattcacatcttctcagtttcgataaaacaaacaaagccctgggatttttacttgctatatcggtgtctctctcccttctcctctataaacatacatataaattaagtacacaccaaaatgtggacgatgggttacaacgaaggaggcgcagattccttcaacggaggaagaaagcttcgtcctctcatcccacgtctcacttcttgccccaccgccgccgtaaacaccaactccgaccaccgctttaatatggcagtggtgacgatgacggcggagcagaacaagagggagctgatgatgctaaactcagaacctcaacatccaccggtaatggtgagctcacggtggaatccgacaccagatcagttaagggttcttgaagagctttaccgacaaggaactagaac

SEQ ID NO: 156921 - DNA, 428 bp, Arabidopsis thaliana columbia
atcagaaaattccgacttggtttgtttttcttgctgtttttgctgtcttgtccggaatgtggtatcaaaccttaattgtgccggaaaatttagagggcgccaaaaatgtattgacaatggctaagaccataccaattcctgtcgctggaccggagagcattgagtttgacccaaaaggagaaggtccttatgctgcggtcgtggacggccgtattctcaagtggcgcggcgatgatctcggctgggttgattttgcctacacatctcctcacagagggaactgttcaaaaactgatgtagtgcctacttgtggaaggccattaggacttactttcgagaagaaaacggtagatttgtacatatgtgatggttacttggggctcatgaaagttggaccatagggaggctctgccgagttaattgttgat

SEQ ID NO: 156922 - DNA, 231 bp, Arabidopsis thaliana columbia
aacaccctgaacttgacctggctgtatgttttcctactctaaaaaatcaattactattttgccggtgacaaaaatggcagggggtgggtctctcacactctacggtaccacttctttatagtgctgcgacaacatcaccagcttcaatgttttcttctcatggatctaccaccgtcgattggtcttttcttacatcactgtcctacgtctacagatccactctaactctct

SEQ ID NO: 156923 - DNA, 432 bp, Arabidopsis thaliana columbia
accccacctcttcagaataaagctactgttctatacatcggtagaatccctcatggcttggatgagactgagattgaagctttcttctcgcagtttggaacagttaagagagttagagtcgccagaaacaaaaagactgggaaatcaaagcattttgggttcatacagtttgaggaccctgaggtggcggaaattgcagcgggtgcaatgaatgattatttgttgatggagcacatgcttaaagtccatgtcattgaaccagagaatgttaaacccaatctgtggagagggtttaaatgtaacttcaaaccagtggattcggttcagattgagcgaagacaacttaataaggaaaggacattggaagagcataggaaaatgttgcagaagatagttaaaaaggatcagaaaaggaggaagagaatcgaagcc

SEQ ID NO: 156924 - DNA, 459 bp, Arabidopsis thaliana columbia
  unsure (1)..(459): unsure at all n locations
tgaatacngggccgaccgacgcgtacgctagtttcagaggcatctatagacaccgtttttttcttcaggactcgttttgaaaggcgggatgcgtgcacacactgacatggtgacttcaatcgccaccccaatcgataacgcagacatcatcgtctcagcttcccgcgacaaatccatcattttgtggaaactcaccaaggacgacaaagcctacggtgtagctcacaggcgtctcactgatcactctcacttcgttgaggatgttgttctctcctccgatggacaattcgcgctttccggcagctgtgacggcgagctccgtctttgggatcttgctgctggtgtctccactcgtagattcgttggacacaccaaggacgtgctctccgtcgacttcttactcgacaaccgtcagatcgtgtcttcatctcgtgaccgtacgatcaagctttggaacac

SEQ ID NO: 156925 - DNA, 446 bp, Arabidopsis thaliana columbia
gccgattcttctattagccgccatggtgaagtactctcaagaacccgacaatcagaccaagtcgtggcaaggctagaggatccgagcgtagggttcacttcaagaatactagggaaacagcgcacgcaatcaggaagctaccattgatcaaggcgaagaggtaccttgaggatgtgatagctcacaagcaagcaattcccttcacacgtttctgcagaggtgttgggagaactgctcaagctaagaacaggcacactaatggtcaaggacgttggccagccaagtctgctcagtttgttcttgatttgctcaagaacgctgagagcaatgctgaggtgaaaggtttggatgttgatgccctcttcatatcacacatccaagtgaaccaggccgcaaagcaaaggagaaggacttaccgtgcttacggaagaatcaacccttacatg

SEQ ID NO: 156926 - DNA, 374 bp, Arabidopsis thaliana columbia
cctttttaaaccctagagttcaagtgtcattctcggaaaccttctgattccgcaacattggcagttacagatactgaaagtcctcatcttggggaaattacttgtggtaccttacttgagaagttgcaggaaatctgggatgaagttggtgagagtgatgatgaacgagacatactgcttcttcagatagagcaagagtgtcttgacgtttacaagagaaaagtcgagcaggctgcgaaatcccgagctgagcttcttcaaaccttgtcagatgctaatgctgaactttccagcctcacaatgtctcttggagacaaaagcttagttggcattccggataagtcttcaggaacgattaaagaacaacttgctgc

SEQ ID NO: 156927 - DNA, 414 bp, Arabidopsis thaliana columbia
aagagatcctcgccgccaaattggtttatcttaagatcgatctcgataagcccgaggtgggggactatgatgataaggaagaccattactctgatgacgatgataaggatgatgacgaggctgatggactagatggagaggcaggaggtaagtcaaaacaaagcagaagtgagaagaagagtctcaaagccatgctcaagcttggcatgaaacccatcactggtgttagccgagtcaccgtcaaaaagagcaagaatatcttgtttgtcatatcaaagcctgatgtgttcaagagtccagcatcagacacatatgtgatctttggagaggcgaagatcgaggatttgagctcttatatccagtcgcaagcagcagtacaattcaaggcaccagatctcagcaatgtgatcttaa

SEQ ID NO: 156928 - DNA, 387 bp, Arabidopsis thaliana columbia
tttgaattccgggcgggaccgcacgcgtccgtacaaaggcctggtacttcctccttttgttttatctgtgcaagttgttgtgattcgtgtgccctacaaagatgctagtgacggaaggaatttatgatgcttgtactgctactgcatctgccttgtgtgaagccggtatccgtgctgaagaagatttaagggacaactactctcctggatggaagtattcagactgggaaatgaagggtgttccattgaggattgagattggtcccagagacctataaaatgatcaggtcagaactgttagacgtgacaactgagttaaagaagatatcccaagaggtagcttattccaacatgttaaggaactgctttaaaagatccagcaaaaca

SEQ ID NO: 156929 - DNA, 443 bp, Arabidopsis thaliana columbia
gaaaaaagacaaatcaaagagagacgattcgatcgcatcaatggcagaagaaaagagcttcaagtatgtgatcgtcggaggtggtgtcgccgccggatacgcggcgagagagttcttcaaccaaggtgtcaagcctggtgaacttgctatcatttccagggaacaagttcctccatatgagcgtcctgcacttagcaagggatatatccacctcgaaaataaagctacacttccgaatttctatgttgctgctggaattgggggagagagacagttccctcaatggtacaaagagaaaggtattgagctgattttgggcacagagattgtcaaagcagatcttgctgcgaagacacttgtcagtgggactggacaagtcttcaagtaccaaactttgctagctgcaactggttcttctgtcataaggttgtcagattttggcg

SEQ ID NO: 156930 - DNA, 443 bp, Arabidopsis thaliana columbia
cgattttcgtttattcgcatccatcggagagagaaaacaatcaataagcgaccatgttggtgtaccaagatcttctcaccggtgatgagcttctgtctgactctttcccttacaaggagattgagaatggaatcctctgggaagtagaaggaaagtgggttactgtgggagctgtagatgttaacattggtgccaatccatctgctgaagaaggtggtgaggatgaaggtgttgatgactctactcaaaaggttgttgacattgtcgacaccttcagacttcaggagcaaccaacttatgacaagaagggattcatcgcttacattaagaaatacattaagcttttgacacccaagctcagcgaagaagatcaagctgtcttcaagaagggtattgagggagctaccaagtttttgctccccaggctcagtgacttccaattc

SEQ ID NO: 156931 - DNA, 244 bp, Arabidopsis thaliana columbia
cgtcgactagagtgaagttctcactctcgccgactatagaaatcacatcaacaaacataatttcagaatcccttttgtttgtggatgtcggaatctcggagaagctttaaggcggacccaggaaggagccgccatgttaagaaccaaatgtgaggctggaactgggaacgctgtctaagccgttaggcacgtgaggagtgtgaacggaactattcactacttacaagcatggacgatgacgagg

SEQ ID NO: 156932 - DNA, 446 bp, Arabidopsis thaliana columbia
cacaacctagctagctagtaaacagtattttctatataccaaaaatggcttcaagttccatagctcgtttcttggctctcaatcttgtctttttcacaacaatctccgcctgtggtagctgtactccgtgcggcggaggttgcccctctcccaagccaaagccaactcctaaaccaaccccaagccctagctctggctcgagcaagtgccctaaagacaccctcaagctcggtgtctgcgctaatgtgctcaacggcctcctggacttgacccttggcaagccaccggtcgagccatgctgcagcctcatccaaggactcgctgatgttgaggcagccgtttgtctctgcaccgctcttaaggctaacattcttggaatcaacttgaacctcccaatatctttaagtctactccttaatgtttgcagcaaacaacttcctcctggc

SEQ ID NO: 156933 - DNA, 411 bp, Arabidopsis thaliana columbia
gagagggccttttcttcttcccttgttgcgcctgcttctcaggggatggttactggggtggctgccgtaatccatcccgactcaggtcgtgttacagccgcgttcgttttcggaaagaagaaggccgctcccaaaaagagtgccaaaaagactgtgactacggaccggcctatttggtacccatgcgccatttctactgactggcttgatggttccttggttggagattactgctttgaccccttcggtttaggcataccgagcgagtatcttcaattttgatatcgattcactagaccagtatctggctaagaacctggccggtgacttgatcggatcccgtacggaagctgtccgcgccaaatcgacgccgtttcagccgttcagtgaggtgttcggaatccagagatt

SEQ ID NO: 156934 - DNA, 422 bp, Arabidopsis thaliana columbia
gtcttccagaaggatgaaatgattgatatcattggtgtgaccaagggtaagggttatgaaggtgttgttactcgttggggtgttacccgtcttcctcgtaagactcacagaggtctgcgtaaggttgcttgtattggtgcgtggcatcctgctagagtgtcctacactgttgctagggctggtcagaacggttaccatcaccgtactgagcttaacaagaagatttacaggttgggtaaggttggtactgaggcacacacagccatgactgaatatgacaggactgagaaggatgtgactccaatgggaggcttcccacactactgtattgtgaaggatgactactttgatgattaatgggtgctgtgtttgttcccaaagaagagagttgtaacttctagacagtcacttttcactcagac

SEQ ID NO: 156935 - DNA, 447 bp, Arabidopsis thaliana columbia
tcgctagatcgcgtagctcaagcgaaaataatttcgtcgtttgatgaagcaccaccaggaaacgccaaggccggtgagaagatcttcaggaccaagtgtgctcagtgtcacaccgtcgaagcaggcgccggtcacaaacaaggacccaatctaaacggtctatttggaagacaatctggtacaactgctggttactcttactctgctgctaacaagaacaaagctgtggaatgggaagagaaggccttgtacgattacttgctcaaccccaagaagttcataccatgtaccaagatggtgttccctgggctaaagaagccgcaagaccgtgctgatctcatcgtctacttgaaggaatttactgcgcctaagtgaatctgatggtggattgattctgagttgttaagtctctctcagatgaggcttttttactttgctatattcttt

SEQ ID NO: 156936 - DNA, 375 bp, Arabidopsis thaliana columbia
tcgctattctctctctctttctatgtcttgttttttcagccgtctcaccataaagctgaccgggagcctcacaaacattgagtgtgttacactaatctcttaaatagagagccgtaatttctacacactctgatcgctagatggaaacggagatatcaggaatggataatccatctatgaccttggacgaggtttccatggaacgcaacatgagcttcgttaaggcattgcaggttccttattatctatctttctgctactagctcttccttgaccacatattttttgatggttctgatcaattatgattttagtagaaattaatagctatgatcacattaaacttggtttaagttgaggcatattcatgtcctc

SEQ ID NO: 156937 - DNA, 444 bp, Arabidopsis thaliana columbia
gccgccttattcgtcttcttcgttctctatttttttcctcagtctctgttcttagatccgtgggagtttccaaatcttccgataaaaatgtcgggtaaaggagaaggaccagctatcggtatcgatcttggtaccacttactcttgcgtcggagtatggcaacacgaccgtgttgagatcattgctaatgatcaaggaaacagaaccacgccatcttacgttgctttcaccgactccgagaggttgatcggtgacgcagctaagaatcaggtcgccatgaaccccgttaacaccgttttcgacgctaagaggttgatcggtcgtcgtttctctgacagctctgttcagagtgacatgaaattgtggccattcaagattcaagccggacctgccgataagccaatgatctacgtcgaatacaagggtgaagagaaagagttcgca

SEQ ID NO: 156938 - DNA, 449 bp, Arabidopsis thaliana columbia
cggcgaaaaaccccttttcgatttcattgataaaacgcaaatcgatctctcgtgtggaagaagaagaagaacacgatgggaacaatgggtaaagcattctacagcgtaggattctggatccgtgaaactggtcaagcacttgatcggctcggttgtcgcctccaagggaaaaatcatttccgagaacagctatcaaggcaccgcacactcatgaatgtttttgacaaaacccctaatgtggataagggggcttttgtggctcctaacgcttctctctctggtgatgtccatgtgggaagaggttcttccatttggtatggatgtgtcttgagaggagatgctaacagcattagtgttggagctgggaccaatattcaggacaacgctcttgtccacgttgctaagaccaacttaagtgggaaggtcttacctactgtcattggagacaa

SEQ ID NO: 156939 - DNA, 414 bp, Arabidopsis thaliana columbia
cctacggaattcaatatgttcagtttgattatgtttttaacggacaacccgaacaagctcctgttggtggtaccaaaggccgtgtgggttccatctgatccgtttgtgattaaccatccagacaaacatctagtttctgtagaaggttggtttagccctgaaggtatcattcaaggaattaagttcatctccaacaagaagacttctgatgtcattggatccgatgagggtactcactttactctacaagttaaagacaagaagatcattggcttttatgggtctgccgggggcaatcttaattcttctggggcttactttgcttcgttgactactacaactccgttgactcctgtcaagcatcttacggtattttggtagtagatgacggaactgtattggatgattggtcct

SEQ ID NO: 156940 - DNA, 386 bp, Arabidopsis thaliana columbia
cgttcggaatccttgtggttggagcttgtatggatatcttcttgtgggctggagtaatatccgggaggggttgataatgagacgggtcaatctaatgggcaaagaacatgctcttgtcgtttgtaatcaccgaagtgatattgattggcttgtgggatggattctggctcagcggtcaggatgcctgggaagcgcattagctgtaatgaagaagttttccaaattccttccagtcataggctggtcaatgtggttctcggagtatctctttctggaaagaaattgtgccaaggatgaaagcactctaaagtcatgttctcaacgcttgagcgacttccctcgacctttctggttagccctttttgtggagggaacttgctttacag

SEQ ID NO: 156941 - DNA, 433 bp, Arabidopsis thaliana columbia
aagagaaagaagatggtcggttgatctatttttgcttctcccgacaaaattctcaggatgcgaatacttccaccatgagtgcattcatttataagatctgggttttacacagctctgcgagtacagtaactatgagaaggagaggaggggatagtttccggagagctggacggaggaagatctcgaatgtggtatggtgggttctctctggtattgccctcctgctcttctttctcattctctccaaagctggtcatattgaacctagaccctctatttctaagcgacgttaccgtaatgacaaatttgtagagggtatgaatatgactgaggaaatgttgagtcctacttacgttgctcgtcaagttaatgatcagattgctcttgctaaagcttttgtagtcattgctaaagaaaggaagaatcttcagtt

SEQ ID NO: 156942 - DNA, 429 bp, Arabidopsis thaliana columbia
  unsure (1)..(429): unsure at all n locations
gccgcttcttcacccaaaaaccccctaaaagcccttattctcttcttcttcccatggnctgcttcagctgtcggctctcgtctctctcttccttcgggccctaaatctcttcctttcggcgtctccagacctgcctccgtttccctcttatctccttccctctcctttaaactcaattccgactccgtttccttctccatcgccgccaaatggaactctcccgcttctcgcttcgcccgtaacgttgcgattacctcagagttcgaggtggaagaagatggtttcgctgacgtcgctccgccaaaagagcaatctttctctgctgaccttaaactcttcgttggtaaccttcctttcaacgttgacagtgctcagctcgctcagctctttgagagtgccggaaatgttgagatggttgaggtaatctat

SEQ ID NO: 156943 - DNA, 424 bp, Arabidopsis thaliana columbia
tctgacgcgtgggctctaacaaacattttattatacccattttccttcataaatttcggaaggttaaccccttaaacttgcattcacatcatccaacccccaatgggtcgaatcttgaaccgtaccgtgttaatgactcttctagtcgtaacaatggccggaacagcattctccggtagcttcaacgaagagtttgacttaacttggggtgaacacagaggcaaaatcttcagtggaggaaaaatgttgtcactctcactagaccgtgtttccggttcgtgtttttaaatccaagaaagaatatttgttcgtaagaatctacatgcaacttaaactcgtctccggtaactcctctggaaccatttctgtctactacttgtcatcttaaggaccaacacacgactatgatatacttttagttttt

SEQ ID NO: 156944 - DNA, 443 bp, Arabidopsis thaliana columbia
caaaaatgggtgagaaagatattccaaggatcttgaaggaagaagaagaagaagaagaagagaaccaaagtgaagaaaccaaaagtttgatctcttcacttccttcagacatagattgctcagggaccaagttgtacaagtaccaaggatgttggtacgacaaagatattctccaagcaatcctcaatttcaacaaaaactttcagccacaagaaacggatataattgttgcttctttccccaaatcgggtacgacttggctcaaggcactcacattcgcactcgcgcaaagatcaaaacacacttcagacaatcatcctctgctaactcataatcctcatgagctagtgccgtacctcgagctcgatctttatctcaaaagctcgaaaccggatttgaccaagttgccatcatcatctccgagattgttctcaacccacatg

SEQ ID NO: 156945 - DNA, 393 bp, Arabidopsis thaliana columbia
atcactctcccataagggtaggttttcacctaatttggcaagactacaccccttcaaatcaagaaagcacttgtcaatcctccccttctatcctcctggaacccccgaaccgactgttgtacctactggaccggcttcgaatgcactaaccgtctctttaccggtctcagcgttacctccggcgaagtctcctgtcagatctcgtaccatatcggccacctcgttgaccttcgtacactagatttcatctacctgccacacctcaccggatacatcccacgcaccatcaccaaacttaagaaccttaacactttttacttgaagcacactattctttccggtccgattcctgattacattagcgagctcaagatcctcactttcttggacctt

SEQ ID NO: 156946 - DNA, 398 bp, Arabidopsis thaliana columbia
cgcgttcgtattaatatttccataaactagatctcactttttttttcatccatatcaccgataatgccgcggcgtgacttcctatccctgtcactcctccttaccattcccaccgtctccactgtcgcattacccaactattaattcacatgtgtttacacattctttcttataaccttatcaaccttcatagccgttacagattctatcatactctctagagtttacgacaaatactgagactacatatatatccgaaacctaaaatcatggggtggtctaatgggaccagcttactactactaccagaggggtaatctcacatttcagcgactaatcaccatgtctttctaccccaccttgttcattaaatttttcctattactttttcactacca

SEQ ID NO: 156947 - DNA, 295 bp, Arabidopsis thaliana columbia
aagcaccataaggacatcatcaggacaactttcttttggtaagctccgaagggaatgtgagagggcatatagagctctaagtaggcagcaccaattccgtgtagagattgagtcactctttgatggtgttgatttttctgagccactcaccagagctcgtttcgaggagcttaacaatgatttgttcaggaagaccatgggacctgtgaagaatgccatggatgatgcctgtctacagaagagccagattcgatgagattgtccttgttggtggaagcaccatgatcccaaatgt

SEQ ID NO: 156948 - DNA, 419 bp, Arabidopsis thaliana columbia
ggaaagcgagagacaacaaggtgtttttgaatcttacaggatgcaacacattcaccagaccgatgactttttgaagaagatgaggaaacattatggaaaacttaacaagatggaaatgagtatatgggaatgttgtgagttattgaacaatgttgttgatgaaagctatccgtatcttgattagcctcaaattcaacaccttcttcaaaccgctgaatccattctaagggactatcccgactaatattggctccatctcactgacctaatccatgatcatgataatgtttttcttcatgcaaaattcttagattattcctaatttgctgtctatgactatacatttccagtttgtatgtaccttcgtacttagccattattcaccacatagttttttaaatgtaaccatgatatttaac

SEQ ID NO: 156949 - DNA, 373 bp, Arabidopsis thaliana columbia
ctctaagtgcactgaaaaacagtttatccttccctaataaggtgcttcaaagttgggaggggtctctttttactccatgtacatggtttcatgttactcgcaatatcgacaatttagttacacgtgtcgaccttgggaatgcaaatctatcttgacagttcgtaatgcaacttggtcagttttcaaacttgctttacttgaagtcttatagcaataacattacttggtcaatcccagtacagcttggaaatcttacagaattggtgagcttggatctttacttgaacaatttaagcgggtctattccatcaactttctgcctacttaataaactatcgttacttgcgtcttaataactatagcttatctgtag

SEQ ID NO: 156950 - DNA, 451 bp, Arabidopsis thaliana columbia
cttcattactaatctccttttaaggtttctttcgtgaatcagatcggaaaaatggaatcttttttgttcacatctgaatccgtcaacgagggacatcccgacaagctttgtgatcagatctccgacgctatcctcgatgcttgccttgaacaagaccctgagagcaaagttgcttgtgagacttgtaccaagactaacatggtcatggtttttggagaaatcaccaccaaggctaacgttgattacgagcagattgttcgtaaaacatgccgtgagattggattcgtctctgctgacgttggtctagatgctgacaattgcaaggttctggttaacattgagcaacagagtcctgacattgcacaaggtgttcatggtcatctcaccaagaagccagaggaggttggagctggtgaccaaggtcacatgtttgggtatgctactgatgaga

SEQ ID NO: 156951 - DNA, 449 bp, Arabidopsis thaliana columbia
aaaaagagagagaaacataaaaatctccattgaatcttattggattgagcaagagaaagagatcaggtatttctaaaaagagagagagatcctctgatctcctctctgattcgatcgagatcgcatcatttccctaatgatttcaaaaacctaaaacgatctcttcttttttttcgcttcgatctccattgaaaaggatgatttcaaatccaagtttattatcgtacacttgcattgcgaaaggaaccgtagttctcgcggagttcgtttcaaggcaagagccaggaatcgaagctatagctttacgatgcatcgagaacacgcctcctcatcatttcaatgtttctcatacagttcacaagaagacgtattcattcgcaatcgacgatgattcctttgtttatttctcgatttctgatgaatccatggagaaacctgaatcattctgg

SEQ ID NO: 156952 - DNA, 325 bp, Arabidopsis thaliana columbia
tgtttattctaataccatctcctggcttttctctgtcactttgcgatttttgctctcgcagcattgttcttgtggtctaatgcttgtacattcatccacaagtcaactcctcacatcccggaagttcacatccctgaagatcctattcttcaacttgtttctggattaaggattgaaatcaatcgtggtttgacccttcttaggaacattgcatcaggaaaagatgtcaagaatattatcctggtaattgctggcttgtgggtttttgccattattggcagctgctacaacttcttgacattgttctacactgctactgtccttc

SEQ ID NO: 156953 - DNA, 468 bp, Arabidopsis thaliana columbia
  unsure (1)..(468): unsure at all n locations
gaaaaaaaggaggttatgttatcacatgtgtgtttgaatgtgaaatgcaacgaggatacgcttgtaggagtttgggagtcctgtacaacgatagttgagtgacggccttatacgaatatgattagatctatctgttgatctgttattttgagacaagtacataggaatacattgtaaacatgatccatgcattggcgcaagaaattctgtcgtttgataactcaagatctaacgatgcttcatctgtctgtatcaaaaggcagaagagattctgatgatggacatnggaggaaactcaacattttattcccaaatgccggggtctctagtcctaaaagaagtatacactggatgggttcaagcatctctacatctaaaaccagcgtttggccaccagaagacccatctgccaagattgatgaagctggtatttctggaaatgagaatggtaagtctggagagaaggtc

SEQ ID NO: 156954 - DNA, 334 bp, Arabidopsis thaliana columbia
  unsure (1)..(334): unsure at all n locations
taagcaccataaggacatcatcaattttttttttgctcttggtaagctccnaanggagtgagagtattcaatgagagcgtgtgagtactcagcaccaaatccttgtatagattgattcactctttgattgtgcttatttttctgatccactcaccatatcttgtttctaagagcttaacaatgatttgttcaagaataccatttgacctgtgaagaatgccattgattattcccttctacagaatagccatatcgatgagatttgcctttgttggttgaatgcaccattatcccaaattttcaactaccttttgaattactttttttaaaataa

SEQ ID NO: 156955 - DNA, 434 bp, Arabidopsis thaliana columbia
ccagccgttgctttcggaccagccgtcgtatgctgtacgtggaccaaccactgggtttactgggctggtcctcttattggtggtggactcgccggaattatctacgactttgtcttcatcgatgaaaatgcccacgagcaattgcctaccaccgattactgaagacgtcaaattcaacgttgttaatctgatgaatttttcgtgatttgcttttttaatttgcatcgtaatggtttctggccgttggatcatttttagatgaatctttgtctattgattgatcatttatgtgtctttgggtttgttgttggagttgtaatatctctggaaggcttttgtgcaattgtattgtacggtttaataactataattgagaaaaccagggaatgtgaattatgaaaaaaaataatataatatatttttttaattggggc

SEQ ID NO: 156956 - DNA, 378 bp, Arabidopsis thaliana columbia
aaagaaaagaacttaaatcaaaatacttaatttcatggcgatacatttatacaaaacttctggccctagcacacgcaatggagccgtatacagtcaagtgaaatccaatccacgaaataatttgatctgtgggcagcatcattgtggtaaaggtcgtaatgccagaggaataattaccgcaaggcatagagggggaggtcataagcgtctataccgtaaaatagattttcgacgaaatgcaaaagacatatatggtagaatcgtaaccatagaatacgaccctaatcgaaatgcatacatttgtcttatacactatggggatggtgagaagagatatattttacatcccagaggggctataattggagataccattgt

SEQ ID NO: 156957 - DNA, 233 bp, Arabidopsis thaliana columbia
ctaaactttattggagaaaccctaatcgtctacaatttgtattccacgcaactctatccgcgaggcgtctgtctcatagggggggtgcacaatcaataaatgaagacgcctatgatttcaattgtaaaaatgcccacgagtaattgcttaccacctattacacgttacgtaaaattcaacgttgttaatctgattaattttttgtgatttgctttattaatttgcattctaat

SEQ ID NO: 156958 - DNA, 468 bp, Arabidopsis thaliana columbia
  unsure (1)..(468): unsure at all n locations
cgggncggacccagcgcgtccgaaaaaatggcttccactgtttcgctttctttacttatcggcggcgggggagctcttcaggggcgtggcgcaggaaccgcgcatgttagcccacgagcggcgcattctaacaaacccgcgctttcttcgttctcgctgaccggcgcctctcgcaggaatctgttattttcgttgacggcagcgacggtagtgacgggacttcagcctgcatcaatggcggagaatattccgttatttggtataagaaagaaactgaagaaagcagaagaagaagcggtggagatcgtgaaagaaggctttgagacggcggagaaaggcgttgatgcggcggagaaaggattagaagcggcggagagaggtgtagagacggcagagaaggaaatcgtgacggcggttagctttaatggattgacacaagctggagcccgcgtggccgctgagttcgtc

SEQ ID NO: 156959 - DNA, 444 bp, Arabidopsis thaliana columbia
gaaaaattgagttgtgggtggcctgcccccttcgttgctgccaagaagaaactcgacgaggatgagccatcacaaagcttcgagagcgtcgctctcatcatcggcgttactggaatcgtcggaaacagcttggcggagattctccctctttccgacacacccggtggtccatggaaagtctacggcgtcgctcgtcgtcctcgtcctacctggaacgccgatcatccgatcgattacatccagtgcgatgtctccgacgccgaagacacaagatccaagctttcccctttaaccgatgtcacacatgtcttctacgtcacctggaccaatcgtgaatcggaaagtgaaaactgtgaagcaaatggctcaatgctccgtaacgttctccaagcgattatcccatacgcgccaaatctccgacatgtttgtcttcagacagggaca

SEQ ID NO: 156960 - DNA, 420 bp, Arabidopsis thaliana columbia
actcccatttagtacccgtcacttttttttttcctcctagagataacccaactggggggctttttttttttgcggtgagggtttcttcatcctttagggtttccacaaaaattcaaaacctacttggaaatatttgggcttgaagaaggaagaattagatggaaggaagaaggattacggcaagccctagaccttgtagtggaagaagaattgtggctaagaaaaggtctcgacccgatggattcgtcaacagtgttaaaaagcttcaacgaatagaaatctctttcttcgaaagatcgagcttttctctattagcactcgcccaagagagattttcgaaacatgcgtttttggggagcaattatgatacttcacgaatcctaaagggccactggtttaagttgcaattacccgtttttg

SEQ ID NO: 156961 - DNA, 340 bp, Arabidopsis thaliana columbia
aagggtttttaccttaagatgaatttttttatcataggtatttggctaaatctgagacggctcaatagaggagaggtgctgctgaacatactctcaccgcttacaaagctgctcatgatattgctaatgctgaattggctccaacgcattcgattcgtcttggattggctttgaatttctctgtgttttactatgagattcttaattctccagatcgagcttgtaatcttgctaagcaggcgtttgatgaagccattgctgagttagatactcttggagaggagtcatacaatgatagtaccttgtgcacgcatcttcattctgacaatcttactctttg

SEQ ID NO: 156962 - DNA, 379 bp, Arabidopsis thaliana columbia
gtataatcctattgcttctttctcttttccttcctcatccaaaaaatcgggttcgtttcaatttcgacagcatcagctctctcatcactctcttcactctcactccacacccatacctcttctttcatctcctctttctccacaaaatccatctactttttctccttcttcctcaaccaccgcttctcatctttcactctcttcaaagccttatcgaccgataccgaaaccatcttcttccaatactaaacaccacaaataaccgcaaatgtcgtcttccacccaccaattgctcccgaaggatacgtctctccttcctatttcgactaacgaagctaccagacatacgaagagatctctacccctttttaagagctct

SEQ ID NO: 156963 - DNA, 406 bp, Arabidopsis thaliana columbia
ctctgaaatgttgccaaaaaacggttttttattttgtggcctatgcgaattttgggggtgggccctttttaacaaacccatcaccgtccctcgtcagaatattccggcggtgggcttgttcacctttggtgactccaacttcgacgccggaaacaaacagactctcaccaaaaccttactccctcaaactttctggccgtatggaaaatcccgagatgatcccaacgtcaaattctccgacgccctcatcgctccaaacttcctcgctaaattcattgaggataccgatcgtgatcccgccggtccttcaaccgaacgtcaatgtctcacgttgaagctagtttccgccgtcgctgatgctacttctactctggagcttccgggggaattttttgacttctgaatt

SEQ ID NO: 156964 - DNA, 286 bp, Arabidopsis thaliana columbia
cggacgcgtgggctggcatgaaaattggtcttatttaggatgtgactccaatcccaaccgacagtgcccgcagaaagggtggaagaagaggaaggaggctctgagttatttggcctctcgttggatctccttatgtagctttctcaatgtttcattttgttttttcttagtttgaaaagagttttggaattactatgctttgttatagtctcaactctgaacagctttggatctttttctgtatgaccataagatattcaaaaattggtagtcattttatctcaca

SEQ ID NO: 156965 - DNA, 468 bp, Arabidopsis thaliana columbia
  unsure (1)..(468): unsure at all n locations
gaaanncgggccgaccacgcgtccgctgcgagaaagctcacatgaacaaaggtagcttggactaaagaagaagatcagcttgtggtggattacatccgtaaacacggtgaaggttgctggcgatctctccctcgcgccgctggattacaaagatgtggtaagagttgtagattgagatggatgaattatctaagaccagatctcaaaagaggcaattttactgaagaagaagatgaactcatcatcaagctccatagcttgctcggtaacaaatggtctttaatagctgggagattaccaggaagaacagataacgagatcaagaactattggaacactcatatcaagaggaagcttctcagcctggggattgatccaaactctcaccgtctgatcaacgaatccgtcgtgtctccgtcgtctcttcaaaacgatgttgttgagactatacaatttgatttctctgga

SEQ ID NO: 156966 - DNA, 252 bp, Arabidopsis thaliana columbia
cggggccggcccacgcgtacgctccttaagccaacttgtcaacagactttctatccgtccttactaagcttacccaggagtgtggtatttaagtcgaggaggcaaaaccagtaaaaggttcaactacattgtccatggcctatgcctgagcattgttcgttgatgcatgcttgaaaggactcaactgtgttccagatgtcatagaatgctcatacgtgcaatctacaatcaccgtgcttcctttctttgtct

SEQ ID NO: 156967 - DNA, 455 bp, Arabidopsis thaliana columbia
  unsure (1)..(455): unsure at all n locations
tccgatcttttcctccgatcattagtctctttattctttttaagcctcttcttgttcgaaatcggtggtcctccggaaaaagaggtcggccgttaactnaaatgctactaacggtgacggagggtttagtttccctaaaggaccggtgatgccgaagataacgaccggagcagcaaagagaggtagcggagtctgccacgacgatagtggtccgacggtgaatgccacaaccatcgatgagcttcattcgttacagaagaaacgttctgctcctaccacaccgatcaaccaaaacgccgccgctgcttttgccgccgtctccgaggaggagcgtcagaagattcagcttcaatctatcagtgcatcgttagcatcgttaacgagagagtcaggaccaaaggtggtgagaggagatccggcggagaagaagaccgatggttcaactacttcggcgt

SEQ ID NO: 156968 - DNA, 348 bp, Arabidopsis thaliana columbia
gaccacgcgtacgatcatttccaatttataaaagttaaagccttgtcttcatctttctctgtcccctctatggtggtgtgatgaagaagggagattcgaagcgtacgttgcggaagtgcatacttggtggagctcagagaggttcaagctaacaaggcgcccttacactgcccgtgacgtggtggctctacgtggccatctcaagcaaggctatgctttgaacgagatggctaagaagctgttgagaacgctcaaaagccatcaagccaactgtacggcctctcgcacctttggagcgtttgaccctgttcaggtgaccatgatggctaaacattaggacaccatcta

SEQ ID NO: 156969 - DNA, 358 bp, Arabidopsis thaliana columbia
tgaagtctggatcgacgctggatctcggtttgagtccgatgagaccaacggaacggctcattttttggagcatatgatattcaaaggcacggataggcgtacagtgagagcgttggaggaagagatcgaagatattggtggtcacctgaacgcgtatacatcgagggaacagaccacttattatgctaaggttttggattccaatgtgaaccaggctttggatgtcttggctgatatcctacagaaatctaagttcgaggaacagagaattaaccgcgaacgagattgtcatccttagggaaatgcaagaggtggagggacaaaccgatgaagtggttcttgaccaattacatgccac

SEQ ID NO: 156970 - DNA, 443 bp, Arabidopsis thaliana columbia
ttcatcgcttagatctttctttaaatacatttcagaaattttcttaagagtcaagggagggtaagaaccaattctgtgagatgatctcagtggtgattcttactgagctactagtagagtacacggcagctctagctaaactcaccgccgggattcttccacggcgtaccggagatagaaacgccgtaaggatcggtggttttctccttccttcaccttcttcaacgacgtcgatgattcctgatttctcttctcatctagttgatttctgatttgccaacttttttattttggctgatttattcagttgttgacttcagatcctagctcccttctatgatctagtcgatgagaagcgactgagatttttactgagtgtctcgtcgtcttgaatcacgttttcttgaatcgtatagagctttgtagaatctgtatctaatttt

SEQ ID NO: 156971 - DNA, 446 bp, Arabidopsis thaliana columbia
gaaaagccgggccgaccgacgcgtccgcttgtgctgatatcttggccttagcgtcttttgattcggtttctctcacaaacgggcaaggttgttatgttccaacaggacgtatagatggaagagtttccttggcatcgaacgttaacaatcttccttctccaagtgactctctagccattcaacaaaggaaattctccgcttttcgcctcaacactcgcgatctcgtcactcttgttggaggaggacacacgatcggaacagctgcatgtgggtttatcacgaacaggatattcaactctagcggaaacacatcagatccaacaatggaccaaacatttgtaccacaacttcaaagactttttccccaaaacggcgacggatcatcacgtgttgatcttgacaccggaagtggaaacacttttgacacatcttatttcatcaatctc

SEQ ID NO: 156972 - DNA, 432 bp, Arabidopsis thaliana columbia
cccaggcgtacgcatgccgaagtccgattctgtttcggtaagcgatctttttcgacctgatggctctgttcctgactgggtcaggattttctatcgcatgaacggtgtcaaaagcatcgacggcctctcggagcccttgcttgctttacaagttaccgagatgagagatggagttttcatcggttttggttacaatcacatggtcgcagacggtgcttccatctggaatttcttcaggacttggtcaaagatttgctctaatggtcaacgggagaatcttcaacctcttgctctcaaaggattgttcgtggacgggatggatttcccgatacatattccggtttcagacacagagacgtcaccaccaagccgtgagctttctccgacattcaaagagagagtttttcacttcacaaagaggaatatctcaga

SEQ ID NO: 156973 - DNA, 404 bp, Arabidopsis thaliana columbia
cgttctccttctctctctctctttcacacacttatttttttctttgtaaaaagcttccttcgtgacgtgagagaacagagactggcgctaactcacttcctaacggtttccacactcaaaattacacttttgccactccggcgaacaacaatatgatcacatggcacgacctctacaccgtcctcacggcggtgataccactctacgtagccatgatcctcgcttacggctcagtccggtggtggaaaatcttctcaccagaccaatgttccggcataaaccggtttgacgctattttcgccggccctcttgattttttccactatatctccttaaacaattcttacgcaatgaatcttcgatttatcgcagccgatacactccaaaaactaatcatgctcact

SEQ ID NO: 156974 - DNA, 434 bp, Arabidopsis thaliana columbia
ccaaaaagatctcgcttttctcgattttggttttttttacaatatccacaaaaccctagtggcggggcctgctctgtttttatgggcctccacttcccgccaagcccctcttagccataaacagtgaaaaacccttttgttccttcaccaagctctaagaccctatccatggagacgccgacgatgaagcctgatacggttttgattcttgattacggctcccaatacacacatctcatcactcgccgtattcgttctctcaacgtcttctctctcgttatcagtggaacttcatcgctcaaatcaatcactagctataacccacgagttgttatcctctccggtggtcctcactctgttcacgcgctcgacgcgccgagtttccccgaggggtttatcgaatgggcagagtcgaaccgtggttctgttttggg

SEQ ID NO: 156975 - DNA, 396 bp, Arabidopsis thaliana columbia
ccaaaaaatatccttaatttaaccttcctgggggcccaagttgggcggggttgattttgagggtggtgcgccccacaatctatgcatttctatgcgggtagcttccacaaagattttcagatacattggggtgactgccgtggaaaggtgctcgacagagatggaaagcttctatctctctcgctcgacaaatcctctggatccggttttcagtccaaccaggagtttctttatggcaaagcctaggttcaaatgaaacttgtccctggtaactcatcttgaacagtaacaacattctatcttaagtctccgggaactacttgggatgagattgatttcgagttctttatgaaaccctaagttgtcattccgaatacttctccatactaatgttta

SEQ ID NO: 156976 - DNA, 428 bp, Arabidopsis thaliana columbia
gacctagctagttattaaacagtattttctttttattaaaaatggctccaagttccatagcggtggggttgtttctaaagctggtctttttcacaacaatctccgcctgtggtagctgtactccgtgcggcggaggttgcccctctcccaagccaaagccaactcctaaaccaaccccaagccctagctctggctcgagcaagtgccctaaagacaccctcaagctcggtgtctgcgctaatgtgctcaacggcctcctggacttgacccttggcaagccaccggtcgagccatgctgcagcctcatccaaggactctctgatgttgaggcagccgtttgtctctgcaccgctcttaaggctaacattctgggaatcaacttgaaccctccaatatttttaagtctactccttaatgtttgcagcaaa

SEQ ID NO: 156977 - DNA, 450 bp, Arabidopsis thaliana columbia
  unsure (1)..(450): unsure at all n locations
ggcgacccacgcgtncggaaaaaaaaagagagaagaaaaatggtgtttacaatcttttctcctttattcgcttcttcaaagagagctgttgtgacattggtggagaagggagtatcattcgaaactgtcaatgtcgatctcatgaaaggagaacagagacagcctgagtatctcgcgattcagcctttcggtaaaatcccagtcctcgtcgacggagactacaaaatcttcgagtcgcgtgcgatcatgaggtatatagcagagaagtatagatcacaaggacctgatcttttggggaagactattgaagagagaggacaagtagagcaatggttagacgttgaggctacaagttaccatccaccactattggctttaacgctcaacattgtctttgcaccacttatgggttttcctgctgatgagaaagttattaaggagagtgaagag

SEQ ID NO: 156978 - DNA, 302 bp, Arabidopsis thaliana columbia
  unsure (1)..(302): unsure at all n locations
gcagtcanttctcatccctaggagattatggtgataatctgccaccatgggtcgtatgcagatgcttataaagggtgtggcagcctctgctttgccttacaagagannnnnnnncnngnnggctcaagaccaccnntaaggangnngatgaatcatattgtaaatttgccaaaaagggattgtcccctttccagattggtgtgattctccgtgactctcacggtatccctcaggtcaagagtgttactgtaagcatgatcttgaggatactcaaagctcatggccttgctcctgagatccct

SEQ ID NO: 156979 - DNA, 400 bp, Arabidopsis thaliana columbia
ttcgacagtcgtagaacttgctagcagctattctgttatgatcctgggaaacgagggcagtgagactttaacgctgccggatcttccttacgattatggcgcattggaaccggccattagtggagagatcatgcagattcatcaccagaagcatcaccaggcttatgttactaattacaataatgctcttgagcagcttgatcaagctgtgaacaagggagatgcttccactgttgttaagttgcagagcgccatcaaattcaacggcggaggtcatgtcaaccattccgatttctggaagaaccttgctccttccaatgaaggtggtggagagccaccaaaaggatcttcttgttgtgccaattgacgcttaactttggcttcctttgaaggtctggtg

SEQ ID NO: 156980 - DNA, 216 bp, Arabidopsis thaliana columbia
gctctggctcttcctcttctaaacatttaaatattttctgacccccaacaaagaggaggcgcggaaactaaacggacgggcggaccacctactatgtcagcaacgacctaaccctccctggatggtctcaaaactccgagtgacaagttttcatcttagcaaccagtgacccctagacagagccagtcccgtcgtttggttgatacagatgaacca

SEQ ID NO: 156981 - DNA, 407 bp, Arabidopsis thaliana columbia
ataaaatatttttatgggtcttctcatctcccacaaaaacgccgctttttaagggtgtgttatccttctaaaccccacatcacccaaatgataaaggtctctaaactcctttaccccaaaggtttccatataactttcgaaaacaccgtatacaaccacaaccgtcttctccggtcccgtggccctaacgccgttaacggtcttccttttttccgaattgagtccatccctgacggtctacccgaaactgacgtgaacgtcactcaggacatccctactcttggcgagtccacaatgaatcactgtctcgctccattcaaggagcttcttccgcagatcaacgcatggaatgatgttcctcctgtgagctgtatcgtatccgacggttgtatgagcttaacacttga

SEQ ID NO: 156982 - DNA, 450 bp, Arabidopsis thaliana columbia
cgactgtatttttttctttattctgattgtttctacatatttgcagtacgttcttttttgtgttggggggggttgctaactcaacggtagagtactcggcttttaagtgcgactagcatcttttacacatttgtatgaagaaaaggattcgttcagatctgcggtagagtttgtaagaccacgactgatcctgaaaggaatgaatggaaaaaatagcatgtcgtatcaagggagaattcagataacatttttttttgctttcctgatcggtacaatcttattttgatgtccaaaaaaaaaaaagaattccaatttgggtcaagtgaataaatataaatggatggataaaaaaaccagttttttcttattccaggaaaaaaaaagaaacgagcttccattcgtaatttgaaaaattaccccaacctaattaatgttataaatagattagtg

SEQ ID NO: 156983 - DNA, 476 bp, Arabidopsis thaliana columbia
  unsure (1)..(476): unsure at all n locations
gcgtccgaagaggtcttgagggaaggaaaatgaatgatgactattgtttcttgcactttttgaggtcaactcattggagtgcttgacaatgaccgagagcggttannctttgtcgatgttcttttcgttcaagcaatcaaacaaaacttggaacttganntgaaggagcactcacttagaattgttgaccacaagagcntgagattgancttgaaggtcattggagaggagtaccagcgcaggaacagcattcctttggagaaagctattaccaaagacactcgtggagattacgagaagatgctcgtcgcacttctcggtgaagatgatgcttaatcaatcaatcctccacagagaaacataagctgctctacagcttctgttatctcttatctccctctctctctctttgatgagtttcaaatcgtttgattttgtttctacaaaaaccttgtttgttcttgtgtgtgttttga

SEQ ID NO: 156984 - DNA, 448 bp, Arabidopsis thaliana columbia
  unsure (1)..(448): unsure at all n locations
ccacgcgtccgaacagacctaaatttcgtggttaaagaacatagctttaagcagccatggatccaaaccaggggtatctcgagaatctctgctcatctcaatcctcctaatcttcataatcagatngctgacgggtcaggtttgaatcgggtggcttgtcgggcaaaaggtggatcacccggattcaaagtggcgatacttggagcagctggtggaattggacaacctcttgcgatgttgatgaagatgaatcctttggtttcggttcttcatctctatgatgttgctaatgctcctggtgttactgctgatattagtcatatggatactagtgccgttgttcgtggatttctcgggcagccgcagttagaggaagcacttacgggtatggatttagtgatcatacctgctggtgttccgaggaaaccagtgatgacgagggatgatc

SEQ ID NO: 156985 - DNA, 208 bp, Arabidopsis thaliana columbia
gtcgacagtcggagaacttgcttgcagctattctgttatgatccttgaagacgagggcagtgccatcacttctgatagagattgcgactttggtcaaagcggctggtgttgagattgagtcttactggccaatgttattcgccaagatggctgagaagagaaatgtcacagaccttatcatgaatgttggtgctggtggtggtggagg

SEQ ID NO: 156986 - DNA, 453 bp, Arabidopsis thaliana columbia
cgtccgagagtgtcttctctttaatctcgaccttttttactttcctctcccttactgtttcgttcggaagggagaaattgttacaatggagggatcttaaggagatttggaacctcttctgctgctgctgaggaaatcataaacccatctgttcaagtttctcacacacagctcctcatcaatgggaactttgttgactctgcttctggtaagacgtttccgactcttgatccgaggacaggcgaagtcattgctcatgtagctgaaggcgatgctgaagatatcaatcgagctgtgaaagctgcaaggacggcctttgatgaaggaccttggcctaaaatgagtgcttatgaaaggtcaagagttttgttgaggtttgcagatttggttgagaaacacagcgaagagctcgcgtttctagagacatgggacaatggcaagccttaccaacaa

SEQ ID NO: 156987 - DNA, 236 bp, Arabidopsis thaliana columbia
aaatacacacatacaatactaacaattagtagtttactatacagatccacatccccgggggggtatatatatcagctgctcgaacaattctaccagctttacttcttcttcaatctcaaacctccaattttttccttcgcacaattcttttaaaaccataactccaatcttcttaattctcctcttacttttaaccttatccctctacacatattattccttccaaaaactccttt

SEQ ID NO: 156988 - DNA, 439 bp, Arabidopsis thaliana columbia
ttcaaatctcagatctagctcaaccatggttttgttcgtcgagaagacctcaagtggccgggagtgcaaggtcaaagacatgtctcaagccgatttcggtcgtctcgaactcgagctcgccgaagttgagatgcctggactcatggcttgtcgtaccgaattcggaccttctcagccattcaaaggcgctagaatcaccggatctcttcacatgaccattcaaaccgccgtactcatcgaaaccctaactgctctcggtgctgaagtcagatggtgtatctgcaacatcttttccactcaagaccacgccgtcgcagccatcgctcgtgacttcagcgctgttttcgtctggaaaggtgagactcttcaggagtactggtggtgtaccgagcgtgctctagattggggtccaggtgagtggtctgatctgattgatgat

SEQ ID NO: 156989 - DNA, 350 bp, Arabidopsis thaliana columbia
ccaatctcttatcagaacgaaattacaactctgtgcgccacttatcttccctagtttccgccacgagtattctcacttcgcaggcttcggacaaacacccgatcacacaccgccggagaagaggactccgagagggttgtgagaatcgcggagaagaaggcacacgatggattgtttctgtgcaagagcaaaggccaacaccttcttaccaacactagaatcctccactccattgttcgaagctccgatatcaggccgactgatacagtcttggagatcggacctggcactggaaatctcacgatgaaacttcttgaagctgctcagaatgtcgtagccgtcgagctaga

SEQ ID NO: 156990 - DNA, 392 bp, Arabidopsis thaliana columbia
  unsure (1)..(392): unsure at all n locations
ccggnncggaannccggcgccgacccacgcagtagcgcggtacgcgtggacgctcatctctgtctgaatctcacaagaagaagtgaaagatggggaaggtatgttgtattggagctgggtatgttggtggaccaacaatggcagtgattgcattgaaatgtccagacgttgaagtagcggttgttgatatctctgtaccacgtatcaacgcttggaacagtgacacgcttccgatttacgagcctggtcttgatgatgttgtgaagcaatgccgtggcaagaaccttttttttagtactgatgatgagaaacatgttagggaagcttgatattgtgtttggttgttgtaacacacctactaagactagaggtttttggttctgttaaagctt

SEQ ID NO: 156991 - DNA, 445 bp, Arabidopsis thaliana columbia
tccactttcctctgcatcaaaacgacatcttttcgcaacccatcaactcctctgtcctcggtccggttcgcctctcacccggcggctaaactacgcttggttcgagcggtaacatctgcgacggaatcttcagagccaaccgcaaccaataagagagtgccacgcggtatcatgaaacctagaccagtttcaccagagatgcaagacatcgtcgaacttcctgaaatcgctcgcacacaagctcttaagcgtatttgggcttacatcaaagaacatgaccttcaggacccacaaaacaagagagaaatactgtgtgatgagaagctgaagaagatattcgaaggaagagatcgggttgggttcctagagattgcaaagcttatcggtcctcactttctctgatggattgttttcgcggaactttatttggatgattgtctatgtt

SEQ ID NO: 156992 - DNA, 443 bp, Arabidopsis thaliana columbia
tacattttcttccgatcaatacagatatgattgtttctgagagagaagaagatgtctgtggaggaagaaaacgttccaacgactgttgactcacgagctgccgatacaacggcgaaatctccggagaagaaaccggcggccaaaggtggtaaatctaagaagacgacgactgctaaagcaacgaagaagcctgtgaaagctgctgctccaacgaagaagaaaacaacttcctctcaccctacctatgaagagatgattaaagatgctattgtaacgttgaaggagagaactggatctagtcaatacgcgattcagaaattcatagatgtgaaacataaatcactgcctcctacttttaggaagcttatgcttgtgaatctcaagagacttgttgcttctgtgaaaatgtttaaagtcaaagctttttttaagattccttctat

SEQ ID NO: 156993 - DNA, 446 bp, Arabidopsis thaliana columbia
cgaaaacagggtcaacgaatgtgtgcaaattttatttttgtttcttgagtttaattcaggagtcaggatatttgattcccaaatctttgatttttgacttgcttacatcaaaagattcatccttttttaataatctgagctcaatccaatccaagacataccaacttcaaacaactctcttgtcctcgcccctcggatctgtttttcagaccaaacccatatcaaaagtttcaacatttaagctcaaaacagagccaaatcttgaatctttctcctccttgcaagttatggtagtagaagagcaaagccttgaaaacggcggatccgtacatgtggtcaaaggagaaagtaatttccgtaatgtggtgtgtggtcctgtacggtggctaaagatgttgtcttcagagcttcattggagctttgtgtttggtgtagtcttactatat

SEQ ID NO: 156994 - DNA, 269 bp, Arabidopsis thaliana columbia
  unsure (1)..(269): unsure at all n locations
gcgtccgtcacaacaaaaagcaagaatatattttatcattttgaactncagagatcctatagggagggggaacctaccgaggtgggggattactgtccaagtatgttcgggatgagggctagagttgcgttgcgagagaaaggtgttgagtttgaatacatataggaagatttctcgaacaagagccctttactcttccagagtaatcccattcacaagaaaatcccggttctggtccacaacggtaaaccggtatgtgaatcttttaa

SEQ ID NO: 156995 - DNA, 401 bp, Arabidopsis thaliana columbia
  unsure (1)..(401): unsure at all n locations
cgcgttcgaaaaactttttctcttttccgattttatttttctctcgtctgctntcctcaaaggggtggggatcactttatgcttcacaagccagctaatgaagctaacgataagaacgataataccatcatcggttccgatttagcatcatctaagaaacgccgtatcgatttcactgaatcttcgtctgataagacctcttcgatatatagcttcttgtaatagcattgtttttcacggttatagcgttgttcagtaaatacgcatggtttttggttaatctaaccgtcaggagattgatgaagatctgcacagtctcctactcgccgtttatggtcgtgagactattaggtctctctttagctttcaaagttctcatttcgttgatgcacgttcttggt

SEQ ID NO: 156996 - DNA, 410 bp, Arabidopsis thaliana columbia
gaccacgcgtccggtgaatctctttctcttctctttttttctccttggaaggaatctttgcttctggttgcgggggaggccgtacgaaaacaaaggaaaagagagagatggcggaagagaagaaagctccaatcagtgtctggactaccgtgaagcccttcgtcaatggcggtgcctctggtatgctcgctacttgcgttatccagccgatcgacatgattaaggtgaggattcaacttggtcagggatctgcagccagaataaccaccaacatgcttaagaatgagggcgttggtgccttctacaagggattatctgctgggttgctgaggcaagcaacttacacgacagcccgtcttggatcattcaagttgcttgctgcagaggcaaatgagtctaatgatggaaag

SEQ ID NO: 156997 - DNA, 430 bp, Arabidopsis thaliana columbia
ttaaaagttaaagccttttttttgtttaatccttttgctgaaatcgaatcggggcgtttgttgaaccggaggttgctgctgctggagttcccaagaagaggacgtttaagaagtttgccttcaaaggagttgatctcgatgctcttctcgatatgtctactgatgatcttgtcaagctcttctcttctcgtattcgtagaaggttctctagaggtttgacaaggaagccaatggctctgattaagaagctgaggaaagcgaaaagggaggcaccacaaggtgagaagccagaaccagtgagaacccacttgaggaacatgatcatcgtccctgaaatgattggaagcatcattgggagtgtacaacggaaagactttcaaccgggttgagatcaagcctgagatgattggtcactaccctgcttgagttc

SEQ ID NO: 156998 - DNA, 452 bp, Arabidopsis thaliana columbia
  unsure (1)..(452): unsure at all n locations
ggaaaaattctcaaantctctaacaaagagctctgtttattttggaaatcttaatctttgtgcgggggttaattttaccagtggcggcatcgaacttgaagaagtctcgatcggaaaactcatcagttgcttcatctggaagtaagattgaggagcagactgagaaatcagctgaaccaacaaccattaatgtgcataaaaaagccggttctccagggaggtcgatagatgtctttgctgtgcagtgtgagaagtgcatgaagtggtggaagattgatactcatgatgagtattgaagatatcagaagtagagtacaagaggacccgtttttttgccagacgaaagaaggtgtgtcctgtgaagattttggagatctaaactatgatttcttcagaacatgggtcatcgacatgcctggcttgttctggacaccaagagggttcaaaaggat

SEQ ID NO: 156999 - DNA, 450 bp, Arabidopsis thaliana columbia
cgcgtacggaagaagctaagacaatggcatccatggctttacctgatcatctcttcaatttgagaagcgcgtgggacttgggtgcttatggagctgcgatcaacaacagcgagatccctaatctttcgcaggaagatatcgtcgagcgagactgtctcgtccatcgcgcttacatcgctctcggaagttaccagcttgtcatcagtgagatcgatgaagccgctgctactcctctacaggcagtgaaactccttgctatgtatctatcgagtcctgaaaacaaggaatcaaccatttcgagcttgagggaatggttggcagatccaactgtaggaaacaatgctattatcaggttgattgctggtactatattcatgcatgaggaagactataatgaggctctgaagcacactcattctggaggaaccatggatctgcatgctttgaatg

SEQ ID NO: 157000 - DNA, 405 bp, Arabidopsis thaliana columbia
cgcgagacgagggttccaatcaaaatctatctgcaacatttatttttaatcgtttcagatcacgtatgtgctggttcaagaccatcggcggaacagattctgtctcctccgatagatccaagtcgcttttcccagcgatgagaacttatgcaactgcttctgctcaaacaaccgctaatgttaaggtgcctattgctttagttggtgaaaatgggaactttgcttcatggctatacattgcagctgtgaaaatgaattccttggaaaagattgagacggatctttctgagatgatcgaggcaatgaagacagctcctatttttgctcagtttacaaaggatccctctgttcctagagggacaagattggtttgttttagggatgcttgtgatcaagcaaagtttg

SEQ ID NO: 157001 - DNA, 307 bp, Arabidopsis thaliana columbia
aaatggttcctttcaggttcaattttactattttgggggaagagctctcccgacaggggtggattttcaacctaggatttacagtatgaacctctgggctacaaacgaggttcgtgccaagtccaagttctggaatttcttgaggaagctcaagatggtgaaaaagagtaatggacagatgctcgccatcaacgagatctatgagaagaacccaacaacgatcaagaacttcggtatttgtttgaggtaccagagtagaactgggtaccacaacatgtacaaggagtaccgtgacaccactcttaac

SEQ ID NO: 157002 - DNA, 403 bp, Arabidopsis thaliana columbia
gcgcatgaccttgctgattaacaggacggtgcgtccattttccgtgcactggactttatttggggatgggatttagacacaactacagtttggagattatccacagatcatgaaagacattgttggacatagattgcctaaatttacaactgagcagaaagcaaaactgaaagcttctaccgatttcgttgggctcaactactattcttcagtgttttcaaaccatttggagaaacctgatccttcaaaaccaagatggatgcaagattctcttattacatgtgagttttaagattgcgcaaaattacgccattggtagcaagcctttgaccgctgcatagaacgtttacttgagaggtttagaagtctgttgaagtacattaaggacaaatcgcaattctga

SEQ ID NO: 157003 - DNA, 449 bp, Arabidopsis thaliana columbia
ccgggcgaccacgcgtccgcggttccttcgctcagtttatcgtcgctgatcaatctcgtttgttccttgtaccggaaaggtgtggcatggttgctgcagctgcgcttcctgttgcgtttgggacttctcatgtagcacttgttcatagagctcgtttaacatctggtcaggtcttattggttctaggtgctgctggtggcgttggccttgcagctgttcaaatcggtaaggtttgtggagccattgtcattgcagttgctagaggaactgagaagattcaactgttgaagtcaatgggagtggatcatgttgttgatctaggcactgagaatgttatttcaagtgtgaaagagtttatcaagacaagaaagcttaaaggagttgatgttctgtatgatcctgttggagggaaactaaccaaggagttcatgaaagttctgaaatgggga

SEQ ID NO: 157004 - DNA, 442 bp, Arabidopsis thaliana columbia
  unsure (1)..(442): unsure at all n locations
accacgcgtccgtgggaatttgcaaagattaggggtattgattggggttggcctggtgtgatctgcctatagggtggggtcacatacttcccatgggacgttttcaagtttgccattcgatacatcttgagcggaaaggcgtggctcaacttgtttgagaacaagacggctttcacgatgaagaaagattacggaaaagaagagagagaggctcaatgggcacttgctcaaaggacacttcacggtttacagccaaaagaagctgttaacatcttccctgagaaaggaagttacagagaattgtctgagatcgctgagcaagctaagagaagagctgatatcgctaggctatgggagcttcacacactcangggacatgtggaatcagtcgtgaagctaaagggcttggacattgaaacctccaatcactacactgtgttgt

SEQ ID NO: 157005 - DNA, 403 bp, Arabidopsis thaliana columbia
gggaccaatgggtttcacatttttcctattgtaatttttttttttttcgaccacaaatagatcatggtcgcgtgttttaggaatagagcagttgttacctgattccgtttcaacgttgttcatcgaaacggtgaacggttcgcaccagttcacgattcaaggttactctctagccaaaggcatgagccctgggaagtttatacagagcgatatcttctccgttggtggatacgattgggcgatttacttctatcctgatgtgaagaacccggaggaccagtcctcgtatatcttctttgttcatcgctgtagcgagtgattctaatgatattagggctttgtttgagctaacgcttattgctcatagtgtttattggtaatattttttgcatttgctctttgt

SEQ ID NO: 157006 - DNA, 437 bp, Arabidopsis thaliana columbia
gtcaatctcaaatcatcttcaccctccttagatttttctacatctacttcctccgacgagccagggaccttcgccgatacggttcatgggcaatcatcaccggaccaacagacggaatcggtaaagctttcgcctttcagttagcccagaaaggtcttaaccttatactcgttgctcgtaacccagacaagctcaaagatgtctctgattccatcagatctaagtatagtcaaactcagatcttgaccgttgtgatggatttctctggagatattgatgaaggtgtgaaacggattaaggagagtattgaaggattagatgttgggattttgattaataatgctggcatgtcttatccttatgctaagtattttcatgaggttgatgaagagttgatcaataacttgttttagatcaatgttgaaggaactacttaa

SEQ ID NO: 157007 - DNA, 373 bp, Arabidopsis thaliana columbia
cccacactaatatatttgactttcttctctgtcttatatattcagctaaaagcagacctagggtttttgtatccgttccagtcacggacgacttctccgttctctgaactctcctaaagcctctatattcatcggattgttcatctccagtaaaccaatcttcagtttggtgaatttgtaagaatgagttaacgaaaacgtccggatccgaaatcatcgggaggtgatctaaactagccacacgagaagaagcttctggatctgattcgaattaaccaatgaagaggcgcaactatgttcgaattgaaacgcgagaaaacgatcccagcaactatagttactcgattgaacgcttctttaccgtagatgattt

SEQ ID NO: 157008 - DNA, 206 bp, Arabidopsis thaliana columbia
gcgttcggatttttcttgtaatggatgagaatattctttttatctcagctaactacttcatgggcgtggactgttacaacattggggtatggatataagagctataactagtaagccggacgcctttttgctgtgttttggatcttgacgagcagcatatgtttgtctcagtttttcctttatgtagttgttctaaattcagattt

SEQ ID NO: 157009 - DNA, 475 bp, Arabidopsis thaliana columbia
aagagaacaacttcttaaccacgaatcttcatagagagatttcaggaaacaaaatggtgaagatctgttgtattggagctggatatgtaggaggaccaacaatggcagtgattgcattgaaatgtccagatattgaagtggcagttgttgatatctctgttcctagaatcaacgcttggaacagtgatcagcttccgatttacgagccaggtcttgacgatatcgttaagcaatgcagaggaaagaatcttttcttcagtactgatgtggagaaacatgttagagaagctgatattgtctttgtctctgttaacacaccgactaaaacgactggtcttggagctgggaaagctgctgatctcacttattgggagagtgctgctcgtatgatcgcggatgtatcggtttctgacaagattgttgttgagaaatcgactgttccggtgaagacagctgaagctattgagaagatttt

SEQ ID NO: 157010 - DNA, 473 bp, Arabidopsis thaliana columbia
caaagagctacatatctagaacaaagggctgtaatgacttcccacatggacgttggggtgagtagacagtgcagcatacagtacactttcggattatcagtttgcgcgcccaaaaggacgtgacaagaagcttcagcaagaatgggtcgtcccactgaaaagcattgaagatgttcaagagaaattcaaagagctctgcattggaaacttaaaaagcagcccatggtctgaattagatggactccagccagagacaaagatcataaatgagcaactcggaaaaatcaacttcaacggtttcctgaccattaatagccaaccatcagtcaatgcagccaaatccgattctccagctattggatggggtggtcctggtggttacgtctaccagaaagcttatttggagttcttttgtttaaaggataatgtagacacacttgtggagaaattcaaagctttttcttctatcacct

SEQ ID NO: 157011 - DNA, 473 bp, Arabidopsis thaliana columbia
cgaaatgcagaattaccaaacctaaaaatggtttttgtttatatgtcttcctctcatatggagctgcttttgcggcctgactcatcgtcgcctctccagcaaatgctagatggaccctgtttgccctgccgtcgaacaaactaagccgggcaagtttccctgaaggttttttatttggcacggctactgcggcataccaggtcgaaggtgcgattaatgaaacttgtcgtggaccagccttatgggacatctactgtagaagatatccagagaggtgcaataacgataacggcgatgtggccgttgatttcttccatcgttataaggaagatatccaactaatgaagaatctaaacacagactcctttagaatgtctatcgcatggccaagaatatttcctcatgggagaaaggagaaaggagtgagtcaagctggtgtgcaattctaccacgacctcatcgactagctcata

SEQ ID NO: 157012 - DNA, 277 bp, Arabidopsis thaliana columbia
aatgctcaaccttatttcggtattttatacatttatcagatctggggaagttgctacatagttttggggtcaaaaccttttttgaatttacattttttgtactggttagtgcactaacaatgccataagagaggagagagtgaattcaaaatctactgaatctgcattatgttggtgcttaatagactcgatcttttccttgctcttgatgtgggaacatcaaaacgattgttatctacaatcttaggggatatattgacaaacataatgtggtacc

SEQ ID NO: 157013 - DNA, 187 bp, Arabidopsis thaliana columbia
  unsure (1)..(187): unsure at all n locations
ccttctgctccaactacttccttatctaaattctccgccgnnactnctcccacgtgcggttgcttctaaaactgcaactgcttctgctttttcaccggttgagttcaccaaaattctccactcctgtttgcgagttgtctccaccaccgacacttgttccagagagctctctttctgttcctgcacc

SEQ ID NO: 157014 - DNA, 314 bp, Arabidopsis thaliana columbia
  unsure (1)..(314): unsure at all n locations
ggaannncgggtcgacgacgcgtccgtgaactcatttttcaatctctcttgatttttatccattcttctccaagtgccggatccggaggtcggatcttctaagtctagctaggcataatggctactgtcactactcatgcctcggcctcgattttccgaccttgtacttcaaagccaagattccttaccggttcttccggtaggtagaaccgcgacttgtcgtttacatcgatcggttcatcgggcaaaacgtcttctttcaaggttgaagctaataaatgagaatggttgcccggtttggcattgcctgatta

SEQ ID NO: 157015 - DNA, 477 bp, Arabidopsis thaliana columbia
gaaaccgggggggaggacgcgtacgcatgatccaggcttaccttgtcacttacattcttcttatctctcacgcaaaagcggttggtgcttatcctaaatgcggaaagtttataggtgggaagatctaaattgcacatagtcctgcttgtttcaaagcacatgaccttgctgattcacaatactgatcgttcattgaccgtgcacttgactttaattttgtgatggcatttatacacaactacatttgtagattatccacatatcatgaaagtcattgttggtcatagtttgtctaaattttcaactgatcttaatagtaatattgtaagctttatatctgatttgtatgtcattaacttcttttatttcatttttttcataccattttaatgaatccttaattcttttatatccattatttgtttttatttttttttttatctcctagtgatattttatcaattcttctatttactt

SEQ ID NO: 157016 - DNA, 288 bp, Arabidopsis thaliana columbia
  unsure (1)..(288): unsure at all n locations
ggaannnccggccgccgacgcgtacgcaaacgaagcaacaatggtgaagttcttgattcagaacaaggccgtgatccttcttcaatgacgttatgccagaaagagaggcgtcatcatcaaatccttcgacgacggttaccgtgatcgtccttacggacactgccttgtcgccggactcaagaagtacccgagcaaagtcatccgcaaagactcagctaagaagacagttaagaaatctatggttaagtgtttcatcaagcttgttaattaccagcatctgatgcctac

SEQ ID NO: 157017 - DNA, 431 bp, Arabidopsis thaliana columbia
gcgtccggcgatgatgacgacgacgacgacaacatttttccatccactacttcctgctaacacttacggatgcggagctgtagctggttcctttgtctcagttcctcgttcgtcgtctctccaatttcgctcacttgtgtcagattctacgtcgatttgtggtccaagtaagttcaccggaaaaaacagaagagtatcggttaccgtttccgccgccgcaacaactgaacctctcaccgtcctcgttaccggtgccggtggaagaacaggacaaattgtgtataagaaattgaaggagaggtcggagcagttcgtggcaaggggtttagtgaggacaaaggagagttaggagaagatcaatggagaggatgaagtattcattggagatattagagatacttgcttaattgcttctgctgttgaagggattg

SEQ ID NO: 157018 - DNA, 436 bp, Arabidopsis thaliana columbia
  unsure (1)..(436): unsure at all n locations
cgtacgccacacttgaatcacaaacaacaacaaatgtttctcattgcagattcacaaactctgttgggttggtntgttcttagctaatgcagcttttgccgtcaaattcaacttcgattccttcgatggcagcaacttgttattccttggagacgctgagcttggtcctacctctgatggcgtaagccgatccggagcttttttcatgacccgagacgaaaccccattctctcatggtcagggtctttacatcaattcaatccaattcaaatctttaaacacttcttctccttttgattataaaacttttttcactgtctccatcactcctttcaccaaacctaattctggtcaaggccttgcctttgtcattgtcccagcctctgataacttcggcacttccggctggtgatatctcggaatcctcaacataacc

SEQ ID NO: 157019 - DNA, 332 bp, Arabidopsis thaliana columbia
tttacatacttacaatggtgctccgatttcttttagtgagcaggccttcattttaaaggcgggttagcttggagctggggagagactccatccttaatgttctgagcacacagtttttgtttgagacttgtcacctgatgttaccgaccacatgcttactgaaacttttaaagctgtgtattcctttgtcaaggtatctaaagttgttaatgatagtactactggactgtccaagggttattgatttgtcatgtttgctgatgaaagtgagcatatttgtgccatttactgatatgaatggtcaatactgctcattaatgtctattcttact

SEQ ID NO: 157020 - DNA, 241 bp, Arabidopsis thaliana columbia
ctcaaatctctcctctcttctttcttctttttcaatacaatacaatcaaaaggagagatagataaagttagagcaaaacactgtctgaaacaaacaacaaaaaaatggcttgctctaatctaacaacaatgtgggtttcatcaaaaccatctctttctgctgattcatcttccttatcattccgatctgttctcaagtgcccaactaacacttcctcacctttttcacgagctatctctgt

SEQ ID NO: 157021 - DNA, 280 bp, Arabidopsis thaliana columbia
cgcgtccggtaaacttactttggtgtcatgaccacttttttcctattgaacacaaccatcccaaccagcgaggtttaaatcttatgcacctactcacacaaccaacccgttgtgttgatccaggtgtacgaaggagagagagccataaccaaggacagcaaccttcttggacaatatgagctcttcggaatatctccagctccttgtggtgcaccccacatcacagtctgctttgacattgatgccaatggtattcctaatgtcttagcatgtggacaag

SEQ ID NO: 157022 - DNA, 224 bp, Arabidopsis thaliana columbia
tgacgcatggcctgttttgaattccaatttttttgaatttggtgttagattggggtaggctttaattgagatttggctgttaactctaaattcgataggaagcagtatttttatccagatcttcctaaaggttatcagatttctcagtttgatattcctattgcatctggtggttatgtggatgtggatattcctctcgagtatggtggtggacatatgaatat

SEQ ID NO: 157023 - DNA, 318 bp, Arabidopsis thaliana columbia
  unsure (1)..(318): unsure at all n locations
ggaancccgggccgaccgacgcgtccgtaatgaacactttggtcttgttcatgtggtttcctttcgcagccgcagccgcagcagccggactcttcgtctctctttgcatcccttactctttatcaatcccgatcctcgccttttccggttgcagactaaccgtcactaacgactacgtttcatctcaaaaacaaaaaccaagtcaacgcaaaggttgtctctttgtttgtaaccataggactttattggaccctctctatgttgcatttcgcttgagaaagaaaaacatcaaaactgttacgtatagtttgagtaggg

SEQ ID NO: 157024 - DNA, 256 bp, Arabidopsis thaliana columbia
  unsure (1)..(256): unsure at all n locations
ccctcacaccctaaaactcatcaacaattgtcttttttttttcagatctacacacatagcggggtgttaaattcgtggaggagcacctctccntaaaaacctacatcttcggagatcaattgtctgtggatgatgtcaaggtatactctgccgttccagtgaaacccagcgatgcctttcccaatgctagcaagtggtacgagtccgtggcttcctaacttgctaaaagtttccctggaaaggcctttggagtaca

SEQ ID NO: 157025 - DNA, 403 bp, Arabidopsis thaliana columbia
  unsure (1)..(403): unsure at all n locations
caatcttaaaatatnatattcccacgatttcttctctttaatttcgtcaccactatcttgcacgtgtctcaacaaccaggcgctccaaaatcaatctccgattactccctctccgctccttctccgtcatgttttcttcaaccccacatattcagatcatttaacacatcttcttattcaaaaccaaagactactctttctccaccaaaatcacctccatgatcaacaacctcaacgctcttgcatatctcgatcaagtgcttcacatcttcacctctcctctccaccgtatcttctccgttaccggcttcactcacttactccatagccgttactaatctaaagaatatctatcctcctacgcttcacattcatatcacgtttctgttgttaaggaatcttt

SEQ ID NO: 157026 - DNA, 410 bp, Arabidopsis thaliana columbia
aaaagcaaaaaaagatgcatatctttttttttaccctaacggggaagacgatcacgggtcggggtctagtcctctgacaccatcgacaatgtcaaggccaagatccaagacaaggaaggaatcccaccggaccagcagcgattgattttcgccggaaagcagttcgaagacggacgtaccttagccgattacaacatccagaaggaatcaacgcttcaccttgtccttcgtctccgtggaggtgctaagaagaggaagaagaagacctacaccaagcctaagaagatcaagcacatgcacaagaagggcaagctcgctgttcttcagttctacaaggatgatggttcaagtaaggttcagcgtttgaggaaggagtgccctaacgcaacctgtggtgctggtactttcat

SEQ ID NO: 157027 - DNA, 295 bp, Arabidopsis thaliana columbia
ttcgagaccttatcctcagtcgcgttaatatcgggtgtcggcatctccactgtgctgctgaatataggaattagacctaatttggctatgctcttacagaagcattcaagactggtctggttaagagggatgatctcttcattacaaccaagctatggaatatataccatggccatgtcatttatgccttcatagacagtctcaagaaactttatcttgattacctcgatctcttccttgttcattttcccttagcaacgaatcacaccggagtacgtacaacctatagtgcttt

SEQ ID NO: 157028 - DNA, 447 bp, Arabidopsis thaliana columbia
actaacaatttatttttacatctacatattatttttaagtactatcaagaatcacaagggggggggtatattttaagcacagggaggttaatcagccaacctatttaactattgatctacacatgattcctttactaatattcattttcttatattcatatactgtatttaatattatcagtatgactatttcaagaatttacaacccttacatgcttcttttcttatttccaaaggtcgatttctttcagctgatccttattttattaaccatccatactaacatcttattttcttttgaaggatggtatagtcctctaattattcatttctaatgaattatagtttatcttccaacatgatagacttctgatattattttattcaattatgtttctcattttattttacatattaaaaacaatattatcatagcttattatatat

SEQ ID NO: 157029 - DNA, 394 bp, Arabidopsis thaliana columbia
gttcatttctcctccattgatctttcttttctcatatctttcctcttcctctgagatgtgcagctattttaggttaccggtggtagctctatctctctttaaggatagcatcataatggccaaggctgcgacgattctccttcctagtcaaaccggatttgatatttctcggagtccggtatgctctgctccggatccgaacctaaattacagaccggttattggtattctgagccatcctggcgacggtgcttcaggtcgtttgagcaatgctacagacgcgtcctccattgcggctttggatgtgaaaggagctgaatctgttggagcacgagtgatcccactcatctttaactgagcctttagaaattctctttcagaagctaatattggt

SEQ ID NO: 157030 - DNA, 460 bp, Arabidopsis thaliana columbia
agcaaaagcaaggagaaaccctaaccatggttacacatccagctactgaatctgtgcagggcttcggtaggaagaagaccgcagtggccgtcactcactgcaagcgtggatctggtttaattaagctcaacggttgcccaatcgagcttttccagccagagatcctccgattcaagatcttcgagccgattcttctcctcggaaagcaccgtttcgcaggtgtgaacatgaggatccgtgtcaacggtggtggtcacacatcacaggtttacgccatccgtcagagtatcgcgaaggctcttgttgcgtgctaccagaagtatgtggatgagcagtcgaagaaggagattaaagatatcttggtgaggtatgataggactctgcttgtggcggatccgaggaggtgtgagcccaagaagtttggttgtcggggtgcttgttctctgtaccagaagagtta

SEQ ID NO: 157031 - DNA, 428 bp, Arabidopsis thaliana columbia
  unsure (1)..(428): unsure at all n locations
aaacaagtanaaactttaaaacgagtttgatttaaagaaatggctacatctttaacgtgcgggacatatgtttcgttggaaggatcgtcttataaacactacaagagctggaagagcgagaaccatgtcttcgctgacgccattggccaccacatccaaaatgtcgttgttcacgaaggcgaacatgactctcacgggtctatcaggagttgggactacacatatgatggaaagaaggagatgttcaaagagaagagagagatagatgatgagaataaaacattgactaaaagaggactggatggtcacgttatgtatcatctcaaagtatttgatatcatctacgaatttattcccaaatctgaggatagctgcttctgcaaaatcactattatttgtgagaagcgcaccgattactttccctaacc

SEQ ID NO: 157032 - DNA, 235 bp, Arabidopsis thaliana columbia
caacaaatcttaaacgttttactttgtttcttttctactcaaccacaatattctactgggcaggttttatatcctgcgcggccttctccattaatgccatcaatctttcccccgcgacatctgaagtcctattaagcggtctcttgacaatgaggaagacttttgccaagccaaaagtcccatcattctacccattatacagatctgacctcttaattacttgctccattcttct

SEQ ID NO: 157033 - DNA, 400 bp, Arabidopsis thaliana columbia
gcttttgattacaaggttaaggcgatttacacattcaggtgtccctttctctctgcgaagaagtatcaacattacaagtataaggatctacttgctcatgcgtctggagttgccaaaggatctgcgagtagaagtgcttagcaaaaagcacatcactttgcctttgctaaatacatggagaactagctttctggtgatgctgatgtcccacgcccacaaattccctcttcctcaacggtacagtctcatgcagtagtggatgacatttatgtttggcctttggatgggtattgtcattaaccctgtgagaagaactgataacaagaatgtgcttcttgatttcaccctactggttgaagaagcttcactaggttcaattcctcatgataagaaaaccctt

SEQ ID NO: 157034 - DNA, 184 bp, Arabidopsis thaliana columbia
tacactatgaatcttccatcgtttacgatagtgacgccaacctccacaacgtggctatgtttaatttaatgccacccaaagatactataattgcggaagctcatacgcctgattgatacacacagtacgtcttcgtgcatctcttctcttcttctgcactcattgacttctcctcaaccatcct

SEQ ID NO: 157035 - DNA, 499 bp, Arabidopsis thaliana columbia
  unsure (1)..(499): unsure at all n locations
ggaannccggtcgacgacgcgtgcggttggaaaattaatggacaaaagcgttggtttggaaacagcacctttgcagatctgttggggatctgtgcgaggaatacaacaactaaccaaatcaacggattcatagtcaagaaagatgcgcctggcctaaaggctactaagatcccaaataaaataggtttacgtatggttcaaaatggagatattctactacagaatgtctttgttccagatgaggatcggttacctggggtaaattcttttcaggacaccagcaaggttctggctgtctcacgtgtaatggtggcctggcaaccaatcggcatatgaatgggaatctacgatatgtgccacaggtatctgaaggagaggaaacagtttggagcaccggtggctgctttccagttaaaccaacaaaagcttgtgcagatgctgggtaacgttcaagccgatgttctaatgggttggcgtctttgcaagctgtttgagacgg

SEQ ID NO: 157036 - DNA, 385 bp, Arabidopsis thaliana columbia
tcgaaaagacaagatgtttctcaggattttatttttctcgtcaaacacaactaaagacgggggagctgatagaaatggctgttaatacatttcaagctttgatctttcttggtctatatgccgcctcatgtctagcttaagcttcggctccggcacctatcacgtttcttcctccgtttgagtcttcttctccagttgttacaccaactgcagataccaccgtcttccgttgcttcaccctctatttcatccaacgatcccatttctgtttcaacatcttcaccatccgttttactcctgaccttggggcccacaacttatctctgttgtttctctttctataccatatgctttggcttcaggcccatcaggtcctacaccatct

SEQ ID NO: 157037 - DNA, 357 bp, Arabidopsis thaliana columbia
gcggaactggatttggggagaatggtttcttctttagctcaatctagaatctcggggcgggagaatcatctttcaccgcttgaagcaaacaacaagctcaggagtctggtcaagatttctccccaagtatctgaagccttgtctaatggacgtgctgttgtcgctcttgagtcaaccattatcttccatgggatgccttaccctcaaaatctgcatacagcaaaagaggtggagtcaattgtgagagaaaatggagcaatccctgcaacaattgctatccttaatggagtaccttgcataggcctgagcgagtaataactataacgtttatcatctttcggaaaaagtgtccaaaag

SEQ ID NO: 157038 - DNA, 371 bp, Arabidopsis thaliana columbia
  unsure (1)..(371): unsure at all n locations
cgtgcggtcaagcactagcaaaagcttgactgcggttttggcttcatgaagctactaantantgagggttacggaaataaatttggtggacacacaccatacagtatcatttttggtcctgatatctgtggctacagcacatagaaagtgcatgctatccttacctataatgaatccaaccacctgatcaagaaatatgttccatgtgaaactgaccagctcacccatgtgtacacatttatccttcgtccatatgctacttacagtattctcatcgacaatgtatagaaacatactggttttctttactgtgactgggattcttttctcacccaataagatcaaggatcccagtgccaataagcctgatg

SEQ ID NO: 157039 - DNA, 451 bp, Arabidopsis thaliana columbia
tgctttcaggtttcaccagtaccaggttgtgttatgagctctcccgacagagaatgatgggcggggctaagatttacagggtgaagctctgggctacgaacgaggttcgtgccaagtccaagttctggtatttcttgaggaagctcaagaaggtgaagaagagtaatggacagatgctcgccatcaacgagatctatgagaagaacccaacaacgatcaagaactttggtatttggttgaggtaccagagtagaactgggtaccacaacatgtacaaggagtaccgtgacaccactcttaacggagctgttgagcagatgtacactgagatggcatcccgtcaccgtgtcagattcccttgcattcagatcatcaagacagccactgttccagtcaagctgtgctagagagagagcactaaatcagttcacaacagcaagatcaagttccc

SEQ ID NO: 157040 - DNA, 273 bp, Arabidopsis thaliana columbia
ttctacttccaaaactggcatgcacgtatattcttaatgtcactttgatgctatcgaggggcgggactgctaagaagcttgaagatattgttccatcttcccacaattgtgatgttccacatgtgaaccgtgttgattaccatttgattgatatcactgaggatggctttgtgagccttctcactgtcagtggtggtaccaaggattgtctcaagcttcccaccgatgatggcctcaccgtccatatgaggcttgatttcaatgagggaaagg

SEQ ID NO: 157041 - DNA, 301 bp, Arabidopsis thaliana columbia
cgtgcgcttattttttttagtggtgggaaaaggttttttttttattttccgttatcgttatataggctaggtgtatggtgtcatggtaattttggatgattggccttctcatgaactagttctatgtatgatgcaaccttaaaaagatttaaattagcaaaaattagttacaaacttgctatatttaccaaaaattatgaaactatctttttttgataaaaaaaataataaatatttatattaatattttaaaattaaataattaattattgggtggtcgcttttgaggatccaattttac

SEQ ID NO: 157042 - DNA, 422 bp, Arabidopsis thaliana columbia
gaattgggggggcgacccacgcgtgcgaaaaaaaaaaaaacacaaaaagttttaatggccgcctccacaatggctctctgcgggcctgccttcaccggaaaggctgcgaacctttcccccgcgtcatctgaagtcctcggaagcggccgtgtgacaatgaggaagactgctgccaagccaaagggtccatcaggcagcccatggtacggatcacgaccgagtcaagtacttgggaccattctctggcgagtcaccgagctaccttaccggagagttccccggagactacggatggtacaccgttggactttcaactgatcccgagacatgcgcaaggaaccgcgagctagaagttatccacagtaggtgggctatgctccgaaccctaggctgcgtctttcctgagcttttggctaggaacg

SEQ ID NO: 157043 - DNA, 399 bp, Arabidopsis thaliana columbia
atttactcctttttattcaaggggacggcatattatcctatgggcgaaacacctttacttttttgacctctatacccggacttgttccatttcttcagccaccgttgactttccacaccttttttgtttatgtttccggatggtgtcagtaggatctaccctctatttctttggatgcctatacgcttcacgccaatacaactgtttctacttgtttgacactaccactaacgagtgttaactgtttacttccttctaagaaggacccactcttcgtagtttccactcaatggcaatcgatgaggtaaacttcttcttttttcttagtagatagtgttaccgtacgacttattatacttttcttttacaacatcctttattataaatattttcattttt

SEQ ID NO: 157044 - DNA, 490 bp, Arabidopsis thaliana columbia
ggccgccgacgcgtgcgagaagagttcacatagagagattttgtgcgtttcgagattttcttcagtcccaatggcgggggacacgcagcaacgacagtttgcagcatagaccacggcaaagaaacggaccacctcctccgcggcgacagggaagaaatccgccgcctccgtcttcgtcaacgcgaacttctcagaatcagccaccacagcatacgccgcaggagaagaagaaaccggtgtttgtcaaagtggatcagcttaaacctggaacgagcggccacactttgactgttaaagtcgtcgatcagaattccgtacctcagaaacggggagctgcttcttcttctcatctccgacctgctaggatctctgagtgtcttgttggagatgagactgcttgcatcctcttcactgctcgcaacgatcaagtggaattgatgaaaccaggagctactgtgaattttcggaatgcaaagatagatatgttcaa

SEQ ID NO: 157045 - DNA, 476 bp, Arabidopsis thaliana columbia
gcgaccacacacaacaaaagaatagtgatcgattctcatggcgtctcttgcaaccgtcgccggggtgagagcatccgccgccatagaaggactcggcggcagctcactcgccggagctaagctctccatcaagccttcccgcctgagctttaaacccaaatccatccgggctaatggtgtggtggctaagtatggagacaaaagtgtctactttgacttagaagatttgggtaacacaacaggtcaatgggacgtatacggctctgatgctccttctccttacaatcctcttcagagcaagttctttgagacatgcgctgccccattcacaaagagaggattgctcctcaagttcttgatccttggaggaggctctttgcttacttatgtcagcgctacctctaccggcgaagttcttcccatcaagagaggtcctcaggagccgcctaagctcggtcctcgcggcaagctctgat

SEQ ID NO: 157046 - DNA, 450 bp, Arabidopsis thaliana columbia
agggtttctctttgtcttcagcagtcagttttcatccgtaggagaaaagtgtgagaatgggccggatgggtcgtatgcacagtcgaggaaagggtatttcagcctctgcgttgccttacaagagatcgtctccgagctggctcaagaccacctctcaggatgttgatgaatcaatctgcaaatttgccaaaaagggattgaccccttcccagattggtgtgattctccgtgactctcacggtatccctcatgtcaagagtgttactggaagcaagatcttgaggatactcaaagctcatggccttgctcctgagatccctgaggatctgtaccatctaattaataaggctgttgccatccgtaaacatctctagaggaacaggaaggacaaggatttcaagttcaggctcatcttggttgagagcaggattcaccgtctcgctcgctttt

SEQ ID NO: 157047 - DNA, 269 bp, Arabidopsis thaliana columbia
  unsure (1)..(269): unsure at all n locations
cttcctctttatttaatttattccaccaccaattcttatccgggctgttttatacgtatgagttggggcntccaaccatttaactatcatttagctcattattacttctattgttacatctttacttgtgatgcaactcttttctgtttccaatattattgatgttgacaacaatgttcttgatgatcttgccctcttaaattgtgcttaaaatcttctatgttttcttattgctcatttttacgcttttgcatatgttctttctacaa

SEQ ID NO: 157048 - DNA, 455 bp, Arabidopsis thaliana columbia
tttgtctgaaaaaaatctttgtgctaagcatgaaaaatgtcgtcgacccatcaggtagttgcttcgatgatctcttcttcctcatccactttcttagccccttcaaattttaatctcagaactcgaaatgcttgcttacccatggcaaaacgggtcaatacttgcaaatgtgttgctacgccgcaagagaagatcgagtataagaccaaagtgtcacggaattcaaacatgtccaaacttcaggctggatacctattcccggagattgcaagaagaaggtctgcacacttgttgaaatatccagatgcacaagttataagtcttggaataggcgacacaactgagccaattcctgaagtgatcacttctgctatggcaaagaaagctcatgagttgtcaacaatagagggatatagttggtttggtgctgaacaaggtgcaaagccactgagagc

SEQ ID NO: 157049 - DNA, 373 bp, Arabidopsis thaliana columbia
  unsure (1)..(373): unsure at all n locations
aatgcattttatatgcctcacactgctttatatctataaatcgctagaactcattatatcgtnttttgaaacatcccctaggcatccttccttcatcaatgccataatgatcattattaattctgattcgtacaaagctgatactgaactttcagacaattaattggtctttgtgtctgtcaatgaaccctcctctgatgatactgacattgacattaatgatattgcatcttgattgtgtagatcatatgtttcttcatctcaaccatcttctggattgttgattattcctctttctttgggtgctggtgcggagttcaatttctaaaaagaatcatactataaatcttcatttaaccttttatttttatat

SEQ ID NO: 157050 - DNA, 466 bp, Arabidopsis thaliana columbia
ggaaaacccggcgcgaccgcacgcgtccggacaaatctagtcgttcctatgcttttgtgttatctatccttgaaactgtgtctggggggggtgtcatgtgttgtgaggttggatcttgagtgtgatgcacttcttattgagatgttccagcatttcctcaaggctataagggaccatcattcagggaatgtattttcatctatggagaacataatgacccttgttttagaagaaagcgaggatataccttcagagatgctttcaccaatcctacattctgttaaaaaggatgatgagatttcccaagtatcacggatgttgtcagaacaagttctcagttactgttctagcaagctcaaaacttatctgaccgaagcagtgaaatcgtcgggtgttcctctagataagtatagtaacatagtggttttgatatgtgaagggacattcagtgtcttgcatcatgacc

SEQ ID NO: 157051 - DNA, 226 bp, Arabidopsis thaliana columbia
gcgggattcaacaatgagggtggtgatggtaattttctcttaaggacctttgagcgtcataggggaactggcaaagggagtgactacaagccttactgatctcttcgtgggaatagtggaactccaatggaagagatagctgctgagactgaaacataagctggtgttgagactgagaaagatgttgtagagaatccagacattgattatataaccactgatgcta

SEQ ID NO: 157052 - DNA, 504 bp, Arabidopsis thaliana columbia
  unsure (1)..(504): unsure at all n locations
ggaanncccgggcggacgggcgcgtccgcggacgcgtgggaagagagatttaatacaattgaatgagaaaaaagaaagatatggcaggagtcatcaacaagatcggagacgcactccacattggaggaggcaacaaggaaggtgagcacaagaaggaagaggaacacaagaaacacgttgacgagcacaagagtggtgagcacaaagaaggtattgttgacaagatcaaagacaagatccacggtggtgaaggtaaaagccacgacggagaaggcaaaagccacgacggtgagaagaaaaagaagaaggacaagaaggagaagaaacatcatgatgatggtcaccacagcagcagcagtgacagcgacagcgattaaggtgaggaagtgaggaggatcgcttgaataaaacagatctggttctggctattattaattaatgttgctgtatgttcttatcatcttagagagagggtaaagacaggagaaccgtgcatctatcttt

SEQ ID NO: 157053 - DNA, 479 bp, Arabidopsis thaliana columbia
  unsure (1)..(479): unsure at all n locations
cgggccgaccgaggcgtacggatctctctcgttacggtgaggctgaggctgtatttgagattgagagagaccaaccatgggacggcttatcaccgagagagcttctggtttcnctaagaatattccgattctcaaatcgtctcgatttcacggcgagtccctcgattcctccgtctcccctgttctcattcccggcgtccatgtcttccattgtcaggatgctgttgggattgtagctaaactatcagattgcatagcagcaaaaggtggcaacattcttggctacgatgtttttgttcctgaaaacaacaacgtcttctactctcgcagcgagtttatctttgatccggttaaatggccgagaagccaagtggatgaagattttcaaactattgcacaaagatacggtgccttgaattcagttgtgcgtgtgccttctattgatcctaagtataagatagctcttcttctttcaaaac

SEQ ID NO: 157054 - DNA, 487 bp, Arabidopsis thaliana columbia
  unsure (1)..(487): unsure at all n locations
ggaanngcgggggcggccgacgcgtccgcgccattggagtttgaaagggaattattcttcgttttatggatcattgtcgttggggtgtggttatcttcttcttctttcgctaccacaatttaaagcctgactagatccatcatcggccatggaggattctacagccacggctacgtcttcgtcttccactcattatttctccattttcacgaattatcctctcattttcgccgtcacctctttcactatcgctcaattcatcaaactcttcacctcctggtatagggaacggagatgggatctcaaacagcttattgggtctggaggaatgccttcttcgcattcagcgaccgttacagctctcgctgtagctattggtttacaagaaggctttggtggatcacattttgccattgcttttgatttggcatctgtttgtgatgtatgatgctaccggtgttagattacatgctggtcgtcaagctga

SEQ ID NO: 157055 - DNA, 468 bp, Arabidopsis thaliana columbia
catagctcctaacaaagcaatatcatttccaatttataaaagttaaagccatgggtgcatgggtctctgtcccctctatgataatggaagaagaagggagattcgaagcggaggttgcggaagtgcagacttggtggagctcagagaggttcaagctaacaaggcgcccttacactgcccgtgacgtggtggctctacgtggccatctcaagcaaggctatgcttcgaacgagatggctaagaagctgtggagaacgctcaaaagccatcaagccaacggtacggcctctcgcaccttcggagcgtgggaccctgttcaggtgaccatgatggctaaacatttggacaccatctatgtttttggttggcagtgctcgttcactcacacattcactaatgagcctggtcctgatcttgctgattatccgtacgacaaccgtcctaacaaggttgaacaccttttcttcg

SEQ ID NO: 157056 - DNA, 447 bp, Arabidopsis thaliana columbia
  unsure (1)..(447): unsure at all n locations
cgatcggctcctaccttctttgcctacaagcatacacgctggagctcaacatcanccatggcggtactgtttgaaaaagcttttcttaagcagcctaaggtcttccttagctcgaagaaatctggaaagggaaagagacctggaaaaggtggaaaccgtttctggaagaacattggtttgggcttcaagacttcctcgtgaagccattgatggagcttacgttgacaagaaatgccccttcactggaactgtttccattagaggtcgtatcttagctggtacttgccacagtgcgaaaatgcataggaccattatcgtgcgaagggattaccttcactttgtgaagaagcatcacaggtttgagaagaggcattcaaacattccggctcatgttttaccatgctttcgtgttaaggaaggagaccatttcatcattggccaagcatg

SEQ ID NO: 157057 - DNA, 242 bp, Arabidopsis thaliana columbia
ttagggtggactacaagaatactagtgaaacagctcacgcaatcaggaagctaccattgatcaaggcgaagaggtaccttgaggatgtgatatctcacaagcaagcaattcccttcacacgtttctgcataggtgttgggagaactgctcaagctaagaacatgcactctaatggtcaaggacgtatgccagccaagtctgcttagtttgttcttgatttgttcaagagcgctgagagcaat

SEQ ID NO: 157058 - DNA, 467 bp, Arabidopsis thaliana columbia
gtgggtttcaagctaacgggaaagttaagatgtatgtaatgacagctactgatttggtcttagcagtgactcagatgttgaggaaacatggagtagttggaaagtttgttgaattccacggggaagggatgagagaattgtctttagctgaccgtgctacaattgccaatatgtctcctgagtacggtgcgaccatgggattcttcccagtcgatcatgtcactttgcagtatctaaggttgacaggcaggagcgatgacactgtctccatgatagaggcgtatttacgagcaaacaagatgtttgtggattacagtgagcctgagagtaagacatgttattcctcatgtctggaattgaatcttgaggatgtggaaccttgtttttttggttccaagaggcctcatgatcgtgttcctttgatggaaatgatagcggtctggcattcttgcttggacaatatagta

SEQ ID NO: 157059 - DNA, 233 bp, Arabidopsis thaliana columbia
gcgtacgtttgtatcttctttgattgatccacatggtttttctttgccgcaagttccgccttttcacgcctgaatttcaccggcgctggtgctccctcctctctaactcgcgcacgtgcctcccttctgccaatttcctctacctctgttttcgcgcgtcctctatgcttcttcgccactctagattcccgtcgtttctctctccacgttgctttcaaagttgaatctatgct

SEQ ID NO: 157060 - DNA, 116 bp, Arabidopsis thaliana columbia
cgtgactctcatgttcctattctagcacctttctttatcggattcgctgtgatcttggtgggagggagtaaccatcccctatgactggaactgtaatcaatcccacaagaagtttt

SEQ ID NO: 157061 - DNA, 283 bp, Arabidopsis thaliana columbia
gggggggacggacgcgtgctacaaaatcaaagttgtgatgaaatttctatttttgagaaccggttcgatgccgcgtcttgagtaaccggttaatttgaggtggttcatcgcggaagatgacgcctatctccaggaccaactccgtcgaatcattatccagctacggcgagagattcgccggtgggaagatttcgatcgaggttaaggctaatgtagggatgcggagggtgttatcggaaagtgatgtgattagatctgagagaatgttgaaaagagttggatc

SEQ ID NO: 157062 - DNA, 429 bp, Arabidopsis thaliana columbia
gggtttttcgcctctttctcaactctcttctcgaaaacctagcagtcgtctctttctcagttctccatgggaaagtctaaatccgccaccaaagttgttgcagagattaaggccactaagcctttgaagaaaggcaagagagagcctgaagatgatattgacaccaaagtgagtcttaaagaagcagaagaaagacgtgattgctgctgtccagaaggaaaaagctgtgaagaaggttcctaagaaggttgagagctctgatgattcagattctgaatctgaggaagaggagaaggctaagaaagtcccagccaagaaggctgcttcaagcagtgatgagtcatctgatgactcttcttcagatgatgaacctgcacccaagaaggccgttgctgctactaacggaactgttgcaaagaagtctaaggg

SEQ ID NO: 157063 - DNA, 381 bp, Arabidopsis thaliana columbia
aaccaaatgagcttcgtgtggtccgctgcgttgtgggtcatagctgtagccgctgtggtgagtagcaaatggttgtaccgatggtcgaacccgaagtgcaatggcaagttaccaccgggatcaatgggtttaccgatcatcggagagacatgcgacttctttgagccccatggattatacgagatctcaccctttgtcaagaagaggatgttaaagtacgggccattgtttcggacaaatattttcggatcgaacaccgtggttttgacagaacctgatatcatcttcgaagtttttcggcgagagaacaagtcttttgtgtttagctatccagaagcctttgttaagccatttggaaaagaaaacgtgttcctcaaacat

SEQ ID NO: 157064 - DNA, 419 bp, Arabidopsis thaliana columbia
ccgggcggaccgcacgcgtccgcttttctttgatgagctcgactccatttcatctcagagaggaggtggaagtgctggcgagggatgttttactgcggacagagtctttaaccaacttttgactgagatggacggaatgaatgccaagaaaaccgtcttcatcatcggagctaccaacagacctgacattatcgattcagctcttctccgtcctggaaggcttgaccagctcatttacattccactaccagatgaggattcccgtctcaatatcttcaaggccgtcttgaggaaatctcctattgctaaagatgtagacgtgggtgcacttgctaaatacactcatggtttcagtggtgctgatattacttagatttgccagagagcttgcaagtaccccatcagagaaaacatttgag

SEQ ID NO: 157065 - DNA, 456 bp, Arabidopsis thaliana columbia
ccggaacggaagtcccggccggcgcgtccgcgttgattcaaactcattttccgatcaaactgcatatttttccctctcgagagagcgatggtgtggaaactgaagatcgcggaaggaggtagtccatggcttagaaccaccaataatcacgtcggaagacagttttgggagttcgatccgaatctcggtactcctgaggatctcgccgccgtcgaagaagctaggaagtcttttttcggataatcgattcgtgcagaaacatagcgccgatctgcttatgcgccttcagttttcaagagaaaatttgattagcccagttttacctcaagtcaaaatcgaagacactgatgatgttacagaggagatggtggaaaccacgttaaagaggggtctagatttctattcaactatacaggcacacgacgggcactggccaggtgattatggtggtcctat

SEQ ID NO: 157066 - DNA, 462 bp, Arabidopsis thaliana columbia
ggaccggaaaggccggggcggaccgacgcgtccgtttagaagccgtcggcacaagaagaagaatatgatgaatgtctcacaggaagtttgagcacgccaagacatggttctcttggtttccttccaaggaagagagctaaccgtcacagaggaaaggtgaaggcgttccctaaggatgaccaaaccaagccttgcaagttcacagctttcatgggttacaaagctggtatgactcacattgtcagagaagtggagaaaccttggatccaagcttcacaagaaggagacatgtgaggctgttaccatcattgagacacctgctatggtggttgttggagttgttgcctatgtgaagactcctagaggtttgaggtctttgaacactgtctgggcacagcatttgagtgaggaggtcatgagaaggttctacaagaactgggctaagtctaataagaaggcttt

SEQ ID NO: 157067 - DNA, 353 bp, Arabidopsis thaliana columbia
aaagactttttcaacttttaagaaaggacacaagatggttacttggaagtgggtttgcttggtaactttggcattctggaggagccagctggtgccctcttcccttctgtttgtgtactcccttgactatgcccgtacccgtctagctaatgatgccaaggctgcaaagaaaggaggtggtggaagacagtttgatggtcttgttgatgtctacagaaagacacttaagactgatggtattgctggtctgtaccgtggattcaacatctcatgtgttggtatcattgtctaccgtggtctgtactttggactctatgactctgtgaagcctgttcttctcactggtgacttac

SEQ ID NO: 157068 - DNA, 436 bp, Arabidopsis thaliana columbia
cgaagatgcaaccgacagagacgtcgcagccggtgccgtcggatcaaggccgccggcttagggatcagttatcggagagtatgagcttcagtagccaaatgaagaaggaagacgatgagttgtcgatgaaagctttgtcggcgttcaaggccaaagaagaggagatcgagaagaagaagatggagatcagagaaagagttcaagctcagcttggtcgtgttgaagatgagtccaagcgtctcgctatgattcgcgaggaacttgaaggttttgctgatcccatgaggaaggaagttactatggtgaggaagaagattgattctctcgacaaagaattaaagccattggggaatacagttcagaaaaaggaaacagagtacaaggatgctcttgaagcattcaatgaaaagaacaaggagaaggtggagctgatcac

SEQ ID NO: 157069 - DNA, 465 bp, Arabidopsis thaliana columbia
  unsure (1)..(465): unsure at all n locations
cggaaannccggggcggcccggcgcgtccgataaaaactaagaaaattgactcaaaaacaattataaaaaatgaaattcccgatttcataggggggctccattgtagaattcgggcctaatgattaatcaagaagcgatgggaacgacggaacccatgaatatagaggattctattgaaaaataaatcttagtaattcattggacaggatggcggaataaaccagattattatctattcttatttttattcagagatctcctgggataaacaacaaacttaatatagatattgaaagagtaaatattcgccggcgaatactttttttttaataaaagtaataaaaaacaaaaattaaaaagataaaagaaaataaggatttgttagaatattctaacaaaaacgacattcgagatgatgatattacgttacgttatttttaaataaatagaattaatcttggatt

SEQ ID NO: 157070 - DNA, 424 bp, Arabidopsis thaliana columbia
cgcgtccgacgggtcaacatttttaagggacattccttaaatgtacattctgtttgttggagcccaaacggagagttggtggcgtgtgttagtgaagacgctgtaaaattatggtcactgagttcaggagattgcatccacgagcttagcaacagtggaaacaagttccactctgttgtttttcaccctagctatcccgatctcttggtcatcggtggctatcaggctatagagctgtggaacacaatggagaacaaatgtatgacggtagcaggccacgagtgtgtgatctctgccttggctcagtcgccttcgacgggagtggttgcgtctgcaagtcatgacaaattcgtaaagatttggaagttgaaatatttctatgttcgtctgaaaagaaaagaaaaaagaagaaatagcaaagagc

SEQ ID NO: 157071 - DNA, 426 bp, Arabidopsis thaliana columbia
attacctctggctttctcttaaatccaccatcatgaggagaggaagaggctcttccgccggcgccggacctaccgtcgttgccgccatcaacggatctgtaaaagaaatcagattcagaggcgtaaggaagagaccttggggacgattcgcagctgagatccgtgatccatggaaaaaagctcgtgtttggttaggtactttcgattccgccgaaaaaagctgctcgcgcttacgactccgccgctcgtaacctccgtggtcctaaagccaaaactaatttccccatcgattcttcttctcctcctcctcctaatctccgatttaatcagattcgtaatcaaaatcaaaaccaagtcgatccgtttatggaccaccggttattcaccgaccatcaacaacagttcccgattgttaaccggcctact

SEQ ID NO: 157072 - DNA, 427 bp, Arabidopsis thaliana columbia
ctctttctcagaaatctctctctttcgcactttctgcaaatggttctcttcttcctttaagctgaatctcgccactggagtgtcaatcgggaaagatctccatcttctccggaggaaaaacggatccgtaaatcgtgaatttttaaacagagaagaatcaattcaatggaggaagagaaagcttctgctgcacagagcttaatcgatgtagttaacgagattgctgcgatttctgattatcgtataacagtgaagaagctttgttataatctagcgaggagattaaagctgcttgttcctatgtttgaggaaattagagaaagtaacgaaccgatcagcgaagatacgttgaagactttgatgaatttgaaggaagctatgtgttcagcgaaggattatctcaaattttgtagccaagggagcaaga

SEQ ID NO: 157073 - DNA, 433 bp, Arabidopsis thaliana columbia
  unsure (1)..(433): unsure at all n locations
caaaaccctaatccgaccggagccatggcttatgtcgacatctcacactcnaagaagggggggcatgacaaaacggagagcgatgcctccgacaccggagactacatgatcaagccacagagtttcactccagccatcgacacttctcagtggcccatcctcctcaagaactacgaccgcctcaacgtccgtaccggtcactacactccaatcagcgccggtcactctcctctgaaacgtcctcttcaagagtatatcaggtacggtgtcatcaatctcgataaacccgcgaacccttcttctgacgaggtcgttgcttggattaagcgtatcctccgtgttgagaaaaccggtcacagtggtactcttgacccaaaagtcactggaaacctcattgtctgtattgaccgagccacacggcttgtgaaatcgc

SEQ ID NO: 157074 - DNA, 342 bp, Arabidopsis thaliana columbia
  unsure (1)..(342): unsure at all n locations
cgtccgcgaaaaaaaaaccttcaccgtctttgctcctcgctgcccgncttcgctttttaaaacttcgatatgatccttttcaaagatatggtcagtatggatgaaataggcatgtttaaccgtcaacaaacccttggaagggtattgtgttgcaagtgtggtgttcccatggcaccaaacgcagccaacatgtgtgtgaattgtcttcgttccgaagtcgatatcaccgaaggtttacagaagagtattcagatcttctattgccctgaatgcacttgttacttacagccaccaaagacttggatccaatgtcaatgggaatctaaagagcttttgacattt

SEQ ID NO: 157075 - DNA, 343 bp, Arabidopsis thaliana columbia
  unsure (1)..(343): unsure at all n locations
cgtccggaagaggtctatcaccccaacgcacttagggcggttctcgctgagtttatctcgactttgggctgggtnttttccgggtcaggctcccgaattgctttcaacaagatcactgacaatggagcaaccactccttccggcctcgtcgccgctgccttagctcatgctttcggtctctttgtcgctgtctctgttggcgctaacatttccggtggccacgttaaccctgccgttaccttcggtgtcttactcggtggtaacatcactctcctccgtggtattctctactggattgctcagcttcttggctccgtcgccgcttgtttcctccttagctttg

SEQ ID NO: 157076 - DNA, 394 bp, Arabidopsis thaliana columbia
tccaagcttctttttttttttttgttagctgcgttttttttcaagctagctctctgcttgtcctggggaataatggaggaggagctgcgtgttcggctgaatgaccatcaagtgtcaaaggttttccctgtgaagcccaaatcaacggcgaaacctgtttccgaatcggagactccggaatcgaggtactggtcctccttcaaaaatcattccacacctaatctcgtctcctccgtagccgctttggctttctctccggtccaccctcactccttggccgtcgctcactccgccaccgtctgcctgttttcctcgcagtcgctttccttctcccgccgtttctccttccgcgatgttgtcttctccgtctgtttcccgtccgacggagcttttt

SEQ ID NO: 157077 - DNA, 287 bp, Arabidopsis thaliana columbia
gtccggcagttccggaaggaggatcatccttggatttttttttcactggtggcaagtaaaataatggcggagacctttatctatccagtgtctttgctgcgttatctcactatgaaactgtttgatgtgagcctttaaatgataagaagtcggtttcttgtctcaactcttatctgtaatattttgctgaaaaaatgtttgaatcaaaaacttcccaacttgtctcttattaaccatcaaatgcgagtacaacttttaatccaaaataaaaaaagtgacaataaatt

SEQ ID NO: 157078 - DNA, 424 bp, Arabidopsis thaliana columbia
caaaaacttgtcttttgcttcttatttggtctcagctctgatcttttgattcaacggctgcgggagacgacggaagcggtgcagttcttcggtggatctgagattagtccgtcgccgccagttccgacggcgagtggaaacaacgcgcacatgatgtacgttttcaatcgtaacggtgtatgtcttctctacaaagaatggaatcggcctcttcatacacttaatcctcagcaagatcacaagctcatgtttggtcttctcttctctctcaaatctctcaccgctaagatggatccagtcaatgcggataaaggaaatcttggggttccacagttgccaggacaaggttgctctttccatagtttccgtacgaatacttacaagctaagtttcatggagactccctctggtattaagattatct

SEQ ID NO: 157079 - DNA, 424 bp, Arabidopsis thaliana columbia
cttacttgcagctatgggtaaagagaagttttacattaacattgtggtcattggtcatgtggattctggaaaatcgacgacaactggtcacttgatctataagcttggtggtattgacaagcgtgtcatcgagaggttcgagaaggaggctgctgagatgaacaagaggtccttcaagtacgcatgggtgttggacaaacttaaggccgagcgtgagcgtggtattaccatcgatattgctctatggaagttcgagaccaccaagtactactgcacagtcattgatgccccaggacatcgtgatttcatcaagaacattaattactgttacctcccaggctgattgtgctgttcttatcattgactccaccactggaggttttgaggctggtatctctaaggatggtcagacccgtgagcacgc

SEQ ID NO: 157080 - DNA, 424 bp, Arabidopsis thaliana columbia
gagagttctgacaccattgataacgtgaaagccatgatccaagacaaagagggtattcctgcgggccagcagagattgatcttcgccggaaaacaacttgaagatggcagaactttggccgactacaacattcagaaggagtccacactccacttggtcttgcgtctgcgtggaggtatgcagatcttcgtgaagactctcaccggaaagaccatcactttggaggtggagagctctgacaccattgataacgtgaaagccaagatccaggacaaagagggtatcccaccggaccagcagaggttgatctttgccggaaagcaacttgaagatggaagaactttggctgactacaacattcagaaggagtccacacttcacttggtcttgcgtctgcgtggaggtatgcagatcttcgtgaaga

SEQ ID NO: 157081 - DNA, 423 bp, Arabidopsis thaliana columbia
cttgttttctctaaatttttcaaaaaacctttagaattttcatttttttacgattccgagggtaactgtttctccggctccagtactcatcggaaacaactcaaaggatacttacatggcggcagatttcgcagattttacgacggaagacttgccggactttacgacggtcggggatttttccgatgatcttcttgatggaatcgattactacgacgatcttttcattggtttcgatggagacgatgttttgccggatttggagatagattcggagattcttggggaatattccggtggcggaagagatgaggaacaagaaatggagggtaacacttcgacggcatcggagacatcggagagagacgttggtgtgtgtaagcaagagggtggtggtggtggtgacggtggtttagggacaaa

SEQ ID NO: 157082 - DNA, 438 bp, Arabidopsis thaliana columbia
ctctcaacctaccatacttcaccacataaccacttctgtctctgcgaatctccataggagggtttgagaagctttcctctgtttctccgctgttatgggtagctccggcgacgttaactggaaacttgcggaccaccccaagcttcccaaaggcaaaactatcggtttgattgttctcgatggatggggtgaatctgatcccgatcaatacaattgcatccataaagctccaactcctgccatggattcccttaaagacgggaagcccgacacatggaggttgatcaaagctcatggtaccggcgttggtctccccagcgaagacgacatgggaaacagtgaagttggccacaatgctcttggagctggtcgaatttacgctcaaggtgctaagcttgttgatctcgcccttgcttcagggaaaatctatgaagatga

SEQ ID NO: 157083 - DNA, 432 bp, Arabidopsis thaliana columbia
caaacagctctgtccgaataatctctcttctagtacctcttttttctgattctgtatatcggcatgaattactgatttccctctctataaacccatcaaagtaaaccaatttctcctgtgacttgtacctaactcgatcttaccagactggtgatggcgtctttgaaccctttcgatcttctaggagatgatgctgaggatccaagccagctcgctgtggctttgtctcagaaagtcgagaaagctgctgctgctgttcagcctcctaaggccgctaagttcccaaccaagccggctcctgcttctcaagcagtgagggagtcgaggaatgctcctcaaggaggtcgtggtgggactggtggacgtggtggattttcccgtggcaggggtaatggtggatacaaccgggacaacaggaacaatgatgctcct

SEQ ID NO: 157084 - DNA, 427 bp, Arabidopsis thaliana columbia
attttagcggcagacgagagagctaaagcatggagcaaccctaaccatggcgactcaaccggcgactgaatctgtgcaatgcttcggaaggaagaagaccgcagtggccgtcactcactgcaagcgtggatctggtttgatcaagctcaacggttgcccaatcgagcttttccagcctgagatcctccgattcaagatcttcgagccggttcttctcctcggaaagcaccgtttcgctggtgtgaacatgaggatccgtgtcaacggtggtggtcacacatcccaggtttacgccatccgtcagagtatcgcgaaggctcttgttgcgtactaccagaagtatgtggatgagcagtcgaagaaggagattaaggatatcttggtgaggtatgataggactctgcttgtggcggatccgaggaggtgt

SEQ ID NO: 157085 - DNA, 428 bp, Arabidopsis thaliana columbia
  unsure (1)..(428): unsure at all n locations
cgctttgagccttgnaagaatttcccaagcgtgctattgtgcttggaggagggtatattgctgcggggtttgcatcaatatggcgtggaatgggtactactgtagatttattcttcaggaaggaacttccgctaaggggttttgatgacgaaatgagggcactagttgctagaaatcttgaaggaaggggcgttaatctgcatccacaaacaagtttgactcagttgacaaaaacagaccaggggatcaaagtcatatcgtcccatggggaggaattcgtggcagatgtcgtcctatttgctactggcagaagtcctaataccaaaagattgaatttagaagctgttggtgttgaacttgatcaggctggagctgtgaaggttgacgagtattcacgaactaatatacctagcatatgggctgtagga

SEQ ID NO: 157086 - DNA, 443 bp, Arabidopsis thaliana columbia
tccgaaagtagaaactttaaaacgagagagagagatatataatggcgacatcgggaacatacgtggggggggttccgttgaaaggagcggcggataaacactacaagagctggaagagcgagaaccatgtcttcgctgacgccattggccaccacatccaaaatgtcgttgttcacgaaggcgaacatgactctcacgggtctatcaggagttgggactacacatatgatggaaagaaggagatgttcaaagagaagagagagatagatgatgagaataaaacattgacgaaaagaggactggatggtcacgtgatggagcatctcaaagtatttgatatcatctacgaatttattcccaaatctgaggatagctgcgtctgcaaaatcactatgatatgggagaagcgcaacgatgactttcccgaaccaagcggctacatg

SEQ ID NO: 157087 - DNA, 461 bp, Arabidopsis thaliana columbia
ggggcggcccgacgcgtccgaaattctattactctgatgattttcttgttggataccgatactggagactaggatttaagcggggatggatttggtggaggaagaccacatgcacttccaatcttcctatatgctcaaggccataaggcaaacgcagttgttacaaacacttggggagcggttaatctgcggttaaagaatcaacgaagctccaaccacaaacaattatattctgcagcttggtacccgattcgaagcgattatggtgtgggagtgaacaatataatattgatgtcagagctaaaagatgcatcaaaagggtatatggtgaatgatgccattatctttgaagctgaaatggttaaggtctctgtgacaaacatagtctccgtttaaatatcactacttctttttcaacaacaaccttacgaataaagtggactttgatgagtttaatttgt

SEQ ID NO: 157088 - DNA, 422 bp, Arabidopsis thaliana columbia
ctccgagcttcttttgaccacacactttcaatggcggatgctgtgaacgctcaaacgccgtggctctccgagcaatatcatttggagaaagaagtgaagcaagacacaagtgcaaagcctgttgaagtgaaagaggtggcaccagaagttactacacaagctgaagaggttaagacggagcaagctaaggaagaatctcctgttgaggaagcggtttctgtagttgaagagaagtctgaatctgctcctgaatcaacggaagtggcttctgaggctcctgctgcagcggaagacaatgctgaagagactcctgctgctgctgaagaaaataatgacgaaaacgctagtgaagaagttgctgaagaaacccctgatgagatcaagcttgagacagctcctgctgatttcccgttccctacaac

SEQ ID NO: 157089 - DNA, 437 bp, Arabidopsis thaliana columbia
agtcaccaaaaaaaaaaaaaaacacaaattgtttcaatggccgcctccacaatggctggctgcttccctgccttcgccggaaaggctgtgaacctttcccccgcggcatctgaagtcctcggaagcggccgtgtgacaatgaggaagactgttgccaagccaaagggtccatcaggcagcccatggtacggatccgaccgagtcaagtacttgggtccattctctggcgagtcaccgagctaccttaccggagagttccccggagactacggatgggacaccgctggactttcagctgatcccgagacattcgcaaggaaccgtgagctagaagttatccacagcaggtgggctatgctcggagccctaggctgcgtcttccctgagcttttggctaggaacggagtcaagttcggagaggcggtttggttcaaggc

SEQ ID NO: 157090 - DNA, 439 bp, Arabidopsis thaliana columbia
caaagactccatgcctttatcagttgatcacaaaccagatagagaggatgagtatgcgcgggtagataaagctggaggaaaagttatacaatggcaaggcgctcgtgtttctggcgttcttgccatgtccaggtccatcggtgatcaatatctggagccatttgtaataccagatcccgaagtgacgtttatgccacgagctagagaagacgagtgtctaatattggccagtgatggactttgggacgtaatgagtaaccaagaagcttgcgattttgcgaggaggcggatcttggcttggcacaagaagaatggagcattgcctttagctgagagaggtgtaggagaagaccaagcgtgtcaagctgcggctgaatatctctccaaactcgctattcaaatgggaagcaaagacaatatctcaatcatagtgatcgac

SEQ ID NO: 157091 - DNA, 379 bp, Arabidopsis thaliana columbia
tgagcaaaagttatgataaacatgcggggaaaacttatccagtttctttctcaaatcacaaggaaccataaccataacaaccacaagtcctaattaataaattccgaaaacaacattgaagagagtcgaataacaaaagatagataataatttgattgaagtcacggagaagagggatcgatgactgatttaccccttcttcacagtctggtttgcttcaacgagcaccaccgctagtgcaatcccttgcaaagtgcccagactcgccgcagctgtagcagcttaagccaccaccaccttcttcttcgtcgccgccagacccgtacctttcaccacccccgcctcctatgtatccttcaccacctttagagcattctct

SEQ ID NO: 157092 - DNA, 423 bp, Arabidopsis thaliana columbia
cgacgcgtccggccatggctgcatctttctctgtccccttttttttaatggaagaagaagggagattcgaggcgggggttgttgaagtgcagacttgctggagctcaaagaggttcaagctaacaaggcgcccttacactgcccgtgacgtggtggctctacgtggccatctcaagcaaggctatgcttcgaacgagatggctaagaagctgtggagaacgctcaaaagccatcaagccaacggtacggcctctcgcaccttcggagcgttggaccctgttcaggtgaccatgatggctaaacatttggacaccatctatgtctctggttggcagtgctcgtccactcacacatccactaatgagcctggtcctgatcttgctgattatccgtacgacaccgttcctaacaaggttgaacacc

SEQ ID NO: 157093 - DNA, 396 bp, Arabidopsis thaliana columbia
cgcgtccgcattatcgtccaccgttcgatgcgacggcttttattaagattaaagagttgggtgggatcgctggtggtattactaatatggatgagtttggaatgggaagtaccactgaagcttctgcttttcaggtaactgcgaatccgtgggatttgagtcgtgtaccgggaggttcatcgggaggatcagcagcagctgttgcagcaaggcagtgtatggtgtcacttggtagtgatactggtggaagtgtgagacagccagcttcgttttgtggtgttgtaggtcttaagccgacttatgggccgtgggctgggggtgggcttatggcttatgcgtcttcgttcgatgtgattgggtgttttgggtctactgttgctgatgctgggatgcttc

SEQ ID NO: 157094 - DNA, 460 bp, Arabidopsis thaliana columbia
  unsure (1)..(460): unsure at all n locations
tccgatccacaccaattccagaacgnttcctcaaaaagctcttctcctttttctctcaaaatggcgtcgggcaggacgctctctcttccgcgctncgtccctctgttcttncccgtcacgagtaaggttgggagcgaggaaatcagcagcaagcgtcacgagaggttagctacaacaagnaggaccaatcagacgttttagtgttacgagcttaatgtaaacggaaatagcttttgaccagcactctagagctgctctacaagctggtattgataagcttgctgattgtgttggtctcactcttggccctagagggaggaatgttgtgttggatgaatttggaagtcctaaggttgtgaatgatggagtcaccattgctagagctattgagttacctaatgccatggaaaatgctggtgcagcgcttattcgtgaggttgcgagtaagactaatgactct

SEQ ID NO: 157095 - DNA, 439 bp, Arabidopsis thaliana columbia
tccggtccaatcaatttcggcgattggtctcagaagatgcattcttgttctcatactcacttcgcgtggttcaagcttcctcattgcttcgcccctaagagttttgtggtgtcttcacggagagaattaagagtgttcgcagtggcaactaccgtcgaggaggcgtccggtaacataccagcggctccgatttctctacctcaagggtcatggaaacagatagctggtggagttacagctgctaaagggtttaaagctgctggtatgtatgctggattacgagctgcagggaagaaacctgatctcgctcttgtaacatgtgatgtcgaagctgtagctgcaggtgtgtttactactaatgtggttgctgctgctcctgtagtttactgtaaaaaagttcttgagacttcgaaaacggctcgtgcagtgttgatcaatg

SEQ ID NO: 157096 - DNA, 441 bp, Arabidopsis thaliana columbia
gcgtccgcaagaattggttgattgtgacacatcttatatcctatgatgtaatggtggtttaatggacggtgcgtttgagtttattatcaaaaatgctcctattgataccgaagcggattatccttacaaggctgctgatggtcgttgtgaccagaacaggaaaaatgctaaggttgttaccattgattcatatgaagatgtccctgagaacagcgaggcgtctctaaagaaagctttggctcaccagcctattagtgtcgccattgaagcgggtggtcgcgctttccagctctattcttcgggtgtatgggatggactttgtgggacggagttagaccacggtgttgtggctgtgggttatggaaccgagaacggaaaggactactggattgtgagaaactcatggggaaacagatggggagagagcggatacataaagat

SEQ ID NO: 157097 - DNA, 355 bp, Arabidopsis thaliana columbia
ggggtttgagcagtggagtcggtaactatgttatgcggaggctctcgcgcctccgggcagttgttttaccatcgtcgtcctcctaggctcggtgctaaggttttgcggaaatcttcgttcatgctcagaccttgttcggctatatcgcagcagcggataaagtcgtcgtttaggtctcactgtaaaactccaagaaaaatcccagctcctctcgattgtttcagccagggagatgatcatcctgagctttcaactgaaaggctttccccaattgcaagaagcattttttctttaggggaggtgggtggcctgcatatttgtcatttagagctttcaatttaagcttcaagaattg

SEQ ID NO: 157098 - DNA, 374 bp, Arabidopsis thaliana columbia
ggcaaatgactctattggtgaggaagtccataagttggttgcaggactacctgaagggcggttttttctctaggagaagggcgacttctacacccaggaagagaagaatgatcctgaatttgcaaagaagcttgctgctcttgccgatgtttacgttaatgatgccttcggaactgctcacagagctcatgcttccactgagggagttgccaaattcttgaagccttcagttgctggtttcctcatgcataaagaacttgattaccttcccttaactgatgcaaaccccaataagccgggcggggcggatctattaaaatacaagcccataacaaaaaatggttccattgactctctcttgaacacttatgaca

SEQ ID NO: 157099 - DNA, 427 bp, Arabidopsis thaliana columbia
tttgaccaaagacaagggatccaaccttaataaattcgggtaccaaagtgcagcttataacgcggggggttcatatgggaagggtgcctatgcttatgggtactatcccccagcatatcagtacccaagacatggttacactgggagctatgcttcagggaaaaccaatcttcagtatcagtacctgactcagcagggaagatcagctggtaatggtcaatcttatggaggatacatggacaacatttactccaattatgggatgtgtggaccttacacgaatggctatgggtatggctcttacggttatgactcatggaaatacatgcccaattggtatgcggttaacaatacctacaagccaagaaacgggtatcatggatatggcaaagaaaacattgaggggttaaatgagatgaatagaggt

SEQ ID NO: 157100 - DNA, 439 bp, Arabidopsis thaliana columbia
gttctgtgttctctctctcgcgcgaagcggttctctttcttttgtttatttgttttggttgctttttctcttatacggaggagagaagatggtggcgcctgctttgttaccggagctctggacggagatccttgtaccgatttgtgcggtgattggtatcgccttttcgcttttccaatggtacgttgtatctcgcgtgaaactcacctctgacctcggcgcatcgtcttccggtggagctaacaatgggaagaatggatacggtgattatctaatcgaggaagaggaaggtgtggatgaccagagtgttgtcgctaagtgcgctgagattcagactgctatttccgaaggtgcaacttcattcctattcacggagtacaaatatgttggtgtcttcatgattttctttgctgctgttatctttgttctcctcggctct

SEQ ID NO: 157101 - DNA, 490 bp, Arabidopsis thaliana columbia
  unsure (1)..(490): unsure at all n locations
cggaannncccgggtgcgaccgcagcgcgtccgcccacgccgtcccgctttctttgnccatcttgttactaaacacccaaacnntctcctgattcatcggtgtgtaagtctttcttcaagtgcccaggcgatcatcnaatccaatnggctcagatcttagcnagcttctccaacatgtcnagatgagagtgcctaaacactcatcagtcattgcatcatcatccaagttatggagctctgttgtgttgaaacagaagaagcagagcaacaacaaagtcagaggctttagagttcttgctctccaatctgataacagtactgtcaatagagttgagactcttctcaatttagacaccaaaccttactctgacaggatcattgctgaatacatttggatcggaggatctggaattgaccttagaagcaagtcaaggactatcgaaaagccggtggaggatccttctgagctacctaagtggaactatgatgg

SEQ ID NO: 157102 - DNA, 476 bp, Arabidopsis thaliana columbia
ggaaaacccgggcgcgaccgacgcgtccgggaagatgaggagaacaagcctagtgttattgaaaagcttcaccgatccaacagctgtgggtcctctttgagcgatgaagaaggtgaggaaaagaaggagaagaagaagaagatcgttgaaggagaggaagataagaaaggactagtggagaagatcaaggagaagctcccaggacaccacgacaagacagcagaggatgatgtaccagtttccactaccatcccggtaccagtgtcggagagtgtggtggagcatgaccatcccgaggaagagaagaaaggattagttgagaagatcaaggagaggcttcctggtcaccacgacgagaaagcagaggattcaccagctgtcacgtccacgccgttggttgtaacggagcatccggtggagcctacgacggagcttccagtggaacatccggaggagaagaaggggattttggaaaa

SEQ ID NO: 157103 - DNA, 431 bp, Arabidopsis thaliana columbia
  unsure (1)..(431): unsure at all n locations
aaaaacaacctctttcctcaacgatatttttttattccatggaggtcgcaataatggggatgggtggcgatcttctgagaaacacgtgtcgccttctaccggtgctnntaccatagcaatccgatcnaacattctaatccacatcatcnttcgtttggccaatcttcttctcagttttacttctcctccactcgtcgaccccaattttcgacccctctcaattagggttttctcaatcgttgaccctcgacggcgttttgcgatttaacgttgggtttatattcgccttgatttatgctctgttctatatcggtttggataagaaatctggatttgtagctgctcttatgtgtttctcttgctgggttggttccagttttcttgctgttcgactaggatcttctcttgccttaaaggttagattttttttc

SEQ ID NO: 157104 - DNA, 454 bp, Arabidopsis thaliana columbia
  unsure (1)..(454): unsure at all n locations
gaaannccggggccggccggcgcgtccgcggaaattataatcatggaaaacggatatttatattaactaggggcctcaaattctgttggtgggggtacctctgatcataacaggaaatattatcttcagaggcatcttttgagtatgcaagaagctgtttgcatcgacaaagtgaatgttacaggatactttgtatggtcattgttggataacttcgagtggcaagatggttacaaaaacagatttggactctactacgttgatttcaaaaataacctcacacgttacgagaaagaatccggcaagtattacaaggatttcctcagtcaaggtgttcgtccatccgcgctcaagaaggatgagctttaagctatttctgtttcaatgtgtttttcctatgttttactttgtgagtgaccaagattcatgaggtcttggttctaataaaaagagt

SEQ ID NO: 157105 - DNA, 440 bp, Arabidopsis thaliana columbia
  unsure (1)..(440): unsure at all n locations
gggggggaccgacgcgtccgactaaacctatcttcctcaatcctattgattctttttgcggcggcggcgagtaaagagagcgggttctatgaatctaatccaatcaaaatggtctccgacaatctccatgagcttgaagacaccgtcgtccagatcctaggacagtcccgtcatgttctatccttttctcgcttcactcacaggtatgggaagaagtatcagagtgtggaggagatgaagttaagattctctgtttttaaggagaatcttgatttaatcagatccactaataagaaaggcttatcctataaactctctctgaaggagtttgctgacttgacatggcaagagtttcaaagatacaagctnggagctgctcaaaactgttctgctactataaagggtagccacaagatcactgaagcttccagttcagacac

SEQ ID NO: 157106 - DNA, 417 bp, Arabidopsis thaliana columbia
  unsure (1)..(417): unsure at all n locations
cggacgtttctctattagggacatgaggcagtctgtttcactcggtgttatcaaaaatgtccgccgtgttgttctcaaccggaggcaaggttaccaatgctgccgtcaagaagggtgcgaagtgaaccatcctcaaaactctatctgccgcaggtgaatcaaaggacagtgttagttttattacaatagtttggtatttggtcgcgtgtctgtgttcttgtttcgttttctccccgtcagagcgttgttctcgtaattgggttcttgatcggaggtggcggatctacacacacattcttcctggggggggctggttatttgttttctcattttgaactgttttaaaatttctgttatatgaatgaatgttttccctgcggttnaaaaaaaaactatattctttaatcttttattatt

SEQ ID NO: 157107 - DNA, 417 bp, Arabidopsis thaliana columbia
gtccggaagtcttcaaatagcacagaagcagagacatatagcgggaacgcgtttagtcacagcttgctggctcctttagcttttctctctacacttgcttctctctctctctcctttgggttatccttcttgagatctgtgcttgcgtttcttcttcattcgacgacactttatctcgggagatttcagatttgtcgatttgttcagcaatggcgccaccgattgaggtttctaccaaaagctacgttgagaaacatgtttcacttcctactcttaatgagaggatactttcgtccatgagtcacagatcagtagctgcacacccatggcatgatctcgagataggacctgaagccccaattatcttcaattgtgtggttgagataggaaaagggagcaaggtgaaatatgaactcg

SEQ ID NO: 157108 - DNA, 417 bp, Arabidopsis thaliana columbia
aaggcggtggtgagtactggtgagagtgtgtgtgaaaaaacaaaaaaaacaattcagctgggaaaattagttccggaatcggaagtttagtgaaggtcatctttaagaacttcgatgtcatcgctggacctgtgattagcttggtttatcctctatatgcatcagtgagggcaatagagtcgaggagtcatggagacgacaagcaatggttgacgtattgggctctctattcacttatcaaactctttgagctcacttttttcagactcctcgaatggatcccattatatccatacgcaaagctagccctaactagttggttggtcttaccgggcatgaacggtgctgcttatctctacgagcactatgtgcgttcattccttttaagcccacatactgttaacgtatggtacgtgc

SEQ ID NO: 157109 - DNA, 428 bp, Arabidopsis thaliana columbia
ccgcagcacagcttcacctatccaaatctttattcactgttgtcataggaagtaacggtggtttttattactttggatcgttcaaactccgacgccagagcaatcctcaacaatatacaattaatggctgataaactcaaagagcaattgaagagaattcacgatagtggagcgcgtagattccttatcatcggggtagcacaaattggttgcacaccgggaaaaagagcgaagaactcgacactccatgaatgtgacgaaggggcaaacatgtggtgctctttgtacaacgaagctctagtaaagatgctgcaacaactcaaacaagaattacaaggctcaataacttacacttactttgataactacaagtccttacatgacattatttccaaccctgcccgttacggttttgctgacgttacatt

SEQ ID NO: 157110 - DNA, 423 bp, Arabidopsis thaliana columbia
ggaacttgacatcgatgttcttgtccacggttagccagagagaaacgacatggttgagtggtttggttagcagttgtctggttttgccttcactgcaaacggatgggtccaatcttatggatctcgctgtgtgaagccaccagttatctatggtgatgtgagccgtcccaaggcaatgaccgtcttctggtccgcaatggctcagagcatgacctctcgcccaatgaagggtatgcttactggtcccgtcaccattctcaactggtcctttgtcaggaacgaccagcccaggcacgaaacctgttaccagatcgctttggccatcaaggacgaagtcgaggatcttgagaaaggtggaatcggtgtcattcagattgatgaggctgcacttagagaaggactaccactcaggaaatccgagca

SEQ ID NO: 157111 - DNA, 427 bp, Arabidopsis thaliana columbia
gaacagggaaacttcgtgagtctaagtcttactgttagaatgcgttgaggatatacaataagcggggtgcctgggacaactgtggaggagattgatgtaaatattcccaatactaacatcaatcgatgcaacctcagattcttgtccactcgcaatcatagccatactagcaagaacaagatgctcaagagcgttttcataatctcctttagcctcgcagataattgccatcaatctcctatcagctgcttcctccagtgaagcaggttcactatgcgctcggtgaatctctagagtcttcttgcataactcttccgctttattgaactgcattgcttgaacatatgcttctgctaagtacctgcaagtttcaccaactcgtggatcagtatcacccaaagtctggatctggatcttaagaccttct

SEQ ID NO: 157112 - DNA, 442 bp, Arabidopsis thaliana columbia
tacaaatctaagcttctgtcgttgacttctataaactgatatctataagtcaaaatcgccggtctcaatcgctcatcggcttgtacaactaattgactaaacaatggcggacaacacaggatccgagatgaaatcaggttcgtttatgttagagaaatccgccaagatctttgtcgctggacataggggattggttggatctgccattgtccgcaagctccaggatcagggtttcaccaatttggtccttcgaacccattcagagcttgatctcactagccaatcagatgttgaatctttctttgctacagagaaaccagtttatgtcatcctagctgctgctaaagtcggtgggattcatgctaacaacacatacccagctgatttcattggggtcaatctccaaatccagaccaatgtgatccactctgcttatacacac

SEQ ID NO: 157113 - DNA, 423 bp, Arabidopsis thaliana columbia
gcgtacggtacttttgtcggccttcgcaaaaacttgatcttttcttcacgagtaaaaacctgcgctgcattagtttatataagcagccacccttttgctctgtttctaacaaaccagaagaagaaaaaagtttcaatttttcttgaagatgacggagtatgagaatgggaagaagaggaaagtacgaaacaaacaacaagtaaaagtacagttcttgtctcaaaggtatctaatcttatgcttttgttgtttcttcgtcttgctcttcttcttatcttccgaccgaatctccacactctctgtgcggtgcgattctctgagaccgtctcttcgtgttcctactctcttcgttttatcatcattcatggattcgtttcaccgtggtagattccctctcttgagtgttgaaaacagagttcaatt

SEQ ID NO: 157114 - DNA, 447 bp, Arabidopsis thaliana columbia
ccggtcgaccgcgcgtccgcggacgcgtgggcggacgcgtgggtcagcgttgtttgaaacgagaaggttcaagatcttcggtggctctatgtcactcctctctcccttggtttggaaactgccggtggtgtcatgaccactttgatcccaaggaacacaaccatcccaaccaagaaggaacaagtcttctccacctactcagacaaccaacccggtgtgttgatccaggtgtacgaaggagagagagccagaaccaaggacaacaaccttcttggtaaatttgagctctccggaattcctccagctcctcgtggtgtcccccagatcacagtctgctttgacattgatgccaatggtatcctcaatgtctctgctgaggacaagaccaccggacagaagaacaagatcaccatcaccaatgacaagggtcgtctctccaaggatgag

SEQ ID NO: 157115 - DNA, 446 bp, Arabidopsis thaliana columbia
cggacgagctggtgagtatgttaatgctattggtgcttatttagctccatcaggcaccacggcggtgactcctgcaacacagtcccaaaagctagaaggagctggtagtgaggcaggaactttatgggatgatggtgctttcgacggtgtaaggaaagtgtctgtaggacaagcccaagatggtattggagcggtctcgtttgtgtacgacaaagcaggtcaggttgtagaaggaaaagaacatggaaaacccacattgcttggatttgaagagtttgagcttgactatccaagtgaatacatcacggcagttgatggcacctacgatgcaatctttgggaatgaaccaatcgtaaatatgcttaggttcacgactaataagcgagtatctattccttttggaataggagctggcacagccttcgaattcaagaaggacggtcaaa

SEQ ID NO: 157116 - DNA, 485 bp, Arabidopsis thaliana columbia
  unsure (1)..(485): unsure at all n locations
tccgtaggcttttggaaacggtacacttgcttagaggataggtattgctatgatgccctgaaggttccgtgggggggaaatttattagttcggttgcgcaggttctttcgttattgacttagaacgaacatgctttcgttcaaccaatcaacagatctggatctttgtnnggcgtaaattctaagctcaccgtcgttatacgttctgatgagggtgttacccggaggagcanttatttctccgacgcctgttgaacagtgaaggatctcggatggttgcacctgggtataccgttgacgcgagttaactggactgggactgtgaaaggacatccttatacttacaaaccaaaggaagttgtgccagagttgatccagagactccggcgatcgaatcactctagctcctactttttcgcccgcaaatttactccggattgcttgaagccgcttttggccattgcagattctgtgattttcaaagat

SEQ ID NO: 157117 - DNA, 449 bp, Arabidopsis thaliana columbia
tgcgccaaaagtgagactgatgctttccgaccgttcatttatcgcatagaagaggttatgggagctgtgagtggttttaaagttacctttattgatacccctggttttcacccactgtcatcttctagcacaagaaaaaaccgaaagattctcctatctattaagagatatgttaagaagcgtccacctgatgtagttctttacttggaccgccttgatatgatcgacatgcgatacagtgatttctccctcctgcagcttataactgaaatctttggtgcagctatatggttaaacacgatacttgtaatgacgcattccgcagctactacagaaggacgtaatggacaatctgtgaactatgagtcatatgtgggccagcgcatggatgtggttcaacattatatacatcaggctgtgtctgatacaaaactagaaaaccctgttct

SEQ ID NO: 157118 - DNA, 428 bp, Arabidopsis thaliana columbia
caactaatgaagaatctaaacacagacgcctttagaatgtctatcgcatggccaagagttgtgccttatgggagaaaggagaaaggagtgagtcaagctggtgtgcaattctaccacgacctcatcgacgagctcataaaaaatggtataactccattcgttactgtttttcactgggacactccacaagatttagaagatgaatatggcggctttttaagcgaaaggattgtgaaggatttccgagagtatgcagattttgttttccaagaatacggtggaaaagtgaaacattggatcactggcaatgagccatgggttttctcgcacgctggctatgacgtaggcaaaaaggcacctggtcgttgctcttcttacgtcaatgctaaatgccaagacggacgatcaggatacgaggcttaccttgt

SEQ ID NO: 157119 - DNA, 341 bp, Arabidopsis thaliana columbia
cggggccgaccgacgcggtccgtactgcttaaccctcttctaaaaggtgttgttctttacaacatgatgcccgatgagggatatacgccgcctttatgttgcatgttatggttggacaatttcccaaggaaagaaggtatggagaggaaggatgtgatgtccaagaatgtttccatctacaagtctcaggctgctgccttggagaagcatgccgctcctaactgcaaggatcttgttgtggccaacccggcaaacaccaacccattgaacctcaaggaatttgcaccatcaatccctgaaaagaacatcttttgtttgacaaggcttgaccacaacagggc

SEQ ID NO: 157120 - DNA, 453 bp, Arabidopsis thaliana columbia
  unsure (1)..(453): unsure at all n locations
gcgttcgtctaccaaaacaccatcctaaaaatcatcgtcaattctccaaaagatcgacggatcacgcgggattatattttacctacgtgtaccccatctntctggaacccaagtggagacaccagagttgccagcggataccaaaatccattgtctgaagcgttttactcgggcagatggaaaatgttttgaacgtgacacatggagagaaataaaggaagacattgaacgtgataggtctgagaatgccagctcctctgatgcagttgttatatctcaagaaatcacagaaaagaagcctgtagaaataagagaggttgaatcgaattcacctcgcgccaatgattggaccccagaaagtagatgtcaacaaggaacgtcttcttaaagtccccatagatagggctctatatcagaaggcactaacatcacttgttgattccaaaattccac

SEQ ID NO: 157121 - DNA, 448 bp, Arabidopsis thaliana columbia
gcctctcgttgctagaggaatcaaacaatggtgtttgtgaagtccaccaagtcgagggctggctttatgaggtaccaagtgaagttcaggagaagaagagatggaaagactgactacagggcaaggatccgtcttatcaaccaagacaagaacaagtacaatactcctaagtatcgttttgttgtccggtttaccaacaaagacatagtggcacagattgtatctgcaagcattgctggtgacattgttaaagcttctgcttacgcacatgaactgcctcagtatggtctcactgttggtcttacaaactatgctgcagcttactgtactggccttcttttggctcgccgtgttttaaagatgttggaaatggatgacgagtatgagggaaacgttgaggccactggagaagacttttccgttgagccaactgattcaaggagacctt

SEQ ID NO: 157122 - DNA, 447 bp, Arabidopsis thaliana columbia
agctacttgagagagagagatagagataagtgagctctgagaaaatccagcaatggctgggattcttgtagtgataattgtgtttatcctcgatctcatcgccgttgggttagccattgccgccgagcagagaagaagtgtcggcaaggttgaaacagacagagacaagcaatatgattactgtgtgtatggtactgacattgctacaagttatggagctggtgcatttgttcttctctttgtaagccaagtccttattatggctgctagtcgttgcttctgttgtggaaagtctcttaaccctggcggttcaagagcttgtgccattattctcttcctcatttgctgggtgtttttcttgatcgctgagatgtgtttgcttgcggcatcaatcagaaatgcgtaccacacacagtatagaaagatgtggaaagttgaagatccacc

SEQ ID NO: 157123 - DNA, 423 bp, Arabidopsis thaliana columbia
atagctcctaacaaagcaatatcatttccattttataaaagttaaagccatggctgcatctggcgctgtcctctctatgataatggaagaagaagggagattcgaagcggaggttgcggaagtgcagacttggtggagctcagagaggttcaagctaacaaggcgcccttacactgcccgtgacgtggtggctctacgtggccatctcaagcaaggctatgcttcgaacgagatggctaagaagctgtggagaacgctcaaaagccatcaagccaacggtacggcctctcgcaccttcggagcgttggaccctgttcaagtgaccatgatggctaaacatttggacaccaactatgtctcttggtggcagtgctcgtccactcacacattcactaatgagcctggtcctgatcttgctgatta

SEQ ID NO: 157124 - DNA, 434 bp, Arabidopsis thaliana columbia
aagaatggctgcttcaagtgctgtcaccgcatactacgtcctcaagccacctccattcgcgctgggtgctttggagccgcatatgagcaaacaaactctggagtttcactggggaaaacatcacagagcttacgtggacaacctcaagaaacaggttcttggaaccgagcttgaaggcaagcccttagagcacattatccacagcacttacaacaatggtgatctcctccctgctttcaacaacgctgctcaggcgtggaaccacgagttcttctgggagtcaatgaaaccaggtggtggaggaaaaccatcaggagagcttcttgctttgcttgaaagagatttcacttcttatgagaagttctatgaagagttcaatgctgctgcagccactcagtttggagctggctgggcctggcttgcttattcaaatg

SEQ ID NO: 157125 - DNA, 382 bp, Arabidopsis thaliana columbia
gcggttctctactagatcccatccgaaaaatcctacttgcttcccaaagttgcaatctttgaggatcgttgacataaccataaatatcctctggtggatgtgagtaaggttgcattgattccaaggacatggcgatggggaagtattcccgtgtagacgggaagaaatcatcgagctatggtttaaccattaccattgttctgttactttccctctgtttagttgggacatggatgttcatgtcttcttggtcagcccctgctgattctgctggctactcctcaactgatactgctaaagatgtttctaagaatgacttgagaaaagaagaaggcgatcgagatccgaagaacttttctgatgaaaagaatgaagaaaatga

SEQ ID NO: 157126 - DNA, 450 bp, Arabidopsis thaliana columbia
taacaatctactctctttaaaagaaattcgttagtactatcaagaagcagaagatggccgggaaggtggaagcacaaggagggaaaggagccaacctatgggacgatggatcgacacatgacgccgtgaccaagattcagctcgcagcaggcatagacggaattcaatatgttcagtttgattatgtcaagaacggacaacccgaacaagctcctcttcgtggtaccaaaggccgtgttctcccagctgatccgtttgtgattaaccatccagacgaacatctagtttctgtagaaggttggtatagccctgaaggtatcattcaaggaattaagttcatctccaacaagaagacttctgatgtcattggatccgatgagggtactcacttcactctacaagttaaagacaagaagatcattggctttcatgggtctgccgggggcaatc

SEQ ID NO: 157127 - DNA, 447 bp, Arabidopsis thaliana columbia
gacgcgtgcgagagacactttttctaattttctcttcttcttcttctttctcgttttgagagaaaacaaggaggtgtttaatctacaggtttcacgaaaaggagaagaaaaaaacaatggcggatcagctcaccgacgatcagatctctgagtttaaggaagctttcagcttattcgacaaggatggtgatggttgcattaccaccaaggagctgggtactgtgatgcgttcccttggacaaaacccaaccgaagcagagcttcaagacatgatcaacgaagtggatgctgatggtaacggtaccattgatttcccagagttcttgaaccttatggctcgtaagatgaaggacaccgactctgaggaagagctcaaggaagcattccgggttttcgacaaggaccagaacggtttcatctcagcagctgagctccgccatgtgatga

SEQ ID NO: 157128 - DNA, 382 bp, Arabidopsis thaliana columbia
ctcataaaaataaaaaccggcgcgtttttataaatcctaatacaacccataaaagaagttagaacctacaacaaatcaatacacataacacttaaaagaagaatctaatcaaacagacaagaaacaataaaaactagatggcctaattaaacatccctaaacgctcttctcatgtatgccttaatctctcataatatacaaacaaaaaactctcaacaacaacttctaacaatcctctctctttcaaaactacaaaagccttgggaaacccgaaatgattctactccaatttctccacaagcacaccaacaaataactgccactttagggataccacaccctatgtgtcatgcacatccattctcccttctaaacataccac

SEQ ID NO: 157129 - DNA, 428 bp, Arabidopsis thaliana columbia
agctcctaacaaagcaatatcatttccaatttataaaagttaaagccatggctgcatgttgctctgtcccctctatgataatggaagaagaagggagattcgaagcggaggttgcggaagtgcagacttggtggagctcagagaggttcaagctaacaaggcgcccttacactgcccgtgacgtggtggctctacgtggccatctcaagcaaggctatgcttcgaacgagatggctaagaagctgtggagaacgctcaaaagccatcaagccaacggtacggcctctcgcaccttcggagcgtgggaccctgttcaggtgaccatgatggctaaacatttggacaccatctatgtctctggttggcagtgctcgtccactcacacatccactaatgagcctggtcctgatcttgctgattatccgtac

SEQ ID NO: 157130 - DNA, 464 bp, Arabidopsis thaliana columbia
  unsure (1)..(464): unsure at all n locations
cggaaaaaccgggncggcccaaggcgtccgcaatcataacaaacccaaaaaacaatttcttttttactatcataaccatggcggtgctttggtgggcttattgagctagtaatgagaagaaggtgaagagttcatactttgatttgccacctatggaaatgtctgtagcatttcctcaagcaactccagcctctacatttccaccttgtacttcagactattatcatttcaatgatctactgactccggaagaacaagctatccggaagaaagtgagggaatgcatggagaaagaagttgctccaataatgacagagtactgggagaaagcagaatttccattccatatcactccaaagcttggggctatgggtgttgctggtggctcgatcaagggttatggatgtcctggtctctccatcaccgccaatgcaattgccacagcagaaatagctagagttgat

SEQ ID NO: 157131 - DNA, 328 bp, Arabidopsis thaliana columbia
aaaaaaacacaaaaagtttcaatggtcgccttcacaatggctctctcctcccctgggttcggcggaatggctgtgaacctttcccccgcggcatctgaagtcctcggaagcggccgtgtgacaatgaggaagactgttgccaagccaaagggtccatcaggcagcccatggtacggatccgaccgagtcaagtacttgggtccattctctggcgagtcaccgagctaccttaccggagagttccccggagactacggatgggacaccgctggactttcagctgatcccgagacattcgcaaggaaccgtgagctagaagttatccaca

SEQ ID NO: 157132 - DNA, 451 bp, Arabidopsis thaliana columbia
  unsure (1)..(451): unsure at all n locations
aaagattgaagaattgcatgaaatacggatttcattgtcagcctcggagaaggaggagaggacgtgtttttggcagcggacaaggctganatggggaggaagaagagggcaatgtgggaaagaaagtggaagagattggacattgtgaaagcttttgcatctctctttgtccatttcctctgtctcttggcgcctttcaatttcacttggccggctttaagagtcgccctcattgtctatacggtgggtgggctcggtatcaccgtctcttaccaccgaaatttggctcaccggagcttcaaagtccctaaatggctcgagtatttcttcgcttattgcggccttcttgccattcagggagatccgattgattgggtgagcacacatcgataccatcaccagtttacagattcggatagggacccacatagtcctaacgaaggattttggt

SEQ ID NO: 157133 - DNA, 309 bp, Arabidopsis thaliana columbia
gcgaccggttcgacttaaccattccagatttaagccgtttggtaagcctaaagaatgttggcttctcgaacggctatctctctggccggatacctcgatatctggccagtcttccttcgctgcgaaatctgaatctttctatgaacaagtttgagggaagggtgccaacaacaggagtgtttcgaaatgctacagcagtttctgtttttggtaacacaaatatttgcggaggcgtccgagaaatgcaactaaagccatgcatggtccaggcatttccaaggaagagaaagcctttgtcagttagaaaga

SEQ ID NO: 157134 - DNA, 433 bp, Arabidopsis thaliana columbia
cacaacgccaaattttggcgtttccacagatttatacatcccggagatctccaacaggtccgactccgttttctactccgacgaatcctcctccgtagatctagtcaaaaaacgaacctaacgaaattcgaaatcctgatcggagatggctccgagtattcgaaaagcgattggtgcggttaaagaccaaacaagcataggaatcgctaaagtagcaagcaacatggctccagatctagaagtagccatcgtgaaagctacaagtcacgacgacgatcccgcaagcgagaaatacattcgtgagattctaaacctgacctctctctctcgcggctacatcctcgcttgtgttacttccgtttcacggcgattgagtaagacgcgtgattgggttgttgctctcaaggctcttatgcttgtgcatagacttctt

SEQ ID NO: 157135 - DNA, 464 bp, Arabidopsis thaliana columbia
gaaaaacgggccgaccacgcgtccgactaagaagctttgtgctgttatgctagtttctgtaggacctgagttgcaagttattagcgggactgagaaagctatttctcttaaagctgatggccttgtaactttgactccgagtcaagatcaagaagcctcctctgaagtccttcccattaattttgatgggttagcgaaggcggttaagaaaggagacactatctttgttggacaatacctcttcactggtagtgaaacaacttcagtttggcttgaggttgaagaagttaaaggagatgatgtcatttgtatttcaaggaatgctgctactctgggtggtccgttattcacattgcacgtctctcaagttcacattgatatgccaaccctaactgagaaggataaggaggttataagtacatggggagttcagaataagatcgactttctctcattatcttatt

SEQ ID NO: 157136 - DNA, 438 bp, Arabidopsis thaliana columbia
gcgatagctcctaacaaagcaatatcatttccattttatataagttaaagccatggctgcatctgtctctgtcccctctatgataatggaagaagaagggagattcgaagcggaggttgcggaagtgcagacttggtggagctcagagaggttcaagctaacaaggcgcccttacactgcccgtgacgtggtggctctacgtggccatctcaagcaaggctatgcttcgaacgagatggctaagaagctgtggagaacgctcaaaagccatcaagccaacggtacggcctctcgcaccttcggagcgttggaccctgttcaggtgaccatgatggctaaacatttggacaccatctatgtctctggttggcagtgctcgtccactcacacatccactaatgagcctggtcctgatcttgctgattatccgtacgacac

SEQ ID NO: 157137 - DNA, 434 bp, Arabidopsis thaliana columbia
gacagatttgattccatttttattactgtttttatcatccaaacccttggtatttgtagccatgagtgttgtttcagatctcatcaaccttaacctctcagactccactgacaaaatcattgctgaatacatatgggttggtggttctggaatggacatgagaagcaaagccaggactctacctggaccagtgactgacccttcgcagctaccaaagtggaactatgatggttcaagcacaggccaagctcctggtgaagacagtgaagtcatcttataccctcaagccatattcaaggatcctttccgtagaggaaacaacattcttgtcatgtgcgatgcgtacactcccgcgggtgaaccaatcccgactaacaaaagacacgctgcggctaaggtctttagcaaccctgatgttgcaactgaagtgccat

SEQ ID NO: 157138 - DNA, 393 bp, Arabidopsis thaliana columbia
ggacgaccacgcgtccggtttcacttaatcacactctatacaaaaaaatataaattttctctcaaatctgcaaatcttgtttcctgtgcaccaaatctcttctctcttcaactaaaaaatctcacttcttctcttaaagacgagccatttctgcttcggcaaccttttctgcttcaggaaaaatttctctctatgcatctaacttttccagaacatcaggatctggtgtctctactaataatacgatcactggactcttacctctttctgctgcagtttatatgatttaaaatcaacaagttctttcttcttttatgtaactaaactttattgctatcaaaccttattgttttccaataagaccttttttctataaaatttttctattctaac

SEQ ID NO: 157139 - DNA, 411 bp, Arabidopsis thaliana columbia
gaagatttgattgaagtacagatccatcggttaagaatacagagagattgaagatcaatgggttcgagatattgggtggtgtctcttccagtgaaagactctgcttcttcgttatggaatcgattacaagagcagatctctaagcattcctttgatactccagtttatcggtttaacattcctaatcttcgtgttggaaccttagattctctactcgctctcggcgatgatctgcttaagtcgaacagctttgtggaaggagtttcgcaaaagatcaggagacagatcgaagaattggagaggatttctggtgttgagagcaacgctcttacagatgatggagttcctgttgattcttatctcaccaggtttgtgtgggatgaagctaagtacccaacaatgtcacctttg

SEQ ID NO: 157140 - DNA, 434 bp, Arabidopsis thaliana columbia
  unsure (1)..(434): unsure at all n locations
catgagtgggcaagagaatcatgatcatggtcggatctcttctacgcccgccgccgcgtcggagccttccaaggctgctgctcactcctctgactacgctccttaccctaagctcgatcctaccgacgtcactcctcctcctcctcagcctattcccaccggtgccgccgcaaccaccatgccagcggaatccaatccttacgtttctccttcccctgccccaaggaatacgatggattcggtgaaggatacgttagggaaatgggggaaaatggctgccgacgccaccaagaaggcggaggatctcgccggaaatttttggcagcacttgaaaacaggcccaagtgtagcagatgctgctgtttcacgaattgctcangggacaaaaatacttgcagagggtggatacgagaaggtcttcaagcaacatttga

SEQ ID NO: 157141 - DNA, 230 bp, Arabidopsis thaliana columbia
gcggtcggtgcgtgacgtgatcgagtgggcggtttttggtctttggataattttaacgtctagtggttgggattgtacaggtggcgtgaaaatgttgataatgcatatgtgaatataaataatagtggtggtggacaatattcatcccatgtggacaccaaatgtgaatacgcaatcagataatattatgtatgatgattatgatttcaatatgtgtacatttttattca

SEQ ID NO: 157142 - DNA, 369 bp, Arabidopsis thaliana columbia
ggaccgacctttttttttttttttaaccgcttttaattcattcattcatataacaaaaattttaaagcgagttcaaaatgggagggcaaataaaaagcaaaaaacaggaagaatgtgtgtgtagatccgccacctccgatcaagaacccaattacgagaacaacgctctgacggggagaaaacgaaacaagaacacagacacgcgaccaaataccaaactattgtaataaaactaacactgtcctttgattcacctgcggcagatagagttttgaggatggttcacttcgcacccttcttgacggcagccttggtaaccttggctccggttgggtccttcttgtcaacactcttgataacaccgactgc

SEQ ID NO: 157143 - DNA, 303 bp, Arabidopsis thaliana columbia
caaaaaaaaaagggacgggtttatactgagagggggcgtgtccctcattaaatcactcataaaaagtttgatggtaactactactcggataaccgtagtaatactagagccaacacgggcaacaaaccccgacttatggaagggacgcatttattagataaaaggtcgacgcgggctctgcccgttgctctgatgattcatgataactcgaccgatcgcatggcctttgtgctggtcacacatcattcaaatctctgccctatcatctttcaatgttatgattgtggcctaccatggtggtaa

SEQ ID NO: 157144 - DNA, 464 bp, Arabidopsis thaliana columbia
  unsure (1)..(464): unsure at all n locations
gaaaaanggaangaccgacgcgtgcgatcaataattaatattcatctggagaatttttgtcttttttctccattgctataactctcgcaactggttcttctcagatgtgcgttgcacttccaactagaattgatgggncgagccgatctatgattaaggttcaaagtataagcttcactgataagtcatggggtcctcctctgctgagactagattcgaaatctagaagcttaggtgtgaaaaaaaggtccacaatatgcatgtcacttcagcaatcaagcaaatccaaagtcttggttactcctctagaacttgaagatcccaaagagactcccttaaacttgtttaggcctaaagagccttatactgcaactattggttcggttgagagaattgttggtccacaagcaccttgagagacttgccacattgttattgatcatgatggtaatgttccttactgg

SEQ ID NO: 157145 - DNA, 419 bp, Arabidopsis thaliana columbia
  unsure (1)..(419): unsure at all n locations
ataggcagattctcacatttgctttctattttgactcaaatcagcaagaanagggggttggtagcgtacggggtgtgctacgctnaattgaatgaggttcttacaagagagctagcagaggatggttactctggtgttgaggttagggttactcctatgaggactgagattatcatcagagctacacgtactcagaatgttctcggtgagaaggggaggagaattagggaattgacttcccttgttcagaagagattcaagtttccagttgacagtgttgagctttatgccgagaaggttaacaacagaagtctctgtgccatcgctcaagctgagtctttacgttacaagcttcttggtggtctcgctgttcgtagggcttgctatggtgtggtgaggtttgttatggagagtggagc

SEQ ID NO: 157146 - DNA, 434 bp, Arabidopsis thaliana columbia
catcaaaagattcttggtctccgatccagtttcctgattattctccgagcttcttttgaccggacactgtcaatggcggatgcggtgaacgctcaaactccatcgctctccgagcaatatcatttggagaaagaagtgaagcaagacacaagtgcaaagcctgttgaagtgaaagaggtggcaccagaagttactacacaagctgaagaggttaagacggagcaagctaaggaagaatcttctgttgaggaagcggattctgtagttgaagagaagtctgaatctgctcctgaatcaacggaagtggcttctgaggctcctgctgcaacggaagacaatgctgaaaagactcctgctgctgctgaagaaaataatgacgaaaacgcttgtgaagaagttgctgaagaaacccctgatgagatcaagcttgagac

SEQ ID NO: 157147 - DNA, 427 bp, Arabidopsis thaliana columbia
  unsure (1)..(427): unsure at all n locations
ctctaatcaatactgctctttatgtttcactcgagaaggacaacttccgcggctgggatcttattgcggtgcggctncccacaaaaaacctatnattnaacctcaatctttaagcacatgggatgcaattggatctcttggagcgaggaactttatgctctgtaggaaaccagaggagaagaacgttgaggaaagtaatggaagatctgactctaccattaatggtgcaagaaaaggnggaagcttgaaggcttggatcaacaaatccttcaatctcaaaatctcaagccattgagatggattttcttctcttttttatgaaataataagaccaatctttgttttatcatcattatgttctttgcttttcggtttcgattccaaagtttgttattttcatctttcattcatgaataaaaatgtcaaa

SEQ ID NO: 157148 - DNA, 421 bp, Arabidopsis thaliana columbia
  unsure (1)..(421): unsure at all n locations
aatttcaaaccttcacataatttttaatttttttgaatccgagtttcattcggggaaggttttttcgatggctggggctgannaaatcaagaatgttcctgaacaggaggtgccaaaggtagcaacagaggaatcatcggcagaggttacagatcgtggattgttcgatttcttgggaaagaagaaagacgaaacaaaaccagaggagactccgatcgcttcagagtttgagcagaaggttcatatttcagagccggagccagaggttaaacacgaaagtcttcttgaaaagcttcaccgaagcgacagttcttctagctcctcaagtgaggaagaaagttcagatggtgagaagaggaagaagaagaatgagaagaagaagccaactactgaagttgaggtaaaggaagaagagaagaaa

SEQ ID NO: 157149 - DNA, 282 bp, Arabidopsis thaliana columbia
aaaagctatttatctttctgattttatgggatacccactataatcttctgtgagagtacttcaacaatttcttctatgtttttcaattcacttttattcgaaagaaaactacttgtcctcctaaatgattcggattcttctcattctccgatcctgctgttatttatatggttcttcacgacattcaccatattgattatagtgatgttgttgtcataacaacaatttctatagattatctatattcttctataatatcacatactttttattcttctaata

SEQ ID NO: 157150 - DNA, 426 bp, Arabidopsis thaliana columbia
agcaaaaaaaagaaacatctgacccggaattttactttaaaacccggaagaatcaaaaaggggggggttatgttctgagcgacgatcaggtctcgacgatgaaggaagccttcatgctcttcgacaccgatggcgacggcaaaatcgcaccgtcagagctcgggatcctcatgcgatctctcggcggaaacccgacccaagcccagctgaaatccataatcgcatccgagaatctctcttcaccgtttgatttcaacagattcctcgatctcatggcgaaacatctgaagacggaacctttcgatcggcagctccgtgacgcattcaaagtgctcgataaggaaagtaccgggttcgttgctgtggcggatctgaggcatattctgaccagtatcggagagaagtggagcctaatgagttcgatga

SEQ ID NO: 157151 - DNA, 347 bp, Arabidopsis thaliana columbia
  unsure (1)..(347): unsure at all n locations
aaaaagggacgggccgacgcggccggccaaantaaagcctaaaaaaattgcctctttgtgttttaatgagtctactaatccctctgttttggttgaacaaaccggtgaggaacntntgcaccttaattgtttacgtgtgcttcatcaacttgcagctagtaccacatgtgctgaagcaatggctgcaactagtgctggaaatgcacaggtggttccacttctcatgaaagcaataggatggcttggtggaagcattttagcactcgagacacttaagcgtgttgttgttgctggaaatcgggccagaaattcncttttttcgcagggtctaaaggttggtctcattg

SEQ ID NO: 157152 - DNA, 441 bp, Arabidopsis thaliana columbia
  unsure (1)..(441): unsure at all n locations
aagatctacccaaaaaaaaaaaaaaagattttgtttttctagagaagctttaaaatgatgttgtggctggacctcaggctgaccgngnccttggccgcctccgtaagatcaccacccaacccattaatatccgagatataggagaagggagcagcagtaaggtggtgatgcataggtcgttgaccatgccggcggcagtgagccctggaactccaacgactccaaccactccgacgacgccacgtaaggataacgtgtggaggagcgtctttaatccgggaagcaacctctccactagagccatgggctgcaacatctttgataaacccacccatccaaattctccctccgtctacgactggttgtacagcggtgactcaaggagtcagcaccggtagggatggtccgatggagtgtgacatgcgggtgatgtaaatattg

SEQ ID NO: 157153 - DNA, 444 bp, Arabidopsis thaliana columbia
  unsure (1)..(444): unsure at all n locations
ggaaaaaccgggncgaccggcgcgggcgataaacacaaaacaccgcttagcttctaaattctgaacatcgagaaaaaatgagttggtggtgggcgggcgccatcggagctgccaagaanaaactcgacgaagatgaaccatcacaaagcttcgagagcgtcgctctcatcatcggcgttactggaatcgtcggaaacagcttggcggagattctccctctttccgacacacccggtggtccatggaaagtctacggcgtcgctcgtcgtcctcgtcctacctggaacgccgatcatccgatcgattacatccagtgcgatgtctccgacgccgaagacacaagatccaagctttcccctttaaccgatgtcacacatgtcttctacgtcacctggaccaatcgtgaattggaaagtggaaactgtgaagcaaatggctcaatgc

SEQ ID NO: 157154 - DNA, 351 bp, Arabidopsis thaliana columbia
  unsure (1)..(351): unsure at all n locations
aatagctccaaacaccttttacttccacaattattctctacattaccatctatattncagtgtgtctgacaaaacatggttcgacaanaanaaacccagctaattcaaacaccatcatatcagattatcattcactcctaatttctagtttcctttgcaccattataaacgcaaaccgaaaattaaacctgttttttacatataaaacaatcacagctctatattttgatataaactgcgaatccagtctacttttattactaaatcttttattctacacaaccaattattttcatatacatacgttgacgctaatacaatgtttagccttttatcccagatcatacattt

SEQ ID NO: 157155 - DNA, 473 bp, Arabidopsis thaliana columbia
gcgtacaaatggctccaatcgccttctacttctactattattctctacataaccatctttggttcctgttatattacaaaacgtgcttgaatgtttgaattgcgagtaatttcaagaccatgatagcagattatcattcaggcctaattggtagtttcttttgcagcattataaactcaaactgaaaagcaaactttttttttacttctaatacaatcatatttttatttttttatataaatagttaatcatctctactctttatactaaatctattattcttcattattatttatttttatattctttttgtgggtgtttaattcattttttttaaattttttttctaattacttttttcctttaccttattatttttttttcattatttttatatattttactattctactttatcctatctattatatattttattttttccttttttaatatttttaatacattatttt

SEQ ID NO: 157156 - DNA, 447 bp, Arabidopsis thaliana columbia
  unsure (1)..(447): unsure at all n locations
gacccacgcggccggcggctcaacactatcctcttctacatttttcaacgttggcctcaaacgcactctcgtctggcacgggcgctaatcccgctctgtctcctaagccactactccctcacggctctgcttctccgtcggtttctctcggcttctccaggaaagttggcggcggcagagcagtggtcgttgcagcggctacggtggacacaaacaacatgccgatgaccggagtcgtgttccagcctttcgaagaggtgaagaaagccgatctggccattccaatcacatctcatgcctctctcgctcgccagaggtttgccgacgctagcgaggcantcattaatgagcaaatcaatgtggaatacaacgtctcctatgtgtaccattcaatgtacgcatactttgacagagacaacgttgctatgaaaggactagccaaatttt

SEQ ID NO: 157157 - DNA, 453 bp, Arabidopsis thaliana columbia
  unsure (1)..(453): unsure at all n locations
gaaaanggggggcggccgacgcgtacgatttttttctttctaggttgcagttttaatggagaaggttttcaattanggttggtgagggggaaagatgagccggggtttgggaataccggtgaagcttcttcacgaggcctcacgtcatatcgtgacggtggagctaaagagcggcgagctttacagaggaagtatgattgagtgtgaggataactggaactgtcagctcgaggatattacttataccgccaaggatggtaaggtatcacagcttgagcatgtcttcattcgaggcagtaaagtcaggtttatggtcataccagacattctcaaacatgctccaatgttcaagcggttagatgctagaatcaagggaaagagctcatcactgggtgttggcagaggtagaggtgcaatgcgagggaaaccggctgccgggcccgggcgtggaac

SEQ ID NO: 157158 - DNA, 457 bp, Arabidopsis thaliana columbia
  unsure (1)..(457): unsure at all n locations
aaaaagggacggccgacgcgtgcgcttgaataaaatcagaattacaaacaaaatttgtttttcaaaagcttcctctcattgngctgcttgtgctcctgaccgtggtggcctctccagcaaatgcagatggacctgtttgcccgccgtcgaacaaactaagccgggcaagtttccctgaaggttttttatttggcacggctactgcggcataccaggtcgaaggtgcgattaatgaaacttgtcgtggaccagccttatgggacatctactgtagaagatatccagagaggtgcaataacgataacggcgatgtggccgttgatttcttccatcgttataaggaagatatccaactaatgaagaatctaaacacagacgcctttagaatgtctatcgcatggccaagaatatttcctcatgggagaaaggagaaaggagtgagtcaagctggtgtgca

SEQ ID NO: 157159 - DNA, 310 bp, Arabidopsis thaliana columbia
atcttggtttgccagatacacaaccaatcttttccactgacttatctgagaataagcatgtcaaggagattgaaccatcattgaagaaccaactcattatctcaactgttattatgactgtcagcatttcttatctgtcaatgattggctaaccaaccttctttaccatcttgaacttgggaacacaaaaagttgtcaagaacttccagctattccttccagtttgttttgaactttaaaactttacttattaatgatttcttcaacttattactaccctctttacctctacagcccttttcttatattt

SEQ ID NO: 157160 - DNA, 372 bp, Arabidopsis thaliana columbia
  unsure (1)..(372): unsure at all n locations
aaaaaaaaaagggggcggccgagcgaacaattctctcaaataagagcatttcttatttcaaaattctcaatnannnctcggtcgggtgtaattagcgcgcgggccccccancacaacnnaaaaaaaaaatttctggaaacaacaaattcatacttcgcaaccttaaactatcgatctttacatatatataaaaactgaaatgaaaataacatgaactctcaactcgtaaaaatacttacacccccaataattccttattttaccaaactcccctctgttacaccattgaaaacttttcgccaaacaatggaatcaagaaattcaaagcttctgtctactcaaactactccaagaagccctccttaaaaccaa

SEQ ID NO: 157161 - DNA, 187 bp, Arabidopsis thaliana columbia
aaactcaataataaattttatatttttcaagagaaagtgaaagaaatttttaaggtgttgaattattgacttacaatttaaaatcaatcattggtgcaagccataaaaaatcttgaatcactaacatagacctataccttttatccacaatttatttaataagttcatccatatgatactgcatcac

SEQ ID NO: 157162 - DNA, 397 bp, Arabidopsis thaliana columbia
  unsure (1)..(397): unsure at all n locations
tctctctnccaatctcatcttttttctctctctaactctcgaaatcaatactggaattcgttgacattaaaattagggtcggaaccaacnnattcnnaagaattggtcgtttggttgctagagttgttctccacagggacaatgttgagctcgtcactgtcaacaaccccttcatcactactgagtacatgacctacatgttcaagtacgacagtgttcacggtcaatggaaacacaatgaactcaagatcaaggatgagaagacccttctcttccgtgagaaaccattcactgttttcggcatcaggaaccctgaagatatcccatgggccgaggcttgagctgactactttgtttattctactgttgtcttcacttacaaatacaacgcttcatc

SEQ ID NO: 157163 - DNA, 355 bp, Arabidopsis thaliana columbia
gaaaaacccaagttcgtacccatggctctgttttttttttctgggaactcataataaacctggggagggagtgcttaaagatgggcttagttctcaaattcaggcaacatttatctcaaacctcatccagattatcacttctttctcgaatcggcggttaccggagttacacccaaccggcgaagattgaagatgaagaagaagaagaattcgatcagagaaagctcccaacagattacgatccagctacttttgatccaacagagcatcgaaatccaccaacggatcgtgtattcagacctcgtagacgagatctcatctctaacattattagaaatctccgagcttggttcga

SEQ ID NO: 157164 - DNA, 415 bp, Arabidopsis thaliana columbia
  unsure (1)..(415): unsure at all n locations
gagagganngaggtctttgaacactgtctgtttacagtttttgagtgaggaggtcaagagggggttcgacaagaactgggctgggtctaagaagaaggctttcactgggtacgctaagcagtatgacagtgaggatggcaagaagggtattcaggctcagcttgagaagatgaagaagtacgctactgtcatccgtgttttggctcacactcagatcaggaagatgaagggattgaagcagaagaaggctcacatgatggagatccagatcaatggtggtaccattgcccacaaagttgactttgcctacagggtctttgagaaacaaatcccaattgaagctgtcttccaaaagggtgaaatgattgatataattggtgtgaccaaaggtaaggggttttaaaggtgtggaaac

SEQ ID NO: 157165 - DNA, 316 bp, Arabidopsis thaliana columbia
  unsure (1)..(316): unsure at all n locations
aaaattaaaaccctggctggttaaatataacgcccgtccatcttaatcaaaaaaaaactnatatttgaatcttattttactaaatttcatactttttggatctcatagaggttcaagctaacaattcaccctaacactttctcttacatttttttttttttttgtcatttcaaacaagtctatacttcgaacgaaatttctaataatctttttataactctcaaatttcatcaaaccaacactacagactttctcaccttctgtgcgtttgacccttatcaaattaccattatttctaaacattttaacacattta

SEQ ID NO: 157166 - DNA, 445 bp, Arabidopsis thaliana columbia
  unsure (1)..(445): unsure at all n locations
aaaaagggagggncgacgcggggcgagaactggtacggacatattgggtatcttgttccagtttatgccatgcgnggacatctaagagaggggacggatgtatatgcctttggtgttgtggctcttgagctagtgagtggaaggccaaactctgatgagaacttggaggatgaaaaaagatatcttcttgaatgggcatggaatctacacgagaaaggccgtgaagttgaacttattgatcatcagctgactgaattcaacatggaagaagggaaacgcatgattggcatagccctgctgtgtacacaaacatctcatgccttgagaccaccaatgtcacgagtggtggccatgctttcaggagatgttgaggtcagtgatgtcactttaaagccaggctacctaaccgactggagatttgatgacaccacaaccttcttaatca

SEQ ID NO: 157167 - DNA, 404 bp, Arabidopsis thaliana columbia
  unsure (1)..(404): unsure at all n locations
aaaacgcgccaccatctccgcgtcgggtgactatgcctggaggggggcaaaaccagagnaaggaatcttttttggtactcaaaagaatgtggtaccgatgcagcagagttcagtaacatcagcatcattggataaacagagggctgagttagctaggaagcatgtgagagctcttaataaccaatttgtaagttgggtgcagttacagctgaagaatcattctgatgaactttgggaagatgggatgaatgactacattacgcatgcttgaaacattctggaaaagtttaaggatgtggtcagctggcttaaaaaaaataaaggaaagggggagaatttatcccctgaatctcgtggagcaaaaaataaattagttgctgaagttaagaataccaatgttaaat

SEQ ID NO: 157168 - DNA, 454 bp, Arabidopsis thaliana columbia
  unsure (1)..(454): unsure at all n locations
gaaaaaaggggccggccgacgcgaacgctctgggacaaaatacttcaaaggtttgtgttatactccgaagatgatactaaaaaagttggtgttcttattctcagtgttgggccttactgacatctacaaggtgtggttcaccgtgaccttaaacccgagaactttcttttctctaccaaggatgagactnctcctctgaaagcaattgattttggtctttctgactatttcaagccagaccagaggttgaatgatattgnagggagtgcttactatgtggccccggaagttttacacccgacatatggaacataagcttacatgtggagtataggagtgattgcttatattcttctctgtggcaatcgacccttttgggcccgtactgaatcctgaatttttcgagctgtactaaaagcataaccgaattttaagaaactccttggcctttttt

SEQ ID NO: 157169 - DNA, 438 bp, Arabidopsis thaliana columbia
  unsure (1)..(438): unsure at all n locations
caggaccggaaaacccggggcggccgacgcgtccgctgagtgaaaaaagcttatcgcggttattatttcccggcgaagaaaaanaanaggggtagggtgaattcgactgatgggtctgctagctcaacgcagctctctcagaaggaagctgatgtcaggatgatgtgtgccgctgaggttcatcttggaaccaagaattgcaattaccagatggagcgttacgtcttcaatagactcaacgatggtatttacatcttcaaccttggcaaaacatgggaaaagctccagatggctgctagagttattgttgccattgagaacccacaggacatcatcgtccaggcagctaggccctatggacagagagctgtgttgaagtttgctcagtacactggagccaatgccactgctggaagacacactcctggtaccttcacc

SEQ ID NO: 157170 - DNA, 417 bp, Arabidopsis thaliana columbia
  unsure (1)..(417): unsure at all n locations
ttcgagtaattacgtttgggattttgtttttcggatacttgttaccataatgcggctgttgtatttgacacctgtgattgtctcaagcatcgttctttactgatttttagatagctctgagatctgtctctgcgattcgtcggatttgaattcgntttttttttgggtagctcttggatttcttcttctagggtttccaagaggatagagaaaatgcgggtgtcctctgagatactccttctttctttggttccggcgttgactttttatcattctggtttaagatctaatcggttgaaacctcttcaaaagagtgattggcgtggtaatcttagttaaacaacaatttctcttgttttttgtttctccgatctcttcagatcttttcaattttctcttcggtttggtttgttttca

SEQ ID NO: 157171 - DNA, 324 bp, Arabidopsis thaliana columbia
  unsure (1)..(324): unsure at all n locations
aaaaagggggcgggggacgcgtaacattctctctctatctgtaattttttttgtttttggatcgaaacctnaaaanagggaaagtggctaaatgattgagcggggttgcgtcacaaatcatggttggaaacggcgtcgttgcccgatccgtcggttcttctcttcttcaacgcgccggaatgggtcttcccgtcggcaaacacattctcctcgataagccgctatcggtaaactactagctgatgtgtgacaactggactgcgtttccagagccttgtatagatcggattgctgattccgtcttaaatgtattaagcattggct

SEQ ID NO: 157172 - DNA, 307 bp, Arabidopsis thaliana columbia
  unsure (1)..(307): unsure at all n locations
gacgaccgacgcgtgcgctacggacctcctggatgtgggaaaacctctttgtgcttatagctattgccaacgagtgccaggctatgttcatcagtgtcaagggtccggagcttctgacaatgtggtttggagagagtgaagcaaatgttcgtgaaatcttcgacaaggcccgtcaatccgctccatgngttcttttctttgatgagctcgactccattgcaactcagagaggatttttaagtggtggcgatggaggaggagctgtttttttttacttttttttttttttagacttttttttttccga

SEQ ID NO: 157173 - DNA, 419 bp, Arabidopsis thaliana columbia
  unsure (1)..(419): unsure at all n locations
agttnaagccatggccgccttttcattattcgacgctgagattcaacaccgggttacgaatgaggttaagctggtcaaccnatggagctttgatgacgtttcggttacggatattagtcttgtggactacattggtgttcagccatcgaagcacgcaacttttgttccccatactgctggacgatactctgtgaagaggttcagaaaggcgcagtgcccaattgttgagaggctcactaactctctcatgatgcacggaagaaacaatggtaagaaagtgatggctgtcaggatcgtcaagcatgccatggaaattatccacctcttgtctgacttgaacccgattcaagttatcattgatgccattgttaacagtggtccacgtgaagatgctaccaggattggatctgctggtgtgg

SEQ ID NO: 157174 - DNA, 439 bp, Arabidopsis thaliana columbia
  unsure (1)..(439): unsure at all n locations
gaaacgaactcctgacctctcgcatggcgtttctagtttctctagtcatatttcttttttggactgtgtgaattactatcgggggctccnaaacgccnngcccgaatttcaagtcgatcatcaatttcggcgattcgattgcggacacgggaaacttggttggtctctctgatcgtaaccagcttcctgtgactgcgtttccaccgtacggagaaaccttctttcaccacccaaccggtcgttcctgcgatggccgcatcatcatggactatatcgcttaatttgtggggcttccttatgtgcctgcggactttggatctaaaaatagaaactttgataagggtgttaatttcgcggtagccggagcaacggcactgaaaagttcctttcttaagaagagaggaatttaaccacacaccaaccttagtttaggagttca

SEQ ID NO: 157175 - DNA, 403 bp, Arabidopsis thaliana columbia
  unsure (1)..(403): unsure at all n locations
aaaaaaaaagggggggggggggaagcgananagatatactcncaagaattttttttacctaaaaacaaaaaacaagggggcctgtgatattcgggggcgcgaacncanatactatctactcnnctaccctcgaaaccattgcaaacatggggaaggtcgtcgacagcctttatgtccggtctgccaaaatcatgtcctgagagagtgagtgagttggtcgtatgaatctcattctatcgttctttctttctggttttagatatcgattggactcaaagaaactgatgtttctcaatggagaaagtaaactggtctgaatggggcacattactcggtctgcttatgatcttattatgtcatgcgttcttacctcttattagcgcttaaaatgtaatttggtttt

SEQ ID NO: 157176 - DNA, 428 bp, Arabidopsis thaliana columbia
  unsure (1)..(428): unsure at all n locations
acaccgaaaaaaacacacaagatttcttttttctcctgcttcttcgactcttgaattgggttctttgagactagcggtgattcaaccatggctaatgcagcatcaggaatggcagtccatgatgactgcaagctgaaatttatggaattgaagacgaaaaggacacaccgtttcatcatttacaagattgaggagctgcagaaacaagtgattgttgagaaaatcggtgaaccgggtcaaacccatgaggaccttgctgcaagtcttccagctgatgaatgccgctatgccattttcgattttgattttgtcagntctgagggtgtcccaaggagcaagatntttttcgtggcatggtctccggacacagcaagagtgagaagcaagatgatctatgcgagctccaaagacagggttaagagagaact

SEQ ID NO: 157177 - DNA, 398 bp, Arabidopsis thaliana columbia
cagcctgtccttgatatggatcttgagggttagaaactccaggcctttactggggcctgtgctgaacttgaatcaactctttctggtttgaatgttcttgtcgagacctacttcgctgatatccctgctgaggcatacaagaccctaacctcattgaagggtgtgactgcctttggatttgatttggttcgaggcaccaagacccttgatttggtcaaggcaggttgtcctgagggaaagtacctcacttgctggaggtgcagatggaaagaacatttgtgccaactatttttcttgcttcctaaggaccttgcaggcacttgaaggcattgttggtaaaaacaagcttgtggtctcaaactactgctttctttttcacatccgctgtgatcttatca

SEQ ID NO: 157178 - DNA, 343 bp, Arabidopsis thaliana columbia
  unsure (1)..(343): unsure at all n locations
gagctggctaacccactcncaaaggtttctatttttatgatgataagcgcaaggcgaaacctgatcctgagctaaagaaatatatcgaaaaggcaataagcatatctggagtaaagcttgaccctaattttgctaatttgtctgagaaagacattattgaaatgacattctttccataagtaaacgaggcgtgtagggattttgctgaacgtattgatgtcaaagcctcagactctgacattgctggcataatgggaaatggttttccaccttacaaatgaggaattatgttctgggcttgattccatcggttcgtaatacattactttaggcttgattaatt

SEQ ID NO: 157179 - DNA, 295 bp, Arabidopsis thaliana columbia
  unsure (1)..(295): unsure at all n locations
gaaaaaggggcgggncgaagcgaacaacncaaaacctaaaccagaaattctttttataaaaaaacaaaaacaaaggcccttgcttattttgcagcggccctaaccccaaccaaaaccaacacaacaacaataatttaatcaacttgcaaaaccacaaactactacaaattctgcgtctcatctctcaaatccgacccaagaagtcccacagccgacacaaaaggtctcgccttcattatggactgcgctgatattacaaacgccacctccaccgcaaaatacatttttttgaaac

SEQ ID NO: 157180 - DNA, 405 bp, Arabidopsis thaliana columbia
  unsure (1)..(405): unsure at all n locations
ctgatctgactccaaagagcgccctggatgcatctttgtcccctgttccttacatgtttgggcgagtgagaaaaacaggtgcagttctggagaaagtgattgagagaaggcaaaaaaggatgataaagaatagggaatcagctgcaagatcccgcgctcgcaagcaagcttatacgatggaactggaagcagaaattgcgcaactcaaagaattgaatgaagagttgcagaagaaacaagttgaaatcatggaaaagcagaaaaatcagcttctggagcctctgcgccagccatggggaatgggatgcaaaaggcaatgcttgcnaaagacattgacgggtccctggtagagcttataatggcgtctaaggaacccaacaaagcgccgaagttatanaacaactc

SEQ ID NO: 157181 - DNA, 521 bp, Arabidopsis thaliana columbia
  unsure (1)..(521): unsure at all n locations
ccggtcggcccacgcgtccgacccaacaaaacccacaagtcgaaatctctatatccgttgagagtttgttcctttttttntgtnctcggagatggaggctgtgccggaggatgaagagtacagtttcagggaagtagtgttgccgtctttgattccggtagttcctgagccggaacttgagagagagatcttatagaggagatgaggaagagattttatcgtctctttttatcaattgtctatttgttcatccccctttttttttgtcatcttttactttttctttctatcttcctattattctttaatctttttctctctttttgggggggggggtgggttctcttcttcttattttcttttactactttttttttttgtcataatattttttttttcttattaaatttttttttttttccctattttttttttttttctctttatattattttttgttatcatctctatactttttttttctttcttaatattattttttttttacacatctttttttt

SEQ ID NO: 157182 - DNA, 412 bp, Arabidopsis thaliana columbia
  unsure (1)..(412): unsure at all n locations
ccggaaccggcaaggcccgacccagcgcgtacccgtacatcaaagtactccaaggtagaacatgcctctggtcttatggaacaatgtannngcaagggaagtcggcagaaatggtatccgtaacttggggggaaaggattagactctgagggctgggctcgggggtcccagttccgaacccgtcggctgtcagcggactgctcgagctgcttccgcggcgagagcgggtcgtcgcgtgccggccggtggacagactgagaacagctctcttgggagctttcaccgggcgtataacatttcacatataactggtacggacactgagaatgcaactgtgtaactaaaacaaagcattgcgatggtccctgcggatgctaacgcaatgtgattttttcccaatgctctgaattgt

SEQ ID NO: 157183 - DNA, 432 bp, Arabidopsis thaliana columbia
accgaaacggacaggcccgacccgggcgtccggttcggtttgttaactccggtacagaggcatttatgggtgtgctacgtcttgctcgtgcctgcagagggaaacaaaagttcatcaagtttgaaggttgttatcatggtcatgcaaactctttccttgtcaaagcaggtagtggtgtagctactttgggtctacctgactcgcctggggtccccaaagcagctacttcagatactttaacagctccatacaatgatattgctgctgttgagaagctttttgaggcaaacaaaggagagattgctgccatcattcttgaacctgttgttggtaacgcgggttttattacacctaaaccagagttcattgagggaatacgccggatcactaaagacaatggtgctcttcttattttcgatgaagtcatgactg

SEQ ID NO: 157184 - DNA, 456 bp, Arabidopsis thaliana columbia
agaaaatggaaagaagaaggtcaagccggaacaggatgaggatgggccaaaaccagtttcttctgtgggaatttgctggagaagttactgccttgagagaaaaggtaactatgtgtggataaaacgtactgtaaaatgtgtattatgtatgatctagagggccttagtgtgatgtatgacttggtcagggattttggtggtttgcccgaagtcaaaccgaaccaaaactggttttcggttactttagactttagtcatagtaaaatgaacatgtctataaatgaataatatgcaactctttcaattggtaggcttgcttttgtctatgtaatatcaatccttcttggtatgtatttatctttggccaaatgtgatattttctggagttttaatctcttcttttccttctattttggaacttcttcgaatctttaatgtcaatattattgcagtgag

SEQ ID NO: 157185 - DNA, 355 bp, Arabidopsis thaliana columbia
  unsure (1)..(355): unsure at all n locations
ccgggccaggcccacgcgtaccggaaagaatnccccccaaaaaatggccatagtcattgaaccatccttattgcagnctctctcgctcgtggcattttctcctttttgtgggtgttccaaagcctatggaagtggcggctatctctttcctcagttttatgaccaatcgtgtcctaaagctcaagagattgttcagtccattgtcgctaaagcattcgaacatgatcctcgcatgcctgcctccttgctcagactccatttccacgactgtttcgtcaagggatgtgatgcttccatactattggacagcagtggaaccataatcagggaggaacgatccaaccctaacaaaaac

SEQ ID NO: 157186 - DNA, 364 bp, Arabidopsis thaliana columbia
gaaaataattaatcacttgctaattctaagcttcttctctttccaaaaatggcgtcatcatgggctttagctctcaggagacgtctctcttcttccaccgtcgccgtccctcgcgccttaagagccgttcgtccggtggctgcttcatctcgcctcttcaataccaacgccgccagaaactatgaagacggtgtcgataggaaccatcactcaaaccgacatgtttctcgccacggcggcgatttcttctcacatatactcgatccgtttactccaacgagaagcttgagccaaatgctgaatttcatggaccaagtaagcgaaatccctttggtatcagctactcgtggaatgggagcttctg

SEQ ID NO: 157187 - DNA, 492 bp, Arabidopsis thaliana columbia
  unsure (1)..(492): unsure at all n locations
nntccgctttgcttcnnttcgtagcccccgccgtcgctcgtgaattctctntggccggagnncttcaaaagggccaacgagaaagagcgaactnnnctatccgccgtgcgtcgtgcacgccnnngtgctaagaaatcctcatgggcagnnntccacgcgtntnnaccctgaggctcttgtatcnnntctgccgnntggtaacctggccggcgnnngcgtcgagcctaaccgnntcgcaaaaaggaatgtcatcgaaggcnnatcggtgaacctannacaataaccgccgtggagcacaattacccttcaccgtgaaagaagctgatcaaagaagaggaaaggactntgacgccgcgcgagaaagaccgcgcttcatgacttgtttggagactattgatgagacgctggacgagctccatgaaacggtggaagatcttcatttgtatccaaccaaaaaaactctccgggaacacgccggagatctcaaacact

SEQ ID NO: 157188 - DNA, 341 bp, Arabidopsis thaliana columbia
  unsure (1)..(341): unsure at all n locations
agtgattcttcgctcgcctctttgttgactttatttttactgtcaggtanaanaatccatntgtatttatattaaaaagngctacgtctctccaacanaacaacttttacttcactttttttattccacctcttttttattttatactatactttttgtatttaataaatttttttttttttttctcccattttatttaaaaataaatttttttttttctttttaactcttatatttattttatatttattttttttcttttaaaaaatatattattttttcaattaaacttttttttattaattaacattaatttttttttttttatattatattttttt

SEQ ID NO: 157189 - DNA, 336 bp, Arabidopsis thaliana columbia
  unsure (1)..(336): unsure at all n locations
gagaccatttcgcgtgaacaaagatggctggtttctttgcttcgatctctttggtcaaagcgcggntctaagatccttctgtgcgtgattcatcaccttccaaattcggatactcgctctcctccttacgctccttttcagcagccaccgctttcacagctgcagccggagctcctaatagctcgcttgaccctaatcgactaagaaacgtggctgtgatagctcatgtcgatcacgggaagacaacacttatggacaggcttcttcgtcaggggggtgctgatattcctcaccagcctgctatggattctattaatcttgagcgtgaaccaggga

SEQ ID NO: 157190 - DNA, 430 bp, Arabidopsis thaliana columbia
tctgcgtttctttctcggggaaaaataatatctgttaagaagattcgagagagagagatctgaacggtttttctcttagtctgcaaggggaacgctacagtcatggcgaagagcttacggagccttaaaagacaccaccaaagtcggccttgtccgagtcaatagcgattacgccgaattagatgttgccatagtgaaggctactaaccatgtcgagtgtcctcccaaagatcgtcatctcaggaaaattttcctcgcaacgtctgcgattaggcctcgagcagatgttgcttactgcattcatgctctctcccgacgattacacaaaaccagaaattggacggttgcattaaaagcactgctagttatacaccggcttttgagggatggtgatccgacatttagagaggagctattgaaattttctcaa

SEQ ID NO: 157191 - DNA, 453 bp, Arabidopsis thaliana columbia
gcgaaaaaacgaaaatggcggcgaacggagtatctacggcgggacgtcaggtatcagagaaagaagctgatatccagatgatgtgatcagccgatgttcaccttggtaccaaaaactgcaactatcagatggagcgttatgtcttcaaaagacgcgacgacggtatttacataatcaatcttggaaagacatgggacaagcttcagatggctgctagggttattgtagcaatcgaaaacccaaaagacataattgttcaatcagccaggccttatggacaaagagctgtcttgaagtttgctcagtacactggtgttaatgcgattgctggaagacacactcctggtactttcactaaccaaatgcagacttctttcagtgagcctaggttgttgattctcaccgacccaagaaccgaccatcagccaatcaaggaaggtgctttgggaaaca

SEQ ID NO: 157192 - DNA, 470 bp, Arabidopsis thaliana columbia
gcgtacgcttgctcaacgttaccagcctcatgagacaagtttcatagacacatgcaacggaagtctctaggcggcgaagcacgtgtaagagaggctccgattccagaaaacgtagcaaagcttcaactagcggaagcaaaaatgcaagagctaaaagcaaatatggcagtccttggtaaagaagcaactgctgcattagccgctgttgaatcacagcaacatagactcactttccagaggcttgtggctatggttgaaggggagaagaattatcacttaagaatagcagccatcctcagtgacattgaagccgagatggtaaccgagaaacaacacaaagaatctgctcctcctgcgattccaacagagaacggctcagagaaaacgtcatactttcttgctgaagtgattcatccattttccgcttcttcaaaaaaagagttagacttggacaaaagagattacatcgt

SEQ ID NO: 157193 - DNA, 308 bp, Arabidopsis thaliana columbia
gatttttgtatactacgtgtctgtgtatgacaccatcatataaaaacgagagccactggaaatcgctggcttgttcaattcttaacaatcgtgcggatttcttgtacaaagacttctattttcactcagtatttgagcgagcgttcttcacacgacactggaagacgcaatttcttgcctttttcaaatttccctggaaaatctcagatttctcggaaaatgcttgcgattgcagagattctcttcgatttgcttatcagctagcagagaagacgtaaacccatctgaagaattcactgtcatacttg

SEQ ID NO: 157194 - DNA, 530 bp, Arabidopsis thaliana columbia
  unsure (1)..(530): unsure at all n locations
accagcagcaatnnggcgtctggttgcttttcttcaacctactttctcanntctttnntctccctttcttctttagggtttggggccagcaatagtacttcacctttgccgtctccatcatgtnnttctttcctttcgaaccccctttctnntctccttccgcnnatctgcttctctttccgctccggatnnttgctcgacgctcttcnccttcagctccccacttctcgtcggagccttnntgctgtcaaagccccaggcccgatgatccttccccactggttggaaaccaaggcnngcctgattttgaggccagaggcctgttgtttgatccaagatttcatcaaggttaagcctctctgattacattggaaagaagtatgtgattctctttttctacccattggactttactttcgtctgcccaacagagattactgccttcagtgaccggcattcagaatttgagaagttgaacaccgaagtattaggtgtttctgtcgatagtgtgttctctcaccttgcatggg

SEQ ID NO: 157195 - DNA, 425 bp, Arabidopsis thaliana columbia
gttcattggttctctattttgaactcgcttatggtgatcttctttctggccggtataggtgtcgtcatattcctgagggcagggagaagggatttgacaaagtatgaggaactggacaaggaagcacaggcacagatgaatgaggagctctctggatggaaacttgttgtcggagatgtgttcagagaaccagaaatgccaaagcttctatgcattatggtgggagatggggttcgaattacaggaatggctgttgtcactattgttttcgctgcacttggattcatgtcgcctgcctcaagaggaatgctactaaccgggatgattattctctatcttttcttgggtattgttgctgggtacgctggtgttcggctctggagaacttgcaaggggactttagaaggatggagatcacttttctg

SEQ ID NO: 157196 - DNA, 468 bp, Arabidopsis thaliana columbia
atctcctcttgcaaaccaacgtaaaacactttctaagagatcaatatggctggagtgagggggttggcatgcatggtcgggggttgcatgattgtggccggtccaatcacagcgaacgcgcttatgagttgtggcaccgtcaacggcaacctggcagggtgcattgcctacttgacccgaggtgctccacttacccaagggtgctgcaacggcgttactaaccttaaaaacatggccagtacaaccccagaccgtcagcaagcttgccgttgccttcaatctgccgctaaagccgttggtcccggtctcaacactgcccgtgcagctggacttcctagcgcatgcaaagtcaatattccttacaaaatcagcgccagcaccaactgcaacaccgtgaggtgatgagcgacggtcaaatgaagctactagcggatgtttcgaatattatataatcgatgagataatatt

SEQ ID NO: 157197 - DNA, 450 bp, Arabidopsis thaliana columbia
ccgggcgaccacgcgtccgcgattaaatctcaaccgtccgtttcaaatctgatcaacgtcgccgaccgtttgattctccgtgatggtaatgccggagatcttgcgggagcggtttcagctcttgatctcatggctcgtgatgggattcgtcctatggactcagtcactttctcttcacttctcaaatcttgtatccgagcacgcgattttcgtctcgggaaactcgtacacgctcgattaatcgagtttgatatcgagcctgattcggttctctacaattcgttgattagcttgtattcgaaatctggagattcggcgaaagctgaagatgtgtttgagactatgagaagatttggtaagcgagatgttgtttcgtggagtgcgatgattgcttgttacggtaacaacggaagagaattagatgcaattaaaggttttggtgagtttctg

SEQ ID NO: 157198 - DNA, 306 bp, Arabidopsis thaliana columbia
  unsure (1)..(306): unsure at all n locations
gcgtccggcagttcgtagagtcatggcgttagcatcaatcacgttgccgacgaagtccggattatgtcgttggtgtccgtcttctgcggcggtcnctcaccaatttcccgctcgtttttctccgatcggttctagaatcgcttccagaagcctcgtcactgcttcgttcgctaacgagaatcgcgagtttgtgattgatggtggaggaaatgctgctggttatgctgctataactttagtggaaaatggaatggctgatggtcggctatgcattgtgaccaaacaagcttactcaccttatgagag

SEQ ID NO: 157199 - DNA, 300 bp, Arabidopsis thaliana columbia
atctgaacttcgccgtcgagagcatccatgtttcgtgtcatcagagctcaacgtaagggttggggttccgtcttcaaagtgccgacactcaccaccgcaaaggtccggctaagttccgtagcctcgatttcggcgagagaaatggttacctcaagggcgtcgtgacggagatcatccacgatcctggtcgtggtgctcctcttgctcgtgtcactttccgtcatcctttccgtttcaagaaacaaaaggagctcttcgttgccgcctaaggtatgtacacctttcagttcttgtactgcg

SEQ ID NO: 157200 - DNA, 379 bp, Arabidopsis thaliana columbia
  unsure (1)..(379): unsure at all n locations
taaaccagattacgcttatctgaaaagattatttctagatctctttatccntnaagggtggcagtttgattacaaatttggctgggcaatcttnaaatatcaacaatcacaactaaccgctcccccatctcgtgccctcaatcctgctgtgggaactagtgccgcattgcctccgggcatttccaacatcgatagatacacaggggaggaagaagggcgaccacatatggaatcatctcgacggagagtttcaggggctcttgataactcatggaatatttcgaaccaacctacatcctcaagtgctagagactccatgatcccgagctcctcgttgtttgcacaatcagcacgatcatctaggagagtaactgcatta

SEQ ID NO: 157201 - DNA, 431 bp, Arabidopsis thaliana columbia
  unsure (1)..(431): unsure at all n locations
ggtcgtgtcatcagagctcaacgtaagggtgcggtttccgtcttcaaatcccacactcaccaccgcgaaggtccggctaagttgcggggcctcnatttcggcgagagaaatggttacctcaagggcgtcgtgacggagatcatccacgatcctggtcgtggtgctcctcttgctcgtgtcactttccgtcatcctttccgtttcaagaaacaaaaggagctcttcgtcgccgccgaaggtatgtacaccggtcagttcttgtactgcggtaagaaagctactctcgtcgttggaaatgttctccctcttagatctattcctgaaggagctgttgtctgcaacgtcgagcatcacgtcggtgatcgtggtgtcctcgctagagcttctggtgattacgccattgttatcgctcacaaccctgacagcgacac

SEQ ID NO: 157202 - DNA, 371 bp, Arabidopsis thaliana columbia
  unsure (1)..(371): unsure at all n locations
gagtactttaagaagacttactctgaccttgctggtcctgagtacactgccaaatacaagactctgatctaccttgctggttctgcgggtgctganatcattgccgatattgcactttgcccatttgaagctgtgaaggttcgtgttcagacacagcctggatttgctagggggatgtctgatggatttcccaagtttatcaagtccgaaggatacggaggcttgtataagggtcttgctccactctggggacgtcagattccttacactatgatgaagtttgcttcctttgagaccattgttgagatgatttacaagtacccaatccccaacccaaagagtgagtgcagcaaaggtctgcaactcggagt

SEQ ID NO: 157203 - DNA, 440 bp, Arabidopsis thaliana columbia
  unsure (1)..(440): unsure at all n locations
agaagggtgacttcatatcggaactttccttataagatcgaatcaaactgtgaagcaggactgcgaggcatcgtcaagcagctttatgcttccaagaataacgttaagtcgaagattgttaagcttggcggtgacaaatatggtctctcttccaagttgttcttcttgaaatcatgtccaagaagcttcggatcttttagttcgtccaagaccgttgatttaccagttcctcccgagtgggggctggctccgaccagttattacgttcctttcttgcccatcatcggtatcccatgatacgcaccgntttaatccttgttttgtgtgttttatgtaatatattcaaattatatatgtgtagaggacatgtaactatcttagctgttcttttcaagttcatgcttgaactgaaggttgtgtgtgaacttaatgcctgaaga

SEQ ID NO: 157204 - DNA, 359 bp, Arabidopsis thaliana columbia
  unsure (1)..(359): unsure at all n locations
acaacctcacgaagaaaaccatttgttttcttatagagagccaagaatattaaaagaggtatgtagaaatatatttgcttgaatgatgccaacatcnatacagtttcagagatcctccaccgccgcagaagcagccaacgccaccgtaagaaactatccccaccaccatcataaacaggttcaaaaagtgagcctcacgcgcgggatggctgatgtgccggagcacgtggagctttcccacacgcacgtggttggtccttctcagtgcttcttcgtcgtggtacaagacgtggaggctccggtttccacagtctggtcgatcctaagccgcttctaacaccctcaagcgtacaaacact

SEQ ID NO: 157205 - DNA, 417 bp, Arabidopsis thaliana columbia
gtaaactctctctgattctctctttctctctttctctcgctctctatctctctctcctctggttggatatcaattaatcaagaagatttcttgtgttttttttttttctgttaaagaagatttcttgggagaaaataaggtggattgaaggattagtctttaggaatggtggtggaggaggagaatagaagcatggaggaaggacttcttcagcatcaaaacgacagagatgatcgtcgtatcacagcttgtgtcatcctcagcacttttgtcgctgtttgtagtgccttcagctacggatgtgccgctggttatacttcaggcgcttagactgctatcatgaaggagttagacctttctatggcacaattttcagcgtttggctcctttcttaatgtgggaggtgcggtgggggcc

SEQ ID NO: 157206 - DNA, 420 bp, Arabidopsis thaliana columbia
cttcttcaaaagcacactcaatatttcgagatcctctcggcttgttcgttcttcgtgggcggtcccatctattgtttcgtggctggtctcagattcgactaacttggatatctccgatactgaagaagcctccttcttctttttccgctcttcccgatgccgatcgataagatcttcaaagatgatgctagtgaagagaagggagaacgtgcgaggatggcatcatttgttggtgcaatggctatcagtgatctggttaagtctactttagggccaaagggcatggataaaatcttgcaatgtactggtagaggtcatgcggtcactgttactaacgatggtgctactattctcaagtcacttcacatagacaaccctgcagctaaagttcttgttgacatctttaaagttcaagattat

SEQ ID NO: 157207 - DNA, 462 bp, Arabidopsis thaliana columbia
gaatccgggaaaaggacaagcggttctttttgtaggagacttgtcttacgcggatcggtgcgctaaccacgacaacaagagatgggatacttggggaaggttcgttgagcgaagtgttgcttatcaacctttgatatggactgctggcaaccacgaaatcgacttcgttcctgacattggtgaaatagaaccattcaagccttttatgaatcggtatcatacgccacataaggcatcaggaagtatctctccattgtggtattccatcaaaaggtcgtcagcttatattattgttatgtgaggtggctgatgttatgggatatacacacctcaatacaaattgttgtaaaaggagatacatggagtgaaatctacattttctccatggctttttttcatagtgcatagcccgttttacatagctattttcattattcatggaagttaatcatttaaagttat

SEQ ID NO: 157208 - DNA, 340 bp, Arabidopsis thaliana columbia
ccggtcggccacgcgtccggttgaggttaacgacgacaaacactttttttcaaacctcgtccatttttacacaaacctgtttcattcctccacagacatgttcatttacaagaaaggtttcggtaagggtttgggcggtggaggcggtctaggcggcggaggtggtctaggaggcggttgtggcctatgatgcgttggaggtttaggctgttgtatcttgattaatttttttcctgtctatttttctttttttcctatattttttttttttacataattttttttttctcatcttttttttttttcttctatctattttttatcgtgggggggggggggg

SEQ ID NO: 157209 - DNA, 455 bp, Arabidopsis thaliana columbia
cccacgcgtccggaaaaaaaaaaaaaagtagtttctttggcgacatctgttgcgactctatcgtctgcaccaccagtatctctgcctggcctctcatcatctcgctcttccttcttctccaattgcttcacagtcacgacccgaccaaacactcgttctctggtagcgattggacgcagaatccgacaagaaccaacgagaaagccactgacttgtaatgctttgtttggtctcggtgtgcctgagcttgctgtgattgctggcgtcgctgcgttgctttttggacctaagaaacttcctgagattggcaagagtattggcaaaaccgtcaagagctttcaacaggctgcaaaagagttcgagtctgagcttaagacagaacccgaagagtctgttgcagaatcatctcaggtagcaacgagtaacaaagaagaggagaaaaaaactgaggtttc

SEQ ID NO: 157210 - DNA, 490 bp, Arabidopsis thaliana columbia
ccgggtcggccgcgcgtccggttttcacactctctcctagggttttatctgcgaatcccaatctagagcttccatggcgacgcatgccatttctcgatccattctttgccgaccggcgaaatctctttcgtttctgttcacgcgatcctttgcttcatctgctcctctcgccaaatctccggcgtcttctctgctcagccggtcccgtcctctggtcgccgctttttcctccgttttccgtggcggccttgtgtctgtcaaaggtctctcgacgcaggctacatcgtcttctctgaacgacccgaatcccaactggtcgaacaggccacctaaggagaccatcctgctcgatggttgcgatttcgagcactggcttgtcgtcgtggagccacctcagggtgagcctactagagatgaaatcattgatagctacatcaaaaccctagctcaaattgttggcagtgaagacgaaactaggatgaagatctac

SEQ ID NO: 157211 - DNA, 449 bp, Arabidopsis thaliana columbia
aagaaacttgactgctaattgctaaaggtaatgcttctgagaattggaagctaatgaagctggtcgtcaatagcaatctgctgagaaactctattttcttcaagatctccgcctttgttttgatctccgttgcttgtttcttcctcggtaagcattggtctgaggatggcttccgccgtctcatcttcttctccgccgagccttcccgatctcccattgtcgcactctcacctgatttcggaaaaacctataacatctctggtttgatctatgagagtcacccgattttgcctccgtctttgtgaccaccgccggcgccagattctgttgagttgaaggtgtttggaatcgttaatgagaacggaacaatgtctgatgagtttcagaatggtgattacgacgttgagtcggcggggacgttggggaatcagacggaattcgagagtagc

SEQ ID NO: 157212 - DNA, 577 bp, Arabidopsis thaliana columbia
  unsure (1)..(577): unsure at all n locations
cgggtcgagccgacnngcgtccgtgaatctanngaaatagttttatttagttggaaatttatattgtatagagagagannnatattactaccaccgagtctgtttctatagaggtnncctaacgagagttaccnnncacaatccnnaggaaaccccnnttatttgagaattcaaaattcatnnnttctttcttttttctgtngnntttgtngannttttccnnncgggaaannntattttnntgggtattttatgtcnntctctngnntttttgctttnntcctttttcatagnnngagtcatgnntgtttcttcttgggtcttccttagcttcttctttaataaagtcctctctctttgtgagaaatctctttcgaattttcaatttnnttgttccattgtgagctatctgtatggatcacagaccagagaaaaagatcaatatctttttaccgttaatggaggaagtattctccggcgatcgcaggtcctttcaggccattctccgaaacccagatggatttcaccgggatcagattgggtaaaggttactgcaataaccaatactcaaatcaag

SEQ ID NO: 157213 - DNA, 374 bp, Arabidopsis thaliana columbia
cccaaaatggcatcggcggttcagaattcatttttgctcttatgtggagactacatggggtgctattaaacgattgtgtgggtcggtatgttctccaatcgtttggggttagcgttcattgcgtttcacccaaccgcaacgccggcgatcgctgcgttatgtctgcccactatttcttgggcctcgagctatacaccgagcttgtcgttgaccagtttactttaaacgcaaacttcgatgacgtcactccggagaattacgacgtcatcatcatcccatgaggccgattcacgtagcttttgagcgccgacgagaaattctttgacctcattgctctattcgccgaatccaagaacttgtcttcactagctgtc

SEQ ID NO: 157214 - DNA, 296 bp, Arabidopsis thaliana columbia
cagactttagtggcccaaagaagagcatgttttttgcatcagagtttattggatgttcccgttcgcttagtggggctatgcgggtaaacccatggaacgttgaagctactggagaagcactaaatgaggccctctcaatgagtgatgctgagaaacagctacggcatgagaaacatttccggtatgttagtactcacgatgtagcttattggtcaagaagtttcttgcaagacctagagaggatatgtgtggaccatttcaagaaaaggtgttgggggatggggattagttatggt

SEQ ID NO: 157215 - DNA, 302 bp, Arabidopsis thaliana columbia
  unsure (1)..(302): unsure at all n locations
cacgcgtacggaaacatcccatttcttgatttccctttttgtctcaaacccaacaaagtanancaaaaccgtaaaacttaaaccttccattgcnattatctctgaggtagaagaagaaagcagtagcagcctacccatgatatttccctttagggcaacactcagttctgcaaacccattattgtttttggagaaagttttcgactttctcgtataacagagcgattttctcaataaacccttctttgaggacaagattctttttttttttcattctttatttttttaaatttttttttttt

SEQ ID NO: 157216 - DNA, 468 bp, Arabidopsis thaliana columbia
gattttatcagatgggagaaaggataaaggaggattcaagctggggggcaattctaccacgagctgatcgacgagctcataaagaatggtataactccattcgttactgtttttcactgggacactccacaagatttagaagatgaatatggcggctttttaagcgaaaggattgtgaaggatttccgagagtatgcagattttgttttccaagaatacggtggaaaagtgaaacattggatcactttcaatgagccatgggttttctcgcacgctggctatgacgtaggcaaaaaggcacctggtcgttgctcttcttacgtcaatgctaaatgccaagacggacgatcaggatacgaggcttaccttgtcactcacaatctccttatctctcacgcagaagcagttgaagcttaccggaaatgcgaaaagtgtaaaggtgggaagatcggaattgcacatagtcct

SEQ ID NO: 157217 - DNA, 456 bp, Arabidopsis thaliana columbia
gttttggttctctatggagaggaaacactgtttatgttatccgttatttccccactcaggcgttgaactttgccttcgagggattacttcaaaagacttttcaactttaagaaggacagagatggttactggaagtggtttgctggtaacttggcatctggaggagcagctggtgcctcttcccttctgtttgtgtactcccttgactatgcccgtacccgtctagctaatgatgccaaggctgcaaagaaaggaggtggtggaagacagtttgatggtctttgtgatgtctacagaaagagcgctgagactgatggtattgctggtctgtaccgtggattcaacatctcatgtgttggtatcattgtctaccgtggtctgtactttggactctatgaccttgtgaagcctgttcttctcactggtgacttacaagacagtttcttcgctagtttc

SEQ ID NO: 157218 - DNA, 430 bp, Arabidopsis thaliana columbia
agtcaccaaaaaaaaaaaaaaaacacattttgtttcaatggccgcctccacaatggcggggggctcccctgccttcgccggaaaggctgtgaacctttcccccgcggcatctgaagtcctcggaagcggccgtgtgacaatgaggaagactgttgccaagccaaagggtccatcaggcagcccatggtacggatccgaccgagtcaagtacttgggtccattctctggcgagttaccgagctaccttaccggagagttccccggagactacggatgggacaccgctggactttcagctgattgggagacattcgcaaggaacctggagctagaaattatccacagcatgtgggctattgctcggagccctaggctgcgtcttccctgagcttttggcttggaacggagtcaagttctgttgaggcggttt

SEQ ID NO: 157219 - DNA, 455 bp, Arabidopsis thaliana columbia
ctagtagtggtcacagccaacgttcttctttaccgggatactacccgagttcccgaggaccgacttcaccttttgatcgtgaattccgtactttatggggctctcaacaccaacgtagagagcaagacgttgtcactctttggctcgacaaatccactgggagtgggttcaagtctcttcgtccataccggtcgggctactttggtgcttccattaagctccaaccaggcttcactgctggagtggatacatccctctatctctcaaacaaccaagagcatcctggagaccacgatgaggtcgatatcgagtttctagggacaacgccagggaagccttattcccttcaaacgaatgtcttcgttaggggaagtggcgaccgaaatgtcattggaagagaaatgaaatttaccttgtggtttgaccctactcaagattttcaccattacgcaatt

SEQ ID NO: 157220 - DNA, 436 bp, Arabidopsis thaliana columbia
acgcgtccggggaaggtggtcagcttcctggatagaaagttagttcgtatatcgctaggctaagaaactctaagcgtggtgttccgcttatatctgcgcctcctcaccacgacatttactctattgaggatcttgctcagttgatctttgatctacatcagattaatccaaatgcaaaagtatcagtcaagctagttgcagaagctggaatcggaactgttgcttcaggagttgcaaagggtaacgctgatatcatccagatatcaggccatgatggtggaaccggggctagtccaataagctccataaaacatgctggtggaccatgggaacttggactaacagaaactcaccaaacacttatcgcaaatggactaagagaaagagtcatttttagagtcgatggaggcttaaaagagtggtgtgatgttctaat

SEQ ID NO: 157221 - DNA, 452 bp, Arabidopsis thaliana columbia
agagcacttatgctttagaacacttcagcgtttcacagctgctacactcgagcacggtatgcgtgcgtccaatttcgcctaaaccagagtggcgcgctttgctggatgaaatggcggttgttgcaaccgaggagtatcgctcagttgtgttccaagaacctcggtttgtcgagtacttccgcctcgctacaccggaactggagtatggacgtatgaatatcggaagcagaccttcgaagcgtaaaccaagcggtggcattgaatctctccgtgcaattccatggatcttcgcttggactcaaacaagattccatcttcctgtatggcttggattcggatcagcaattagacatgtgatcgaaaaagacgtcaggaacctccatatgctccaagatatgtaccaacactggcctttctttagagtcaccattgatctaatcgaaatggtgttc

SEQ ID NO: 157222 - DNA, 408 bp, Arabidopsis thaliana columbia
ggaagatgaagaacaatgccattgtctgtaacatttttcattttgacaatgaaatcgacatggttggacttgagacctaccctggtgtgaaacgtattaccatcaagccacagaccgataggtgggtgtttcctgataccaactctggcatcattgttctagctgaaggtcgtttgatgaacttgggatgcgccactggacacccgagtttcgtgatgtcgtgctcattcaccaaccaggtgattgcacagcttgagctctggaacgagaagtcaagcggtaagtatgagaagaaggtctatggtgtgcctaaacacttggatcagaaggtagctgcacttcacttaggcaagcttggtgcaagactcaccaagcttaccaaggaccaatctgactatgtcagcatac

SEQ ID NO: 157223 - DNA, 453 bp, Arabidopsis thaliana columbia
cgggcgaccacgcgtccgcccagacaaggcgctcacggttctaaggactgtcagtttaagaatcgagagatggtggagggaagagaaacgccatgagtctgtaccgcttcaagccataggctcttcattttcagacaaaatctcagaagagatctgtaactcagctgctaaaatggctaacaatcttggagtggacgcggttttcgtttacacaacgagcggacacatggcatcactggtctcccgatgtcgcccggactgcccgatctttgctttcacaaccacaacctcagtgagaagacgcttaaacctacaatggggacttatgccattccgtctcagcttctcagacgacatggaaagcaacttgaacaaaacattctcgttactgaaatcaagaggtatgatcaaatctggtgacctcgtgaacgcagtctcggacatgctgcaatc

SEQ ID NO: 157224 - DNA, 457 bp, Arabidopsis thaliana columbia
gttttctagtctagtgtttccgggagcagcctgagcaggaggaagaagacgaagaagaagaggagcagctactaccatggttgtcaagacggagctttgtcgtttcagtggacagaagatttacccaggaagaggaattaggtttatccgatctgattctcaggttttcttgtttcttaactcaaaatgtaagaggtacttccataacaagttgaagccatccaagcttgcatggactgccatgtacagaaagcaacacaagaaggatgcagcacaagaggctgtgaagagaaggagacgtgccaccaagaagccatactcaaggtccattgttggtgctaccttggaagtaattcagaagaagagagctgagaagcctgaagttcgtgatgcagccagggaagctgctctgcgtgagatcaaggaaagaatcaaaaagaccaaagatgaaaagaag

SEQ ID NO: 157225 - DNA, 464 bp, Arabidopsis thaliana columbia
gattcgagctgtgtttcaagctgcgatttgtatggctctctatctctatttagtacctcagtttgcgttaactcggttcactgaaccagtgtaccaagaatggggattcttgaagagatttggttaccaatacatggcgggtttcacggctcgttggaagtattactttatatggtctatctcagaggcttctattattatctctggtttgggtttcagtggttggactgatgaaactcagacaaaggctaaatgggaccgcgctaagaatgtcgatattttgggggttgagcttgccaagagtgcggttcagattccgcttttctggaacatacaagtcagcacatggctccgtcactacgtatatgagagaattgtgaagcccgggaagaaagcgggtttcttccaattgctagctacgcaaaccgtcagtgctgtctggcatggactgtatcctggataca

SEQ ID NO: 157226 - DNA, 292 bp, Arabidopsis thaliana columbia
ggagaatattctgctttgttccactattgaccctgaagcagatgctcggaaatcggggattcctcttgttcttgcaactgtgaaggacaaggctgttcctgagagaccagttgaaaaagagaaacctaagagttatacgtatagtgcggatttgactaagaatcagaagaagaagatccgtaagaaagctaagaaagtggaaggttcagaggaaaatgagagagactcttctaactctgaggcaagaccaaatgtgaatgcaactgtggagaggttggaagagagttctgaa

SEQ ID NO: 157227 - DNA, 425 bp, Arabidopsis thaliana columbia
gcagaggcttatcttcgccggaaagcatttgtaggatggccgcacgttggcggatacgatggccataaggaatccacgctgacttggttctcaggctccgtggtggtatgcagattttcgttaaaaccctaacgggaaagacttttactcttgaggtggagagctttttctctcatttgacatcgtttaggccaagatccatgttttggtgggattttctcctgaccatcatattgtttttcttttctctttttgttatttgaatacttttttttcttctttcttttttcttattttttggagtgggggggggggggtggttttattatattcttttatatttatttttattttttatttctttttttctttattctttttatactgtcttttatttttttttcatctatataattttttttttt

SEQ ID NO: 157228 - DNA, 468 bp, Arabidopsis thaliana columbia
cgaaatgggttaccaggtgtgatttggaatcttttatgccggtgcatatggagtatcccaatctcgtaaacgagctttcatttgggctgctgcaccagaagaagttctccctgaatggcctgagccgatgcatgtctttggtgttccaaagttgaaaatctcactatctcaaggtttacattatgctgctgttcgtagtactgcacttggtgcccctttccgtccaatcaccgtgagagacacaattggtgatcttccatcagtagaaaacggagactctaggacaaacaaagagtataaagaggttgcagtctcgtggttccaaaaggagataagaggaaacacgattgctctcactgatcatatctgcaaggctatgaatgagcttaacctcattcgatgcaaattaatcccaactaggcctggggctgattggcatgacttgccaaagagaaaggttacgttatc

SEQ ID NO: 157229 - DNA, 400 bp, Arabidopsis thaliana columbia
  unsure (1)..(400): unsure at all n locations
cgcgtccggccaaggttcttagcaacaccattaaacaaaataggaaagagaaagctggcaaatgggaggggcctcttccaaaggtccgtccagttgctgaagatgaaatgtttagagtgatccgatctggaaaaaggaaaactaaacaatggaagcggatggttacaaaagctacatttgttggacctgctttcacaaggaagccttcaaagtacgagcgtttcatccgtccatctggtcttcgtttcaccaaggcccacgtcactcaccctgaactaaaatgcanctttctgtctcgagatcatcgggattaagaagaatcctaacggtcccatgtatacatcactcggtgtgatgaccaggggaacaatcatcgaggtcaatgtgagtgagcttggtc

SEQ ID NO: 157230 - DNA, 460 bp, Arabidopsis thaliana columbia
caaacaccaaactctcctgattcatcagttttaagtcttcttcaagtcccagggatcatcaggccaatggctcagatctgagcagcttctccaacatgtcagatgagagtgcctaaacactcatcagtcattgcatcatcatccaagttatggagctctgttgtgttgaaacagaagaagcagagcaacaacaaagtcagaggctttagagttcttgctctccaatctgataacagtactgtcaatagagttgagactcttctcaatttagacaccaaaccttactctgacaggatcattgctgaatgcatgtggatcggaggatctggaattgaccttagaagcaagtcaaggactatcgaaaagcccgtggaggatccttctgagctacctaagtggaactatgatggttcgagtacccggcaagcacctgggtgagatagtgaagtgattctatacc

SEQ ID NO: 157231 - DNA, 472 bp, Arabidopsis thaliana columbia
  unsure (1)..(472): unsure at all n locations
gcctccttttcgtttgccactttttgatcaatctaaactccaaaacacagagccatgcgcgggaatttttacccgagcgagatcgtcnatgtgtacgtccgtgtaaccggaggagaagtgggagccgccagttctctagcttcaaagatcggtcctctcggtctcgcaccaaagaagatcggagaagacatttcgaaagagacttttaaagaatggaaaggacttttttttactcttatgttttctgttcataattgttaagtttatgttaccgtttttctatttttttaattctcggagtggggggggggggggttccaaatttagaccttaagattttttttattattaatctttattttttcattttttttgtttttttctataaattattttatttattctatatttatattttttttttttaattttattttttaatacttttatatatttctttaatttaatattt

SEQ ID NO: 157232 - DNA, 372 bp, Arabidopsis thaliana columbia
  unsure (1)..(372): unsure at all n locations
gtgtatttttccatcgttaaaaggcatttcatagagacaatatgtcaggtgatgagggggggcgctgttgttgttcctggcgccgttgctganccagcggccatcccagaggacatggacttaatgactgcattggagttgactcttaggaaagctcgtgcttatggtggtgttgttcgtggtctccatgagtgtgctaagcttattgagaagcgtgtggctcaactcgttgtcttggctgaagactgcaaccagcctgattatgtcaagcttgtgaaggctctctgtgcttatcacgaaggcgagggtggtgacagttccaagtgccaagacccttggcgaatgggctggtctctgcaagattgattctga

SEQ ID NO: 157233 - DNA, 444 bp, Arabidopsis thaliana columbia
  unsure (1)..(444): unsure at all n locations
gcgtccggtcatcgtcctcctttatctctctcactttcttcttccttcttctcgtttcttcatcntcaggttgcgatgacatctgtgaggtattcnacnactggtgccagaaacatggcaaaacgtacggttcagaagaagagaggcaacagaggattcaaatctttaaagataatcacgacttcgttacgcaacacaatcttatcactaacgctacttactctctctctctcaatgctttcgcggatctgactcaccacgagttcaaggcttctcgtcttggtctctctgtttccgctccgtcggtgataatggctagtaagggacagagtctcggtggtagcgtaaaggttccagattcttgtgattggagaaagaagggagctgttactaatgtcaaagatcaaggaagctgcggggcatgttggtcgttctcggcgactg

SEQ ID NO: 157234 - DNA, 322 bp, Arabidopsis thaliana columbia
  unsure (1)..(322): unsure at all n locations
aaaaaatctcaacctatcccagccgaatacatctagccagtgaaggttgttgtttctggcaggctttacaacattgtctggagagtctanaaagaacgttttgcttgaattctatgctccatggtgtggacactgccaaaagcttgctccaatcttggacgaagttgctgtgtcttaccaaagcgactcaagtgtagtcatcgctaatctagatgcaaccgcaaacgacttcccaaaagatacctttgatgtgaagggattcccgaccatttacttcaaattatctatcggaaacgttgtggttttcgaaggagacattaca

SEQ ID NO: 157235 - DNA, 366 bp, Arabidopsis thaliana columbia
  unsure (1)..(366): unsure at all n locations
caaaaagaacaatggcagcgagtgcatctccatatggcgagccagctaaggagcagctggtcggccgcttctctttctcagcgggtcgccgtcccnaagggcatctccggtgctcctttcggtgtttctccgaccaaaagagtctcttccttcactgtccgagctgttaaatccgacaagacaacattccaagtagttcaaccaatcaacggtgatccattcatcggaagtttggaaactccggtgacatcaagcccattgatcgcgtggtacctttccaacctccctggataccgtaccggcgtcaaccctttccttcgcggtgtggaagttggcctggcccaaggtttcttcttagtgggccca

SEQ ID NO: 157236 - DNA, 429 bp, Arabidopsis thaliana columbia
  unsure (1)..(429): unsure at all n locations
ttcaattcactaaatctttttccaccaatttaattaatccgcgtgatgatcaaaaagnttggcgggattcaatccagaataggcaagatccanaacaaccaaaatcacaaccagagatccgtagttccatcaaaaccctcgtcaaatcagtaccctaataaccatcaattatggacttacgagaatcaccaacgaattatttataacaacaatagtaatagtgttgatccatatcgaggaggatgaggacagaagaaagtgccaatagaagccatttttctatctggtgagcttgaaagcatgatcacggatcatcagaaagcaaaaagaaccaattgattggttcgtgcattttctagcaatataaatttatattgtaatctttttcaattttaatcaaacttgaccttttactgcaggtttaaatta

SEQ ID NO: 157237 - DNA, 416 bp, Arabidopsis thaliana columbia
  unsure (1)..(416): unsure at all n locations
gccatgtttgctcagttagcaccatcgccgtcttcttctccggcgaacgttagccacttcgtgcagcgtctcaccttccgtcagtgtgcatacnccntctccncttctcttcccactgcaaattcctctcgtccaccaccaattcagattgttggaggaaaggatttgaatttggatgttacacggaaagatgattcaattgggttcaaattagaggcaaatgaagatgaaattgattggatgaatctagaatctgatattcgtctatggactagagcattacgtcctgttcagtggtatccagggcacataatgaaaacttaaaaagaacttaaggaacagcttaagttgattgatgttgtgattgaagtccctgattcttgtatttccttttcgaacactcatccaaaaattga

SEQ ID NO: 157238 - DNA, 342 bp, Arabidopsis thaliana columbia
  unsure (1)..(342): unsure at all n locations
ggtgaggcgattgccgttggtagtcataagttcttcttcagtaccaacatcaatgtcattctggagtcttaacaacccaggggtgaggaacttancaccataacanatagcattcacagcataatccttgacaacaagtctcttgtaactcgtcaatatcatctcaagaggcataatcaccctcctttgatctctgctgttaaaagacatcttaagattatgacaatctattaaagcaatcttctttattatcatgcttatatgcatttgtatgttttctggttttattgtcatatcttttcttacattaggactatttttattcactttttttttttcttc

SEQ ID NO: 157239 - DNA, 267 bp, Arabidopsis thaliana columbia
  unsure (1)..(267): unsure at all n locations
cgcgtccgatctcctcttgcaaaccaacgtaaaacactttctaatagatcaatatggctgtantaatnaagntggcattcatttacttggcgtgcgtgattaaaaccnttccaatcacatcaaacgctcttattagttgtgtcacctttaacatcaacctgtcattttgcattgcctactttacccgaggtgcttcacttacccaagggttctttatcttctttactatactttaaaaacatggtcagtacaaccccatacctttat

SEQ ID NO: 157240 - DNA, 451 bp, Arabidopsis thaliana columbia
gaaagtctttggaagatttagttctagcttctcaagaaggtgttttcgtaaatattgatggggagttttacttgaatagggagtggggcaaacttcaagaatttctggtaagcaggtcaatgtgttgttgcgtatcaatcctgatgttgatcctcaggtgcatccatatttttcttctgtgtacaagaactcaaagttttgttttattaacctgttgcttctaatgtttctggatgatgtgttatctcattccaaagtgctttatcttgtttcttttcactttcaccttttttcttccatggcgggggtggttgtattcatattttcttcttttcccattttttaattcaatattttattttttcctcacatctttttttctcttttcaattttttttttatatctttttttttttcattttcttttattttcttttactctttttttttt

SEQ ID NO: 157241 - DNA, 438 bp, Arabidopsis thaliana columbia
cttttgtggcggctttttttcacgaactgctttaaaccctaaaaactccaacctttgttctgtgtgtaacaacaacaacaacagtgcatgaagaatctcacatcgaagaagttgaaatccaaaacaaactcgaagttgctcctgcattgatttccgttcatccatctcagaaatctgtcgctgtcgctgtcggctcggatcttcgtattttcgatcttatagagaattgcccagttagtttggtggatgaatctgatgggcctatccgtaaggaatccattagagctattctgtacagtacaagtggcaagctctttgtgtccgcaggcgatgacaagcttgtcaagatttggtccgcagattctttggcgctgtcttaacacagtatgttctgagaaaagagttatgcgcagtgctataagtagtgatgactcacat

SEQ ID NO: 157242 - DNA, 422 bp, Arabidopsis thaliana columbia
  unsure (1)..(422): unsure at all n locations
gcttctcacactaacacggcgaagcataaaatgagctcgaaacaaaaatgganggagcgctgtcgccgctttgcttacggtcttcttcaaacctctgttacttctccagtaatgtttcaccagattctcaccgttctataggatttacattggttgattcgctccggccaacgaacttggtttccctgcgaacgggaaataaacgttcgtcatcgtcttcactacggctatttctctctccgactagaagcgctctccgtacgccgactatttccgcggaagaagtgaaagatgtcccgatgccgaagattgataagagcggccgattaagcaatcctcgagccgcacgcgagctcgctcttgtaatactttatgccgcatgcttagaaagctctgacccaattcgtctctttgagaagaga

SEQ ID NO: 157243 - DNA, 440 bp, Arabidopsis thaliana columbia
cggaacggaaggcccgggccgagccacgcgtccggttagagagagagagaccacgccagatatacctttcttgtttcaccggttttcatacgcagagaatggcgggcagtgccggattcgccgccgcattattcatcggactctctcttctcttcgccgtcacggctgaagatccgtacagattctttgaatggaacataacttacggcgatatatacccactcggtgttcgccaacagggtattttgatcaacggggcgtttccgggaccggacattcattcggttactaatgacaatctcatcatcaacgtctacaatagcctcgacgaacctttccttctttcatggaatggaattcaacagaggaggaactctttcgttgatggagtgtatggaacgacatgcccaatcccgccggggaagaactacacttacatt

SEQ ID NO: 157244 - DNA, 413 bp, Arabidopsis thaliana columbia
  unsure (1)..(413): unsure at all n locations
cgtccgcggacgcgtgggaaatcagaaaagagccagtttaaaaaaaaatcaaggaagatgantaccattggagctgtttacgatctctcggtgaccactttctctcccgatggccgtgttttccagatcgagtacgccgctaaagctgtcgacaacagtgggactgttgttggaatcaagtgcaaagatgggattgttatgggagttgagaaacttattgcatcaaagatgatgctaccaggttccaacaggagaatccattcttgtcatcgtcatgctggcatggcttgtgctgggcttgcaacttatggggggcaaattgttgcccctgctaattcttaagcacgaagctatgagagtgtttatggcgattctgtacctgtgaaggaactttctgggcgtgttgcaagtta

SEQ ID NO: 157245 - DNA, 464 bp, Arabidopsis thaliana columbia
  unsure (1)..(464): unsure at all n locations
gcgtccgaacgaagcgatacttggttacttgaaaacagagttctattgaggtggtcatgggtcagaactcaagaatgaagagcggcggtatcatgcaaagtgggagccggcgtcaagaaaacaaacannagcccagaagaatcttnaaatccatganctttaanggagatctctgtttcttctacccattcnaggaaccaaatcaaagatgcgtcgtttggcngtggttggaagtatcaacgtgaatggtacanctgatgatgctgaaggagtagaaggagaaggagcggttgatgtcaaagcgattggagaaatgaggaaatgtgtggatttgaaggaaatgaaaggagacaaaaggattattactaaaggttttgttttgtttagaccagccgaggttgtctgttgttcctgttgaggaagatgtttggaatatgatttgtgaattgggaaaatgggtttgt

SEQ ID NO: 157246 - DNA, 418 bp, Arabidopsis thaliana columbia
gaagccgtcttcttcctccttcaatctctctcgttcgtatcatctgctctgcgatttcaatggcgagccgttggttgagaccggaggtgtatcctttgttcgctgctaccggagttgccgttgggatctgtgcgttttccttgatcagaaacatcaccggaaaccctgaagtcagatgcaccaaggagaacagggctgctggaattttggataaccatgcagagggagagaagtataaggaaaatttcctgaggaagtttgttcgcaacaagaaacctgaaatcatgcctggactcaacaagttcttcactgatcctacatactgaaaccatctttgcacaccgctttgtcgtattgtttcttgaattgaatctctttgtgatataaaaaccgatttgtcaatttcacattgttgatg

SEQ ID NO: 157247 - DNA, 331 bp, Arabidopsis thaliana columbia
ctccaacggaaaaaccaccgtcgatgtcatcactgatcttcttggtttcgatgactacattggaccgtattccgaagcaaggggagaagatatcctaagaggagtaaactacgcttctgcagctgccggaatccgagaagaaactggtcgacaattgggagctagaataacatttgcagggcaagtagctaatcatgtaaacactgtgtcacaagttgtgaacatactcggagacgagaatgaagctgctaattacctaagtaaatgcatctactcaatcgggttaggcagtaacgactatctcaataactattttatgcctgtttattac

SEQ ID NO: 157248 - DNA, 232 bp, Arabidopsis thaliana columbia
  unsure (1)..(232): unsure at all n locations
ggaagatcaacaanggaggagtaccgctgctttctacaaagagtttgagcaatgactgggaagagcatttggctgtgaagcatttctcagttgaaggacagcttgagttcaaagctatcctctttgttcccaagagagctccttttgatctctttgacactaaaaagaagcccaacaacatcaagctctatgtccgtcgtgttttcatcatggacaactgtgaagacatcat

SEQ ID NO: 157249 - DNA, 413 bp, Arabidopsis thaliana columbia
  unsure (1)..(413): unsure at all n locations
ggcttagtgaagcgatataacaatgctataataagaatggggtttcggacaattgattgctcgatcaacattctacaacgcgagacgaangttaccttgaccaggacactggttcttttggtgctgagatctttattgttaaaccggctcaacaacaagagaaagttacattcatatcaaaccctccaaacaatgttttcacttggaagatacttcgtttctctaccttggaagataaattctattactccgatgattttctcgttgaagaccgatactggagactaggatttaacccgaagggggatggaggaggaagaccacatgcacttncaatctttctatttgctcaaggccataaggcaaatgcagttgctacaaacacttggggagcggttaatctgcggtttaag

SEQ ID NO: 157250 - DNA, 262 bp, Arabidopsis thaliana columbia
gtcttcggatttagaacggagacagcttgatgtatagagcgcttcttcggctacaacaagctggcgctaatggcgggttgcttgtgatcactctcaccggagccgtcatcttctctgttttaccgatttttaggaaattttgattgtggtggaaacttgttgtggcaactctactgagaaagtttgaagaagctggaatcaaagatatagctagagttaagagggttcatactaacttgtgctcgttttgagatgtgctgtt

SEQ ID NO: 157251 - DNA, 464 bp, Arabidopsis thaliana columbia
cttccgaagatttttcttcctttcttttttttattctcctccatgcaaaattggaaaggcgtaagactaacaccaaccatacgccatcgtgcgacgtgaaaattggagaatctgattggctgaaggattattgaaattgaaagttattgtgatcgagttttgttttttcctgatggtggaagaagcacaattggatcctaaatcgaaatcgattccgaatgagaatttgaaatttggagaaagggctttgtctgccggaggcgccgcttttatatcggcggtcatagtcaatcctctcgatgttgttaagacgagattacaagcacaggctgcaggagttccgtatcaaggctcgtgtcgtcttggttgtttcgacacgaattccacgttggtacatgatttgagaagtaattctgctccagggatgtgtagaattactggctctgcatctgtatgctcagata

SEQ ID NO: 157252 - DNA, 165 bp, Arabidopsis thaliana columbia
  unsure (1)..(165): unsure at all n locations
gaanacccgggccggccgcacgcgtccggtaagatttatcaacacaagcaaaaaagatgtcccaaaagctagaagcaaagggtggtgaggtcggagatgtatgggatgatggtgtatacnaaaatgttagaaaggtatatctaattcaagcacaatacactatac

SEQ ID NO: 157253 - DNA, 460 bp, Arabidopsis thaliana columbia
ggagatgagccgtggagcgtatttggcgtgttaagacttgacggtggtaatacccaatgtgagtgatggtccaaccagaagggtgctccaaaggctaaacggttatgcagaaccgggtcggatcatggctataatgggtccttccggatccggaaagtccactcttcttgactctcttgcaggtagactcgcaagaaacgtggtcatgaccggtaatcttctactgaacggcaagaaagctagattagactacggtctcgtagcatatgtgacacaagaggacgtattgttggggacactaacagtgagggagacaataacatactcagctcacttgagacttccaagtgatatgtctaaagaggaagtgagtgacatcgtggaaggcacaatcatggagcttggtcttcaagactgttcagacagagtcattggaaactggcacgccaaaggagttagt

SEQ ID NO: 157254 - DNA, 235 bp, Arabidopsis thaliana columbia
  unsure (1)..(235): unsure at all n locations
attcacaatcnnctcggcggannatcggattccctacccttcgtcttcttccctcctccacnncaaaaacctcgacaacaataaccaattctcattccacgaagcgtctttcttcggcaacagaacaagtcctttcactactccaacctccgnctttcttcgtatgggacgaagaaacaacaacgcttcccgatacaccgttggtccagtccgtgtggttaacgagaaagtcttc

SEQ ID NO: 157255 - DNA, 366 bp, Arabidopsis thaliana columbia
acgtaaaactcactaaacatgatgctaatttaattcatagaagaagaatggtttcaaggggacggtttatatgttcttggcgggacaactttcaattgcttcgttcaatcactaattcacatgctgaaaacgatacatcgatcataatggatgcatcaaaatatatcctaaagcttaagcagaaagtctaaagattcaaccaagaccctactgcagagcaatcttcaaacgagcccacagatccaaaaacaccaatggtaacaagtgaaaccctaaacaaaggttttattataaaccttttctcaagaaaggatcaccccaggattcttttttcagttttaaaaaccttctaagatatttaactta

SEQ ID NO: 157256 - DNA, 474 bp, Arabidopsis thaliana columbia
tagagacccatccctcacttcaaagtttattttctcgaaggatcttctccaactctgtctgatctatttttccaaatttgcaaagcccaatacgttctatagaatcaaaaacattacctttaaaatggctcatttacttttatcttcatgcccattaataattttatttatcatcaaccataacaacgaatatattaacctctttctttcctacttttatttatttatcttcctcacattttctttaatctctattttttcattttatatttttctcaattttttttttttatttctttttgtcttggtgggttatttattattcctttctttactttaatacttttctctttttttattatattattattttttttaatttttattctatttttcattttttttatattacttttaattcttttcttctctattttttttttttttctatttttctataatatttttattttt

SEQ ID NO: 157257 - DNA, 227 bp, Arabidopsis thaliana columbia
  unsure (1)..(227): unsure at all n locations
ggaaaacccgggccggccgacgcgtcacggttaaggtctcatcgatcaacggataataagtatcgtgaaggcaaacaacacnntatnttgatgacttaccgaatgctgcctcccccactaaatccaangccnnaatctaatttattcaacccttttacttcactgtcaacctttttattattttccataacttctttttaaccctccaatcactcataatttatctt

SEQ ID NO: 157258 - DNA, 495 bp, Arabidopsis thaliana columbia
  unsure (1)..(495): unsure at all n locations
ggaanncccggggcggccgacgcgtcacgcttttgtcactcatcttcacaggaaacaattttgtttgtgaagtcctccaaatcgaatgcgtacttcaagaggtaccaggtgaggttcangagaaggagagatgggaagactgattacagggcaaggatccgtcttatcaatcaagacaagaacaagtacaacacccctaagtaccgttttgttgttcgatttaccaacaaagacattgtggcacagattgtatctgcaagcatagctggtgacattgttaaagcttcggcttacgcacatgagcttcctcagtatggactcactgttggtcttaccaactatgctgcagcttactgtactggccttcttttggctcgtcgtgttctgaaaatgctggaaatggatgatgagtacgagggaaacgtagaggccactggagaggacttttctgtggaaccaactgattccagaagacctttccgtgctctttttgat

SEQ ID NO: 157259 - DNA, 397 bp, Arabidopsis thaliana columbia
agcaaactgcgagttctaagcctacaggtatgttatttattgaaatgttccattgatcacatggtggtaactaagcagaagggggaaatcaacgatgacaatgatctttacatactcaagaacataaatgtatccgtgattgacacaacattatggcttatccagttgcaaatacacatactagtgaaccatccagaaatacagattctgctaacgcactaactaacacacatattggaccggatgtcaagtcaccatgcctaatcttaacaaactttcataccttcaagctgaacataaggagactattggtctgacaattaccattactttgctcaatcctaacatgaacctacatgatgcgaacttcgatagatactatatacgagcataaagc

SEQ ID NO: 157260 - DNA, 401 bp, Arabidopsis thaliana columbia
  unsure (1)..(401): unsure at all n locations
actcttcttccttcttcttctctctcgatttattataatccacacgcaaaaatntnaagccgacaagctgctgtttcggggctgtccaatttggcnaangctgctttcggtcttggaacggcggcgacggtgctgaatacatcgcttttcaccgttgacggcggagaaagagctgttatcttcgatcgattcaggggagtgatggatcatactgtggttgaaggtactcatttcttgatcccgatttttcagaggccttacattttctttttccgtacataacctcatacttttctattgggggggggggggtgaggatcttcaaatattttattttactctttttgttcatttcttattcatgttttatatattattttcttattttatttacatatatt

SEQ ID NO: 157261 - DNA, 369 bp, Arabidopsis thaliana columbia
  unsure (1)..(369): unsure at all n locations
gcaaaaacaaaaccaacaaggaacttgtctctctctctggctctctttctcttaacgggatgataacgtgattcgaaagttggatatagataggtttcttgttggatcttgatccctctggaaaaggaggggagaatagcagttcatgatgggattttgtatctgcccgttggagtcacctgcgagattactatggagtacaagcttcttccgccataagatcatgatcttctaatccttcctacttcttcccatctttttaatcatcttctcgctatctctgcttcctctttctctctgtttgctctgtctcagaactcagaagtagttgttgttttatttctngtgatcaaaaatggaatccaattc

SEQ ID NO: 157262 - DNA, 469 bp, Arabidopsis thaliana columbia
agaaaacacaaaaatgatgtcatcaatggcactctcttctacttccctctgctcttgggtgatctctcaacatccaaagactctccatcactgcttctcctccattgttccatacccaaacaaccaaacccatctctgtaaaacggaaaatcataactctagcagctccagagacactcaccgctgaaacagtcaccggaattgatacttccgacaacactccacaacaaacaataaaggtggtgaagccagatgagaaatcaagagtggtactcaagtttgtgtggatggagaagaacataggattaggattggaccaacatgtacctggacatggcacaatcccacttagtccttacttcttctggcctaggaaagatgcttgggaagagcttaagtctactcttgaagctaaaccatggatctctcagaagaagatgatcattcttctaaaccaagccactgatat

SEQ ID NO: 157263 - DNA, 410 bp, Arabidopsis thaliana columbia
  unsure (1)..(410): unsure at all n locations
acgcaaaaccatcatatcttaagaagaatttcttttatctcactacgatatttttcnagagtagtactactttatctgttgcgattgataacananattctatgaatatcgcaaaacaagaatcacaaagaacactgtacccatatgttacttgaacttcaattgttgcaatcaaatacaaacatggggttttgatggcttcttatatgggaggttcatatgtatcaaccttaagatacaagaacatccacagagtgaaagctattggtaagcattctctttttggttccagccgataaatcagcgactttcaggagattctcccttatctttatgagctcaccctgaatgataacatgtttgatgatggtaacttcttttcaccaaaagagattcacaactatcttacc

SEQ ID NO: 157264 - DNA, 474 bp, Arabidopsis thaliana columbia
cgtccggggcgtggaggtacctctggtaacaaattcatgatgtcactgggtcttccggtggcggcgacggggaactgtgccgataacaccggtgctaagaatctctacatcatttccgtgaaaggtatcaaaggtcgtcttaatcgattaccttctgcttgcgtcggagacatggtgatggccaccgtcaaaaagggtaagcctgatctcaggaaaaaggttcttcctgccgtcatcgttaggcaacgcaaaccatggcgccgaaaggatggtgttttcatgtacttcgaagataatgctggagtcattgtcaaccccaagggagaaatgaaaggttctgcaattactggtcctattgggaaagagtgtgctgatctttggccaaggattgctagtgctgccaatgccattgtctaatgatcagatcaatcaattgcttgtatttgatggatatgtctagatacaaatttgaga

SEQ ID NO: 157265 - DNA, 322 bp, Arabidopsis thaliana columbia
caacctctcttctctcttcctcgttcaacaacaatggagttctggggagttgcggtgacgccaaaaaacgctactaaggggactcctgaagaagacagccttgtccacatttctcaggcttcacttgactgcacagtgaaatctggagaatctgtggttttgagtgtgactgttggtggggctaaacttgttattggaacactttcacaagacaagttccctcatattagctttgatttggtttttgatttattagtttatctatcacacatttgttcctaattatatatttatttcgtgggggggggggggtttattattt

SEQ ID NO: 157266 - DNA, 280 bp, Arabidopsis thaliana columbia
gaaaacccgggccgagcgacgcgtacgagaatcatctaagacagacaggagggctctttttctcaaaggctgaaccaaaacacaggacgggatattttcaagttactggaagaaaattgaaaaattgtttccattacttgagattgaatcaattattctcctgccctgaagttggctgatattggtgtggctatgggcatttccgggacagaagtagcaaaggaggcatcttacttggtgttggcagatgataatttcagcaccattgttgcaacttttt

SEQ ID NO: 157267 - DNA, 277 bp, Arabidopsis thaliana columbia
  unsure (1)..(277): unsure at all n locations
ggaaaacccgggcgggccgacgcgtccggttcatgtaaccttgtccgaattgaaggactgatataaagaaatcgttcatactaaatttgtngtttatcaaatggagagcgagtaccatttataaanataatcttccctcccgataatttcaatccaactcctcacctacagctccttcatcttgcaacacctcctttcatgtctttgacaaatataataaattaattatctcacattttcctatctttatttaatttcattactcttttttcatttt

SEQ ID NO: 157268 - DNA, 460 bp, Arabidopsis thaliana columbia
acgctagtttcagaggcatctccagacaccgatattgtctgaaggactcgttttgaagggcacgatgcgtgcacacactgacatggtgacggcaatcgccaccccaatcgataacgcagacatcatcgtctcagcttcccgcgacaaatccatcattttgtggaaactcaccaaggacgacaaagcctacggtgtagctcagaggcgtctcactggtcactctcacttcgttgaggatgttgttctctcctccgatggacaattcgcgctttccggcagctgggacggcgagctccttctttgggatcttgctgctggtgtctccactcgtagattcgttggacacaccaaggacgtgctctccgtcgccttcttactcgacaaccgtcagatcgtttctgcatctttggaccgtacgatcaagctttggaacactttttgtgagtgcaagttcaccatt

SEQ ID NO: 157269 - DNA, 462 bp, Arabidopsis thaliana columbia
cgtccgaacaacaacactaatcaaaaaaaaaaagcttattcttctagagacaatggcatcaacattgggcgagctcatgcagtggtcttgcccgaacaacattccttggccagactaaagcctcaagctttaacccccttcgtgatgttgtctctctcggatctcccaagtacactatgggaaatgatctttggtatggacctgacagagtgaagtacttaggacccttttccgttcaaactccgtcttacctcaccggagaattccctggcgattatggttgggacaccgccggtttatcctcagaccctgaagcctttgccaaaaacagagctcttgaggtgatccatgggagatgggcaatgttgggagcttttggttgcataacccctgaagttcttcaaaagtgggtccgtgtggacttcaaagaaccagtctggttcaaagccggttcacaaatct

SEQ ID NO: 157270 - DNA, 455 bp, Arabidopsis thaliana columbia
cggaaccattctagggaagcaaagatatggaacagtttttttgagcgtgctgagaaaatggcgtggatagatagaggaagcatgagagcaactgtgcttatcgagaccctcccggctgtcttccagatgaatgagatactctatgaactacgtgatcactcagtcggtttaaactgtggaagatgggattatatcttcagctatgtcaaaaccttccaagctcaccctgaccggctcttaccagaccgtgtcctagttggcatgggccagcatttcatgagaagttactctgatcttctcatccggacttgtcataagcgcggtgtccacgccatgggtggcatggcggctcagattccgataagagatgacccaaaagcgaatgagatggcattggatctagtgaggaaagacaagctgagagaggtaagagcaaggcatgatggaacatgggc

SEQ ID NO: 157271 - DNA, 418 bp, Arabidopsis thaliana columbia
  unsure (1)..(418): unsure at all n locations
tagctcctaacaaagcaatatcatttccaatttataaaagttaaagccatggctgcatcgttgtctgtcccctctatggtgagatggaagaagaagggagattcgaagcggaggttgcggaagtgcagacttggtggagctcagagaggttcaagctaacaaggcgcccttacactgcccgtgacgtggtggctctacgtggccatctcaagcaaggctatgcttctaacgagatggctaagaagctgtggagaacgctcaaaagccatcaagccaacggtacggcctctcgcaccttcggagcgttggaccctgntcaggtgaccattatggctaaacatttggacaccatctatgtctcttgttggcagtgctcgttcacttacacattcactaatgagcctgggcctgatcttgc

SEQ ID NO: 157272 - DNA, 162 bp, Arabidopsis thaliana columbia
  unsure (1)..(162): unsure at all n locations
ttcatttatcttctccnatttaaaaatgccttcnaaaaaagaatcctccatctacagtcgggtttttaataacagaccggactccaaacacattcaatcccaatactcctataaaccctatctcatcatcttctactaacaatctctatccttttcttaata

SEQ ID NO: 157273 - DNA, 328 bp, Arabidopsis thaliana columbia
  unsure (1)..(328): unsure at all n locations
gtaagaacagatggttctttaccaagctcatgttctgaagaaattttctatttcggnaggaattcattttgagcgttgggggatcgtnttttttagtttctagggttcatttcccatggtgaaaaatgtggatcctgttttggattgtggaagatgttttgatgaattttgcactatacattttaacatttacttatattaatacttttgtgctccctttatatttatttcttgttttcgtactcttactttctaaattattactcttttttttttattcctttaatttatattattggggggggggggggggttatatttttctttt

SEQ ID NO: 157274 - DNA, 450 bp, Arabidopsis thaliana columbia
  unsure (1)..(450): unsure at all n locations
aaaaccgggccggccgcgcgtccggtcgttctatttctcctaggcgccatcgaattttatctgttactcctaagaaacgttctcgagcgccaaaacgttacaaaagacaaaatattattanttcaactccatctcctgcaaaaagatctcccgccgcaacccttgagtcagccaaaaataggaatggagaaaaacttaaaagagaagaggaagaacgaaaaaggcgacagcgtgaagcagaactgaagctaatagaggaagaaactgtgaaacgggttgaagaagctattcgaaagaaggtcgaagaaagcttacagtctgagaaaatcaaaatggaaattctaacgctgtttgaggaagggcgaaagagacttattgaagaagtcgcggttcaactttgagaggagaaagaggcttcttttattgaggcttaagaaaaaaattgtgtta

SEQ ID NO: 157275 - DNA, 426 bp, Arabidopsis thaliana columbia
  unsure (1)..(426): unsure at all n locations
gaaaacccgggccggccgacgcgtccgcgaagccaaagaacaatttctccgtcactattataaccatggcggtgctttcatctgcagatcgatctagtaatgagaggagggttaanagttcatactttgatttgccacctatggaaatgtctgtagcatttcctcaagcaactccagcctctacatttccaccttgtacttcagactattatcatttcaatgatctactgactccggaagaacaagctatcctgaagaaagtgagtgaatgcatggagaaagaagttgctccaataatgacagattacttttagaaatcattatgggggggggggtcactccaaatcttttttctattatttatcctttttacttcttttattttttatattttttttttttttattctttcttcattcttttctt

SEQ ID NO: 157276 - DNA, 491 bp, Arabidopsis thaliana columbia
  unsure (1)..(491): unsure at all n locations
cggaancccggggcggccgacgcgtccgatccaggaggcatgtcgacatctgaggatataccggaaatcatcagtagagtanttgagtgggagggtgacgtggaaatcgtcgatagaagtcagaaggataaggacgaggaaaaagaagaagggaaaggtggattcctcgataaggtgaaagatttcattcatgacattggtgagaaactcgagggaaccattggctttgggaagccaactgctgatgtctctgcgattcatatccctaagatcaatcttgagagggcagatattgttgtggatgtgcttgtcaagaacccgaatccagtggctatccctctcatcgatgtcaactacctggtcgagagcgatgggaggaaactggtttctggtttgatcccggatgctggaacactcaaggctcatggagaagaaactgtgaagataccattgccgttgatctatgatgacatcaagagcacttacaacga

SEQ ID NO: 157277 - DNA, 393 bp, Arabidopsis thaliana columbia
  unsure (1)..(393): unsure at all n locations
gctttttcttatcctcaacaaggagaaatggtctctactcaacttacagcgtcaccagtgagtatgtcagcaaggagctgaggctcgctggatggtctcagagcttcgagtgtcaagttttcatctttgaaaccagngacccttagacagagccagttccgtcgtttggttgtcaaagctgcttctgttgttgcccctaagtatacttcaattaagccattgggagatcgagttttggtgaagatcaaggaggcagaggagaagactttaggtggtatcttactttcatccactgctcaatcaaaacctgaaggaggtgaagtcgttgccgtgggtgaaggaagaactattgggaagaacaaaattgatttcactgtccctactggagcacaa

SEQ ID NO: 157278 - DNA, 232 bp, Arabidopsis thaliana columbia
  unsure (1)..(232): unsure at all n locations
aagatttagaggacacatacaacgtgccattcaattcatgtgtttacgaaggaaaagtagctagtttaatgtgttcggacaggcagagtcaatnnaaagcccacatgtgctgatgaaaatctcttaaagaacactattcgtggtcaatggcgtctcaatgggtacattgtctcagattgtgactctgttgatgttttttttaaccaacaacattacactatcactccttaag

SEQ ID NO: 157279 - DNA, 438 bp, Arabidopsis thaliana columbia
ccgcctttctctctccctctcccttcttattcttctccttcttctccttcaccatctcgaggtcccaaaatcttcatcgagcagtcatcatcatgagagaaatcctccacgtccaaggcggccaatgcggtaaccaaatcggttccaaattctgggaagttatctgcgacgaacacggcgttgatcccaccggacgttacaacggtgattccgccgatcttcagctcgaacgtatcaatgtttattacaatgaagcttctggtggtcgttacgttcctcgtgctgttctcatggatctcgagcctggtactatggatagtatcagatctggtccctacggtcagattttccgtcctgataacttcgtctttggtcaatccggtgccggaaataattgggcgaaaggtcattatactgaaggtgctgtacttattgatg

SEQ ID NO: 157280 - DNA, 473 bp, Arabidopsis thaliana columbia
cgtccggcagagatgacggtgaagataaggctcgcgctttttggttgtaaacaccgccccttctatggggtagttgtcgccgatgaaaaatcgcccagggacggtaaacaaatcgaggtgttaggcttttatgatccactccaaggcaaagaagatgcggatagagtgagcctcaaattcgacagaatcaagtactggttatctgttggagctcaaccaacagacacagtggaaagcatgcttttcagggccggtttgataccaccaaagcctatggtagtggtcggttcgaaaaatgggcagaagtctacgagccaacatgtttcacccattacaggtgaaatcttgaactaagagtgttgatgcgttgagcaagaaagagccttttgtgtctgtgtgaaaggagtttatgtaatgttgttaagacttttctgtttatgtgaaaagagttaatgttatgttgtttaagactt

SEQ ID NO: 157281 - DNA, 433 bp, Arabidopsis thaliana columbia
cggacgcgtgggcacgagtggaagcttttatacaaaattaaaaaagagagagagaaatggggacgtctggaacatacgtgacgcatgtgccgttaaaaggaacggtggagaaacacttcaagaggtacaggaacgagaactatctcttccctgacactatcggccaccacatccaaagtgttactgttcacgatggcgaatgggacactcaaggaggcatcaagatttggaactacacactcggagatggaaaggaggaggtattcaaggagaggagagagatagacgatgacaataagatagtgaaggttgtaggattggaaggtcacgtgatggagcagttcaaggtgtatgagattgacttccaatttattcccaactctgaagaagattgcgtttgcaaaatcactatgatatgggagaagcgcaacga

SEQ ID NO: 157282 - DNA, 466 bp, Arabidopsis thaliana columbia
ggaggcagcctctcgtttctcttcgttcttttaatcgccaccatcacttccgtcatttgcgtgagtgacgggatgttgccagagacggcgactttgaactaggaccaaaaccatcggacatgaaaggaacgcaagtaataaacaagaaggcgattcctagctgggagctttcaggcttcgtcgaatacataaagtccggtcaaaaacaaggagacatgcttctcgtagtcccggccggaaagttcgcaatccggctaggcaacgaggcatcgatcaaacaaagacttaacgttacaaaaggaatgtattactcactgacgttcagtgccgcaaggacatgtgcccaagacgaacggctcaacatatcggtggcacctgactcaggcgttattcctatacagacggtgtacagtagcagtggatgggacctttacgcatgggcgttccaagccgagagtaacgtggc

SEQ ID NO: 157283 - DNA, 440 bp, Arabidopsis thaliana columbia
  unsure (1)..(440): unsure at all n locations
cgtccgctccaccaccaccatactactctccttctttttattagtctacaagtctcccccaccaccgtgcgtntacagttctggacgagcaccatattattctccttctcctaaggtagtctacaagtcttctccaccaccgtatgtctacagttctccaccaccaccatactactctccttctcctaaggtagtctacaagtcttccccaccaccgtacttctacagctcaccaccaccaccatactactctccttctcctaaagtagtttacaagtctcccccaccaccgtacttctacagctcaccaccaccaccatactactcaccttcccctaaggtagactacaaatctcctccaccaccgtacgtctacagctcaccaccaccaccatactactcactttcctctaaagtagactacaaatcttctccaccac

SEQ ID NO: 157284 - DNA, 494 bp, Arabidopsis thaliana columbia
  unsure (1)..(494): unsure at all n locations
cggaaannccgggncgggccgacgcgtccggtgtaaaggtggaaagatcgnaattgcacatattttctcttggttcgaaccacataaccgggcggattaacaagaacggtgggtccatcaaccntccacttgactttattttgggatggcatctagacacaactacatttggagattatccacagatcatgaaagacattgttggacatagattgcctaaatttacaactgagcagaaagcaaaactgaaagcttctaccgatttcgttgggctcaactactatacttcagtgttttcaaaccatttggagaaacctgatccttcaaaaccaagatggatgcaagattctcttattacatgggagtctaaaaatgcgcaaaattacgccattggtagcaagcctttgaccgctgcattgaacgtttactcgagaggttttagaagtctgttgaagttcataatgacaaatacgcaaatncggaaattattatca

SEQ ID NO: 157285 - DNA, 459 bp, Arabidopsis thaliana columbia
tccgttcattgatcagatcagccatggaagacgagattgaattgaaaactgctcctgctgattggcgggttcctacaacaaatcagagactaggcactgcttcactcggtacatcgagtttcacaggtgtacaactgcaaagggagaggagtctaatgactgtgaaaggtttgccaagtattaccgtgccctctgtcctggagaatgggttgacaagtggaacgagcagagggagagtggaacttttccaggtcctctttgaaccaagccttcaatcttgatgaagaggcaatcaagtccgtaataatacatggtttcaaagttaatttcttgcttgcgtgtgtatgttttggccttattatttcctctctagtgtaagtgttttattgggatgtctaagaaaggccaatcaaattataatatgaaaacattcgcttaataaaaataatttatcttata

SEQ ID NO: 157286 - DNA, 268 bp, Arabidopsis thaliana columbia
tgttaatgctattggagcttatttagctccattttgcaccacccctttgactcctgcaacgacaatcccaaaagctagaaggagcgggtagttaggcaagaactttatgggatgatggtgctttcgacggtgtaaggaaagtgtctgtaggacaagcccaagatggtattgaagcggtctcgtttgtgtactacatagcatgtcatgtcgtgtaatgcaaagaacatgtgaattccacatttgctaggatctgaagtgttcaagcctt

SEQ ID NO: 157287 - DNA, 476 bp, Arabidopsis thaliana columbia
gttgctgttgctgctcttggtatgctcagttccattgccactggtttggcaattggggcgtatggtcccatcagtgacgagatgctggtggtattgctgaaatggctggaatgagccaccgcatccgtgaaagaactgatgctcttgatgccgctggaaacaccactgctgctattggaaagggatttgccattggctctgctgccctagtctccttggctctctttggtgcctttgtgagccgtgcagggatccacaccgtagatgatttgacccctaaagttatcattttacttcttggggggggggtgcttgcttactgtttctctttcattacaattaacaatttttttatttcttattttttaaattatattctaatatattccttaggttacttcatttatttaatttatatttttttattttattttttttattttattttttactctatctatttttattatttattt

SEQ ID NO: 157288 - DNA, 334 bp, Arabidopsis thaliana columbia
  unsure (1)..(334): unsure at all n locations
cggacccgtgggtcgaattccaaaggtagatcagttgaagaaatcatggatccagctgaaatgggatatttggaagaagaggatggtccgttgatgaaaacaatcaaaggtagtatcactggttttggtgctgggactatttacggaaccattttagccacatggaaagatgttccaagagtggagaganatgtggctcttccaggacttattagaacactgaagatgatgggaacccatgggctgacttttgctgctataggaggtgtttacatcggtgttgaacagctggttcaaaattttagatcccaagagagatttttaacaatgggtg

SEQ ID NO: 157289 - DNA, 384 bp, Arabidopsis thaliana columbia
aaaacccggcccggccgacgcgtccgccccgagaaaacgaaaaccctagtttcagattcatctccagacaccgaaaatggcgggggggctcgttttgaagggcgcgcatgcgtgcacacactgacatggtgacggcaatcgccaccccaatcgataacgcagacatcatcgtctcagcttcccgcgacaaatccatcattttgtggaaactcaccaaggacgacaaagcctacggtgtagctcagaggcgtctcactggtcactctcacttcgttgaggatgttgttctctcctccgatggacaattcgcgctttccgtcatctgggacggcgagctcgcgctttgggatcttgctgctggtgtctccactttaatattctatt

SEQ ID NO: 157290 - DNA, 461 bp, Arabidopsis thaliana columbia
ctgagaatctggtgctttagctttggtaaaatgaagatatactctagaacggttgctggtgcactcattgtgtcattgctggtgtgtttctctgcctttgctgagcgcaatgacgggaccttcagagttggactgaaaaaactcaagttggattcgaaaaatcggcttgcagcacgcgtcgaatccaagcaagaaaagcccctgagagcttacagacttggagattctggagatgctgatgttgttgtgcttaagaattatctagatgctcagtactatggtgagatcgccattggtactccacctcagaagttcactgtggtttttgacactgggagctctaacctctgggtgccatcatcaaaatgctatttctcacttgcatgtctcttgcatcccaaatacaagtcgtctcgttcaagcacatatgagaagaatggaaaagctgccgcaattcatta

SEQ ID NO: 157291 - DNA, 464 bp, Arabidopsis thaliana columbia
gttggcattcttaaaagagccacaaaccccattgtcgaacgaacacaaaaccaaaccgcgggcaaagaaacaaattcgcggacaatagtcgaaaatggctgaaatctcggcgacttcgtttccttcttcttcttcctctgctctcgtcatccgtagctcccacaatggtagcttaaaatgtcagaatgtagctgttccaaaaactacttgccagttccaagagttatctctgaaacgaagccagcttgttggcaatgccgttgttaccggtcatgttaccggatcccgcagctgcaagaatcaagctattcgagctgttctatccggtgatggaaccgccttgactactgattcaaaggaggctggacttcgtggaaaactgaaaaaggtcgttctagcttacagcggaggcttagacacctctgtcattgtgccatggcttaaggagaactatggttgtgaag

SEQ ID NO: 157292 - DNA, 357 bp, Arabidopsis thaliana columbia
gaaaaacctagaaagctctagagagaaagagtagagagagatggaaggtaaagaagaagatgtgagagtcggagctaacaagtggccggagaggcaaccgatcggaacttcggctcagagtgacaaggactacaaagagccaccacctgcgccgttgttcgagcccggcgagctagcttcatggtccttctggagagctgggattgctgagtttatagctacgtttttgttcctgtacatcactgctttgactgttatgggtgtgaagaggtcaccgaacatgtgtgcttccgtcggaatccaaggtatcgcgtgggctttcggcggtatgatctttgctctcgtctactgcaccgc

SEQ ID NO: 157293 - DNA, 401 bp, Arabidopsis thaliana columbia
  unsure (1)..(401): unsure at all n locations
gaaaattttccctttactctcaaattccttttctatttccctctcttaaacctccnaaagctcgcatggcgtctcgaagagcggtcggtgggagctcttcgcagcttcgttaaccctaaccttagctttgattcacctggtcgaagcaaactccgaaggagatgctctctacgctcttcgccggagtttgacagatccagaccatgtcctccagagctgggatccaactcttgttaatcctcgtacctggttccatgtcacctgtaaccaagacaaccgcgtcactcgtgtggatttgggaaattgagaccggtctggacatcttgcgcctgatcttggtaagcttgtacatttacagtatctagagctttacaaaaacaacatccaaggaactatacctt

SEQ ID NO: 157294 - DNA, 254 bp, Arabidopsis thaliana columbia
  unsure (1)..(254): unsure at all n locations
tccgtttgtttgtgttgtaagcatccctgttatcatttcgtttatccaggtnaattctgcaaatccttgagcagctgtcagatnataaanactttgntctctccttatagtggatttggatctcataagttgaagtttgacatatcttctgagaaagttaatacttgtgcattatgaatggatctcacaatcattcaaccttattaattacatcttcatttactttacgagttttctttttttattcttttttt

SEQ ID NO: 157295 - DNA, 64 bp, Arabidopsis thaliana columbia
  unsure (1)..(64): unsure at all n locations
tccgctttggntctgcctccgccgcttcttcttctttttctaatctccgacagatttactctgg

SEQ ID NO: 157296 - DNA, 74 bp, Arabidopsis thaliana columbia
  unsure (1)..(74): unsure at all n locations
gtaaaaaggttcttcctgccgtcatctttattcaacgcaaaccatggctcctaaatnagtttgttttcatgtac

SEQ ID NO: 157297 - DNA, 468 bp, Arabidopsis thaliana columbia
ggctgtgctgtgctgtgtaatatgtttgactctcacagagaaaacattttccctctggtagttggttgatttcttactgaaagtattcaacggcactggaatctttctatgagaagttcgatccagatttcatcaacatcaggacaaaggccagagaggtgttgcagagggaagacgatcttaatgaaattgtccagcttgtaggaaaagatgcgctagcagaaggggacaaaatcacattggaaacagctaagctattgagggaagattaccttgctcaaaacgcgtttacaccatatgacaaattctgtcctttctacaagtccgtgtggatgatgcgtaacattatccatttctacaacctagccaaccaggcggttgagagagcagctggaatggacggtcaaaagattacctacactcttatcaagcatcggttaggagatcttttctaccgtttagtgtctc

SEQ ID NO: 157298 - DNA, 468 bp, Arabidopsis thaliana columbia
cagacttggtggagctcagagaggttcaagctaacaaggcgcccttacactgcccgtgacggggtggctctacgtggccatgtcaagcaaggctatgcttcgaacgagatggctaagaagctgtggagaacgctcaaaagccatcaagccaacggtacggcctctcgcaccttcggagcgttggaccctgttcaggtgaccatgatggctaaacatttggacaccatctatgtctctggttggcagtgctcgtccactcacacatccactaatgagcctggtcctgatcttgctgattatccgtacgacaccgttcctaacaaggttgaacacctcttcttcgctcagcagtaccatgacagaaagcagagggaggcaagaatgagcatgagcagagaagagaggacaaaaacttcgttcgtggactacctaaagcccatcatcgccgacggagacaccggctttggc

SEQ ID NO: 157299 - DNA, 388 bp, Arabidopsis thaliana columbia
aaaaattctcacttccgtgcaagcaaatgcagtcttgtttcgagtttgattcacacaagaggggaatagaggagacattgtctctttgattcttgagcttatttgggggagagaaagagagagcgagaggatctgatgtgtatctcaatctcgcaagtctctagattgagaatccattcatttggaagttcttgctgtgagcgtgttcatggatggatcaagaacagctctagcttgaagctgcttgatgttagagcttcttctgttgatggtaaagcaagatggatcagacgtaacgtgagtacaactacacaaggtagtagaagcaacactaagagcagtgtgttgggaggaacagttcctgtaaccaggattatagatgaagaga

SEQ ID NO: 157300 - DNA, 299 bp, Arabidopsis thaliana columbia
  unsure (1)..(299): unsure at all n locations
cttctccgaaaacctttcttctctcaaatttttgttaaaacatgtctgacgaccatcaccggtttgattccaacgaatgcggggcttccaanacctatcctcaatcanccggtaacatccgtaaaggtggtcacatcgtcatcaaaaaccgtccctgcaaggttgttgaggtttcgactttcaaaactggcaagcacgttcaccccaaatgtcactttgttgctattgatatcttcactgttaagaatccttgaagatattgttccatctttctacatttgtgaatgtccacattttaa

SEQ ID NO: 157301 - DNA, 470 bp, Arabidopsis thaliana columbia
  unsure (1)..(470): unsure at all n locations
cggggcgggccgcgcgtccgtctgcctcctttcggattcaaatctcagatctagctcaaccatggcgttgctcgtcnagaggacggtcaagtggccgtgaatacaaggtcaaagacatgtctcaagccgatttcggtcgtctcgaactcgagctcgccgaagttgagatgcctggactcatggcttgtcgtaccgaattcggaccttctcagccattcaaaggcgctagaatcaccggatctcttcacatgaccatccaaaccgccgtactcatcgaaaccctaactgctctcggtgctgaagtcagatggtgttcctgcaacatcttttgcactcaagaccacgccgccgcagccatcgctcgtgactccgncgctgttttcgcctggaaaggtgagactcttcaggagtactggtggtgtaccgagcgtgctctagaatggggtccagggtggtggcctgatctgatt

SEQ ID NO: 157302 - DNA, 167 bp, Arabidopsis thaliana columbia
gtccgcaccgctgctgttcggcatcttgcctctagcggtgttgatgtctacactgctgttgctggaccgttgttatcgctttatgggccgcttcataattttgcaaactatgctgtacttaatatgttgtcagagattattacttttttaattattccatacttcat

SEQ ID NO: 157303 - DNA, 462 bp, Arabidopsis thaliana columbia
ctcgtggagaggatcctcttcgtcgccgtctttcggaaaacacacgccttcaatttttctgcgcggaatgcgatcgagtgccttggtaaactagattaatctctgctatgtcgaattggagacataaactatggagaaaattgagctcatttcagagagctagttactcaactacatcttcaagaaacaacaaattaaagcttgatgaccttagaaaactccggccaatgattctaaagagaatcgaaaatcgagctaaagattacccggttaaagagattgttcctgtagctgaagaaatccttatagctagaaagaatctaatcagtaacatcgccgctcttcttaaggtgtttcctgtcttgacatgcaaattctgttcagaagtgtttgttggcaaagaaggacatttgattgagacatgtcgtagttatatacggcgtggtaacaataggctacacg

SEQ ID NO: 157304 - DNA, 430 bp, Arabidopsis thaliana columbia
gtcacagccacagagagatttgatcagctttgtgtgttttccatggcgtcggaagcgagggaatcaccagcaaacaatgctggcttgtcaacgaatcgagatgaggctacaaaaggatacatcatgcaacagactatgtttcggatcaaggaccctaaggctagtcttgacttttactcacgtgtgctggggatgtcattgctgaagaggctggatttctctgagatgaaatttagtttgtacttcctgggctacgaggatactacaacagctccaaccgatccaacagagagaacggtttggacatttggtcaaccggcaacaattgaattgactcacaactggggtacagagagtgatcctgagtttaaaggttatcacaatgggaactctgagcctcgtggatttgggcacattggggttaccgttg

SEQ ID NO: 157305 - DNA, 450 bp, Arabidopsis thaliana columbia
caatttttctgagcttcaaaaatccactctaatggcttcatctgcatttgcgtttccttcttacataataaccaaaggagcctcaacagattctttcaaatcaacttctctgtcttcttctcgatctttggttacagatttccatcttttgttctccagacccatctttttcggtcctaaataccaatctgccaagtccgctaaaccggaatctccagtcgccataaactgcttaaccgatgccaaacaagtttgtgcagttgggaggaggaagagcatgatgatgggcttgctcatgtctggtttaatagtttcacaagccaatctttcaacagcatttgcttcaacttcagtgtttagagaatacatagatacatttgatggatactccttcaagtaccctcaaaattggatccaagtccgaggagctggtgctgatatattctttag

SEQ ID NO: 157306 - DNA, 395 bp, Arabidopsis thaliana columbia
attttctgacgatcaggtgtcagtttccgttaccggagctcctccgcctaactatgattcgttggcgagcgaaaacaggagcaaccataacagcgggaacaccgggaaagctaaggcggagagaggcggatttgattgggatcctagcggtggtggtggtggtgatcataggttgaataatcaaccgaatcgggttgggaataatatgtatgcttcgtctctagggttgcaaaggcaatccagtgggagtagtttcggtgagagctctttgtctggggattattacatgcctacgctttctgcggcggctaacgagatcgaatctgttggatttcctcaagatgatgggtttaggcttggatttggtggtggtggaggagatttgaggatacaga

SEQ ID NO: 157307 - DNA, 298 bp, Arabidopsis thaliana columbia
  unsure (1)..(298): unsure at all n locations
gtgaaaaccctaacggggaagacgatcactctttaggtcgagtcctctgacaccatctacaatgtcaaggccaagatccaagacagggaangaatcccaccggaccagcagcgattgattttcgccggaaagcagctcgaagacggacgtaccttagccgattacaacatccagaaggaatcaacgcttcaccttgtccttcgtcttcgtggaggtgctaagaagaggaagaagaagacctacaccaagcctaagaagatcaagctcaatcacatgaagggtaagctcgcttttcttc

SEQ ID NO: 157308 - DNA, 356 bp, Arabidopsis thaliana columbia
gcgcattcatagtctctacgatcagatagataaattatagtcaacaacgatgtcttgggacgagggagcacacgcaaaggtgaagaaagtgcagctaaccttcgatgagatcatctactcaatccaggtcacgtacgacggagccaccgctcttcaatcccagcttcgcggctccgttggtcccaaatctgctgagttcactttggctccggacgagtacataacggccctttctgcttacggcaaatcgttgagtacgcaagaagttattactgcgttgactttcacaaccaacatgacttcttatggaccttacggtaccaaattcggtttccagatttctgcttcggaagcca

SEQ ID NO: 157309 - DNA, 480 bp, Arabidopsis thaliana columbia
  unsure (1)..(480): unsure at all n locations
cgaagcacagnttttcccaacaccagcancctccaaagagaccaatctgttcctcctctttggtaagggagcaagtaagatcaacaagccttaataccatgtggccagagatctcttgcccagtggctagatcaaccaaagccggagcatctctgtgaataggtaagtaatgctcggtcttgatttcgcctctctcgtcaatgggttctccaagcacattcatgatacggccaagggtagctcttccaacaggtacagtgattggagcaccagtgttgagaaccttccttccacggacaagaccctcagtaccatccatagcaatggtcctaacgacattttgacccaaatgatgagacacctcaagcaccagccttgtgggatgatcctgaacctcaagagatgtcatgatcggaggcaatcctttctgatcctcgaatctcacatcgacaatggcaccgatgacctgacaaacacgcc

SEQ ID NO: 157310 - DNA, 449 bp, Arabidopsis thaliana columbia
cccacgcgtccggtagcctttcgatttggttcttcttcttcttcgtcttcgtcttcttaggcaaggcctccatttctattcgaacttccttcatcaagcttcccggaagcgacggatctcgctactgcgacagctggagattagccgccgagaccaataacgtcggaacttgggatctgattccgtcaatctgcgtggattccgtcgccgagtatcttaacggagaccagtttttatccgattacagtgtcatcgtcgattatgctctcgcgtttgcgaaatcggttgaaatttccggcgacggcaaggacgtgtggatcttcgatatcgacgagacgcttctcacgaatattgactactacaaggctcatggttacgggtctgaaccgtatgacgataataaatttagtgagtgggtggaacaaggaacagctccagcttttgatgcg

SEQ ID NO: 157311 - DNA, 470 bp, Arabidopsis thaliana columbia
  unsure (1)..(470): unsure at all n locations
gaaacccgggccgaccgacgcgtccgaattgagttattattctaatatatctgtaattataggtgcaggaaacccacataaagcagcgatgtctctttccaaaagctgggaaaatgctaaatctgcaccaaaaggtagccaattggaagctaacaagaaagctatgtcgattcagtgcaaggtttgtatgcaaacattcatctgcacgacatcggaagtgaaatgcagggagcacgcggaggcgaagcatccgaaagccgatgttgtcgcttgttttcctcaccttaagaagtgatgaaagctattatctcaactataaaggatttcaatggatgacgtatggattcttatctttcctaattttgtattaaagntttgacaaaatnaatggnatctatttctctttactttttttaaccattagtttattgctatgataatatatcgaagctttttgttgtatctttttt

SEQ ID NO: 157312 - DNA, 450 bp, Arabidopsis thaliana columbia
aaaacaatcaataagcgaccatgttggtgtaccaagatcttctcaccggtgatgagcttcggtctgactctttcccttacaaggagattgagaatggaatcctctgggaagtagaaggaaagtgggttactgtgggagctgtagatgttaacattggtgccaatccatctgctgaagaaggtggtgaggatgaaggtgttgatgactctactcaaaaggttgttgacattgtcgacaccttcagacttcaggagcaaccaacttatgacaagaagggattcatcgcttacattaagaaatacattaagcttttgacacccaagctcagcgaagaagatcaagctgtcttcaagaagggtattgagggagctaccaagtttttgctccccaggctcagtgacttccaattctttgttggggagggtatgcatgatgacagcactttggtct

SEQ ID NO: 157313 - DNA, 459 bp, Arabidopsis thaliana columbia
cgatcacgcggccgctcttctgtatctaaaagacatatcaaacgaaagaaatcaataaacacaatattctttctggcaaagtttctcatttctcatgggcatatctcaagtacactattgcaatggtgaccagaacttagaagcaaaccttctagatcatgaggaaactgaatcattttcagtacctcaaacgaagaactgtaagaggtggctccgtgtctccatatacgcaatctttgtcatcttctgccaaccacttgctacagttctgggtagactgtactatgaaaatggagggaaaagcacatatgtggtaacacttcttcaactcattggcttccctgtactgattctcttccgcttcttttctcgaatcaggcaacccaaatcaacagatacaaatttcagtcagtccccttccttcaccacccttgcatcggtttacttgtgcactggact

SEQ ID NO: 157314 - DNA, 296 bp, Arabidopsis thaliana columbia
caagactcaaatagtttctatttaattactaaaaagaaaaatgggtcgtggttacaatttgctatgcgttctagtaacgtttgtaggattggttgcagctgtaaccgcacaagggaaccgtggctcaaacagcggtggtggtcgaagaccacatgttgggttttatgggaatagatgccgaaacgtagagtctattgtgagatctgtagttcagtctcatgtccggtctattccggctaatgcacctggaattttgcgtatgcatttccacgattgttttgttcatggctcttatt

SEQ ID NO: 157315 - DNA, 484 bp, Arabidopsis thaliana columbia
  unsure (1)..(484): unsure at all n locations
accgnntggaaaaccgggccggccgcacgcgtccggcctcagccgccgcacgacctcttgtcaccgtccaaggacttgacggtgacatgagcaccggtcagatccaccaccgtcactggaccagacgtcatgactgctccagttcgacctgacattgtcaacttcgtccacgcccaaatctccaacaacagccgtcagccttacgcagtctccaaaaaggccggtcaccaaacctccgccgagtcctggggaaccggaagagccgtgtcacgtatccctcgtgttcctggtggtggaactcaccgtgccggtcaagcagcgttcggaaacatgtgtcgtggtggtcgtatgtttgctcctactaagatctggagacgctggcaccgtcgtgtcaatgtcaacatgaagaggcacgcgattgtttctgcaatcgctgctactgctgttccagctcttgtgatggctcgtggtcacaagatcgaga

SEQ ID NO: 157316 - DNA, 415 bp, Arabidopsis thaliana columbia
  unsure (1)..(415): unsure at all n locations
ggaaaacccgggccggccgacgcgtacgcggacgcgtgggtgcgtctgcgtgtaggtattcagatcttcgtcaagactttnaccgggcgcaccatcacccttgagggggggagctccnacaccattgacaacgtcaaggccaagatccaggacaaggaaggtattcctccggaccagcagcgtctcatcttcgctggaaagcagcttgaggatggacgtactttggccgactacaacatccagaaggagtctactcttcacttggtcctgcgtcttcgtggtggtttctaaatctcgtctctgttatgcttaagaagttcaatgtttcgttgcatgtgaaactttgttggtttgtgttttggggccttgtataatccctgatgaataagtgttctactatggttccgctcctgtt

SEQ ID NO: 157317 - DNA, 475 bp, Arabidopsis thaliana columbia
gaaaacccggggcggccgacgcgtccgcccaattcgccgaaggtatcaagtccaagacaccggtggtcatgctcgcctacaatctctggccggccttcaactgggacgcgtccggtatgacggatcagcagatggttgagttcattccgcggattgctaggctcggatattgttggcagttcataacgcttgcgggtttccatgcggatgctcttgtggttgatacatttgcaaaggattacgctaggcgcgggatgttggcttatgtggagaggatacaaagagaagagaggacccatggggttgacactttggctcaccagaaatggtccggtgctaattactatgatcgttatcttaagaccgtccaaggtggaatctcctccactgcagccatgggaaaaggtgtcactgaagaacagttcaaggagagttggacaaggccgggagctgatggaatgggtgaagggactag

SEQ ID NO: 157318 - DNA, 447 bp, Arabidopsis thaliana columbia
  unsure (1)..(447): unsure at all n locations
cagtactttaaccatcacttcaaagttcaatctctttttttttttttgnttgatccggatgttaacaaaattatggagcgcaatttcctcctaacagttacattgatctgcattgtcgtcgccggtgtcggtggccaatctcctatctcttctccgaccaaatctcccaccactccttctgctccaactacttcccctactaaatcccccgccgttacttctcccactacggctccggcgaaaactccaactgcttcggcttcttcaccggttgagtcaccaaaatctccggctcctgttagcgagtcgtcttcaccaccgacacctgttccagagagctctcctncggttcctgcaccaatggtttcttcttcagtgagctcttcaccggttccagcaccagtagctgattcttctccagcttcggtagccgctccggttgctgat

SEQ ID NO: 157319 - DNA, 450 bp, Arabidopsis thaliana columbia
gtggttcggagctgtttctaagaaaacaacatgtagttcggatcggagctacgctggcagggctcaaaacatggcgaggggtttgaagaagcatctgaagaggcttaatgcgcctaagcattggatgcttgacaaacttggtggtgcatttgccccaaagccgtcttctggaccacataagtcaagggagtgccttcccctcgtccttatcatcaggaacaggttgaagtatgctcttacctaccgtgaagtgatttcaatcttgatgcaaaggcatatccaagttgatgggaaagtcaggacggacaagacctaccctgctggtttcatggatgttgtgtctatccccaagaccaatgagaacttccgtcttctctatgataccaagggacgtttccgtctccactccatcaaggatgaggaagcaaagttcaaactttgcaaggttcg

SEQ ID NO: 157320 - DNA, 284 bp, Arabidopsis thaliana columbia
  unsure (1)..(284): unsure at all n locations
cgtacgtttgttctcttgagtggaaaaaagttgctttcactaaatcagatccgacaataccnaggggcagggattaaatcaaggaggtccttttaacacctagaaggaaagatgcaaggtctttgaagatcaagataagcacggacattgttaagttcaaggtcacgcttcttaaggtaccattacacactatgtgtctttgacccatttaaagacgattactttaagcactctatgtttccattatttgtgatagcatacatcattgaagatattacccatat

SEQ ID NO: 157321 - DNA, 344 bp, Arabidopsis thaliana columbia
  unsure (1)..(344): unsure at all n locations
acgctgtaacgttcgatcatcttgtatttcattttaaccactcattgtttttagtttggttaggaagaatcaactatggggacgaanagaagcgttggaactttgaaggaagcggatctgaagggaaagagtgtgttcgtgagggttgatctcaacgttcctttggatgataactctaacatcaccgatgacaccaggattcgtgccgctgttcccaccatcaagtacttgatgggtaatggatctagggttgttctctgcattcacttgggccgtccaaaatgtgttattttttagggcaggggggggggggttgtcccatatttttctaactttttcgtttt

SEQ ID NO: 157322 - DNA, 454 bp, Arabidopsis thaliana columbia
gaaaacccgggccggccgacgcgtacgcccacgcgttcgccgatgacgaagaggagcttaggagctaacgaagataagctgatagaagccaaaagcaaaaacgttgctggaaaatctcataaacagaagaaaccagtagaagcagaaagcttaaaagaggaagaccttctacaagcatccggaactgattctgattacgacggagatagtttgcctggttctttgaattccgacgatttcgactccgatttttccgattcagaggatgatggaacacatgaaggaacagaagatggagatgtagaattttccgatgaccaccacctgcttgagcatggtgggtcaattgataacgaggatgatgatggaagtgaacatgtaagtagtgacaataatgaggaacatgggagtgatgaaaattttgagtgaggtgaaacggttgaagtgagctatt

SEQ ID NO: 157323 - DNA, 475 bp, Arabidopsis thaliana columbia
gaaaacccgggccggccgacgcgtacgggcgatttcttcttcttcctcctctatatgtttcaaccccactcgatttcacacagctccgcatatttcatctgcggcgcggctcttcccagtcaccagcttctcccctcgctctctccgtttctccgacagacgatctctcctatcttcctccgcctctcgcctccgtctttctcctctatgcgttcgtgattctcgagcagctgaagttacacaacgatcatgggaagactcagttctaaaaagcgaaaccccggtgttagtagaattctacacgagttggtgcggtccatgtcggatggtccacaggataatagacgaaatagcacgggactatgctggaaaactaaactgctatctccttaatgcagacaatgacttgccggtggctgaagagtacgagataaaggctgtgccggtagttctgctcttcaagaacggggagaaa

SEQ ID NO: 157324 - DNA, 450 bp, Arabidopsis thaliana columbia
attcttcagtaaatactaatggcgagttgaagaaaggtgaggctgatgggacagtgaaaggtgctgggtctcaagagagacgtgatgcttctagacctgccagctcggataagaacaatgatagtgatgcaaaactcccaagaaagaactctttgagagttccagagcatgtggtacaaaatggaatcataaaagagatctctgaaagcaacaaatctctcaacaatggtgtggcggtgaaaacagatcctattggtttggataacttgtctatgtctgatggtgaaagtgatcctgtgtataaagcttcgagctctaaatttcaagcgctggacaatgaagatttctcaagtgactcttcgtctggaagcattcaaagaaagaaaaacctgaaggttcctactgaatctgttccacctgttaaagactttacaccaagaggattaataa

SEQ ID NO: 157325 - DNA, 308 bp, Arabidopsis thaliana columbia
cgtacgaaaccactcatttttctattactgaaatttttcttatagaagaagaagaagaatcaaaagggccactttctcatcagggtggctctcaccaaccacattctccactgcaatctcccacaaaaaccctaactccatctcattccatggccttcgtcccctccgtctaggtggctcctcctccgccctacccaaactatcaaccaccgggagaaaatcctcctccgctgtcgtgagagcttagctaagcccttccattgtcataagtctcagcacaggtctctcccttttcctccgccttttct

SEQ ID NO: 157326 - DNA, 411 bp, Arabidopsis thaliana columbia
gaaaacccgggccggcggcgcgtccgcttttcttttcttaaaagagctcattacactttaccatctttccgctgtcttctgagcttgttatttaccgtaatcatgccaacatcagcaacagcggtggctccatcaactggatctgtccagaaaaaagatcaagactggcgtgcgattttgtctcccgagcaatttagagttctcagggaaaagggcacagagaaccgaggtaaaggagagtataccaaactgttcgacgacggaatctatagttgtgctggttgtgcaactcctctttataagtccaccactaagttcgactctggtggggggtggccgttcttcttctatgctttccctggtgccattaaacaaacgccctgaggcaggagggtgaagaatggagatcac

SEQ ID NO: 157327 - DNA, 476 bp, Arabidopsis thaliana columbia
cggaaaacccggtgccgacccacgcgtccgggaaactctgaaagttgtgttaaaaaaaaatactagaatcatggcggcgtcaatggcgaggcccatctcaataactggtctcggtttctattctgatcgaaagaacattgctttctctgattgcatttcgatttgttctggattcagacattcccgaccatcttgcctcgatttggtcacaaagtcaccgagtaataacagtcgtgttttacctgtcgttagtgcccaaatatcttctgattatattccagactcgaaattttacaaggtggaagcaattgtcagaccatggagaatccagcaagtttcatcggctttactgaaaatcgggattcgaggtgttactgtttctgatgtgagagggtttggtgcacaaggaggttctaccgagagacacggtggctctgagttctcggaagacaaatttgttgctaaagttaagatgg

SEQ ID NO: 157328 - DNA, 450 bp, Arabidopsis thaliana columbia
ggaaaaatcggttcgcggcttcttctgctttgccgagaccctaagcttgattcgagctaggtctggcttatcaattgtgagcttgtcgtttcgcaatggtggtctgcaaatgcaaaaaggctaccaggctgtattgctttgttcacaaggcccctgtttgcggcgaatgcatttgtttcccggagcatcaaacttgtgtggtccggacgtattcagaatgggtgatagatggagagtatgatcagccaaagtgttgtcaatgccaagcaacatttgatgagggggcaggtcatcaagtcactcggttaggttgcttgcatgctatacatacaagctgcctggtttcgcttatcaagagttttcctcctcatactgcacctgctggttatgtgtgcccagcatgtagcacacctatatggcctcctatgatggtaaaagatgcaagatctc

SEQ ID NO: 157329 - DNA, 441 bp, Arabidopsis thaliana columbia
gatcagaaagggttcccactttctccattgtttattcttttgttcgattcttctcgccgggatttggtatcaaaatggcgtatgaggaacactttcagcaaacttctgaagctaaatatgattgtcttttatttgatatagatgatactctttaccctctcagttctggtttggccatggaagtgaaaaagaacattcaagaatatatggttcagaaacttggtattgaagaagataaagtccaagaactttgcctttccctttataaaatctatggaactactatggctggtctcaaggctgcgggttatgacttttattatgaccatttccatcgttttgttcatgggagattgccatactcaacactgaagcctgacccaattcttaggaatattattcttagcttgcctatttggaatagttgttttactaatgcat

SEQ ID NO: 157330 - DNA, 450 bp, Arabidopsis thaliana columbia
catcgactcaaattcaaaaactcatctctctctatttctatttctctggttccatagctcgccggcgcatcgcagatctactccttccgcaataaattttaccggcggaggtatcagatctcgccgatctgttgtagcagctactgtattttgggcttctcatttgatattggggaaacgaggagtagaggacgatggaaaatctgatctctctggttaacaagatacagagagcttgcacggctttaggagaccatggagactccagcgctttacctactctttgggattccttgcctgcgatcgccgtcgttggtggtcagagctcacggaagtcttcagtcctggagagcatcgtgggaaaggactttttaccccgtggatctggcattgttactcgaaggccccttgtcttacagttgcaaaagatcgatgatggaacccgggagt

SEQ ID NO: 157331 - DNA, 452 bp, Arabidopsis thaliana columbia
gtcatcctcagggaaatgcaagaggtggaggttacataccgatgaagtggttcttgaccatgtacatgccactgcattccaatacacaccccttggaagaactattttgggacctgctcagaacgtcaaatcgatcaccagagaggatctacagaactacattaagactcactacactgcttccaggatggtgattgctgctgcaggagctgttaagcatgaggaagttgttgagcaagtgaagaagctatttaccaagttgtcgtctgatccaacaactacttctcaactggttgccaatgaacctgctagttttactggttctgaggtccgaatgattgatgacgacctaccccttgcacaatttgctgttgcctttgagggagcatcttggactgatccagattccgttgctcttatggttatgcaaactatgttgggttcgtggaaca

SEQ ID NO: 157332 - DNA, 354 bp, Arabidopsis thaliana columbia
gcgggcgagcagcaatgagtatgaggaaggtcttttggtatagggagagtgggtacgacccagagatggtgccttattcagagaaggcgggcgtgtcacacatgtacagacacataagggataagaacgtgtacgagatccaccagatgtgtgagacatcgttccagagcatatcggagcgtttgttcaaggacacgccgtggccaagtgtggaagcgattgctccttacgtagacaacgaccatgtgttctgtcttctgtaccgtgagatgtggtttcgacatttgtatgcgaggttgtctccgacgttgaagcagaggattgattcttatgacaactattgcagcctttttt

SEQ ID NO: 157333 - DNA, 328 bp, Arabidopsis thaliana columbia
  unsure (1)..(328): unsure at all n locations
ataccggaccgaccgcacgcgtccgctctattgtatgaaatcaaatccaaatctattttactcttgaagacaacttaaaactttcgccggtgtctcttcttttcatgttcaataaanctcattgagctattgcattttcaatctcttctaataagctcaatgagcatatatttagaaatgtttgcatggtatcagagcatcagtccatctaaaggatttatggttttactctcactatcttagtctctgctcactctttgaaacgtcgagccttctatctttcccacaatatctaaagcaaggctagtctttagttttttttactttc

SEQ ID NO: 157334 - DNA, 429 bp, Arabidopsis thaliana columbia
ctccgttgtgtttcaggacgacgcataggttaaaaaaaattgaattctttctctccaagcgaaactagggtttcgaaagtctctgtctcatcaaagcttcgaaaagaaagtgattgcattaagagaaacattgggataaaagatgagctttactcaggctaattgttttcgaccatcctactatcctgcaaggataacacgaccaaattgcatctccagtgtacctattaggtcttcagtacgctttgatcacttcccgcgtacctcgtttactcttcgagctactgctgcagtgtctactcagttttcgcctcttcttgatcatcgccgtcgtttacctactgggaaatcgaaacaaagttctgctgtgtgcttatttggtgggaaagataaacctgatggtagtgatgagatatcgccatggaaagc

SEQ ID NO: 157335 - DNA, 446 bp, Arabidopsis thaliana columbia
attcatcagagtccctcatccatcttctcattctccaacgcgagatcagacttcgacagagagtgcgatgagttcatcaacaagaaagcttgaggttgtttcaccagttcccgccgatatcgacatagctaattccgtcgagcctttacacatctctgagattgccaaagatcttaatatcaaccctcttcactacgatctctatggcaagtataaagctaaggttttgttgtctgcgtttgatgagcttcaaggacaagaagatggatactatgttgttgttggagggattactcctactcctcttggagaaggcaagagtactaccactgttggactttgccaagccttaggcgcttacctcgataagaaggttgttacttgtcttcgccaaccgtcacaaggacccacctttggaatcaaaagaggtgcagctggtggtgggt

SEQ ID NO: 157336 - DNA, 467 bp, Arabidopsis thaliana columbia
gacccacgcggccgcaagaactcaaacacttcataactaaacattctttttagccttttcaaaaactcaatcatgtcaaggaactgcggaagctgcgactgtgctgacaagacccagtgcgtaaagaagggaaccagctacaccttcgacatcgtcgagactcaggagagctacaaggaggccatgatcatggacgttggtgccgaggagaacaacgcaaattgcaagtgcaagtgcggctcctcttgcagctgcgtcaactgcacttgctgccccaactaatgaagcttctttaatcaaaatgtaatatgaataaaagttgatgtgggctcatctattgagctcatgtctctcttattactactctctagtatggtgtgatgtaatgggttatgacccttctttcccttccctataaaactaaagaaacttgcaagataattgaaaagatggtttctttttattat

SEQ ID NO: 157337 - DNA, 381 bp, Arabidopsis thaliana columbia
ccttatcttctacgcccgcttcttcagactgggcggccgggtccttcctctatttcttcttcttcttcttcggctcttcttcttctgctatcacttcctcctcttcgtcattagtatctccaccctgctgtagctttttatttttcttcttcttcttcttcggctcttcttctgctaccgcttcgtcctctccatcattaatatctccacgctacttatttttctccttcttcttcttcttcggttcttcggcaattaacgcattgttctctttggcatcaacatctctgtagggttcttcttccttgcttcttcgagtctcgatctcctctctcaatctcagtcttcagcttccaattgactttcaacatggcatattat

SEQ ID NO: 157338 - DNA, 442 bp, Arabidopsis thaliana columbia
  unsure (1)..(442): unsure at all n locations
gtttcattanaagctcaaatttcaaatctcacttccttatcacaatgtcttcctccgtctcgccccttcttacaaccggcaggtccatcacaatcctcctcttctccaccatctccacagcggcgacaattccaaacatccaccgtccattcaacaaaatctacgccttctgagattctttcaccgacaccggaaactcacgctccggcgaaggaccagccggattcggacacttgtcaagtcctccatacggcatgactttcttccgacgaccaacaaaccgttactccgactgtcgtctaaccatcgacttcgttgcatagtcaatgaatttaccgtttctgccaccgtatctcagcctcaaaaccactaacgctaacggcacagcaacggatactcacggcgttaatttctctgtctctggatcaacggtgatttaaca

SEQ ID NO: 157339 - DNA, 450 bp, Arabidopsis thaliana columbia
tttgttatcttcttcttcatcacaatttttctacggtcagagattcaaaagagggcgttgtctctatcttattctcggatcatcatgatgcagcagccaccacccggaggtatccttccacatcacgctcctcctccttctgcgcaacaacagtacggttaccaacaaccttacgggattgctggagctgctccaccaccaccacagatgtggaatcctcaagcggcggcgccgccatcagttcagcctacgaccgctgacgagatccggactctttggatcggggacttacagtattggatggatgagaatttcctctacggttgctttgctcataccggagagatggtttctgctaaagtgattcgtaacaagcaaaccggtcaagttgaaggatacggtttcattgaattcgcatctcatgctgctgctgaaagagttctacaaaca

SEQ ID NO: 157340 - DNA, 227 bp, Arabidopsis thaliana columbia
  unsure (1)..(227): unsure at all n locations
ggcgggagtctataagcacataacaggttctaacattgtttgtcatgctgttaaacttattngcgcngggactatcagtgaaggagagggttattanttgatgtcaaatcaatggaacagaggctggggtgatgatggttatttcatgataaggagagtaactaatgaatgttttattaaatatgaaccagtcgctgtaaaccctttaaattattatttctttatct

SEQ ID NO: 157341 - DNA, 477 bp, Arabidopsis thaliana columbia
  unsure (1)..(477): unsure at all n locations
gaaaancgggtcgaccacgcgtgcgaacaatggtgaagtttctgaagcagaacaaatcggtgatcctccttcaaggccgttacgcgggcagaaaggcagtgatcatgaaatgcttctattacggaaccagtgaccgtcgttacggacactgcctcgtcgccggactgaagaagtacccgagcaaagtcatccgcaaagactcagcgaagaagacggcgaagaaatcaagagtgaaatgtttcatcaagctcgtgaattaccagcatctgatgcctacacgttacacgctcgatgtagatctgaaggaagtagcgactcttgatgctcttaagagtgaggataagaaggtgactgctttaaaggaagctaatgctaagcttgaggaacgtttcaagactgggaagaacaggtggttctttactaagctcaggttctgaagaagaacctttgagaattttatctatctatctacttttt

SEQ ID NO: 157342 - DNA, 462 bp, Arabidopsis thaliana columbia
cgtccgacaaatcttaaacgttttactttgtgctgcactactcaacctcaatggccgcctcaacagggggggtctcctcccctgccggggccggtaaggccgtcaagctttcccccgcggcatctgaagtccttggaagcggccgtgtgacaatgaggaagactgttgccaagccaaagggcccatcaggcagcccatggtacggatctgaccgtgtcaagtacttgggtccattctctggcgaatcaccgagctaccttaccggagagttccccggagactacggatgggacaccgccggactttcagctgaccccgagacattcgcaaggaaccgtgaactagaagttatccacagcaggtgggccatgctcggagccctaggctgcgtcttccctgagcttttggctagaaacggagtcaagttcggagaggcggtttggttcaaggccggctcacagt

SEQ ID NO: 157343 - DNA, 454 bp, Arabidopsis thaliana columbia
ccaaatgttgttcaattatatgaggtgatggcaagtaagacgaaaatatttatcatctgggagtgtgttacaggaggagaactctttgataagattgtaaatgatgggcggatgaaagaagatgaggcgcggagatatttccaacagcttatacatgctgtggactactgtcatagcagaggggtctaccatagagacctcaagcctgaaaatttactattggactcctatggaaacctcaagatctcagattttggattaagtgctttgtcccaacaagtcagggatgatggactcttgcatacatcgtgtggaacaccaaactacgttgctcctgaggttctcaatgatagaggctatgatggagcaacagctgacatgtggtcatgcggtgttgtactctatgtcctgcttgcaggttacttaccttttgatgattctaatctaatgaatc

SEQ ID NO: 157344 - DNA, 455 bp, Arabidopsis thaliana columbia
cacaatccgatcctctggtgggctctcagaggatgagatccagataccaaagtttagagagaaggccaaagagaacaaaaagagaaaaagagaaagatgaggttgttcgatccatggccagtgttcttcaagagagaatggaaacgttgttggccgtttctcaccggattcgccgttaccggcgttctcatcaccaagctcaccgctggactcactgaggaagacgccaagaactccaagtttgtccaacaacacaggcggtgatctactgacgtgagttgtcgaagctgagaagccgaagcgttcttatggaaactactgagagtgcttcagctttcaaacctgttctaataacatgaaagagaggattatagacactatcaatctctcgtttccttttctctgtgttttcacaactcttgaacagtgcaaattctactctgtttatccaattt

SEQ ID NO: 157345 - DNA, 419 bp, Arabidopsis thaliana columbia
  unsure (1)..(419): unsure at all n locations
tcttatctataactagtaaaaaaaaaaacacagaaccgttcaatttccgcctccagaagggctctctcctcccctgccttcgccggaaaggctgtgaacctttcccccgcggcatctgaagtcctcggaagcggccgtgtgacaatgaggaagactgttgccaagccaaagggtccatcaggcagcccatggtacggatccgaccgagtcaagtacttgggtccattctctggcgagtcaccgagctaccttaccggagagttcccctgagactacggatgggacagcgctggactttcanctgatccctagacattcgcaaggaaccgtgagctagaagttatccacagcaggtgggctatgctctgagccctaggctgcgtcttccctgagctcttggctaggaacggagtcatgtt

SEQ ID NO: 157346 - DNA, 446 bp, Arabidopsis thaliana columbia
ctctaatcaaaaagcttttaacctcagccgttaaatctttctccgatcatgccgaccagagacatcttcattggtggagtcgaagaagaggtctatcaccccaacgcacttagggcggcgctcgctgagtttatctcgactttgatcttcgtcttcgccggctcaggctccggaattgctttcaacaagatcactgacaatggagcaaccactccttccggcctcgtcgccgctgccttagctcatgctttcggtctctttgtcgctgtctctgttggcgctaacatttccggtggccacgttaaccctgccgttaccttcggtgtcttactcggtggtaacatcactctcctccgtggtattctctactggattgctcagcttcttggctccgtcgccgcttgtttcctccttagctttgccaccggtggcgagccaattccagc

SEQ ID NO: 157347 - DNA, 453 bp, Arabidopsis thaliana columbia
gcgtccgccaaaacacacccacacgtacgcacacacactaagacaatgtctcctttcaaaataggctgtgttcacgactcttctcggggcggcgttttcagtgtcggctgctgatttcaacactgacgtcaacgtagcttggggaaatggccgtgggaagatactcaacaacggccagcttcttactctctccttagacaaatcctctggttccggttttcaatccaaaacagagtatttgtttggaaagattgatatgcagattaagcttgttcctggtaactctgcaggaacagtcacaactttttacctaaaatgcgaaggatccacttgggatgagattgattttgagttcttgggtaatatgagtggagatccttatactttacacactaatgtttacactcaaggtaaaggtgacaaagagcaacaattccatctctggttcgaccc

SEQ ID NO: 157348 - DNA, 454 bp, Arabidopsis thaliana columbia
ggaaagggtcacactgtctgtcccaaacactataacagcgagttcgtcacgtacaatcgcttgccatgtaggctcagctgaaacatctgaggacctcctcttagacgctgacccttgatcttagggacatcaaactgaaatgcttttccttcttctcctaaggccaagacaagacttcccttttggactagcccgcctacatgtatttgaccagttaaaacaggggttttcgggtcctcgatgttgtactgacgaatatctccatgaagccagttggaacaatagaggaatcggtcgtcaagtgagattagaaagtcggtgataagccctggcatttctgggagaatccagttttcaactttcagaggttcaactgatatagccacctcgtggctccatgtttcatcatcgttcttgaaaaatcttactaaagtactcgacaacgcacaccctg

SEQ ID NO: 157349 - DNA, 399 bp, Arabidopsis thaliana columbia
gtcttcgtttctaagataataaggttttgtttattaaagcatcgataaaaggcggggcagggagacaatatgtgggggggggagactgtctctgttgttgttactacaaccgttgctgagccagaagacattccagaggacatatacttaatgactgcattggagttgactcttaagaaagctcatacttatggtgtattatgacggattctccatgaatgagctaatcttatctagaagcatgtggctaaactcgttgaattggctgaagactgataccattcttattatttcaagctcgggaaggctatctgttcttatcacgaagacaggttactatcatttccaagttcctaaaccttaggctaatgctctaatctatgcaacatttattatcac

SEQ ID NO: 157350 - DNA, 452 bp, Arabidopsis thaliana columbia
cgccaatacaggatcagactgacttctcaatagacaaagctcctgatggggtgacggaggggaaatcaactcggagggggccaagttctcggtttagccgctttggtattggcatattgaagaacactgtagggaaggtcttcccatctcgaccatctaatgaggcaaaactgggtaatgagaatcaattctactatgacgataacctaaagagatgggtggaaagaggtgtggaacccccagctgaggaagctgcactacctcctcctccaacgtcagtcccattccgaagcaactcattggggcatgaaaacaagtctgagataaagaacgagatgtctccatctagtgggagctggagtagtggcagcccaactccgtcagagaattctccgggaatcccaccagtctcacagggctcaaaccaattctcagctcgtggacgtatgggt

SEQ ID NO: 157351 - DNA, 453 bp, Arabidopsis thaliana columbia
  unsure (1)..(453): unsure at all n locations
cggattatcgtgtttgggagtggcatggtcatatcatgttgtttgatgaanagagggggtgcacgcctgagtatatgtacgggaattacttcgagaggttgcctgtgaagcttcctaataaccgccgtgtggagaaggagaagaagaaggagatgaaagaagaggaggtggagaatttggggcttagagagttgatcgatggtggtgacgctgctcctggtaggattcttcataggaacaacatcaacatcggttcctcaagggtctaagttcctaagagcgtcttggtagggagaggtcacattgttcgggaagatttcagatgtgtgaacaactcgcgacaacaaaacataaggtgctggtgggtctacgggttctattccgttttatttaaaccgggaaatccatgggtgaatctgttttctttaagaaattcatctgaagttgtttctg

SEQ ID NO: 157352 - DNA, 452 bp, Arabidopsis thaliana columbia
gcccgagaattcttcaaacgctattaacgtctatacgagtctcgattccgattcaaaacctgaccgggacgctaatgatatgactgatcatgactcttcttctaaagcattggtaatccctgctcccgccgtttgtcttgtacgtttcgccggagatgctgctagtggcgcattcatgggctctgtatttggctatggctctggattgtttaagaagaaagggtttaaaggatcatttgtggatgcgggtcagtctgcaaagacttttgcggttttatctggagtacacagtttagttgtttgccttctaaaacaaatacgaggcaaagatgacgccattaatgttggagttgctgggtgttgtactggccttgctcttagtttccccggtgcaccgcaagcaatgctacagagttgtctcacttttggtgccttctccttcatccttgaag

SEQ ID NO: 157353 - DNA, 450 bp, Arabidopsis thaliana columbia
gttagttaatagttaatatgacgagttatgtttagaacttttacttataccaaaatagatggttgaatttttacttaatatggggctacaaccaagatattttgttatctgaacaattccatctacgtttagtctctttcttttgctttggctaatggcaatgacactgattccacagcttcccgaaagtcttgattgatggtccatatggtgcaccagcacaagactacaagaagtacgaggtggttctactagttggtctcgggattggagccacaccaatgatcagtatcgtcaaagacattgttaataacatcaaggccaaggaacaagcccaactaaaccgaatggagaatggaacaagcgaaccacaacgaagtaagaaagagagtttcaggacccgtagagcttacttctattgggttacgcgtgagcaaggctctttcgatt

SEQ ID NO: 157354 - DNA, 424 bp, Arabidopsis thaliana columbia
aaaacgaataatccggctatgccaccggattaattcgttttcggacagaaagatcaaatggctggaataccctcgctcacggactggtataactaccggaaaaaacttttcaccgtccctccagtggcggagagaagaagagctttgaagatgttctggtgcggtgctcggagaagggtgagagacgagggaggtggtgaagatgaagatgaaatgtatggatacaacgaggaaatggcgatgttggagatatatagccagtcgtgtagagaagaagcgcttatagtgacggccattgtcgacgagggagaagtggaagttgtaatctttaaaggagtgtcgtcgtgcttgagcggagaaacggcggtggatccggctaggagtgtgttgccggagagagcagtcattacaaagattgatagag

SEQ ID NO: 157355 - DNA, 446 bp, Arabidopsis thaliana columbia
  unsure (1)..(446): unsure at all n locations
ttatctttgagcacttagcttcttataatttaccataggaacagaagtttcttattggagttatgctgatggttcctgtggaggccgtgnaatcgtttttgtctttggtgaattcagaagcagctttcaactgcgaggtgattagagattgttatgaagcttttgcactctattgtttcgagagatatttgatagcttgcctagatggagaagaacgtacaattgaattcatggaacaacagacagttatcacccagagtactcctcttctagaaagcacatgttcttatggggttgtggagcgtggctgtccaatgaactgtttcttaaaagattgcagtctttgtcctcagttttattatgcttgtgtaaaatggcatcgttcaatatatgatactgaaaattatttgtgctctgtttgcatttatcctctaaatctttttttt

SEQ ID NO: 157356 - DNA, 299 bp, Arabidopsis thaliana columbia
aaaattattcttaccatttatttttttttaaatgcaattctttctttaataagcctgtttttattaatatggcggccgacaaaaatatttctactaaataccatacttctttgaaaaaagctatttcataccaaccccttagtttatctattgaaaccactgaaataatttttcaacattaccaatcacatatttttaccgtaagttatacaacaaatcttgatcactcatttttttctgtccaatacttatcatagaactcttttgactactgtatattaagtaactcatttagacca

SEQ ID NO: 157357 - DNA, 303 bp, Arabidopsis thaliana columbia
ctcagacagagagtgagagatccaattctgttctttccacctcccttatgatacacgtccgtgttctttttcttgtcggctaccctaaccctatccaccaatccctacttcttcttcgattggactgtctcttacctctctgcttctcctttcgacactcgtcaacagttaattgtgataaatgggcaatttcctgttccgattctaaacataactacaaattgtaatgttgttatgaatgtgaagaataatcttgatgagccatttcttcttacatttaattttaatccaacatatgaaaaa

SEQ ID NO: 157358 - DNA, 441 bp, Arabidopsis thaliana columbia
  unsure (1)..(441): unsure at all n locations
cttttcgatcaaaagacatgatctttgtgaatgtgggcaacgattgtaagcanagggaacgcgaagaattatgataggctcgcatcaacgataagacaaaatccataaactactctttcgatcatcaaatccaccggtggcgccgccgttacacgctcctcccgcgcctcctttggacacattccctccacatctgtctccgcacgtcgccttggcttctccgccgtcgttgactctcgtttctcggtccacgtggcgtccaaggtccactccgtgcgcggaaagggcgccaggggagtgattacgagggcgaataanantgttggagatctgaattctgtagatttgaaggggaagaaggtgtttgttatagctgatcttattgtacctttttatgacaacctaaattttacttgctacacttgtattcagagccgtcat

SEQ ID NO: 157359 - DNA, 441 bp, Arabidopsis thaliana columbia
  unsure (1)..(441): unsure at all n locations
cggaaagagagacactttttctctctctttctttatctccttcaatctctctagntttgcggtcatcggctaaaagatgggcgggggacgaccctcgaagaagagcgacaacactaagttctacgagatcttaggtgttcctaagagcgcttcaccagaagatctcaagaaagcttacaaaaaagccgctatcaagaatcatcctgataagggtggagatcccgagaagtttaaggagttagcacaagcttatgaagtgcttagtgacccggagaagcgtgagatttatgaccagtatggagaggatgcgctgagggaaggaatgggtggtggaggaggtggtcatgatccatttgatattttctcatccttctttggtggaggcccctttggtggtaataccatccggcaaaggaggcagaggcgtgttgaggatgttgt

SEQ ID NO: 157360 - DNA, 375 bp, Arabidopsis thaliana columbia
tctttataccagcctctgtaacgttcgatcatcttgtatttcatttcaaccactcgtgcgttttagtttgttttacgaggaatcaactatggcgacgaagagaagcgttggaactttgaaggaagcggatctgaagggaaagagtgtgttcgtgagggttgatctcaacgttcctttggatgataactctaacatcaccgatgacaccaggattcgtgccgctgttcccaccatcaagtacttgatgggtaatggatctagggttgttctctgcagacactttggccccccaaaaggtggtgggggggagtacagcttaaaacctcttttgctcagattgtctgaactttttggtgttgaggttgttatggcata

SEQ ID NO: 157361 - DNA, 454 bp, Arabidopsis thaliana columbia
ccagcttcttgctcatgcagcggccgttgatgtttacaggacgaaatataaggatgaccagaaaggtatgattgggcgagggatgataactagatggtttcttccatttgatcatagtcaagagagcaaagatgcaactgagcgggctaaaatatttttccatggatggttcatggggcctctaacagaaggtaaatacccagacatcatgagggaatatgttggtgatcggcttccagagttcagtgaaacagaagccgcacttgtaaagggttcatatgattttcttggtctcaactattacgtcactcaatacgcccaaaataatcagacgattgttccttcggacgtacacactgccttgatggactcacgcacaactctcacatctaaaaatgcaactggtcatgctcctggtccaccgttcaatgcagccagttactactacccaaaa

SEQ ID NO: 157362 - DNA, 456 bp, Arabidopsis thaliana columbia
ttcttcttcttcttcctcactttgttcatcatcttcttctccgatctaaacaacaatggcgacaggaggagcttcctgagcgggagatgaattcgtatacatggcgaaactcgccgaacaagcagagcgttacgaagaaatggttgaattcatggagaaagtcgcgaaagctgttgacaaagacgaactcaccgtcgaagaacgtaatctcctctccgtcgcttacaaaaacgtcatcggagctcgtcgtgcttcgtggagaatcatttcatcgatcgaacaaaaggaggagtctcgcggtaacgatgaccacggttcgttgatccgtgactacagaagcaaaatcgaaacggaactttctgatatctgtgacggaatccttaagcttctcgatacgattctcgttcccgctgctgcttctggagattcgaaggtgttttatctgaagatgaaagg

SEQ ID NO: 157363 - DNA, 452 bp, Arabidopsis thaliana columbia
atcaaaatgtcttctcatactgcaactaagtatgatgttttcctaagtttcaaagggcatggcagtcgccacaacttcatcaggtgtctctacaaagaactggttcgaaggagcattcgaaccttcaaagacgacaaagagctggagaatggccagaggttttcgccggagctcaaaagccccatcgaggtgtcaagattcgccgtcgttgttgtctcagagaactatgctgcgtcttcttggtgtctcgatgagctcgtaacgatcatggatttcgaaaaaaagggttccatcaccgtgatgcccatcttctacggcgtggaaccgaatcatgtgaggtggcagaccggagtactcgctgaacagtttaagaaacatgcgagtagagaagatcctgagaaagttcttaaatggaggcaagcattgaccaattttgcgcaactctccggcga

SEQ ID NO: 157364 - DNA, 454 bp, Arabidopsis thaliana columbia
  unsure (1)..(454): unsure at all n locations
cgttgattcaaactcattttccgatcaaactgcatatttttccctctcgagagagcgatgatgtggaaactgaagatcgcggaaggaggtantccatggcttagaaccaccaataatcacgtcggaagacagttttgggagttcgatccgaatctcggtactcctgaggatctcgccgccgtcgaagaagctaggaagtctttttcggataatcgattcgtgcagaaacatagcgccgatctgcttatgcgccttcagttttcaagagaaaatttgattagcccagttttacctcaagtcaaaatcgaagacactgatgatgttacagaggagatggtggaaaccacgttaaagaggggtctagatttctattcaactatacaggcacacgacgggcactggccaggtgattatggtggtcctatgtttcttctcccaggactgataattacac

SEQ ID NO: 157365 - DNA, 226 bp, Arabidopsis thaliana columbia
  unsure (1)..(226): unsure at all n locations
cgtacgcaaaactataaanatcactaanattgctttttcattctatcccgccantnaacataaagcgtcggtttatactaagactggtgcgaaacgactctatgactctggaatctcaaagattccacgcattttccatcactcatctgtcgaactagcaaaccctaaaccactttcctcggacctgctacatataaagacgatcccaacgatcgatctcggagga

SEQ ID NO: 157366 - DNA, 477 bp, Arabidopsis thaliana columbia
  unsure (1)..(477): unsure at all n locations
ggaannnccggggcggccgacgcgtacggtgatgaaattggcatgcatggtcttttctttcatgattgtggccggtccaatcacggccgactctcttatgagtgggggcgccgtcaacaacaacctgncanggtgcattgcctacttgacccgaggtgctccacttacccaagggtgctgcaacggcgttactaaccttaaaaacatggccagtacaaccccagaccgtcagcaagcttgccgttgccttcaatctgccgctaaagccgttggtcccggtctcaacactgcccgtgcagctggacttcctagcgcatgcaaagtcaatattccttacaaaatcagcgccagcaccaactgcaacaccgtgaggtgatgagcgacggtcaaatgaagctactagcggatgtttcgaatattatataatcgatgagataatattaaataaagatgttcgaatggctgtactcttttcaa

SEQ ID NO: 157367 - DNA, 474 bp, Arabidopsis thaliana columbia
  unsure (1)..(474): unsure at all n locations
ggaancccggggcgaccacgcgtccgaatcagcaaaaaccctagaatatcttatagcttcgcttcactttcaagctcgagacggtgggaaagattcctccgaaggccaaagctaaagatgcaggtcccgtagagaggcctattcttggccgtttctcttctcacctcaagatcggaattgttgggttaccaaatgttggaaaatctactcttttcaacactcttacaaagctttcaattccagctgagaatttccccttttgtaccattgagcctaatgaggcacgtgtgaatatccccgatgagaggttcgattggctttgccaaacttacgagcctaagagtgagattccagctttcttggaaattcatgacattgctgggcttgttagaggagctcatgaaggacagggtcttggaaacaacttcttgtcccatattcgtgcagttgatggaatttttcatgttttacgtg

SEQ ID NO: 157368 - DNA, 457 bp, Arabidopsis thaliana columbia
cattttcagagctcagagaaaaagaaagaatgaaaataagcttcgtgctccttcaccttccgaaatcggaaaacaatgcacgccaaaaccgattccgaggtaacaagcctcgcagcatcatcaccagccagatctccacgtagaccagtctactacgtccaatcaccatcacgcgactctcacgacggagaaaaaacagcaacatcgtttcactcaactccagtactaagtccgatgggatctccaccgcattctcactcatctatgggtcgtcactcacgtgaatcatcttctagtcgattctctggctctttaaagcctggatctagaaaagtcaaccctaacgatggttctaaacggaaaggtcacggcggtgagaaacagtggaaagaatgtgcggttattgaagaagaaggtttgttagatgatggtgatagagacggtggtgttcctcgtc

SEQ ID NO: 157369 - DNA, 443 bp, Arabidopsis thaliana columbia
attcagatcgccgaatttgcagtaaggagacgaaaatatggtgcacgtttgctactaccgcaactatggaaagaccttcaagggaccacgtcgtccttacgagaaggagcgtcttgattctgaattgaagctggttggtgagtatggtctgcgtaacaagcgtgagctctggagagtgcagtactctcttagccgtatccgtaatgctgctagagatcttttgactcttgatgagaagagtccaagaaggatctttgaaggtgaggctttgctccgtaggatgaaccgttacgggcttcttgatgagagccagaacaagctcgattacgtcttggctttgactgttgagaactttcttgagcgtcgtcttcagactattgtgttcaagtctggtatggctaagtctatccatcactctcgtgtcctcatcaggcagaggcata

SEQ ID NO: 157370 - DNA, 450 bp, Arabidopsis thaliana columbia
cgggcgcgtgggaaaaaagaaacgaaaaaagtatcttgtttttctcttcagcaagacgcatgaatcgtagtccattttgtctcaactttaggaatctcaaatctccgatttggaaatccggcgacaatggtgagagatattgaagatgagattagagacgagaagaatcctcgtcctcttgatgaagatgatatcgctctcctcaagacttatgggttagggccttactctgcacctatcaagaaagtggggaaagaaattaaggatctcgccaagaagatcaacgatctatgtggtatcaaggagtctgatactggtttagctcctcccagtcaatgggatcttgtatctgataagcaaatgatgcaagaagagcaacctctgcaggttgcgagatgcacaaagattataagtccaaacactgaagacgcccaatacgtcataaatgtc

SEQ ID NO: 157371 - DNA, 424 bp, Arabidopsis thaliana columbia
accgccgtatatccacggccgtcttatcaccggcaacaaccgtaggtttttgttttccggcgcgatggaggtggataagaaggacgagagagaggctgaatcttcggagcaagtggtgaatccatgggaagtgtccgccaaagacggcgggaagatcgattacgacaagcttattgacaaatttggatgtcaaaggcttgacgagtcactgattgatcgtgttcagagactgacttctcgtcaaccacacgtgttcctccgccgtagtgtcttcttcgcccaccgggatttcaatgagattttggacgcttatgagagaggagacaagttctatctctacactggaagaggaccttcatcagaagcattgcatttggggcatttgattcctttcatgtttaccaaatacttgcaagaagctttc

SEQ ID NO: 157372 - DNA, 481 bp, Arabidopsis thaliana columbia
  unsure (1)..(481): unsure at all n locations
gaaaanngggccggcccacgcgtccgcacaactccacgacgagaggaaaaaaaaaacttatagagacaaatctaaatggcgatgatgtgggcgcaacaccgccacgcgcctccctctcctcctccaatctcaacgcgccgtcgccgctgcctcggtctctcacctccacacatcccttcccgctctctctccctccacatcaccgacttcctacaccagacctggtcctccttcgacctcccctcctcctcctggtctctctaaagcggccgaatttgtgatctccaaggtcgatgatctcatgaactgggctcgtaccggatcgatctggcctatgacctttggtctcgcttgctgcgccgtcgaaatgatgcataccggtgctgctcgctacgatctcgatcgattcggtatcatcttcaggcctagtcctcgccagtctgattgtatgattgtcgccggtactcttaccaataagatg

SEQ ID NO: 157373 - DNA, 463 bp, Arabidopsis thaliana columbia
  unsure (1)..(463): unsure at all n locations
gcgtgcggcccgacaacaattgggcagactatatgcgcacaggtgttgtggcaattctgcaaaaccgtgtggcgccttccgaaaagcttcatgcgttgattctggctgagaatatgatgtcaatattgggtgaaaagtggcttctcggcggggtaaaattacccaatgttgatattccagctgataggtgtcttctgttggtattagagtcatcgcatgttgaaatttctgtattgttaaatgatctcgcttacaagaagtatgaagctcctaaagataattcaactgctgaagacattctcttgaagcaacggtatctacccatcgngttttcactggtagaaaagatcatcaaatatatatcatctgctggtgaaaacgaagggactctatctgacgaagctgtctttcaaaaggtgattaaaatacttaatgagacagtaggagcggtgttcgaatatct

SEQ ID NO: 157374 - DNA, 448 bp, Arabidopsis thaliana columbia
catcttgctgccgttgagattatgcaacttaagcatatcatcatccttcagaacaagattgatcgtattcaagagaatgttgccattaatcagcacgaggcaattcagaaatttataatgaacactgttgctgatgctgctccgatcgtccctgtctcagcacaactgaaatacaacattgatgtggtgtgcgagtacattgtcaagaagatcccaatccctgagaggaattttgtgtcacccccaaatatgatagtgattcggtcttttgatgtcaacaaacctggttatgaggttgatgagatcaaaggtggagttccaagtggaagtattctacggtgtgttttgagagtcaaccaatttaatcgaattcgacctggtatctgtaccaaagacgagcgtggcatctcaaaatgcactccaatttactcttgatttatttactttt

SEQ ID NO: 157375 - DNA, 449 bp, Arabidopsis thaliana columbia
ttttccatggacggaccttgacctctctgcttcccttcgtgcattttctctctctgactggcctctctctttctagtggttggttgatcctctgcgtactctgttcttcttctctcttcagataaaacaagtcctgcatattgaagatctgatgtcttatcgattgctaagtgtggataaggatgaactggttacgtcaccttgtttgaaagaacgtaactacttgggtctctctgattgttcctctgttgatagctcaactattcccaatgttgttgggaagagcaatctcaatttcaaagctactgaactgaggctaggtcttcctgagtctcaatctcctgagagagagactgatttcggtttgctgagtccgagaacacccgatgagaagcttctcttcccgttgctaccttctaaagacaatggttctgctactacagggcata

SEQ ID NO: 157376 - DNA, 416 bp, Arabidopsis thaliana columbia
  unsure (1)..(416): unsure at all n locations
gaaaaccgggccggccgcgacgcgtacgntctttctaacttcacacatgacttttttttttttaattcaatcgttttttccccgcacgggttttttacttgttcgggctattcaactctatgataaaaaacctcttttgttctgtcaacaacatagagctattttatgcaaagattgcgattcatcgatccactctgtgaactaacacacaatgaaacactataggtttcttcttacaggggttaagctctctgcaacatcttttgtttacaaacctacttcgaaatcttcttcttcttcttcaagcaaccaacatttctctgtccctggatcatcgagctctaattctcctcctctcaagaaacctctctcatctccttctcatatcaacacgatccaacccttttctaatatca

SEQ ID NO: 157377 - DNA, 448 bp, Arabidopsis thaliana columbia
gaaaacttcgtctctcttctctgcttttccctctcatttcctgtgagataaaggcggggtgtctctccagttattttgctcatccatcgattcttagagttcaaaatggttgatcaagttcagcaccccactattgcgcagaaagctgccgggcagttcatgcgttcaagtgtttccaaggacgttcaagtgggttaccagaggccttctatgtatcaaagacatgcaacctacggaaactactccaatgctgcatttcaatttcctccgacatcccggatgttggcaacaactgcttctcccgtgtttgtccaaaccccaggagagaaggggttcactaactttgcccttgactttctgatgggtggtgtttctgctgccgtcttcaagactgctgctgctcctattgaacgtgttaagcttttgatccagaaccaggatgagatga

SEQ ID NO: 157378 - DNA, 429 bp, Arabidopsis thaliana columbia
ctagctctagatcgtcaaagcacccaaacacataagtgagaggttcatttcacacgaaagtgagcttagaaagatctggcaggactcatcaacaagagcggagacacacttcacattggaagaggcaacaaggaaggtcagcacaagaaggaagaggtacacaagaaacacgttgaccagcacaagagtgtggagcacaaagaaggtattgctgacacgatcaaagacaagatccacggtggtgaaggttaaagacacgacggagaacgcaaaagccacgacggtgagaagaaaaagtagcatgacaagaaggagaagaaacatgatgatgatggtcaccacagcaacagcagcgacagcgacagcgattaatgtgaggaagtgaggaggatctgttgcataaaacagatctggttctggctattatta

SEQ ID NO: 157379 - DNA, 474 bp, Arabidopsis thaliana columbia
gatttttggtggatgatattcccatatgaagatacccaaagaagagtgcgtctacatttccgttaagaccaatgtggcgtgtatggttccatatgggatgcttcttcttgggcaacggaagacggtaaatacaaagccgactataaatatcaacctttcactgctaaatacaccaattttaaagcgctcggctgcaccgcctactcgtcagctcggtgctatccgttgtcggcttcgccataccgttctggcggattaacccgacaacaacaccaagccatgagatgggttcaaacacatagtatggtatacaattattgcaaagattataagcgagaccattctttaacgccggaatgttggcgttaggaaatattcgatgaaagtcccaaagtttgagagttttaatcacattaaagttaataccagaaagagctttgtacaattttgggattttttcattccattattatg

SEQ ID NO: 157380 - DNA, 478 bp, Arabidopsis thaliana columbia
gagcgagtcaccttatcgtctctctatctcctccttcctatatccccttgctctctgggttgttgctcagtgtgctacgtgagagatagagagatggaaggtctgattcaaaccagaggaattctctctttacccgcgaagcccatcggagtgagaaggcttctccaaccctcacatggcttaaagcaaagacttttcaccacaaacttacctgccttgtccttatcctctaatggtcacaagaaatttcaagcctttcagcaaatcccacttgggatttcggtttcccacaaggagagaagcagaggattcatctgcaaggcggaagctgctgcggccggaggcggaaatgtgttcgacgaaggagacacagcggcgatggcggtgtcgcctaagattttcggtgtggaggttacgactctgaagaagattgttcctttagggctaatgttcttttgcatcctcttcaattacacaa

SEQ ID NO: 157381 - DNA, 421 bp, Arabidopsis thaliana columbia
ccgcggcttaggacaatatgatccgaatcgttgaagaaactgtctccttgtgtctatgtttgggtttgatcccacattcctaaagctccagaaattgatcaaaatgggagaagctggtcaatccagagacggagaatctgtcacgcctcttgttggcggtggtaatggggacaatgcggttgcaccacaagtgtttaattctttaccagctcttaatgaagctgcttcttatataactcaagcaacgtcttacttagggagctgtttttctgactattcagtagaatatggtggcaaggatactatttcccacccccatgagttgttacgatcaacttccggggttgacgggaattccccagtgagtgtatgcatttcgcctggtgaaaggttttcaacttcttcagaggcatctacattt

SEQ ID NO: 157382 - DNA, 483 bp, Arabidopsis thaliana columbia
ctcatttctggggtttcacatttcatcttcaccagaatccatcacactctctgaaatctgaaaatgattagcacagtacttcgccgatctatccttggtacgtcaaggcgtactctcgccgcttcggtgacctccattaacgcagctctatttcataaccttgctccagccgccgccacagtctccgatctagcaaatggagctactaatgtcaagtctctcccttcgaattcgagcccttttggtgttaaagtgagagactttcatgttaaatctgtaccgtcggagtttagatcgtcgattgtttcttctgcgggattcgcggctcaagagtatgctccttcttatgagaacgatggagggattggagattcggagagtgttggtagcagcggtggtggtgatgggcttgcgatagctgatcttggtatatctccggagattgttaaagcttttgaagggtgggggtattgagaaactctt

SEQ ID NO: 157383 - DNA, 310 bp, Arabidopsis thaliana columbia
gtttttctctgcaaaactaaagaaacaaaaataagaaaaatcggagaaaccaagaaaaaaggaatgggaagtgtagaagcaggagaaaagaaggctttaggatgggctgcaagagatccttctggtgttctctctccttactcctacactttaaggagcacaggagcagatgatgtgtatataaaggttatatgctgtggaatatgccatactgatattcaccaaattaaaaatgatcttggaatgtctaattatcctatggttcctgggcacgaggtagtaggtgaggtgttggaagtgggatcagatg

SEQ ID NO: 157384 - DNA, 290 bp, Arabidopsis thaliana columbia
cttattgacatctcaaaaaaaatcagttatggttacctcctccgcttggaagctcggggaccaccccaagctccctaagggtaagaccattgccgtaatcgatttagatggttggggtgaatctgtctctgatcagtacaactgtatgcacaacgttgcaacttcagccatggattttcttaaacatggagcttctgttacttggacttttgatcaaagctcacggttctgctgtaggactttctagtgtagatgatttgggaaacagtgtggttggtcattattgtttt

SEQ ID NO: 157385 - DNA, 377 bp, Arabidopsis thaliana columbia
gatagaagcatcaagagccgggaagtggagtcttctagagcatgccttcgatgcagggcttgaagatggagaaatcccgcacccattgttcttcactgaactgttgtgtcatgccacagctaaaggcgatttccaaagagctatcacactgattaacactgtggctctcgcatctttccagattagtgaagaagaatggactgatctttttgaggagcatcaagactggcttactcaagataatcttcataagctctcggatcatcttattgagtgtgattatgtaagtgaaccaacggtctcaaacctctcaaagtcattgaaatctcgatgtgggtcttttttttcttcagcacaaccattgttagccgtagatg

SEQ ID NO: 157386 - DNA, 376 bp, Arabidopsis thaliana columbia
ctaagctacagaagaaggatgcagcgtatagtaacgcttctcttaagcgttcttcatgctagagtggtgacagggcatgcaacgcaaatgggtgtagcagagaatggagactcaaaaccggatagttctaaaaataatccaagctcaagaaaggcgtcttctattctagggaagcaacaaccacttgtctccgaaaagagaagagacttatcagaagatactaccaagaacattccatgtaccactaaaacacatgatgcttgcagtaaaagaataaccgagtttttaaggaagcccgattcatttagagtgggcggggtatgaatcattaagattttctaaatggctttgctttatgatcactagtttttatttt

SEQ ID NO: 157387 - DNA, 418 bp, Arabidopsis thaliana columbia
  unsure (1)..(418): unsure at all n locations
ccggccggaancccggtcgccgacgcgtccgcacttttttcagccgcatcatccttctcccttgtgcgatatcgtttgcgtgagatgtgtcgtaaaagtagctagccaggggtaaagagaagtttcacatcaacattgtggtcattggccacgtcgattctggaaagtcgacaaccactggacacttgatctacaagttgggtggtattgacaagcgtgtgatcgagaggttcgagaaggaggctgctgagatgaacaagaggtccttcaagtacgcatgggtgttggacaaacttaaggctgagcgtgagctgtgtatcaccattgacattgctgtgtggaggttcgagaccaccaagtactactgtacttgtcatgatgctcctgttcatcgtgattttattaagaacattatcac

SEQ ID NO: 157388 - DNA, 462 bp, Arabidopsis thaliana columbia
gtatgatgttaggaagagtgtgattattgtttctgagttcatcggttgttctccatggctgagtggtgcgatccgtgtggatgcgtgaaacatcgatgcagtcactaacgccatgagctctgcaatgacgatgtccgacaaagagaaaaatctgcgccaccagaagcatcataagtacataagctctcacaatgttgcctattgggcgcggagttatgaccaagatcttcaaagggcgtgcaaagatcattacaacaagagattctggggagtcggattcggtctttttttcaaggttgttgcgttagatccgaatttcaaaaggctctgtggtgaaaccatagttcccgcgtataggagaccaagcagtaagttgatcctattggactatgatgggacaatgatggatcaagattcttttgatataatgcccagtggtgatcttaatttgcttttaatcgc

SEQ ID NO: 157389 - DNA, 395 bp, Arabidopsis thaliana columbia
tggtgataaggtgcctgctgatatgcgtgtggttgctttgatcagttcaactttgagagtcgagcgggggtccttaacaggagagagtgaggcactcagcaaaaccaccaagcacgtggatgagaatgctgatattcaaggaaagaaatgcatggtgtttgcaggaaccactgtcgtgaatgggaactgcatatgtttagttacagatactgggatgaatactgagattggaagggttcactcacagatccaggaagctgcacaacacgaggaagatacccctttgaagaaaaaacttaacgagtttggggaaggtctgactatgatcattgggttaatttgtgcgttagtgtggctcatcaatgtcaaaatacttttgtcatgggagtatgttg

SEQ ID NO: 157390 - DNA, 458 bp, Arabidopsis thaliana columbia
  unsure (1)..(458): unsure at all n locations
cggaanaaccgggccgacccagcgcgtgcgttttcagatctcaaaaactttttctcttttccgatttcaatcttctctcgtctgctttcctgaaaggttttttcatcacgttaggcttcacaagcgagctaatgaagctaacgataagaacgataataccatcatcggttccgatttagcatcatctaagaaacgccgtatcgatttcactgaatcttcgtctgataagtcttcttcgattttagcttctggtagtagcaggggttttcacggcgatagcgtcgttcagcaaatcgacatggcttttggtaattcgaaccgtcaggagattgatgaagatctgcacagtcgccaactcgccgtctatggtcgtgagactatgaggcgtctctttgcttccaatgttctcatcttggggatgcacggtcttggtgcccagattgccaagaatcttatac

SEQ ID NO: 157391 - DNA, 449 bp, Arabidopsis thaliana columbia
acgcttaccggtggataccctagtgcacccagagacgtatgaagtggcgtagtaaggcgaccgaaatgcttgggggggagttgaataataagcgtgaggatccggcaaaattccccgaataggttaacccttttgaacctgctgctgaatccatgtggcaggcaagagacaactctggcgaacctgaaaccatcttagtatgccagaggaaaagaaagcgaaaagcgattcccgtagtatgcggcgagcgaaatgggagcagcctaaaccgtgaaaacggggttgtgggagagcaaaaaaagcgtcgtgctgctaggctaagcggttgagtgccgcaccctagatggctagagttcagtagcccaaagcattactagcttatgctctgacccgagtagcattgggcacgtggaatcccgtgtgaatcatcatggaccaccttgcaaggc

SEQ ID NO: 157392 - DNA, 363 bp, Arabidopsis thaliana columbia
  unsure (1)..(363): unsure at all n locations
gcgacaagaagaaaaagatgaagaagaagagtgtcgagacttacaagatctacatcttcaaggggcgggagcaagttcaggccgagatcggaatctccagcaaagcgatggggatcatgaacagtttcattaacgatatcttcgagaagcttgctcaagaggcgtcgaagcttgcgaggtacaataagaaacctacgatcacttctcgggagattcagactgctgtgagattggtgcttcctggagagttggcgaagcatgccgtttctgaggggactaaagccgtcacgaaattcaccagctcttgaataattgagttagggnncttatcatattgatgttgctctgctttagggttaatgg

SEQ ID NO: 157393 - DNA, 419 bp, Arabidopsis thaliana columbia
gttagtcaccaaaaaaaaaaaaaaatctcattttgtttcaatggccgcctccacaatggctggctcctcccctggcgttgggcggaaaggctgtgaacctttcccccgcggcatctgaagtcctcggaagcggccgtgtgacaatgaggaagactgttgccaagccaaagggtccatcaggcagcccatggtacggatccgaccgagtcaagtacttgggtccattctctggcgagtcaccgagctaccttaccggagagttccccggagactacggatgggacaccgctggactttcagctgatcccgagacattcgcaaggaaccgtgagctagaagttatccacagcaggtgggctatgctcggagccctaagctgcgtcttccctgagcttttggctaggaacggagtcaagttc

SEQ ID NO: 157394 - DNA, 409 bp, Arabidopsis thaliana columbia
gcggtttctaagagagattcagaaccaatatgattagatggaagcaaaattctttgaggagagagcaggtcttgaagctaagtgtcaaaagttatatcagcctttatataccaagcgagatgagattgtgaatggtgtggtcgaagttgaaggtgcagctgaagaagtaaaatccgaacaaggagaagataaatcagctgaagagaaaggagtaccagatttctggcttattgcattgaagaacaatgaaattactgcggaagagataactgagcgagatgaaggggctctcaagtatctcaaagatatcaagtggaggtgggttgaagaaccaaaagggttcaagcttgggtttttcatttgatcgagaatgcttactgtaagaacactgtcttgacccagacatatg

SEQ ID NO: 157395 - DNA, 435 bp, Arabidopsis thaliana columbia
atgagaatggtaatgttaagcttgattgtcctgctattggtaaacaatttgctgctgaggagatttctgctcaggttttgaggaagcttgtggatgatgcttcgagatttttgaatgataaagtaacgaaagctgtcatcactgtgcctgcttacttcaatgattcacaaaggacggctactaaagatgctggtcgtattgctggattggaagttcttaggattattaatgagcctactgctgcttctttggcttatgggtttgagaggaaaagcaatgaaactattcttgtttttgatcttggtggtggtacttttgatgtctcagtccttgaggttggtgacggtgtttttgaagtgctttcgacttctggtgatacacatttgggaggtgatgactttgacatgagagtcgttgattggcttgcttcaacct

SEQ ID NO: 157396 - DNA, 470 bp, Arabidopsis thaliana columbia
aaaatgggtgctttcaggtttcaccagtaccaggttgtgggaagagctctcccgcggagggggatgtgcagcctaagatttacaggatgaagctctgggctacgaacgaggttcgtgccaagtccaagttctggtatttcttgaggaagctcaagaaggtgaagaagagtaatggacagatgctcgccatcaacgagatctatgagaagaacccaacaacgatcaagaacttcggtatttggttgaggtaccagagtagaactgggtaccacaacatgtacaaggagtaccgtgacaccactcttaacggagctgttgagcagatgtacactgagatggcatcccgtcaccgtgtcagattcccttgcattcagatcatcaagacagccactgtcccagccaagctgtgcaagagagagagcactaaacagttccacaacagcaagatcaagtttccattggtgttccgc

SEQ ID NO: 157397 - DNA, 450 bp, Arabidopsis thaliana columbia
gcttcaccatatgatcctgattggtactacattatagctgcatctatggcaaggaaggtctggcttattttaggacgttggtgttctatctttccgtagaatctatggtggaagcaagaggaacggtagtcgcccacctcacttttgcaaaagcagtggtggtattgcccgtcacatcctccaacagctggagacaatgaacattgttgagctcgacaccaaaggaggaagaaggatcacttccagtggccaaagggatttgtaccatgtttctggccttattgcaatttaaccttgtagagctggagggggtgttttgttcttcttctacttttgaagccattgttctattagtgtttatcttatcttttaagaattgttaccattttatttcttaagacttgctctcatattgtttaaaaatttatctttttgcccttactttggaca

SEQ ID NO: 157398 - DNA, 463 bp, Arabidopsis thaliana columbia
cggacgcgtgggccggagatggccgcaacatccgccgctgctgcagctgcttcttcgatcgggggtactcgggtggctgccggtatccatcccggttcaggtcggttcacagccgtgttcggtttcggaaagaagaaggcagctcccaaaaagagtgccaaaaagacggtgactacggaccggcctctttggtacccaggcgccatttctcctgactggcttgatggttccttggttggagattacggttttgatcccttcggtttaggcaaaccggccgagtatcttcaattcgatatcgattcactagaccagaatctggctaagaacttggccggagacgtgatcggaacccgtacggaagctgccgacgccaaatcgacgccgtttcagccgtacagtgaggtgttcggaatccagagattcagggaatgcgaactcatccacggacggtgggcgatgc

SEQ ID NO: 157399 - DNA, 320 bp, Arabidopsis thaliana columbia
  unsure (1)..(320): unsure at all n locations
acgcttcattgaagcctgagtgcaaggagtcaattagcacaacaccgttccaaaccgtgggttagagcttttacatgacagagtcgatcacaagagcatcaaagatcatggcgcagtgcagtgccgtgctcttgaaaaagtgagagctttaacttgggttttcacattttctctcttttcgcaaaaataaagatactgattcttcgattgctgtcctttttatagaccttttgtttaagcctgagtatcactgaatttcggttttagtttggggtgaaannaataaccancctcccccaagcccccccggnggggggggg

SEQ ID NO: 157400 - DNA, 410 bp, Arabidopsis thaliana columbia
tagttaatcaatcaaagagaagtaagagaaatggctgattctaactgtggatgtggctcctgctgcgaatgtggtgactcttgcagttgcgagaagaactacaacaaggagtgcgacaactgtagctgtggatcaaactgcagctgtgggtcaaactgtaactgttgatgaaattattatggtctaaaatcatatatatggcagaaaaattggggaaaatatgtgttttatgctaagagatgtgtgtgtgttgttggaataaagacgtgaccgttgtgttgcgtatcaactctcttaagctttgacttttcccagctttgtattttcctatgtatggtaatggtgtgattgtgtaatgttttcatatgtaacgtaaaaaaaatatttatgtgacattgacttttgtgact

SEQ ID NO: 157401 - DNA, 459 bp, Arabidopsis thaliana columbia
acggggagagctcgcttgcagctacgctgttattatcctcgaggatgagggtattgctatgacggctgacaaaatcggcaggttggtgaaagctgctggtgttaccattgagtcatactggccaatgctattcgccaagatggctgagaaacgtaatgtcactgatctcatcatgaacgttggtgctggtggtggaggtggtgcgcctgttgcagctgctgctcctgctgctggcggtggtgctgccgctgctgcttctgctgccgaggagaattagatggactaaccatcataatagagtgtgggtgggggggggtttgtctttttctatttatttctctttatttttcatttcatttttgattttatatttttttttttcgtttaagctatttcttgatttttttctttcttataattatttttttttttttttctttattttatatttttttattt

SEQ ID NO: 157402 - DNA, 272 bp, Arabidopsis thaliana columbia
  unsure (1)..(272): unsure at all n locations
ctctctctaactctcgttttcgattctacatttgctgacaagaagattaggatcgggatcggcggattcggaagaattggtcgtttggttgctagagttgttctccagagggacgatgttgagctcgtcgctgacaacgaccccttcatcactactgagtacatgacctacatgttcaangtcgacagtgttcactgtcaatgtaaacacaatgaactcaagatcaaggtttgagaagacccttctcttcggtgagaagccagtcactgttt

SEQ ID NO: 157403 - DNA, 494 bp, Arabidopsis thaliana columbia
  unsure (1)..(494): unsure at all n locations
gcgtccgctaaagagacgganagtgagagaagagagaaacatttcgagacaaatggccgccgccgctggtcgtgctctcgtcaccatgcaggaccttggatggtgacatgtccaccgatcaatcctccaccgtcgtacttcccgacgtcatgacggcgccagttcgaccagacatcgttaacttcgttcacgcccaaatctccaacaacagccgtcagccatacgccgtatcgaagaaggccggtcaccagacctccgccgagtcctggggaaccggacgtgccgtgtctcgtatccctcgtgttcccggtggtggtactcaccgtgctggtcaagctgcgttcggtaacatgtgtcgtggtggtcgtatgttcgctccaaccaagatctggcgccgcttgcaccgtcgtgtcaatgtcaacatgaagcgtcacgcaatcgtctcagctatcgctgcaactgctgttcctgcgcttgtgatggctcgtggtcac

SEQ ID NO: 157404 - DNA, 476 bp, Arabidopsis thaliana columbia
gagcgcgtacgcacaaagtatgcagctatgttagctgagaatatgaattcacaaggtgctactggttggctcggagcactggttggtctggtggcagttatggtgttggaaacagaatcaagctggcatacactagaaagatcatcgatgcaatccattcgggcagtctcttgaaggcaaactacaagaaaaccgaaatctttggatttgaaatcccaactgagatcgaagggataccttcagagatcttggaccccgtcaactcctggtctgataagaaggcacacaaagatactctggtgaaacttggaggtctgttcaagaagaacttcgaggtttttgctaaccataagattggtgtggatggtaagcttacggaggagattcttgctgctggtcctatcttttagaaaaaccaaactcttaatgatgttgtcgaaaagaaagaaagatctactattattaagaagaataaa

SEQ ID NO: 157405 - DNA, 483 bp, Arabidopsis thaliana columbia
  unsure (1)..(483): unsure at all n locations
gccgggcgtgcgggagctgntagtgaggcaggaactttatggtatgatggtgctttcgacggtntaaggaaagggtgtgtaggacaagccggagatggtattggagcgntctcgtttgtgtacgacaaagcaggtcaggttgtagaaggaaaagaacatggaaaacccacattgcttggatttgaagagtttgagcttgactatccaagtgaatacatcacggcagttgatggcacctacgatgcaatctttgggaatgaaccaatcgtaaatatgcttaggttcacgactaataagcgagtatctattccttttggaataggagctggcacagtcttcgaattcaagaaggacggtcaaaagatagttggtttccatggaagagctggtgatctacttcacaaatttggagttcatgtcgcgccaataaccaaataattatggagattttaagtatcttttgatgatagtttacacactttg

SEQ ID NO: 157406 - DNA, 372 bp, Arabidopsis thaliana columbia
  unsure (1)..(372): unsure at all n locations
cgtatatctgccaagagaacggtctttaccaatttctagcctgagacctantnatgggtccgttacattcaaagtgggctgccctaactaatcctttccttgcatcttgctacaaggctcttagcgaccaccacgtcttgctcgagggtacactcttgaagcctaacatggttactccctgatctgacatccccaaggtttcacctgaagtcatcgctgagcacaccgttcgtgccctttatagaaccttcccagcagcttttccagccattttcttcttattcttatgacagagcgaggaagaagctaccaggaacttttactccattaaccatttttagaccaataaaccatggtcattttcttttttat

SEQ ID NO: 157407 - DNA, 460 bp, Arabidopsis thaliana columbia
gccaagttccctggagtgccatacacattcttctcgcagagacaaggctgcaaagggtctcgttaccaagatgctcatggtccagacaactttgtccctagaattcctctcgctggagggaagaactatgagcctcaaagatgttgggaggatatttttgatgctattagcaatgcaaaacacttgatctacattactggttggtctgtttacgctgagattgctttagtgagggactcgaggaggcctaagcctggaggtgatgtgaccattggtgagctactcaagaagaatgctagtgaaggtgtgagggttcttttgcttgtttggtatgaacagaacttcttgttaatgtgcttgtaaaaagaatggcttcattgtttacttctttattaattataccctgaaatttttttaatgtgtagtttttttccattcggttttttttttcctttattaa

SEQ ID NO: 157408 - DNA, 299 bp, Arabidopsis thaliana columbia
acgataccctttcagcctcagaagtggtgttccttgtgctgcatcttgtgggctttggcgaatgtagcttatcttgggggtgcaacacaagctctcaagacagagaaaaggaacactgcatatgttgatgcggttatgactgtcccggccaaggctatgctacccataagcggaatcaacattgcttttaaccgcgagttggtgggtccagctttggtgcctgcactcagattggctggagaagggaaagtgagattggaaacacttgaagatgtttggtgttggatgtttctgaaaca

SEQ ID NO: 157409 - DNA, 433 bp, Arabidopsis thaliana columbia
  unsure (1)..(433): unsure at all n locations
ccggnnggaancccgggtcggccgacgcgtacgatcgcaggaggtaagagtaagaagaccaaattgactgctcctaagtccgatgatgtgcgaccgaaagcttctcgtgaagcgttaccggtttttggtgaggagatctaacagcaacttcaatgctgtgattctgaaaaggcttttcatgagcaaagtcaacaaagctcctctttcactctctaggcttgtagagttcatgactggcaaggatgacaagattgctgtgttggttggaactatcactgatgatttgagagttcatgagattcctgccatgaaggttactgcctttaggtttactgagagggctgggggttgaatttaaaaaacttttttatgatgcttaacctttgaccagcttgctttcagatcttcatttggacagtacacaatttttttt

SEQ ID NO: 157410 - DNA, 504 bp, Arabidopsis thaliana columbia
  unsure (1)..(504): unsure at all n locations
ccggnnggaancccgggtcggcggcgcgtacgctcatctcctccattattttgatcttatcgtaacagatctctcatctccttcactgggtgggtgtttataccacgggagaatggctgacaaagatgaagcagcgacgcgtggaaatgattgggaagttgtttctcttactgcttcagcttacgctgctgctcctggtcctaaaccagtagtggactcgaaagatgatgatcacaaggaagttactccttgttacgaagctgagacatctcatcccttatacatgtctcgccactttgttttcccaccaactggtcagcttgagaatactagtgacctgaccgaggctagcttaacggggtctcattgcaaggaagggagtgatttgagtctgaaagggttggatttatcagatgatttcggaggacttgagttttccgaggataaaggcaagaaagaagaaatcatttacacgactgcttttatttcttttgacgattaaag

SEQ ID NO: 157411 - DNA, 270 bp, Arabidopsis thaliana columbia
cggacgcgtgggcagtgataaggatctgtttgttgaaacaaagatggcgaaaattggaccggtgagtcctgtggagaagattgttagcatggagaataacagcaagtttattgaaaaggatgttgaaggggtttcatgggaaacagaagaagctaccaaagctgctcctacaagcaactttactgtcggatctgatggtcctccttcattccgcagcttaagtggggaagggggaagtggttctggaagcctttcactggttgcatggtt

SEQ ID NO: 157412 - DNA, 259 bp, Arabidopsis thaliana columbia
  unsure (1)..(259): unsure at all n locations
gcgattcgagaggcttaacaagtctgttgctatttctgcaccaaccacttcatacacgcatgtagacagaacaaatgcgggggagcaggtactatacaaactcggttaaccatgtcaaggatcccttctcgtctatcccagtaggaggaggaggaggtggagaggtaagaaaagaagagggtgaagaanatgatgattaattagaaggtgaatactaattatttggaggcgatagacatattgacaactagattttcga

SEQ ID NO: 157413 - DNA, 325 bp, Arabidopsis thaliana columbia
  unsure (1)..(325): unsure at all n locations
gaatgccaaacccactactaaacaagtctggcaagtttcaccaacagttttttaacaaatacgacttcaaattgaacaatgctattctggcagagtacaaacacttgcccatgtacaatcaaatgagccatatactcaatgttgaatacattgctggacgttctacccaacactcaatcaaactggcccagttgatgcttcaagttcctagagcaaccagttacatgggatccattcnaaagcacaaatactgagaggcaatgaagaacgatgctacagcatcttgtgtctatgtccactattactaagatgaggcaacacctac

SEQ ID NO: 157414 - DNA, 461 bp, Arabidopsis thaliana columbia
gcaaaacaaagatcggagaagatgaagacgattctttcttccgaaacgatggacatccccggcagggttaccatcaagggtcacgctaaagtgatcgaagtcgaaggacctcgcgggaagcttgttcgcgatttcaagcatctcaacctcgatttccagctgatcaaggatccagagactggaaagaagaagcttaagatcgattcgtgtttggaacacgcaaaaccagcgcctccatcagaaccgctcttagccacgtcgataacttgatctccggtgttaccagaggtttccgttacaagatgaggttcgtgtacgcccattttcccatcaacgcctccatcggcggtgacggaaagtctatcgagatccgtaacttccttggcgagaagaaggtgaggaaggtagagatgttggatggtgtaaccattgttcgatctgagaaggtgtaggatgagatt

SEQ ID NO: 157415 - DNA, 435 bp, Arabidopsis thaliana columbia
  unsure (1)..(435): unsure at all n locations
aagaccttcttgctcagtgtggcgagcatcttgagaaaggtgacatccaccagggtccagcggtgcgtgggttagcaatggtggctatgtctnaagaactgggagttgatatggagatccgttctctggagcggatgctacaatacggagaacaaaacattcggcgtgctgtgcctttggcccttggtctcctttgtatatccaatccaaaggtgactgtaatggacaccttgagccggcttagccatgacacagattcggaagttgccatgtcagcaattatatcattgggactgattggcgctggaactaataacgcaaggatagccgggatgcttcggaacctctccagctattattacaaagacatgagtcttctcttctgtgtgcgtattgctcaagggcttgtgcacatgggaaagggtctcttgacac

SEQ ID NO: 157416 - DNA, 388 bp, Arabidopsis thaliana columbia
  unsure (1)..(388): unsure at all n locations
gttttgaagcataaggaaaacatgttgggttttgttgaagaagaagaagacgatgaagagggggagtattactaagaagaaggggaggtaaatgaggaaaaggacgcagagggtaagaggaagagaaagccaaaaacgtctcttgtacaaaagacgaaaagaagctttgatggaggagtactacaagctagattatgaggatacaattggagaattgagaacaaggtttaagtatgcgaaagtacaaccaaacagatttgaactggatacaggagagatacttaccttagatgacgcanagctgaaccaatatgtgccattgaagaaaatggctccttatgtggaaaaggatttggaggtgaataggcataaggtcaaggagcagaaa

SEQ ID NO: 157417 - DNA, 405 bp, Arabidopsis thaliana columbia
  unsure (1)..(405): unsure at all n locations
ggaannncccgggtcggaccgacgcgtaacggaaaacaccaaaaaccaaagattataattttcttttctcaaccatggcttttgtccctcccctgcctgggcgccttaaaggctgtgagggcctgccgcatcagatgtcctcggaagcggccgtgtgaccatgaggaagactgtcgccaagccaaagggtccatcaggcagcccatggtacggatctgaccgagtcaagtacttgggtccattctccggcgagcccccgagctaccttaccggtgagttccccggtgactacggatgggacaccgctggtctatccgccgacccagagaccttctccaggaaccgggagctagaagttattcacaacagattggccatgctcggagccctaggctgcgtttttcc

SEQ ID NO: 157418 - DNA, 474 bp, Arabidopsis thaliana columbia
  unsure (1)..(474): unsure at all n locations
catcaaaggggtttttagggtttcgtcactttctcgataatcctctctctctagaaaggatgagtgcctaacagaaggtggagctcgccnccaaattggaagagcagaagatcgatcttgataaacctgaggttgaagatgatgatgacaatgatgaggatgattccgaggacgatgacgaggcggagggacatgatggggaggccggtggccggtcaaagcaaagcagaagtgagaaaaagagtcgtaaagctatgttgaagcttgggatgaaaccaatcactggtgttagccgtgtcaccgtcaaaaagagcaagaatatcttgtttgtgatatcaaaacctgatgtgttcaagagtccagcttcagatacatatgtgatctttggtgaggccaagatagaggatttgagctcgcagcttcagagtcaagccgcagagcagttcaaggctcccaacctcagcaacgtgattt

SEQ ID NO: 157419 - DNA, 395 bp, Arabidopsis thaliana columbia
ggtttttgtctctagcctcctcaagctttgcatacattcatggcgacccagatcagcaaggagagagggttgtagccggtggtgtgttttacgctgaactcaatgaggttctaaccagagagcttgctgaggatggttactctggtgttgaggttcgcgtcactcctatgcgtactgagatcatcattagagccactcgtactcaaaacgttctcggtgagaagggaaggaggattagggaattgacatctcttgtacaaaagagattcaaatttcctcaggacagtgttgagctttatgctgagaaggtggctgacagaggtctttgtgctattgctcaggctgagtctcttcgttacaagctttttggtggtcttgctgttcgtagggcgtgc

SEQ ID NO: 157420 - DNA, 482 bp, Arabidopsis thaliana columbia
  unsure (1)..(482): unsure at all n locations
caaatttcttcttctcttcttcaagctcatttatcaatggcgtcgtctctatctccaccgggagaagcttcgtatcaccaccgtcataccaaaaggtacacctcctccgcttcctccgcttcctccaccaccaacggaaccgtcgaatcatcggtttccgatttcgtcaaacgtcccaaaatctctcatccgaattacatatcaagttccgagatcgaatcagagttttctcatcacgatccagatttcgcaagaatcaacaacggtagttttggttgttgtccgtcatcaatcctagctttacaacgagattggcagctccggttccttcgtcaaccggatcgattctatttcgacgaactcaaaccaaaaatctccgattctagatctgtaatcaaacggttaataaacgccgagcatgacgatgaagtctcgatcgtcgataacgcaacaaccgcagctgcaatcgntcttcaacaaac

SEQ ID NO: 157421 - DNA, 391 bp, Arabidopsis thaliana columbia
  unsure (1)..(391): unsure at all n locations
cgaatggcgactcttaaggtttctgattctgtttctgctccttctgatgatgctnancaattgggaagcgtttttgaagggtggggtacgaacaaggacttgatcatatcaatcttggctcacagaagtgctgaacagaggaaagtcatcaggcaagcataccacgaaacctacggcgaagaccttctcaagactcttgacaaggagctctctaacgatttcgagagagctatcttgttgtggactcttgaacccggtgagcgtgatgctttattggctaatgaagctacaaaaagattgacttcgagcagccgggttgttatggaattttcttgcacaaggacattaacgtatctgctttactgctaggcaagcttaccatgcttgctac

SEQ ID NO: 157422 - DNA, 430 bp, Arabidopsis thaliana columbia
ggaaagtcataaaacaacctcatatttatcgtattcgacacgtttaagaacaatgaggctagttacattagtggtggcgcgaggtcggaatcaacatcaactcgatgacttctcttgtcgctgagaaagctggttattgggttcagacattagtcggaaaaagaaaagtttggtcgtttaaagatgtgaatcttagcagtggagagaggttcaaggcttggatcgagttcagaagcaaagactctaggaataccattaccatcgcccctgaaaacgttaagaaacctaagaggccttttatccaaggtgggggagtgctcaatgattttcttcttcaaaacatgtacgctggttttgctggttccatgggacgtgccggtgagcgtcactatgtttggagcttgtcttttgaaaactaattaaaccggtt

SEQ ID NO: 157423 - DNA, 465 bp, Arabidopsis thaliana columbia
acgccgcaatctccagagaatagttacagcaacttgcttctcggagctgaggactactctggaggaccgcctgtggtgcccgggcacctacaaatgacactgctgaacttgccggcagccaatcctgacattccatctccgctgccgagacctcagcatgtcattctcaatcatctttacatgcagaagggcaaaagtggtccttctgtggttgcgcttggttccactcaccgatttctagcaaagtatgtaactgtggtgctctacaaatccctgcagaggtgagtgaagatgatgcaattccaatgggtagtgggcatgtggatcctcggcatgctcttatctattttggtgttaaaacgttaactcatggagtatgggtgaggctatatagaaaggagacacacgaagagagttattttcaggcaaagtattccctcgatacagcgaatttttgttgtcttt

SEQ ID NO: 157424 - DNA, 474 bp, Arabidopsis thaliana columbia
  unsure (1)..(474): unsure at all n locations
cgcgtcacgccgcgtcttcatctcagactctccatcttccgttcttccagagttttaccctgtcaggtagagggaatggcatgtcttatttacgtgcgcgtgcgcgacagactcttccggctggaacaacctgtgancggcgcctgcgcttatgcccacctctctgagatcttatctcgaccctcgtttagggaggagaggggacactcttcgggccgattcaagttccttccgataaattgtggggagcccagacgcagagatcgctgcagaacttcgaaatcggtggtgagcgcgagcgaatgcctgaaccaattgtccgcgcttttggcgtcttgaagaaatgcgctgccaaggttaacatggaatacggtcttgatccgacgattgggaaagcaattatgcaagctgctcaggaagtagctgagggaaagctcaatgatcattttccccttgttgtctggcaaactggta

SEQ ID NO: 157425 - DNA, 423 bp, Arabidopsis thaliana columbia
tgctcttgcaaacaaagagacattaatcgcatgtggtcctttcgtgcttccgcttgccaacgaacggaatgtaaagattggttggggcagattcagaacattctgccatatttcagtgtattcaaggtttgcctgaaggcgctctgcgcaagataatcttgactgcatctggtggagcttttagggattggcctgtcgaaaagctaaaggaagttaaagtagcggatgcgttgaagcatccaaactggaacatggtaaagaaaatcactgtggactctgctacgcttttcaacaagggtcttgaggtcattgaagcgcattatttgtttggagctgaatatgacaatatagagattgtcattcatccgcaaagtatcatacattccatgattgaaacacaagaattatctgttcctgcttaaa

SEQ ID NO: 157426 - DNA, 359 bp, Arabidopsis thaliana columbia
ggaagatacactgaagcaaaagagcaagtcatggcgtcgacatcttcctctgcttttctccgtaatgcgttgacttctcgccacgcgtcctttcaaatactcgccagagctctcttctctctccttatcctctcgaaaggctgctgctttcgatgtttcctcagctgctttcacgctcaagagacagagccggagtgatgttgtgtgcaaggctgtatctatcaagccagaagctggtgttgaagggctcaatatcgccgataacgccgctcagcttattgggaaaactccgatggtgtacttgaacaatgtagtcaagggctgtgttgcaagtgttgctgcttagctagagatcaatc

SEQ ID NO: 157427 - DNA, 390 bp, Arabidopsis thaliana columbia
ccggggcggccgggcgtccgaggattcaatcccaaaattgattgggatgcgttttacagtttcctcggaagttctatcgttgcgagattctccaaggagcggggtttgagtaaaatcacgaagttgaaaaggagatttcatgttcattgggagaaaatcagtgaagggaatgatccgaaatttactaggtctagtgattctgaagcctttggattttcttcgatgatttggggacaaggtgaatttggtaatgatgatggtatggataaggagatggtgaaggagcacgatgtaaacggaaatggcgcatctgtaaatgggactgctcgaatagcacaggataactagattgggtaggagattgttaagggagccttaaggaaaccttta

SEQ ID NO: 157428 - DNA, 481 bp, Arabidopsis thaliana columbia
ccacgcgtccgctagcaccttcagttccgtacaacaatggctctccaagctgcctattctcttcttccttctgccatgttaatccaaaaagagggcaaattcaatgcttctctaaaggagacgacttttactggttcttcattttcaaaccatcttagagctgaaaagatatccaccctgttgaccatcaaggaacagagaagacagaaaccgcgattttccaccggtattcgtgcacagacagttacagccacgccgccggcaaacgaagcatcgccggagcaaaagaagactgagagaaaaggcactgcagtgatcactggagcttcgtctggtttaggtttagctacggccaaagctttagcagacacagggaaatggcatgtgatcatggcttgcaggaactttctcaaggccgagaaggcagcgagatctgttggaatgtccaaggaagattacacagtgatgcatcttgatcttg

SEQ ID NO: 157429 - DNA, 467 bp, Arabidopsis thaliana columbia
ctttagtcctctacaccaaaacatgatcaataggtatctcatccgaatattccacgtgtcaagcaagctgtggctaggagggattacacagtccacgtcagctctctagaaacggctcaatgctcttgtccttgacacttttcttccacttcttcttcatcatctttaatcgttgggaaaagtttgatgatacggagtggacaattcttggtgtagaaggagaatctgagagagagagagtcatggaagctctgaaaaccgcaacttttagccctatgtcggtgttatccgagaaaagatcagaaccacgaaagcctttctcgctccctaacctctttccaccaaaatcacagagaccaatctcccaagaaagcttcttgaagagattcaatggtggaattggctcttctaacttctgttctaagcagtgcaacagcttctgctaaatccctgacgtacgaggaagc

SEQ ID NO: 157430 - DNA, 373 bp, Arabidopsis thaliana columbia
aagaatggatcaagttgtgataaatatccagaatggtttgataagactaacggcaagccaaatttaaggaagtgagacagtggacccactccgactccgaggttccaatgccctaatcatcacctttacctccatctccttttctcaggttctcataagtgagtgtacttcaagctgaaattgaaaggactattcaatatcttcatctgttgttaccaatctcttcttgtgtctgctaagtggaaacttttttaacagcttcatcacctcatacgtccttatctgtgtttcaaggtagaggcaaagcccaagcggagttaacccatccttgttcttcacttttatgtccgccccttttatcaaaagaagcttt

SEQ ID NO: 157431 - DNA, 388 bp, Arabidopsis thaliana columbia
gtccgcgtttttaaaataataaggacttgtttatttttccatcgttaaaaggcatttcaaggagagattatttcaggggatggggctgcccctgttgttgttcctccccccgttgctgacccagcgcccatcccagagcacatgcactaaatcactattggagttgactcttatgaaagctcgtgcttattgtggtgttgctcgtggactccatgagtgttctaagcttattgagaagcgtgtggctcaactcgctgtcttgtctgaagactgcaaccatcctgattatgtcaagcttctgaaggctctctgtgcttatcactaattcacgattctttacatttccaacatccaagacccttatcgaatgttctggtctcttcaagat

SEQ ID NO: 157432 - DNA, 461 bp, Arabidopsis thaliana columbia
cggacgcgtggccaaaaacaacaaacgcagttaaactcaaaactcgaaaacgtttcatataggagcggtgctttcttcatgtggagacttcctttactcatccatttctctcttcttctccgcctctatctccgatatctccgccgtctcgcacggctcggatctctccacctctcgtctccgcctcttgctcatacacctacacggaagattcgccgagactgcatcagatcccgcggcgattgacgacggtgccagcttcgctttacgatgttcttgaggttcctttaggcgcgacgagtcaggatatcaaatcggcttaccggagattagccaggatcctgccatccagacctggcgggaactgatcggacttcttcttcatcggcggatgaattcatgaagatccatgccgcttactgtacgctttctgatcctgagaaacgcttcgtttatgatcg

SEQ ID NO: 157433 - DNA, 374 bp, Arabidopsis thaliana columbia
atggtcgttacacggattacactccttgtcatgatcagagacgtgccatgactttgccgagagatagtatgatttaccgagagaggcattgcgctcctgagaatgagaagctccattgtcttataccggctcctaaaggatatgtgacacctttctcttggcctaagagtcgagactatgtgccttatgctaatgcgccgtataaagcattgactgttgagaaggctattcagaattggattcagtatgagggagacgtttttagattccctggtggtggaactcaattccctcaaggtgcctgataaggataatcgatcaagcttgcttttctttgatatcctatgtgagaactggtaccttttcagggactt

SEQ ID NO: 157434 - DNA, 396 bp, Arabidopsis thaliana columbia
cgtccgattctgttcatcttcttcttcataatatgccattgttcatgtctctgtgtcctatcacatagcacgcacgctatctaaggatgggctctcgctctttctcactgagaggacactaaaaaaatggcgatgagacttttgaagactcatcttatgtttctgcatctgtatctatttttctcaccatgtttcgcttacactgacatggaagattttctcaatctcaaatactccatgattggacctaaaggacacgcacttcacgactggattcactcatattctcctgatgctcacatgacttacgacatcgaatcatgttaccacaatacatctcttatctttcttaaccacttgttcactactgtgcttgctacaatttcaccagagaat

SEQ ID NO: 157435 - DNA, 476 bp, Arabidopsis thaliana columbia
acgcgtccggactgcttgacaatcttaaagacgcggtcttagaaatgaaaggctcgatgaaacagatgggggagctggtctcgactggcgcgctcgagtccttcaggttccaaatgagtaacgtgcagacgtggctcagtgcggctttaactgatgaggagacttgtacggacggatttaaagacattcacgatgagccgaggaaggatgacatatgcgcacgggtcgatgacgttaaaaagatgactagtaatgcgttggctctagttaatcgatgtgttgataaggccatacattgatcattttatcattattcactaaatattcttcttcttttttttcttacttgaaaaagaagttattggttaaatgtttttggttatcacgcgtgcatgatagagatataataagataagcctgtttgtgattggctgtaatgaaatagtgatattatgtagtttgctacgctttttgtt

SEQ ID NO: 157436 - DNA, 473 bp, Arabidopsis thaliana columbia
  unsure (1)..(473): unsure at all n locations
cgtccgagcggttccaagagttatttgctcaaacaaagtacatggaggctgctgagcttgctgctgaatctggtcagggcattctacggacacctgatacggtggccaaattccagagtgttcctgtacaagcagggcaaactcctccattgttacagtattttgggacccttttgactagagggaagctcaattcatatgagtctttggaactatctcggcttgttgtgaatcaaaacaaaaagaacctcttggaaaactggttggcagaggataagttagaatgcagtgaagaactcggagaccttgtcaaaactgtggataatgaccttgctctaaaaatatacatcaaagctagagctactccaaaagtcgttgcagcttttgcagagcgaagggagtttgacaaaatattgatttattcaaagcaggntgngtacacacctgattacatgtttttttgcaaacgatac

SEQ ID NO: 157437 - DNA, 344 bp, Arabidopsis thaliana columbia
cgcggacgctttcaactcaaaatctttttcatttctctgtatcctcctcatatttttattcttttgtagtgacgggttgttttagcgtgggggaggcattataacgaacttacaaatccggtttcaaaagatccggtctacgacccgtaaccatcgacttgaaagatggaaccgtagtcaacttttgggtatccaaaaccaaacccgattccaaacccaaacctaatctcctcctcatccacggcctcggagctactgccatctggcaatggtacgacgtatctcgtccgttctcacgttattttaacctttacattcccgagctagttttcttcgtcggatct

SEQ ID NO: 157438 - DNA, 426 bp, Arabidopsis thaliana columbia
gaagaagaagtaatggcttcctctatgctcttctctgccgctgtggttacctccccggctgaggccaccatggtcgctggatggactggtttgaagtcatccgcttctttcccggtcacccgcaaggccaacaacgacattacttccatcacaagcaatgggggaagagttagctgcatgaaggtgtggccaccaatcggaaagaagaagtttgagactctatcttacctccctgaccttactgacgtcgaattggctaaggaagttgactaccttctccgcaacaaatggattccttgtgttgaattcgagttggagcacggatttgtgtaccgtgagcacggaaacactcccggattctacgatggacggtacttgacaatgtggaagcttccattgttcggatgcaccgactccgctcaagtg

SEQ ID NO: 157439 - DNA, 542 bp, Arabidopsis thaliana columbia
  unsure (1)..(542): unsure at all n locations
accggnnncggaannncccgggtcgagcccacgccgtccgagaaaaccagactctcccagagaaggtaagactattggacacnaagtatancttttttcacgtggtcggagaagtacatgaagagaagatgcaannaatggatgaacaacnagcaggaanagtccaaagnccaagagtacacnatccaacatntgtcgctcagatgnnagagtctcagatcctaagncctctatttctncgctggagaaagggatctgcggaaaancctcttaacttagaganngtttgtacttgttnngcatctgaatcgcagcggactaaacgagctagcttgccatggtgatcaagataccaaaacttacagacacaacaagctcaaccactcttggagattactttgcagaggttaacgcaacagtggtacttccaagtggagttcacagtctcccgcacaaaggagggccgtcatcactgatccaacgatggaaatcagatggatcatgtgactgtggaggctgggacacgggatgtaaccttagaa

SEQ ID NO: 157440 - DNA, 424 bp, Arabidopsis thaliana columbia
cattcttctcgtagatctcgagagagagccttaaggaaattaaaaaaggttggattgtgggcgatgggttcttcgtcaggacaacccgaatttgattacttgtttaaggttttattgatcggagattctggtgttggaaagagctctcttttgttgagtttcacatctaatacctttgatgatctttctccaacgattggtgtggattttaaggttaagtatctgacaattggagaaaagaaactcaagcttgcgatttgggatacagctgggcaagagagatttaggacgctaacaagttcgtattacagaggagctcaaggtataattatggtatatgatgtgacacgaagagacacgttcacaaacctatcagacatatgggctaaggaaatcgacctctattcgactaatcaggattgca

SEQ ID NO: 157441 - DNA, 435 bp, Arabidopsis thaliana columbia
gaaaacccggcccgacgcacgcgtacgttcttttcaaatttcacccacacaacttctttattcaacagcaataaccattactgacacgtcttttcttactcaaggcagcgtccactcaccctcacacgatctcgatcactgcgtaagacatcgattttactgaatagaaaggagacatactcgtaatccggagtccacagataatgacttagccaaatactgtaactcaaagtttgagaatccgatctttagcaaggtcaatgcttacttaagtggacttttatctcaagtctcttccgaggaagatttcactattaaacctggtcaagcgacgggtctcatgctttcttatttatgaacaaaatatatccgctttatcgttctagtcactttttttactctccagttctttttataacctatattttatccttt

SEQ ID NO: 157442 - DNA, 472 bp, Arabidopsis thaliana columbia
  unsure (1)..(472): unsure at all n locations
ttttcccatcttttaatcaccatctttattttctttctccagcatcatcatanagggaagtttccttcaacattcaggagagttcatanataatcaaatcagtttgcgatggcccaaaacttgtaagcaaaaggcgggaaaggaggcaatcatcgggatgatttactcgaccatgacaatatcgcaaagattcatgtacaaggtggtcatgaagggattcagtacgtcaagtttgattatgttaagtctgataatctcaagattggtcaacccaaacttggatcaatccatggtctctcgcgttaaggattcactcaaacgtttgatatctatcccaccagtgagtatattgtatccgctgaaatgtttactatgatgaatctaaaggtattattcaagcactttaaattcaaaaccaacaagaagacttccttcatgataggatacgattaaaattgtttgaaattctcac

SEQ ID NO: 157443 - DNA, 393 bp, Arabidopsis thaliana columbia
  unsure (1)..(393): unsure at all n locations
gcgtncgcatcgtcatagaaatcctgctctttcttcgattctcgactaagctttgaaatctgctgggtggttgaaaatggaactacaagatgctatgaatgatgagaatgagaaagcccctgaggcttcggtggttcagaatgatgaagtttccgggaacaatggggatgtagtggttgaagctgaggaaaaggatgggaatgaggttgtagaacccgttgattcaggaaaaagtaaggcagatgacgagtttgttgaaagtctgttggataccaatcaggatttggctaccttcaaaataccggtagaggaaaatgatacggaaaatgtgactgttgaagaaccttctcttcctgcctctgttgaagcaacttcttctggaatgaaaaagcc

SEQ ID NO: 157444 - DNA, 390 bp, Arabidopsis thaliana columbia
cgaacatagcaaaatccaaatcaaattcctgaataaacctctttcgctctcgtcttcgtgttgagatcaacaagaaatggcaacagcaacatcagcttctctgttttcaactgtttcttcatcttactccaaagctagctccataccacattcaagactccaatctgtgaaattcaactcagtccctagcttcaccggtctcaaatcaacctctctcatctccggatctgattcctcttccttagccaagactctacgcggttccgtaacgaaagcacaaacatctgacaagaagccttacggattcaaaatcaacgcttcatacaaagtagcttgtcttggtgctgctggtggtataggtcagcctttatcacttctcatcaagatgtc

SEQ ID NO: 157445 - DNA, 502 bp, Arabidopsis thaliana columbia
  unsure (1)..(502): unsure at all n locations
ggtttcggaanttcccgggtgcgacccgcacgcgnntccggtctcattcnntccctcttcaatcccaatccagagtgtaagatagagacaannnctccatanntcttccgtcagagaggtgctcaaaaaaccgcaccaggtgtgtgtctccctttcttctgtccctcatcctcacataggtggcatgagacattgtattccaccagagggaaaatgcatatgatcacatactctgcttttgatttcaagttgtatatgatccgcaaagccgaatctgtaaatgcggctctcgacgtttctgtaccgctccgagaacccctcactgtccaggaagccgtgcggtactcattgctagcgggcggaaaacgtgtgaggcctctgctctgcattgccgtctgcgagcttgtgggaggcgacgaggctactgccatgtcagctgcttgcgcggttgagatgatccacacaagctctcttattcatgacgatncttcgtgcatggaca

SEQ ID NO: 157446 - DNA, 368 bp, Arabidopsis thaliana columbia
agatcgattgacacgtattgctattgtgtgttcagaccgttgcaagccaaagaaaggtggccaagagtgcaagaagagttgtcctgtggtcaagacaggaaaactttgtattgaggtgactgttggttccaagcttgcttttatctcagaggagttgtgtatcggttgcggtatttgtgtgaagaaatgcccgtttgaagctattcagattatcaatcttccaagagacttggagaaagatacgtcccatcgttatggggcaaacacttttaagttacacaggctcccagttccaagaccagggcaggtgctagggttggttggaaccaatggtattggaaaatcaactgctctgaaaattttggctg

SEQ ID NO: 157447 - DNA, 419 bp, Arabidopsis thaliana columbia
ctttcgtcacgaaagggcgatatgtattgtttctcagtaggaagctcgttactctgatgggattcgattctcaatcctttcatcaaaccgttttgggacttcggattttcatattaagttttcaaagcagtcaattagggtttgtagactaattcggatttggagacggtagcggttatggacgcttttggaatcgggagtagtttaaatcaagctcccgtaactcaggatcttaagaaatttggagataattctacaggtaacacaatgtttgatgcatctcaatatgccttttttgggaacgatgttgtcgaggaggttgagctgggtggattggaagaagaagatgagattttgtctttcactggaatagcagaagacttttcatttgataaggaagaggttggagattctagact

SEQ ID NO: 157448 - DNA, 383 bp, Arabidopsis thaliana columbia
  unsure (1)..(383): unsure at all n locations
gcgtncgtcaaactctgaaatcgttctttcaaatctcttaatcgggatcaagatgcagatctttggtgagactctcaccggaaagactatcaccctcgaggtggaaagctctgacaccatcgacaacgttaaggccaagatccaggataaggaaggcattcctccggatcagcagaggcttattttcgccggaaaacagctagaggatggccgtacgttggctgattacaatatccagaaggaatccaccctccacttggttctcaggctccgtggtggtatgcagattttcgtcaagaccttaacgggaaagacgattactcttgaggtggagagttctgacaccatcgacaacgtcaaggccaagaatcaagacaaggagg

SEQ ID NO: 157449 - DNA, 334 bp, Arabidopsis thaliana columbia
ttctttttccaatccaatctcacatcatttcttttaaatagcaataacccatgttgacagtgtcttttttactgaagccacctacactatccctcacatgatccagatcaccacgtatgcgatcgatgtaattgaatgaaaaggtgcacatcctcgtagttcgtatgacagaccaagacttcgccaaaaacggtcactgaaagtttgacgaatgctaccttgagcatcgacgatgctcacttaaacggacttttaactcaagactcttacgaggaaatatttactaccaaacctgctcaatcgactgttctcaggcttactgctttaagatcaa

SEQ ID NO: 157450 - DNA, 350 bp, Arabidopsis thaliana columbia
ttctttttaaagttcaatcacacatctcctttcttaaatagcaataaccattactgacagtgttcttcttactcaagccaactccactcatcctcacaagatctagttcactgcgaatgcgatcgatgttattgaatgaaaaggagacatactcgtagctcggtgtgacagagaaagacttagccaaaaacggtcactcaaagtttgcgaatccgatcttgagcaaggtcgatgctcacttaaatggacttttagctcaaagctctttcgaggaataatatactagctaacctggtcaatcgactgttctcaggctttcgttttcaagatcaaagagaatcgctttcatc

SEQ ID NO: 157451 - DNA, 394 bp, Arabidopsis thaliana columbia
  unsure (1)..(394): unsure at all n locations
acgcaaaccatcatcatcatcatctcttgttgtctgaagaaaagagttgagcaacanaggaagtttttttcaagcacttgggggttcttcacttacctcctcttttcagacagctagacagatatttggctcaaaaccagttgcgtctgcctcacagaagaagagttcctttgttgttaaagctgctgcaactccacctgtcaagcaaggagccaacagaccattgtggtttgcttcatcgcatagtctctcttacttggatggcatcttacctggtgactattgattcaaccctcttggtctttcagacccataatgttctgtatgattcattgagccaagatggctagcatactgagagatcatcaaccgactgtttctccattttgtgtgc

SEQ ID NO: 157452 - DNA, 465 bp, Arabidopsis thaliana columbia
gttttgaattttgaaattgttcatttccttctctctaccattccccctctctctttccgggtggcaaactcattcagcagcgggcattgattctctctagagctgacaaatccagaatcggatctcaggagacttgaagctcgctcccacgatgaatcagtaccacatctacgaagctattggacatggcaaatgctcgactgtgtataaaggaaggaagaagaagacgatcgagtattttgcctgcaagagtgtcgataagtcgcggaagaacaaggttcttcaagaggtcaggatccttcactcgctaaatcatccaaacgtactcaagttctatgcttggtatgaaacttctgctcacatgtggttagttctggaatattgcggtggtggtgatctcaggacattattgcagcaggactggtaacttgccagagaatctatctattggcttgcttatgatct

SEQ ID NO: 157453 - DNA, 410 bp, Arabidopsis thaliana columbia
gaggctacacactttgcggttgctttcgttgtgcctggctggaataacgagaaagaagcggtgaccgtcactgttctccagatgcttatgggaggaggtggctcattctctgcgggaggtcctggaaaaggaatgcactcgtggctttatcgccgtgttctaaacgaatatcaggaggttcagtcatgcactgcattcactagcatctttaacgacaccgggttgtttggaatctatggttgctcgagtcctcaattcgctgcaaaagcaattgaattagcagctaaagaactcaaagatgttgcaggaggaaaagttaaccaggcacatcttgatcgtgccaaggcagccacaaaatctgcagttctgatgaatttggaatctcggatgattgcagcagaagacattgt

SEQ ID NO: 157454 - DNA, 428 bp, Arabidopsis thaliana columbia
ctcaggatcagatcttagctaaattgagacaagctcaaaatgagtaagcttcagagtgaggccggtcgtgaagccatcactactatcacagggaaatccgaggcaaagaaacgtaactttgtcgagactattgagctccagatcggtctgaagaactatgaccctcaaaaggacaagcgtttcagtggatctgtcaagttaccacatatcccccgtcctaaaatgaagatctgcatgctcggagatgcccagcatgttgaagaggctgagaagatggggttggaaaacatggatgttgagtctctaaaaaagcttaacaagaacaagaaactcgtcaagaagcttgcaaagaaataccatgctttcttggcctctgagtctgtcattaagcaaattcctcgtcttcttggtcctggtcttaacaaggc

SEQ ID NO: 157455 - DNA, 448 bp, Arabidopsis thaliana columbia
ggaggagctcgatccattgattagaagattacaactccacaagtgaagaccggtttgttggtggggttgaacaagggacatgttgttaccagacgtgaattagctcctcgtcctcgttctcgcaaaggaaaaacgagcaagaggacaatctttatcagaaacttgataaaggaagttgctggtcaagctccctatgagaagagaatcactgagcttttgaaggttggtaaagacaaacgtgctcttaaggttgctaagaggaagttgggaacccacaagagagccaagcgaaagagagaggagatgtccagtgttctccgcaagatgaggtctggcggtggtggtgcaactgagaagaagaagtgaacgtcatcttaagtttgtgaatcgctcgtaaagagttatggtttctttgttgcaaatcgtttttatgattcctaagcttctc

SEQ ID NO: 157456 - DNA, 385 bp, Arabidopsis thaliana columbia
tccttttcacagttcaatcacacatcacttcttttcaatagcaataaccatcgctgacgcgctctttctcactcaagccaactccactgatccttacaagatctagttcactgcgaaagcgatcgatgtaattgaatggaaaggagacatactcgtagctggtgtcgacagaccatgacttagccaaagaccgtcactcaaagtttgcgaatccgatcttgagcatggtcgatgctcacttaaatggactcttatctcaagtctcttccgaggaagatttcactcgtaaacctggtcaatcgaccgagctcaggcttaacgttttaagatcaaagagaattactttcatcgttcttggacagtctgtttcgactccagtggcttt

SEQ ID NO: 157457 - DNA, 293 bp, Arabidopsis thaliana columbia
ttcttatcacaacccaatcacacatttcttcttttcacaagcaataaccatcactgacgctttctttctcactaaagccaactccactactccttacatgatctagttcacttccaatgcaatcgctgtacttcactggtcagtttacatactcgtaacacctgtcacagaccatgacttagccaaagaccattactgactttttacgattccaatctctagcaagttctctactcacttaagtgctcttttatctcaagtcactctctagaaagttttcatctgctaacctg

SEQ ID NO: 157458 - DNA, 408 bp, Arabidopsis thaliana columbia
  unsure (1)..(408): unsure at all n locations
ggcctctttcggattaaatctcaaatctagctcaaccatggcgttgctcgtctagaaggcgggatgtttccgtgaatacgagggtcaaagacatgtctcaagccgatttcggtcgtctcgaactcgagctcgccgaagttgagatgcctggactcatggcttgtcgtaccgaattcggaccttctcagccattcaaaggcgctagaatcaccggatctcttcacatgaccatccaaaccgccgtactcatcgaaaccctaactgctctcggtgctgaagtcagatggtgttcctgcaacatcttttgcactcaagaccacgccgtcgcagccatcgctcgtgactccgccgctgttttcgcctggaaaggtgagactcttcangagtactggtggggtaccgagcgtg

SEQ ID NO: 157459 - DNA, 248 bp, Arabidopsis thaliana columbia
ttctttttaaagttcaatcacacatctcttttattaaatagcaataaccaatactgacagtgtccattttactcaacgcaactccactcctcctcacaagatccagttcacttcgaaagcgatcgatgtaactgaatagaaaggaaacacactcgtatccgtattacagaacatgacttagccaaatacggtcactcaaacattttcgaatcctatctttatcatcgcctattcccacttaaatgcac

SEQ ID NO: 157460 - DNA, 427 bp, Arabidopsis thaliana columbia
cgcgtccgtgtcataagcgtttactgtgagtctctcttatttaccaaaggcagagaaaagagataacggacgcaaaaaaaaatggcatggacgctcactcctcaaggcttctccggtgttggacaaatccgaatgggtcaagggacaaagcgttctcttccgtcagccttcttccgcttctgtcgtcctccgcaaccgtgccaccttcctcaccgtccgtgccgctttcttctacgccgatgagcttgttaagacagcgaaaactattgcgtctcccggacgtggaatcttggcgatggacgagtcaaacgcgacttgcgggaaacgtttggattcgatagggctagagaacactgaggcaaatcgttaagctttccggactttgctggtctctgcaccgggactcggacagtacgttttcggcgca

SEQ ID NO: 157461 - DNA, 445 bp, Arabidopsis thaliana columbia
ttcattgatcttctccgatttgaaatcgccggctaaaatggaatcctccggcgacaagcggacgtcttctctttaccctactgttgacacatccaatcccgaagctcctataaaccctagctcatcatcttctactaacaatctctatccttctctcgatatgaatgatctcgctcgtaatctcttccctgaacaaccagagacgagttctattccggtttcagctcctcccgctgcgacggaggaagtaattttgaaaatctccggcgcgattcttcatttaatcgacaaatcttacagcgtcgagctcgcttgcggtgatcttgagatcatccgtattgttcaaggagagaatgttgtcgctgttctcgctagtgtctccgatgagattcaatggcccgtgactaaggatgagaactctgtcaaggtcgatgagtctcattac

SEQ ID NO: 157462 - DNA, 258 bp, Arabidopsis thaliana columbia
ggaattcccggtgacgacgcgtccgaaagaagtgtacaaggttgatgaaatgtttatgaggtggttctacacattatacagaagacgtttttaccctgatggctggctctatataatataccgaaaaaaggatatcgttaaacttcatcatggagaatatgtctccttgggcaaagttgaagctgctctaagtataagtccctatgttgaaaacataatggttcatgctgattcgttctacatttactgtttggcttt

SEQ ID NO: 157463 - DNA, 337 bp, Arabidopsis thaliana columbia
  unsure (1)..(337): unsure at all n locations
cgggggacgcacgcgtccgttctttttaaanttcaatcacacatctcttttcttcaatagcaataaccattgctgacagtctccttcttactgaagcgcagctccactcttcctcacacgatctagatcactgcgtaagcgatcgatgtaattgcatggaaaggagacatactcgtagccggagtccacagagaatgacttagccaaagacggtccactcaaagtttgcgaatccgatcttgagcaaggtcgatgctcacttaaatgcacttttatctcaagtctcttcctaggaagatttcactaccaaacctggtcaatcgactgatctcagtct

SEQ ID NO: 157464 - DNA, 298 bp, Arabidopsis thaliana columbia
  unsure (1)..(298): unsure at all n locations
cgttcggaaaaaatttctaatttactgnaaacatctatctttttctcctctgctgataaattactacgttttctttctaagaggtcggagagcccatcatctccctttctctgctttcatcaatggaggaagaaagatactcaaaagctcaactatcacctttgctaccgacactgtcacttacaatggcactacaagtgcggtagtaaaaagctcttttgaggatccaatggaagttgaggttgctgaatgttacactatttcttcattttattactagattatttatttttttttt

SEQ ID NO: 157465 - DNA, 325 bp, Arabidopsis thaliana columbia
cacacactctctcttatatctctccgtctataaactttccgatcaccgacaaaaaaggaaaaatttttttgcagacgcggacggttcatcatcaatctcatttaacttcctaatctacggtaaaaccggatggatcggtggtttactcggtaaactctgcgaagctcaaggaatcacttacacttacggctccggtcgtcttcaagatcgtcaatcgatcgtcgccgacatctaatccgtgaaacctagccacgtgttcaacgctgctggagtcaccggtcgtcctaatgtttattggtgcgaatgtcacaaagtttatactatt

SEQ ID NO: 157466 - DNA, 401 bp, Arabidopsis thaliana columbia
  unsure (1)..(401): unsure at all n locations
aaacaatcggagaaagttgatggaggagattgttcgttttgtgaacgcttcaatggcatgaaggttcggccatcacattggttgtactttctctttctctctcccttgttgttgttctctagaattcgattcatcgttgttaacgtcgtccattcttcttctttgatcccttctttgatctctcacatttccgattccaatttagggtttcctctcttttcacatttctagggtttttcttgttccctttgtaccggagatggtgaattgaaaggaaaaataaaacgcttttgagagcttatatttgaggttgtttcctcaggttttgtagatctgaggttgctatttttgaattagagnatcttttttttttcttttcaaaatttggttgttgtgatcat

SEQ ID NO: 157467 - DNA, 517 bp, Arabidopsis thaliana columbia
  unsure (1)..(517): unsure at all n locations
cggaanttcccgggtgcgacgcgcatcgcgtccggtgtatcttccaatcttgccgcttcnttttgaaaatcatcttctgccgtgtctcttctannagcttcttcttgacgtgtgaaaatcctcagagtcgcaaatatgcatcgcatccggtactttcgttctgagcgtattcgttgaagcgtgaatctggaagtaaaggttcatcaatggtaatatccaagcttccaaggctgttgctgatatcattcgtacaacattgggtcctcgttctatgttgaagatgcttcttgatgctggtggagggattgttgttactaatgatgggaatgctattcttcgtgagctagatgtcgctcatcctgcagctaagtcaatgattgagttgagccgtacgcaagatgaagaagttggtgatgggacaacgtctgttattgttctagctggtgaaatgcttcacgttgcagaaagcgttcttgagaagaattaccatcccacagtcatatgccgagcttacatc

SEQ ID NO: 157468 - DNA, 473 bp, Arabidopsis thaliana columbia
gttcggagctgtttctaagaaaacaacatgtagttcggatcggagctacgcttgcaaaagtcggaacatgtcgaggggtgggaagaagcatctgaagaggcttaatgcgcctaagcattggatgcttgacaaacttggtggtgcatttgccccaaagccgtcttctggaccacataagtcaagggagtgccttcccctcgtccttatcatcaggaacaggttgaagtatgctcttacctaccgtgaagtgatttcaatcttgatgcaaaggcatatccaagttgatgggaaagtcaggacggacaagacctaccctgctggtttcatggatgttgtgtctatccccaagaccaatgagaacttccgtcttctctatgataccaagggacgttttcgtctccactccattaaggatgaggaagcaaaattcaaactttgcaaggttcgatctatccagtttggacagaaaggca

SEQ ID NO: 157469 - DNA, 417 bp, Arabidopsis thaliana columbia
  unsure (1)..(417): unsure at all n locations
gaagcttgtctctgcaaccaaggaaggtcttaatctggatgagactgaagacgagaagaggaagaatgaatagctcaaggagaagtttgaggnactctgcaaagtgatcaaggacgttttgggagacaaggttgagaaggttatcgtctctgaccgtgttgtggactcaccctgctgtcttgtaacaggcgagtatggctggactgcaaacatggagaggatcatgaaagctcaagccttgagagacagcatcatgtgtggctacatgtcgagcatgtagacattggatattaacccagagagctgcagtatggattatctgataaagagagctttttgcttacaattacgaccagtctgtgtaggatccttttaccttcttttctttttagacccgttcttttaactttttgtttt

SEQ ID NO: 157470 - DNA, 417 bp, Arabidopsis thaliana columbia
attcatggctatttgaatctctcttctctctctctatcaaatatgcaaaacccttgaagggtgacccaggaatcaggcgcgccggtctttgatttcttcccacggctcagaggtttaacctctagaaatcgatccccgtgttcgaattcagatgggtatgctctctcatcgtccaatgccttgtacttcaatggtttccggactttaccctcccgaaggatgggaaaaaccctagcttccttgagcttcaacactaagagcagtgctggttcgagtctccgtaggtttatcagcgattgcaatagctttattaggtttcactgcgataaagtggttccggagagctttgcctccgtcggaggagtcggattatcgagtgatgagaatgggattagggaaaatgggactggtggggtt

SEQ ID NO: 157471 - DNA, 376 bp, Arabidopsis thaliana columbia
ctcgattttggtgattcgaacacgattttacctatccttgagcgatctcgatcccgacgttttgagttgattttattgtcaggagttttcaaaaaatctgttgttaagtggtgaatcggaaaatgtcgcagtcttccgtcgatataccgccaaaaggtgggtttagcttcgatctgtgcaaaaggaatgatatgctgacacagaagggtcttaaagcgccgtcgtttctcaagactggaacgactatcgttggattgatatttaaggatggtgtaatacttggggctgatacacgggcaactgaagggcctattgtggctgataagaactgtgagaagattcactacatggcaccatacatttactgttgtggtgc

SEQ ID NO: 157472 - DNA, 427 bp, Arabidopsis thaliana columbia
cacggcggcgataacaaattacctgctaataaaggaaggaaaagaagaagaagggaagctatgacaacagggaggcttcgcaagagtaacaccagactcccaccggaggtgaatcgcgtgctctacgttcgtaaccttccctttaacataacgagcgaagagatgtacgatatcttcggcaagtacggcgcaattcgccagattcgaatcggttgcgacaaggcgacgaaaggtactgccttcgtcgtttacgaggatatctacgatgccaagaacgccgtcgaccatctctctggcttcaacgtcgcgaatcggtacctaatcgtgttatactaccagcacgcgaagatgagcaagaagtttgaccagaagaagagtgaagatgagatcaccaagttgcaggagaagtatggagtctctaccaaag

SEQ ID NO: 157473 - DNA, 414 bp, Arabidopsis thaliana columbia
gtcagtttccgaggttaaacctaaaaacctcggggttcgacctggggaagctctagccggaaactttgcctttgtgcttcatcatatgccagacgaaagcgtgagcaccgagaatcaccgcgaccggttattgagaatggtgaagagcttatctcccaaggtggtgactcttgtggaacaagagtcaaacacaaacacagccgctttcttcccgaggttcatggagacaatgaactactatgccgcgatgtttgagtcaattgatgtgactctaccaagagatcacaaacagaggattaatgtggagcaacattgtctagcaagagatgtcgtgaacatcatcgcatgtgaaggagctgatcgggtggagcgacacgagctcctaggaaaatggaggtcacgggttgggatggc

SEQ ID NO: 157474 - DNA, 423 bp, Arabidopsis thaliana columbia
cgccagcagccttccattgttcgtcttgttcgttccactcgtcccgacaaggctcgtcagctgggctacaaggccaagcaggggtttgttgtctaccgtgttcgagtcagacgtggtggacgcaagaggccagtgcctaagggtatcgtgtacggtaaacccaccaaccagggagtgacacagctcaaattccagcgtagtaagagatctgttgctgaggaacgtgctggtcgcatactgggaggccttagggttgttaactcctactggctcaatgaggactctacctacaagtactacgagattatgcttgtagaccctgcacacaatgccgtccgaaatgatccatggatcatactggatcttcaaccctgtgcacaagcacagagaactcagaggtctcaccttccaatgaaagaagaa

SEQ ID NO: 157475 - DNA, 287 bp, Arabidopsis thaliana columbia
  unsure (1)..(287): unsure at all n locations
ctcaacattttatccgtcttgtgcaaaggttaatggaaagacaacgtctcgaggaagaccgagaggtctatcttctaaggggggacaagatgcanagcagtcccttttaagcagggctactagtcctcagccagatggtccaacagctggtggtagcttaaaatcaatgaaagacaaacctagttcgcaagataaagagacgcctgaggtctctggtctgaaaactgctgtacctgagggggagataacagtagggtacttaatgaagaaaagttcattaacaaatt

SEQ ID NO: 157476 - DNA, 467 bp, Arabidopsis thaliana columbia
caaataacaattcctctcttcgtttttgtttttcttttggatccaaagctctcttaaatcggtggatcaacaatggccgccgccactgagaatctccctcaactcaaatccgccgtcgatggccttactgagatgagtgagagtgagaagagcggattcatcagcctggtttcacgttacctgagcggtgaggcacaacacattgagtggagtaagatccagactcctaccgatgaaatcgttgttccctacgagaaaatgacccctgtctcccaagatgttgccgagaccaataatctgttggacaaacttgttgtgttgaagcttaatggaggtcttggaacaacaatgggatgcactggcccgaagtccgttatctaagttcgtgatggtttgacatttcttgatctgattgttattcaaattgagaatttcaacaacaagttttgttgtatggttccgttagt

SEQ ID NO: 157477 - DNA, 227 bp, Arabidopsis thaliana columbia
atcagaacaagctgcgacgtaaaatttgtttcgacatccgaaaatggttgtgtaacctgatactatgttgagatgggtcgtaaagaagtattctataggttcatattgtctatgcacgccccagatgctctgagattgcttggtgaagaagtaacgtttgacgaatctagttttcttggtgctttccaatacgttttacagcgtatttatatgttcattactgacat

SEQ ID NO: 157478 - DNA, 396 bp, Arabidopsis thaliana columbia
cgcgtccgcccaaaatggaacattctagggaagcaaatatatggaacagtgtttttgagcgtgctgagaaggtggctgggatagagagaggagagcattagagcaactgtgcttatcgagaccctcccggctgtcttccagatgaatgagatactctatgaactacgtgatcactcagtcggtttaaactgtggaagatgggattatatcttcagctatgtcaaaaccttccaagctcaccctgaccggctcttaccagaccgtgtcctagttggcatgggccagcatttcatgagaagttactctgatcttctcatccgtacttgtcataagcgcggtgtccacgccatgggtggcatggcggctcagattccgataagagattacccaaaagcg

SEQ ID NO: 157479 - DNA, 294 bp, Arabidopsis thaliana columbia
ggaacaaaattgaaggccggaacgttaactcaatatatcaaaagccaaaaacaaagggcttccagtaaaacatcggtctacaaactcccatcacctcacatgaatgagaattaagaaaaccaaaaaaaaaaaagttccaagttcaaagaaattttattcgaaaacgacaaattcagaccataaaaggggatgaacagatgactttccactccctatcattcgagatctgcttcttagcttaagcctttgacatgtggacgatcaagtcgaccacacgggaactgtacccccatt

SEQ ID NO: 157480 - DNA, 448 bp, Arabidopsis thaliana columbia
cttcgaacaaattcgaaaacagcacacggttattgcgtcgcttatactcggagctcctgggcgagtcaccgtcgcattaccgtcctcacggttatcatcttctcactctgaaactgccggtgtctctctctcttgcttcactcatcaattctctctctccacttcctcatccagctcaattccactcgtgtactgtggcagaggtgaccggaaaacagctaaaggaaagcgtttcaatcactcttttgggaatgcgaggccaagaaacaagagcaaaggaagaggaccggagagagtaccggttcctccagcaccaccgaggaaagataagtttgagaacgacgagaagatcaaaatcgatatcgacgagtctctcttctctaattagaaatatgagattcttcaccttgtggctctaactgaaatttaatttgttttttgaaaagct

SEQ ID NO: 157481 - DNA, 476 bp, Arabidopsis thaliana columbia
ctcgttttgataaaaatctctgaatctctccaagctctcttctcatcaaaccatggatcggtggaagtatcgtccagctagttcttacaactctcccttcttcaccaccaactctggtgctcctgtatggaacaacaactcctccatgaccgttggacccagaggtcctatccttcttgaggattaccatctcgttgagaagcttgccaatttcgacagggaacggattccagagcgtgtggttcatgccagaggagccagtgctaaaggtttctttgaggtcactcatgatatctctaacctcacttgtgctgactttctccgagctcccggtgttcagactcctgtcattgtccggttctccaccgttatccatgagcgtggaagtcccgagaccttgagagaccctcgtggttttgcagtcaagttctacaccagagaggggaactttgatcttgttgaaacaactttctgtt

SEQ ID NO: 157482 - DNA, 241 bp, Arabidopsis thaliana columbia
atgccttgtaagcataagtttcatgttcgttgtattgttccctggcttgagcttcataggtctggtcctgtgtgtcgttttgagcttccttctagtgctgatgatgatgatgagactaagactgattccgagagagtgctgagaacaagaaatgttcgggaaacgagtaacggaaacgttgttgagaatgtgggaaatgcggatagaggaagagaggatgaggtgaggagtggaaatggga

SEQ ID NO: 157483 - DNA, 360 bp, Arabidopsis thaliana columbia
ctcttttctctccagatttcgattcccgaggctcgagagaaaaccgtaaatctcttctggggtgactcaatcaaccaaagatgcgtgagattcttcacatccagggtggtcaatgcggtaaccagatcggagccaagttctgggaagtggtttgcgccgagcacggcatctatccaaccggaaggtacaccggagactcagatctgcaacttgagcgcatcaacgtttactacaatgaagcgagttgcggtagattcgttcctcgtgcagtgctcatggatttggagcctgggactatggatagtctcagatctggaccgtacggtcagacctttcgacctgataacttcgtctttggtc

SEQ ID NO: 157484 - DNA, 349 bp, Arabidopsis thaliana columbia
gccaattttccagattgatctctctaattatggcttccatgagtttcgccttgaatcgggctgtggactctcctctaaagccaccttatcagctgacttcgatccatcctctcgccggagttttctaccgccgactagagttggacttaagatctcttccgccgccgaatcggagcctgatctcagtgtcactgtaaatggcctgaaaatgcccaatcctttcgtgatcgggtcgggtccaccgggtaccaactacaccgtcatgaatagagcctttgatgaaagttgttgggccggcatcggcaaaaccgtatttttagatgcatccaaagttatcaacgtgacacct

SEQ ID NO: 157485 - DNA, 315 bp, Arabidopsis thaliana columbia
ggacgcgcacgcgtccgcgcaatcttcgctcttctctttgctctctttctctcaacgcggttcagatccgaggttgattgattcaagctcggctggggggagccctttactctcgcttaccaactttgctccagcatggcaggatctgcaccagaaggcacacagtttgatgcacgtcagtttgaccagaaactcaatgaagtacttgagggacaagatgagttcttcacatcctatgatgatgttcatgagagctttgatgccatgggtcttcaagagaaccttctcaggggtatttatgcttatggttttgag

SEQ ID NO: 157486 - DNA, 366 bp, Arabidopsis thaliana columbia
gaattccggggggacgcacgcgtccgcagaaatcctccttccagctctcaatcatctggaactatggatccgacagacagagtaagcaccattgtaaaagctggtgctggaaagtttgcagtgcttcatcttcgtttcgataaagacatggctgctcattcaggctgtgactttgaaggtggcaaagcagaaaaactggcgctggcaaaatatcgccaggtgatctggcatggaagggtcttatattcacagttcacagattaggagcttagaaacaaatggctgctgtcctgtgacaccataagagattggtttacttgctgcagctttgggttgcaaatacaattactctttttatttaacttt

SEQ ID NO: 157487 - DNA, 419 bp, Arabidopsis thaliana columbia
gcgtccgattctgatcgacgaaaactaatctctctcttttttcttctcatctccttactagagatcgctggcttctataatttgggggaagcactgagaaaatggcggccgtaggagtagattcgaggcgtcctgagacagcgatggaggaaacctgtaacgtgaaaggagcggcggcgaaacaaggggaagggcttaagcagtactatctccagcacatccatgagctccagcgccagcttcgacagaagactaataacctcaatcgccttgaagctcaaaggaatgaactcaattctcgagtgagaatgctcagagaagagttacagctccttcaagaacctgggtcctatgtgggagaagtggtaaaagttatgggaaagaacaaggtcttggttaaggttcatccagaggggaag

SEQ ID NO: 157488 - DNA, 297 bp, Arabidopsis thaliana columbia
gaaaaaacaacagatccgaattttatcttttatcagccggaaaaaatggagaaagcgatggagagacaacgcgttcttcttgagcatctccgaccttcttcttcttcttcgcacaattacgaggcttctctatctgcttctgcttgcttggctggggacagtgctgcatatcagaggacctctctctatggagatgatgttgtcattgtcgcggcacatatgactccactatgcaagtccaaacgtggcaatttcaaggatacatattccgatgatttgctcgcacctgttttgagg

SEQ ID NO: 157489 - DNA, 505 bp, Arabidopsis thaliana columbia
aaaacccgggccgaccgcacgcgtccggagaattagatatttccgacacgaggcattttcctagtggctcatggcgtcatcatctgggcggacttctaagataatcgacggcaaggcgattgctcataccatcagatcagagatcgccgaggaagttcgcggtctatctgagaaacacggcaaggtcccaggactagctgtagttattgttgggagccgaaaggattcacagacctatgtgaatacgaagaggaaagcgtgcgctgaggttgggattaagtcatttgacgtgggcctaccagaggaagtttctgaagctgatcttattagcaaagttcatgaactaaattcaaatccggatgtccatggcatattagttcaactcccattgccgaaacatattaatgaggagcatatattgtgtgcaatcagcattgataaagatgtcgatggcttccatcctttgatattggtaagctagccatgaaaggcagagaaccccctt

SEQ ID NO: 157490 - DNA, 418 bp, Arabidopsis thaliana columbia
ctcgtcgtctctacaccatctagaagacctttatctcatggctgtcgggaagaacaagacccagttcttattttaggaaaggagggaagaacaaggctgttgatcccttcttcaagaaggattggtatgacgtgaaggctcctggttctttcacgaacaggaatgttgggaagactcttgtttccaggactcaatgtaccaagattgcctctgagggactgaatcacatggtgtttgaggattttcttgctgttctacaaaatgattaggattatgcctacagtaagatccgtcttaatgcgggggatgttagtgatagtattttttaaccctatttttttatttgattttaacacttctcatgttttagttatttttttaatattattcatatcatttatattatattcatttcttt

SEQ ID NO: 157491 - DNA, 359 bp, Arabidopsis thaliana columbia
  unsure (1)..(359): unsure at all n locations
gtttcgtgaaaagaatctatcttgagcaatgtctctcagctaaagttgatgtcaccaagggagcggaccctaaggctaaggctgtgaaagctgcnaaagcagtgaaatctggccaaatcgttaaaaagcctgcgaagaagatcaggacaaaggttactttccacaggccaaagacattgaccgttcctagaaagcctaagtacccaaagatcagtgctactccaaggaacaaattggatcattaccagatcctcaagtaccctctcactactgaatctgccatgaaaaagattgaagacaacaacacctttagtcttcattgttgacatccgtgctgacaagaaaaagatcaaagatgc

SEQ ID NO: 157492 - DNA, 447 bp, Arabidopsis thaliana columbia
cttattcagagtgtagaggaggatccaaattaaaagaggaaaaaatggactatatgggtggaccatggagacaccatgtgtggtgtaccaggaccagtgaacataccggaaccggtaatccgggcgatgaaccggaacaacgaggattaccggtcaccagccattccggcgcttacgaaaacattgttggaggatgttaagaagatattcaagaccacatcagggacaccttttctgtttcccacgaccgggactggtgcttgggagagtgccttgaccaacacgttatctcctggagacaggattgtttcgtttctgattggacaatttagcttgctctggattgaccagcagaagaggcttaatttcaatgttgatgtggttgagagtgattggggacaaggtgctaatctccaagtcttggccttaaagctttcacaagacgag

SEQ ID NO: 157493 - DNA, 303 bp, Arabidopsis thaliana columbia
cgtccgctctctctcatttctcggagatattcaccatatcaataaccatggacgctaaaaaaacgctgcccacctatttgaaaggaccgagagaagaggatgataacggcggcgccgctaccatggagccggagaacggagatcagaaaaaggaacctgcttgtttctccactgttattcctggggggtctctgaaatgagtcctatgtggccaggaaaggcacactcattgaaggttgagaaagtttttgttcaagggataatcaaattatcaaggatgtcatttgatttctcagtttttta

SEQ ID NO: 157494 - DNA, 459 bp, Arabidopsis thaliana columbia
agaaaacgaaaaccctagtttcagaggcatctccagacaccgaaaatggcggaaggactggttttgaagggcaccatgcgtgcacacactgacatggtgacggcaatcgccaccccaatcgataacgcagacatcatcgtctcagcttcccgcgacaaatccatcattttgtggaaactcaccaaggacgacaaagcctacggtgtagctcagaggcgtctcactggtcactctcacttcgttgaggatgttgttctctcctccgatggacaattcgcgctttccggcagctgggacggcgagctccgtctttgggatcttgctgctggtgtctccactcgtagattcgttggacacaccaaggacgtgctctccgtcgccttctcactcgacaaccgtcagatcgtctctgcatctcgtgaccgtacgatcaagctgtggaacactcttggtgagtgc

SEQ ID NO: 157495 - DNA, 439 bp, Arabidopsis thaliana columbia
gcgatcactacaacgggaacaaacaaaggtagcttgtttttgggtgatgttgctacccaggtggggtacaacaacttcactgctgatgtcaaagtttccactgattcttctcttttgaccactcttacctttgatgagcctgcccctggactgaaagttattgttcaggctaagttgcccgatcacaaatctggaaaggctgaggttcagtatttccatgactatgctggtatctctaccagcgttggattcacagctaccccgattgtcaacttctccggtgtggttggaaccaatggtttgtctcttggtactgatgtggcctataacaccgaatctggcaacttcaaacatttcaatgctggtttcaacttcaccaaggatgatttgactgcttcccttattctgaatgacaaaagtgagaaattgaatgcattct

SEQ ID NO: 157496 - DNA, 421 bp, Arabidopsis thaliana columbia
  unsure (1)..(421): unsure at all n locations
agaaaaagtaaataaaaaagagatggtttttatcaaagagagagagatggagattccagtgatggattttgcagagttgggtggagagaanagaagcaagaccatgtcacttcttgatcatgcatgtgataagtggggattcttcatggttgataatcatggaattgataaagagttgatggagaaagtgaagaagatgattaactctcactatgaggagcatttgaaagagaagttttaccagtcagagatggtcaaggctttgagtgaaggcaaaacctcagatgcagattgngaaagcagtttcttcatctcacataaaccaacttcaaatatctgtcagatcccaaacatttcagaggaactcagcaagacgatggatgaatatgtttgtcaactgcacaagtttgcagagagactc

SEQ ID NO: 157497 - DNA, 458 bp, Arabidopsis thaliana columbia
  unsure (1)..(458): unsure at all n locations
gctctaaancttttcttcactcnntcttgtctcttcaaatcttcggttacctccgttttagtcgagaacagatgtgcctctgtttcaaggagagttactgtangagagagaccgatcccctgtttcagccacacctgtgaggaaacttcttctccaccgttggatctccttcttttgctcagagactcagagatctccccaaagacttcccctctaccaacgccaaacgtgacgcctctctgcttattgggaaaacgcctcttgtgttcctcaacaaagtcactgaaggttgtgaagcgtatgttgcagccaaacaagaacatttccagccaacttgttgcattaaagacagaccagctatagccatgattgcagatgcagagaagtaaaaactaatcatccttggaaaaacaacacttatagagcctacttcaggaaaacatgggatcagtttggct

SEQ ID NO: 157498 - DNA, 446 bp, Arabidopsis thaliana columbia
catcattctctggatctgttttcgcccttctccacgattcagcagtttcaggcactgttgtgtctatggatgccaaggggggtgacacaatctgctcgagagatgcgatcagctggctccctgacgaggttctgggtaaaatattgtctttaatccccaccaaacaggctgtttcaacatctctccttgctaaaaagtggaggactatctttagattggtggatcatctcgagttagatgactctttctcgctgcaagccgtaaaggaccaaacaccaggtctccgtaaacatgtgaggtttgtgtttacggaggacttcaagatttttgtggatcgaactctggctttgcaatgtgattatccgatcaagaatttctctctaaaatgccacgttagcaagtacgatgagcgtcagaaagcttgtgttggccgctgaatatctaat

SEQ ID NO: 157499 - DNA, 458 bp, Arabidopsis thaliana columbia
ggcgattcgaggaagaaagtagctaacttgtaagataacgatgcggttagatcggggagggtgttatacgacatcgggtcgaaatcgatttcttctgtggctttgattattcaagggatggctgatgaaactctagaatcagctaaagagtatctaaggaacttgattgattcaccggagaagaaggagaagctggtgaatcttcagaaccagattgataaaaggtctgatcttagtaaggagacgttatcgaaatgtgttaaagatcagcttgatatcttggtagctgtaagaacagggcttaagtatttcctctctggtaagatcagaatccctatgaacgaattggtagagatctttctcttcttgagatgtaggaatgtgaattgtaagagtctcttgcctggtgatgattgtgaatgcaagatctgttccaacaacaaaagcttttgtagctc

SEQ ID NO: 157500 - DNA, 322 bp, Arabidopsis thaliana columbia
agaagaagataaaggattcaaaaaaccctaaacactccaatgtcttcttctactctgcaggcttctctttttcttcgtgctgctctccatacttcttcgtttaagctttacccttgtctattctcttcttcttcattgagtttttgtccacaatctctctcaagtttctaccgtctttcttcagttcttcacaactctcgatttcgtccccttccttgctcattgcgtcaagacaatgtcgcttccgattctgatttcattcccaaagactccgcttttgaggttacggattcagctgagagtaatagattggtttccgata

SEQ ID NO: 157501 - DNA, 382 bp, Arabidopsis thaliana columbia
gttgtaacaagatggatgccactacccccaagtacttttaggccaggtacgatgaaatcatcaaggaggtgtcttcctacttgaagaaggttggttacaaccccgacaaaatcccatttgtgcccatctctggatttgagggtgacaacatgattgagaggtccaccaaccttgactggtacaagggaccaactctccttgaggctcttgaccagatcaacgagcccaagaggccgtcagacaagccccttcgtctcccacttcaggatgtctacaagattggtggtattggaacggtgccagtgggacgtgttgagactggtatgatcaagcctggtatggttgtgacctttgctcccacaggattgaccactgaggtcaa

SEQ ID NO: 157502 - DNA, 436 bp, Arabidopsis thaliana columbia
gcgtttcctgttgaggaagtgcacaaaatctgtgtctttgacataagaatggcaaatgcggatcgacatgctggaaacatattgaccgggaaaagcgaagaaggaaaaactcttcttattcccatcgatcatggttattgtttgcccgagaattttgaagattgcacatttgagtggctctactggccgcaagcgaaactcccgttttctgcagacaccattgactacataaactctctagactccgaacaagacattgcgcttctgcaactccatggctggaatgttcctgaagctgtctcacgcactctacgtatctccacgatgctgctgaagaaaggcgttgagagaaacctgacgccatatcaaataggaagcgtaatgtgcagagaaacggtgaacaaagactcagcgattgaagagatagtgagagaag

SEQ ID NO: 157503 - DNA, 408 bp, Arabidopsis thaliana columbia
ctttctctctcctcctaccaagaaatcatcgtcttcttcttcatctattcaggatcgatccggcttgagatttattacaaatgcgtccttctatttgctccaaaagttcgacaatttcgtaggggcaaagatggacgctgattccaagagatttctagctacgcttcgatcccgatctgaaatgttaatgggctttgaagaaatagatggagatgatgatttccaggaggagtttgcttgcccgttctgtgcagaatcgtatgatatcatcgggttgtgctgtcacatagatgatgaacatactttagagtcgaagaacgcggtatgccctgtttgttctcttaaagtgggagttgatatcgtagcacacataacgcttcaccatgggagtttatttaagttgcagcg

SEQ ID NO: 157504 - DNA, 437 bp, Arabidopsis thaliana columbia
tataaacccattttccttcataaatttctaaaataaaaccccttaaactttcattcacatcatccaacccccaatgggtcgaatcttgaaccgtaccgtgttaatgactcttctagtcgtaacaatggccggaacagcattctccggtagcttcaacgaagagtttgacttaacttggggtgaacacagaggcaaaatcttcagtggaggaaaaatgttgtcactctcactagaccgggtttccgggtcgggttttaaatccaagaaagaatatttgttcggaagaatcgacatgcagcttaaactcgtcgccggtaactccgctggaaccgtcactgcctactacttgtcatcggaaggaccaacacacgacgagatagactttgagtttcttggtaatgaaacagggaagccttatgttcttcacactaatgtat

SEQ ID NO: 157505 - DNA, 417 bp, Arabidopsis thaliana columbia
gcggaaatgcctctgtgcctgccatggaaatgaccaatggttcgacaccaactaccattacatcgtggcctgagttgggccctgaggttaacttctcttacgcatcccacaaggcggtgaatgagtacaaggaggccaaggctcttggtgttgacaccgtccctgtacttgttggcccagtctcttacttgctgctttccaaggctgccaagggtgttgacaagtcattcgaacttctttctcttctccctaagattctcccgatctacaaggaagtgattaccgagcttaaagctgctggtgccacctggattcagcttgactagcctgtccttgttatggatcttgagggtcagaaactccaggcctttactggtgcctatgctgaacttgaatcaactctttctggattgaatg

SEQ ID NO: 157506 - DNA, 253 bp, Arabidopsis thaliana columbia
aagaacgctagataagatatcaaatagcttttcagcaccaaattctgccatccggttttggttagattagggtgggatgatgctcgtacttataacaagaacattaaggaatggccacaaagaggtggagctaatggaagtctgagattcgatattgagcttaaacatgctgctcacgctggtcttgtgaatgctttaaacttgattaaggatatcaaagagaaatactttgggatcagttattctgatttga

SEQ ID NO: 157507 - DNA, 426 bp, Arabidopsis thaliana columbia
aaaaccacaattctggcaaaaaagaaaaattcccaaaatctagggttttcttcgcgcccagtgttcacttttcttgtacgaaattctccattcctgccggctgtcgggttttctgaatcgattctccttcaccaacttcttctctggttctgttcgattctgattttttttcaaggtcaattttttcttctctttaaactctgcaaaatcgtgatcgattaaattcacctcagggttttttgatttctgaaagaagttaatcttcttcgaaggcgattgcaaaagagtgctctgctgtgaatgtccactgagatgcaatcaaaaccgggaagagaaaacgaagaggaagtcaataatcaccatgctgttcagcagcccgtgatgtatgcagagccctgggggaaaaaacaactccctttggtgttg

SEQ ID NO: 157508 - DNA, 299 bp, Arabidopsis thaliana columbia
cggacgcgtgggtttatctcccaaaacacaaaacaaaaaaaaatggctttcactgctctgtgaagcgccatcgtcggaacttcattcatccgtcgttccccagctccaatcagtctccgttccctttcatcagccaacacacaatccctcttcggtctcaaatcaagcaccgctcgtggtggacgtgtcacagccatggctacatacaaggtcaagttcatcacaccacaaagtgagctagaggttgagtgtgacgacaacctctacgttcttgatgctgctgaggaagctggaatcga

SEQ ID NO: 157509 - DNA, 420 bp, Arabidopsis thaliana columbia
gcgactattttaaccccattagtgacactcctttcttctccactacactccatttctctttctggttgactcgaccatcgtttctctaatctccgcaactatggcttcatttacgaaaacggttttgatccctattgcgcacggtacggagcctctagaagcggtggcgatgattaccgtgttgcgtcgaggtggtgctgacgtgacggtggcgtctgttgagactcaggttggcgttgatgcttgtcatggcatcaagatggtcgctgatactcttctctctgatattaccgactctgttttcgaccttattgtgctccccggagggcttcccggtggcgagactcttaaaaactgtaaatctttagagaacatggtcaagaaacaagactctgatggccgacttaacgcagctatatg

SEQ ID NO: 157510 - DNA, 421 bp, Arabidopsis thaliana columbia
  unsure (1)..(421): unsure at all n locations
tggattccgagatcgccgtcgactgctctccattgctcaaaatctacaagagtggccgcagggagcgactcatgggtgaggccaccntcccaccttcttccgaaccacaaaacggagtcgtttccaaggacgttgtttattctgccgacaacaacctatccgtccgtatttacctcccggagaaagccgccgccgagaccgactcgaaactccctctcctcgtttacttccacggtggaggattcatcattgagacagctttctctccaacttaccacactttcctcacgacgtctgtctctgcgtcgaactgtgtancggtctctgttgattaccgtcgtgcaccggagcatccgatctccgtcccgttcgatgattcttggacagctctcaaatgggtattcacccatatcactggatc

SEQ ID NO: 157511 - DNA, 433 bp, Arabidopsis thaliana columbia
aattttctctagatccacggatccatttttctcgggaaaattcgaaatccgccgggggagggaaactcattcatggggtgagctaaaacatggggacggagatccctagatcggcggagatatcagaggcattgttaccaccggaatctgagaaaaccgtgacggcgacggaggagcatgtacctgagtggaaagagcagataacgattcgaggattaaccgtgagtgcgttgctcgggactttgttctgtatcattactcataaactaaatctgacggttggaatcatcccgtcgttgaacgtggctgcgggattactcggtttcttcttcgttaagtcgtggactggtttcttatcgaagctagggtttacagtgaagcctttcactaagcaagagaacaccgttattcagacttgtgttgtcgcttgcta

SEQ ID NO: 157512 - DNA, 426 bp, Arabidopsis thaliana columbia
atttcatagctcctaacaaagcaatatcatttccaatttataaaagttaaagccatgggggcatctttctctgggcgcggtatgataatggaagaagaagggagattcgaagcggaggttgcggaagtgcagacttggtggagctcagagaggttcaagctaacaaggcgcccttacactgcccgtgacgtggtggctctacgtggccatctcaagcaaggctatgcttcgaacgagatggctaagaagctgtggagaacgctcaaaagccatcaagccaacggtacggcctctcgcaccgggggagcgttggaccctgttcaggtgaccatgatggctaaacatttggacaccatctatgtctctggttggcagtgctcgtccactcacacattcactaatgagcctggtcctgatcttgctgat

SEQ ID NO: 157513 - DNA, 463 bp, Arabidopsis thaliana columbia
  unsure (1)..(463): unsure at all n locations
gcagaggatctctnctcagacacagtattcttccatctcatggcntngtctctttcttctaccctctctcgtgtgtccccaagaaattctcaccaggctccatccttcatctggtttttctctgaatccaaatgctcgttgtgtcagtgtttcatttggactgaatcactccaacaaacttcatatttctgctcctagaaccaaaaggatcctaaccattcaatctgcatacagagatgatgatggttcaggcagcacaggcctattcgtcggagggtttattttgggcggacttatagtcggtgccctcggatgtgtatatgcaccacagatcagcaaggctatagctggagcagaccgaaaggatctcatgaggaagttgcctaaattcatatatgacgaggaaaaagctttggagaaaacacgtaaggtactagctgagaaaatngctcagcttaacttt

SEQ ID NO: 157514 - DNA, 428 bp, Arabidopsis thaliana columbia
agaaaatggtgggagcgactgtagttagtaaatggactcccctatgtgtggcttcgccgccggagagaaactcggcaggtctgaatccacactgttctccagccagggttaattttagaacagcgttggccgcatttcgtcctcagttccgtcttttctctcgcaattccgcgtctcgccgccgtcttcgcgcttccagctccgccgaatcgggaatcttccttcctcaccttgtagcttctatggaggacgttgaggagacttacattatggtgaaacctgatggcatacaacgaggccttgtaggagaaatcatttctcgctttgagaaaaaggggtttaaacttattgggctcaagatgtttcagtgcccaaaagaattggctgaggagcattataaggatcttagtgctaaatcattctttcct

SEQ ID NO: 157515 - DNA, 344 bp, Arabidopsis thaliana columbia
cggaatcccggtcgcggacgcgtccggcgcgtacaacgccccattctacaccacaaacggtggtgctccagtctccaacaacatctggttgcctcaccatcggagaaagaggtccggttcttcttgaggattatcatttgatcgagaaggttgctaatttcaccagagagaggatccctgagagagtggttcatgctagaggaatcagtgctaagggtttctttgaagtcacccatgacatttcaaacctcacttgtgctgattttctcagagcccctggtgttcaaactccggttattgtccgtttctccaccgttgtccacgaacctggccagtcctgaaac

SEQ ID NO: 157516 - DNA, 279 bp, Arabidopsis thaliana columbia
gtcgtcaatcatagtttcatctcttattattaaaaaaaggcgccggactaaaaaactgatagagagagagccctatacgaaaatctcaagctgataaataatggcttgctcgtctggtcacaagataaccagacgacttgttatacatataacaacacaaaatagcgatgaaatccaacgtgaggattttcaagcttcgtcgagagcgaggactccttgtaagtggcttaccctcaagaagctccaaactagcaccgtctccggtagagatgtggctca

SEQ ID NO: 157517 - DNA, 392 bp, Arabidopsis thaliana columbia
acagatccgaattttatctttaatcagccggaaaaaatggagaaagcgatcgagagacaaggcgttcttcttgagcgtgtgcgaccttcttcttcttcttcgcacaattacgaggcttctctatctgcttctgcttgcttggctggggacagtgctgcatatcagaggacctctctctatggagatgatgttgtcattgtcgcggcacataggactccactatgcaagtccaaacgtggcaatttcaaggatacatatcccgatgatttgctcgcacctgttttgagggcattgatagagaagacgaatctaaacccaagtgaagtaggtgacattgttgtgggtactgttttggcacctggatctcatagagccagtgaatgcaggatggc

SEQ ID NO: 157518 - DNA, 262 bp, Arabidopsis thaliana columbia
  unsure (1)..(262): unsure at all n locations
atantgatcatctaaaggttctatttttcttcttttgttccgtgtattatctcggtatagtaaactaattaaggtgggataaacggtcatagttgttacacttgctctttatttttcattgctaaattggttttgttgacagattgatcttttctaattcaagaatatttctcttaataataaaagtgtactctccattttattcttttactcatataattatttctcacacacaatatatctatttattaaaaattttatt

SEQ ID NO: 157519 - DNA, 256 bp, Arabidopsis thaliana columbia
  unsure (1)..(256): unsure at all n locations
gcgtccctctaacccaaaaatcctcgccgttttaaacttcaccnacattaccttctccgggagtttgccaaacgagctcctggtcaacatctccaaatccncatcactctcctacgactggatccgatccaacatcctcccgttttacccaaccaccaagatccgctaccttctcttcggcaacgagatcctctctttaccagactcttagctcaaatctttactccttcccgcaatgcgcaagatccaacgctcc

SEQ ID NO: 157520 - DNA, 384 bp, Arabidopsis thaliana columbia
cgatgttgtgggagaaaacactgatgatgctgttgaggaagatgaccatgattgggatatgaacttgtcctcatttccaggagttgagactgtttgtgttttccccaaaaacagtgccaaattggttccagctggagaagagactgagctccttgttggtcttaaaaatgaagggaaaactagagtaggtgtgatgggaattagggccagcgttcatcttccttatgatcataagttgttggttcagaatctaaccatgttgagacttaacaatgcatccatcccaacgtctcttcaagcaacattcccatacatctttgcagtcagccagtacttgcagcctggagcatttgatctggtgggttatatcatatacgatgtgga

SEQ ID NO: 157521 - DNA, 451 bp, Arabidopsis thaliana columbia
cgcgtgcggaatgctcaagctcagctggacgaatctgacaggtccaattcctgactttataagtcagcggaagggtctcgagttcttagaactttccttcaatgatctctctggttccattccaagttctctctctacgttacctaaaatcttggctcttgaacttagcaggaacaaacttacaggttccataccagagtcatttgggtcgtttccaggaacagtccctgaccttcgcctatcacataaccagctctccggtccaatacccaaatcattaggcaacatcgactttaaccggatcgatttatcccgcaacaagctccaaggtgatgcttcgatgttgtttggttccaacaaaacaacctggtctattgacttatcaagaaacatgttccagttcgatatctcaaaggttgatatccctaaaacacttggtatcttggacttg

SEQ ID NO: 157522 - DNA, 422 bp, Arabidopsis thaliana columbia
aaaatcagaattacaaacaaaaatggttttgcaaaagcttcctctcattgggctgctggggctcctgaccatcggggggtctccagcaaatgcagatggacctgtttgcccgccgtcgaacaaactaagccgggcaagtttccctgaaggttttttatttggcacggctactgcggcataccaggtcgaaggtgcgattaatgaaacttgtcgtggaccagccttatgggacatctactgtagaagatatccagagaggtgcaataacgataacggcgatgtggccgttgatttcttgcatcggtataaggaagatatccaactaatgaagaatctaaacacagacgcctttagaatgtctatcgcatggccaagaatatttcctcatgggagaaaggagaaaggagtgagtcaagctggtg

SEQ ID NO: 157523 - DNA, 449 bp, Arabidopsis thaliana columbia
  unsure (1)..(449): unsure at all n locations
aacccgggccgggggtgaaagcagcagccacgtcgggaccagtgaaatggcgacttgaatatgtgcaangatcccangaatcgctaagagtgggctcnttccattagagtggagtgcccgacttccctaaaccaggaatcatgtttcaggacataacgacgcttcttctcgacactgaggcctttaaggatactattgctttgtttgttgatagatacaaagataaaggcatatctgttgttgcaggtgttgaagctagaggtttcatttttggccctcctattgcgttggctattggtgccaaatttgttcccatgaggaagcccaagaagctacctgggaaggttatttcggaggagtattcgttggagtatggaacagatacgattgagatgcacgtaggtgcagtagagcctggtgagcgtgctattattattgatgacctcatt

SEQ ID NO: 157524 - DNA, 377 bp, Arabidopsis thaliana columbia
ttaggaccaacgtgtgcaagcctgggagaggagagatagggatagttttcgaacacccgaccagacccggaaaccagtcgggtgggtggatggcaaaggagcgtcagcttgagatttcctcagaatccaacaataccttgaagaaatctgtctcatctcctttcatgaacactgcctcgaagatgtattcaatctctgaagttagaaaacacaacactgctgactctgcatggatcatcgtccacggtcacatctatgactgtacacgtttcttgaaagatcatccaggaggcacagattctatcctgataaacgcaggtacagattgcaccgaagagtttgaagccattcactctgacaaagccaagaagcttttg

SEQ ID NO: 157525 - DNA, 446 bp, Arabidopsis thaliana columbia
agaaaaccaaaaccctagtttcagaggcatctccagacaccgaaaatggcggaaggactgggtttggagggcactatgcgtgcacacactgacatggtgacggcaatcgccaccccaatcgataacgcagacatcatcgtctcagcttcccgcgacaaatccatcattttgtggaaactcaccaaggacgacaaagcctacggtgtagctcagaggcgtctcactggtcactctcacttcgttgaggatgttgttctctcctccgatggacaattcgcgctttccggcagctgggacggcgagctccgtctttgggatcttgctgctggtgtctccactcgtagattcgttggacacaccaaggacgtgctctccgtcgccttctcactcgacaaccgtcagatcgtctctgcatctcgtgaccgtacgatcaagctgtggaacac

SEQ ID NO: 157526 - DNA, 401 bp, Arabidopsis thaliana columbia
agaatagtgtgtgtgagtgttattctccttctccttcttcttcttcttcttctccacaaagaacgaaaacttttttctggtgtctctcaacttgcagaagaagcgatttacacaagtaaccatggagcggctgatttctcatcctcctctcatgatcgtctcagaccttgatcacaccatggttgatcatcaagatcatgagaacctctctcttctcaggttcaattcattgtgggaatacgcttatcgccgtgactctcttcttgtcttctctacagcaagatcacctgttctttataaagaattgagaaaagagaaacctttgttgactcctgatatcattattacatcaataggaactgagatagcattttggtaactccattggttctgatcatgct

SEQ ID NO: 157527 - DNA, 445 bp, Arabidopsis thaliana columbia
  unsure (1)..(445): unsure at all n locations
gcgtccgaaacactttancacggtgcgacaagatggcgagctcagtgacgctgcttctatggagtctgctggttctcggtacactaagcgctattcangccaaaaagtctaaggaaaacttaaaggagatcacacacaaggtttattttgatgttgaaattgatgggaaagcagctggtcgtattgtcatgggtctatttggcaagacagtccccaaaactgtagagaatttccgagctttatgcactggggagaaaggaataggtaagaatgggaaggcgctccattacaaggggagttcatttcataggatcataccaagctttatgctccaaggaggcgattttacacatggaaatggaatgggaggagaatctatctatggtgagaagtttgctgatgagaacttcaaactcaagcatactggtccagggttcttatcaat

SEQ ID NO: 157528 - DNA, 266 bp, Arabidopsis thaliana columbia
  unsure (1)..(266): unsure at all n locations
ggaannggggggncgaccgcacgcgtccgcttcgaacccactttgcccactcttttatcttcaaaactagactcaattccctcgcttgtgttttttcatataccgcgcatactctctaacttcttccacaccaaattcgactctctcctattccactacccatcaatttctcaacccacctacttcttttcccgtctcgttatcagtcccatctccaaagaatacccgccatcttcttcttctcattaccttctcttttaattcac

SEQ ID NO: 157529 - DNA, 454 bp, Arabidopsis thaliana columbia
  unsure (1)..(454): unsure at all n locations
gcgcaacgaccaagacaaaagattcaatattttcaaagacaacttaagattcatcgatctacacaacgaaggcaacatgaacgctacttacaagcttggtctcaccaaatttaccgatctcactaacgatgagtaccgcaagttgtacctcggggcaagaactgagcccgcccgccgcatcgctaaggccaagaatgtcaaccagaaatactcagccgctgtaaacggcaaggaggttccagagacggttgattggagacagaaaggagccgttaaccccatcaaagaccaaggaacttgcggaagttgttgggcgttttcgactactgcagcagtagaaggtataaacaagatcgtaacaggagaactcatatctctatcagaacaagaacttgttgactgcgacanatcctacaatcaaggttgcaacggcggtttaatggactacgctttt

SEQ ID NO: 157530 - DNA, 423 bp, Arabidopsis thaliana columbia
atttctcagtctttttgcacaagaaacatttctcaggaaaacctcaaaaccctaaggtgggggaacaagcaaccgtctgataggtttagtcaacttcctcactttcctcctctcaataccaatcctcggcggtggaatatggttaagcagccgagctaactccaccgactgtttaagattccttcaatggcctctcatcgtcatcggaatctcaatcatggtcgtatctttagctggattcgctggagcttgttaccgtaacaagttccttatgtggctatacctagtagtcatgcttgtcatcatcgctgctcttatcggtttcatcatcttcgcttacgcggttacagataaaggatccggtcgaaccgtacttaaccggtgttatcttgactattatcttgaaaatactcttgttggttg

SEQ ID NO: 157531 - DNA, 434 bp, Arabidopsis thaliana columbia
  unsure (1)..(434): unsure at all n locations
gtttcttctcattcgtcatctagtcccattctctgtccataacaatgaatatcaatggggctccattagggtttctaatttcactcttcttcattgttacttttcttgcaccacaagtcaaatctagggctttctttgtctttggtgactctctcgtcgacaatggaaacaacgactacctcgtcaccactgcccgtgccgacaattacccgtatggtatcgactacccgacccgtagacccaccggacgtttctctaacggccttaacattcccgacattatcagtgaggctataggcatgccgtcgactttgccgtaccttagcccgcatctcaccggagaaaatcttctagtcggtgctaattttgcctccgcaggaattggaatcctcaacgacacntgaattcaattcgtaaacataattagaatttct

SEQ ID NO: 157532 - DNA, 380 bp, Arabidopsis thaliana columbia
tcagacaggactaccaatatgatgaactgatgatttttttttttttttttttggctcaacaacaaactttccattcacccatttatggatacacagtctagctcaacagagcttttaacccaaattggtacaatagaatacaactttagatcataattctcaaaagaaagagattccttagctattctatctgccactccatttccttctcggcttgtatgcacaagcataaaatcctcaaacttgctaagtagatactttatgtcttggataattggattgagacttgacaagcataactttcatgtaaccaaagacacaagttgctgagaatccaccttaaaaatgatcttcctataattgaatcgggagttctagat

SEQ ID NO: 157533 - DNA, 448 bp, Arabidopsis thaliana columbia
aatttccaagcagagatgacggtgaagatatggctcgcgcgtcttggttgtaaacaccgggccttggatcgtgtagttgtcgccgatgaaaaatcgcgcagggacggtaaacaaatcgaggtgttaggcttttatgatccactccaaggcaaagaagatgcggatagagtgagcctcaaattcgacagaatcaagtactggttatctgttggagctcaaccaacagacacagtggaaagcatgcttttcagggccggtttgataccaccaaagcctatggtagtggtcggttcgaaaaatgggcgggggtgtacgagccaacatgtttcacccattacaggtgaaatcttgaactaagagtgttgatgcgttgagcaagaaagagccttttgtgtctgtgtgaaaggagtttatgtaatgttgtttaagacttttctgtttatgtgaa

SEQ ID NO: 157534 - DNA, 446 bp, Arabidopsis thaliana columbia
gcgtgcagttgttactggttccaacaaagggattgggtttgagatttgcaggcaactagctagaggatgggataactgtggttttaactgcgagagatgaaaacaagggtcttgctgctgtccaaaagctcaagactgagaatggtttttctgatcaagccatctcctttcaccctcttgatgtctccaacccagacaccatcgcttctcttgctgcttttgtcaagacccgcttcggcaaactcgatattctggttaataatgccggagttggaggggcgaatgttaatgttgatgttctcaaagctcagattgctgaggctggtgcgccaactgatatttccaagataatgagtgatacatatgagatagtcgaggagtgtgttaaaacaaactactacggcgttaagcgaatgtgcgaggccatgattccctctcttcaatct

SEQ ID NO: 157535 - DNA, 390 bp, Arabidopsis thaliana columbia
  unsure (1)..(390): unsure at all n locations
gtgaaaggttgnacaatcgtacagcctgcttgtgactttttgaatcttaagaagaggatgtggggcatgagaactgtgtgggatgctggaaccttcaaagagctgaggaaacacatgaaagtggaccaccctagtgcgaagccgcgtgaagtggatcctgatgtggagcagaattggagaaggcttgagatcgagcatgaccgggacgatgttatgagcacgattaggtcgacaatgcctggtacagtggtgtatggtgattacgtaattgaaaggaacaatgccaacggttcatattcagacgagggtggtgatgatgattggatcgatgctgcatttggtaggaaattttgtgaatgttttcctttctgttacatgctttttggggca

SEQ ID NO: 157536 - DNA, 344 bp, Arabidopsis thaliana columbia
gcaaaacaaatatcggagaagatgaagactattctttcttccgaaactatagacatccccggcgttgttaccatcaaggtggacgctaaagtcatcgaagtcgaaggacctcccgtgaagcttgttcgcgatttcaagcatctcaacctcgatttccagctgatcaaggatccagagactggaaagaagaagcttacgatcgattcgcggttttgaacacgcaaaaccagcgcctccatcagaaccactcttagccacgtctataacttgatctccggtgttaccagacgtttccgtttcaagatgaggtgcgtgtactcccattttcccatcaaccccttcat

SEQ ID NO: 157537 - DNA, 373 bp, Arabidopsis thaliana columbia
aagaaccatcctaaacattttttcttgaatataaatcagaattacaaacaaaaatggtttgggcggagcttcctctcattgggctgcttttgctcctgaccatcgtcgcctctccagcaaatgcagatggacctgtttgcccgccgtcgaacaaactaagccgggcaagtttccctgaaggttttttatttggcacggctactgcggcataccaggtcgaaggtgcgattaatgaaacttgtcgtggaccagccttatgggacatctactgtagaagatatccagagaggtgcaataacgatgacggcgatgtggccgttgatttcttccatcggtataaggaagatatccaactaatgaagaatctaaacac

SEQ ID NO: 157538 - DNA, 419 bp, Arabidopsis thaliana columbia
gcgtccgctttgttatagagccaacactacatagagactcacacacttgtttcaataattaaatctggatttggctcttcttgtgaactaatgtctgcagttcgtagagtcatggcgttagcatcaaccacgttgccgacgaagtccggattatctctttggtgtccgtcttctccgtctctcgctcgccgatttcccgctcgtttttctccgatcggttctagaatcgcttccagaagcctcgtcactgcttcgttcgctaacgagaatcgcgagtttgtgattgttgtttgaggaaatgctgcgggtggtgctgctagaacttttgtggaaaatggaatggctgatggtcggctatgcattgtgaccaaagaggcttacgcaccttatgagagaccggttttgacaaaagcctactt

SEQ ID NO: 157539 - DNA, 421 bp, Arabidopsis thaliana columbia
  unsure (1)..(421): unsure at all n locations
gcgcaaaaaacctagccagaacaagccctcgtgtgagcgtggacatgtctaacatacaggttgagacaaaggcgagtgcctcggcgtggtctatggtnattgtgactggcagtctacgaggcgaaatcagaatatttcagaattttggatttccagttcgtctatgatgcaaggagaaggttttacaatatcaaaatcctaaggcaaagtgaaattttcccttagtaaaaccatctcctgtcaaaagtgtatagattgagagaaggtttggttcatccactgacttctctcgttttttttttttaccacgctgcttttatttatctgatttgttatctctaaaattcaaatctctagcaaatatatataatgttatttttaagaaagattcaaataggcagaaaaagaaacttcatatacc

SEQ ID NO: 157540 - DNA, 402 bp, Arabidopsis thaliana columbia
cttctctgagtacccaccacttggacgttttgctgtgagggacatgaggcagactggggcggtcggtgttatcaagagtgttgacaagaaggacccaaccggagccaaggttaccaaggctgccgtcaagaagggtgcgaagtgaaccatcctcaaaactctatctgccgcaggtgaatcaaaggacagtgttagttttattacaatagtttggtatttggtcgcgtgtctgtgttcttgtttcgttttctccccgtcagagcgttgttctcgtaattgggttcttgatcggaggtggcggatctacacacacattcttcctgttttttgctttttatttgttttctcattttgaactgttttaaaatttcttgtatatgaatgaatgtttttcctgcggtt

SEQ ID NO: 157541 - DNA, 437 bp, Arabidopsis thaliana columbia
  unsure (1)..(437): unsure at all n locations
ccaaaatcaaaagctgagagctctcttacattgaagctactttcgaagatagcattgagctgattggtaaagagttctagaagcgacnagcatcttctttagttcccgagttttctgcgtttgagaagtctgttctagaaagtaatgggtgacagcgaggccatggtttccgagggttatacttctgctccatatggagactataatgcttctgctgctactgtggaatcgaccgggcaagagactgcaccaattgttgatgcatcacactcggtcaacaatgattctttggtcaatggtactgcgccagttgagaacggaagtgcaacagataatgtggctgtgactgctccagcagcggagcatggagacaatactggctctacactctcaacggaagaggagcgcttgtggaatatngtaagggcaaattcttt

SEQ ID NO: 157542 - DNA, 441 bp, Arabidopsis thaliana columbia
gattattctttatctggatagagaagataatgagctccttggggttttcagttggaactgggtctcgtccaagtgagaaaagaaaatgcagatttcttgtgaataatagcttaaacaaagcagaggctattaacttgagaaacaagcaaaaagtttcttctgatcctgagttaagttttgcccaattatcctcatgtggtagaagagaagcaattattggttttggtttctctattggcttgcttgataatgtttctgcattagccgaaacaacttcttgtgaattctctgtgtctccttctggtcttgctttttgtgataaagttgttggttatggtcctgaagctgttaaagggcaactaatcaaggcacattatgtagggaagttggagaatgggaaagtctttgatagtagctataatcgagggaaacctcttactt

SEQ ID NO: 157543 - DNA, 437 bp, Arabidopsis thaliana columbia
cattgcttcatcattaccaaatcatcaacttaatcgtttctctcaaatttagggttttctgttttctcgaaagtcttgcgggtttctgaatcatctctatctggtttgagggtttcgtttgatatctggagaaaggggtttctggaaacaaggagttcataattcgcgatcttgatctatcgatcttcatttatatataaaagcgtgaatgagattatgatggagtcgaaaggtggtaaaaagaagtccagcagtagtagttccttattttacgaagctcccctcggttacagcattgaagacgttcgtccaaactgtggaatcaagaaattcaaatcttctgtctactcaaactgctccaagaggccatcctgagtaccagcgtgcaccgatcttcataatatagttatagctttctttactttcaggttataatt

SEQ ID NO: 157544 - DNA, 413 bp, Arabidopsis thaliana columbia
catacgcgtatgttcttgtcaagacctacttactttatatccctgctgaggcatacaagggcggaacctcattgaagggggtgactgcctttatatttaatttggttcgtggcaccaagacccttgatttggtcaaggcaggtttccctgagggaaagtacctctttgctggtgttgttgatggaaggaacattttgtccaactactattctgcgtccctaatcaccttgcaggcactttaaggcattgttggtaaagacaagcttatggtctcaacctcctgctctcttctttcacaccggtggtgtgcttatcaatgagactaaacttgatgattaaatcaattcatggttttctgtttgctgccccaaatgtttttcaatttttctcttttctcaatgatttttcttttt

SEQ ID NO: 157545 - DNA, 423 bp, Arabidopsis thaliana columbia
aattcacaaagccatcttctgccttttgctcacctaacagaacagtcagtttaatggggtggcgggataagcaacatcgccggcacgtcaccgcctaatttctccatagcgcggtaacctcaatctcttcctcaatcattcctctcttccctcccaaaacggcgccgtctcgtgtatgcctcccacttagattctcggtatcagacgatgtctcgtcccctttcgaatcgacggtcaagagcacatcatccgcgtcctcctccggccttaattcaacggttaggatatcatctctcagctccgatgggaaacgcggtggacctgctttcgtcggtcaggtgtttagtatgtgtgaccttactgggactggtctaatggctgtttctactcacttcgatatttctttcatctccaagagaacac

SEQ ID NO: 157546 - DNA, 435 bp, Arabidopsis thaliana columbia
cttccccaaattcccaaatccctcacttcctccaccgatctccgtagcaaagcggtatcaggctcctccgccaccggcaaatccttagctttaatcgccgctttcgctcctccgtcgatggcggaggcgatggagaaagcacagctcttcgatttcaatctcacgcttccgatcatcgttgttgagtttctcttcttgatgttcgctctcgacaaggtctattactctccgcttggtaacttcatggatcaaagagacgcttccatcaaagagaagctcgcgagtgttaaggacacttcgactgaagtaaaggagctcgatgagcaagccgccgccgtgatgagagcagctagggctgagatcgccgccgcgcttaacaagatgaagaaggagactcatgttgaagtcgaggagaagctagcggagggaaggaag

SEQ ID NO: 157547 - DNA, 433 bp, Arabidopsis thaliana columbia
  unsure (1)..(433): unsure at all n locations
gctccttacaatcaagctgcttatcaacagcatcctcagtttcaatacgctgcttatgaggagcagcagcagcaacatcaccagagtcagcagcagccacgcggtggatctggtggtgatgatgtcaagactctttgggttggtgatcttcttcattggatggatgagacttatctccatacctgtttctctcacaccaatgaggtttcttctgtgaaagttatacgcaacaagcaaacttgtcaatctgaaggatatgggtttgttgagtttctttcacgttcagcanctgaagaagctcttcagagctttagcggtgttacaatgccgaacgcggaacagcctttccgtttaaactgggcatctttcagtactggtgagaaaagagcatcagagaatggtcctgacctatccatatttgttggagatttgg

SEQ ID NO: 157548 - DNA, 443 bp, Arabidopsis thaliana columbia
gagatttaatacaaaagaaagagaaaaaagaaagatatggcaggactcatcaacaagatcggagacgcactccacattggaggaggcaacaaggaaggtgagcacaagaaggaagaggaacacaagaaacacgttgacgagcacaagagtggtgagcacaaagaaggtattgttgacaagatcaaagacaagatccacggtggtgaaggtaaaagccacgacggagaaggcaaaagccacgacggtgagaagaaaaagaagaaggacaagaaggagaagaaacatcatgatgatggtcaccacagcagcagcagtgacagcgacagcgattaaggtgaggaagtgaggaggatcgcttgaataaaacagatctggttctggctattattaattaatgttgctgtatgttcttatcatcttagagagaggttaaagacaggaga

SEQ ID NO: 157549 - DNA, 391 bp, Arabidopsis thaliana columbia
gcgaccttatgctgtatggacaccagagagtattaggaccaagtcacttacgtattatccatctgagacactacagaatagtggaagtctgtatgctcatatcttttttgctcgatctggatttcccattgaccccactgatcctgaatatcaacctcttaatagttttagtaggacgcatgctgtggcgacttactttccaaagcagaaaaaaaataagaagaagagtctcttgggcagtcccaaagactctgatgaatccgaacctgaagttgagaaagttggagataagaaatcagatcccaaggaagaggtccctgtggaatggatatccctctggaaacctaatgtcacgattaacctggttgatgattttactcactattcacag

SEQ ID NO: 157550 - DNA, 334 bp, Arabidopsis thaliana columbia
  unsure (1)..(334): unsure at all n locations
cccccggaannccggggcgccgacgcgtggcgctccagagccgttttctcttcttcttctttctcctcgcgccgtctctgaaactccatcatcgtatcagtcaaattgcttgctggtccaaattgaaaaacaatggaattggattcggagaacaaattgttgaagacgggtttggttatagtggcgacacttgttatagccaaactcatcttctctttcttcacttctgattctaagaagaagcgtcttcctcctactcttaaagcttggcctccattgcttggaagacttatcaaattcttgaaaggacctattattatttctacagaggcat

SEQ ID NO: 157551 - DNA, 405 bp, Arabidopsis thaliana columbia
gcgtccgaaaaaaaaaataatcaaatcctcctcctctgcttcaccaccaaaaagcatattcttctctgggcgtctccggttaatcagaatctctccgtgtgaatcgtttgtgaatggtggaaactaatccgatcggtggtaagtttacgctctccctttccatcaaaagggcgagcttttctcttcctctctcgacatcctctgttttcgctttcggatcttgcaaagaaggctggtactttcgctgccttggcctcgacccgtgaacgattcgcccctaaaattcacaacccggaaccctaatttcctaaagagtgggtctttttttattgattctgttacttgtgagatttgctctgttttttgttctctcgatttcgaagatgttgctctacaacaagcaga

SEQ ID NO: 157552 - DNA, 303 bp, Arabidopsis thaliana columbia
ctgctctcagatctcgttaacctcaacctcactctatgccaccgggaaaatcatcgccgaatgcatattgatcggtggatctggaatggatatcaaaagcaaagccaggacactaccaggaccagtgactgatccatcaaagcttcccaagtggaactacgacggatccagcaccggtcaggctgctggagaagacagcgaagtcattctataccctcaggcaatattcaaggatcccttcatgaaaggcaacaacatcctggtgatgtgtgatgcttacacacccaactgttgtattctatt

SEQ ID NO: 157553 - DNA, 431 bp, Arabidopsis thaliana columbia
gcgtccggtgataatcacggcgacaacaacaatggctttctttcctaatcctctctctctaagcgtgggcgagcctgctttcgaggctgggcttcaagattccggttacctcgagctcctcgatcaccgcacctccgccgctgcagctgccgcttcctcctccgcctccgtttcatcctcagctgccgcaacttctgcggcatctgacgatgtcgtttcatccattaccggtggatgcttcgcttctctcttatctcgactcgtcactgtctcttcttttcttactattaaccctttctctaagctctgcggcgatgatttttcccgagatactacaccgtggaccaccggtttcatcggcaattgagactcttattcgttcccgtcgtctttttagcaagcgagaatgagagttcatgagaatatcaaac

SEQ ID NO: 157554 - DNA, 429 bp, Arabidopsis thaliana columbia
cgaatacggtaacgtatagccatttgattcacgggttttgtaatgaagatgattgggaggaagcgaagaagttgttaagattatggtgaacagaggatgtaagcctgatagtgagtgttacttcactcttatatattacttatgcaaaggaggagactttgagacggctttgagtctttgtaaagagagtatggagaagaattgggttccgagttttagtatcatgaagtcgcttgttaacggactagctaaggattcgaaagtcgaagaagcaaaggagcttattgggcaagtgagagagaagttcactagaaacgttgagttgtggaacgaaatctaagccgcattaccgcaatgaataaaaagataagttccgagatcggttttttaaaaattttacgaaattttctttctccattttgtagcaat

SEQ ID NO: 157555 - DNA, 370 bp, Arabidopsis thaliana columbia
  unsure (1)..(370): unsure at all n locations
cgtactttgacaagcttgcagatgccatggttacatggattgaagcttgggatgagcttagcccaccagcagccagtggcaaagcttgagagcagtatgagccaaaaagaaaaagccaccaaagttttggttatttttagctcaaattatcgttacttttaaatttctgattttacgaacctttcttgctttttttacacatttgagtagttttcatcatcagtactttctcattgtccggttatggtttttgcatttggtttaaatatcaccggtttatttataaacagtggtggattagtagtactattttctgagtttttttctttgtttcattaataaaaaggccttttcnnnnnaataaaaattt

SEQ ID NO: 157556 - DNA, 441 bp, Arabidopsis thaliana columbia
ggcgctgtaaatcaactgagaaaatggaaccctccataggaacaacctaaaacacgccggagaaatcaagtgctccgagtgctccagccaccatatgcctgccgcctttccttccttccggatgctgcacaaactgcggcggaccaacgatttcagaagcaccaccaccactagcttcattcccagagatgtcaccaccaccaaactatcgtccgatccgagctccagcaatcaatctcccacacaactcccacacgaaacaaatttcgcggcgtggttgtattgtttagctaggatggggatagtgaaagaagaggattatcatagtttggttgctagggtttttgttaagtatttggagttgatgaggaaattgcaaatggtttattggttagaaccagctggatctcatggagtttggggacttgatgattaccaatt

SEQ ID NO: 157557 - DNA, 429 bp, Arabidopsis thaliana columbia
atttactgttctgtttcactttctctctctctgtatactctctaaatgatggcaaagaactgtaatttagtcagtggtgctatgtgtatttttggtattgaccctctttaacaaacccatcaccgtcgccgggcagaatattccggcggtgggcttgttcacctttggtgactccaacttcgacgccggaaacaaacagactctcaccaaaaccttactccctcaaactttctggccgtatggaaaatcccgagatgatcccaacggcaaattctccgacggcctcatcgctccagacttgctcgctaaattcatgaggattccgatcgtgatcccgccggcccttcaaccgaacgtcaatgtctcacgtggagctagtttcgccgtcgctgatgctactctactcggagctccggtggaatctttgac

SEQ ID NO: 157558 - DNA, 436 bp, Arabidopsis thaliana columbia
  unsure (1)..(436): unsure at all n locations
cggacgcgtgggtaaactcaatgatatggcaactcaaaaagagaaaccttcctccaggtggttcaaatggttttgcaccaaaaccttaaagttaaaccttagtttccaaaaccgacgaagatcaccaaaatcaaactcttcgtcaaccttaaactctccaagaagcaacagtgatgacaacaacaacataaagagtcaccaggcctccaaagaagagctccgtcaagtcttcagccatttcgacagcgacggcgacggtaagatctcagcctttgagctcagacattacttcggctctgtcggtgagtatatatctcacgaggcagctcaagaggcgataaacgaagttgacactgacgcagacgggtctctagggtttgaggactttgttggattgatgacaagaagagatctntacggtgacggtgaagttgat

SEQ ID NO: 157559 - DNA, 427 bp, Arabidopsis thaliana columbia
cttgctttgagaattcccaaggtccttataaactctacttcaaaatctaatgagaagaggaacttttcttctcaatgctcttgcgaaataaaactacgaggctttcctgttcaaacaacatctatccctttgatgccgtcccttgatgcagctcctgaccatcacagtatttccactagcttttatcttgaagaatctgatttaagagctcttttgacacctggatgcttctatagtcctcatgctcacttggaaatctcggttttcacgggtaaaaagagtttgaattgcggtgttggtggcaaaagacagcagattgggatgtttaagttggaggtaggtcctgaatggggagaaggaaaaccaatgattcttttcaatggttggatcagtattggaaagaccaagcgggatggtgctgcagagc

SEQ ID NO: 157560 - DNA, 444 bp, Arabidopsis thaliana columbia
  unsure (1)..(444): unsure at all n locations
acgcgnntccgggtgaaaagaaaggagactttgancttcttctgggatgtaactttcttctnngcacttcttctcattagagcgctcgcgtgtgttaaaatagattgtggagatgnngcgataggaaaccctccagaagtagcaaccttattgtnggaaggangaacccactgaagccgagtccctcttaatggaaaccgagtctcagnttaagttctgacttaacgaagagtcttgatctcggctgaagtgaaggaagcccaaaanggataataacccaagaagaagaangatggacctgaaaggtaaatcaatttcgtgtttttgatagatcttgtagttgaagtatgtaattatgacgggaaaaagatggaactttggtctctttcgtgtgttcttgtttattactagtttagattaatcaatctggttatgtcatcagag

SEQ ID NO: 157561 - DNA, 429 bp, Arabidopsis thaliana columbia
aaaattcttcttctactaacttacgcttcaatggcgactccaactccatctctatgtcctcctgcattgaatctctggataatcttatcagaatcaaaacgaatcatcaacgcacactcacgtcacttcctagctctctccgttctcttcctcctccctctctgcttctccatcacagtttacccttccgtcttccttctcatcaccgatcaatcatccgcttctcacaacaccgtctctctcctccgcggcggactccacaacaacaacgatgatgacatcgataccaaaacaacggtcttacttgtaatcgggtacatcgttgttatcaccgtcttcaatctcttagctattggatcaatcgcttatagtgtgtttcaagggatctatgggagacctgtgaaagtgaactctgcagtgaaatcgagc

SEQ ID NO: 157562 - DNA, 384 bp, Arabidopsis thaliana columbia
cttcttcctatgggtgttacgtcagaaaatgtatcacaacgctttggtgtctcaaggcaggagcgggatcaagctggtgttgactcgcacagaaaggcagctgctgctactgctgctggtaaattcaaggatgagatcattcctgttaagaccaagcttgttgacccgaagactggtgatgagaaacccattacagtttctgttgatgatggtatccgaccaaccacaactcttgcttctcttgggaagctgaagccagtgtttaagaaggatggcaccactactgctggaaattccagccaagtaagtgatggtgcaagagcggctctcctaatgaagagaagtgttgcaatgcaaaaaggacttcccgttcttggtgtattc

SEQ ID NO: 157563 - DNA, 427 bp, Arabidopsis thaliana columbia
attttcgtagccgcaagactcctttcagattcttacttgcagctatgggtaaagagaaggtgcgcgattaacattgtgggcggggggtcatgttgattctggaaaatcgaccacaactggtcacttgatctataagcttggtggtattgacaagcgtgtcatcgagaggttcgagaaggaggctgctgagatgaacaagaggtccttcaagtacgcatgggtgttggacaaacttaaggccgagcgtgagcgtggtattaccatcgatattgctctatggaagttcgagaccaccaagtactactgcacagtcattgatgccccaggacatcgtgatttcatcaagaacatgattactggtacctcccaggctgattgtgctgttcttatcattgactccaccactggaggttttgaggctggtatc

SEQ ID NO: 157564 - DNA, 395 bp, Arabidopsis thaliana columbia
gcgcaaggacttgacggtgacatgagcaccgatcaatccaccaccgtcactttaccagacgtgagggctgctccagttcgacctgacattgtcaacttcgtccacgcccaaatctccaacaacagccgtcagccttacgcagtctccaaaaaggccggtcaccaaacctccgccgagtcctggggaaccggaagagccgtgtcacgtatccctcgtgttcctggtggtggaactcaccgtgccggtcaagcagcgttcggaaacatgtgtcgtggtggtcgtatgtttgctccgactaagatctggagacgctggcaccgtcatgtcaatgtcaacatgaagaggcacgccattgtttctgcaatcgctgctactgctgttccagctcttgtgat

SEQ ID NO: 157565 - DNA, 388 bp, Arabidopsis thaliana columbia
  unsure (1)..(388): unsure at all n locations
cttaaagttgagttcttaggagagttattggagaacaagagtaacccangaatgagtactgcgcggacttatattgtgtcgcattgtgacttcactgctaacttaacgttaacaatctcaaacgttatcaatctggatcaactagaaggctggtacaagaaagatgatgtggttgctgagtggaagaaggtgaatgatgagctgcgtttacatattcattgttgtgtgagtggtatgagtttattgcaggatgttgctgctgagctcaggtttcatattttcttcaacgaattgcctgtgggggtgaagctgtgatgcatggagattcaatcttgtttagtgagaatccttgcctaatggtttcctatttattggtttatttccattc

SEQ ID NO: 157566 - DNA, 420 bp, Arabidopsis thaliana columbia
cttcctcactttgttcatcatcttcttctccgatctaaacaacaatggcgacacgaggagcgtcctcagcaagagatgaattcgtatacatggcgaaactcgccgaacaagcagagcgttacgaagaaatggttgaattcatggagaaagtcgcgaaagctgttgacaaagacgaactcaccgtcgaagaacgtaatctcctctccgtcgcttacaaaaacgtcatcggagctcgtcgtgcttcgtggagaatcatttcatcgatcgaacaaaaggaggagtctcgcggtaacgatgaccacgtttcgttgatccgtgactacagaaagcaaaaacgaaacggaacttttctgatattctgttgacgggaattctttaaaacttttttgaaacgaattcttgggtctcccctggttgttt

SEQ ID NO: 157567 - DNA, 435 bp, Arabidopsis thaliana columbia
attcgaaatgtcacaatcttttctctccaaattctcttctctctgaatcaatccaatcatggttgagccggcgaacaccgttggaattccggtgaaccacatcccattgttgaaggatgagctcgatatcgtgatccccacgatccgtaacctcgatttcctggagatgtggaggccttttcttcagccttaccatctgattatcgtccaagatggagatccatcgaagaccattgctgtccctgaagggttcgattacgaactctacaacaggaacgacatcaaccgtatccttggtcctaaagcttcctgcatttccttcaaggactctgcttgtcgttgcttcggctacatggtcttcaagaagaagtacatctttactattgatgacgattgcttcgttgctaaagatccatctggaaaagctgtgaacgc

SEQ ID NO: 157568 - DNA, 419 bp, Arabidopsis thaliana columbia
aatatttagaggttctctttctcgcttgtgtgatctgtctgacaagctagaagaatcgtagaatcgtgagcggattgatttgataattatggtgaaggagacggagttttacgatgtcctcggcgttagccccaccgctacggaggctgagattaagaaagcttattacatcaaggcacgccaagtgcatccagataaaaaccctaatgatcctcaggctgctcataatttccaggtattgggagaggcctaccaagtgctaagtgatccagggcaacgtcaggcctatgacacatctgggaagtcagggatttcaactgagatcattgatcctgcggctatatttgctatgctttttgggagtgaactcttttgaagatacataaggcagcttgctatggcatcaatggcttcacttg

SEQ ID NO: 157569 - DNA, 434 bp, Arabidopsis thaliana columbia
gttgctcaaaaccttcttcctgaaatggcttcttctctcatcttcctcctcctcgttaccctaaccttttcagcatcaaccctaatctcagccaaatccaacacaacaacaataatcgaatcaacttgcaaaaccacaaactactacaaattctgcgtctcagctctcaaatccgacccaagaagtcccacagccgacacaaaaggtctcgcctccattatggtcggcgttggtatgacaaacgccacctccaccgcaaattacatcgctggaaacctatccgccaccgtaaaagacaccgttctcaaaaaggtcttacaagattgctccgagaagtatgctctcgccgctgattctctccggctgacgattcaagatcttgatgatgaagcttatgactatgcctccatgcatgtgttggcggcgcaggatta

SEQ ID NO: 157570 - DNA, 441 bp, Arabidopsis thaliana columbia
  unsure (1)..(441): unsure at all n locations
cccaaattgctctcgactttttattctcggattagcgtttgtgctttcgcatcagagaatgtctcagttcttctcaatttaggtcatcagatctcacaatcaatcgactcgaactcaaatctcacttcatcaatcaaatcatgactcttggctcaggatcgagtgttgtcgttccgaggaatttccggttgctggaggagcttgaacgtggagagaaaggtattggagatggaactgtgagctatggaatggatgatggagatgacatttatatgcgctcttggactggcactatcatcggtcctcacaacgtaactgtacatgagggtcggatttatcagttgaagctcttctgtgacaaagattaccctgagaaacctncgactgttcggttccattcgcgtatcaacatgacttgtgtcaaccatgataccggcgtgg

SEQ ID NO: 157571 - DNA, 327 bp, Arabidopsis thaliana columbia
accgacgcgtgcgatctctctctcagtcgcatataaatttgaaacgccgattcgtttttgctctttaagctttcttgttgatttcgacggtgtctctcaatctccgacaagcttgacgaatttcaggagctatatataccatggcgctcttgtctcaagcaggaggatcatacactgttgttccttctggagtttgttcaaaggctggaactaaagctggtggttcgggtggcgtgaggaatttggatgttttgaggatgaaagaagcttttggtagcttctactctaggaggctatctaccaaattaatgcttttgcattctggta

SEQ ID NO: 157572 - DNA, 401 bp, Arabidopsis thaliana columbia
gcggagatcttaagagttaaagactaatcccaacaatggcgtctttcaaagtcccaagcaatggtcctcttcccgaagatgacgccgagcaactccacaaggctttttcaggatggggtaccaacgagaagctgatcatatcaatactagctcacaggaacgcagcacaacgcagcttgatccgcagcgtttatgcagctacctacaatgaggatcttctcaaagcattagacaaagagctttctagcgactttgagagagctgtgatgttgtggactcttgatccaccagagagagatgcttatttggctaaagaatccaccaagatgttcaccaagaacaattgggtcttgttgaaatcgcttgcacaaggcctgctcttgagcttatcaaggtcaagc

SEQ ID NO: 157573 - DNA, 468 bp, Arabidopsis thaliana columbia
  unsure (1)..(468): unsure at all n locations
cggaaaggccggaccgacccatgcgtgcgtttgcttataccctttgttacaaaattttatttttgtctcatcgggatgctgctagaggcgcgtaatcttactatgaacccccctaccctcagcataatacttcacatcaacgttcaccagagaatcttgcactaccacaaactgcttccaattatgcttctcacctctcaattactgcccaagatgttccacatccctcacagnaagtattggctccattattgtccgatttggcatgataaacgctaccttcaccgtaaattacatttctcgaaacctctaccgcaccgagaaacacaccgttctcaaaaaggtcttacaagattgctccgagaagaatggtctcgccgctgattctcttcggctgacgattcaagatcttgatgatgaagcttatgactattcctccatgcatgtgttggcggcgcacgattattc

SEQ ID NO: 157574 - DNA, 223 bp, Arabidopsis thaliana columbia
  unsure (1)..(223): unsure at all n locations
ctttcggattcaaatctcagatctatctcatctcatggcgttgctcgtcnagaagagctcaggtggccgtgaatacaagggcaaagacatgtctcaagccgatttcggtcgtctcgaactcgagctcgccgaagttgatattccttgactcatggcttgttgtacccaattcggaccttctcagccattcaaaggcgctagtttcaccggttctattcatatg

SEQ ID NO: 157575 - DNA, 420 bp, Arabidopsis thaliana columbia
ggctcccaaaaaacctctactcacgcagattactgcacagccagaagtagctaagccattggcgctcgaagaacctacgaaaccattggctattgaagctcctccatcttccgaggcaccacagaccgaatcagcgcctgaaaccgcagccgctgctgagtcaccagcacctgaaaccgcagccgttgctgagtcaccagcacctggaaccgcagccgttgctgaggcaccagcatctgagactgcagcagcacctgtggatggaccagtgacggagactgtgtctgagcctcctcccgtagagaaggaggaaacttctttggaagaaaaaagcgatccgtcttcaactccaaacacagaaacagctacgtccacagaaaatactagccaaacaacaacaacgcctgaaagtgttacaac

SEQ ID NO: 157576 - DNA, 422 bp, Arabidopsis thaliana columbia
tccggaatcgaccgacgcgtccacacatacatggctcaagcagtgacttcgatggctggcttacgtggagcatctcaagctgtgcttgaaggaagtttacagatcaacggctcaaaccgtttgaacatctcaagagtctcggttgggtctcagagaaccggacttgtgatcagggctcagcagaacgtgtcagtaccagaaagtagtcgccggtcagtgattggactcgtggcggctggtttagccggtggttcattcgttaaagctgttttcgccgaagctattccgatcaaagttggtggtcctccacttccttccggtggcctacctggaacagataactcagaccaagcaaagagactttcattggcattgaaagatagattttacatacaaccattgtcaccaacagaagctgcagc

SEQ ID NO: 157577 - DNA, 492 bp, Arabidopsis thaliana columbia
gctgattcagcttggtgtccccatctttggtcatgtcaaggcggatgaaaactctaacgacaccaacggctctgttaacatcgagccaattccaccacttcttgagagtgtcattgatcactttgtcacatggagactcatcccagaatacaagagacctaacggctgtgtcatcaacttctttgaagagggtgaatactcacagcctttcctcaaaccacctcacttagaacaaccaatctccactcttgtcctctctgaatcaacaatggcctatggacgcattctctcaagtgacaacgaaggcaacttcagaggacctttgacactctctctcaaacaaggatctttggtggtgatgagagggaacagtgcagacatggcaagacatgtaatgtgtccatcacaaaacaaaagagtaagcatcacattctttcgtattcgacctgacacatatcataaccattcacaacccaacagttctcgcaacga

SEQ ID NO: 157578 - DNA, 447 bp, Arabidopsis thaliana columbia
cttatctcttcaccaccagcttctcaaagctttagcctcgagagcaaaattctctcaagctttagccgggtctgcctctgcttcgtccctctctgctttcaatcctaaatcccttcctctctgcgtctccagacccgcttccgtctccgtcttacctccttccctctccttcaaacttcactccgaccacctcgtctctatcttcgcttcctccgccctcaaatgctcatcccccgccgagtacccgtcgcgtttcgttagaaacgttgctgtatcttcggattttgaggtggaggaagatgatatgttcgctgacggtgacgattcatcgcctgtggagcgtaactccttctctcctgaccttaagctctttgttggtaacctttcttttaacgttgatagcgctcagcttgctcagctctttgagagcgctggaaatgttgagat

SEQ ID NO: 157579 - DNA, 121 bp, Arabidopsis thaliana columbia
gccaatctcatcttcaacctctctctaactctcgttttcgattctacaatggctgacaagaagattatgatcggtatcaacggattcggaagaattggtcgtttggttgctagagttgttc

SEQ ID NO: 157580 - DNA, 332 bp, Arabidopsis thaliana columbia
agtgacgcgtgggctcgaaacaagagcttagctaagatttcgaagaactacccaaccctgagcgaagaggacaagaaggctgtgtgagaagtgcacgatgtagctcagaggttagatcgctgagaagaactgagcacccatcatggtccgactcgcatggcactctgctggaactttcgattgtcaatcaaggactggaggttcattcgtaacaatgaggtttgacgcttatcaagctcatggagccatcaatggtttccacattgctcttaggttgtttgaccccatcagtgagcaatttcctaccaatttttttgctgattttcatcaat

SEQ ID NO: 157581 - DNA, 447 bp, Arabidopsis thaliana columbia
acacatacggttttcacgacttgactcaagcctcgacgaccaaaatttttctttctacaaatactttgacttaagagttgcagaaatatcaagttaaaaaaaaaacagaaggagaaatggcaataagttttagaactctagctcttttgaccctctcggtgttactaatttccatatctctcggcgtcgtcacagcaacagagtcgcagaggaatgaaggggaggtgcttacaatgtacgagcaatggcttgtagagaatgggaagaactataacggtcttggagagaaggagagacggttcaagatcttcaaagacaacttgaagcgcatcgaagaacacaattcagatccaaaccggagttatgaacgcgggttgaacaagttttcggatctaacggctgatgagtttcaagctagttacttaagtgggaagatggaaaagaaaa

SEQ ID NO: 157582 - DNA, 468 bp, Arabidopsis thaliana columbia
gtttcgacaaagaccaggaggaacacttgtaaagccaaatcatggaatctcggtcttgttatcaactctagaagctctgaggcttcggtttttgatccgttggggatcaatccagatgaaacttctggtttaagtagcatttgggaaagctttgtgagtcttttgtcaccatcatttgaaagctcttccggtaacaggcgagataagccgtcttctggtagaggcgtggcagctgctattgaggacagttccattgattttggagatttcttcaaagggccattgccagggaagtttctgaagcttcttgggtttttagctctctctcggcttggaatttacataccactcggcggggttaatcgagaaagctttgttggaaatttggatcagaatagcattttgagcactttggatacattttctggtggaggcatatggagacttggtatatgttctctcgggatt

SEQ ID NO: 157583 - DNA, 478 bp, Arabidopsis thaliana columbia
cggacgcgtgggccggttcactactcaccttctccagtcgtataccactctccaccaccagcggttcactactgacctgctgcagttgtataccactccccaccaccacccaagaagcactacgaatacaaatctcctcctcctccggtccattactctccccctacggtataccattctcctcctcctccagtacaccactactcacctccacaccaaccctacctttacaaatcaccacctcctcctcactactagattacttaatcgtctctaatggagtcgacgacgatacacaagaaaacaaagaatcgtttggtgatataataaaagacacaagatcgttgacgggagaattgaaacggatacatatgtcaaaagagaaagtttcccaatttaatgtctcttctttatttaataatacgttactgaaataaacttcaaacatgttaatgagtgtgatcccttcatgcatgca

SEQ ID NO: 157584 - DNA, 439 bp, Arabidopsis thaliana columbia
gcgttcttcatcagcgccgcgttctcaaagttgctctcacagtctccgatctcgaattttgtaagttatggctggaaaagctgcataagctgtggcaaagacagtgacagggtttcaacatccatggagggcgaaactcgataagtacagaaccgagttgacgaaaggtgtgtggggttattgggagatgggagcatggaaaccgttagggataagtgcacgaaggagggctatgctgaggaaagaagtgttgactaatggagaagattggccttatgatccagagaggaaagctatgaggacaaagaggaaagggcataaatgtgatagaatttcagctgagaaaagagagaacactgcgaagcttatgttgaagatgcctcagatgttgcttgattataagaagagaaggtgggaaaagaagatgaaggaagaagag

SEQ ID NO: 157585 - DNA, 426 bp, Arabidopsis thaliana columbia
gtaaagcttgaaactttggactaaaagaatggcgtctttgggtgtgtcggaaatgcttggtgctccggttaacttcagggcagtttcaagatcgtctgctccgttggcatcaagcccatccacgttcaagactgttgctctcttctctaagaaaaagccagctcctgctaagtccaaggctgtctctgagactagcgatgagctcgccaagtggtatggtcctgacaggagaattttcttgcctgatggtcttttggatagatcagagatcccagagtacttaaacggtgaagttgctggagattatggttatgacccatttggtcttggaaagaagcctgagaactttgcttaataccaagcttttgaattgatccatgcgagatgggctatgttaggagcagctggtttcatcattcctgaagc

SEQ ID NO: 157586 - DNA, 473 bp, Arabidopsis thaliana columbia
ggcgagcagcaatgagtatgaggaaggtccgggggagagggagagtgggtacgacccaaatatggtggcggattcggtgaagtcgttcgtgtcacacatgtacagacacataagggataagaacgtgtacgagatccaccagatgtgtgagacatcgttccagagcatatcggagcgtctgttcaaggacacgccgtggccaagtgtggaagcgattgctccttacgtagacaacgaccatgtgttctgtcttctgtaccgagagatgtggtttcgacatttgtatgcgaggttgtctccgacgttgaagcagaggattgattcttatgacaactattgcagcctctttcatgttgtgttgcacggcgtagtgaatatgcagttgccgaaccagtggttgtgggatatggtggtggagttgtctaccagttccaaaagttctgtcaattcagagcaaagctcaagaacaaaac

SEQ ID NO: 157587 - DNA, 428 bp, Arabidopsis thaliana columbia
  unsure (1)..(428): unsure at all n locations
atcaaggacacgtcaataataaagctgagaaatctggtttagaggattcaaatgcanatggctccaaagggaggtcactatctccagaaactttggcattgatgtgtgacgaacgggacacaatgttaatggttgcagcttcacctaattgttcggtggagcctacgtcacagctaccaaacgggcaagaccaggtttatgcagaacaagaaaaagtagtattaaccaagttccgtgactgccttaaccgaataatctcctgtggagaagtaaaagaatcaaattgttctatgtcaagaatggatctagatacacctgtacaaacgactgtcagaatcgacccagtggttcaacaagctccagttgcaaatggagtttcacaaaccgcaaagcaacctttccagcttaacacaacaacaccaaacaca

SEQ ID NO: 157588 - DNA, 406 bp, Arabidopsis thaliana columbia
caaatcagtttttaaaaataagggaaaatcctaataaaggagaagaaaaacagatctgaaggcccgcgtgatactccaccgactttaaactactggtttttgtttgatttaagtatagtgttaatgactcctctctccaccttcctttgattctacctatcacttcccttgccgttgctccatcttcatcactagtcactatacaccaatcttagatccgggaagctaatttctcttctccgatcggtgaatgcagttacattgacctcggatctaaccaagctcttctggtttccagctctctggaattcaaaaaaatggaggagaaatccaagtcaagaagttggtgcggctggttcatcgccattattgtgctagcttctgttatcctcgccgtcgtttacac

SEQ ID NO: 157589 - DNA, 473 bp, Arabidopsis thaliana columbia
aatcaatcaaatcaaagcatccatttttgattcagacttcagagagacagagaaggaagaagaagaagaagaagaagaaaaaactatggagaatgagagggaaaagcaggtttacttggctaagctctccgagcaaaccgaaagatacgatgaaatggtggaggcgatgaagaaagttgctcagcttgatgtggagctaactgtggaagagaggaatcttgtatctgtagggtacaagaatgtgattggtgcaaggagagcatcatggagaatactatcttccattgagcagaaggaagagtccaagggaaatgatgaaaatgtcaagaggcttaagaattatcgtaagagagttgaagatgagcttgctaaagtttgtaatgacatcttgtctgtcattgataagcatctcattccatcggctaacgcttgggagtcaactggctttttctacaaaaagagattactatcgc

SEQ ID NO: 157590 - DNA, 365 bp, Arabidopsis thaliana columbia
cagattcaacccaaaattgaagacaaaaatgtctcgcagatcgctaactctcctgaagaagctagctagaaacgcgaatggatcaggtattcaaacccgatccgtgacttacatgcccagacccggtgacggagcaccacgcgcagtgacgctgatccccggagatggaatcggtcctctggtgacgaacgccgtggaacaggtgatggaagcgatgcacgctccgatcttcttcgagaagtacgatgttcacggagaaatgagccgtgtgccgccggaagtgatggagtcgataaggaagaataaggtttgtttgaaaggtgggcttaagactcctgttggtgagggtgttagttcctttaacg

SEQ ID NO: 157591 - DNA, 240 bp, Arabidopsis thaliana columbia
  unsure (1)..(240): unsure at all n locations
nctttttcgcccttctgaagtccaccaccggggtaatctctatgaccagtccctttgttgaagaccggaaagtgaaagtggctgcctttatacccaggtttgggtaattcccatggtttcatgggcaattcttgccggggatctttcaaggacaaactcgcgaagcgatacaatagcctgagatactctaaacctctaccaccaactgctttaatccgccatcaccgacgctgcaacatc

SEQ ID NO: 157592 - DNA, 478 bp, Arabidopsis thaliana columbia
ggaaagtctcttcttgattatcgtccagggattgcaacagagagaaagtaacgatgccggggaaacagaggacagctaaggtcaacaggaatcctgatctgatcaggggagttggtaaatactcaaggtctcagatgtaccataagagaggtttgtgggcaatcaaggccaaaaatggaggcgttttcccccgccacgacgctaaatctaaggttgatgctccggtggagaagccaccgaagttctatccagctgaagacgtgaagaaacctctccccaacaggcgcacggcaaaaccagccaagctcagagctagcatcactccagggacagtgcttatcatccttgctggtagatttaagggcaagagagttgtcttccttaagcagcttgcctccggtttgcttcttgtgactggaccattcaagatcaatggtgttcctctgagacgtgttaaccaggcctatgtcattggtac

SEQ ID NO: 157593 - DNA, 486 bp, Arabidopsis thaliana columbia
gcgcccacgcgtccgtccatagctagctagagagtaaaaagaacaaagatgtcgaaagaagtgagcgaagagagcaaaacccaccatggaaaagactacgtggatcctccaccagctcctcttctcgacatgggtgagctcaaatcctggtctttctacagagctctcatcgctgagttcatcgctacactcctcttcctctacgtcaccgtcgctactgtcatcggccacaagaagcaaaccggtccttgtgacggcgttggtttacttggtatcgcttgggctttcggtggtatgatcttcgtcctcgtctactgcaccgccggtatctctggtggtcacattaacccagctgtgactttcggtctgttcttggcccgtaaggtctctttggtgcgagctctaggtacatgatagctcagtgtcttggagccatttgtggtgtgggtttcgtgaaagctttcatgaaaactccttacaacactc

SEQ ID NO: 157594 - DNA, 477 bp, Arabidopsis thaliana columbia
gcgattggaattgcccctggctctcctgagagaccacaattggtgaaaggaaatatgcagctgttctctggggatcaacagcggagccgggcccttgaagcacatgctgcatcttttgctcagtttaaggtccctgggaatgagaatccttcgattcttatatcatttgcaagcaagagctttaatgctgggcagataacatcaaagctgcatgttattgaacttggtgcccaaccagggaaaccatcatttacaaaaaagcaggcagatctctttttccccccagattttgctgatgattttcctgtggccatgcaggtctctcacaagtttaacttgatttatgtcatcaccaagcttggcctgctgtttgtatatgatctagagacagcttctgctatctacagaaatcggataagtccggacccaattttcttaacgtctgaagcttcctcagtttgggagttctatgccatt

SEQ ID NO: 157595 - DNA, 459 bp, Arabidopsis thaliana columbia
gaaaatatcagatctaaagaagagcgtcttcataaacgcccttcgtcttcttccctgcaaagctatgggctagatcttgctttcttccgcgaaacgacaatgagagagtgcatttcgatccacattggtcaggctggtattcaagtcggaaatgcttgctgggagctttactgtcttgaacatggcattcagcctgatggccagatgcctggtgacaagactgttggtggaggtgatgatgctttcaacaccttcttcagtgaaaccggtgcaggtaagcacgtcccacgtgctgtctttgttgatcttgagccaactgtgatcgacgaggtcaggactggtacttaccgtcagcttttccaccctgaacaactcatcagtggtaaagaagacgctgctaacaatttcgcccgtggtcattacaccattgggaaagagattgtgatctctgcttggccg

SEQ ID NO: 157596 - DNA, 394 bp, Arabidopsis thaliana columbia
atagctcctaacaaagcaatatcatttccaatttataaaagttaaagccatggctgcatcggtctctggcccctctatgataatggaagaagaagggagattcgaagcggaggttgcggaagtgcagacttggtggagctcagagaggttcaagctaacaaggcgcccttacactgcccgtgacgtggtggctctacgtggccatctcaagcaaggctatgcttcgaacgagatggctaagaagctgtggagaacgctcaaaagccatcaagccaacggtacggcctctcgcaccttccgagcgttggaccctgttcaggtgaccatgattgctaaacatttggacaccatctatgtctctgggtggcagagctcgttcactcacacattcact

SEQ ID NO: 157597 - DNA, 488 bp, Arabidopsis thaliana columbia
tctcactcactcttcttcatcataccgaaaaaaatccaatggcttctttggaaaatccaggaatcgattcttcaagcgaatttgagagttcttctgaagagatctcttcttctaaagaaagcaaacccaaagaagctcccgtcactgttccgtcaacaaaaaccctaaactctccttccgccgccgtggcagtttctgatgactcagagtcagagaagcagtcattcgtcttaaccaggcggaagaagaaagaaggtgctgctgaatcaccggcagtgaagtcagggaagaaagaaggtgctgctgaatcaccggcagtgaagtcagggaataacgaaggtgctactgaatcaccggcggtgaagtcagggaagaagcgagctagcgaaggaaccacgtcaagggacatgcatgtcaaaagaattaagaaagagggcgataacaaaaaggggcatgctcagagagtatggagtgaagaagacgagatc

SEQ ID NO: 157598 - DNA, 439 bp, Arabidopsis thaliana columbia
gttttacatctttaacaagaatgagaggatgtacttcactatccaagataccgatgtgtagggagtttagtgtcttgaggacgatgtggggattctctcaagtcctccccattgatacattcaaagatccgacaaaaggatatctctacgatggagatcactgcgagtttggtgttgatgtaaccatgccttctctctacgaaaaatcggaacttttctctgtcacagagaattttctaaatccgagattcacctggaccattcggggattctctacgctgctaaaaaacagttacctatcagaagtgttgtccatcggaggaagaagttggaatatacaaatcaatccaagtggtcttggtacgggtgtgggaaaagctttgtcgatgtatcttggccttaatgtgaatgagatattcagaccatatgagaagattta

SEQ ID NO: 157599 - DNA, 481 bp, Arabidopsis thaliana columbia
acaatggcttcctctatgctctcttccgctactatggttgcctctccggctcaggccacgagggtcgctcctttcaacggacttaagtcctccgctgccttcccagccacccgcaaggctaacaacgacattacttccatcacaagcaacggcggaagagttaactgcatgcaggtgtggcctccgattggaaagaagaagtttgagactctctcttaccttcctgaccttaccgattccgaattggctaaggaagttgactaccttatccgcaacaagtggattccttgtgttgaattcgagttggagcacggatttgtgtaccgtgagcacggtaactcacccggatactatgatggacggtactggacaatgtggaagcttcccttgttcggttgcaccgactccgctcaagtgttgaaggaagtggaagagtgcaagaaggagtaccccaatgccttcattatgatcatcggattcg

SEQ ID NO: 157600 - DNA, 475 bp, Arabidopsis thaliana columbia
gcgctcgttgacttttcttgttacaagccacctgtcacgtgtcgtgtccccttcgcaactttcatggaagactctcgtttgatcctcaaggacaagcctaagagcgtcgagttccaaatgagaatccttgaacgttctggcctcggtgaggagactagtctccctccggctattcattatattcctcccacaccaaccatggacgcggctagaagcgaggctcagatggttatcttcgaggccatggacgatcttttcaagaaaaccggtcttaaacctaaagacgtcgacatccttatcgtcaactgctctcttttctctccacaccatcgctctcagctatggtcatcaacaaatataagcttaggagtaatatcaagagcttcaatctttcggggatgggctgcagcgcgggcctgatctcagttgatctagcccgcgactagctccaagttcatcccaattcaaatgcaat

SEQ ID NO: 157601 - DNA, 288 bp, Arabidopsis thaliana columbia
  unsure (1)..(288): unsure at all n locations
ctctgctgctagctctgcttgtgaccacattcgtgactgggtccttggaactccagaagggacgttcgtttccatgggaggatactccnatggctcttacagcgttccatcaggacttatctactccttccctgtaacttgtcgcaatggagactggagtattgtccaaggccttccgattgatgaagtatcaaggaagaagatggatttgactgcagaggagctcaaagaagaaaaggacttggcgtactcatgcctcttttaaacccttctggagcaaaattttca

SEQ ID NO: 157602 - DNA, 480 bp, Arabidopsis thaliana columbia
accgcccgaatttccggtcgaccacgcgtgcgggacgatcgatctaaggagacgatgaagatcttccacgttccttgtctgcaagacaactactcttatgtgataatcgatgagagcaccggagacgcggcggttgtggatccagttgatccggagaaggtgatcgcatcggctgagaagcaccaagctaagatcaagttcgtactcactacgcatcatcactgggatcatgccggtggaaacgagaagattaagcagttggttcctgatatcaaagtatatggaggttctctggataaggtgaagggttgcactgatgcggttgataatggtgacaagctgactttgggtcatgatattaacatattggctctccacactccttgtcacaccaagggtcacattagttattatgtgaacggaaaaagaaagagaaatacccagccgtgttcaccgggagatacacttttttgtgcttga

SEQ ID NO: 157603 - DNA, 455 bp, Arabidopsis thaliana columbia
gcgagggccactgatgtcatgatcgctggaaaggttgctgttatctgtggatatggtgatgttggaaagggttgtgctgctggcatgaagactgctggtgctagagtcattgtgactgagattgatcccatctgtgcccttcaagctttgatgtaaggacttcaggttcttacccttgaggatgttgtctcagaagctgatatctttgtcaccaccaccggtaacaaagacatcatcatggtcgaccacatgaggaagatgaagaacaacgctattgtgtgcaacattggtcactttgacaatgagattgacatgcttggacttgagacttaccctggtgtgaagcgtatcaccatcaagccacagactgacaggtgggtgttcccagagaccaaggctggaatcattgtcttggctgaaggtcgtctgatgaacttaggttgtgccactggtca

SEQ ID NO: 157604 - DNA, 316 bp, Arabidopsis thaliana columbia
  unsure (1)..(316): unsure at all n locations
gcgcatcatcatctcttggtgacagaagaaaagagttgaggtacagagaaaatggcancacaagcactagggtcttcttcacttacctgctctgttcagacagctagacagatatttggctcaaaaccagttgcgtctgcctcacagaagaagagttcctttgttgttaaagctgctgcaactccacctgtcaagcaaggagccaacagaccattgtggtttgcttcatcgcagagtctctcttacttggatggcagcttacctggtgactatggattcgaccctcttggtctttcagacccagaaaagtactgga

SEQ ID NO: 157605 - DNA, 279 bp, Arabidopsis thaliana columbia
  unsure (1)..(279): unsure at all n locations
gcgattcaaatctcataaacacattgataagttaaaatcctctcgagagacaagaatganaatgacactaggtcacttgtctctctcgctgttctcatgtctcctccttgtcctttctccgaccttcattgcctccactcccgtctccgaacccgaactcgtagttcaagaagttaacgaaaagatttatgcgtctaggaggaatctaggcgtgctctcatgtgggaccggaaatccaattgacgactgttggagatgcgaccccgaatgggagaaaaa

SEQ ID NO: 157606 - DNA, 483 bp, Arabidopsis thaliana columbia
gctgccgctgttgtttctcctccatttctctatctttctctctcgctgcttctggaatggtctgtatcatcttgttggtctgcaagtgaaaaatggccgatggtgaggatattcagccacttgtctgtgacaatggaactggaatggtgaaggctggttttgctggtgatgatgccccgagagcagtgttcccaagtattgttggtcgtcctaggcacactggtgtcatggttggtatgggtcagaaagatgcttacgttggtgatgaagctcagtccaagagaggtatcctcactctgaagtatgcaatcgaacatggtattgtaagtaactgggatgacatggaaaagatatggcatcacactttctacaacgagcttcgagttgcccctgaggagcacccagttctactcacagaggcacctcttaaccctaaagctaacagggagaagatgactcagatcatggttgagacattcaatg

SEQ ID NO: 157607 - DNA, 494 bp, Arabidopsis thaliana columbia
gcgctttcgttctctatttgggtccgcacattgctttgttcactctaaaagcaacgctatgtggtcgaggtgatctaaaatctgcaccatatgatacaatacagttgaaaagggttccttcatggcttgataaatcttgttcggaattcggtcctcctttaatgatatcagctgctggatcgcgtgtgcctcttaccagcatattgccacaagtccagttggaggcaatcttatggggtattgagacggctcttggggagcttcctccatatttcatctcaagggcagctagtatatctgggagcacagtggatggaatggaagaattagatggttcctccactgaagatagcggatttatggcaactcacctgaaccgtgttaagcgttggttattaacccattcacagcacttgaacttcttcactgtctaggttcttgcttcggttccaaatcctttgtttgacctcgctggaataatgtgtggacaattt

SEQ ID NO: 157608 - DNA, 477 bp, Arabidopsis thaliana columbia
cactgcgccagtgttgtgcggctctgcgaatcttcgaaaatgggtgcgtacaagtgtgtgtgtgagctatggaggaagaaacagtccgatgtgatgagattcctccagagggttaggtgctgggagtacagacagcaaccttcgattgttcgtctcgtcaggcctactcgtcctgataaggctcgtcgtttgggttacaaggccaagcagggctttgttgtgtaccgtgtacgtgtgagacgtggtggacgcaagaggccagtgcctaagggtattgtgtatggtaagccaacaaaccagggagtgacacatctcaagttccagcgtagcaagcgttctgttgctgaagagcgtgctggcaggaaattgggtggtctcagagttgtcaactcttactggctcaatgaggattcgacctacaagtactacgagatcatcttggttgacccagcacacaatgctgtgcgtaatgacccg

SEQ ID NO: 157609 - DNA, 486 bp, Arabidopsis thaliana columbia
  unsure (1)..(486): unsure at all n locations
ggaggggatccatctctttgggcagatcttcttaagtttttcggtgaaattgnaaaggacgtgcaccaaataagtgaaggaggttctcacttatattgaacgggatgatattttacctcctatcattgttcttcagaccctggcaaagaatccatgcctcacactttctgtcatcaaagactacatagctcggaaacttgagcaagagtcaaaaataattgaagaggaccggcgagctgtagagaagtatcatgaaacgactaaaaacatgagaaaagagattgaagatctcaagaccaatgccagaatatttcaacttagcaagtgtactgcttgcactttcacattggatatcccagctgtccatttcatgtgtatgcattcattccatcaacgctgcctcggtgacaacgaaaaagaatgccccgagtgtgctcccgagtacagatctgtgatggaaatgaaaagaagttggagcagaactcg

SEQ ID NO: 157610 - DNA, 420 bp, Arabidopsis thaliana columbia
  unsure (1)..(420): unsure at all n locations
cggaannnccgggnagacggacgcgtgcggtcaaagtttactctgcccttccattgaaacccagcttttccttccccaattctatcaaggggttcagttccatggaggaggaacttggtattactttccctggaaaggccgttggagtacaattcggtggctctgctgctgctgctccagctgttgaagctgaagcacctgcagctgcagcttatgatgatgatgtcatggatctctttggagaccagaccttactatatatgaatgctgcataggaaaaggatgctgctttaatagacacctataaactctaatatactttttagctttctgggctggtgggttgttattccttcttattttttaacctctctctatttatccttttataacctttttcgttgtttctttaattccttt

SEQ ID NO: 157611 - DNA, 445 bp, Arabidopsis thaliana columbia
gcgcaaatctctctttctctcaaactctctcaacaacaacattggcgtctcttcaacaaactcgattctcgcttcaatccaggactgcgaccatcctccttccaaatcgccagatctctcccactccgaaaaaccttcccaatccgaatcaacaacggtggaaacgccgccggagcaagaatgtcagccaccgcagcatcaagctacgcgatggcattagcagacgtcgcgaaaagaaacgacacaatggaattaacagtcacagacatcgagaagctcgaacaagtcttctcagatccacaagtactaaacttcttcgcgaatccaacaatcaccgtcgagaagaaacgtcaagtcatcgacgacatagtgaaatcgtcgtctcttcaatctcacacatttaacttcctcaacgtcctcgtcgacgcgaatcggatcaatatcg

SEQ ID NO: 157612 - DNA, 465 bp, Arabidopsis thaliana columbia
aaatctttgtgcgaagcaagaaaaatgtcttctacccatcagttagtttcttcgaggatcgcttcttcctgatgcactttcttagccccttcaaattttaatctcagaactcgaaatgcttgcttacccatggcaaaacgggtcaatacttgcaaatgtgttgctacgccgcaagagaagatcgagtataagaccaaagtgtcacggaattcaaacatgtccaaacttcaggctggatacctattcccggagattgcaagaagaaggtctgcacacttgttgaaatatccagatgcacaagttataagtcttggaataggcgacacaactgagccaattcctgaagtgatcacttctgctatggcaaagaaagctcatgagttgtcaacaatagagggatattgtggttatggtgctgaacaaggtgcaaagccactgagagctgctattgcgaaaacattctac

SEQ ID NO: 157613 - DNA, 455 bp, Arabidopsis thaliana columbia
gcgaatcgctcctccttaaaccctaacatttttgcttcctttgtttcgattctcgagagttatgagagatgagttcggacgatgagagagacgagaaggagctgagtcttacctctcctgaagtcgtcaccaagtacaagagcgccgctgagatcgttaacaaggcgttacaggttgttttagctgaatgcaaaccaaaagctaagattgttgatatctgtgagaaaggagactcttttattaaagagcaaacagcaagcatgtacaagaattctaagaagaagattgagagaggtgttgcgttccctacatgcatttctgtgaacaacactgttggtcatttttcaccgcttgctagtgatgagtctgtgttggaagatggtgacatggttaaaatcgatatgggatgtcatattgatgggttcattgcccttagtggtcacacacatgttctt

SEQ ID NO: 157614 - DNA, 472 bp, Arabidopsis thaliana columbia
acaaagtgaaatcctcaagggttatttaatggctaccctcttttatgagccttgtacccgtgccaggctttgattaggatctgctatgaaacgccttggaggtgaagtcttaactactgagaacgctagagagttttcgtctgccgcgaaaggggaaacacttgaagacacaataagaacagtggagggttattcagatataattgtgatgcgacattttgaaagcggtgctgcaagaaaagctgcagctactgccaatatacctgtcattaatgcaggtgatggtcctggagagcatcctactcaggctctattggacgtctataccatccaaagtgaaattggaaaattagatggcatcagtgtagccttagttggagaccttgccaacggaaggactgtgcggtctcttgcatacttgcttgccaagttcaaagacgtgaagatctactttgtttcccctgaaattgtg

SEQ ID NO: 157615 - DNA, 474 bp, Arabidopsis thaliana columbia
ctgtttccatcagggaaacttgtacgagcgttaatggaaagtcagtaaaacgatgtaatggctggtccaatgcccattgcttgtcctccatcttccagtcatcaacagggatcagatgtcattgatttgactgaagaatcttttgaaataagatgtactaaaagaaatcgcagcccaggtgatcagggtccttcttgtgccaaagatgtaccgaacgctggtgtcatgaagtcatcgattcctttgccatcgacgagttacaatgcaaaccaaagcagagaagaatccacaatgtgggagtgtgcagaatgcaccttattgaacccgtcattggctccaatatgtgagctatgcactgccgcaaagccaaaggaaagggagatgaagcacaaagtctggtcttgcaaattctgcacgcttgaaaatgaggtgaatgtagagatatgtgaggcttgtggtcagtggaggtactcg

SEQ ID NO: 157616 - DNA, 425 bp, Arabidopsis thaliana columbia
caaaatttagacaaaaaaataaatatggagctcgagacctcagtttatcgaccggacgtcgccgtttatgatgtcgtgcggatggtgtggaggttcgaggacggtacgaccaaatcttcgccaagattttgacgagagaagctcttagctttgtggctgagttacagagagagtttcgtggccatgtgaagtatgccatggagtgccggagagaggcaagacggcgttataactccggtgccgttcctgggtttgatccttccactaagttcatcagagacggtgattggagctgtgcgtggcggcggtctgccgttgctgaccggagagttgagaacaccaatccggtcaagaggttgatgatcatcaactgctttaactccggagctaaaggttttttggctgatttctaggtcacttttttc

SEQ ID NO: 157617 - DNA, 443 bp, Arabidopsis thaliana columbia
  unsure (1)..(443): unsure at all n locations
gcgcacacgtattcctgctgttcaagaactcgtgaggaaggtgactgggaaagaacctaatgggacagagaatcctgacgagggtggagcgttaggtgctgcattccaagctggtgttcttgctggagatgtgagtgacattgtgcttcttgatgtgacaccgctttcgattgggttggagaccctaggtggtgttatgactaagattattccaaggaacaccacactgnctacttctaaatcagaagtcttttcaactgctgctgatggacagacaagtgttgagattaatgtgttgcaaggtgagaaggagtttgttagggataacaagtctcttggtagcttccgtctagatggtatcccccctgcaccacgtggagtttcacaaatcgaagtcaaatttgacattgatgccaatggaattctatctgtcaatgctgttg

SEQ ID NO: 157618 - DNA, 417 bp, Arabidopsis thaliana columbia
gcgccaccttatctacaaaccttctagtggccctgttaaaaccaaacttgctcttgttggaaaaggatagacatttgacagcggtggcgtacaacattaaaattgggcctgaattaataattgagctcatgaaaatcgatgtgggaggttcagctgctgttcttggcgctgcaaaagccattggtgaaattaagcctcccggtgttgaggtgcactttattgtcgcaacttgtgagaatatgataagtggtaccggaatgagacctggagatgtcatcacagcctcaaacgggaagacaattgatgtcaacgacaccgattctgaatgtcggctaacacttgcagatgctctagtttatgcttgcaaccaaagtgtcgataagattgttgacattgcaacattgaccggggagatta

SEQ ID NO: 157619 - DNA, 408 bp, Arabidopsis thaliana columbia
  unsure (1)..(408): unsure at all n locations
cacaaacaaaaagagagagaagagaacgagagaatcattgagaaacgaaacaacaatggccgtctcatcattccagtggcctaccatcttctcctcctcctcaatctccggctttcaatgccgttctgatccagatctcgtcggttctcccgtcggtggatcatctcgccgtcgtgtccatgcctccgccgggatttcttcctcattcaccggggacgctggattatcctccaggatcttaagatttcctcctaatttcgtccgtcagctgagcattaaagcccgtataaactgtagcaacatcggtgttgcacagatcgtggcggcttattggtccaacaacccatcctccgcgtttccttttcggcggggnggntgctgcttccctcgtctgcatctgcgggttct

SEQ ID NO: 157620 - DNA, 454 bp, Arabidopsis thaliana columbia
  unsure (1)..(454): unsure at all n locations
gcgaccaaccccatttttaagcccctttctttgtttttatcctccgaccgatcaaaccaagaagaaacacgttcntattggcctcgacgaaaaaaatgccaaccatttcgaatctcgctaatcttccccgcgccacctgcgtcgactccaaatcttcttcctcttcctccgtcttacctagatccttcgtcaatttccgcgctttgaatgcaaagctttcctcttctcagctttctcttcgttataaccaacgatcaataccttccctctctgtgaggtgttcaacgtctggtggaaatggaactgctggaaagagaacgactcttcatgatctatatgaaaaggaaggtcagagtccttggtatgataatctttgccgtccagtcacagatcttctcccgttgattgctcgtggtgttagaagtgttactagcaaccctgcgatctttcaaaa

SEQ ID NO: 157621 - DNA, 219 bp, Arabidopsis thaliana columbia
atttcctcaagacagtgttgagctttatgctgagaattttgctaacagaggtctttgtgcgattgctgaggcttaggggcttcggtacaagcttcttggtggtcttgctgttcgtagggcgtgctatggtgttttaaggtttgttatggagagtggagctaaaggatgcgtagtcattgtcagtggaaaactccgtgcttcacgtgcttagtctatgaa

SEQ ID NO: 157622 - DNA, 478 bp, Arabidopsis thaliana columbia
  unsure (1)..(478): unsure at all n locations
cggacgcgtgggtcttgcgatatctctgagatttgtttgacagtctctaaccatgggtaagaagaattttgacatgaggattgtnttcattggccacgtcgattctggaaagtcgaccaccactggacacttgatctacaagttgggtggtattgacaagcgtgtcattgagaggttcgagaaggaggctgctgagatgtacaagaggtccttcaagtacgcatgggttttggacaaacttaaggctgtgcgtgagcgtggtatcaccattgacattgctctctggaagttcgagaccaccaagtacgacgtgcactgtctttgatgctccttgccatcgtgatttcatcaagaacatgatcactggttccttccaagctgattgtgctgtccttatcattgacttcaccactggtggttttgaggctgggttctccaaaggatggcatacccctgagcaccctctacttgctttacc

SEQ ID NO: 157623 - DNA, 445 bp, Arabidopsis thaliana columbia
cacacttaagcttggtgtttgcgcagacttattgggcctagttaacgttgttgttggttcgccaccaaagactgctgggtgtgcacttcttcaaggtcttgctaatcttgaagctgcggtttgtctctgcaccgctcttaaagccaatgtcttggggattaatctcaatgttcctattgatctaaccttgctgttgaactattgtggcaagaaagttcctcatggtttccaatgttcttgaagatttgagactttaaaagagaaaaatctctttggtttgctatgtttttatatgtttggttctactgtgatctattgtttttgtgagaaaaagctttgttctgtcactgttgagtttgatgtaatgcttgagcttgttcatgatagaacctttgttctctcaatattgagtttgatgtaatgcttgagcttgtaatggatttta

SEQ ID NO: 157624 - DNA, 389 bp, Arabidopsis thaliana columbia
tcttgatgcgagtcctcaagaacgatttcatgaagtatgctcaagatgaggaagctgctagtgatcaagaggaaactggatggaagtacattcatggcgatgtgtttcggttccctactcacaattctttatttgctgcatcgctcggtagtggcactcaattgttcacgctcaccatatttattttcatgcttgctcttgttggagtgttctacccatacaaccgaggagcactctttaccgctttggtggtcatttacgctctcacttctggaattgccggatacacatctgcctctttctactgtcaacttgaaggaaaaagctgggtgaggaacttgttactcactggatgtctcttctgtggcccattatttctaaccttttgc

SEQ ID NO: 157625 - DNA, 425 bp, Arabidopsis thaliana columbia
gagaggagataaagagccaagcaaatggcgtggaataggataacacctggtcgtgtttattcagccacgtctctcactttcgtttccaccattaaagctgctttcgttaaacctcctttggcctctccgtctcgtcgtaacctccttcgtttctcatcatctcctttgtcatttccgtcgctccgtcgaggtttccacggtggtcgtattgtggcaatgggttcttctgctcctgaatcggtcaataagccggaagaagagtggcgtgcgattctttctcctgaacaatttaagattctcagacagaaaggcactgaatatccaggaactggagaatacaacaaagtattcgacgatggcatctattgttgggcaggatgtggtactcctctctacaaatccaccaccaaattcgactctggttg

SEQ ID NO: 157626 - DNA, 450 bp, Arabidopsis thaliana columbia
tgattctcgtatagacacacacatacctatacatacacactttaacacttatatgtgtagagtatagccatgggagaaggagaagcaaaagcagagcacgcagccaaagcagatcacaagaacgctccctccgcttcttcaacgccagaatcttactctaaagaaggcggaggaggcggtggagatgctcgccgcgcaatctgcggcgcgatcttcaccatccttgtcatactaggtatcatagccttaatcctttggctcgtctaccgtccacataaaccacgtctcaccgtcgtcggagccgccatctacgacctgaatttcacagcgccgccgttaatctcaacctccgttcagttcagcgttttagcaagaaaccctaaccggagagtctccattcactacgacaagctctctatgtacgtaacgtacaaagatcagatcataaca

SEQ ID NO: 157627 - DNA, 473 bp, Arabidopsis thaliana columbia
caatgaggaagactgttgccaagtccaaagggcccatcaagcagcccatggtacggatctgaccgtgtcaagtacttgggtccattctctggcgaatcaccgagctaccttaccggagagttccccggagactacggatgggacaccgccggactttcagctgaccccgagacattcgcaaggaaccgtgaactagaagttatccacagcaggtgggccatgctcggagccctaggctgcgtcttccctgagcttttggctagaaacggagtcaagttcggagaggcggtttggttcaaggccggttcacagatcttcagcgatggagggctcgattacttgggaaaccctagcttggttcacgctcagagcattttggccatttgggccacacaagttattttgatgggagccgttgaaggctacagagtcgcaagaaatgggccattgggagaggccgaggacttgcttta

SEQ ID NO: 157628 - DNA, 467 bp, Arabidopsis thaliana columbia
  unsure (1)..(467): unsure at all n locations
gcgggagcggaaggatctcatcatcctcacctttttctagccaacaagctcttcctcctcactgatccaggtgttccagacatcgagagagtccatctcaagtctgaggttttggatttcatcagatcccatggtatggctcctttgtacgaaaccctaattgcctcttcggtgctggatttggatcaaagcttgttagagtctatgcgggccgctaatgaagaggagcttaagaagctcgacgagaagattgcagatgcagaagaaaatttgggtgaaagtgaagttcgtgaagctcatcttgctaaggctctgtatttcatcaagattagtgataaggagaaagctttggagcagctaaaactcactgaagggaaaactgttgctgttggacaaaaaatggacgtggtgttttatacgttacaactngcttttttctatatggaccttgatctggtatcaaagag

SEQ ID NO: 157629 - DNA, 389 bp, Arabidopsis thaliana columbia
  unsure (1)..(389): unsure at all n locations
gcgcttaagctttatttctccgttttcgttttgtctttctttatcgtctcggtttcntcgtcggatgtcagacgacagcgatgagctcatgatccctcaggtggttggtggagccgagcctcaagttttgacctcagaggatcacttttctctcttcaagcggaagttcgggaaggtctacgcttccaacgaggagcatgactatagattctcggttttcaaagcgaatctcaagcgagcgaggcgtcaccagaagttggatccgtcggcgactcatggtgttacgcagttctcaaatctgactcggtctgagttgcgttagaagcactttggggttagaagtggcttttagcttcctaaaaatgccaacaaggcttcgatttttccta

SEQ ID NO: 157630 - DNA, 452 bp, Arabidopsis thaliana columbia
gcgagaagttcaagattttcaacacaaacaacctatgggttaacttgaaggccatcaaaaagcgggtgggggctgatgcactgaaaatggagatcattccaaacccaaaggaagttgatggagtcaaagttcttcaactggaaactgcagccggtgctgcgataaggttctttgacaacgctatcggtgttaatgtacctcgctcacggttcttgccagtgaaggcaagttcagacttgctgctcgtccagtctgatctctacaccttagttgatggctttgtcactcgaaacaaagctagaactaacccctcgaacccgtcaattgaattgggacccgagttcaagaaggtggctactttcttgagccggtttaagtccattcctagtatagtcgagctcgacagccttaaagtgtctggtgatgtctggtttggctcttccattgttctc

SEQ ID NO: 157631 - DNA, 464 bp, Arabidopsis thaliana columbia
  unsure (1)..(464): unsure at all n locations
gcagcttcacctctccagatttcgtgtgtgtagaatcatttcaagccatgtctccngctagagttgagactaccaagaggggtgatcctaaagccaaagccttgaaagcggcaaaagctgtgaagtctggtcaagccttcaagaagaaggacaaaaagattaggaccaaggtcaccttccacaggccaaagactcttaccaagcctagaactggtaagtacccaaaaatcagcgctactccaaggaacaagttggatcactaccaaatccttaagtacccactcaccactgaatctgcgatgaagaagattgaagacaacaacactcttgttttcattgttgacattcgtgctgacaagaagaagattaaggatgctgttaagaagatgtatgacatccagaccaagaaagtgaacacactcatcaggcctgatggaaccaagaaagcttacgtgaggcttaca

SEQ ID NO: 157632 - DNA, 481 bp, Arabidopsis thaliana columbia
  unsure (1)..(481): unsure at all n locations
caggtaactaattaatattcaaaaagatggctcaaaaagtggaagcagggggtggcgccgggggagcttcatgggatgagggtgtccacnatggcgttagaaaggtgcatgtagggcaaggccaagatggtgtgtcatctatcaacgtcgtgtatgcgaaggactctcaagatgttgaaggaggtgaacacggaaagaaaacgttacttggatttgaaacgtttgaggttgatgcagacgactacatagtagcagtgcaagtgacctacgacaacgtgtttggccaagactctgacatcatcacatctatgaccttcaatacattcaagggaaaaacatctccaccctatggattggaaacgcaaaagatgtttgtactcaaggacaaaaacggtggtaaacttgttggctttcatggacgcgctggtgaagctttatatgctcttggagcataatttgctacaaccacaacttctgtgac

SEQ ID NO: 157633 - DNA, 283 bp, Arabidopsis thaliana columbia
attaaagtcaatggcgtcacgtttatgtcttctccttctcgttgcgtgtatcggcggagcatttgccggagacgtcagggaactcaatcgatctcagagggagttcgattatttcgctctatctcttcaatggcctggaacctattgccgtggaactcgccattgttgctccaaaaacgcttgctgcagaggctccgatgctccaactcaattcacaattcatgggttatggcctgactataacgatggttcgtggccttcaatgttgtatcgatctgacttt

SEQ ID NO: 157634 - DNA, 454 bp, Arabidopsis thaliana columbia
ctgacgcgtgggttcggaccttttctctcttccctgaagctcccctcactcactcttctagtaggttgaacaacagagacaatggcggttcccaaagccattattctacctatcttgctactcatctgtggtgctgctctcggagctcctgcttctgaaggttatcttcgtaatggaaacttcgaagagtcaccaaagaaaaccgacatgaagaaaacagttctactaggcaaaaacgccttgcccgaatgggaaaccaccggtttcgtcgagtacatctcctgctgtcctcatccaggatgcatgtacttgccagtggctcatggagtccacgccgtgaggctcggaaacgaatctacaatctctcaaaagttagaaatgaaaccaggttctctctacgcactcacgttttgggcgtcgagaacttgtgcacaagacgaatttcttagagtct

SEQ ID NO: 157635 - DNA, 430 bp, Arabidopsis thaliana columbia
  unsure (1)..(430): unsure at all n locations
acgctttgttcaagagttcaagaggaagaacaagttagacattagtggaaacccgaaagctctaaggagggggagaaccgcctgtgagagagcgaanaggactttgtcatctaccgctcaaaccaccatcgaaatcgactctctgttcgatggtattgacttctacgctcctatcacccgtgccagattcgagagagcttaacataaatctcttcagaaaaagtatggagcccgttgagaaatgtcttcctgatgctaagatagacaagaactcaatccatgatgttgtccttgttggtggctcaacccgtattcccaaggtgcagcaattgctcgttgactctttctacagcaaggagctcttcacatatatcaacccccatgaggctgttgcatatggtgctgctgtccaggcaactattctcagtgg

SEQ ID NO: 157636 - DNA, 487 bp, Arabidopsis thaliana columbia
gggccgaccgacgcgtccggctgcactcgtcgttacagtcttatcaaaagattttgatgttctcaatcttaagaggacccgtagctggaatggaggggagagacaatttgcaagaagagcagccataatgggtggtggcgattttacagttcctgtacaaagggttactgattttctgcaaaacaagctatctgaaacacctttacctccatcaagctatagattaggagtgaagtctgcaaatctgcatgaactgtttcctgctcatatcacagaggctctgcgagagtctatctctatgtttgaaaaggagttaccgggattcatctcagaggaagcactcctccacggcgtaaagacaagaacaagctcccctgttcggatacctcgtagcaatgagacgtacgagagtacgagcttaaaaggtctatacccagttggtgaaggagctggttatgctggtggaattagaagtgctgcagtggat

SEQ ID NO: 157637 - DNA, 262 bp, Arabidopsis thaliana columbia
cgcgtaccgggtatcttccactttgccgctctttattaaatttcttcgccgtagtctctctaatcttggtgcttaagctgttttaacggagagatcgggagattgcaccgcatcctgttcctcgtttctgagcgtattcgttagaatgcgtgaattctggaagcaaagagtcatctatggtaatattccaaagcttgcaatggctgatgctgatatcattcatacaactttgggttctcgttctatgttgaaaatgcttatt

SEQ ID NO: 157638 - DNA, 460 bp, Arabidopsis thaliana columbia
  unsure (1)..(460): unsure at all n locations
ccgggccggcccacgcgtacgtaccgggcgagctcgatccattgatttagattatgacaactccacaagtgaagaccgnttgggtcgttgggttgaacaagggacatattgttaccagacgtgaattagctcctcgtcctcgttctcgcaaaggaaaaacgagcaagaggacaatctttatcagaaacttgataaaggaagttgctggtcaagctccctatgagaagagaatcactgagcttttgaaggttggtaaagacaaacgtgctcttaaggttgctaagaggaagttgggaacccacaagagagccaagcgaaagagagaggagatgtccagtgttctccgcaagatgaggtctggcggtggtggggcaactgagaagaagaagtgaacgtcatcttaaagttgtgaatcgctcggaaaagagtatggtttcttgttgcaaaatcgntattatga

SEQ ID NO: 157639 - DNA, 384 bp, Arabidopsis thaliana columbia
gcgatataattgagactggcttgcttagccgcgtataactcagaactcattcgctgcaaacatggcaagaggtttgaagaagcatttgaagaggctcaatgctcctaagcattggatgcttgataaacttggtggtgcctttgcccccaagccgtcttctgggccacacaagtctagggagtgtttacccttggtccttatcatcaagaacaggttgaagtatgctctgacatacagagaagtgatttcgatcttgatgcaaaagcatattcaagttgatgggaaagtgaggactgacaagacttaccctgctggtttcatggatgttgtgtctatccccaaaacaaatgagaacttccgtcttttgtatgacaccaaaggacg

SEQ ID NO: 157640 - DNA, 420 bp, Arabidopsis thaliana columbia
cgcgtgcgaataaacagagggagtcgccaaattttctcatcattttctcgagaaaatagactaaaagcgattcccgtgagaaagaaagaacaaaaaaaaaacatccgagtgaaaatgagagaaattcttcatattcaaggaggtcagtgcggaaaccagatcggagctaagttctgggaagttatttgcggcgagcacggtattgatcaaaccggtcagtcatgtggcgatacagatctacagcttgaaaggatcaatgtctattttaacgaagctagcggaggcaaatacgttcctcgtgctgttcttatggatctggagcctggaactatggattctctcagatctgggcccgttggtcagattttccggcctgataactttgtttttggtcagtctggtgctgggaataactgggcg

SEQ ID NO: 157641 - DNA, 356 bp, Arabidopsis thaliana columbia
  unsure (1)..(356): unsure at all n locations
tttaaatgggcaaagtggcttctnaattacaaaataaaccaaacaaaggaaacaacatttgacaaacaaaacaacaatttctccatattaaaccgcaacaacacgagtttctgttattgctaaaagtgaatctccctagtcacgtaacattgttgctaccagatgattcctccaacaaaccaccacctttctttacagtcacatacttttcaaaactcggttccataagatcggctttcttcaccgtcaatgtgaatctaaaccggctcgaatcagacctcaaacaagttctgttcgtcatagagttaagatcagccactgcttcaacaattgaacaagctttactaacacacaat

SEQ ID NO: 157642 - DNA, 443 bp, Arabidopsis thaliana columbia
ctttcttcttcaaaagttcgaaacttttttttttccggcaatggagggactagttccggtgcagagacttccaattaaggtggcttcaccttctctgtatcggtgtaacaattctgtctcaatcagacgttcaatttcaggttttgccatggacaggaagataaactttagggctccgtcgcaattctcgatccgagctcaacagtcggatttgaaggaaagcttagctgtgtcttcttcatcagtagaggataaaggaaatgttcttagaatcaaggaatgggaagtagagatgtatcaggaggaattagctattaatcaaggtattaggataaggagaaaaccaccaagtaaggctcctttgggatactctggaccatttgagttgagattgcataacaatgatgctgattcttctcgtaatatcttggaggagatcacat

SEQ ID NO: 157643 - DNA, 416 bp, Arabidopsis thaliana columbia
  unsure (1)..(416): unsure at all n locations
acgcacatgggttctcttgacttgccttacgctttatcgttcaagggaagaagtgaagccttggtccanattgtattgggggagggtgctcaaaacgtatttgaggaagaacccgatggcgaagacgatatgggaactagttaagtcggtggacaacgaaaagatctcttacgaccacttctttttcaggacatttaaagtcgatggttatggaattgattccctggcgagttttttcatggattatggatataaagttggaggcagacttgattttccaaagaagaaaatacaagttctctggctttctactgcggatgttcacttccccgataatggttacaggattggcaatggccctttgccaagacttgttatagctgagcttcttgtggaagaactaaacctgagtcaca

SEQ ID NO: 157644 - DNA, 324 bp, Arabidopsis thaliana columbia
gatctcagttccttacagaagaatctccgactcgtttctttgccggcattctcagatttccggatactacccatgaacagtgatgggttcatcggaaaggtacttcttcgtatttgtaatattcgatgaaatatgaactgtgtttaccattgacgtcttctctctgatccataattggcttttaagttgcacacatttgtttattattggtagatctggtattatctgcatagattaagatcatcaatttaatctgctgctcgtagtgtgtcttgatcttgatgaatctttcacatgcattgcttattatgtacatgagctggg

SEQ ID NO: 157645 - DNA, 430 bp, Arabidopsis thaliana columbia
  unsure (1)..(430): unsure at all n locations
gaggactcccaaggttaaccgtaaccctgacctaatcaggggagttggaaaatattcgaggtctcagatgtaccacaagagaggtttgtgggctatcaaggccaagaacggtggcgttttccctcgtcacgatgctcagccaaaggtcgacgctccggttgagaagcctgccaagttttatccggcggaagacgtcaagaagccgcttgttaacagacgcaagcctaagcctaccaagctaaaagccagcatcactccaggaactgtgttgatcattcttgctggtagattcaagggtaagagagttgtcttcctcaagcaactttcttctggtttgcttcttgtaacaggaccattcaagattaatggtgttccattgagacgtgttaaccaagcctatgtgattggaacctncacaaagattgacatt

SEQ ID NO: 157646 - DNA, 358 bp, Arabidopsis thaliana columbia
ctcgggttctggatcctcgacgtagcctacattaccttacaaggaccttgccgtgctttcttagccgacttagccgccggtgacgctaagagaacgcgagtcgcaaacgcgtttttctctttttttatggcggttggaaacgttttgggttatgcggctggttcgtacactaacctccacaagatgtttccgttcacaatgacaaaagcttgcgatatctattgcgccaatctcaagacttggttcttcttatccatcactcttcttcttatcggcaccggcacgtctctttggtacgttaatgacaaacaatgggcttcggcggcgcgaaatggccaccaccaccaggagaccttaa

SEQ ID NO: 157647 - DNA, 406 bp, Arabidopsis thaliana columbia
ctccgatcgaatcgccgacggagaaatgaccaagttcaggaagctcggccgcccagcaggtcaccgtatgtccatgctcaggactatggtttctcaattggtgcaacacgagcgaattgagaccactgttacaaaggctaaagaagttcgtcgtcttgctgataatatgattcaactcggaaaagagggttcactagctgcagcaagaagagctgctgggtttgttagaggagatgatgtacttcacaagatttttacagaattggctcatcgatacaaagatagagctggtggatacacaagaatgcttcgtactcgcattcgtgttggtgatgctgccccaatggcctatatcgagtttatcgatagagagaacgagctaaggcaatcaaaaccagctactcct

SEQ ID NO: 157648 - DNA, 418 bp, Arabidopsis thaliana columbia
tgattaatgaaacttgtcgtggaccagccttatgggacatctactggagaagatatccagagaggtgcaataacgataacggcgatgtggacggtgatttcttgcatcgtttttaggaagatatacaactaatgaagaatgtagacacaaacacctttagaacgtgtatcgcatggacaagaatattttctgatccgagaaaggagaaaggagtgagtcacgctggtgtgcaattctaccacgacctgatcgacgagctcataaaaaatggtataactccattcgttactgtttattactgggacactgcacaagatttacaagatgaatatggcggctttttaagcgaaaggattgtgaacgatttacgagagtatgcagattttgtatgccaagaatacagtggaaaagtgaaaca

SEQ ID NO: 157649 - DNA, 430 bp, Arabidopsis thaliana columbia
  unsure (1)..(430): unsure at all n locations
gtcagggagagcaaaacaaagatcggagaagatgaagacgattctttcttccgaaacgatggacatgcccgacagtgttaccatcaaggttcacgctaaagtgatcgaagtcgaaggacctcgcgggaagcttgttcgcgatttcaagcatctcaacctcgatttccagctgatcaaggatccagagactggaaagaagaagcttaagatcgattcgtggtttggaacacgcaaaaccagcgcctccatcagaaccgctcttagccacgtcgataacttgatctccggtgttaccagaggtttccgttacaagatgaggttcgtgtacgcccattttcccatcaacgcctccatcggcggtgacggaaagtctatcgagatccgtaacttncttggcgagaagaaggtgaggaaagtagagatgttggat

SEQ ID NO: 157650 - DNA, 369 bp, Arabidopsis thaliana columbia
caccattcaggatcagagattcgtgacctgttatagacactcaatatgagtaagcttcagagtgaggctgttagagaagccataacgactatcaagggaaaatctgaggagaagaagcgtaactttggtgagacaggggagcttcaaaatggtctggagaactatgacccacaaaaggataagcggttcaagggatctgggaagcttccacatatttcttggccaaaaatggagaactggattcttggagaagcttaacatggtgaggaggccgagaaaatgggacttaataacatggatggtgaggctttgaaaaagcttaacaagaacaagaagcttgttaagaagcttgctaagtcttaccatgct

SEQ ID NO: 157651 - DNA, 409 bp, Arabidopsis thaliana columbia
cgattaatgaaacttgtcgtggaccagccttatgggacatctactgtagaagatatccagagaggtgcaataacgataacggcgatgtggccgttgatttcttccatcgttataaggaagatatccaactaatgaagaatctaaacacagacgcctttagaatgtctatcgcatggccaagaatatttcctcatgggagaaaggagaaaggagtgagtcaagctggtgtgcaattctaccacgacctcatcgacgagctcataaaaaatggtataactccattcgttactgtttttcactgggacactccacaagatttagaagatgaatatggcggctttttaagcgaaaggattgtgaaggatttccgagagtatgcagattttgttttccaagaatacggtggaaa

SEQ ID NO: 157652 - DNA, 395 bp, Arabidopsis thaliana columbia
gaaccacttgacttctgctactatgtctggtgtgactcgctgtctgaggttccctggtcaactcaactctgacctccgaaagcttgctgtgaatctcatcccattcccccgtcttcacttcttcagggaggggtttgctcctctcacctcaagaggttctcagcagtaccgttccctcacagtccctgagctcacccagcaaatgtgggactccaagaacatgatgtgtgctgcagacccaaggcacggacgctacctcacaggctctgcacatgttcctgggcaacgatgagcacacaggaagttgacgagcagatgctgaatgtgcagaacaagaactcgtactactttgtggagtggatccacaacaacgtgaaatcgacaggctgtgacat

SEQ ID NO: 157653 - DNA, 428 bp, Arabidopsis thaliana columbia
cttgtatctgtagggtacaagaatgtgattggtgcaaggagagcatcatggagaatactatcttccattgagcagaaggaagagtccaagggaaatgatgaaaatgtcaagaggcttaagaattatcgtaagagagttgaagatgagcttgctaaagtttgtaatgacatcttgtctgtcattgataagcatctcattccatcgtctaacgctggggagtcaactgtctttttctacaaaatgaaaggagattactatcgctatcttgcggagttcagttctggtgctgaacgcaaggaagctgcagatcagtctcttgaagcatataaggctgctgttgctgctgcagagaatggtttggcacccacacatccagttagacttggcttggcgttgaacttttcagttttctactatgagatcttgaa

SEQ ID NO: 157654 - DNA, 426 bp, Arabidopsis thaliana columbia
cggacgcgtgggcggacgcgtgggcaaattatgacattttaattatgtgttagatgtactaataccttaccccatccatctagaaatcttggttcaaaccctacgttaccgggtaaaagatgcctcttctttgcatttttttcggttctgtttatacgagtattgtaattggaagaatttttatattaaaaaaaaatcaattttgaatccaagatttttcttgttcttatataattcttatgtatgtgaatacgaatccatcttttttttttctacgcaagcggtcttcgcatttacgatcgacatcttatgaagtcctttttgagcgaattgtattctatggaaaaatacaccattttttcaaagtttttgttaataattttccggcaatcctagggttgctcaaggatcctttcatacattatg

SEQ ID NO: 157655 - DNA, 188 bp, Arabidopsis thaliana columbia
ctcctttcctttcattgtagttaacgaaaagattacgataatggcaacatcagctatccagcaatcctccttcgccggccaaacggctctcaagccctccaacgaactcctccgcaaggttggtgtatccggtggtggccgtgtgaccatgcgtcgtaccgtcaagtctactcctcaaagcatctggt

SEQ ID NO: 157656 - DNA, 420 bp, Arabidopsis thaliana columbia
aagaaatgaaagagatgggagtgatagtgcttcttctccttcactcgttcttctacgttgccttttgcttcaatgatggactactaccaaacggtgacttcgaactcggtccacgacattcggacatgaaaggaacacaagttatcaacataacagcaatcccaaactgggaactctcaggctttgtcgagtacattccctcaggacacaaacaaggcgacatgatccttgtcgtgcctaaaggcgcattcgcagtacgtctaggcaacgaagcctcaatcaaacaaaaaatcagcgttaagaaagggtcgtactattcgataacgttcagtgctgctcgaacatgcgcacaagacgagcggttaaacgtttccgtggctcctcaccatgcagtgatgccgatacaaacagtgtatagta

SEQ ID NO: 157657 - DNA, 426 bp, Arabidopsis thaliana columbia
cgccatttggtttctcttgttggatactgcattgcggattcagagagattgcttatctatgaatatgttcctaaccaaacattggaacatcatttgcatgggaagggaaggccagtacttgaatgggctaggagagtcagaattgctataggttctgccaaaggtttggcgtatttacacgaagactgtcacccaaaaatcattcacagggacataaagtccgctaacatcttgctggacgatgagtttgaagctcaggttgctgactttggacttgccaaactcaatgattcaacacaaactcatgtatcaactcgcgttatgggaaccttcgggtacttggcaccagaatatgcacaaagtggaaagctgactgatagatcagatgttttctcgtttggggttgttctcttagagcttataaca

SEQ ID NO: 157658 - DNA, 421 bp, Arabidopsis thaliana columbia
atcaaaactgcaggaaggatttggttgtgaagatggcatcgaagttgatacaagttcaatcaaaggcatgtgaggcttcaaagtttgtggctaagcatggaacttcctactacagacagctgttggagaagaacaagcagtatatccaggaacctgccactgttgagaagtgccaagagttgtctaagcagttgctctacacccgtcttgctagcattcccggacgctatgaaaccttctggaaggaagtagactacgcaaagaacctatggaagaacagatccggtctgaaggtagaagatgcaggaatcgctgcattgtttggtctcgaatgctttgcatggtattgcgcaggtgaaatcgccggcagaggattcaccttcacaggctattacccatgaaggagagtaacaataacttg

SEQ ID NO: 157659 - DNA, 425 bp, Arabidopsis thaliana columbia
cgtctttctcggtagtagtatcgacgatttcgtcgctgatgctattatgagtcagttgcttctcttagatgctaaagatccaaagaaagatatcaaactctttatcaattctcctggtggttctctcagtgcaaccatggctatatacgatgtggttcagcttgtgagagctgatgtttcgacgattgctcttggcattgctgcatcaacagcttcgattattcttggtgcgggaactaaaggcaagcgctttgctatgcccaacacgaggataatgattcatcaacctcttggaggtgcaagcggtcaagctatagatgttgagattcaagctaaggaagttatgcataacaagaacaatgtcaccagcattatcgcgggatgtactagtcgatcgtttgagcaggttctgaaagatattgata

SEQ ID NO: 157660 - DNA, 434 bp, Arabidopsis thaliana columbia
tgacgacggcgcaatttctccacagagcgacgctactgaagaagccacctcctcctccatggaatgtgaactcaagctttctcacatctacctcctattcgatacctagaccttcttctctccgccgctctttgcccttgtctatcaatggcgacgcgacacagcccacctctcttctccaccaccaccggtttctcagttcattgacacggcggctcagtctttccggttcgtgtcctctacggcttcttcaggaggatggagattggagcaaagaccatttctgggccgttattcgttttctccgtcagtcctcaagactccacgagattcttcctgtttttgatacgtggaagaatcttgagccttcgcgaataagtgagaacaattacgaaaggattataaggtttttatgtgaggaaaaatcgatgagg

SEQ ID NO: 157661 - DNA, 99 bp, Arabidopsis thaliana columbia
cgtagccgcatgtactcttttcagattcttacttgcagctatgggtaaagagaagtttcacataaacattggggccattggtcatgtggattctggaaa

SEQ ID NO: 157662 - DNA, 416 bp, Arabidopsis thaliana columbia
cttcttcaaacaaaaaatgggtttcttaaagttatctccaatgatccttctcctagcaatgatcggcgtttcatatgccatggacatgtcaatcatctcctacgacgaaaaccaccacatcaccaccgagaccagccgtagcgactcggaggttgagagaatctacgaagcgtggatggtggaacacgggaagaagaagatgaatcaaaacggtcttggtgcagagaaagatcaaagattcgagatctttaaagataatcttcgtttcatcgatgaacataacaccaaaaacctcagttataaacttggtttaacccggtttgctgatttaaccaatgaggagtaccgatctatgtaccttggtgctaaaccgaccaagagggttttgaaaaccagtgatcggtatcaggcgcgtg

SEQ ID NO: 157663 - DNA, 215 bp, Arabidopsis thaliana columbia
ctcctatcgaggagggggagggcgagaggagacattcacgtcttgggccttgaagatctcgtaggccgttgaggccgaggagacgaggactatggggaagttaaagaagcggaggtggaggagaggtccatatttagatgagatgttcttgaaagactggtggattgggacaaagagtataaggtgaagatgaccaatgattggtaatgaaggag

SEQ ID NO: 157664 - DNA, 425 bp, Arabidopsis thaliana columbia
ggattgttaatggggattggaagatcattcagaagaaagagagcttcttctcttgatatcctctccccaaaacgagctcctagagacttctacaagggcaaaaactgcaaacctactggtttccacacgagaaaaggaggatatgttgtgcagccagataagttaccgaattacgtagtccctgatctcaccggctttaagctgaagccatatgtatctcagtgccctctacaagtcaacacaaacgagtcaactgaagcttccaagtgaaaaatagtcaatcaggagaaatatgtttttaagtcttcttcataaagctttaagttaggactctgttcttctattgtccgtaatccttttgtgctattcttaaaatgggagatttgatttgatattttcacgaaacgacatgcaaagtaattggt

SEQ ID NO: 157665 - DNA, 417 bp, Arabidopsis thaliana columbia
gacgataagcaaagtagaaaacacaagtttctctcacacacattatctctttctctattaccaccactcattcataacagaaacccaccaaaaaataaaaagagagacttttcactctggggagagagctcaagttctaatggcgaacttggtcttatcagaatgtggtatacgacctctccccagaatctacacaacacccagatccaatttcctctccaacaacaacaaattcagaccatcactttcttcttcttcttacaaaacatcatcatctcctctgtcttttggtctgaattcacgagatgggttcacgaggaattgggcgttgaatgtgagcacaccattaacgacaccaatatttgaggagtctccattggaggaagataataaacagagattcgatccaggtgcgcc

SEQ ID NO: 157666 - DNA, 426 bp, Arabidopsis thaliana columbia
gaaggaagagaggagataaaaagccaaacaaatggcgttcaatatcataacacctggtcgtgtttattcagccacgtctctcactttcgtttccaccattaaagctgctttcgttaaacctcctttggcctctccgtctcgtcgtaacctccttcgtttctcatcatctcctttgtcatttccgtcgctccgtcgaggtttccacggtggtcgtattgtggcaatgggttcttctgctcctgaatcggtcaataagccggaagaagagtggcgtgcgattctttctcctgaacaatttacgattctcagacagaaaggcactgaatatccaggaactggagaatacaacaaagtattcgacgatggcatctattgttgtgcaagatgtggaactcctctctacaaatccaccaccaaattcgactc

SEQ ID NO: 157667 - DNA, 430 bp, Arabidopsis thaliana columbia
ctcgatgttcccagatctgagattctccattttagtaacaacgatcccatggcttctggctctgcttctcagcctctgaaacgaggtcgtggtcgtcctcctaagcctaaacctgaatctcaaccacaaccactacagcaacttccaccgaccaatcaagtccaggctaacggacagccaatctgggaacagcagcaagttcaatcacctgttccggttccgactccggttacagagtcggcgaagagaggacctggtcgtccaaggaagaacggttctgctgctcctgctactgcaccaatcgttcaagcttcggttatggctggaattatgaaacgtagaggtagaccaccgggtcgtcgagctgctgggagacagaggaagcccaaatccgtttcttctactgcctctgtgtatccttatgttgcta

SEQ ID NO: 157668 - DNA, 428 bp, Arabidopsis thaliana columbia
catcttttcccacccaagatctctccttcttgtttccccagatctgaaatttcaaaagctacccaattttaactcaagactctgaacaacacatctagatccatttccatggcgagcgcctggaaaaaagacaagaaccaaaaacttttatcaccaaagacactaatctcacttcttgtcctttccattatcttcctctcttctctcttcttcttcttctctaactcctctctccaatactccaatccaaatctctccatcaattccccataccctatccctccttttgattgcttcaaatgtccacaatcaaaacccataatcgcaaacgtcgtcgaaaatctcaagtacccttttgtttactctctcgctgatctcggtaatctcccggagaaaccacataagaacattgttaggctacttaaagg

SEQ ID NO: 157669 - DNA, 426 bp, Arabidopsis thaliana columbia
gagagagcgatagtgagatttagatcaacagatttgtatcgatttctgaaaacatgcagtacaagaatctggggaaatcgggtttaaaagtgagcacgctctcgttcggagcgtgggttacgttcgggaaccagctcgatgtgaaagaagcgaaatcgattcttcagtgttgtcgtgatcatggagtcaatttcttcgataacgctgaggtttacgctaatggtcgcgctgaggagattatgggtcaagcgattcgtgaactgggttggcgtcgatccgatatcgtcatctctaccaagatcttctggggtggtcctggtcctaacgataagggtttatctaggaaacatatcgttgaaggcactaaagcttctctcaaacgacttgatatggattacgttgatgtgctctattgccacaggccgg

SEQ ID NO: 157670 - DNA, 428 bp, Arabidopsis thaliana columbia
aataccgtttgccagatgattatggggaggagttgttcagaggaaaacggtgaagcagagagagtcagaggcttggtgaccaagacagatgccttgacgaagaagtttatcttggcaggcatcttgcggaaaccgcttcagaagattgggatctcactgttcaaaaaggagttaatggatgcttcctgcaagttcaacgaggtgttggagaagattcttgtagaatataaagagaaagttgaagagcatcatcaaggtactgacatgatggataagctcttagaagtttatggagacgaaaaagcagagtataagatcactagagaccatatcaagtccttgtttgtggatcttttctttgcaggcactgacacctggacgcacgctatacaatggattatggccgagatcattaacaactcgtacat

SEQ ID NO: 157671 - DNA, 420 bp, Arabidopsis thaliana columbia
caaaactgagagaaactaaacaaattcaaatgaccaccaccgataaatccgccggaatcgtaactgactcggaagccggaccggagacttctcttctcctcaatcctcacgaaggatctaccaaaaaagctccttctgattcctaccacttcgcttacatcatctacttcaccctcggcgttggctttcttcttccatggaacgcattcatcaccgccgtcgattacttctcttacctctatccttccacggccgtcgatcggatcttcgccgttatctacatgctcgttgctcttgtttgtctattcgttatcgttgtcttctatgcacataagagcctcgctagctttagaatcaatctcggtcttttactcttcgtaatcgccttgcttgtggttcctgttttggatctggtttatg

SEQ ID NO: 157672 - DNA, 424 bp, Arabidopsis thaliana columbia
cagacctcaatttcgttgttaaagaacaaagctttaagcagccatggatccaaaccaacgtatcgcgagaatctctgctcatctcaatcctcctaatcttcataatcagattgctgacgggtcaggtttgaatcgggtggcttgtcgggcaaaaggtggatcacccggattcaaagtggcgatacttggagcagctggtggaattggacaacctcttgcgatgttgatgaagatgaatcctttggtttcggttcttcatctctatgatgttgctaatgctcctggtgttactgctgatattagtcatatggatactagtgccgttgttcgtggatttctcgggcagccgcagttagaggaagcacttacgggtatggatttagtgatcatacctgctggtgttccgaggaaaccagggatgacg

SEQ ID NO: 157673 - DNA, 424 bp, Arabidopsis thaliana columbia
atcatccatgggtcgtgttatcagagcacaacgtaagggagctggttccgtcttcaaatcccacactcaccaccgtaaaggtccggccaaattcaggagtctcgatttcggggagagaaatggttatctgaaaggtgttgtgacggagatcattcacgatccaggacgtggtgctccattggctcgtgtagctttccgtcatccttttcgattcaagaagcagaaggagcttttcgttgctgctgaaggtatgtataccggtcagtttctttactgtgggaagaaagctactctcgtcgtcgggaatgttcttcctctcagatctattcctgaaggagctgttatttgtaacgttgaacatcatgttggtgatcgtggtgttttcgctagagcttctggtgattacgccatttgtatcgctcac

SEQ ID NO: 157674 - DNA, 416 bp, Arabidopsis thaliana columbia
ctttcccgcgatttctttctctcctcgccgttgtcactctctctcttttcctcaccaccggtgatgcttcctctcgctctcgatccactccacctaaaacgaacgtactcgacgtcgtttcatctctccagcaaacacaaactatcctctcactcgacccgactcgttcctcactcaccaccaccaaacccgaatccctatccgacccggttttcttcaattcatcttcaccactatctctagagcttcactctcgagacactttcgtcgcgtcacagcacaaagactacaaaagcttaacactcagtcgactcgagcgcgactcatcccgagtcgccggaatcgtcgcgaagatccgtttcgccgtcgaaagagtcgatagatccgatctcaaaccccgttacaacgaagataca

SEQ ID NO: 157675 - DNA, 427 bp, Arabidopsis thaliana columbia
ggaaaaaaaaaaaaaagaggcagaaccaaaaaactttagggttcgatttcgctccttggtaatcaccatgtccggagaagaagaagagaacgccgccgaactcaagatcggagatgagtttttgaaggcaaagtgcttaatgaactgtgaagtctctttgattcttgagcacaagtttgaacagcttcagcaaatctcagaggatcctatgaatcaagtttctcaagtgtttgagaagtccttgcaatatgtgaagcgattcagccgctacaagaatccagatgctgttagacaagttcgagaaatactaagcagacatcaactcactgagtttgagctatgtgttcttggcaatctctgtcctgaaactgttgaagaagcagtggcaatggttccttctcttaagacaaaaggaagagctcatgat

SEQ ID NO: 157676 - DNA, 422 bp, Arabidopsis thaliana columbia
tccaagttgtaatattggagaagatggtgtatttccttgctgaagcagttcacggttctgcggctgatatcgctggaaagaacgtggcgaacccaaccgcgttgcttctgagtggagtgatgatgttgcgtcacctgaagttcaacgaacaagcagaacaaatccacagtgcaatcatcaacaccatagcagagggcaaatacagaaccgcggatcttggaggtagttcgaccaccacggaattcacaaaggcaatctgtgatcatctctgaacatcgtaaaatccaattctttatcgaatcttcttttgggagccttttttatagcctcgaattcttcttgttttcttgttttacgattagaataaaagaaaaagcaaaaaaacggctcttcatgagttttgaagttattgtttctgcctt

SEQ ID NO: 157677 - DNA, 435 bp, Arabidopsis thaliana columbia
tttttcttgaataaaatcagaattacaaacataaatggttttgcaaaagcttcctctcattgggctgcttttgctcctgaccatcgtcgcctctccagcaaatgcagatggacctgtttgcccgccgtcgaacaaactaagccgggcaagtttccctgaaggttttttatttggcacggctactgcggcataccaggtcgaaggtgcgattaatgaaacttgtcgtggaccagccttatgggacatctactgtagaagatatccagagaggtgcaataacgataacggcgatgtggccgttgatttcttccatcgttataaggaagatatccaactaatgaagaatctaaacacagacgcctttagaatgtctatcgcatggccaagaatatttcctcatgggagaaaggagaaaggagtgagtcaagctggtgt

SEQ ID NO: 157678 - DNA, 426 bp, Arabidopsis thaliana columbia
cggacgcgtgggtaaaggtatcaagacggacctgaaaggatactgtgaaagctggaggatgaacgtggaagttcacaacatcagaaagttcgatgtggtgcctcaagagtgtgtatcgcacattaaggattacatgacgtcatcgcagtacaaggatgacgtggcgagaaccgttgatgaggtcattcttcatttcgggagcatgtgctgtagcaagtctaagtgtgacggcatggacgcttggatctttgatatcgatgacacgcttctctctaccatcccttaccacaagaaaaatggcttcttcggaggagagaaattgaactcaacgaaattcgaggattggatacagaagaagaaagcaccagcagtgccacacatgaagaaattgtaccacgacatcagagaaagaggcattaagatctt

SEQ ID NO: 157679 - DNA, 410 bp, Arabidopsis thaliana columbia
  unsure (1)..(410): unsure at all n locations
accaacatgggatggatcatggtggtcctgtttcatgggtccagtcttttgagcaacaacggggggtgaatgggtgggctggtgagttcnagcagggtcaatctcaattgatgtcaagccaaatgagaagtatggatatgcaaaatatagctgcaatggagcagactcgtaagcttgcccatacactatctcaagatgggaatccgaaatttcagaattcaagattccttcagtttgtttccaagatgagccgtggtgaacttattattgatgagaatcaggtcaagcaagcttcaacccccggggggtgggctactgaatatgaacagcagtatctggggccaccaaagttggctgatcaatttgcaaatgagaaactttcacatggaccagaacagtgggctgatgag

SEQ ID NO: 157680 - DNA, 417 bp, Arabidopsis thaliana columbia
gtgacattgctggtatgggatctgatctctttggatcatatgctgaagcatcatgcgctgctcttgttgttgcctcgatctcatctttcggaatcaaccacgacttcactgccatgtgctacccattgctcatcagttcaatgggaatcttggtttgtttgatcacaactctctttgccactgacttctttgagattaagcttgtcaaggagattgaaccagcattgaagaaccagctcattatctcaactgttattatgactgttggtattgctattgtgtcatgggttggcttaccgacctcctttaccatcttcaactttggaacacaaaaagttgtcaagaactggcagctattcctttgtgtttgtgttggtctttgggctggactcattattggtttcgtcactgagtact

SEQ ID NO: 157681 - DNA, 420 bp, Arabidopsis thaliana columbia
gacttgtgcacagaaagttaaagttaaaaatgtctcaaagtatgtcataagtgcagcaaagaaccctgaatttgcgcagaaattacatgctgtgttgttagaaagtggtgcatcacctcccccagatttgtttatggatattaacccacataacttgagggggaagaatttgcttcaagagctccgccaagaaagtagcaattctatggtttctggtattccatgctacccagaaaaggtagctgaacaactgagagaatctgaaaggaaccccacagccgagagttaccaacaatcagtggaggtcgatttgtcaatgaagaggaactttgatttggataatactggtaaagcttcttcattcgaaaatatggaggttggcactgctgatggggagtctgctgtttgtgatagtcatga

SEQ ID NO: 157682 - DNA, 422 bp, Arabidopsis thaliana columbia
ctgctccaagaagctacacaacgattcgatgttttgaaggccaatttcaacgatgtcttcggtgcttctccccaactcttcgctcgctctcctggaagagtgaatctgataggagagcacattgactatgaaggatactcagtgttgccgatggctattcgtcaggatacaattatagcgattcggaaatgtgaggatcaaaagcagcttcggattgcaaatgttaatgataagtacactatgtgtacatatcctgccgatcctgaccaggaaattgacttgaagaatcacaaatgggggcattacttcatatgcgcgtacaaaggatttcatgagtatgcaaagtcaaaaggtgtgaatcttggttcaccagttggacttgatgtgcttgttgatggaattgttcctacaggttctgggtt

SEQ ID NO: 157683 - DNA, 423 bp, Arabidopsis thaliana columbia
cagaattacaaacaaaaatggttttgcaaaagcttcctctcattgggctgcttttgctcctgaccatcgtcgcctctccagcaaatgcagatggacctgtttgcccgccgtcgaacaaactaagccgggcaagtttccctgaaggttttttatttggcacggctactgcggcataccaggtcgaaggtgcgattaatgaaacttgtcgtggaccagccttatgggacatctactgtagaagatatccagagaggtgcaataacgataacggcgatgtggccgttgatttcttccatcgttataaggaagatatccaactaatgaagaatctaaacacagacgcctttagaatgtctatcgcatggccaagaatatttcctcatgggagaaaggagaaaggagtgagtcaagcttgtgtgcaat

SEQ ID NO: 157684 - DNA, 430 bp, Arabidopsis thaliana columbia
atctcaagctcatgtcgtatctcaaccttggtggtaaccgtctcactggaaccattccaggggttttcaaatccatgccagagctccgatctttaactctctcccgcaacggattctccgggaatcttcctccgtccattgcatcactcgcaccgattcttaggttcctcgagttaggccataacaaactctccgggacgattccaaactttttatcaaacttcaaggcgctcgacacattggatctctccaagaatcggttctcgggtgtcataccgaagagtttcgccaatctgaccaagatattcaatcttgatctctcccataatcttctaaccgatccattccctgtcttgaacgttaaaggcattgaatctttggatctttcttacaaccagtttcacttgaatacgatcccgaaatgggtgac

SEQ ID NO: 157685 - DNA, 428 bp, Arabidopsis thaliana columbia
ggcttctcccttcctggcaaattcatcccttttagccgccattgaagatgactggtaaggccaagccaaagaagcatacagcgaaggagattcaagcgaagatcgatgctgcgttgactaatcgaggcggaggaaaagctggaatcgctgatcggaccggaaaagagaaaggaggccacgctaagtacgagtgtcctcattgcaaaattacggctccaggtcttaagacgatgcagatccatcacgaatcgaagcatcctaatatcatttatgaggaatcaaagctcgtgaatctccatgctgttttagcaccagtagctgaatcgaaacctaaacctggtatcaggggaagcttgaagaagtaactctatgtttgaattttataaaatttgttatcttttgatgttaaagagtgtaatgtgctactt

SEQ ID NO: 157686 - DNA, 426 bp, Arabidopsis thaliana columbia
cgacgaaccgccacagataaggttcttctttttttttccaatatctctggattttttttcccctcgttgaagaaaatctagtggtgattaagccataggggaaacaaaacccagagagacgagtttgctagattttttttttttttggaggctgcatgagtttggagaagaaggcgagtagtacaaattacaactccagaaaggagaagaggagaatcaatttatagaatggttgtttcaatggctttggtcagacattctccgtctttcgattttctgtttcattttccggtcgacagaagccgttttctatcgccggttgctttttctagcgttcgctatcatcgcttccattcttgtagatggttaagtctccgcttttcaccttcatgttctcgcaggttaaacagttttagttcgaggtgt

SEQ ID NO: 157687 - DNA, 425 bp, Arabidopsis thaliana columbia
ggaagatacactgaagcaaaagagcaagtcatggcggtgacatcttcctctgcttttctccttaatccgttgacttctcgccaccgtcctttcaaatactcgccagagctctcttctctctccttatcctctcgaaaggctgctgctttcgatgtttcctcagctgctttcacgctcaagagacagagccggagtgatgttgtgtgcaaggctgtatctatcaagccagaagctggtgttgaagggctcaatatcgccgataacgccgctcagcttattgggaaaactccgatggtgtacttgaacaatgtagtcaagggctgtgttgcaagtgttgctgctaagcttgagatcatggaaccatgttgcagtgtcaaggataggattgggtacagtatgattactgatgcttgagagaaaggact

SEQ ID NO: 157688 - DNA, 420 bp, Arabidopsis thaliana columbia
gtgatttactgagtgaaaaaagcttatcgcggcgattagttcccggcgaagaagaagaagagagggaagaaaatggcgactaatggatctgctagctcagcgcagctctctcagaaggaagctgatgtcaggatgatgtgtgccgctgaggttcatcttggaaccaagaattgcaattaccagatggagcgttacgtcttcaagagacgcaacgatggtatttacatcttcaaccttggcaaaacatgggaaaagctccagatggctgctagagttattgttgccattgagaacccacaggacatcatcgtgcagtcagctaggccctatggacagagagctgtgttgaaagttgctcagtacactggagccaatgccaatgctggaagacacactcctggtaccttcaccaatcagatg

SEQ ID NO: 157689 - DNA, 411 bp, Arabidopsis thaliana columbia
gcagctgcaaacatggcaagaggattgaagaagcatctaaagaggctcaatgctcctaagcattggatgcttgacaaacttggtggtgccttcgctcccaaaccatcttctggacctcacaagtcgagggagtgtcttcctcttgtcctgatcatcaggaacaggttgaagtatgctttgacttaccgtgaagttatctctatcttgatgcaaaggcatatccaagttgatggcaaagtcaggactgacaagacttaccctgctggtttcatggatgttgtatccatccccaagaccaatgagaacttccgtcttctctacgacaccaagggacgtttccgtctccactccatcaaggatgaggaagcaaagttcaagctttgcaaggttagatctatccagtttggtcag

SEQ ID NO: 157690 - DNA, 418 bp, Arabidopsis thaliana columbia
cacggcttaagatagcatatggtgcagcacaaggtttagcttatctacaccatgactgtagtccaaggatcattcacagagacgtgaagtcgtccaacattctcttggacaaagacttagaggctcgtttgacagattttggaatagcgaaaagcttgtgtgtgtcaaagtcacatacttcaacttacgtgatgggcacgataggttacatagaccccgagtatgctcgcacttcacggctcactgagaaatccgatgtctacagttatggaatagtccttcttgagttgttaacccgaaggaaagccgttgatgacgaatccaatctccaccatctgataatgtcaaagacggggaacaatgaagtgatggaaatggcagatccagacatcacatcgacgtgtaaagatctcggtgt

SEQ ID NO: 157691 - DNA, 420 bp, Arabidopsis thaliana columbia
gagaactcttaaagccttctgcttccgtcgctcttcaccgtcactccaacgcccttgttgatgttttgcctccggaggctgattctagcatctcccttctcagccaatctgagaagcctgacgtctcctacaatgatattggaggatgcgatattcagaaacaggaaattcgtgaggctgttgaattgcctcttacccaccacgagctttacaaacagattggtattgacccacctcgtggagtcttgctctatggacctcctggtactggaaagactatgttggctaaggctgttgccaatcacacaactgctgccttcattagggttgttggatccgagtttgtgcaaaagtatctcggcgagggacctcgtatggttcgtgatgtcttccgtcttgccaaggaaaatgctccagcta

SEQ ID NO: 157692 - DNA, 422 bp, Arabidopsis thaliana columbia
cttcttctcatttctcaccaactccctccaaacccaacaaaagtgtttatattagcaaagccgccaaagtgtaaacgaaagtttataaatttcatttctgtgatcttacgtaattggaggaagatcaaaattttcaatccccattcttcgattgcttcaattgaagtttctccgatggcgcaagttagcagaatctgcaatggtgtgcagaacccatctcttatctccaatctctcgaaatccagtcaacgcaaatctcccttatcggtttctctgaagacgcagcagcatccacgagcttatccgatttcgtcgtcgtggggattgaagaagagtgggatgacgttaattggctctgagcttcgtcctcttaaagtcatgtcttctgtttccacggcggagaaagcgtcggagattgtact

SEQ ID NO: 157693 - DNA, 431 bp, Arabidopsis thaliana columbia
gtcgccgccgccgccgccgcaagtcttgtcggataagccttaaatggagacgcagaaaactcaagctgaaaacccgccaaaaccggccacgtcttcatgtcgaaagaagacaaaggatgatgccaatttcctagaagacgtcaaggatcacatcgatgatttcattaatgcttccatggatgatcacaagaactgtttcaacaaaaccatcaagaagatgtttgggttgtcaaaggctgttgcggataagcagcaaagtgaggctaaaggaggagtcgagagttatttgcctcttcagacaacagtctcagattagagaaactgatgatagaatcaagctaacaagatcttgtttcggtttactttttgttggtttgtttcggttaccattgtttagggagatatgcccatttataacagtaataaagatg

SEQ ID NO: 157694 - DNA, 417 bp, Arabidopsis thaliana columbia
gcaatatcatttccaatttataaaagttaaagccatggctgcatctttctctgtcccctctatgataatggaagaagaagggagattcgaagcggaggttgcggaagtgcagacttggtggagctcagagaggttcaagctaacaaggcgcccttacactgcccgtgacgtggtggctctacgtggccatctcaagcaaggctatgcttcgaacgagatggctaagaagctgtggagaacgctcaaaagccatcaagccaacggtacggcctctcgcaccttcggagcgttggaccctgttcaggtgaccatgatggctaaacatttggacaccatctatgtctctggttggcagtgctcgtccactcacacattcactaatgagcctggtcctgatcttgctgattatccgtacga

SEQ ID NO: 157695 - DNA, 432 bp, Arabidopsis thaliana columbia
cggaagagcacaagcacgaggaatcgatcatttagaagatctctgagaagatccatggtcacgatgactcttcttcggcttcttccgattcggatgacgataagaactctgcgtctctcaaaaccaagatttatcgtcttttcggaagagaacagcctcttcacaagcttttcggtggcggaaaacctgccgacattttcctgtggaggaacaagaaggtatcaggaggagtattgggtgctgcaactgtttcctggatcttattcgagttacttgagtacaatcttctcacactctgcggccacattggaattcttgctctcgcagtattgttcttgtggtctagtgctagtaccttcattcacaagttaccctcttcatatccctgaagttcacatcccccaggatgttgttctttagcttgcttttgga

SEQ ID NO: 157696 - DNA, 425 bp, Arabidopsis thaliana columbia
  unsure (1)..(425): unsure at all n locations
ggagtctctctccagttattttgctcatccatcgattcttagagttcaaaatggttgatcaagttcagcaccccactattgcgcagaaagctgccgggcagttcatgcgttcaagtgtttccaaggacgttcaagtgggttaccagaggccttctatgtatcaaagacatgcaacctacggaaactactccaatgctgcatttcaatttcctccgacatcccggatgttggcaacaactgcttctcccgtgtttgtccaaaccccaggagagaaggggttcactaactttgcccttgactttctgatgggtggtgtttctgctgccgtctncaagactgctgctgctcctattgaacgtgttaagcttttgatccagaaccaggatgagatgattaaagctggcaggcttttttaaccctacaag

SEQ ID NO: 157697 - DNA, 377 bp, Arabidopsis thaliana columbia
aacaggaacggaaacatagtagaacacttattcatcagggattatacaaggccccaaaacacaaaccaccaaagttttacatgaaacgaaacattgaacttcttaagcataacagagacgagatttagaaaccaccacgaagacgcaggaccaagtgaagagtagactccttctggatgttgtagtcggccaaagtacgtccatcctcaagctgctttccagcgaagatgagacgctgctggtccggaggaataccttccttgtcctggatcttggccttgacgttgtcaatggggtcggagctttccacttcaagggtgatggtctttccggtcaaagtcttgacgaagatctgcataccttcacgcagacgcaac

SEQ ID NO: 157698 - DNA, 299 bp, Arabidopsis thaliana columbia
gcggagaaaacttcgtctctcttctctgcttcgtcctcttatttcctgtgagataaaggcggagtctcgctccagttattttgctcatccatcgattcttagagttcaaaatggttgatcaagttcagcaccccactattgcgcagaaagctgccgggcagttcatgcgttcaagtgtttccaaggacgttcaagtgggttaccagaggccttctatgtatcaaagacatgcaacctacggaaactactccaatgctgcatttcaatttcctccgacatcccggatgttggcaacaact

SEQ ID NO: 157699 - DNA, 413 bp, Arabidopsis thaliana columbia
aatagagtctctttgaaacgaagcagctttgtcctgttctgatatccatggctttaccttcgtgcttaaagactggagctttaatgtctccggccactggatttaatttttccggcagtcttatgaagtcagacagcggcttcgccgttccgacaaagttacagagtactcgaaaaggtgatcgagagagattgagagtccaagctattttcagtttccctcctgcgtttctgacaagaaacggtcgagctgagaaacagaaacagctcaaacaagaacttcttgaagccattgagcctcttgaacgtggtgctacggcctcgcctgatgaccagcttcggattgatcagttagcgcgtaaagtggaagcagttaatcccaccaaggagcctttgaagtctgatttggtcaat

SEQ ID NO: 157700 - DNA, 357 bp, Arabidopsis thaliana columbia
agagaagagaagaggagactacactgctccatcattttctccttctggggatttttttttggaaaaatcgttctgttaccttttttttgcccattactcaaaccctaaccctaattttctgaaatcgcagagagagagagagagaggtttcttcgaattctttcatcatcaattcgctaactttgtttttttggggttaaatcgattaatcgttattttattagatactgtcgatcggagctaatcgactctctcttaacaaaccctaattttttggtcctctctcatggcttccgccacttccaataaccctgcttctttttctatgtctcctcgtcgtatcagcgggaatcacgg

SEQ ID NO: 157701 - DNA, 163 bp, Arabidopsis thaliana columbia
gaaaaaggaaagcaaacttctgaagtttttggggtttatgtggaatccactttcatgggtcatggaaatggctgcaatcatggccattgctttggccaacggtgatggtaggccttccgattggcaggattttggtggtattatctggctggtgggtattaac

SEQ ID NO: 157702 - DNA, 419 bp, Arabidopsis thaliana columbia
ctgaacatcgagaaaaaatgagttggtggtgggctggcgccatcggagctgccaagaagaaactcgacgaagatgaaccatcacaaagcttcgagagcgtcgctctcatcatcggcgttactggaatcgtcggaaacagcttggcggagattctccctctttccgacacacccggtggtccatggaaagtctacggcgtcgctcgtcgtcctcgtcctacctggaacgccgatcatccgatcgattacatccagtgcgatgtctccgacgccgaagacacaagatccaagctttcccctttaaccgatgtcacacatgtcttctacgtcacctggaccaatcgtgaatcggaaagtgaaaactgtgaagcaaatggctcaatgctccgtaacgttctccaagcgattatcccatacgcg

SEQ ID NO: 157703 - DNA, 416 bp, Arabidopsis thaliana columbia
cccagatttgaagatcggagatatgaatctcttctttctctggatttgaaagttcgataaaaatctactgatacatcgacttctggaagcgatctcgatctctctagaattgtttcgacgacgaagatgaagaagattcaaattggtgcggtggcgctattggtgtttctatctgtggcctctctctttgaaatcggattggcttctccgaacacagttcctgctttcctctggtctccgcatctccagtctgctaatggtgaattggatgaggctgtaaattatcaggtcatgtctgcaaaggatctagttggttctgttttcactcaaggaggttggtcaaactttctgtgctcagagaagaagcttgagcaacctgttgatgttgcacttgtgttcataggcagagagttact

SEQ ID NO: 157704 - DNA, 461 bp, Arabidopsis thaliana columbia
  unsure (1)..(461): unsure at all n locations
gaaaacccgggccggccgcacgcgtacgcaagtcatcagaacctagtcttgagtattggttcaagtgcattgatttgnatccaggtgggggtttgacgcggaacgagctgcaattcttttacgaggagcagctacatagaatggaatgcatggcgcaagaggcggtgttgtttgaggatattttgtgccaattattcgacatggtcaaaccagaggacgaagggttcatttgtctaaatgatttgaagggttctaaactttctggaaatgtcttcaacatactttttaacctcaacaagtttatggcgtttgaaacgcgtgatcccttgctcatgcgccaggagcgcgcaaatccgacatggacagagtgggatcgttttgctcatagagaatatattaagctatcaatggaagaagatgtcgaagatgcttctaatggaagtgctgaagcatgggacgac

SEQ ID NO: 157705 - DNA, 430 bp, Arabidopsis thaliana columbia
gatcgttacgctcttcgtacttctcctcaatggttatgtcctcaaatcgaagtgatccgtgacgcggcgaaatcgatcgagcgtgagattaactccgtcaacgataatccgttgatcgatgtttcgaggaacaaggcgattcacggtggtaacttccaaggaacaccaatcggagtttcaatggataacacgagattggcgatagcagcgattggtaaactcatgtttgctcaattctcagagcttgtgaatgatttctacaacaatggtttaccctcgaatctaaccgcttcgaggaatccaagtttggattatggattcaagggagctgagattgcaatggcttcttattgttcagagcttcaatacttagctaatcctgtgactagccatgttcaatcagcagagcaacataaccaagatgtcaact

SEQ ID NO: 157706 - DNA, 285 bp, Arabidopsis thaliana columbia
gaattccgggggccacgggtacttgtgctctagtaatccatcagtctctgtctcgcatcaaactttctcctcccaaatcttcttctggttggtcttctgctttctccgctgagtccttaccgatcagacggatcgagctgtgtttccgaggagctatatgtgccgccgtacaaagaaactacgaagaaacgacctcctccgtggaagaagcagaggaagatgatgagtcatcatcatcgtacggagaagtggacaagatcattggaaggccaacggggggggaag

SEQ ID NO: 157707 - DNA, 277 bp, Arabidopsis thaliana columbia
gctttctatgctggaaagcttttccttgaagcgggtcttcctcctggcgttctgaatattggttcgggattcggtgcaacagcaggtgctgccctcgcgagtcatatggatgtagacaagcttgcttttacaggatcgactgatacggggaaagttatacttggattggctgctaacagcaatcttaagcccgtaactctggaacttggagggaaatcaccgttcatcgtattcgaagatgctgatattgataaagctgtagagcttgcacactttg

SEQ ID NO: 157708 - DNA, 323 bp, Arabidopsis thaliana columbia
  unsure (1)..(323): unsure at all n locations
tcacttttcgtccaagccgctaaaaatgaagtacaacaacgttatcccgagctcacactttcgcgagcactggcagaattatggcaagacttgntttaaccagcctgccaggaagacaaggagacgtgttgctagacagaagaaggctgtgaagatcttccctcgtcccacctctggtcctctccgacctgttgttcatggtcagacacttaagtacaacatgaaagttagagctggaaaaggattcactcttgaagagcttaaggttgctggtatcccaaagaagttggcttcaacaatcggaaggggggggggatcaccga

SEQ ID NO: 157709 - DNA, 452 bp, Arabidopsis thaliana columbia
cggaaacccggggcgccgcacgcgtccgaacgttttcaggcgaccaagggaagacttacatgttgagaatctccaatgttgggttatgaggcactttcaatttcagaatgcaaggccatacaatgaaagtagttgaagttgaaggctctcatgttattcaaactgattatgattctcttgacattcacgttggccagtctttagcagttcttgttactttaaaccaatctcctaaagattattacatcgttgcaagcacccggttcataagaagcaagctttctgttatgggtttgttgcgttattctaactctcgcgtcccagcttctggtgaggctgccgctcttccacctggagagcttgtttggtccatgagacaagctagaaccttcagatggaacttaacagcaaatgcagctagaccaaaccctcaaggatctttccactatgga

SEQ ID NO: 157710 - DNA, 429 bp, Arabidopsis thaliana columbia
  unsure (1)..(429): unsure at all n locations
caaaaaattcacaaacatcaaacattctccacctactgcccaaaaacgacagcattcctttgccagcaacaaagaaaaaacacggttccttgccaatggcccgttgtaccaaccttgttaccgttttcctattatgggctcttttgatgttctcatggtgtaaagcttcaagaatcagccctaatgtatatgaccattcttataaaaggttcaaatccgatagcttaatcaagcgaagagaggacatcacgggattgagaagttttgtaagagcctctttgcggactccaaccaccgttagtgtttctgattttggagctaaaggagatggaaaaaccgatgacacgcaggcgttcgtgaatgcgtggaagaaagcatgttcttcaaatggagcntgtaatctnctagttcctaaagggaatacttatt

SEQ ID NO: 157711 - DNA, 363 bp, Arabidopsis thaliana columbia
  unsure (1)..(363): unsure at all n locations
ggccattcctttttacctccccctccttctctttctcctccaaatcttttnnagggaatgcgaatcgaagggcagggggtaaacataaacattatgatgagccatcacgcttcagctcaccacccgaacgagcatttggttatggcgactcgcaacggaagatcattggatcatctacaagagatgcctcggccaccaccagccaatagacccccagagaagcgacaaagagtaccatctgcatacaaccgattcatcaaaaaagagatccaacgtataaaagcaggcaaccctgatatcaggcacagagaagccttcantgctgctgccaaaaactgggctcatttccctcacatacacttt

SEQ ID NO: 157712 - DNA, 393 bp, Arabidopsis thaliana columbia
  unsure (1)..(393): unsure at all n locations
gagagagatgcataaacgggagcttgttaaattcggcggtaattccggtnaatcggggggggcaccatcgaagagagggcggcccttctntagtacaagtgctaactcagctgctgctgctgcagcggcggcagcagcggacgcgatgtcaccgncagctttacttggtccttctcttctagttcacaattccttcgtcgagcagaacaatagaagaatagttcttgcgttgcagagtggtttgaagagtgaggtgacatgggcattgaacacacttacgttgctttccttcaaggaaaaagaagatatgcgaagagatgtcatgcctcttgctaagatagctggcttgcttgatgcccttctcttaattatagatgattggcgtgacataac

SEQ ID NO: 157713 - DNA, 429 bp, Arabidopsis thaliana columbia
  unsure (1)..(429): unsure at all n locations
ccacgcgtccgctcaaaagaaactttctacataatatataatgtcacacattctctctattaattaagcatggtgcttgttgcgtttgtgactgttttggtaacactagctttgcagccactaccgtcagtgttgtctttggacgttcaccttcttcggcagctagccgcaaagcacaatgtgacatcgatacttgtgtttggagattctagtgtcgatccagggaacaataatttcattaaaaccgaaatgaaagggaattttccaccttatggtgaaaatnttatcaaccataaacccaccggtagattatgcgatggattactcgctcccgattatattgcggaagccatgggttaccttaccataccggcttttcttgatccattcctaacccaagctgatctaactcgacgtgcaaggtttggc

SEQ ID NO: 157714 - DNA, 430 bp, Arabidopsis thaliana columbia
gtctttaagaggtattgagtttcacactgaataattttctgaagccatcatcaaagctggagatgggtcgttctctctgaagaccagcaagggaactgttgagggattttcgcatgttatgtttgcaactggtcgcaagcccaacacaaagaacttagggttggagaatgttggcgttaaaatggcgaaaaatggagcaatagaggttgacgaatattcacagacatctgttccatccatctgggctgttggggatgttactgaccgaatcaatttgactccagttgctttgatggagggaggtgcattggctgaaactttgtttcaaaatgagccaacaaagcctgattatagagctgttccctgcgccgttttctcccagccacctattggaacagttggtctaactgaagagcaggccatagaacaa

SEQ ID NO: 157715 - DNA, 420 bp, Arabidopsis thaliana columbia
  unsure (1)..(420): unsure at all n locations
aggcagcccatggtacggatctgaccgagtcatgtacttgggtccattctccgncnagcccgcgagctaccttaccggtgagtgccgcggtgactacggatgggacaccgctggtctatccgccgacccagagaccttcgccaggaaccgtgagctagaagttatccacagcagatgggccatgctcggagccctaggctgcgttttccctgagctattggctaggaacggagtgaagttcggagaagcggtttggttcaaggccggttcacagatcttcagcgactgatgattggactacttgggcaacccgagcttggtccacgctcagagcatcttagccatttgggctactcaagttatcctcatgggagctgttgaaggctacaaaagtccctgagatggtccattgggagaagc

SEQ ID NO: 157716 - DNA, 222 bp, Arabidopsis thaliana columbia
  unsure (1)..(222): unsure at all n locations
acggacaaaggaaagtttggtcttaatattccttattacattgtctccgacaacnnancnttaagggaggagtgttacgctcagggtcacagcncnncnnnaacaccttgtccggctcacgactgccttgagtccaccaagatcgtgtttttatccaaatccggggataaacacatttttggtctcaaacaaaatctgaaattttcaccggagatttgcgtt

SEQ ID NO: 157717 - DNA, 311 bp, Arabidopsis thaliana columbia
cccacgcgtccgcacaatgtcttcgaaagacaagaaaccgtcgtttccatctagtagtcgtggtggaatccgagctcggtccgatcttaaccgggggtcgggtccttactccgacagtgattccgatggtccacaagaatactacacaggtggtgagaaaagtggtatgttagttcaagatccatcgaaaaaagatgatgttgatgagatatttaatcaagctagacaactaggagctgtagaaggacctcttgagccacctccgagttccaggagtttcactggaactggtagattgctttctggtgaaa

SEQ ID NO: 157718 - DNA, 302 bp, Arabidopsis thaliana columbia
cgcgaacactgatgtgaaaggactcgttgacttttgaatttcaaagattccacgcattttccagcactgatctgtcgaactagcgaacgctaaaccacttccctcggacctgctacatctcaagacgatcccaacgatcgatctcggaggacgggacttccaggacgcgattaatcacaagaacgcgattgaagggattaaagaagcagctgccaagtggggtttcttccaagtgatcaaccatggagtttcgctcgagcttcttgagaagatgaaagatggagttcgtgactttcatgagc

SEQ ID NO: 157719 - DNA, 408 bp, Arabidopsis thaliana columbia
  unsure (1)..(408): unsure at all n locations
cccaaattcgatccgttttccggcgataatcttcgatctagatccgatggcgaaagaaccgggtcgtgtgctcgttactggggctgcangacaaatcggatatgctcttgtacctatgattgcaaggggtatcatgcttggtgctgaccaacctgttatcctccacatgttggatattcctccagctgctgaagctttgaacggtgttaagatggagttgatcgatgctgctttccctcttcttaaaggtgttgttgctacaactgatgccgttgagggatgtactggagtcaatgttgctgttatggttggtggtttcccgaggaaagaaggtatggagaggaaggatgtgatgtccaagaatgtttccatctacaagtctcaggctgctgccttggagaagcatgc

SEQ ID NO: 157720 - DNA, 422 bp, Arabidopsis thaliana columbia
atccttacgcggagagagctgatgacaaataccatggtgttgtgaaatttgatccagcaacgggtagacagttcaaaactactaataagactcaatcttacacaacttactttgcggaggcattagtcgcagaagcagaggtagacaaagatgtggttgcgattcatgcagccatgggaggtggaaccgggttaaatctctttcaacgtcgcttcccaacaagatgtttcgatgtaggaatagcggaacaacacgcagttacttttgctgcgggtttagcctgtgaaggccttaaacccttctgtgcaatctattcgtctttcatgcagcgtgcttatgaccaggttgtccatgatgttgatttgcaaaaattaccggtgagatttgcaatggatagagctggactcgttggagctgatggt

SEQ ID NO: 157721 - DNA, 416 bp, Arabidopsis thaliana columbia
ctctaaatctctccgatgatgctcggtggaaagtcctccgccggaggccgtacaagccttggagtctccgtcgctggcgacggaggaaccggtaaatccagcctgatctctgccgtcgcctccgagactttcccggataatgtccctcgcgtccttcctccgattactctccctgccgacgctttccctgactatatacctatcaccatcgtcgatactccctcaagtattgacaatcggattaagctcattgaagaattcaggaaggctgatgtggtccttctcacttatgcttgtgatcagccttcaactcttgatcgcttgagttcttattggctccctgagctccggcgtttagagatcaaagcacctgtgattgtggtgggctgcaagcttgatttacgtgatgaacgatc

SEQ ID NO: 157722 - DNA, 396 bp, Arabidopsis thaliana columbia
cttatcttctttcttctcacttctcagaccttaattttcaagcagagatgacggtgaagataaggctcgcgcgtcttggttgtaaacaccgacccttctatcgtgtagttgtcgccgatgaaaaatcgcgcagggacggtaaacaaatcgaggtgttaggcttttatgatccactccaaggcaaagaagatgcggatagagtgagcctcaaattcgacagaatcaagtactggttatctgttggagctcaaccaacagacacagtggaaagcatgcttttcagggccggtttgataccaccaaagcctatggtagtggtcggttcgaaaaatgggcagaagtctacgagccaacatgttttacccattacaggggaaatcttgaactaaaagtggt

SEQ ID NO: 157723 - DNA, 433 bp, Arabidopsis thaliana columbia
ctgatctctgtattggatttttgatataaggtttgaaatcatggaggtcgttgatattgatgcccgagctgctaagttagggattgattggtctcaggttaattttgattccatccaacttcctcctggagaagactttgggatcgagagtgatgatgaagctgtttaccaggatgaccagtctgaattcgacactggattcggtaacattatcgtggtcgatcacctccctgttgttcccaaggagaagtttgagaaacttgaaggtgttgtcaagaaaatttacaaccagttaggtgtgattaaggaaaatggactgtggatgcccgttgatcccgataccaagatgacattgggctactgttttattgagttctacactccttaggaagcacaataacgcttaggtaaagtcttatggtttcaagtttgt

SEQ ID NO: 157724 - DNA, 433 bp, Arabidopsis thaliana columbia
ctgagataataaggacttgtgtatttttccattgttaaaaggcatttcaaagagacaatatgtcaggtgatgaggctgcccctgttgttgttcctccccccgttgctgagccagcggccatcccagaggacatggacttaatgactgcattggagttgactcttaggaaagctcgtgcttatggtggtgttgttcgtggtctccatgagtgtgctaagcttattgagaagcgtgtggctcaactcgttgtcttggctgaagactgcaaccagcctgattatgtcaagcttgtgaaggctctctgtgctgatcacgaagtcaggttgctaacagttccaagtgccaagacccttggcgaatgggctggtctctgcaagattgattctgagggtaatgccaggaaggttgttggatgctcatgtcttgttgtcaa

SEQ ID NO: 157725 - DNA, 462 bp, Arabidopsis thaliana columbia
cttcgtggagactccgtcgtgcttatggggttgaacactatgatgaagcgttccgttaggattcactctgagaacaccggaaacactgcaatcctgaatctgcttcctctccttcagggaaacgttggtttgatctttaccaaaggtgacctcaaggaagtgagcgaggaggttgctaagtacaaggttggtgcccctgctcgtgtgggtttggtggctccaattgatgtggttgtccaacctggcaacactggtctcgacccatcccaaacatctttcttccaggtgcttaacatcccaaccaagattaacaagggtaccgtcgaaatcatcaccccagttgagcttatcaagcaaggtgacaaggtcgggtcttctgaggctgcgcttctagccaagcttggcatcaggccgttctcatatggtcttgttgtccagtctgtctatgacaatggctcagtc

SEQ ID NO: 157726 - DNA, 143 bp, Arabidopsis thaliana columbia
gttttagttgacgcacgaggaggattaatgtcatgcgggtcatggagtccggtcgtgagcgagggatctgttcgcgaggccatgcattaagaagggttacattccactctcgacttacctgataacctttaagggcggccatt

SEQ ID NO: 157727 - DNA, 471 bp, Arabidopsis thaliana columbia
ctccgcggtgatgtcaaagaattgttgcttctggatgtcacacctctatcgctcggtattgaaacacttggtggtgtctttacgagactgatcacccgaaatacaaccatccccacaaagaagagtcaggtgttctcaactgcagccgataatcagactcaagttgggatcagggtgcttcaaggtgagcgtgaaatggcaacagacaacaagctcttgggagaatttgatctagttggcattccaccatctccaagaggagtccctcagatcgaagtgacatttgacattgatgccaatggcattgtcactgtttccgccaaggacaagacgactggtaaagtacaacagatcacaatccgatcctctggtgggctctcagaggatgatatccagaagatggtgagagaagcagagttgcatgctcagaaagacaaagaaagaaaagaattgatccgcaccaagaacaca

SEQ ID NO: 157728 - DNA, 458 bp, Arabidopsis thaliana columbia
atcaaagtcgacaagggtttggtgccacttgttggattcaacaatgagtcatggtgccaaggactagatggtctatcatctcgaactgctgcttactatcaacagggtgcgcgtttcgccaaatggcgtactgtcgtgagcattcctaacggtccgtctgccctcgccgtcaaagaagctgcttggggtcttgctcgatacgctgccatttcacaggacagcggtttggttccgattgttgagccagagatcttgttggatggagaacacgacattgacagaacatacgacgtagcagagaaggtttgggctgaggttttcttttaccttgctcagaacaatgtcatgtttgaaggtatcctcctaaaaccgagcatggtgactcccggagctgagtctaaagacagagctacttctgaacaagttgccgtctacacccttaagcttcttcgcaacag

SEQ ID NO: 157729 - DNA, 341 bp, Arabidopsis thaliana columbia
aaattcggaaaaaagtctcaatctttctttctgggtttctactttatcaaacgaaatcaactcaagcaatgtttcactaatatatctgcttccgtgaattctgaataaaaagatcatgaagctcacaagcttgagcaagaatgctaattccacagcaacagcagtaactgtatcttcaatacagaaactcccgtttctgtctctgtctgaaactttgccttgtccgaagagttcgagaaaacccacgtttcttcctttaagatgtagacggagaccaaagttggatttgctcttgggaaaatttagagttcgtgcatcagatgctggtgttggaactggga

SEQ ID NO: 157730 - DNA, 261 bp, Arabidopsis thaliana columbia
cttcactctctataatcaaaaagcttttaactctagccggtaaatctttctccgatcatgccgaccagaaacatcgccatcggtggagtccaagaagaggtctatcaccccaacgcacttagggcggcgctcgctgagtttatctcgactttgatctttggtttcgccggctcaggctccggaattgctttcaacaagatcactgacaatggagcaaccacttcttccggtctcgtcgccgctggcttagctcatgctttc

SEQ ID NO: 157731 - DNA, 265 bp, Arabidopsis thaliana columbia
gttttagttgtcgcacgaggaggaaaaatgtttgcgggtcatggagttcgggcgagaacgagggatctgttcgcgaggccattcacgaagaatggttacattccactctcgacttacctgagaaccttcaaggtcggcgattacgtcgatgtgaaggtgaatggtgcgatccacaagggtatgccttacaagttctaccacgggcgtactggtcggatttggaacggtacttaacgcgccgtctgtgttggaagtaacaaacaga

SEQ ID NO: 157732 - DNA, 343 bp, Arabidopsis thaliana columbia
ggagatttctctgaggttttaatctgcggttgatcaggctcagccgccgcgtgttttggtttctccggtggtggtaataataacaacgttcaaggaaatagctctgggactcgagtatcatcttcttccgttggagctagtggcaacgagacagatgagtatgactgtgaaagcgaggaaggaggagaagctggagttgatgaaactccctcttccaagtcaggtccttcttcttgtagttcatcttaaaaatgcagagctggtgaagttcataatcttctctgagaagaggggggggaagttgaatttaatgaaaaaattgaaagcctttacaaaagtttta

SEQ ID NO: 157733 - DNA, 423 bp, Arabidopsis thaliana columbia
aaacaaagcaagcaaaaaaaaaaaatggctttctcacgcctctcatttgcagcttctctcatcgtcttctcatctctaatcatatcttcagttgcttattacggcaatgaagctgacccggagaccggaaaattgattcccatcgccgttgaagggatcatcaagtgcaagtccggtggcaaaacttacccaattcaaggtgcaacggcaagaattgcgtgtgtgaaggtcgatgcatatgggaatgagttagttccaatatcgatattgagcagcaaaactgatgctaaaggttacttcatcgccacgatattcccttcgcagcttcgtgcaggaaggacagtgaccaaatgcaaaacttacctttacaaatctccactcgctgattgcgattttccgaccgatgtgaacaaaggtgttaga

SEQ ID NO: 157734 - DNA, 457 bp, Arabidopsis thaliana columbia
gttcgatattacatttttgaacttctaaaggcgttggatttctgccattcacgtggaatcatgcacagagatgtgaaaccacataatgtcatgattgatcacgagcagcgaaaacttcgtttaattgactggggtttggcagaattctatcatcctgggaaagaatacaatgtccgtgttgcttcaaggtactttaagggtccagagctgctggtggatttacaggactatgattattccttagacctatggagtcttgggtgtatgtttgctggaatgatattccgcaaggagccgttcttttatggccatgacaactatgatcaattggtcaaaattgcgaaggtgcttggcacagatgaactcaacgcctacctaaacaaataccgtatagagttggaccctaatctaacatcccttcgtggcagacatagccggaagccatggacaaagttca

SEQ ID NO: 157735 - DNA, 459 bp, Arabidopsis thaliana columbia
gttggtgctttgttttttgagctagggattgtcggaacgatggagagtgatttgattgatttgttcgagggagctaagaaggcagccgatgcggcggctcttgacggtgttacctcttcaggtcctgaggtttctcaatgtatcgatgcccttaaacagctcaagaagtttcctgtcacatacgataccctcgttgcgactcaggtgggaaagaagctgaggtctcttgcaaaacatcctgttgaagatatcaaaagcgtagctactgatctgcttgagatatggaagaaagttgtcattgaagagacagccaaagctaagaaaaccgaaggcactaacggttgtaaagaggctaaggtgaataagatggatggtggagaagccttcaaatcctgctcctgttaaagttcagaaacttcagaggggtgattcggctaagagtatcaaggttgagagaaa

SEQ ID NO: 157736 - DNA, 270 bp, Arabidopsis thaliana columbia
gcgaacgaatatcggctgccactagaaaaactctagcttctcatctcctcatcgcaggcgcactgctggcaaccaaggccacggatcaggcggacacccgcgctacagaggctgctggtgccatcaaccttactgcgatccagaaaaaagggggccaattcactactatgagccatactataaacatcaactaagtcggttaggaagacaacattcaagagagtcgtgagtccgagagttgacggggttcaaccaacagacatgctttta

SEQ ID NO: 157737 - DNA, 358 bp, Arabidopsis thaliana columbia
ggttttgaggctggtatctctaaggatggttagacccgtgagcacgctcttcttgctttcacccttggtgtcaagcagatgatttgctgttgtaacaagatggatgccaccacccccaaatactccaaggctaggtacgatgaaatcatcaaggaggtgtcttcatacctgaagaaggtcggatacaaccctgacaaaatcccatttgtgccaatctctggattcgagggagacaacatgattgagaggtcaaccaaccttgactggtacaagggaccaactctttttgaggctcttgaccagatcaacgagcccaagaggccaatagacaagccccttcgtctttcactttaagatg

SEQ ID NO: 157738 - DNA, 435 bp, Arabidopsis thaliana columbia
ggccaagcacatgtttgagttgatgattagcaaagactgtttcccaaacgtagtgacttacagtactcttataaagggattttgtaaggctaagagagtagaagaaggtatggaactcttccgcgagatgtctcaaagaggattggttggcaacacagtcacttacaccactcttatccatggattttttcaagctagagattgtgataatgcccaaatggttttcaaacagatggtttctgttggtgtgcatcccaatattttgacatacaacattctgttagatggactttgtaaaaatgggaagctagcgaaagcaatggttgtattcgagtatctgcaaaggagtacaatggaacctgatatttacacatataatattatgattgaagggatgtgcaaggcaaggaaggtggaagatgggtgggaattgtt

SEQ ID NO: 157739 - DNA, 423 bp, Arabidopsis thaliana columbia
cttctctcgtcttatgaatttaacggtgatgatattcttattatctctggttctgctcttttagccgttgagactcttactgagaatcctaaggttaagagaggtgataacaaatgggtagataagatttatgaacttatggatgctgttgatgattacatccctatccctcagagacaaactgaattgccattcttgttagctgttgaggatgtgttctctatcactggacgtggtacggtggctacagggcgtgtcgagagaggtacggttaaggtaggagagactgtagatttagtgggtttgagggagactaggagttacactgtcactggggtttgaaatgtttcagaagattcttggtgaggcttttagctgttgacaattgttggttgttgattatggttatttttattgcttttt

SEQ ID NO: 157740 - DNA, 465 bp, Arabidopsis thaliana columbia
ctcttttagagccttgcttcgtcctcgtaccggcattctctacgaggctactactgttccttccaatttgactgggatcaaactcgctgctatgagactcagaagcggaagctttagaaaacgtggagtcactccttttaatgagttctcaattcccagcggcgttatcgtcaagccgtatgtgacaaggcttgttttggtttatcaaaacctagctaatttctctcacttgtattaccctttgtctggttatgattatgtcgctcctgtcttgggtcttctcgcttacgatgctaagaatctctctgcgcttaatttgcctcagcttgatttaagggtgtctaatgatcctatcagaatcgatttctctgatctggaacgaatcccgcaggggtctagtgctaagtgtgttagattcgattctaaaggtgaagcgagtttcagcgattcgattcagcctggaaa

SEQ ID NO: 157741 - DNA, 356 bp, Arabidopsis thaliana columbia
acgcacatctctctctctcttattaactcaatgtcggcgactgcgtttagggtcggcttgtggttggccggtacggcttcctttctcttaaccggaacaaacgccaaaatccccggcgtttacagtggcggaccgtggcagaatgcacacgccactttctacgggggcagtgacgccttcggcacaatgggcggcgcgtgtgggtacgggaacttggacaggcaaggatacggtgtgaacacggcggcgttgagcactggttttgttcaacaacgggatcaagctgtggggcttggtttgagattaaatggactgatgaacccagatggggtgttccgggaaaatcaattattttt

SEQ ID NO: 157742 - DNA, 427 bp, Arabidopsis thaliana columbia
  unsure (1)..(427): unsure at all n locations
cccaaagctcatttattctntccttttcaattattctttcaatttttccgatcgacggagggtgatcggcgacggcgtaatggccggaggaatcgtctcaccggcctctctactcgacctaatcgctgatatcgtcgagattccactcaacaccggaatgttcaagaaggattgcgcagatctcactcgacgagtttgtctcttaacgcatttgttagaggagattagagactcaactcctatcgaatccgccgtttcgtcgtcgtcggagaatgattggtggtctgatctcgtggtcggacttcaaggcgcgaagcgttttttcttccacagcttgagtcccagctcgcgaatccctttgagggtgctgcgaagagaattccatttcaggtccaatgtgttacatgggaagcttgagaaagccttt

SEQ ID NO: 157743 - DNA, 478 bp, Arabidopsis thaliana columbia
ctcaacctcatcaaatctctttacatgaatatggttctgtaaccggacaacatctcaaaacttgttctgttttttttttttcatttcttagacagaaaaatggttgcagcattctcttacactgcctgcaccaagctttctctattacatccttctatggttgctcaaatccgaccaagaacaacacaaaaggcgttcgtggtgacaaatccggaacaagacagtactcttgaagtacaagaaacagagacactcaaagaagagcaatcaacagagaagatgaagaagcagccaacaccattgagaccagtggagaaacagctgaacgtgaagagcaagggtatgggcgattttggtggtcagtggctaagcagtgtcacacgtcacgttaggatctacgctgcttatattgatccagagacttgtgagtttgaccagtcacaaatggataaactcactttgattcttgatcctactg

SEQ ID NO: 157744 - DNA, 448 bp, Arabidopsis thaliana columbia
tgaagcgattctcactaaaaccctcgaacacatcgcctttatctctttctctagatctactcgctatggctactatcaccgttgttaaggctagacagatcttcgacagtcgtggtaatcccaccgttgaggttgatatccacacgtcaaatggtattaaggttacagcagctgttccaagtggagcttccactggtatctatgaggctcttgagctgagggatggaggatctgactaccttggaaagggtgtatctaaggctgttggcaatgtgaacaacatcatcgggccagcacttattggaaaggacccaactcagcagactgctattgacaacttcatggtccatgaacttgacggaacccaaaacgagtggtggtggtgcaagcaaaagcttggagccaatgcgattcttgctgtgtttcttgctgactgcaaagctggggc

SEQ ID NO: 157745 - DNA, 430 bp, Arabidopsis thaliana columbia
cgaatctgaaatctgcaattcacgagaagatgtttttttttgtaacaatggcgaatccaattcaagagattattgagaaacaagttctaacggtagcgaaagctatggaggataagatagacgacgagatagcgtctctggaaaagcttgatgaagatgatttggaagttttgagagagaggagattgaagcagatgaagaaaatggctgagaagaagaaacggtggatgagtattggacatggtgaatactctgagattcattctgagaaagatttcttctccgttgataaatctagtgaacgcgtcgtttgtcacttctaccgtgagaattggccctgtaaagtgatggataaacacatgagcatattggccaagccacacatttggacacgtttttgggagatccaagctgagaaaagtccattctt

SEQ ID NO: 157746 - DNA, 450 bp, Arabidopsis thaliana columbia
cttacttcaagggtctttctaagattgaaagataaccttcaagtcagcaaatctcgaaaatggagtttgaatttgagaggcgaaggttgacaaaggacgacattagagaactaatatacagagaaatactggagtaccatcctcagttgctcaaggactatatgagcggatctgaggggtctaattttgtatatcctagcgccattggacatcttagacagcagttcacttacttagaggaaaatagcagtagaaatgggccggtcatacctctcgagaggaaacacgcatcactaccgcggtctacggttcactcaactgtagtccattccacctcgcaacccaacttgggtgcaacagatagtagacgtgtttctttcgagccttcaaaaaaatggagcttcttttgcaggacattcatcaacttccgcgtattctactaaatccatc

SEQ ID NO: 157747 - DNA, 477 bp, Arabidopsis thaliana columbia
aagattcctccaattcaaatctctgtctgtgtctctgtctctcaactttcaatttctgagagagtcggaaatattctccagatcgcctaaggcaaattcgttttccgattcggcctagcgacggcgagagaggagaggaagaggcaagttgattgaccggagaagaagacgaagccgttcttggagaaaatgataacgattccttatttaaccgctgtatccacctacttcagctatggattgctctttgcttttggtcagctccgagatttcttccgtcgcttcattgattggtggttcactagcaatctccagggatacgcgccgatctgtttggggcatgaggatttctatatcaggcgattgtatcatcggattcaggattgttttgaacgacctatatcgagtgcacctgatgcttggtttgatgtggttgagcgctactctaatgacaacaacaagacgcttaagcgaaca

SEQ ID NO: 157748 - DNA, 431 bp, Arabidopsis thaliana columbia
cagaaaccaacaccagatctgaatgtcagcctaaacctcagatacatcataatggctgagagtgctaactacgatggaaagctcgtcggaatgggtaacccactcctagatatcttagccgccgccggcgacgaatggctgaccaaatacgacatcacgttgaacaatgcgaatctcgcggaagacaaacatatgcccatgtatgatgagatgagtagcaagatcaacgttggatacattgccggaggtgctactcagaactcaatcaaagtggctcagcggatgcttgaaagtcctggggcaaccagttacatgggatccattggaaaggacaaatatggagaggccatgaagaaggatgctacagcagctggtgttaatggtcactattatgaagatgagttggcacccactggaacctgtggtgtctt

SEQ ID NO: 157749 - DNA, 422 bp, Arabidopsis thaliana columbia
cacaaacaaaacaacaaaccaaaaaaaaaaaatatgagagagagagagagcaaatctccatcatcatcatggactcgtctccaaacgacggcgtacaccaaccgcttctccatcctcaaccatctccatctccgccggagtcaaccaacggcgagctagaaactgtcctctccgacgtagaaactcctctgtttctccgcctacgtaaagccaccataatcgaatcaaagcttctctttaacctcgctgcaccagccgtcatcgtctacatgattaactacctcatgtccatgtctactcaaatcttctccggccatcttcgtaacctcgaactcgccgccgcttctcttggtaacaccggtaatcaagtcttcgcttacggtcttatgctaggcatggtgagtgcagtggagacgttatgt

SEQ ID NO: 157750 - DNA, 454 bp, Arabidopsis thaliana columbia
cccacgcgtccggaagaagcttatctcaagctttctacttgtcttatactccaccaccatcattgttgcttcatcagaatctcgatgtaggcgttttaaatcgatcatcagctttggtgattccatcgcagacaccggaaattatctccatctctctgatgtcaatcaccttcctcaatccgcctttcttccttatggcgaaagcttcttccatcctccctccggtcgtgcctctaatggccgtctcatcatcgacttcattgccgaattcttgggactaccatacgtaccgccttactttggatcccaaaacgttagcttcgaacaagggatcaattttgcggtgtatggagcaaccgcattggaccgagcgtttcttttgggaaaaggaaatggaatctgatttcaccaatgttagtttaagtgttcagcttgacaccttcaagcagatttt

SEQ ID NO: 157751 - DNA, 425 bp, Arabidopsis thaliana columbia
gttttatgtctcttaccggttcttcctcccgagttgagacccatcattcagatagaagggggtaaactaatgagttcagatattaatgaactctatagaagagttatctatcggaacaatactcttaccgatctattaacaacaagtagatctacaccgggggaattagtaatgtgtcaggaaaaattggtacaagaagccgtggatacacttcttgataatggaatccggggacaacccatgagggatggtcataataaggtttacaagtcattttcagatgtaattgaaggcaaagagggaagatttcgcgagactctgcttgggaaacgggtcgattattcggggcgctcggtgattgtcggtggaccttcactttcattacatcgttgtggattgccttgcgaaatagcaatagagctttt

SEQ ID NO: 157752 - DNA, 430 bp, Arabidopsis thaliana columbia
ctatagagttggtgaaaatcttcttcaatggtgtgattaagagtcccattgctaacaacattacaagcttgtagatttctatatttaatggactattttactgaaattctcactttatggatataattaaggttccaagagcattttcctgagttcttgaggccttttcttcaagcatccggagttcacaagagagtttaaccaaacttcatcagaccttgttggttcgtcatcatcgttcctatgccaggtccatagcgcatgtgttgaattcaccatctgaagctccccatgtccaaagcttgcttccctgaagactgaccactctggtgacggatctttgtacttgcgagccaaaccttctctgtttcctccatcacctatgtgaatgtgtacgggaccacatggatctgatttaccattgttgaca

SEQ ID NO: 157753 - DNA, 471 bp, Arabidopsis thaliana columbia
agctctcacactatccactcttcatcggcagctagatttccgggtcctcagtatcgggtcagatctagatccggatccggagacgctgagaatgaaacacttcagaactgagcgagtccgtgcgactccgaagctcttcacctacgttctcgtcggtttcatcgctctactcggcttgacttgcctctactacggctcttcgttcgctcccggatccagaaagtccgatgagttcgatggatctaataaccgcgttcgcaccggaatcggatccttgaggaatcgagatattgtgcttgcagtgagccgtttcgaagttcctaaaagtgttccgatatgtgattcgagacactcggagttgataccgtgtttggatcggaaccttcattaccagttgaaattgaaactcaatttatcgttaatggagcactatgagcatcattgtcctccatcagaacggcgtttcaattg

SEQ ID NO: 157754 - DNA, 454 bp, Arabidopsis thaliana columbia
gtggttcggagctgtttctaagaaaacaacatgtagttcggatcggagctacgcttgcaaaactcaaaacatggcgaggggtttgaagaagcatctgaagaggcttaatgcgcctaagcattggatgcttgacaaacttggtggtgcatttgccccaaagccgtcttctggaccacataagtcaagggagtgccttcccctcgtccttatcatcaggaacaggttgaagtatgctcttacctaccgtgaagtgatttcaatcttgatgcaaaggcatatccaagttgatgggaaagtcaggacggacaagacctaccctgctggtttcatggatgttgtgtctatccccaagaccaatgagaactttcgtcttctctatgataccaagggacgttttcgtcttcactccaataaggatgaggaagcttagttaaactttgcaaggttcgatcta

SEQ ID NO: 157755 - DNA, 248 bp, Arabidopsis thaliana columbia
  unsure (1)..(248): unsure at all n locations
gtcgtccctaacctcatctctgcaagctctctagctttcgtctccgttcgcccatggctccactcctctctcatctctctctaagcccaattccttcccgaaccacagaatgcccgctttagttccggtcatcagagccatgaaaacgatgcaggggcgcgtggtgtgcgcaaccagtgacaagactgtggcggtggaggtggttnttttttnttnttttttttttttttattttttttttttttttt

SEQ ID NO: 157756 - DNA, 445 bp, Arabidopsis thaliana columbia
cttcgccgtcgagagcatccatgggtcgtgttatcagagctcaacgtaagggtgcgggttcggtcttcaaatcccacactcaccaccgcaaaggtccggctaagttccgtagcctcgatttcggcgagagaaatggttacctcaagggcgtcgtgacggagatcatccacgatcctggtcgtggtgctcctcttgctcgtgtcactttccgtcatcctttccgtttcaagaaacaaaaggagctcttcgtcgccgccgaaggtatgtacaccggtcagttcttgtactgcggtaagaaagctactctcgtcgttggaaatgttctccctcttagatctattcctgaaggagctgttgtctgcaacgtcgagcatcacgtcggtgatcgtggtgtcctcgctagagctttttgtgattacgccattggtattgctcacaacccttg

SEQ ID NO: 157757 - DNA, 484 bp, Arabidopsis thaliana columbia
  unsure (1)..(484): unsure at all n locations
cgaannccggtcgaccacgcgtccgacgataactccgagaaatctattgagctcttcattagtattggtttggacgagaaaacagctcgtaataccatcaataataacaaggtcaccgccaatctcaccgccgttatccacgaggctgctgttactgatgggtgcgatcgaaatactggcaatctgttatactcggtcgctactaagttccctacaaatgctcttgtgcatcgccctacattgctcaagtacattgttaactctaagattaaaactccagcccaattggaagctgcatttgccttttttgccagtaccggtcctgaggactttaagctgaatgagtttgaagaggcatgtggtgttgggaatgaagtttccccagaagatattgagaaagcagttaaaggaatctttgaagagaataagaaaacaatattggagcagcgctatcgaactaatgtgggtgaattatttggacatg

SEQ ID NO: 157758 - DNA, 168 bp, Arabidopsis thaliana columbia
ctcatttactgttctgtttcactttctctctctctgtatactctctaaatgatggcaaaaagctgtaatttagtcagtgttctatgtgtatttttggtattgaccctctttaacaaacccatcaccgtcgccggtcagaatattccggcggtgggcttgttcactttt

SEQ ID NO: 157759 - DNA, 467 bp, Arabidopsis thaliana columbia
gcgaagtgattttgtaaggagaagaaaagggtaaaaatatttggtaacttttatatggtaagaagagaagggaagagcaaacctgggaaaatcaggggagaatttgctggagggtttactggattgtatccatgacatcactgcggctttggcttttgctaggatgactgattctgcttacagagtagacaccatttctagactcgcccaatggcgaatccacaatctttcttcctccacttaccgcaagtccgatcctttcaagatgggtctttggaattggcacttgtctgtggagaaaagcaagatgctattaaatgttaagttgtatccagaggtatcaaaccttaccagagaaaatccaccggttgctttctttgctctccgtgttggctcttctactggtgagagaaaggctctatctcatccagaagtaatagatagcggttaaaacaaactaagatttt

SEQ ID NO: 157760 - DNA, 465 bp, Arabidopsis thaliana columbia
gctaaacgaaaaacttaaaacccaaatcttatcactactctaaaagaatcttcatcatgggctcagtaacctcagccaccgttgcaatcccatctttcaccggccttaaagcctcaaccatcaaatcatccgccaccgtcagaatccaaactgctgctgttgcatcaccgaagcttacagtgaagtcatctctaaagaacttcggagtcgcggccgtagcggctgcagcttcaattgctttggccggaaacgccatggcaatagaagttctcttgggaggaggggatgggtcgttagcttttattcccaacgacttctctatagctaaaggagagaagattgtgttcaagaacaacgctggatacccacacaatgttgtcttcgatgaagactagatcccaagtggcgtcgacgtggccaagatctcgatggacgagcaagatctactcaacggtgcgggagaga

SEQ ID NO: 157761 - DNA, 238 bp, Arabidopsis thaliana columbia
agccggcatggtgaagtacttgcaaggacccgacaattaaaccaaggtttggaagggttgaggatccgatcttagggttcactttaagaattctagggaaacagcgcacgcaatcaggaagctaccattgatcaaggcgaagagggaccttgaggatgtgatagcttacaagcaagcaatttcctttacacctttcttcaaaggtgttgggaggactggttaagctaagaacaggcac

SEQ ID NO: 157762 - DNA, 455 bp, Arabidopsis thaliana columbia
gcacgtctgtttgattacagacttctgcccatgtggagagttgtttgcactacttgacaggcgaacctatgaaaatattgacagaagactctgcaaggttctatgcagcagaggttgttatcggcttagaatatcttcactgcttaggaattgtatatcgagacctgaagcctgagaatatactgctcaagaaggatggacacatagtattggctgactttgatttatcattcatgacgacctgcacaccccagcttattattccagctgcacctagcaaacgaaggagatccaaaagtcaaccactacccacatttgttgcagaaccaagtacccagtcaaactcgttcgtaggaactgaagaatacattgcgcctgagataatcacgggtgctggtcatacaagtgctattgaatggtgggcactgggtatcttgttgtatgagatgctttat

SEQ ID NO: 157763 - DNA, 254 bp, Arabidopsis thaliana columbia
gagagatttgctaatctcgctctcgcaggtttgacattggcaccactcgttgtgagagtagagtccaaatttgaatgttattctcacagcatgtatcactgtttatgtgggttgctttcgttcggtcaaggatactcctccaacggagacgatgtcaaaagaacatgccatgcgtttcccattggttgggagtgctatgcttctctcacttttcttattgttcaagtttctttcaaaggacttgtgtaatgctg

SEQ ID NO: 157764 - DNA, 432 bp, Arabidopsis thaliana columbia
  unsure (1)..(432): unsure at all n locations
ccgacctcttctcactcttttcctctctctccttccctccctcttccataaaatctttgtggtgctcttttattgttttgatactgtgctctgcttcggagagtgtagaaagagacagagctaaagtctctgtgtttcttctcagcaggactaaaaggaaaaaaggaaatcgattgctaatgtcgggtgagaaacaagcggaggagtcaatagtagtctccggggaggatgaggtggccggtagaaaagtggaagattcagcggcggaggaggatattgacggcaacggnggcaatggatttagtatgaagagctttctctggcatggcgggtccgcttgggacgcctggtttagctgtgcatcaaatcaagtggcacaagtgctgttgacgctgccgaattcgttctcgcagttgggaatgttatcaggaa

SEQ ID NO: 157765 - DNA, 442 bp, Arabidopsis thaliana columbia
gtttctatctccgatgacacaaaacgaggattattatttgacattttaagtaagaacagctagctttgccatctccctaaaggcaataaatctcggatccactttcacgatattttgatattttttctatttataatctttctgggttttgagtcttttgaaggctgaattgctctgaaatctcaattgtataatcatctcctgggtcgtcgttatcgtgatcatctagaagaaagcatgactacactagatttgaccagagccgagcttgctcttattgttctctatttgaacaaagctgaggctagagataagatatgcagagctatccaatatggttccaaatttttgagcggtggccaacctggtactgctcaaactgtcgacaaaaacaccagcttggcgagaaaagtttttcgtcttttcaagtttgtcaatgatt

SEQ ID NO: 157766 - DNA, 456 bp, Arabidopsis thaliana columbia
cgaaatcacgaccgcattagagaagaaagagagagagagagcttttcttcttcttcttccgctcactagatctgctccctctcgcagtctcctgggttttggcaaattgcttttgattcttctcgggtggcagctatggtttcctccaccaaactcaaatccgttgatttctacaggaaaattccgagagatttgacggaggcatctctatcaggcgctgggttatcaattgtagctgctctctttatgatgtttttgtttggaatggagctgagtagttatttggaagttaacactaccacagctgttatagttgacaagagcagtgatggtgacttcttacgcattgatttcaacattagttttcctgctctttcctgtgaatttgcatccgtggatgtgagcgatgtttggtaacgaattggttgaatttatcaaaaacagttcgtaagtttc

SEQ ID NO: 157767 - DNA, 455 bp, Arabidopsis thaliana columbia
caaaaatcgtgtcttttgcgtgttctcgagtcgaattgtatgatttgattcttaatttttgtttgatagtaacagtctaaagaagcaatggagctttgttcttcatctccatcttcttctctccttcgcatttgttcatcttcagcaccagaaatctcattttcatcttcaatttctcagttcccatctaaaacccaatcgattctcacaaaatccagattccaaaatctccgaatttgcgcttccgtgacggcggagactcaaggtcttccacgagacagccctcaacgtctcctcaaagagctagcacagcgtaaaacagcgacaggaccgaagaaaaaggttcctcctaaacgattcatcttaaggccccccattagacgataagaaattagctgagagattcctcaatagtccacaattgtctctgaagtcgtttcctttacttagctctt

SEQ ID NO: 157768 - DNA, 166 bp, Arabidopsis thaliana columbia
cgatgagtctggtgcatcactttactacatttactacattgcaactcttcacaaaggggagaggggagcttttggttacggctcctacttctccctctccacgatggacaggcattaccgcagtgacatgtctggagaagaagcccttgaactaggtgaccaatgc

SEQ ID NO: 157769 - DNA, 380 bp, Arabidopsis thaliana columbia
gtggttgaacatgttgatcacgcttgccgttctgcacaacactgggaaatcagtactagcacacactgacacgtacgattatttccatatttactagagtatcggttgaaggaagcccaagaaaagtgggggcgttttcgggatatgggagaaacagggggtggaactttgacccgaaatgtcctttgatgaatctgcaggtgaaaggtgtttagagaaagcggtcgctgagagtccgctttccaaagctgcagagccaccctgcttaggctaactcgaagccatttagtctaagatgcttcagatgctcagccgtctcagagttaggaagaacttaggagtttttatgctttggtcagaaaaataatattttatttctg

SEQ ID NO: 157770 - DNA, 354 bp, Arabidopsis thaliana columbia
cacgttacaaaatttagacaaaaaaataaatatggagctcgagacctcagtttatcgaccaaacgtcgccgtttatgattctccggatggtgtggaggttcgaggacggtacgaccaaatcttcgccaagattttgacgagagaagctcttagctttgtggctgagttacagagagagtttcgtggccatgtgaagtatgccatggagtgccggagagaggcaagacggcgttataacttcggtgccgttcctgggtttgaaccttccactaagtttattataaacggtgattggagctgtgccttcgttccttcctttcattgctgacttggagtggtgagaatctccgtttc

SEQ ID NO: 157771 - DNA, 455 bp, Arabidopsis thaliana columbia
ttcaaactctgaaatcgttctttcaaatctttcaatcgggatcaagatgcagatctttgttaagactctcaccggaaagactatcaccctcgaggtggaaagctctgacaccatcgacaacgttaaggccaagatccaggataaggaaggcattccttcggatcagcagaggcttattttcgccggaaaacagctagaggatggccgtacgttggctgattacaatatccagaaggaatccaccctccacttggttctcaggctccgtggtggtatgcagattttcgtcaagaccttaacgggaaagacgattactcttgaggtggagagttctgacaccatcgacaacgtcaaggccaagatccaagacaaggagggtattcctccggaccagcagaggttgatcttcgctggaaagcagttggaggatggcagaacttttgctgactacaaca

SEQ ID NO: 157772 - DNA, 437 bp, Arabidopsis thaliana columbia
caccagttcatcctcggtgccactaacccgttccttagaggcaagagtttgtcctggcttgtggctgagggaatgactgtaggcaagaatggtccggcgttgcaatccattgaagatcagtggcttggctcggccggtcttatgactttctcggaagctgtcgtgcaggccatcaagcgcatgaacctcaacgagaacgagaagaatcagagactgagcgagtggttaacccatgcaaggtatgagaactgcctgtcaaatgagcaaggccgagtgttagcagcaaaacttggtgtgacagatcttttctgggactgggacttgccgagaaccaaagaaggattctaccggttccaaggctcggtcgcagcggtcgtggtccgtggctgggcctttgcacagatcgcagacatcatttggatggaaacggcaagccc

SEQ ID NO: 157773 - DNA, 321 bp, Arabidopsis thaliana columbia
gcacgtctgtttgattacagacttctgcccatgtggagagttgtttgcactacttgacagagaacctatgaaaatattgacagaagactctgcaaggttctatgcagcagaggttgttatcggcttagaatatcttcactgcttaggaattgtatatcgagacctgaagcctgagaatatactgctcaagaaggatggacacatagtattggctgactttgatttatcattcatgacgacctgcacaccccagcttattattccagctgcacctagcaaacgaaggagatccaaaagtcaaccacttcccacatttgttgc

SEQ ID NO: 157774 - DNA, 239 bp, Arabidopsis thaliana columbia
cggacgcgtggggttttgagtcttcttaaggaagcatttgagaagcatgttgatgtagccaggcgaattagggaagtagctgatgaggaccctgttcatcggaagatctttgtgcacggtcttggttgggatacgaaaacagagacgcttattgaagcttttaagcagtacggagagatcgaagattgcaaggctgtgtttgataagatctcagggaaatctaaaggttatggctttat

SEQ ID NO: 157775 - DNA, 463 bp, Arabidopsis thaliana columbia
cgaaaaaaagaaatctaattctctcgagaaaatgtcttttcgtggaaagggaggaaaaggctggggtgaaggaggagccaagcgtcacaggaaggttctgagagacaacatccaaggaatcaccaagcctgccattcgaagattggctcgtagaggtggagtcaagcgtattagtggtctcatctacgaggagacacgtggcgtcctcaagatctttctcgagaacgtaattcgtgatgctgtcacttacaccgagcacgctaggaggaagactgtgaccgccatggatgttgtctacgctctcaagaggcaaggaaggactctttacggattcggtggtttaatagggtttttcaagatttgtgttttggagatctggttttttgaaatttatattttgaaaattttaaatgtacggtttttttatttaatgttaaccatgtattttattttcctatttttt

SEQ ID NO: 157776 - DNA, 235 bp, Arabidopsis thaliana columbia
acccacgcgtgcgcttgaataaaatcagaattacaaacaaaaattgttttgcttaagcttcctctcattcagctggttttgcgcctgaccatcgtcgcctctccagcaaatgcatatggacctgtttgcccgccgtcgaacaaactaagccgggcaagtttccctgaaggtgttttattttggcacggctactgcggcataccaggtcgaaggtgcgattaatgaaacttgtcgt

SEQ ID NO: 157777 - DNA, 282 bp, Arabidopsis thaliana columbia
gtttcgtggccatgtgaagtatgccatggagtgccggagagaggcaagacggcgttataactgcggtgccgttcctgggtttgatccttccactaagttcatcagagacggtgattggagctgtgcctccgtccttcttgccgttgttgaccggagagttgagatctccgttccggtcgagaggaaaatgatctataacgttcttaattccggagttaaagtttttatggttgattctaaggccgttttgtttcaaagtttggaggattttgttgagagggc

SEQ ID NO: 157778 - DNA, 467 bp, Arabidopsis thaliana columbia
ctttggttagaaacttgaagaacacgttatctgcacacttctgtcgaaagaaagacaaagcagggatcgcttctgaaaagttctctgagatttacagggatgttacgatgaacaatctgatgggaatgtcgataacattggcgattgtatactcgagaggattgaagtgggaatactcaatagaatcttttctggttgtggtagttggcattgcatttggtttaccggcttatgggagatcgacttatccgttctggatctgtgtaatggccttggcttatgattatctcctctctggccctaacctatatcacatttcatttttaaggtcaaagctaaagtcttaacttttatagctttgttcagcctaaaagagtttttcactcttaaagtggtcttttccatttaatttaaaactattttttttttgtttttaaattatctatatttgtttttctttattcttt

SEQ ID NO: 157779 - DNA, 57 bp, Arabidopsis thaliana columbia
  unsure (1)..(57): unsure at all n locations
gccaaaccccaaaaagcaaaccaaacagganncaagacaaggccaaaggggcaaagc

SEQ ID NO: 157780 - DNA, 321 bp, Arabidopsis thaliana columbia
agagcttctgttaatttacaccacctggaacaggagtttacaaatctggaatcaaaagctactgatacatcgttttgggatgatcgtactaaagctcaagaaactttatcgtctttaaatgatcttaaagatcgtatgcggttactctctgagttcaaaacgatggttgaagatgccgaaacgattgttaaactaacagaagagatggactctactgatgttagtttacttgaagaaagccatgggaaatcattaaaagagttgaaataaaatcttttaagataaaattttgaggctttacttcaagctttttaatcaggg

SEQ ID NO: 157781 - DNA, 259 bp, Arabidopsis thaliana columbia
ctttttgcctcagagctccgtggagagcagttatcagtagccatggctgagcagactgagagagcttttcttaagcaacccaaggtcttccttagctcgaagatatctgggaaaggaaagagacctggtaaaggtggaaaccgtttctggaagaacattggtttgggtttcaagactcctcgtgaagccattgatggagcttacattgacagtaaatgttcattcactggaacctgttctatcagaggacgtatcttag

SEQ ID NO: 157782 - DNA, 342 bp, Arabidopsis thaliana columbia
ctccgatcgactcaagccgtcggcaaatcttttgggctcgaaacttcctcggctcgcctcacttgctccttccagtctgactttaaggacttcaccggtaaatgctccgacgctgtcaaaatcgccggattcgctcttgccacctctgctctcgtcgtctcgggagcaagtgcggagggagctccaaagagattgacctatgatgagattcagagcaagacatacatggaagtgaaaggaactggaacggctaaccagtgccctactattgacggtggctctgagactttctcgttcaaacccggaaggatgcaggaaagaagtctgtttgagccacttctt

SEQ ID NO: 157783 - DNA, 276 bp, Arabidopsis thaliana columbia
ctctcacggaattccacaggtgaaaagtgtttctggaagcaagattctcagaattttgaaaggtcatggtcttgcacctgagatccctgaggatctgtatcacttgatcaagaaagctgttgctatccgcaagcatcttgagaggaacaggaaagataaggattccaaattcaggctgattcttgtagagagcagaatccatcgtcttgctcgttactacaagaagaccaagaagctcccacccgtctggaagtacgagtctacaactgcaagcac

SEQ ID NO: 157784 - DNA, 411 bp, Arabidopsis thaliana columbia
cgcaatcttcgctcttctctttgctctctctctctcaacgcggttcagatccgagtttgggagatgcaagctccctgaaaaaagccctttactctcgcttaccaactttgctccagcatggcaggatctgcaccagaaggcacacagtttgatgcacgtcagtttgaccagaaactcaatgaagtacttgagggacaagatgagttctttacatcctatgatgatgttcatgagaagcttgatgccaggggtctttaagagtaaccttcttagggggtatttatgccttataggttttatagaaatctatttcttttatatcaatcacattgagttaatttcggttctctatcttatttattgatttttttttttttagtttataatcattggctcaatttactttattct

SEQ ID NO: 157785 - DNA, 469 bp, Arabidopsis thaliana columbia
cctctctctacaaaaaaaacagtagagagagatatagagagcatcaatggcgtcgtcgtcaagactttgcgattcgtgcaaatcgacggcagcaactctattctgccgcgcagacgccgcgtttctctgcggcgactgcgacggtaagatccacacagctaacaaactcgcatcacgtcacgaacgagtttggctatgtgaagtatgcgaacaagcaccagcacacgttacgtgcaaagctgacgccgctgcgttatgcgtcacgtgcgaccgtgatattcactcagctaatccactctctcgccgtcacgagcgcgtaccaatcactcctttctacgacgctgtaggtccagcaaaatccgcttcctccttcgtcaattccgtagatgaagatggcggtgaccgcactgcttcggggcttttagctaaagaaggaattcgaatcactaaattggtctccgatcttgat

SEQ ID NO: 157786 - DNA, 472 bp, Arabidopsis thaliana columbia
taattttctaagcaaaatatggcgggagaagatagccttgaagctcaacgaggcgacgaatatgagggagtcgagtcctctcttgaaggtgaacgagaatgacggcaagatctgctcgaaaagagatgccaaggcggcgcctcttgtgcctccttccgcggcggaggaatacggctggactgcggatggattgcctgtgagccatggtagcgtgattggcgagcctatcaggataatccaatgaatttctggactttttacctttttggtcataattgatgattctttcaacattcacttattttatatttgtcttttttttaaatatattaattgttatatattaatgatctaattttattttttagttattatttttttttaatttttttttatatttaacttttcttttattttttttataatcatcttatttttttttttttttgttttatctattcttttttttttt

SEQ ID NO: 157787 - DNA, 190 bp, Arabidopsis thaliana columbia
agaagagagaaaaacaaaaatggcggttcttttctcgtcttcgacggtgatactctcttcttcttccgtgaaatcctccggaagtgagagaaagtctccgtttttagggttctctttaacggctatctcgaagccgtcggtacgagtcggcatttatgcgaattctaaaagaggattgcatgtgaagtgt

SEQ ID NO: 157788 - DNA, 328 bp, Arabidopsis thaliana columbia
ctctctgcctcctttcggattcaaatttcagttctagctcaaccatggcgttgctcgtcgagaagacctcaagtggccgtgaatacaaggtcaaagacatgtctcaagccgatttcggtcgtctcgaactcgagctcgccgaagttgagatgcctggactcatggcttgtcgtaccgaattcggaccttctcagccattcaaaggcgctagaatcaccggatctcttcacatgaccattcaaaccgccgtactcatcgaaaccctaactgctctcggtgctgaagtcagatggtgttcctgcaacattttttccactcaagaccactc

SEQ ID NO: 157789 - DNA, 178 bp, Arabidopsis thaliana columbia
atcatacctctgcccaagtaattgtttgacctgttagatgttgggaagaagattaagaaaacaccagttgtggtgggaaactgcacagggtttgcagtgaataggatgttcttcctttacacacaggcagttatgttcctttgtgaggtggggagcagttccatatttaatcgacagg

SEQ ID NO: 157790 - DNA, 453 bp, Arabidopsis thaliana columbia
aggatctttctcgctacatcaaatggcccatttccatccgtcttcaaaggcaaaagaggatcctgaagcagaggttgaaggtccctccagctcttaaccaattcaccaagactcttgacaagaatcttgctaccagcctcttcaaggcccttctgaagtacaggccagaagacatagctgccaagaaggagcgtcttgtaaagaaggcccaagctgaagctgagggaaagccttctgagtctaagaagcccattgtagtcaaatacggcctcaaccatgtgacctacctcattgagcagaacaaggcccaacttgttgttattgctcatgatgtcgacccaattgagttggttgtctggttgcctgctctgtgcaggaagatggaagtcccgtactgcattgtcaagggcaaatctcggtttggagcgggtgttcaaccaaaagactgctttt

SEQ ID NO: 157791 - DNA, 204 bp, Arabidopsis thaliana columbia
gagctcttgaggtgatccatgggatatgggctatgttgggagcttttggttgcataacccgggaagttcttcaaaagtggttccgtttggacttcaaagaaccagtctggttcatagccggttcacaaatcttcttcgaaggctgttttggacttcttaatgcacccaaacctagtccatgctttagagcattttagccgttct

SEQ ID NO: 157792 - DNA, 314 bp, Arabidopsis thaliana columbia
cacactctctctttgttcgagtaccaacaatggcccttcaagctgcttctttggtctcctctgctttctctgttcgcaaagatgcgaagttgaatgcttcttcatcatctttcaaggactcgagtctttttggtgcctccattaccgaccaaatcaaatccgaacatggatcttcctcgttaagattcaagagagaacagagcttaaggaatctagcaattcgagcccaaaccgctgcgacttcaagccctacagttacaaaatccgtggacggcaagaaaacgttgaggaaaggaaatgtggtggtcactgga

SEQ ID NO: 157793 - DNA, 333 bp, Arabidopsis thaliana columbia
aatccatttgagaggcctcgcgctgtttttgttctagaaatcgctggagctgatgatatgctgttggaaacctcccctagtcattctttcttgggcaatgccataaggagcagtattaagtctgattcgtacaaagctgatactgaacttccagacaatgaagtggttgttgtgtctgtcaatgaaccctcctctgatgtgactgacaaggacattaatgattttgcatcttggttgggtggatcatatgttgctggagctgaaccatcgtctgaattgttgagtatccctctggctgggggggctaatgtggagtccaatttggaaaaggaa

SEQ ID NO: 157794 - DNA, 446 bp, Arabidopsis thaliana columbia
tcatcaccccagttgagcttatcaagcaaggtgacatggtcgggtcttctgaggctgcgcttctagccaagcttggcatcaggccgttctcatatggtcttgttgtccagtctgtctatgacaatggctcagtcttcagcccagaggttcttgatcttactgaagaccaacttgtggagaagtttgcttctggtatctccatggtcacttccttggctcttgctgtgtcgtaccctacccttgctgctgcaccgcatatgttcatcaatgcgtacaagaatgccttggctattgctgttgccactgagtacaccttccctcaagcagagaaggtcaaggaatacttgaaggatccaagcaagtttgctgttgcttcagtagctgcggtgtctgctgatgcaggtggtggtgccccagctgctgctaaggtagaggagaaggaagag

SEQ ID NO: 157795 - DNA, 267 bp, Arabidopsis thaliana columbia
ctcgagttgaacatgttgatcacgcccgccgctctgcacaacactgtgtgaaatcactactcacgggacacactgacacgtacgattatcttccatatttctactcaagagtattcgagtatgaaggaagcccaagaaaagtgtggtggcagtttttcggagataatgtgggagaaacagtggaggttgggaactttgacccgaaaatcgcttaccttctggattgaatctggcaggttgaaaggtgttctagtagaaaagcggatc

SEQ ID NO: 157796 - DNA, 256 bp, Arabidopsis thaliana columbia
tccggaatcgccgcacgcgtccggagagatgggtgattctgacgtcggtgatcgtcttccttctccatcttcttccgacgaactctcgagctttctccgacagattctttcccgtactcctacagctcaaccttcttcaccaccgaagagtactaatgtttcctccgctgagaccttcttcccttccgtttccggcggagctgtttcttccgtcggttatggagtctctgaaactggccaagacaaatatgctttc

SEQ ID NO: 157797 - DNA, 241 bp, Arabidopsis thaliana columbia
catctagatacaacgattgtattccctgattatcagtttttgcaaagattgttcactccatcgcttgctcagaaatatgaagaactgtaccgtcaaaatggtgttaagtttgtcaagggcgcttccataaataacttggaagcaggttcggatgggcgtgtatcagctgttaagcttgctgatgggtctacaattgaggcagacacggttgtaattggaattggagctaagcctgctattg

SEQ ID NO: 157798 - DNA, 376 bp, Arabidopsis thaliana columbia
aagagaaacaacaagaagtagtaatgttcttttctatgctctcctccgccgctgtggttacgtgccccggctcaggccaccatggtcgctccattcaccggcttgaagtcatccgctgcattcccggtcacccgcaagaccaacaaggacatcactttcatcgcatgcaacgggggaagagttagctgcatgaaggtgtgggcaccaattggaaagaagaagtttgagactctatcttaccttcctgaccttagtgacgtcgaattggctaaggaagttgactaccttctccgcaacaagtggattccttgtgttgaattcgagttagagcacggatttgtgtaccgtgagcacggaaacactcccggatactacg

SEQ ID NO: 157799 - DNA, 463 bp, Arabidopsis thaliana columbia
aaaaagcattttcttctttcgattgcttcagattcgtcagctcactctttcctctccagaagaaaccctagacatctcatcgccaaaatgttcagatctatgctcgtccgatcttctgcctccgcgaagcaggcggttatccgccgtagcttctcctccggctccgtccccgagcgtaaagtcgccatccttggtgccgccggtggaattggtcagcctcttgctctcctcatgaagcttaatcctcttgtctcttccctctccctctacgatatcgctaacactcctggagttgctgctgatgttggtcacatcaacaccagatctgaggttgttggatacatgggcgatgataacttggccaaagctcttgaaggagctgatctcgttatcattccagctggtgtaccaaggaagcctggtatgacccgtgacgatcttttcaaacattaaggctggaatt

SEQ ID NO: 157800 - DNA, 459 bp, Arabidopsis thaliana columbia
ctcaggttcaggaaaccgtctctacgtgggcaacctttcttggggtgttgatgacatggcacttgagaacttgtttaacgagcaaggaaaggtagttgaagctagggttatctacgacagggacagcggtagatccaagggttttggatttgtgacacttagctcttcccaagaggttcagaaggcgatcaattccttgaatggagcagatttggatggaagacaaataagagtctcagaggctgaggctaggccaccaagaggccaattttgagcggtcacacctctttcatattctcaaaaaatgcaaattctggagggttctttgaagcatatagggttagtggaaaatggcggtttcagacagtaactaaaactcactgctggtgcacgctaggctttatccgcctttgatgcatgagggttttatggaatggatttttattgagaaagattatc

SEQ ID NO: 157801 - DNA, 418 bp, Arabidopsis thaliana columbia
gcgctttggttctgcaactcacagtcaaaggcggctgtaatggcgttagtgaaacccatctccaagttctcttccccaaagctctcaaacccgagcaaattcctctccggccgacgtttctccaccgtgatcagaatgtcagcctcttcctcaccgcctcctccaaccaccgccacctcgaagtccaagaagggaacgaagaaagagattcaagagtcgcttcttactccgaggttctacacgacggacttcgaggaaatggaacagcttttcaacacggagatcaacaagaaccttaacgaagcagagttcgaggctctgcttcaagagttcaagaccgattacaaccagacacatttcgtgaggaacaaggagtttaaagaagctgcagacaaattgcaaggacctctccgacaga

SEQ ID NO: 157802 - DNA, 451 bp, Arabidopsis thaliana columbia
ttttcgtttttatcttttcctccgaagaagaagataagaggttgaagaagaagaagatgccaggtccagttattgaggaagtgaatgaggaggctcttatggatgccattaaagagcagatgaagctccagaaggagaacgatgttgttgttgaggatgtgaaagatggagacgaagacgatgatgatgttgatgacgacgacgatgagattgctgatggagctggtgagaatgaggcttccaagcaaagtagaagcgagaagaaaagccgaaaggcgatgctgaaactcggaatgaaacctgttactgatgttagcagagtgactatcaagagatcaaagaatgtgttgtttgtcatctcgaagccggatgtgttcaagagtccgaactctgagacctatgtgatattcggtgaggctaagattgatgacatgagctctcagctacaagc

SEQ ID NO: 157803 - DNA, 450 bp, Arabidopsis thaliana columbia
gagaaaacttcgtctctcttctctgcttcgccctctcatttcctgtgagataaaggcggagtctctctccagttattttgctcatccatcgattcttagagttcaaaatggttgatcaagttcagcaccccactattgcgcagaaagctgccgggcagttcatgcgttcaagtgtttccaaggacgttcaagtgggttaccagaggccttctatgtatcaaagacatgcaacctacggaaactactccaatgctgcatttcaatttcctccgacatcccggatgttggcaacaactgcttctcccgtgtttgtccaaaccccaggagagaaggggttcactaactttgcccttgactttctgatgggtggtgtttctgctgccgtctccaagactgctgctgctcctattgaacgtgttaagcttttgatccagaaccaggatgagatga

SEQ ID NO: 157804 - DNA, 123 bp, Arabidopsis thaliana columbia
atattccaggaggcggcttacacgaaaactttttatctcagccatggcgaattattacgaaccgccagcttctggaaaccgtcgagacgcagtgaaaggtttcaacagagggagcttctacga

SEQ ID NO: 157805 - DNA, 352 bp, Arabidopsis thaliana columbia
cgacaaacacctttacgtctttgacctcgagacccggacttggtccatttctccagccaccggagacgttccacacctctcttgtttaggtgtccggatggtgtcagtaggatcgaccctctatgtctttggaggccgagacgcttcacgccaatacaacggtttctactcgtttgacacgaccactaacgagtggaaactgctaactccggtcgaagaaggacccactcctcgtagtttccactcaatggcagccgatgaggaaaacgtttacgttttcggtggagtgagtgctacggcacgactcaatacactagactcttacaacatcgttgattagaagtgggttcat

SEQ ID NO: 157806 - DNA, 381 bp, Arabidopsis thaliana columbia
gtagaagaagatgaaaaatccaattccttttatttgtgttttaggtcaacattccaaagttggttctttcccaatgtaaaactcgagcatttccttccactcatgcccttagacctcgccggatattgtagctgaaggcatgcgtaacatttgcattcatgaccaagttgacgaatacgcatgtgagccttgcacattttgttatatgtgtgacttgctccatgctgccgtaaaaggtgtcacatggttttcactcagatcatcctcttgagttttctctattccaatatgatcgaaaacctggctacattggctgctcttgttgtggtaacatgtcttcttgctcattctattgatggaaagaatgtgagatctatcctt

SEQ ID NO: 157807 - DNA, 411 bp, Arabidopsis thaliana columbia
aaacaatggcgtcttcttcagcgacgctctctctctgctctactttctctgctcattgcaatgtcaattctcgccgttctagcactatcctctgttctctctctaaaccttcgcttaatttggctaaacctctgactggatttctttcttcttccactgcgtcgacgtctcgaaccgcattcaccgtcgctccgaaattcgcggaatcaggcgtcgaagctgaaccggagactaccgatatcgaagctgtggtggtttccgatgtttcggaggttactgaggaaaaagcttaacgagaagagattttcgctggtattatggttggtggacgccaatacatagtggttccagggagatatctctacactcagaggctaaaagatgcaaatgttgggtgacccgtttggtctt

SEQ ID NO: 157808 - DNA, 340 bp, Arabidopsis thaliana columbia
cccacgcgtccgttttcgtttttatcttttccttgattctttcttctattggctgcgagatcaacgccgagtctttcttcaggtatttcggtgatacaatggttctttgaggtctaaacagttgttcaagatcagtacgccctgattgctcaaagagatgcgctgcgggtcatgcattcaagagttttcaggggcgatcacatgggttagctggctggcttagtttgtgaggaagctggggagaatgaggcttccaagcaaagtagaagcgagaagaaaagccagatcgggtatgggatccacagattgattccggacactggagttaccagagtgacta

SEQ ID NO: 157809 - DNA, 438 bp, Arabidopsis thaliana columbia
cgactcttcttcgttcagaccaaaactctcaatctcagccatggcgaattattacgaaccgccagcttctggaaaccgtcgagacgcagtgaaaggttacaacagcgggagcttcgacgattcagccggcgatcagagtcaaacgaacgattaccagttaaagataaagaaaagcaaaagcgttccaaacgcggatcgtgcggcgtcaagaagctggagtttcagcgatccagaatcgcggaggaagagaagagtcgctggctacaaagtttattccgttgaacagaagatgaagggatccattcgaaagagcttcaaatggttcaaagacattatcggtatttcttgatataccttctctcaactttcttaaaatcttttttttgtgctgagagaggtaaatatatctgtaacgaacaaaaaattgataggattttc

SEQ ID NO: 157810 - DNA, 448 bp, Arabidopsis thaliana columbia
ctccaatggcgtcgttactcgattccgtctccttgacccgcgtgttttctctgccgattgcggcttcggtctcgtcttcttcagctgctccgtcggtttcacgacgccggatttctcccgccaggtttctggaattcagaggtttgaagtcttcgcggagtttggtgactcagtcggccagtctgggtgcgaatcgtagaaccagaatcgctcgcggtggacgaatcgcctgtgaggctcaagacaccactgccgccgccgtcgaagtaccaaatctgtctgattcagaatggcaaacaaaggttctggaatcagatgtcccagttctggtcgagttctgggcaccatggtgtggaccttgccgtatgattcaccccatagttgaccagctagccaaagatttcgcagggaagttcaaattctacaaaatcaacactgacgagagccc

SEQ ID NO: 157811 - DNA, 469 bp, Arabidopsis thaliana columbia
agctcctaacaaagcaatatcattcccaatttattaaagttaaagccatggcttgcatctttgtctgccccctctatgataatggaagaagaagggagattcgaagcggaggttgcggaagtgcagacttggtggagctcagagaggttcaagctaacaaggcgcccttacactgcccgagacgtggtggctctacgtggccatctcaagcaaggctatgcttcgaacgagatggctaagaagctgtggagaacgctcaaaagccatcaagccaacggtacggcctctcgcaccttcagagcgttggaccctgttcaggtgaccatgatggctaaacatttggacaccatctatgtctctggttggcagtgctcgtccactcacacattcactaatgagcctggtcctgatcttgctgattatccgtacgacaccgttcctaacaaggttgaacacctcttcttcgctc

SEQ ID NO: 157812 - DNA, 436 bp, Arabidopsis thaliana columbia
gtcatttcatcctaccaaaaggaaaagttctgttgatcacacatcgaagagtgatattgctacaacaaccctccaacataatgggccaaagaaagtttattccggcaaaagatgcgtgttctatacagtgggatattctatggaatgatctggtaaccatggaactgagtgacgggaaaaaagacccacctaactctccaccttcgcggcttattctctatctgaaagcaaagccacatgacccgaaggaacaattccgtgttgtcaaatgcattcccaacagcaagcaggcctttgatgtttactcagctatcgatcaagccattaacttgtatgggcagaatgctttaaagggaatggtgaaaaacaaagtgacaagaccatattccccaatttctgagagttcttgggctgaaggagcttctcaacaaatgcc

SEQ ID NO: 157813 - DNA, 461 bp, Arabidopsis thaliana columbia
ctctttcacaaaccccccaacctccaacaagaagacctctctttcataaaaccctcacacgtgtgactgattcatcaccatgagctcatccccggccgtgaaaggcctaaccgatgaagagcagaaaaccctcgaaccggttatcaaaacgtaccaccagttcgaaccagacccaaccacgtgcacttctctcataacccaacgcatccacgctccggcctccgtggtttggcctcttatccgccgcttcgacaaccccgaacgctacaaacactttgtaaaaaggtgccgtctcatctccggtgatggtgacgtcggaagcgtcagagaagtgaccgtaatctccggcctcccagcctcaaccagtaccgagcggcttgagttcgtcgatgacgaccaccgtgttctaagcttcagggtcgtcggcggagagcaccgactcaagaactacaaatcagtga

SEQ ID NO: 157814 - DNA, 471 bp, Arabidopsis thaliana columbia
ctttgagaataatcaaaaatagaaagagttcagttttaacatgaaaacgtgaccgagtttgtcctagttactcttcgggacggagtggaagaagggaggagattcgcgaacgaggaaagggacccaatgacttcgaaagaattgaacgaggagccgcatgaggtgaaaatctcatgtacggctctgtagagtggcagtaagggtgacttatctgtcaacttttccactatcacccccaaaaaaccaaactctgctttacgtaaagttgccagagtacgattaacctcgggatttgaaatcactgcttatatacctggtattggccataatttacaagaacattctgtagtcttagtaagagggggaagggttaaggatttacccggtgtgagatatcacattgttcgaggaaccctagatgctgtcggagtaaaggatcgtcaacaagggcgttctaaatatggggtcaaa

SEQ ID NO: 157815 - DNA, 533 bp, Arabidopsis thaliana columbia
  unsure (1)..(533): unsure at all n locations
agcagtccaggttttataccttcatagaaagcagtagtttttcttagtctgtgatcttcccttatcatttttcctagataagagacgtagagttttctgagcatactacaaatattcatgaccataaagtatatatcttcctgaagtcccagggataaatgcatttgcttcgacttattatctttatccattgctagcgtaaaccttagcccctcatagatggcgtcgtatccctgtattcatgattcatgaggcattggaaagcgatgttttcctctgccgtcctggaaaagaggtagtctgcccaagatcttaattctatcttcaatcattgagagattttagtattctattggnggtcacagagatcttgcatactaaatggctctacaagaacgtgcacagtgtgcatcatgagtacgcgacaccgtttggtttgacatcagaatatgctcatcccgctgaaattctgttccttggttttgctaccattgttggttcggctcttaccgggccttacctgatcacccttt

SEQ ID NO: 157816 - DNA, 465 bp, Arabidopsis thaliana columbia
cttctacttggtttctttctctagatctcagattattctcttccacgcaaagaagaagatctaaagatgtcgtcatcatcatataacacaagcgttattccttcatcatcatcctctgctcagcctttcttcatcaccagctccggcaccggagataacgactttaaccggaaagatacttttatgtcaatgattcaacaacctaactcctcagctccaccacccaagaaacgaagaaaccaacccggaaacccaaatcctgatgcggaagtggtagcattatctccaaagacactaatggctacaaacagattcatatgcgatgtatgtaacaaagggtttcaaagagaacaaaatctacagcttcaccgaagaggacacaatctcccatggaagctgaaacaaaaatcaaccaaagaagtgaagaggaaagtgtatctttgtccggagccaacgtgcgttcac

SEQ ID NO: 157817 - DNA, 463 bp, Arabidopsis thaliana columbia
cggacgcgtgggtccagatctgcggtagagtttgtttgaccacgactgatcctgaaaggaatgaatggaaaaaatagcatgtcgtatcaagggagaattcagataacatttttttttgctttcctgatcggtacaatcttattttgatgtcgaaaaaaaaaaaagaattccaatttgggtcaagtgaataaatataaatggatggataaaaaaaccagttttccttattccaggaaaaaaaaagaaacgagcttccattcgtaatttgaaaaattaccccaactaattaaatgttaaaaatagattagcgcctaatacgggtatgggaaggcatttttttcttgcgtgttattatcaattttttcatgagtcctaattattgttttaactagtccatttggattaggttggagtgtgtaaaagaagcagtatattgataaaaaatatatatatttccaaaatc

SEQ ID NO: 157818 - DNA, 463 bp, Arabidopsis thaliana columbia
aaacaatggcgtcttcttcagcgacgctctctctctgctctactttctctgctcattgcaatgtcaattctcgccgttctagcactatcctctgttctctctctaaaccttcgcttaatttggctaaacctctgactggatttctttctccttccactgcgtcgacgtctcgaaccgcattcaccgtcgctccgaaattcgcggaatcagtcgtcgaagctgaaccggagactaccgatatcgaagctgcggtggtttccgatgtttcggaggttactgaggaaaaagctaaacgagaagagattttcgctgttattatggttggtggacgccaatacatagtgtttccagggagatatctctacactcagaggcttaaagatgcaaatgttgatgaccagattgttctcaacaaagtgttgcttgttggaacaaagacacacacttacattggcaagccggt

SEQ ID NO: 157819 - DNA, 360 bp, Arabidopsis thaliana columbia
gtaagcaacagcctcgtccgggttaatgcttttacagagcagctgtgcaagctgcaatcttgagcggtgaagggaatgagaaggtccaggacttgttacttcttgatgtcactcctctgtccttgggtttggaaactgccggtggtgttatgactgttttgattccgaggaacaccacaattccgaccaagaaagagcagatattctctacctattcagacaaccagcccggtgtactgatccaagtctacgaaagagagagggcacgaacaaaggacaacaaccttttgggaaagttcgagctcaatggtataccacctgcttcacgaggtgtaccgcaaattactgtctgtttcgaca

SEQ ID NO: 157820 - DNA, 462 bp, Arabidopsis thaliana columbia
agaaaacttcgtctctcttctctgcttcgccctctcatttcctgtgagataaaggcggagtctctctccagttattttgctcatccatcgattcttagagttcaaaatggttgatcaagttcagcaccccactattgcgcagaaagctgccgggcagttcatgcgttcaagtgtttccaaggacgttcaagtgggttaccagaggccttctatgtatcaaagacatgcaacctacggaaactactccaatgctgcatttcaatttcctccgacatcccggatgttggcaacaactgcttctcccgtgtttgtccaaaccccaggagagaaggggttcactaactttgcccttgactttctgatgggtggtgtttctgctgccgtctccaagactgctgctgctcctattgaacgtgttaagcttttgatccagaaccaggattagatgattaaagctggcag

SEQ ID NO: 157821 - DNA, 414 bp, Arabidopsis thaliana columbia
agcaaaagaaaaaaaagctattgtttgaaagaagaagaagttaactatggcaaaggatgtggaagccgttcccggagaaggatttcagacaagagactatcaagatccgccaccagctccgtttattgatggagcggagctaaagaagtggtctttctacagagcagttatcgcagagttcgtagccactctcctcttcttatacatcaccgttttgacagtcatcggttacaagattcagtccgatactgatgccggtggcgtagattgcggcggagttggaatcctcggtatcgcttgggcctttggtggtatgatcttcatcctcgtctactgcaccgccggtatctttggtggtcacattaacccagcggtgacatttgggctattcttggcacgtaaagtgtcgttacc

SEQ ID NO: 157822 - DNA, 461 bp, Arabidopsis thaliana columbia
gccgattcttctattagccgccatggtgaagtactcgcaagaacccgacaatcagaccaagtcttgcaaggctagaggatccgatcttagggttcacttcaagaatactagggaaacagcgcacgcaatcaggaagctaccattgatcaaggcgaagaggtaccttgaggatgtgatagctcacaagcaagcaattcccttcacacgtttctgcagaggtgttgggagaactgctcaagctaagaacaggcactctaatggtcaaggacgttggccagccaagtctgctcagtttgttcttgatttgctcaagaacgctgagagcaatgctgaggtgaaaggtttggatgttgatgccctcttcatatcacacatccaagtgaaccaagccgcaaagcaaaggagaaggacttaccgtgctcacggaagaatcaacccttacatgttcaacccatgccaca

SEQ ID NO: 157823 - DNA, 456 bp, Arabidopsis thaliana columbia
tttcactctcttccaattatataatctctggtctcatagaaaacatcggtctcttgtcaccggtgattttatttggtcaaaatcattcttcttctcgctgaataatcgttgatttcacttcttcttctggtcttaaaaaaattcaagatctatacgagaaaacacaaaacatgtaaaactttttcaaccgtttttcctgtcggtaaagtttggattcttcttagtaaattttggtcttattgtcgaccaaaagaagaagatggtcgttcagaatgttcaagatttggatgttcttccgaaacatagctcggattcattcgatgatgatggtcgtcccaagcgaaccgggacggtgtggacagcaagtgcacacataataacagcagttattgggtcaggagtgttgtcattggcatgggccgttgctcagattggttggattggtggtccagtggc

SEQ ID NO: 157824 - DNA, 452 bp, Arabidopsis thaliana columbia
cttaaggatctctggtttctctttctctcctctgtcttatcttctccaaagttacgctttttttcaatgaaaacattttcttgattcctgatttcaaatttcacaatctggatttcgtgtttcgaattcactttgaagaaaaagtttctcaatttcgcctgaaaacccacatgggattggaactaaacactagactgacaagaagaagaagagtaatcatcatcgagtgtttattacgattatgtccttaacgaaatcttcagaatcagttttcactgaagaagaagaagaagattcctttagcggtcgatacacgttatggatcaaagaagcattagaggagcttccacacaatttcacaatcaccgacccgtttatttcgggtcacccgattgttttcgcgagcttagggtttttgaaaatgactggctattcacgaggagaagtgatcg

SEQ ID NO: 157825 - DNA, 452 bp, Arabidopsis thaliana columbia
tgttttcaaaccatttggagaaacctgatccttcaaaaccaagatggatgcaagattctcttattacatgggagtctaagaatgcgcaaaattacgccattggtagcaagcctttgaccgctgcattgaacgtttactcgagaggttttagaagtctgttgaagtacattaaggacaaatacgcaaatccggaaattatgatcatggaaaacggatatggagaagaactaggggcctcagattctgttgctgttggtaccgctgatcataacaggaaatattatcttcagaggcatcttttgagtatgcaagaagctgtttgcatcgacaaagtgaatgttacaggatactttgtatggtcattgttggataacttcgagtggcaagatggttacaaaaacagatttggactctactacgttgatttcaaaaataacctcacacgttacgag

SEQ ID NO: 157826 - DNA, 475 bp, Arabidopsis thaliana columbia
gcgaaatttcacggtatttgaaatggcgacagttccaggacaattgatctgggagatcgtgagagaacaacaactgtttcttggtgaagcagttcggtagaggaaactctaaggttcaattcagcaaggagactaacaacctcaccaacgttcactcttacaagcactctggtcttgcaaacaaaaagactgtgaccatccaggccgctgacaaggaccaagctgttgtgctcgccaccaccaagaccaagaagcagaacaagcctaagctctctgtcaacaagtctatcctcaagaaggaattccccaggatgtcaaaggctgttgctaaccaggtggtggacaactactacaggccggacttgaagaaagctgcacttgctagactcagcgccatcagcaaaggtctcagggttgccaagtccggtgccaagcaaagaaacagacaagctttagccttttttttcacaatctg

SEQ ID NO: 157827 - DNA, 460 bp, Arabidopsis thaliana columbia
cacgaattctgatggcaatggctagggatggtctgctcccttctattttttcagacattaataaacgcacacaggttccggttaaagcaacagtggcaactgggttgtgtgctgcaaccttagcgttctttatggatgtttcacagcttgcagggatggtgagtgttgggacacttctggcatttacaatggtggcaatatcagtgttgatactaagatatgttcctccagatgagcaacctcttccgtcatctcttcaagagagaatagattctgtttcctttatatgtggtgaaacaacgtcatccggtcatgttggtacttccgatagcagtcaccagcctttaatagttaataatgatgctttggtcgatgtcccacttatcaagaatcaagaagctctagggtgtttggttctcagcgaggaaaccagaaggattgtcgctggatgagagcatta

SEQ ID NO: 157828 - DNA, 458 bp, Arabidopsis thaliana columbia
  unsure (1)..(458): unsure at all n locations
gcgaaggctccgcttcaatcatttgtagcagtatgttcgaattcgagacctagaaattcatcgaaccgtctcgtttctgtattcggacgcaagtcttcttctccttcatttgttactctcagagttgtttcatcgatggcttacgagaaagagcttgatgctgctaagaaagctgcttcactcgctgctcgtctctgtcagaaagttcaaaaggctttgttgcaatcagatgtgcaatcaaaatctgataaaagtccagtgaccgttgctgattatggttcacaagcagttgttagtttagtcttagaaaaagagctcagttctgaacccttttcattggtggctgaagaggactcaagcgatctacgcaaggatggntctcaggatactctggagcgcatcacataactcgtgaacgacactttggctaccgaggaatcggttaatggctctacttt

SEQ ID NO: 157829 - DNA, 459 bp, Arabidopsis thaliana columbia
aagaaagacatacccttttgaattttcgagcgttgtgatgccatatgagacatacaatggcgtgagcgtgcgcctaaggtatgtcctcaaagtaacagtcacacgtggttatgctggaagcatcgtggaataccaggactttgtggtccgtaactatgttccgcttcctccaatcaataatagcattaagatggaagttggaatcgaggactgtctgcatatcgagtttgagtacaataaaagcaagtatcacctaaaagatgttatccttgggaaaatatactttcttctggtgagaatcaagataaagaatatggatcttgagataagacggcgagaatcaactggagcaggagctaatactcacgtcgaaacagaaacactagccaaatttgagttaatggatggtgctccagttagaggcgaatcgatacctgtaagagtgttcttgacaccata

SEQ ID NO: 157830 - DNA, 423 bp, Arabidopsis thaliana columbia
acgagaagaatcttagttatagattgggtttgactcgttttgcggatcttactaacgatgagtatagatccaagtatcttggagctaagatggagaagaaaggtgagagaaggactagcctacggtacgaggctcgtgtcggtgatgagctaccggagtctattgactggaggaagaaaggagccgtggctgaggtcaaagatcagggtggttgcgggagttgttgggcgttttcaaccattggagcagtggagggaataaaccagatcgtaaccggagacctaataaccttgtctgaacaagaattggtcgattgtgacacttcatacaacgaatgttgtaacggaggtcttatggactatgcttttgagttcattatcaaaaatgggggaatcgatacagacaaagattatccttacaagg

SEQ ID NO: 157831 - DNA, 456 bp, Arabidopsis thaliana columbia
ggaaaaaggaaaggctgtggttgttggtggcggttacatcggtcttgaactcggtgctgctctgaaggctaacaacctcgacgttaccatggtttatccagaaccttggtgcatgcctcggcttttcaccgctggcattgtttccttctacgagggttactatgccaacaaaggaattaacattgtcaaaggcactgttgcatctggtttcactaccaactcaaatggagaggtcactgaggtgaaattgaaagacggaagaacgttagaagctgatattgtgatagtgggtgtcggtggtagaccaattatatcactcttcaaagatcaagttgaagaagagaagggtggtttgaagactgatgggttctttaaaacaagccttccatatgtatacgccattggtgatgttgccacctttccaatgaatctctacattgaaatgagacgcgtttt

SEQ ID NO: 157832 - DNA, 416 bp, Arabidopsis thaliana columbia
ggaagaacgatctcagtgagaggacgatcacttcgccgtcgcagtcatgggtcgaatgcatagtagaggtaagggtatctcggcatctgctttgccgtacaagcgttcatctccgagctggctcaagacaacccctcaagatgttgatgagtccatctgcaaattcgcgaagaagggtttgaccccatcgcagattggtgtcattcttcgcgactctcacggaattccacaggtgaaaagtgttactggaagcaagattctcagaattttgaaagctcatggtcttgcacctgagatccctgaggatctgtatcacttgatcaagaaagctgttgctatccgcaagcatcttgggaggaacaggaaagataaggattccaaattcaggctgattcttggagagagcagaatccatc

SEQ ID NO: 157833 - DNA, 468 bp, Arabidopsis thaliana columbia
gtctctgcaaacaaaggaagaagaatcaagatggctctggaaatctgtgtgaaagctgctggtggtgctcctgatcatctcggcgactgtccgttcagccaacgggctcttctcacactcgaggagaagagtcttacctacaaaatccatctgattaacctctctgacaaaccccagtggttcttggacattagtcctcaagggaaagtaccagtgcttaagatcgacgacaagtgggtgactgattccgacgtcatcgttggtatactcgaggagaagtatcctgatccaccactcaagactcctgctgaatttgcctctgttggatccaacatttttggtacttttgggacattcttgaagagcaaagactccaatgacggatctgaacatgccttgcttgttgagctagaagctttggaaaaccatcttaagagtcacgatggcccttttatcgccggagaaaga

SEQ ID NO: 157834 - DNA, 387 bp, Arabidopsis thaliana columbia
caaatttctcaaactctgaaatcgttctttcaaatctctcaatcgggatcaagatgcagatctttgttaagactctcaccggaaagactatcaccctcgaggtggaaagctctgacaccatcgacaacgttaaggccaagatccaggataaggaaggcattcctccggatcagcagaggcttattttcgccggaaaacagctagaggatggccgtacgttggctgattacaatatccagaaggaatccaccctccacttggttctcaggctccgtggaggtatgcagattttcgtcaagaccttaacgggaaagacgattactcttgaggtggagagttctgacaccatcgacaacgtcaaggccaagatccaagacaaggagggta

SEQ ID NO: 157835 - DNA, 458 bp, Arabidopsis thaliana columbia
atagatgcgatgtttccaggtacacaagtgcctgcctgcttcattcatcgagctacttctggggagtccttgaaaatcaagttgaaggagtcgcctcttcctacaaccttgagatttaaggcttgtatcatgcttgttaaggttaatgaagaactgatgagttatgatcagacaccgatgatcgttgacattgtcatcagggacgaacataatgatctcaaagaaaagatatatccaagcatatatccaagcatatatccacttttaacagagcatatatacacatttgaacttgacgtagaggaggtgacttccacggagcttgtctttgagttcccacaactcaacaaaagaaattggaagataggagaatgcgggatactccaaagagaaacgagatcacttcgccggagctcttcgccggatctctcgccggaatcttctcgtgtttctagcta

SEQ ID NO: 157836 - DNA, 371 bp, Arabidopsis thaliana columbia
ctacttcaataaatctccaccttactttaagaacaagaaaaacacagtattaacaaatggcaggaatcaaagttttcggtcacccagcttccacagccactagaagagttctcatcgctcttcacgagaagaatgtcgactttgaattcgttcatgtcgagctcaaagatggtgaacacaagaaagagcctttcatccttcgcaacccctttggtaaagttccagcctttgaagatggagacttcaagattttcgaatcaagagcaattactcaatacatagctcatgaattctcagacaaaggaaacaaccttctctcaactggcaaggacatggcgatcatagccatgggcattgaaattgagtcgcat

SEQ ID NO: 157837 - DNA, 458 bp, Arabidopsis thaliana columbia
atgtgttctctatcactggacgtggtacggttgctacagggcgtgtcgagagaggtacggttaaagtaggagagactgtagatttagtgggtttgagggagactaggagttacactgtcactggggttgaaatgtttcagaagattcttgatgaggctttagctggtgacaatgtagggttgttgcttaggggtattcaaaaggctgatattcagagaggtatggttttagctaagccgggatcgattactccacataccaagtttgaagcaattatctatgtgttgaagaaagaggaaggtggaaggcattctccattctttgcagggtacaggcctcagttctacatgaggacgactgatgttacgggtaaagtgacgaagatcatgaacgacaaagatgaaaagtcgaagatggttatgcccggtgatcgagtgaaaatagttgttgagcttatt

SEQ ID NO: 157838 - DNA, 415 bp, Arabidopsis thaliana columbia
ggaaggataaagagagacgccatgggaagaagacctgcgaggtgttaccgtcagatcaagggtaagccatacccaaaagtctcgctactgtcgtggtgtgccagatccaaaaatcaggatctacgatgttggtatgaagaggaagggtgttgatgagtttccattctgtgtccatttggtgtcatgggagaaggagaatgtgtcaagtgaagcacttgaagctgcccgtattgcttgcaacaagtacatggtgaagtctgctggaaaagatgcttttcatttgaggattagggttcatcctttccatgttctcaggattaacaagatgctttcgtgtgctggagctgataggcttcagactggtatgagaggtgcttttggtaaagctttgggtacttgggctcgtgtgctattg

SEQ ID NO: 157839 - DNA, 455 bp, Arabidopsis thaliana columbia
catagttcttcctcaaattgctcatacctttgcttctctttctttctttattcaacctcttatttcttcttcagcaccaacgtgtatctgcagtaaacacatatccatcgatcgatctcctcaaaaagttattgttttcttgaaggatttttcttgttcttgatcaagcatacatatatatagatggtggaagaaggcggcgtagttgtgaatcaaggaggagatcaggaggtggtggatttgcctccggggtttcggtttcaccctactgatgaagagataataactcactacctcaaagagaaggtcttcaacatccgatttaccgcggcagcgattggtcaagccgacctcaacaagaacgagccatgggatctaccaaagattgcaaagatgggggagaaggagttttactttttctgccagagggatcggaagtatccgaccgggatgag

SEQ ID NO: 157840 - DNA, 406 bp, Arabidopsis thaliana columbia
gtatttttcatgggcggaatatgatattatggctccagtgcaaccaaaaacagagaaagcggttgctgctgcttttatttccaattgcgccgctcggaatttccgcctgcaagctcttgaagccttaatgaagacgaatgttaagattgattcttatggtggttgtcaccggaatcgggatgggagtgtggagaaggttgaagctcttaagcactacaaattcagtctagcttttgagaacaccaacgaggaggattatgtcacagagaagttcttccaatctctagtcgctggatctgtccctgtggttgttggagctccaaatatagaagaatttgcaccttctcctgactcattccttcacattaagcagatggatgatggcaaggcagttgcaaaagaaatg

SEQ ID NO: 157841 - DNA, 263 bp, Arabidopsis thaliana columbia
tgaatgttgatctcaaactctttgtccacaatctgaagttaaagaaatatctgtctgtgagagatggaacagtgaagcgatacatcgatccaaaaaaagagtggggattcacacaattgatttcttttccaacattctacaacgcgaacgaatggtaccttgtgcaggacacaaattcttttggtgctgagatcttcatcgttaacccgacagaaaaacaagagaaagtcacattcatattaaacccttcagacaatgttttc

SEQ ID NO: 157842 - DNA, 460 bp, Arabidopsis thaliana columbia
  unsure (1)..(460): unsure at all n locations
attcagtttttttcatcaaaaaagagcgtcttcattaacgcccttcgtcttcttccctggaaatgtagtttctttcttccacgaaaatgagagagtgcatttcgatccacattggtcaggctggtatccaggtcggaaatgcttgctgggagctgtactgtcttgaacatggcattcagcctgatggccagatgccgagtgacaagactgttggtggaggtgacgatgctttcaacaccttcttcagtgaaaccggtgcaggtaagcacgtcccacgtgctgtctttgttgatcttgagccaactgtgatcgacgaggtcaggactggttcttaccgtcagctttttcaccctgaacaactcatcagcgngtaagaagatgcagctaacatattcgcccgtggtcattacaccattgggaaagagattgttgacctgtgcttagaccgtatcagaaagct

SEQ ID NO: 157843 - DNA, 415 bp, Arabidopsis thaliana columbia
gaaaaccttgaccggcaagaccatcactctcgaggtcgagagcagcgacaccatcgacaatgtcaaggccaagatccaagacaaagaatgaatccctccggatcagcagagattgatcttcgccggaaagcagctcgaagatggccgtactttggctgactacaacatccagaaagaatctacacttcatcttgtgttgaggcttagaggaggtattattgagccttccttgatgatgcttgctcgtaagtacaatcaggataagatgatttgccgcaagtgctatgctcgtcttcacccaagagctgtcaactgcaggaagaagaagtgtggtcacagcaaccagttgaggcctaagaagaagatcaagtagagagactcttatcaagaaatccatctcttgcttgcttttttt

SEQ ID NO: 157844 - DNA, 451 bp, Arabidopsis thaliana columbia
attctctctctctctaaaaaaccaaatccagagtcagagaaaatctgtgatggctctttccaacgcctcctctctctccaccagatctatctacggcggtgatctttctcaccgtccaagcaaccgtcaatcatccttcacatttcatcccgccgtcaacaccaagcctaaatccgttaacctcgtcacggctgtacacgcggctgagccagctagaaacgctgtttcagtcaaagaatccgttgcgtcttcttcgtctggtgcattgaaatggactccagagagctggaaactgaagaaggctctgcaacttcctgattatcctaacgccaatgagcttgagtctgtgcttaaaacgatagaggcttttcctccgattgtgttcgccggagaagctaggaatcttgaagagagattggctgatgctgctgttggtaaagcttttcttctc

SEQ ID NO: 157845 - DNA, 449 bp, Arabidopsis thaliana columbia
attctctctctctctaaaaaaccaaatccagagtcagagaaaatctgtgatggctctttccaacgcctcctctctctccaccagatctatctacggcggtgatctttctcaccgtccaagcaaccgtcaatcatccttcacatttcatcccgccgtcaacaccaagcctaaatccgttaacctcgtcacggctgtacacgcggctgagccagctagaaacgctgtttcagtcaaagaatccgttgcgtcttcttcgtctggtgcattgaaatggactccagagagctggaaactgaagaaggctctgcaacttcctgattatcctaacgccaatgagcttgagtctgtgcttaaaacgatagaggcttttcctccgattgtgttcgccggagaagctaggaatcttgaagagagattggctgatgctgctgttggtaaaagctttcttc

SEQ ID NO: 157846 - DNA, 460 bp, Arabidopsis thaliana columbia
ggaaggataaagagagacgccatgggaagaagtcctgcgaggtgttaccgtcagatcaagggtaagccatacccaaaagtctcgctactgtcgtggtgtgccagatccaaaaatcaggatctacgatgttggtatgaagaggaagggtgttgatgagtttccattctgtgtccatttggtgtcatgggagaaggagaatgtgtcaagtgaagcacttgaagctgcccgtattgcttgcaacaagtacatggtgaagtctgctggaaaagatgcttttcatttgaggattagggttcatcctttccatgttctcaggattaacaagatgctttcgtgtgctggagctgataggcttcagactggtatgagaggtgcttttggtaaagctttgggtacttgtgctcgtgtagctattggacaggttcttttgtctgttcgttgcaaggatgcccatggtcac

SEQ ID NO: 157847 - DNA, 447 bp, Arabidopsis thaliana columbia
ggggtttctatccagcgggtgatgatggcgattataacatggttggggaaggtccaggtgaagggtttaacataaatgttccatgggatcaaggacgatgtggagatgcagattatcttgctgcatgggaccatatcttgattcctgtggcgagggaatttaacccggatgttatttttctttcagctggatttgatgcagctattaatgatccgctagggggttgttgtgtgaccccatatggatattcagttatgttgaagaagctgatggagtttgcacaaggaaagattgtgctggcgttagagggaagggacaatttttgactcaattgcaaaggcttcacttgcatgtgtccaagttttgcttgaaaacaaacaaattcaaagaccttcggaagcatacccattcgaggcgacatggcgtgtcattcaagcggtgcgcaag

SEQ ID NO: 157848 - DNA, 465 bp, Arabidopsis thaliana columbia
cggacgcgtgggttttgctcagtgtgctacgtgagagatagagagatggaaggtctgattgaaaccagaggaattctctctttacccgcgaagcccatcggagtgagaaggcttctccaaccctcacatggcttaaagcaaagacttttcaccacaaacttacctgccttgtccttatcctctaatggtcacaagaaatttcaagcctttcagcaaatcccacttgggatttcggtttcccacaaggagagaagcagaggattcatctgcaaggcggaagctgcggcggccggaggcggaaatgtgttcgacgaaggagacacagcggcgatggcggtgtcgcctaagattttcggtgtggaggttacgactctgaagaagattgttcctttagggctaatgttcttttgcatccttttcaattacacaatccttagggacacgaaggatgttttggtggtgacg

SEQ ID NO: 157849 - DNA, 454 bp, Arabidopsis thaliana columbia
ggacataccagagacaagagatcgaacaggtttacgatttcaaaaaccatcagctccctctagctcgtatcaaaaaaatcatgaaagctgatgaagatgtgcgtatgatctccgccgaagcaccgattctcttcgcgaaagcttgtgagcttttcattctcgaacttacgattagatcttggcttcacgctgaagagaacaaacgtcgtacgcttcagaaaaacgatatcgctgctgcgattactagaaccgatatcttcgatttccttgttgatattgttcctagggaagagatcaaggaagaggaagatgcagcatcggctcttggtggaggaggtatggttgctcccgccgcgagcggtgttccttattattatccaccgatgggacaaccggcggttcctggagggatgatgattggaagaccggcgatggatcctagcggtgtttatgc

SEQ ID NO: 157850 - DNA, 339 bp, Arabidopsis thaliana columbia
atcccatccgaaaaatcctacttgcttcccaaagttgcaatctttgaggatctttgacataggcataaatatcctctggtggatgtgagtaaggttgcattgattccaaggacatggcgatggggaagtattcccgtgtagacgggaagaaatcatcgagctatggtttaaccattaccattgttctgttactttccctctgtttagttgggacatggatgttcatgtcttcttggtcagcccctgctgattctgctggctactcctcaactgatactgctaaagatgtttctaagaatgacttgagaaaagaagaaggctttcgagatccgaagaact

SEQ ID NO: 157851 - DNA, 498 bp, Arabidopsis thaliana columbia
  unsure (1)..(498): unsure at all n locations
ctgaanncccgggncggccccaggcgtccgctttcttatacatccatatcaccgatgatgcttcgccgtgacgtcctcttcctctcactcgggctcgtcatcgccaccgtctccgctgtcgcattagccgacgatgaagcagattgtgtctacacattcttccttagaaccggatcaaccttcaaagccggtacagattcgatcataagcgctagagtctacgacaaatacggagactacatcgggatccgaaacctagaagcatggggtggtttaatgggaccaggttacaactactacgagaggggtaatctcgacattttcagtgggaaagcaccatgtcttccgagcccagtctgttcattaaatctgacctctgacggctccggtgaccaccacggttggtatgttaactacgtggaagtcacgacagccggagttcatgcaaagtgctcgtaccaaagctttgatgttgagcaatggcttgcgtccgataca

SEQ ID NO: 157852 - DNA, 446 bp, Arabidopsis thaliana columbia
gggattcttccgagtagcagagagtctcgatttctcttgctctagatatcccatctgccaaagagctgtttgattcgatagttccaaaggctatttctggaggctggctcgatgattcatttaagataacctctgatcaagatggagaaaaatcgagtcaagacggaaagctaagacagtacaagaaggatacagtgaacataattcaggaatatttcttatcagatgacattcctgagctaatccgcagtcttcaagatttaggggcacctgaatataacccggtgtttctgaagaggctcataactcttgctctagacaggaaaaacagagaaaaggaaatggcttcggttcttctttctgctcttcacatggagctattctcaactgaagatttcataaacgggttcattatgctcctggaatcggcagaagacacagcttta

SEQ ID NO: 157853 - DNA, 460 bp, Arabidopsis thaliana columbia
caaaaaagctcctccatttcaatggcgacagcttctgctctctcatcactctcttcactctcactgcacacccgaacctcttctctcatctcctcttcctccacaaaatccatcgtctctttctcctccttcctcaaccgccgcttctcatctctcactctcgtcaaagcctcatcgaccgataccgaaaccatcttcttcgaagacgaaacaccagaaataaccgcatatgtcgtcttcgacccaccaattgctcccgaaggattcgtctctcctccgtatttcgacgaaggaagcgacgagacagaggaagagatcgctaccgcttttgaagagctctatggacctgcgtatagtggtgagagtatgcttgggaaagatatttatgtgatggactcaaagcataagaagagttcaggtattggtgggaagcccaagaaagataagattagggatgggt

SEQ ID NO: 157854 - DNA, 457 bp, Arabidopsis thaliana columbia
gaacgctttcgttttcgagatcgtgatgacattcggtcttgtttacaccgtctacgctacagccattgaccccaaaaacgggagtcttggaacaattgctcccatcgcaatcggtttcattgttggagccaacatcttagctggaggagctttctctggagcctccatgaatcccgccgtggctttcggaccagcggtggtgagctggacatggaccaaccactgggtctactgggccggacctctcgtcggcggtggaatcgctggactcatctacgaagttttcttcatcaacaccacacacgagcagctcccaaccacagactactgaattaatctctctttttctctcttgagtaattttattcgactttgaatttgaattctaatgtctttttaatttcccgttgtgtaatttcgaatcatcaaggggtttatgatcgttcgatcttttaga

SEQ ID NO: 157855 - DNA, 456 bp, Arabidopsis thaliana columbia
ggacataccagagacaagagatcgaacaggtttacgatttcaaaaaccatcagctccctctagctggtatcaaaaaaatcatgaaagctgatgaagatgtgcgtatgatctccgccgaagcaccgattctcttcgcgaaagcttgtgagcttttcattctcgaacttacgattagatcttggcttcacgctgaagagaacaaacgtcgtacgcttcagaaaaacgatatcgctgctgcgattactagaaccgatatcttcgatttccttgttgatattgttcctagggaagagatcaaggaagaggaagatgcagcatcggctcttggtggaggaggtatggttgctcccgccgcgagcggtgttccttattattatccaccgatgggacaaccggcggttcctggagggatgatgattggaagaccggcgatggatccctaacgggtttatgctc

SEQ ID NO: 157856 - DNA, 441 bp, Arabidopsis thaliana columbia
catggataagacagcgacattgtgtctcttgttcttgttcacattcctcacgacctgggggtctaaagatctctgtaaccaaaatgacaaaaacaccctcctcaagatcaagaaatctctaaacaacccttatcacctcgcttcatgggaccctcaaaccgactgttgctcctggtactgccttgagtgcggcgacgccaccgttaaccaccgtgttaccgccttaaccatattcttcggccagatctccggtcagatcccggctgaagtcggtgacttgccgtatcttgagacccttgtcttccgcaaactctctaacctcaccggtacaatccaacccaccatcggcaaactcaagaacctccgaatgctcaggctcagctggacgaatctgacaggtccaattcctgactttataagtcaggtcaagaatctcgaggt

SEQ ID NO: 157857 - DNA, 430 bp, Arabidopsis thaliana columbia
ctcagactcagagagtcacaaagtgtgtgttgcagcaatggcgtctgttgcttcttcaactactctcatctcttctccctcttctagggtttttccagcaaagtcttcactttcctctccatctgtttctttccttcgaaccctttcttctccttccgcatctgcttctctccgctccggatttgctcgacgctcttccctcagctccacttctcgtcggagctttgctgtcaaagcccaggccgatgatcttccactggttggaaacaaggcgcctgattttgaggcagaggctgtgtttgatcaagagttcatcaaggttaagctctctgattacattggaaagaagtatgtgattctctttttctacccattggactttactttcgtctgcccaacagagattactgccttcagtgaccggcattca

SEQ ID NO: 157858 - DNA, 437 bp, Arabidopsis thaliana columbia
ctcaaactctgtaaacagcaacaatgtcttctctccaactaactctattctctctgggatccatactcccaccatcctacttccaattcgccagatctctcccactccgaaaaaccttgccaatccgtatcaacaacggtggaaacgccgccggagcaagaatgtcagccaccgcagcatcaagctccgcgatggcattagcagacgtcgcgaaaagaaacgacacattggaattaacagtcacagacatcgagatgctcgaacaagtcttctcagatccacaagtactaaacttttttgcgaatccaacaatcaccgtcgagaagaaacgtcaagtcatcgacgacatagtgaaatcgtcgtctcttcaatctcacacatctaacttgctcaacgtcctcgtcgacgcgaatcggatcaatatcgagacggagatc

SEQ ID NO: 157859 - DNA, 414 bp, Arabidopsis thaliana columbia
catctccaacaagaagacttctgatgtcattggatccgatgagggtactcacttcactctacaagttaaagacaagaagatcattggctttcatgggtctgccgggggcaatcttaattctcttggggcttactttgctccgttgactactacaactccgttgactcctgccaagcagctaacggcatttggtagtgatgacggaactgtatgggatgatggtgcttacgttggggttaagaaggtgtacgttggacaagcccaagatggaatctcagctgttaagtttgtgtacgacaaaagccctgaggaggtcacaggagaagaacatggaaagagtactctactcggattcgaagagttcgtacttgactatccaagtgaatacatcaccgcagtcgatggcacttatga

SEQ ID NO: 157860 - DNA, 420 bp, Arabidopsis thaliana columbia
catttccattacccaatcccgctccttttctctgattttgaatcgaacccttaatacccagaaatctcacggttccgaggagtgggtttttgggggttagggttttcgagagatgttgaatgtcaggttcattgatgaatctgttttctctctgcttcaagccattcgggcacgtctgtgataattccgaagctggatcgggtggtggtggtggcgtttctggtggaaccggcggtgaaggcaaagacggattgctttggttccgtgatctcggttaatattgcggcggagatttctccatggctgtgatttcaagccaatcaggttcttgaagatcagagccagttctaatccggtaattttgggacttttgttggtgtttacgatggtcatgggggtcctgaagctgctcgttttgtc

SEQ ID NO: 157861 - DNA, 436 bp, Arabidopsis thaliana columbia
  unsure (1)..(436): unsure at all n locations
agaacagctagctttgccatctccctataggcaataaatctcggatccactttcacgatattttgatattttttctatttataatctttctgggttttgagtcttttgaaggctgaattgctctgaaatctcaattgtataatcatctcctgggtcgtcgttatcgtgatcatctagaagaaagcatgactacactagatttgaccagagccgagcttgctcttattgttctctatttgaacaaagctgaggctagagataagatatgcagagctatccaatatggttccaaanttttgagcggtggccaacctggtactgctcaaactgtcgacaaatacaccagcttggcgagaaaagttttccgtcttttcaagtttgtcaatgattttcacggtcttatcaaccccgtgcctaaagggactccactttctct

SEQ ID NO: 157862 - DNA, 446 bp, Arabidopsis thaliana columbia
aggtattgtcgactctgaagatcttcctctcaacatctcgagagagacattgcagcagaacaagatcctcaaggtcatccgcaagaaccttgtgaagaagtgccttgagctcttctttgagattgctgagaacaaggaagactacaacaagttctacgaggctttctctaagaacctgaagctcggtatccatgaggactcccaaaacagaaccaagattgctgagttgctccgttaccactcaaccaagagcggtgatgaattgactagtctcaaggactacgtgacaaggatgaaggaaggtcagaacgatatcttctacatcactggtgagagcaagaaagctgttgagaactctccattccttgagaagctcaagaagaaaggtattgaagttctctacatggttgatgcgattgatgagtacgctattggtcaactttaag

SEQ ID NO: 157863 - DNA, 466 bp, Arabidopsis thaliana columbia
cgctttgttgcagaggatcacaatctaatggcgattccaatgtccatggcaatggcgactcctacagattccgtgagcagagtctggagtatgtcttctctcaaatcagctcttccctccaccgcatcactccgattaccttcctcgtcttctcgccgtccggttactcttcgtctcccaatctcttctccttcactcccatctttctccggtctctctccggtcaatcctctcctctcaatcggacttccagattggcaaagctttgagaatggattcaaaattgttgacggtggtggtcgtatctacgcgatgagacacggacgacgtgttccgaagctgaacagaccaccggaccagcgcaaagctcttctgcgaggactcacgactcagcttcttaagcatgggagaatcaagacgactcgagctagagctagtgcgatgaggaagttcgttgacaagatga

SEQ ID NO: 157864 - DNA, 448 bp, Arabidopsis thaliana columbia
cgcctttatctctttctctagatctactcgctatggctactatcaccgttgttaaggctagacagatcttcgacagtcgtggtaatcccaccgttgaggttgatatccacacgtcaaatggtattaaggttacagcagctgttccaagtggagcttccactggtatctatgaggctcttgagctgagggatggaggatctgactaccttggaaagggtgtatctaaggctgttggcaatgtgaacaacatcatcgggccagcacttattggaatggacccaactcatcagactgctattgacaacttcatggtccatgaacttgacggaacccaaaacgagtgggggtggtgcaagcaaaagcttggagccaatgcgattcttgctgtgtctcttgctgtctgcaaagctggggctgttgacagcggctatcctctttacaagcacat

SEQ ID NO: 157865 - DNA, 452 bp, Arabidopsis thaliana columbia
atttctcatttctaaaaccctaagcttcgccggcagctccgatcgtgatctttcataaatcctaccatcgccgtcgattaagagctgagctcaggaaatgagtttcaacaaagttcccaacattcctggagctcctgctctctctgcccttcttaaggtcagcgttattggtgggctcggtgtctatgcccttactaatagtctctacaatgtcgatggaggacaccgtgctgtcatgttcaaccgattaactggtatcaaggaaaaggtgtacccagaaggcacacattttatggtgccatggtttgaaaggccaatcatctatgacgttcgtgcacgaccttaccttgtagagagcaccactggtagtcatgatcttcagatggtgaaaattggattaagggttctcacacgttccatgagtgaccgtttgcctcagattaccgaaccct

SEQ ID NO: 157866 - DNA, 454 bp, Arabidopsis thaliana columbia
cggacgcgtgggtcagatctaaagaagagcgtcttcataaacgcccttcgtcttcttccctgcaaatctattttctagatctttctttcttccgcgaaacgacaatgagagagtgcatttcgatccacattggtcaggctggtattcaagtcggaaatgcttgctgggagctttactgtcttgaacatggcattcagcctgatggccagatgcctggtgacaagactgttggtggaggtgatgatgctttcaacaccttcttcagtgaaaccggtgcaggtaagcacgtcccacgtgctgtctttgttgatcttgagccaactgtgatcgacgaggtcaggactggtacttaccgtcagcttttccaccctgaacaactcatcagtggttaagaagacgctgctaacaatttcgcccgtggtcattacaccattgggaaagagattgttgatct

SEQ ID NO: 157867 - DNA, 461 bp, Arabidopsis thaliana columbia
ctcgagtaggtctcagttacgtaaaggatcgagcttaaaagatgagtggagttgaagagaaagtttctggaacgacaaagacacctgcagatttcctcaaatccatccgtgggagacccgttgttgtcaagctcaattctggtgttgattatcgaggcactcttacttgtcttgatggatatatgaacatagcattggagcagacggaggagtatgtaaacgggcagctcaagaacaaatatggtgacgcctttatccgtggaaacaacgttctttacatcattacagtaaacatgactgttgcagacggagcctaggcccatcatgatcatcaacaacatcaacaggggtcatgttatggctgccatttttgttggctttttctacctcattttaaaagaagttgtagacatgtacccaaatttgcattcttttgttcttcattagatttttgggattca

SEQ ID NO: 157868 - DNA, 463 bp, Arabidopsis thaliana columbia
aaacaaatggtgcaagaaggagctttaactgctcttgcttcagtggctgattcatcacaggaacactttcaaaagtactatgatactgtcatgccttatctcaaaactattttgatgaatgcaactgacaagtctaagcggatgcttcgtgccaaatccatggagtgcatcagtcttgttggaatggcagttggaaaggacagattcaaggaagatgctagacaggtcatggaagtgctaatgtcattgcaaggttctcagatggaggcagacgatccaataacaagttacatgttacaggcatgggctaggctttgcaagtgtctaggtcaagatttcctcccatacatgaaggttgtgatgcctcctttgcttcagtcagctcaacttaagccagatgtaacaattacatctgctgattcaaaagatgaagcagaggattctgatgatgaaagcatggaga

SEQ ID NO: 157869 - DNA, 430 bp, Arabidopsis thaliana columbia
aaagggaggaggatggtgtgacaacattaggatctgtgtataccgaaagaagtcgcgtcgcggatcttctaactatatggagaaacaaatacagtttacaggaatacttagcaataaagctcaagaaaatccagactttttcaactggaatcgagttaagcttcgttactgcgatggtggttccttcagtggagatagtcagaacaaggctgcacggcttcagtttagaggagagaagatatggagagccgcaatggacgatttgaaggcaaagggaatgcgaaatgcgaaacaggcacttctatctggttgctctgcaagtggtctagcagttattttacgctgtgacgaattcagaaacttgttttctggatggaccagagttaaatgcttaagtgatgcaggcttagtcttggacacttgcagggag

SEQ ID NO: 157870 - DNA, 426 bp, Arabidopsis thaliana columbia
ccaagctctcttctcatcaaaccatggatccttacaagtatcgtccagctagttcttacaacgctcccttcttcaccaccaactctggtgctcctgtatggaacaacaactcctccatgaccgttggacccagaggtcctatccttcttgaggattaccatctcgttgagaagcttgccaatttcgacagggtacggattccaaagcgggtggttcatgccagaggagccagggcctaaagtttctttgagggcactcatgatatctttaacctgacttgagctgactttctccgagctcccggtgttcagactcctgtcattgtccggttcttcaccgttattcatgagcgtggaagtcccgagaccttgagagaccctcgtggttttgcagtcaagttctacaccagagaggggaactttgatc

SEQ ID NO: 157871 - DNA, 431 bp, Arabidopsis thaliana columbia
gaagatctcgctcaccgctctcatttcctcaattctccgtccgtcgaagaagcgaatcgctcgaaattagggtttctactgagagaagatgcgagaaatcataagcattcacatcggacaagctgggatccaggtcggaaattcgtgttgggagctttactgtctcgaacatggaatccagccggacggaatgatgccgagtgatactacagttggtgttgcacacgatgcgttcaatactttctttagcgagactggtgctgggaagcatgtccctagggctgtcttcgttgatctcgagcctaccgttatcgacgaagttcgtactggtacttaccgtcaactttttcattcagagcagcttatttctgggaaagaagatgctgcttacaacttcgctagaagacattacacttgtggggaaggaaatt

SEQ ID NO: 157872 - DNA, 453 bp, Arabidopsis thaliana columbia
gcccacgcgtcggttaaatttctagggtttcgaaagaaaaattattgactccaatcgaatggctaagtccatggattcacgataagtttcgattctcaacttgttgtagtactagtagtttattgtatttgcatgcttcgagctttttccgagatcgatcttttggttttcgtcagaatccgaatcgattcgtctccaattcatcgattcaacttcctcaatcagttccagggtcgataaaccaggaaaggtttaatctttggcaagggttttcgaggaagaagagtactagtagtagtagaacgattgtgaattgtcaagaaggtgatcagaaagctagctcaagtgaaggagaaggaaagaccaataaggataaaggacggaagcaaggtaagaatgagttatggtggtctaaagggaagaaatggcaatggaaaccgattattcaagcgc

SEQ ID NO: 157873 - DNA, 437 bp, Arabidopsis thaliana columbia
gtttggcacttccctcggctaatactaatgcttatcgtcttgtcaacagtgaaggagatagattgtctggattgattgtggatgtgtttggagatatagctgtggtagcatcctctgctgcttggcttgaaaagtacaggattgaagtggagagttgcttaagatcaattgacggaattaatcatataaactggagaccttctcttgatgttcttaaagaagatggttttgacatctcaagtctgaaacagacacaatcatctactctcccacagagatcaatggtacggtgtgtggtgcccttaatcaggttgtggaaaatgggatctcatacgcaattttgctagagggacagaagacaggtgtctacacggatcagcgcgaaaaccgtcacttcatatcaaccatctctgctggaaaagagttcttgatctttg

SEQ ID NO: 157874 - DNA, 440 bp, Arabidopsis thaliana columbia
cgcgatcgcgttcgtgctatgaagtttactgagcctactgttgttcttgttgctgctcagtgtaaggttgcgtctgaccttcccaagttggttgagggtctcaagaggttggccaagtctgatcctatggttgtgtgtacaatggaggaatcaggtgagcacattgttgctggtgcaggagaactccatcttgagatttgtcttaaggatcttcaggatgatttcatgggtggtgctgaaattatcaagtcagaccctgtggtctccttccgtgagacagtttgtgattgatctactcgcacagttatgagtaagtctcctaacaagcataaccgtctgtacatggaagcaagacccatggaggaaggtctagctgaggctattgatgatggacgtattggcccaagggatgaccctaagatcagatccaagatcttggc

SEQ ID NO: 157875 - DNA, 441 bp, Arabidopsis thaliana columbia
cccacccttcacttcattctctagggtttaaaaaagacaaaagctttttgtctaatgaaaaaggaaattcctcggttccactccagggtaatcatggcatctcccgcgatctcgattgtttcttattatcggcattcatgttatattagctagaatcgtgttttgtacctccgatctgattcacagattcagtatgcgaaattcattattttgaggatttgatcgtcttatcaatgatttaatctatgtgtgaatattggtgaatcacgggcaatttcgcatcacgccaaaagaattgtttctaacagatgcgaaaaagattgaatctgctttcgcaatgctattattcaaattagctgagttcttgtcttgataagatggattggttcttgatttaaaatgcatggcccaatcttaccctggctttgcccaaattaaata

SEQ ID NO: 157876 - DNA, 292 bp, Arabidopsis thaliana columbia
aagaagaagagaaacaacaagaagttgttttggcttcctctatgctctcctccgccgctggggttacatccccggctcaagccaccatggtctctccattcaccggcttgaattcatccgctgcattccctgtcacccgcatgaccaacatggacatcacttccatcgcaagcaactggggaagagttagctgcatgaaggtgtggccaccaattgaaaagaagaagtttgagactctatcttacctccctgaccttagtgacattttattggctaaagcagttgactacct

SEQ ID NO: 157877 - DNA, 228 bp, Arabidopsis thaliana columbia
ggagaagaagatgaagaaaccaattcctaaaattagggcttttggtcagcgatcgattgcttgttccttcctgaatctcagctcgattcctgtcgataatacttcggaaaatccgccggagaaagtggagaatcgcagcaagctgaacaaatcagtgctgtttaagccaaacaactttgaggagcggctaagaccatttacttctttgggtagctctaaagatccgac

SEQ ID NO: 157878 - DNA, 426 bp, Arabidopsis thaliana columbia
ctcttatatgtcgtcgtgtcattagcctcctgttatgagtccatcatcaacgaccatctccgagttccatcggacggcaagtggagaaccgatgaagaagtgaggtccatctacttacaatggtccgcagaacacgggaaaactaacaacaacaacaacggtatcatcaacgaccaagacaaaagattcaatattttcaaagacaacttaagattcatcgatctacacaacgaaaacaacaagaacgctacttacaagcttggtctcaccaaatttaccgatctcactaacgatgagtaccgcaagttgtacctcggggcaagaactgagcccggccgccgcatcgctaaggccaagaatgtcaaccagaaatactcaaccgctgtaaacgggaaggaggttccagagacgggtgattggagacag

SEQ ID NO: 157879 - DNA, 408 bp, Arabidopsis thaliana columbia
aaaaaacagagtagagattgataaaaatttaatgagtagctccgattctcctcagcttcacaatatcttcgtctatggtagctttcaagagcctgacatcatccatgtcatgcttaatcgtattcctgagattgtctctgcaacacttcctggctttaagagatttaggcttaaaggacgtttgtatccatgtattatcccctctgagaatggagaagttcatggcaaggtactaatgggtttgactattgatgaacttgggaatgtagattgggttgtaggatacgtatatgatgagtgtttttttggctttttataataatgccatttttttgtaattttatttgtgtttccatatttttcgtctcttcttgtattctttctttttttttttcgtatatttgtttt

SEQ ID NO: 157880 - DNA, 427 bp, Arabidopsis thaliana columbia
cggacgcgtgggcggacgcgtgggcggtcgcgtgggcggacgcgtgggcggacgcgtgggcggacgcgtggggacataaggactggtcaccaactccaggtctatcagccacatggtgatggtgagaacggacctgtcacctccattgcattctctgtgtcagggagacttcttttcgctggctatgcgagcaacaacacttgctacgtttgggataccctcttgggagaggttgtattggatttgggattacagcaggattcacacaggaatagaataagctgtttggggttgtcagcagatggaagtgccttgtgtacaggaagttgggattcaaatctaaagatatgggcgtttggaggacacaggagagtgatttgaagaagatttaaacgaagtaggagtcacgtcttcagttgttggttaa

SEQ ID NO: 157881 - DNA, 431 bp, Arabidopsis thaliana columbia
acgctagccgacttatcctggtttgagtgatacttacacgaaaattaaagccctctgcctcaacttggtattggcagggagcgagacggccattgtggttctggtttgggcggtatccttgctcttgaacaacccgcatgtcttgaggaaagctcaggaggagctggacagcaaaattggaaaggagagagttgtggaagagttagacatcaaagatttggtttacctccaagccattgtcaaggagacatttcgtctatacccaccagtccctctcgttgcttacagagctgtggtggaagatttcgacattgcattttgcaaatgtcatgtacctgcagggacacaattgatggtgagtgcatggaagattcacagggatccaaatgtttggtcgaaccccgaacagttcgagccagagagattcttga

SEQ ID NO: 157882 - DNA, 421 bp, Arabidopsis thaliana columbia
cgcagcttaagctaaaacccctcagagagaacaatgatttaaatcgagagctttgatgatttcgtcaaagtacatggaatacttttggcggcttcaggtttgccgccgaagctttacccacgcctcttcgagaaacttgcttacgatacttttgatggcggcgattacttccaaatcgaatcctgcgaggatgatcagcgacggaagcttctcctcactgccgaatctatgcctaaagattctgacgtcttccttgtcgatcacgcctggacttttcgtcttcccgatgcctataagcagcttaaggaaattcctggattggctgagaggatggcttctttgatgagtgttgatattgatgtggatgctggagaagaagaagtggcaaaagaactttctgttgatcagataattgacaatg

SEQ ID NO: 157883 - DNA, 451 bp, Arabidopsis thaliana columbia
ccagcgcgtccggagataccgtgagtgtgtagtctagtgtcttttcgcttttttgtgctttctatcgcgtgacttccagcgaaccggcagtgtaattcgacgtttatctaccgagatgctcatactctcttcagatgttgtgatatctcgtcaaaatctgcaagccgaaatcgagatgttctcagatctgcgttttcgcttgcacgacgattcagtatctgatacgtgtcggtgttcacattttctcaaatccaaatggagaaaccggagagcgagaagaaatcggcggtgtctgatgtcggtgcatgggctatgaatgtaatcagctccgatggaatcatcattgctaataaacagctcatgtcttcctctggtttcggttttggctttgctacaacgttaacgggatttcactttgcattcactgctcttgttggtatggtgtcaaacg

SEQ ID NO: 157884 - DNA, 405 bp, Arabidopsis thaliana columbia
tgaaacttgagcttcaattacaaagaatggctgcttcttgtgctgtcaccgcaaactacgtcctcagagccacctccattcgcactggatgctttggagccgcatatgagcaaacaaactctggagtttcactggggaaaacatcacagagcttacgtggacaacctcaagaaacaggttcttggaaccgagcttgaaggcaagcccttagagcacattatccacagcacttacaacaatggtgatctcctccctgctttcaacaacgctgctcaggcgtggaaccacgagttcttctgggagtcaatgaaaccaggtggtggaggaaaaccatcaagagagcttcttgctttgcttgaaagagatttcactttttatgagaagttctatgaagagttcaatgct

SEQ ID NO: 157885 - DNA, 342 bp, Arabidopsis thaliana columbia
ctcaagtggttcggagctgtttctaagaaaacttcgttagttcggatcggagctacgcttgcaaaggtcaaaacatggcgaggggtgtgaagaagcatctgaagaggcttaatgcgcctaagcattggatgcttgacaaacttggtggtgcatttgccccaaagccgtcttctggaccacataagtcaagggagtgccttcccctcgtccttatcatcaggaacaggttgaagtatgctcttacctaccgtgaagtgatttcaatcttgatgcaaaggcatatccaagttgattgtaaaggcaggtctgacaagacctaccctgctggttatatgggatgtt

SEQ ID NO: 157886 - DNA, 386 bp, Arabidopsis thaliana columbia
ctagccgccttattcgtcttcttcgttctctagttttttcctcagtctctgttcttagatcccttgtagtttccaaatcttccgataaaaatgtcgggtaaaggagaaggaccagctatcggtatcgatcttggtaccacttactcttgcgtcggagtatggcaacacgaccgtgttgagatcattgctaatgatcaaggaaacagaaccacgccatcttacgttgctttcaccgactccgagaggttgatcggtgacgcagctaagaatcaggtcgccatgaaccccgttaacaccgttttcgacgctaagaggttgatcggtcgtcgtttctctgacagctctgttcagagtgacatgaaattgtggccattcaagattcaagc

SEQ ID NO: 157887 - DNA, 347 bp, Arabidopsis thaliana columbia
ccaaactctcctgattcatcagttttaagtctttttcaagtcccagggatcatcaatccaatggctcagatcttagcagcttctccaacatgtcagatgagagtgcctaaacactcatcagtcattgcatcatcatccaagttatggagctctgttgtgttgaaacagaagaagcagagcaacaacaaagtcagaggctttagagttcttgctctccaatctgataacagtactgtcaatagagttgatactcttctcaatttagacaccaaaccttactctgacaggatcattgctgaatacatttggatcggaggatctggaattgaccttagaagcaagtcaag

SEQ ID NO: 157888 - DNA, 426 bp, Arabidopsis thaliana columbia
ttcgtcgtgacctttttgtagtattaagcaatgtttattaagacgttatcaagatcggttgatgaatacactcgagaaagaagtcaggatcttcagagggtctttcacaacttcgacccaagtcttcgacctatggagaaggccgtggaataccagagagctcttacagctgccaaattagaaaagatatttgcaaggccgtttgttggagcaatggatggtcatcgtgatggagtctcatgtatggcgaagaacccaaattacctcaaaggaatcttctctgcttctatggatggagatattcgcctttgggatatctcttcaaggcgtacagtttgccaattccctggtcatcaaggtgctgtgcgtggtcttactgcatcaaccgatggaaatgtattggtttcatgcggaactgaatgcact

SEQ ID NO: 157889 - DNA, 400 bp, Arabidopsis thaliana columbia
caaaagtgcaaggatgttggtgctacgctggttatttttcaatggggattcgatgatgaggcaaaccatctattgatgcacaggaatttgcctgctgtcagatgggtagggggtgttgaattagaacttatcgcaatagccacaggcggtagaattgttccaagattccaggagttgaccccagagaagttagggaaggctggcgtggttcgtgagaaatcttttggcacaacaaatgaacgaatgctgtatattgagcactgtgcgaactcaaaagctgtcactgttttcatccgtggaggtaacaaaatgatgatagaagagacgaaaccttgtatccacgatgctctgtgtgtggctagggaatttcattcgtaacatatcaattgtttattgatgt

SEQ ID NO: 157890 - DNA, 305 bp, Arabidopsis thaliana columbia
gctaaaactaaatacaaagaaacagagatggtttttggttacagaggaggtgagagctaaggcggagatgtacaccggagatgagatatgtagagagaagacaaagtgtttcctcaaggaaatatctatgcccaatggtttattaccattgaaggatatagaagaggttgggtatgacagagagtcaggtgttgcatggctgaagcagaagaagagcattactcacaagttcacagagatagataagcttgtcttctatggaaccgaagtcacagtcatttgtgagaccggtaaaatcaagaagc

SEQ ID NO: 157891 - DNA, 436 bp, Arabidopsis thaliana columbia
atggagtcttaggattcgacaacttcaactatttctatgacccatcactcaaagagcaagacaagagctcttggagaaacaacaagtgttcatcgtcgaaggtgatctcaacgatggaccactcttacgtaaactcttcgacgttgtccctttcactcacatccttcacttagccgctcaagccggagtacgttacgctatgaaaaaccctcaatcttacatcgccttcaacatcgccggattcgttaaccttcttgaagtggctaaagcagctaatccacaacctgcgattgtttgggcttcctctagctctgttacggtctcaacactgagaattcattctttgaagaacaaccgaacagaccaacctagcgagtcttttactcaacaaccaagaaaagcttgttgaggagatcgcacattcttacaaccccat

SEQ ID NO: 157892 - DNA, 423 bp, Arabidopsis thaliana columbia
ctgttctgtttcactttctctctctctgtatactctctaaatgatggcaaaaaactgtaatttagtcagtgttctatgtgtatttttggtattgaccctctttaacaaacccatcaccgtcgccgggcagaatattccggcggtgggcttgttcacctttggtgactccaacttcgacgccggaaacaaacagactctcaccaaaaccttactccctcaaactttctggccgtatggaaaatcccgagatgatcccaacggcaaattctccgacggcctcatcgctccagacttcctcgctaaattcatgaggattccgatcgtgatcccgccggcccttcaaccgaacgtcaatgtctcacgtggagctagtttcgccgtcgctgatgcttctctactcggagctccggtggaatctttgac

SEQ ID NO: 157893 - DNA, 419 bp, Arabidopsis thaliana columbia
gcagagacacaattaactccggtgcaagtcaccgacgacgaagctgccctcttcgccatgcaactagccagtgcttccgttcttccgatggctttaaaatccgccttagagcttgaccttcttgagattatggccaagaatggttctcccatgtctcctaccgagatcgcttctaaacttccgaccaaaaatcctgaagctccggtcatgctcgaccgtatcctccgtcttcttacgtcttactccgtcttaacctgctccaaccgtaaactttccggtgatggcgttgaacggatttacgggcttggtccggtttgcaagtatttgaccaagaacgaagatggtgtttccattgctgctctttgtcttatgaaccaagacaaggttctcatggaaagctggtaccaattgaaggatgc

SEQ ID NO: 157894 - DNA, 433 bp, Arabidopsis thaliana columbia
cttttgctctaattatcttccactctctcacggtcttctctagtgttctgtcccactcagatcgagtcacccgtttacccggtcaaccccgggtcggatttcagcaatactccggttatgtcactgtcgacgacaagaaacagagagctctgttttactacttcgccgaggcagaaaccaatccatcctctaaacctctcgtcctctggctcaatggaggacctggatgttcatctttgggcgttggggcattctcagaaaacggaccatttagaccaaaaggaccaatcttggtcaagaatcagcatagctggaaccaagaggctaatatgttgtatctagagacacctgttggagttggattctcttattcaactcaaagctcccattatgagggtgttaatgataagatcactgtaagagacatccttgt

SEQ ID NO: 157895 - DNA, 418 bp, Arabidopsis thaliana columbia
aagcaaggctatgcttcgaacgagatggctaataagttttggagaacgctcaaaagccatcaagccggcggtacggcctctcgcacctgcggagcgttggaccctgttcaggtgaccatgatggctaaacatttggacaccatctatgtctctggttggcagtgctcgtccactcacacatccactaatgagcctggtcctgatcttgctgattatccgtacgacaccgttcctaacaaggttgaacacctcttcttcgctcagcagtaccatgacagaaagcagagggaggcaagaatgagcatgagcagagaagagaggacaaaaactccgttcgtggactacctaaagcccatcatcgccgacggagacaccggctttggcggcaccaccgtcaccgtcaaactctgcaagcttt

SEQ ID NO: 157896 - DNA, 418 bp, Arabidopsis thaliana columbia
  unsure (1)..(418): unsure at all n locations
caaaacttctctgaaaggtggataaatggtgtcgtcgtctctgagactcccttcactcacttcgcttctatttcccgccaccactcggtatccagccactctccggcgaaccgtatgtctacggaacagacctctttccggattcgcgacggcgccgagtggtactgcttcgccggagactaagtcgtcggaggttgaccggcttaggtcagaccgagccgttacgcctcgctcacaggactttaatgcttggtatcttgatgttatagctagtgctgaactcgcggattatggtccggntcgtggtactatggtcattcgtccttatggttacgcgatctgggaagcgattcatgattatttgaatgtgaagttcaaggagactgggcatagcaacatgtacttcccacagtttata

SEQ ID NO: 157897 - DNA, 433 bp, Arabidopsis thaliana columbia
aaaaaaaaaaacacaaaaagtttcaatggccgcctccacaatggctctctcctcccctgccttcgccggaaaggctgtgaacctttcccccgcggcatctgaagtcctcggaagcggccgtgtgacaatgaggaagactgttgccaagccaaagggtccatcaggcagcccatggtacggatccgaccgagtcaagtacttgggtccattctctggcgagtcaccgagctaccttaccggagagttccccggagactacggatgggacaccgctggactttcagctgatcccgagacattcgcaaggaaccgtgagctagaagttatccacagcaggtgggctatgctcggagccctaggctgcgtcttccctgagctttggctaggaacggagtcaagttcggagaggcggtttggttcaaggccggttcac

SEQ ID NO: 157898 - DNA, 375 bp, Arabidopsis thaliana columbia
atatcaaaccaacgccatgaccactacaccaaccggttcagaccatccagcttaccatcagatccaccagcaacaacaacaacagctcactcaacagcttcaatctttctgggagactcaattcaaagagattgagaaaaccactgatttcaagaaccatagccttccattggcaagaatcaagaaaatcatgaaagctgatgaagatgtgcgtatgatctcggccgaggcgcctgttgtgttcgccagggcctgcgagatgtttattctggagcttacgttaaggtcttggaaccatactgaggagaacaagagaaggacgtttcaaaagaatgatatcgcggctgcggtgactagaactgatatttttgattt

SEQ ID NO: 157899 - DNA, 317 bp, Arabidopsis thaliana columbia
tttgactcgcaaaatctcaacgaagctcgaaaatggattcacgaaccaaggggaagacggtgatggaagttggtggcgatggcgttgccgtcataacactcatcaatcctcccgtcaattctctatccttcgacgtgctatacaatctcaaaagtaattacgaggaggccttgagcaggaatgatgttaaagctattgttattactggtgcaaaggggaggttctctggtggctttgatatatctggttttggtgaaaagcataaggggaatgtcaaagagccaaaggctggttactatttggattgacatcataac

SEQ ID NO: 157900 - DNA, 428 bp, Arabidopsis thaliana columbia
gaaagatgttggatatcaatctatttcgtgaagagaaaggtaacaatccggagattatgcgagaatcgcaacgccggagatttgccagcgttgaaatcgtcgatgagatcattaagctggacaaggaatggcgtcagcgtcaatttgaagttgatagcttcagaaaggagttcaacaagctcaataagcaagtggcgcagctcaaaattaaaaaagaagatgcgagtgagattattcaacaaactgagaaaaacaaacaagattctactgcaaaggaggctgaagttcgtgaagcttatgctgctttgaaagccaatgtggagcaagttggtaatttggtccatgattctgttccagttgataaggacgaggctaataaattttgtgattaaaactgtggggtgaaaagcggttttctacccctggtc

SEQ ID NO: 157901 - DNA, 370 bp, Arabidopsis thaliana columbia
gtccttatcatcaggaacaggttgaagtatgtttttacatacagagaagtgatttcgatctggatgcaaaggcatattcaggttgatgggaaagtgaggactgacaagacttaccctgctggtttcatggatgttgtgtctatccccaaaacaaatgagaacttccgtcttttgtatgacaccaagggacgtttccgtctccactccatcaaggatgaggaggctaagttcaagctttgcaaagtgagatcgatccaatttggtcagaagggtatttcctacttgaacacatatgatggtcgcgcgatgcgttatcctgacccgctcattaagcctaacgacaccattaagctcgacctttaggagaaca

SEQ ID NO: 157902 - DNA, 314 bp, Arabidopsis thaliana columbia
caaaacccaattagccggagatggccgtatcatccgccgctgctgcagctgcttcttccatcatgggtactcgggtggctcccggtatccatcccggttcaggtcggttcacagccgtgttcggtttcggaaagaagaaggcagcttccaaaaagagtgccaaaaagacggtgactacggaccggcctctctggtacccaggcgccatttcttctgactggcttgatggttccttggttggagattatcggtttgatcccttcggtttatgcataccggccgtgtatctttaatttcgtgtggggttactagac

SEQ ID NO: 157903 - DNA, 281 bp, Arabidopsis thaliana columbia
ttttctgactcttcaatctctcccaaagcctaaagcgatctctgcaaatctctcgcgactctctctttcaagatgcaaatcttcgtgaaaacactcactggcaagactatcactctcgaggttgagagctctgacaccatcgacaatgttaaggcaaagattcaggacaaggaaggcattcctccggatcagcaaagattaatattcgccggtaaacagctagaagatggccgtaccttggccgattacaacattcagaaagaattaacccttcatttggt

SEQ ID NO: 157904 - DNA, 334 bp, Arabidopsis thaliana columbia
ccatcttcttcgtcttcgccttcgttagtggttttgtgacgacgatgagatgaagctcaagcacttggaattcattcaagtcgcggcggtttacttcgccgcctgtttctcgaccctctacgagttggctaaagacaacgctggtccactcaaactcggcgtcgagaacattgaagattgcgttcgaaccgtgcttgctccattatacgaaaaattccacgacgttcctttcaagcttctccttttcgtcgatcgttaggtggacgatgtgttcttcgatgttgagacatattgttccgtcattggtgtagcaagctttttgccaagtgcttac

SEQ ID NO: 157905 - DNA, 423 bp, Arabidopsis thaliana columbia
atcgacgacgacgacaacaaaatcacatatcttctctatcgatctccaatcatcatcttctggctaactacaggtgtattgatgttctttgcagagatgtctccagcaacaaagtcaaagtctaaggataaaaaaactggtaaagaagctcaaaaggcatcaccaaagccttcactttcggttaatgggaatagcagcttggcagctagtggttataatcctcttttaggaacatttcaagctcttgattcagtgtcgatagcttctatctcaccattacagtatagtcgtttccggagtatagatgaggcagatgtaaatgggattgagtctgattcagtttcgaataatggtagcttgtctggtgagtcaaaagatcacaaggagaaaacaacttatcttgcccttaagcaggaggtgata

SEQ ID NO: 157906 - DNA, 432 bp, Arabidopsis thaliana columbia
  unsure (1)..(432): unsure at all n locations
agaaaacttcgtctctcttctctgcttcgccctctcatttcctgtgagagaaaggcggagtctctctccagttattttgctcatccatcgattcttagagttcaaaatggttgatcaagttcagcaccccactattgcgcagaaagctgccgggcagttcatgcgttcaagtgtttccaaggacgttcaagtgggttaccagaggccttctatgtatcaaagacatgcaacctacggaaactactccaatgctgcatttcaatttcctccgacatcccggatgttggcaacaactgcttctcccgtgtttgtccaaaccccaggagagaaggggttcactaactttgcccttgactntctgatgggtggtgtttctgctgccgtctccaagactgctgctgctcctattgaacgtgttaagcttttgatcca

SEQ ID NO: 157907 - DNA, 426 bp, Arabidopsis thaliana columbia
gctctctctaaagctgtagttgtgcgttaaccttctaaggagcttgtaaaaatgctaatactgtttgagacgccaggtggttttgccatcttcaaagtattaaacgaaggaaagctctctaatgttgaggatttgggtaatgagttctcgaccgcaaagttagcccgaaagatggtgaagctagtagcttttgacaagtttgacaacacagctgaagctcttgaagcagtggctaaattgcttgagggaactccaagcaagggtctacgcaagtttttgaaagctaactgtgttggtgaaacattagctgttgctgattctaagcttggaaatattatcaaggagaaactgtaaatagtctgtgttcacaacaatgctgttatggagctgttaagaggtatcagaagccagctaacttaacttata

SEQ ID NO: 157908 - DNA, 354 bp, Arabidopsis thaliana columbia
cacgcccgtccgaagttgtagtcactaaaaaaacgaaaataacacgaaaaagttattattggtccgcgctcaacaatggcatctctacgctcccctcgctttctgccggaaagggctgagaactctttcccctgcggcatcatgaagtcacttggaaagcggcccgtgtgacacatgaggaagactgttgccaagccaaagggtctcatcaggcagccgcatggtaccggatccgaccgagtcaagttacttgggtcccattctcttggcgagtcactccagctaccttagccggagagtttccctgtgagactaccggattgggacaacacgctggttctataccgcttgacc

SEQ ID NO: 157909 - DNA, 420 bp, Arabidopsis thaliana columbia
gatttatgaagaatctcgtttcaaaccttttatttttctcctcttattcttcttcgagagttccgcgatgtagtaacagacctaaaccaattctcaatcctctctacaatttacttccccagtctcaaaaccctagtaaaatcgtggatgttatctgttcaacactcaaccacagtgattattccgtcttgttacctaaccttcgcgacgaggtgaaatcgctgattcctcatttgggttatcctgaaatctcgagggttttgcttaggtttcagtctgatgcttctctagctattacgggcgtttaaatgggtttaatttgatttggggaagaggcctaatgttggtaactactgtttgttgcttcacaatcttgggtcttctaagaagtttcctttagctatgcaatttctctgtgaa

SEQ ID NO: 157910 - DNA, 431 bp, Arabidopsis thaliana columbia
gcagcttcttcacacgctcaagctcaccgatcgattcttccaatgctcttctaattcgtaagtaattttccagatccaacctttctcagattcgctctttcccgagaaaatttgaagaaacagagattcatcattttctcttcctctcaaaaatcagatctgcaaaactctcagatcactcatgggtttgatttcaaaccctacccgtttgattctcgtcgccaccatcttcttcctcgtttcttcaatctccggtcaggattctgtcgttgagaacaatgagagacaagaatctgaaggatctggtaaagagcttggtcgtcgtggaatggttggtactgaacgaattggagttgatactgttgtagacaatattggtgctcttggtttgaatctagaccttgatgctactgctcctagtgtatttgatg

SEQ ID NO: 157911 - DNA, 336 bp, Arabidopsis thaliana columbia
cttcctttgagaccattgttgagatgatttacttgtacgcaatccccaacccaaagagtgagtgcagcaaaggtctgcaactcggagtgagttttgccggaggttacgttgccggagtgttctgtgccatcgtttctcatccagcagacaatctagtgtcattctctcaacaacgctaagggagcaaccgttggagatgcggtgaagaagattggtatggtgggactgttcacaagagggcttcctcttagaattgtgttgatcggcacgttttctgttgcacatagtgtattattctatgccttttaaagtgtttttttatctttcaaccactgt

SEQ ID NO: 157912 - DNA, 418 bp, Arabidopsis thaliana columbia
cacagtaaccatgtccgtctctctgttcactgtcttcaccgttctctcactctgtttacacacttcaacatctgagtttcagctgtccaccatatcagctgcaccttcgttcttgcctgaagctccatcgagtttctcagcttctaccccggccatgtctccagatacctctcccctgttccctactccaggttcaagcgaaatgtctccttccccgtcggaatcgtctatcatgccgacaatcccctcaagccttagtccaccaaacccagatgctgtcactcctgatcctctgctcgaagtttctccagttggatctcctcttccagcttcttcctctgtttggttggtctcatcacaactctcatctttgcttcttgtcctactcatgttgctactagctttctgcagtttcttc

SEQ ID NO: 157913 - DNA, 334 bp, Arabidopsis thaliana columbia
cttaacttgttgaaattagcccctggtggtctccttggtaggtttgtgatttggactaagggggcttttgagaagcttgaatctatctatggctcgtttgagaaaccatcagagaagaagaagggttacgtcttgcctcgtgcgaagatggtgaatgctgatcttgctaggattattaactccgatgaggtacagagtgtggtgaacccgattaaggatggttccaagagagcggttctgaagaagaatccattgaagaaccttaatgtgatgttcaagttgaatccttatgctaagaccgcagagagaatgtctctgatggctgaagcttcaa

SEQ ID NO: 157914 - DNA, 425 bp, Arabidopsis thaliana columbia
aattaaagaggtttcttcttatagaaatgaatttctcttattcttccttgtcaacttggacggccctaatgacattgggttgggttctgcttcattcatccatttccagtgctcagctaaccccaactttctatgacaatacatgtccaagcgtctttaccatcgtacgggataccatagtaaacgagctaagatcggatcctcgtatcgctgcaagcatccttcgtcttcacttccacgactgtttcgtcaatggctgtgatgcatcgatcctgttagacaacacaacatcctttcgaacagagaaagatgcggctccaaacgcaaactcggctcgaggatttccagtgatcgatagaatgaaagcagcagtagagacagcatgtccaaagacttgttcatgcgcagatatacttaccatcgca

SEQ ID NO: 157915 - DNA, 419 bp, Arabidopsis thaliana columbia
agatggcttccatggatcacaatcattttctttttcctctcctcttcatcatcatcatctcttccttgcacgttttgcgtgcttcgaccacaccttcacactcacacaaactaaaatccgccactaccattagaaaaatcaaccgtagaggaccttacattggccttgtgacggtctttgagaccgaagaagatgcttttctcggcagtgttgatttcagactcgatcctacgcatcctttcctcgatctctctggaagacgttttcgtatagggaagattcatggaaagaaggttgtgtatgtcagatgtgggataggaatggtgaacgcagcagcagcaacacaacaaatgatagatgtgttcagtgtgaaagggattgtgcattttgggattgctggaaatataaacaactcgatg

SEQ ID NO: 157916 - DNA, 431 bp, Arabidopsis thaliana columbia
  unsure (1)..(431): unsure at all n locations
aaagattttaagagagaaagggggagatgtgttagagatggagcataagagaggacatgtattagcagtgccgtacccaacgcaaggacacatcacaccattccgccaattctgcaaacgacttcacttcaaaggtctcaaaaccactctcgctctcaccactttcgtcttcaactccatcaatcctgacctatccggtccaatctccatagccaccatctccgatggctatgaccatgggggtttcgagacagctgactccatcgacgactacctcaaagactttaaaacttccggctcgaaaaccattgcagacatcatccaaaaacaccagactagtgataaccccatcacttgtatcgnctatgatgctttcctgccttgggcactttgacgtgctagagagtttggtttagttgcgactcctttct

SEQ ID NO: 157917 - DNA, 423 bp, Arabidopsis thaliana columbia
cagggtttcaatattgtcggctacgggtgcactacatgcatcgggaattctggggaaattaatgaatcagtgggagctgctattaccgaaaatgacattgtggcggctgctgtgctatccggtaacaggaactttgaggggcgtgttcatccactaacaagagccaattaccttgcatctcctccgttggtggttgcctatgctcttgctggcacggttaacattgactttgaaacggagcctattggcaaaggaaagaatggcaaggacgtcttcttaagagatatctggccaaccacggaagaaattgctgaggttgttcaatccagtgttttgcctgacatgttccgagcaacgtacgagtcaatcaccaaaggttaccccatgtggaaatagctgtctgtttctgagaataccctctac

SEQ ID NO: 157918 - DNA, 369 bp, Arabidopsis thaliana columbia
cccatctgtgcccttcaagctttgatgtgttgttcttcaggttcttacccttgaggatggggtgtcagaagctgatatctgtgtcaccaccaccggtaacaaagacatcatcatggtcgaccacatgaggaagatgaagaacaacgctattgtgtgcaacattggtcactttgacaatgagattgacatgcttggacttgagacttaccctggtgtgaagcgtatcaccatcaagccacagactgacaggtgggtgttcccagagaccaaggctggaatcattgtcttggctgaaggtcggttgatgaacttgggttgttccactggtcacccaagtttctggaagtcttgctctttcaccaaccaggt

SEQ ID NO: 157919 - DNA, 293 bp, Arabidopsis thaliana columbia
ggcgtccgcaaacttgtgtgttggtttcttggttcttttttgtacacttgaattgtgtctcctttacctgttgttttgttgttttcaataaaaacttttattaccatttcaataaaaagatcatcaaattaacaaaaaaaaaaaaaaaaaaaaaaaaaaaaaaaaaaaaaaaaaaaaaaaaaaaaaaaaaaaaaaaaaaaaaaaaaaaaaaaaaaataaaaataaaaaaaaaaaaaataaaaaaaaataaaaaaaaatataaaaaaaaatgtgttttttataaaatggggggg

SEQ ID NO: 157920 - DNA, 405 bp, Arabidopsis thaliana columbia
aaagttgcttgcttggggtgctgatcgtcttctacgagacgcttctgggagaataccggatggggttgctatgaagcataagcgtggagcatgtggagccttacttaatccgtcctctgcagagccacttgtttggccatcaccattaaagttcatcagtgagcttaatgacgaggcgaaacttctcttagagcaggctttaatggaggctaacagggagagagagaaaaccatcctcaaaggaacagcttattccttaccatcaccctctttctctgacacggatgataacatgtccgaggtgagtgatactgaactgtgctgcatttgctttgagcaagtttgtacaattgaagttaaagactgtggtcaccaaatgtgtgcacattgcacactttcacctgt

SEQ ID NO: 157921 - DNA, 302 bp, Arabidopsis thaliana columbia
  unsure (1)..(302): unsure at all n locations
gaagatccagaaattgaagattgtcagattngtttcaaatcagatactaacataatgatttagtgtgattattgtttaggtgggtgttcatttaaaatgctttaaaccatcatttaaggaagtttccttattgtgatcgtatctctcatttctgttatggataaaattttttttctttctcaaccttttattttctctttctttcctctagtctcactctctttctcttttttccattttcctttcttcctttatatatcctttcttctctaatatatttatttttcttttcttatttttcc

SEQ ID NO: 157922 - DNA, 410 bp, Arabidopsis thaliana columbia
gtttctaaaccacacggtgcaagccgatgcgaatgccatgactttgacagttgagagtggcgtgacgcttaggcaattaatcgctgaagcagctaaagttggattggcgttgccttatgcaccgtattggtggggagtaaccgtgggtggtatgatggggaccggtgctcacggtagctcattgtggggtaaaggaagtgcggtccatgattacgtgaccgagatcaggatggttagtcctggttcggtcaacgacgggttttgcaaagattagagttttaagcgagactactactcctaacgagtgtaacgcaggtaaggtttcttttggcgttcttggcgttatctcttaggtgacttttgaatcacaacccatgtttataatatcgtttacgtatgttatgagaaat

SEQ ID NO: 157923 - DNA, 431 bp, Arabidopsis thaliana columbia
ggcgagccacgcggccgctcaactgctgcagacagtgtttccgtagcatctccatggaaatcggattcattaagtaccggtggtgatcgatgttgttcacacaggagcattatgtcttttgagttttaaactttgcgttgaacttgtaatcgatttatcgacattgatctaattggatcatgttttcgttctgttgaatctacatgatactttgttctactattgcttataagattatcagatatatttgcttaattgattagaagaaattcctattgaatgtaactgtaaattgttaaaacttacctggaagtggtggatgaatgatatgttttttacttttcaatttcataaattttttttttatttatctcttttttattttttttttttattttttacttttttatatatatttttattcatttttg

SEQ ID NO: 157924 - DNA, 298 bp, Arabidopsis thaliana columbia
gaccacgcgtccggcgattccatcaccacaacgccggacgacaatttgttttgatctgatcgccggaagtaagagggaggagaccaataggacaggtccaaagtctaataatgtctacctcatgcttactgtcaagctttaccgccttctggtaaggagaactaattttaagttcaatggccttatattgaagaggctgtccatgagcaaacacaacaaagcttgtgaaactctatctaggcccgaagagaatatgactggcaaagaagataattttgccagttggcttaaaactata

SEQ ID NO: 157925 - DNA, 372 bp, Arabidopsis thaliana columbia
gagccacgcgtccgcgtctcctgaagcttacgcacaagatgaagattttttgaaaatctggaaggagatgagtgctgttggtgaaagaatgtgttggagaagtgccgttaaaagaaaccaaactgtggtttggcagaaaccgttgagtaatgactgttacttggagagagagcccgggacacagcctcctctctgtcgctcagatgctgatcctgatgcggttgcgggtgtttcaatggaagcttgcatcactccttactccaagcatgaccataaaaccaagggaagtgggttagctccttggccagctaggttgggtgtttttctccccgacttgcggattttggttattcaaccgacatgttttgagaa

SEQ ID NO: 157926 - DNA, 319 bp, Arabidopsis thaliana columbia
attttcttcagtaatcgaaggatataactctgtatatttgtgtaagcattcttctttgagatgttccgaggtcacaagtcagtgcacaaaggaagttccttttttgggttttggggtctgctttgtgtcagtgattttaggattgcttcatttgccacacatttccaatctcttaagtagttggcggcgaagatgggtttcctgatagggggcttttgctttgtcccttctgttcctctacactctcgattcctttcatctccttcttcttcttcttcttctactccttcttcatctagttggggcttttgtgttcgag

SEQ ID NO: 157927 - DNA, 370 bp, Arabidopsis thaliana columbia
ggaaggcgtcaccgtcgtgtctttcttcctttttttcatcgccaccgccatggccggcaagggcaccgtctccttccgtgacggcatgttaccaaacggagacttcgagctaggaccaaaaccatcagacatgaaaggaacagaaatactaaacaaactagcaataccaaactgggaagtcacaggattcgtcgaatacattaaatcaggacataaacaaggagacatgcttctcgttgttcccgccggtaaattcgctgtaagacttgggaacgaagcatctatcaaacaaagacttaaagtgggtaaaggaatgtattactcactcacctttagtgctgctagaacttgtgcacaagacgagagactt

SEQ ID NO: 157928 - DNA, 375 bp, Arabidopsis thaliana columbia
gaaaaactcaaatgcaaagccatcagaatcgtttcaggctgagcttgattctacggtcgagagtcatcccttccttctcttcagccactctccctcttcgtcgtcctcgctgctgttcctcttccgatctacttttccggtctactctccggcagaaacaacaagccgctttcagttatgagactcaactccaacttagcttcttcaatggtggaatcgaatatttcttgtaccactttcaatatcttggctccgatttataaacgcgttgatcaaaagaatcatagcactcgagagagcgatttccgcacgctttggttagctcgtaaccagaggattttagatttgttactccatcaacgctcttcagttatt

SEQ ID NO: 157929 - DNA, 387 bp, Arabidopsis thaliana columbia
ctctctctttgcctcctttcgaattcaaatttcatatctagctcaaccatggcgttgatcggcgagaagacctcaagtaggccgtgaatacaaggtcaaagacatgtctcaagccggttgcggtcgtctagaactacagctcgccgaagttgagaggcctgcactaatggcttgtactaccgaatacggaccttctcagtcattcaaaggcgctagaatcaccggatctcttcacatgaccatgcaaaccgccgtactcatcgaaaccctaactgctctcggcgctgaagtcagatggtgttcctgcaacatcttttccactcaagaccactccgccgcagccatcgctcgtgactccgccgctgttttcgcctggaaaggtgagac

SEQ ID NO: 157930 - DNA, 404 bp, Arabidopsis thaliana columbia
gtcaggagggtgttcatctcagatgaatttgtttagcttctgcctaagtatttgagtttcttgaagggtcttgttgactctgacacattgcctctaaatgtatcaagagaaatgcttcaacaacacagcagcttaaagacaattaagaagaagcttatccgaaaggcgcttgatatgatccgcaagcttgctgaagaagatcctgatgaaatccatgatgatgagaaaaaagatgtggagaagtctggtgagaacgatgagaagaagggtcaatacacaaaattctggaacgagtttggcaagtctgtcaaactaggtatcattgaggatgctgctaacaggaaccgcttggcaaaacttcttcgttttgagacaacaaaagccgatggaaaaattgacttccc

SEQ ID NO: 157931 - DNA, 409 bp, Arabidopsis thaliana columbia
  unsure (1)..(409): unsure at all n locations
agaagccgtcggcacaagaagaagaagaagaataatgtctcacaggaagtttgagcacccaagacatggttctcttggtttccttccaaggaagagagctaaccgtcacagaggaaaggtgaaggcgttccctaaggatgaccaaaccaagccttgcaagttcacagctttcatgggttacaaagctggtatgactcacattgtcagagaagtggagaaacctggatccaagcttcacaagaaggagacatgtgaggctgttaccatcattgagacacctgctatggtggttgttggagttgttgcctatgtgaagactcctagaggtttgaggtctttgaacactgtctgggcacagcatttgagtgaggaggtcaagagaaggttctacaagaactgngctaagtct

SEQ ID NO: 157932 - DNA, 206 bp, Arabidopsis thaliana columbia
gttaagatctgcgatttcggttcagggatttgtttaggtgagggagagaccaccgaaggagtcgtcggaacgccgtattacgtggcgccggaggttttaatgggatattcttacggagagaaggtcgatctatggagcgccggcgtcgttttgacacgatgctcgctggaactccaccgttttacggcgagacagctgtagagatt

SEQ ID NO: 157933 - DNA, 416 bp, Arabidopsis thaliana columbia
gaaagagagaaagagagacagagataatggcgtacagtgcgtgtttcctacaccagagcgcattggcttcatcagccgcacgatcatcatcttcctcctcatcccagcgtcacgtgtcgctctccaaacctgttcagatcatctgtaaagctcaacagtctcatgaagacgataactccgccgtctcccgccgtcttgctctcactctcctcgtcggcgccgctgctgttggttccaaagtatctcctgctgatgccgcctacggtgaagctgcaaacgtgtttgggaagccaaagacgaacacagacttcttgccatacaatggagatgggttcaaagtgcaggttccagcaaaatggaacccaagcaaagagattgagtatccaggacaagtccttaggttcgaagacaacttc

SEQ ID NO: 157934 - DNA, 407 bp, Arabidopsis thaliana columbia
gtgagatcactaccgctgcgaaagttgactatgagattattgttagatccacttgcagggagattgggtttatctctgctgatgttggtcttgacgctgacaaatgcaatgttttggttaacattgagcaacagagccctgacattgctcagggtgttcatggtcatttgaccaagaagcctgaagatattggtgctggtgatcagggacatatgtttgggtatgctactgatgagactcctgagctcatgccgttgactcatgtcctagccaccaagcttggtgctaagcttactgaagtgaggaagaacaagacttgcccatggttgaggcctgatggtaagacacaagtcacagtggagtacaagaacgatggtggagctatgattccgattagaggccacact

SEQ ID NO: 157935 - DNA, 399 bp, Arabidopsis thaliana columbia
gtctcctccacgcaattacctcttctcactcttagacattttgtcaaacagatggtgctcgtttctgaatcagcttaagaactaacaaggagacagacactaagcttggtttttctctccgattagacggaggaaaaagtgaaaacgaggggcttagacgagtgatgtgatagagatggaaggagttgagctagaattagaaagaagaagcaagttcttgaacagtttgatacagaagaagaaggctaaagaacagcaagatcagaaagatgagttcaatgttcgtgttagggcttcagatatgcctttgcctcaacagaacagagcctttagtttgtcgcgtgagattttgaatgctactccagggaaggctgataacaaaagactcgctcatgccct

SEQ ID NO: 157936 - DNA, 263 bp, Arabidopsis thaliana columbia
gggttggcttaccgacctcctttaccatttataactttggaacacaaaaagttgtcaagagctggcagctattcctttgtgtttgtgttggtctttgcgctggactcattattggtttcgtcactgagtactacactagtaacgcctacagccctgtgcaagatgttgcatattcatgcagaactggtgcagttaccaatgttatctacgtccttgctcttggttacaaatccgccattatttcaatctttgctattgctatc

SEQ ID NO: 157937 - DNA, 404 bp, Arabidopsis thaliana columbia
gagcttttctccctccgcaatgaaaccacgcatcttccgtgtctacatctataccatgctcattgtatcgtaccttggctgagtgcccgtaactcctgcccactctgccgttatgagctcccgacagatgataaagattacgaggagggaaagcggaatgtgctggatgtgagcgaggatagctcctcctctgatgatggtacagaatcgggggaagaggaatatgtagagagaggtgagagcgagtctggtgtgagcagagtcagcagaggaagatggctgtttctggctgctgcaccagttgtgagtctggtgggcgttgggttggcaatgtggctaagcagcccacacaggaggggtatagcaatctctcatagccaaagggtgaaacagaccagaagatg

SEQ ID NO: 157938 - DNA, 412 bp, Arabidopsis thaliana columbia
gtttcacggcggagattcaagttctttgacctaggatgctttcactatcaccggagactatttcaatggcaaccatggctaggtcgtttctgcaggcgatatcgaaggatgaggcggtggctcctccgcttagagttgttcagatcgaaggactggctgtactaaagataatcaaacactgcaaggagttttcaccgacccttgtcactggacagcttcttggacttgatgttggtagcgtcctcgaagttaccaattgttttcctttcccggtcagggatgatgatgaagaaattgaagctgatggtgctaattatcagcttgagatgatgagatgtctgagggaggttaatgttgacaacaacactgttggctggtatcaatctaacagtcttggttcgtatcagactgt

SEQ ID NO: 157939 - DNA, 391 bp, Arabidopsis thaliana columbia
gcagcctctctccaatccaccgctacattcctccagtcggcgaagatcgccaccgctccttctcgcggaagttctcacctccgatcgactcaagccgtcggcaaatcttttgggctcgaaacttcctcggctcgcctcacttgctccttccagtctgactttaaggacttcaccggtaaatgctccgacgctgtcaaaatcgccggattcgctcttgccacctctgctctcgtcgtctcgggagcaagtgcggagggagctccaaagagattgacctatgatgagattcagagcaagacatacatggaagtgaaaggaactggaacggctaaccagtgccctactattgacgggggctctgagactttctcgttcaaaccccggaagtatg

SEQ ID NO: 157940 - DNA, 429 bp, Arabidopsis thaliana columbia
gaagaacgcatcgacttcgtcgttgaaggacttgggtccgagtggtctagatctaaccagcgcctttttcaaaccgatccacaactccgatccttctctcccttcaaaccgacgtaccaaagtctccgtcgtcggagtcggaaacgtcggaatggccatagctcaaaccatcctcactcaagatctcgcagacgagatcgctctcgttgacgccaaacccgataagcttcgtggcgaaatgcttgatctccaacacgccgctgctttcctccctcgaactaagatcaccgcttctgttgattacgaagtcaccgctggatctgatctttgtatcgtcactgctggtgctagacagaatccaggcgagtctagactcaatttgcttcagaggaacgtcgttctctttcgtcatatcattccttcactcgc

SEQ ID NO: 157941 - DNA, 438 bp, Arabidopsis thaliana columbia
cgtccgcgcttgttcacgcacaacaaaaagcaagaatatttattactttgtgaacttcagagatcctatggggatggcgaacctaccgagtcttttggattactggccaagtatgttcgggatgagggctagagttgcgttgcgagagaaaggtgttgagtttgaatacagagaggaagatttctcgaacaagagccctttactcctccagagtaatcccattcacaagaaaatcccggttctggtccacaacggtaaaccggtatgtgaatctcttaacgttgtccagtacgtcgacgaggcttggcccgagaagaacccgttcttcccttccgatccttacgggagagctcaagctcgattctgggctgatttcgtggacaagaagttcaccgacgcccaattcaaggtatgggggaagaaaggtgaggaacaaga

SEQ ID NO: 157942 - DNA, 434 bp, Arabidopsis thaliana columbia
  unsure (1)..(434): unsure at all n locations
gacccacgcgnccgagacgagagaggatcgtttcttcacgtattggttgttgtatagatcttaatcgataaccatctaggccttgatctaaccattcaatataaactttatttccttcttcttttcgatctcaattgttccgaccaaacaagatgaagagatcacgtggaagctccgattctttatccggtttcttaccaattcgccattctacaacagacaaacaaataagcccaagaccaacaactaccggctttctctattccggcgccggagactactcccagatgtttgacgcattataagacgacggaagtctagaggacctcggcggcgttggacacgcgtcttctacggcggcggagaaaaaacggcggttgagtgtagagcaagtgtaagcgttagagaagatttcgggattgatacaagcttga

SEQ ID NO: 157943 - DNA, 432 bp, Arabidopsis thaliana columbia
ggatcaggaaggattgccaccaatcatgacatctctcgaggtgcaggatcaccccacaaggctagtgcttgaggtgtctcatcacttgggtcagaatgtcgtcaggaccattgctatggatggtactgagggtctcgttcgtggaaggaaagtcctcaacactggcgctccaatcactgtacctgtcggaagggctactcttggacgtatcatgaatgttcttggagaacctattgacgaaagaggcgaaattaagaccgaacattacttacctattcacagagatgcaccggctttggttgatctagctactgggcaagagatcctggccactggtattaaggttgttgatcttcttgctccttaccaaagaggaaggaaagattggtctcttttggcgggggctggtggtgggaaaaactgtgcttatta

SEQ ID NO: 157944 - DNA, 409 bp, Arabidopsis thaliana columbia
ttttcgtagccgcaagactcctttcagattcttacttgcagctatgggtaaagagaagtttcacattaacattgtggtcattggtcatgttgattctggaaaatcgaccacaactggtcacttgatctataagcttggtggtattgacaagcgtgtcatcgagaggttcgagaaggaggctgctgagatgaacaagaggtccttcaagtacgcatgggtgttggacaaacttaaggccgagcgtgagcgtggtattaccatcgatattgctctatggaagttcgagaccaccaagtactactgcacagtcattgatgccccaggacatcgtgatttcatcaagaacatgattactggtaccttccaggctgattgtgcttgtcttatcattgactccaccactggaggt

SEQ ID NO: 157945 - DNA, 320 bp, Arabidopsis thaliana columbia
cgacactgcaaatggcggatgaatctcttaagtctatctacgacttcaccgtcaaggatgtcggaggtaacgatgtgagtttggaccaatacaaaggcaaaactcttttggttgtaaacgttgcttccaaatgtggtctgacggatgcgaactacaaggaactgaatgttctgtacgagaaatacaaggagcaagggttggagatattagcattcccgtgtaatcagttcttaggacaagaaccaggaaacaatgaagagattcaacaaactgtctgcaccaggttcaaagcttaattccccatctttgacaaggttgat

SEQ ID NO: 157946 - DNA, 321 bp, Arabidopsis thaliana columbia
ctaaaatctctctctgccaatctcatcttcaatctctctctaactctcgttttcgattctacggtggctgacaagaagattaggatcggaatcaacggattcggaagaattggtcgtttggttgctagagttgttctccagagggacgatgttgagctcgtcgctgtcaacgacccctatatcactactgagtacatgacctacatgttcaagtacgacagtgttcacggtcaatggaaacacaatgaactcaagatcaaggatgagaagacccttctcttccgtgagaagccagtcactgattttggcattaaggaaccc

SEQ ID NO: 157947 - DNA, 390 bp, Arabidopsis thaliana columbia
ctttcaacaattcaatggcagacccaagagttgcagttgttactggttccaacaaagggattgggtttgagatttgcaggcaactagctaacaatgggataactgtggttttaactgcgagagatgaaaacaagggtcttgctgctgtccaaaagctcaagactgagaatggtttttctgatcaagccatctactttcaccctcttgatgtctccaacccagacaccatcgcttctcttgctgcttttgtcaagacccgcttcggcaaactcgatattctggttaataatgccggagttggaggggcgaatgttaatgttgatgttctcaaagctcagattgctgaggctggtgcgccaactgatattttcaagataatgagtgattcat

SEQ ID NO: 157948 - DNA, 419 bp, Arabidopsis thaliana columbia
ctcatacgagggtagatcctgcccaaggagaagctggtacggaacaatcttctggggatcaagggagtgaagccaagaaggatgcgaagcaaagtcttgagaatcaagatggatcgaaggttcttccatttgagtttgttgctctggaagcctgtcttgaagctgcatcaagcagtttggaacatgaggccttaagattggagttagaggctcatccagccctggacaagcttacttccaagatcagtacccttaatttggagcgggttcgacagattaaaagcaggctggttgcaataactggacgtgttcagaaggtgagggatgagctagaacatttgcttgacgatgatgaagatatggctgagatgtatcttacagagaagttagcttagaaacttgatgattcgtcaaatttc

SEQ ID NO: 157949 - DNA, 418 bp, Arabidopsis thaliana columbia
agaaatgctccgcaatgtatctcaggacatgagcgagaattttctcttttgccccggggtcaacaatgatcgagaaccatcagttttctggtctctgctctctcctgatgaaaacggcctccacgcgccagttgaatcatctcctttatctttgtctttcagtccaatgcagcaacacacagttggacctccacagtcgagtggcttcacaatgacatcatcaatgcaaccgaatatgttggaccgcccgtggatggccgtgtctgcgccgtttcaacaaagtcattacctctgatctaataaacccataccctagtaaaaaaagtaaataacacagaggtttgtcagaaagatttgagtttaaagaacaagatagcaaaacaaaacagaggaaaggtggtagaatttttattttttt

SEQ ID NO: 157950 - DNA, 436 bp, Arabidopsis thaliana columbia
atttcaccaggagcaagagaaagatgagcgagacgagaccagtgccgaggagagagagtccatggggtttaccggaaggtcaccgtgagcccaaagctcaccgctgcaacgatcgtgttgaagacgttatccaggcgttattcgagggaaacccattcaagacagttccaggacctttcaaactcttctaccgatgtatgcgctctaagccaggagaggagccaacagagccattcaaatacctcgacctggaacctccaaagagagaagttaaacttgaagaagcaaagcttgagtaaagtgatattcactcccttttttattcctgcatactttttagctgagcgtgtaagcgccatcactgtgattttaagtttaccttcaatatgtggtaacaacatttttattttcttttaataaaattgatactcggagt

SEQ ID NO: 157951 - DNA, 341 bp, Arabidopsis thaliana columbia
gttcttctcagctgtgccttcttgtacgatatcttctgggtgtttgtctccaagaagttgttccacgaaagcgtaatgattgtcgtagctcgaggtgataagagtggagaagatggcatcccgatgctactgaagattccgcggatgttcgatccgtggggaggctacagcattattggatttggtgatattcttttgcccggtttgctaatcgcatttgctctcagatatgactggctagctaacaagactcttagaaccggctattttatatgggcaatggctgcctatggattaggggctttaattacttacgtggctttgaacctaatggaaggaca

SEQ ID NO: 157952 - DNA, 413 bp, Arabidopsis thaliana columbia
cagatctctccctccctctttctccgatctcagatccattcaacaatctacaaagaagatggaaccagtctcttcatggggtaacacctctctcgtctccgtagatccagagatccacgacctaatcgagaaggagaaacgtcggcaatgtcgaggaatcgaacttatcgcttccgagaatttcacttccttcgccgtcatcgaagctctcggaagtgccttaaccaacaaatactccgaaggtattcctggttatcgatattacggaggtaacgaatttcatcgatgagatcgagaatttttgccgttcaagagctctcgaagcttttcattgtgatccagcagcggggggcgttattgttcagcctgtttctggttcttcggcaaattttgtattttaatctttttttttt

SEQ ID NO: 157953 - DNA, 364 bp, Arabidopsis thaliana columbia
caatcctgatgtctggattcctgcatacaagtcttctcgctggtcttcggtgttcttcgtgctctacgtgctaattggcgtctactttgtcacaaacttgattcttgccgttgtttatgacagtttcaaagaacagctcgcaaagcaagtatctggaatggatcaaatgaagagaagaatgttggagaaagcctttggtcttatagactcagacaaaaacggggagattgataagaaccaatgcattaagctctttgaacagttgactaattacaggacgttgccgaagatatcaaaagaagaattcggattgatatttgatgagcttgacgatactcgtgactttaagataaacaaggatgag

SEQ ID NO: 157954 - DNA, 344 bp, Arabidopsis thaliana columbia
aaaaaagagagaagaaagtccactaaagaaaagagaatagatatagatcaatggcgtttgaagctcttaccggaatcaatggtgatctaatcaccagatcatggtcagcctcgaagcaagcttacctaaccgagcgctatcacaaggaagaagcaggagcagtcgtaatcttcgctttccaaccatctttctcagagaaagatttcttcgatccggacaataaatcttcctttggagaaatcaagttgaaccgtgttcagtttccttgtatgaggaaaatcggtaaaggtgatgtagctactgttaacgaagctttcctcaagaatcttgaagctattattgat

SEQ ID NO: 157955 - DNA, 381 bp, Arabidopsis thaliana columbia
actctcttgtcaaaagagaaaaatagttcttgtaatggatgattcaagctttatggatttgatgatcgacactgacgagtatctgatcgatgactgggaatccgatttcccgatatgcggggaaactaacaccaaccccggttccgagtctggatctggaaccgggtttgagttgctagcagaaagaccaacgaagcaaatgaaaaccaacaacaacatgaattcaacatcttcttctccgtcgtcttcttcttcttctggttctcgcacgtcacaagtgatctcatttgggtctccagacacgaaaaccaacccggtcgagacatctttgaacttctccaaccaagtaagcatggatcagaaagtggggtcgaaaagaaa

SEQ ID NO: 157956 - DNA, 419 bp, Arabidopsis thaliana columbia
ctcgttttgataaaaatctctgaatctctccaagctctcttctcatcaaaccatggatccttacaagtatcgtccagctagttcttacaactctcccttcttcaccaccaactctggtgctcctgtatggaacaacaactcctccatgaccgttggacccagaggtcctatccttcttgaggattaccatctcgttgagaagcttgccaatttcgacagggaacggattccagagcgtgtggttcatgccagaggagccagtgctaaaggtttctttgaggtcactcatgatatctctaacctcacttgtgctgactttctccgagctcccggtgttcagactcctgtcattgtccggttctccaccgttatccatgagcgtggaagtcccgagaccttgagagaccctcgtggttttg

SEQ ID NO: 157957 - DNA, 421 bp, Arabidopsis thaliana columbia
gcgaaagaaggccgatcagagccagcaatggctattatcaaaccgacaagcatcgctgcttcatagcacgaagaagaaaggaccgactcggataagcataaccaacatcgtcatttacactttggctgtgcttttgcttgtctttgttctcttctctgcttacagacgttggactcacaggttcctcactttctctttatcaaattgtgattttttcttttattccaaaggttaacatctgttagttttttggttgtgaatatttcttcagatctgagatcccaacgcacaatggtagatcagttcttgaggatgcaaccttccctggaatgaagaatgttgatcttccccggtttggtgtgagttttaatctcacatatgtttttttttcaggttggggtttccttttctttggttccta

SEQ ID NO: 157958 - DNA, 302 bp, Arabidopsis thaliana columbia
ctcgttttgataaaaatctctgaatctctccaagctctcttctcatcaaaccatggatccttacaagtatcgtccagctagttcttacaactctcccttcttcaccaccaactctggtgctcctgtatggaacaacaactcctccatgaccgttggacccagaggtcctatccttcttgaggattaccatctcgttgagaagcttgccaatttcgacagggaacggattccagagcgtgtggttcatgccagaggagccagtgctaaaggtttctttgaggtcactcatgatatctctaacc

SEQ ID NO: 157959 - DNA, 424 bp, Arabidopsis thaliana columbia
tgactggttatcgtgatcctcctgctggaatttcgatcagagaggggctacactacaatccttatttccctggtggagcaatcgctatgccaaaaatgctcaacgatgaagctgtggaatatgaagatggaactcctgcaacagaagcacagatgggtaaagatgttgtatccttcttgtcctgggcagctgaaccagagatggaagagaggaaattgatggggttcaaatggatattcttactgtctttggctctgcttcaagctgcgtattacaggagactgaaatggtcagtactcaaatcccgtaagcttgttctcgacgttgttaactaatcccgtgaagatcaacctttctctgggtaataatcattaatcttgaaagggataaatggtgaatcccactttttgtctcaaaagacatg

SEQ ID NO: 157960 - DNA, 426 bp, Arabidopsis thaliana columbia
gtttgatcatcttgtgagaaaaataatggctgcttcagtgatgctatcttcggtgacattgaaaccagctggtttcacggtggagaagacggcggctagaggattaccgtcgctcacaagagctcgtccctccttcaaaattgtcgccagtggcgtcaagaagatcaagaccgacaagcccttcggaattaacggcagcatggacttgagggacggcgtcgacgcctccggcagaaagggcaagggatacggtgtttacaagtacgtcgacaagtatggagctaacgtcgatggatacagtcctatttacaacgagaacgagtggtcagcgagtggtgacgtgtacaagggaggagtcaccggattggcaatttgggcggtaactctcgccggaattcttgccggaggtgctcttcttgtgtacaa

SEQ ID NO: 157961 - DNA, 412 bp, Arabidopsis thaliana columbia
tcttgttcgttggaatctccgtccctttttgttgatcgtcggtggtgaatcttagacatggcggctgcgaagctcgtcgctttgttacttcttgccttgcttttcaccaccagcgtcttcgccgatgctgatgagccggaggtttctgaggctgccggatccgatggctcttccaagatccacctggatcagcttaatgccaagatccgtgccctagaatctcaaatcgatgagaaaacccgggaagttcagggcaaagacgaggtagtagcagagaaggagaaactactcaaagaaagggaagacaagattgcttccttgcagactgaagtctcatcactacagaaaaagggatcatcagattctgcaaaacagttgggaaaggctcaagcacgagctgatgaattagaga

SEQ ID NO: 157962 - DNA, 285 bp, Arabidopsis thaliana columbia
  unsure (1)..(285): unsure at all n locations
cagatgcagaagaaggccgatcagagccggcgccggttcttcgatttttgacgccgncgcttcttcttcttcctcgcagcaggtaagtcacacaggtaactgaaagatggggcgtgttagaaccaagactgtgaagaaatcttctcgtcaagtcatcgagaagtactactctcgcatgactcttgactttcacactaacaagaaaatccttgaagaggttgccatcatcccttcaaagagactccgcaacaagattggtggattctccacccacttggtggaacg

SEQ ID NO: 157963 - DNA, 319 bp, Arabidopsis thaliana columbia
cccactcgttcggacaaacacctctgtgtttcactcccgccctttttcgaattcttctgttagggtttctttttctttctgagatggcggagtcgcaggccaagagtcccggaggctgtggaagccatgagagtggtggagatcaaagtcccaggtcgttacatgttcgtgagcaagataggtttcttccgattgctaacataagccgtatcatgaaaagaggtcttcctgctaatgggaaaatcgctaaagatgctaaggagattgtgcaggaatgtgtctctgaattcatcaatttcgtcaccagcgaagcgagtga

SEQ ID NO: 157964 - DNA, 415 bp, Arabidopsis thaliana columbia
aatatggctagaggggtggaggatgattatcatcatgatgaagctcgtgctgaagaatctttcattactgcgcatccgtcacttgacgagtcagccatacatgttctttgtggtttgggggacggtgatcacgaggaacctgtttacgattcgagtcctccctcaggcagtagattcccatcattttcttccgaatcgtctgattacaaaccagatctacctgaaaagaatggggaagaaatagaagaaaatgaagagaaagaacgtgaagtttattctgaaagtataggtcctgaggaaattcattctacttctaatgagactgaaacaaggacaagcgaagtaggagagaatagcatgcatgttacaggagaggcaagccttgttatgagggagcattcgacaccactggaag

SEQ ID NO: 157965 - DNA, 417 bp, Arabidopsis thaliana columbia
  unsure (1)..(417): unsure at all n locations
cgatgcggngaagaaaaacttgttgcgtgagttcgatgttgataatgccttaatcaacacgctaacagtccaaatgagactaggaatgtttgatggcgatatagcggctcaaccgtacggacaccttggaccggcacacgtgtgtacaccggttcacaaaggactagctctcgaagcagctcaacaaggaatcgtcctactcaaaaatcacggctcgtctctacctctctcaagccaacgtcaccgaactgtcgccgtaattggacctaattcagacgctacggtcacaatgattggtaattatgcaggggttgcttgtggatataccagtccggttcaaggtattaccggttatgctcgaaccattcatcaaaagggttgcgtggacgtacactgcatggatgatagattgttcga

SEQ ID NO: 157966 - DNA, 334 bp, Arabidopsis thaliana columbia
aacttctacaagactcaaatagtttctatttatttactaaaaagaaaaatgggtcgtggttacaatttgctattcgttctagtaacgtttttagtattggttgcagctgtaaccgcacaagggaaccgtggctcaaacagcggtggtggtcgaagaccacatgttgggttttatgggaatagatgccgaaacgtagagtctattgtgagatctgtagttcagtctcatgtccggtctatcccggctaatgcacctggaattttgcgaatgcatttccacgattgctttgtccatggctgcgatggctcggttctcctcgcttgtaacacctcag

SEQ ID NO: 157967 - DNA, 369 bp, Arabidopsis thaliana columbia
tgagagtgttggtgaaggagtaactgaagttcaagctggagatcatgttatcccttgttatcaagctgagtgtcgtgaatgcaagttttgcaaatctgggaagactaacctttgtggcaaggtgagatctgctactggtgttgggattatgatgaatgaccgtaagtcgaggttctcggttaatgggaaacccatttatcacttcatgggtacttccacgtttagtcagtatactgttgttcatgatgttagcgtcgccaaaattgatcctactgctcctttggataaagtttgccttcttggatgtggtgtttccactggccttggagcagtttggaatactgcataagtagaaaccaggtcaaaatg

SEQ ID NO: 157968 - DNA, 426 bp, Arabidopsis thaliana columbia
ctgaggaggataaaaaccctagggtgagtgagacagagagaagcgaaaatggtgcagcgccttgtttaccgatcacgacacagttacgccaccaaatccaaccagcacaggatcgtcaaaactccaggaggtaaattgacgtaccagaccactaagaagagagctagtggacctaaatgtcccgttaccggcaagcgtattcagggtattcctcacttgaggccaactgagtacaagaggtcacgtttatcaagaaacaggaggaccgtgaaccgtgcttatggtggggttttgtctggttctgctgttagggaaagaatcattcgtgcctttcttgtggaggagcaaaaagattgtgaagagggttttgaagcttcagaaggcaaaggaaaaggttgcttccaagtgatctagaccctattagtt

SEQ ID NO: 157969 - DNA, 419 bp, Arabidopsis thaliana columbia
caaaaagcttttaacctcagccgttaaatctttctccgatcatgccgaccagaaacatcgccattggtggagtccaagaagaggtctatcaccccaacgcacttagggcggcgctcgctgagtttatctcgactttgatcttcgtcttcgccggctcaggctccggaattgctttcaacaagatcactgacaatggagcaaccactccttccggcctcgtcgccgctgccttagctcatgctttcggtctctttgtcgctgtctctgttggcgctaacatttccggtggccacgttaaccctgccgttaccttcggtgtcttactcggtggtaacatcactctcctccgtggtattctctactggattgctcagcttcttggctccgtcgccgcttgtttcctccttagctttgccacc

SEQ ID NO: 157970 - DNA, 431 bp, Arabidopsis thaliana columbia
  unsure (1)..(431): unsure at all n locations
cccacgcgnccgggagttttggtaagaaaaagacggagtcacagtcaccgttacccctgagtacaaggaactatcagaatggtgctgctaataccccaaaggttcgtcaatcaagaccttcaccagtagctatgaagaagacgccagttccagaagcgaacaaatctttacactctttatcgtctgatggaatctctattgacctcaacggtcagaatgattcttttaaccataagcaggagaagccatcgcgaactgttcctctatccccaaacagcatggctgatcgtgggaaacccttatcaccacgacctcaagggcatgaacacagtggcaagaatgacacagccagtgagattagtttgtttaatgttgtaagccctccaagatcatgcgccaatgatgatgatgatgatgatgatgaaaacaat

SEQ ID NO: 157971 - DNA, 387 bp, Arabidopsis thaliana columbia
ctctttaaaagaaattcgtaagtactatcaataagcagtttatggcccaaaaggtggaagcacaaggagggaaaggagccaacctatgggacgatggatcgacacatgacgccgtgaccaagattcagctcgcagcaggcatagacggaattcaatatgttcagtttgattatgtcaagaacggacaacccgaacaagctcctctttgtggtaccaaaggccgtgttctcccagctgatccgtttgtgattaaccatccagacgaacatctagtttctgtagaaggttggtatagccctgaaggtatcattcaaggaattaagttcattttcaacaagaagacttttgatgtcattggatccgatgatggtactcactttactctac

SEQ ID NO: 157972 - DNA, 310 bp, Arabidopsis thaliana columbia
gggagctgatattgaagtggaagacgagagagggttaacggcgttggaactagcgagggagattctgaagacgacgccgaaggggaatccgatgcagttcgggaggagaattgggttagagaaagtgatcaatgtcctggaaggacaagtgttcgagtacgccgaggtggatgagatcgtagagaaacgagggaaaggcaaagacgttgaatatctggtcagatggaaggacggtggaaattgcgagtgggtgaaaggtgtacacgtggcggaagatgtggctaaggactacgaggatgggctggagtac

SEQ ID NO: 157973 - DNA, 286 bp, Arabidopsis thaliana columbia
gttagactatcagaaattatcaagagattctttcataaatttggatcgatgggtttgggaaacatttattgaagaccaatggaagtcttctctataagtatacctatatacctcgaatataaaggggtgtccagaaaagggagaaggggtttaaaaagtctaaagttcctgttttatgggataaagctcatgatcgtaatgctaagcggtttttgaatttgattggggaattggaggggttatgggtgaaactggcgcagtattctatttactggtgctgatgttt

SEQ ID NO: 157974 - DNA, 381 bp, Arabidopsis thaliana columbia
gaaagttgctgtatctggaaagaagcgtaactaaaagctgtacaggaggcattcaggacgacctggtggtatgacagtagagacatttgatcaattgcagcagagaattcctgaaagaatcgttgagcatgctgttcgtggaatgcttccaaagggacggcttgggagagctctgttcaatcacctgaaggtgtacaaaggccctgaccatcctcacgaggcccagaaaccgcttgatctgcctatcagggacaagagaatacagctgcaaaaatagaagctccaccactgttccattatcgccaagcgcagagagttttttcttctcaggtttcttgtagttcttcattccaaaaccagaggaggctttacagattcttg

SEQ ID NO: 157975 - DNA, 423 bp, Arabidopsis thaliana columbia
caaaatcagatccaacaaatcttcttcttcttcttcttcttcgatcatcatggccagtatcaaggttcacggagttcccatgtccaccgccacaatgcgcgtcctcgctactctttacgagaaagatctccagttcgagctcatccccgtcgatatgagagccggtgcccacaagcaagaggcccaccttgccctcaaccccttcggtcaaattcctgctctcgaggacggtgatttgacgcttttcgagtcaagagccatcacacagtacctagcagaggaatacagtgagaaaggtgaaaagcttatctcccaagactgcaagaaagtcaaggcaaccactaacgtatggcttcaagttgaaggtcaacagtttgaccctaacgcctctaagcttgccttcgagcgtgtctttaaaggcat

SEQ ID NO: 157976 - DNA, 417 bp, Arabidopsis thaliana columbia
  unsure (1)..(417): unsure at all n locations
gcacatgaccttgctgattcacaagtcggtgcgtccatcgaccgtgcacttgactgtattttgggatggcatctagacacaactacatttggagattatccacagatcatgaaagacattgttggacatagattgcctaaatttacaactgagcagaaagcaaaactgaaagcttctaccgatttcngtgggctcaactactatacttcagtgttttcaaaccatttggagaaacctgatccttcaaaaccaagatggatgcaagattctcttattacatgggagtctaagaatgcgcaaaattacgccattgttagcaagcctttgaccgctgcattgaacgtttactcgagaggttttagaaatctgttgaagtacattaaggaccaatacgcaaatccggaaattttgatcatg

SEQ ID NO: 157977 - DNA, 387 bp, Arabidopsis thaliana columbia
gctaaaactaaatacaaagaaacagtatatgggtttggttacagaggaggtgagagctaaggcagagatgtacaccggagatgagatatgtagagagaagacaaagtgtttcctcaaggaaatatctatgcccaatggtttattaccattgaaggatatagaagaggttgggtatgacagagagtcaggtgttgtatggctgaagcagaagaagagcatcactcacaagttcacagagatagataagcttgtctcctatggaaccgaagtcacagccattgttgagaccgggaaaattaagaagctcactggagtcaaagccaatgtacttttttatttgggtcactatcaatgagatctataccgaggaaccccctaccaagatca

SEQ ID NO: 157978 - DNA, 379 bp, Arabidopsis thaliana columbia
aaaaatatcaaagtgtcattaatagaaagacttgaaagaaagaccaaccctgaaacatggctgaagaacaacaaaactcagatcagagcaatggtggaaacgttatttcaactcctgaagaagttgctacgttcctgcacaaaactgttgaagaaggtggatgggaaaaatgttgggaagaagagataacaccatgggaccaagggagagccacacctctcattgttcatctttgtgacacttcctcactcccacttggccgtgctctggtccccggctgtggtggaggacacgacgtcgttgcgatggcaagttctgaacgcttcgttgttggattgtataattccgaaagcgcactttttaatgctaatgatactta

SEQ ID NO: 157979 - DNA, 416 bp, Arabidopsis thaliana columbia
agcagaatctaaaaacacttatcgtttcgtctcttctctgatccattgttgaagatgtcgaagagaaaaactaaggagccaaaggttgagactgtgactcttggaccttctgttcgtgaaggagagcaagtttttggtgttgttcacatctttgcatctttcaatgacactttcattcatgtgactgatctctccggtagagaaactctcgtccgcatcaccggtggcatgaaggtgaaggctgaccgtgatgagtcctctccttatgctgctatgcttgcagctcaagatgttgctcaaagatgcaaggagcttggcatcactgccatgcacgtgaagctccgtgctactggaggaaacaaaaccaagactccaggttctggtgctcagtctgctcttagagcccttgctcgttc

SEQ ID NO: 157980 - DNA, 379 bp, Arabidopsis thaliana columbia
taaaacattgaggggttaaatgagatgaatagaggtccacgagctaagggtttcaacagccaagatggttccaaggtgatggctgtgtctttgaaggagcagagagtgactgagactgagaaactcagtgaagatgtgtctcttttagatcccaaggactacaataagatagatttccctgagacctacacagaagcaaagttttatgtaatcaaatcgtacagtgaagatgatattcataaaagtattaaatacagtgtttggtccagcactcctaatggtaacaagaagctggatgcctcatataacgaggcaaaacagaagtcagatgggctgcccgtgttttacttttttctgtaacacctagggacaattgttg

SEQ ID NO: 157981 - DNA, 421 bp, Arabidopsis thaliana columbia
ctccaacagttttcttcttctcttcttctttgggtgttccttccaccaacggcagaaatcgatttggcttaaatctccccctcctttcgatctctctgatcgccgccgggaacattcaatttcccgggagttcaacaaaaaaaactctccgtttttatttttccccctttttcaccggtggaagtttccggagatggtgtcacccgaaaacgctaattggatttgtgacttgatcgatgctgattacggaagtttcacaatccaaggtcctggtttctcttggcctgttcagcaacctattggtgtttcttctaactccagtgctggagttgatggctcggctggaaactcagaagctagcaaagaacctggatccaaaaagagggggagatgtgaatcatcctttgccactagctcgaaa

SEQ ID NO: 157982 - DNA, 419 bp, Arabidopsis thaliana columbia
attccctctgagagattctctctgcgtttctttgatcgagcgagcgaagcgagagatcatggaaggtggagctgctctctacaatcctcgaactgtcgaagaagttttcaaggatttcaaaggtcgtcgtactgccattgtcaaagctctcaccaccgatgttcaagagttttaccaacaatgtgaccctgagaaggagaatctttgcttgtatgggttaccgaatgaagaatgggaagtgaatttaccagctgaagaagtgcctcctgagttaccagagccagctcttggtattaactttgctagggatgggctctctgaaaaggaatggctttcgcttgttgctattcacagtgacgcttggttactgtctgtctcgttttactttggctcaaggttttctttccacaaggaagaaa

SEQ ID NO: 157983 - DNA, 425 bp, Arabidopsis thaliana columbia
cttcaacgccctgagagtcacgcacgagaattggattgatggtttttcacacgcaggagaggcgattcgttgtcttcttcttgtcccgttgacctgtttcgatctcagatggtgattatgcagcagctgattctaaattagggcatttaaatccgccttccaggtgaatttttgaaaagtaattaaagggtgttcttgaatggacttgaaaatggataatgttattgggggaaagtttaaacttggtcggaagatcggtggtggctcttttggagaactttttcttgccgtaagtttgcaaaccggagaggaagcagctgttaagctggagcctgcgaaaactaagcatccccaacttcattatgagtcgaagatatacatgcttctacaaggaggaagtggcatccccagccttaagtgggttg

SEQ ID NO: 157984 - DNA, 410 bp, Arabidopsis thaliana columbia
ttcctttgtctcagtgactctagtttatctctaatggctgaacgagtctatcccgccgattcaccaccacaaagcggacaattctccggcaacttcagctccggcgaattccccaaaaaaccagcaccaccaccatcaacatacgtaatccaagtcccaaaagatcaaatctaccgtataccaccgccggaaaacgcacaccgctttgaacaactctctcgtaaaaaaaccaaccgcagtaactgtagatgctgcttctgctcattcctcgccgcggttttcatcttaatcgtcctcgccggaatatccttcgcgggtctctacctaatctaccgtcccgaagctcctaaatactccatcgaaggattcttttgttccggtatcaatctgaaatcaacatcttcgatttc

SEQ ID NO: 157985 - DNA, 416 bp, Arabidopsis thaliana columbia
gagagaagaaaaactcagaagaaaagccaaagagtgaaacaaaaatggcgtcgacgactctctcaatcgcaacaacaacccgttcctcatcttatcctactctcgcttccatcaatcacttcccttcccgaaccaccaccatcgaattcccctctcgcttcggtggtggttcatcatccacattgacccaccgtgcaacccatctccgtccaatcgccgccgtcgaagctccggagaaaatcgagaagatcggatccgaaatctcatccctaaccctcgaagaagctcgtatcctcgtcgactatctccaagacaaattcggtgtctccccactctctttagcccccgcagcagcggcggttgctgctccagccgacggtggcgcggcggctgtagtggaggagcaaacagagttc

SEQ ID NO: 157986 - DNA, 289 bp, Arabidopsis thaliana columbia
gttctcaccttacttggcaaacacttatatgtttaaaggagagagagacggttatggcgatcaagaacattctcgcccttgtggttcttcttagcgtggttggagtttctgtcgccattccacagttgcttgacctctactactaccggtctaagtgtcccaaggcataggaaattgttcgtggtgtcacagtacaatatgtttttcgccagaaaacctttgccgcttaacttctaaggatgcatttccatgattgtttcgtcagaggatttgatggttccgttctttt

SEQ ID NO: 157987 - DNA, 391 bp, Arabidopsis thaliana columbia
gagcacattgttgctggtgcaggagaactccatcttgagatttgtcttaaggatcttcaggatgatttcatgggtggtgctgaaattatcaagtcagaccctgtggtctccttccgtgagacagtttgtgatagatctactcgcacagttatgagtaagtctcctaacaagcataaccgtctgtacatggaagcaagacccatggaggaaggtctagctgaggctattgatgatggacgtattggcccaagggatgaccctaagatcagatccaagatcttggctgaagagtttggatgggacaaggatcttgcaaagaagatctgggcttttggacctgaaaccacagggcctaacatggttgtcgatatgtgtaagggagttcagtacc

SEQ ID NO: 157988 - DNA, 422 bp, Arabidopsis thaliana columbia
ctgaaaaatgaacgcagcgcttgcaacaaccttcgccacaactcccgtactccgccgtgagacgcctcttcttcattattgttctctcacaacaaaatcgccggtttaccaaatcaacagagttagattcggatcttgcgtgcaaacagtcagcaagaaattcttgaaaatctcggcgagctctcagagcgcttcagcggcggtcaatgtcacggcggatgcttcgattccgaaagagatgaaggcgtgggtgtatagtgactacggcggagttgatgttctgaagctggagagtaacattgttgtgccggagattaaagaagatcaggttttgattaaagttgttgcggcggctcttaatcccgtcgatgctaagagacggcaagggaaatttaaagccactgattcgcctctcccgactg

SEQ ID NO: 157989 - DNA, 420 bp, Arabidopsis thaliana columbia
catcatcatcatttctctctatctctttctaaaacacaaccatgactgtttcttcatctccatgggctctcatggctctctttctaatggtttcttcaacaatggtaatggctattcctccacgcaaggccattgatgtaccatttggtcgtaactacgtcccaacttgggcttttgaccaccagaaacagttcaatggcggttccgaacttcagcttatcctcgacaaatacactggcacaggatttcaatcaaaggggtcatatttgtttggacattttagtatgcacataaagcttccagctggtgacacagccggagttgtcacagctttctatctatcatctaccaacaatgagcatgacgagatagactttgagttccttggaaacagaacaggacaaccagctatattacaga

SEQ ID NO: 157990 - DNA, 437 bp, Arabidopsis thaliana columbia
cgggatcgccgcaccggcccacgcacgcgtgctcacaacccttcggcaccggttaacaatggctcaagaatttagcggctcgtcgtcagcttctgttaacctgcacgctcaagcaacatcatttgcacgattatctgagacagtcaatggaaaaactcacagtctaaacagtgattcacctgttcttccagtatcagctgagatggcaaagttgcttcctcaacgcaaagagagtgcaagaggatctgatttaatgttagaggcggttcttgaagcggaagtagcacacaaggcgaaaagctttttcgcacaagccgagaaagaaactccagctttgaaagggaagtttttcagtgacaggaaaggagaaaattgaactcaaaagttttggggaccatcatcgatcacaagacaccggcaaggtacaaaagagtagg

SEQ ID NO: 157991 - DNA, 399 bp, Arabidopsis thaliana columbia
aagatctggtcgtcgctcacaggagaaacgtaatggaaatcaaagagaccaagcaagaaccagcagcagcagctgagcaaaagaccgttccgttgatcgaagatgagatcgagaggagcaaagtcgggatcatgagaaactatgtgttgcagaggtgactcacatactaaggatgaggataggctgatgatccagaggtaaatgtgagcgcgggaccgtggacattgcaaaggctctaacgatgtttctaaattacctgacttggaagagaagcatgctcccaaaggggcacataccagaagcagagattgcaaatgatctatcgcataacaagatgtgtatgcaaggtcatgacaagatgggtcgacctatcgttgttgccattgtgaacagacataa

SEQ ID NO: 157992 - DNA, 380 bp, Arabidopsis thaliana columbia
gatttatcaacacaagcaaaaaagatggcccaaaagctataagcaaagggtggtgagatgggagatgtatgggatgatggtgtttacgaaaatgtttgaaaggtatatgtagggcaagcacaatacggtatatccttcgtcaagtttgagtatgtcaatggttctcaagtgtttgttgtttatgaacatggaaagaagacagatctaggagtttgtagagtttgagattgttgctgatgactacatcttatacgttgaatgttaccgtgagaaatttatctatatgacttcagaaatgatcacgtttctttctattaagacttttaattgctaaatctttcatcctatcaaaataagacttgtgtttttttttttctaca

SEQ ID NO: 157993 - DNA, 427 bp, Arabidopsis thaliana columbia
agaaatttgcagaagagagaaaaacaaaaattgtcggttctttgctcgtcttcgacggtgatactctcttcttcttccgtgaaatcctccggaagtgagagaaagtctccgtttttagggttctctttaacggctatctcgaagccgtcggtacgagtcggcatttatgcgaattcgaaaagaggattgcaagtgaagtgtgaagctgagccgacgacgacgacttctcttgttccggcgaatcaacgatggatgttcgacgaagaagaagctaatggccctgacatctggaacacgacatggtatccaaaagcttcagaccatgtgaacacggacaagccctggtttgtggttgatgcaactgacaaaattcttggtagattggcatcgacaattgctaatcacatccgtgggaagaatcttgcct

SEQ ID NO: 157994 - DNA, 341 bp, Arabidopsis thaliana columbia
  unsure (1)..(341): unsure at all n locations
gcctcacagacatgcgggagtgtttattgcttagggtaaagaagatgctcttgtcactaagaatttggttcctggtgaagctgtttacaatgagaagagaatctctgttcagaatgaagatggaactaaggttgaatacagagtttggaatccgtttagatctaagttagctgctgcaattcttggtggtgtcgacaacatttggatcaaacctggtgccaaagttctttacttgggtgctgcttctgggaccactgtctctcatgtttctgacctcnntttccctgagggatgtgtttatgctggtgagttttctcataaaagtggtagagatttggtgg

SEQ ID NO: 157995 - DNA, 412 bp, Arabidopsis thaliana columbia
tcgagatgaagtagcagggacaacatgatgaagaacaaacagaccaagcaagacccaacaacaaaagatgtccagacgaccatacctctgataccatatgatgtgcgagaggagcaggcaaccacatcacacacgctgtcatctaccgacaagacggcagtgtctgggctcagagctcagctttccctcagttgaagcctgcagagatagcacgaatcaacaaagactgtgaagaagccggacatcttgcaccagcctggctatagattgatgctgagaagtacatacatgcccaaggcgaggatggagcactgattctagggtaacaagaacctggtggagtgacttatcaggagactactcaagctctaggctttggtatctatgatgaaccgatgaccggagggcaatg

SEQ ID NO: 157996 - DNA, 344 bp, Arabidopsis thaliana columbia
aaaatggcgaatacccaactcaaatccgatgcaatcatggacatgatgaaggaacatctttccaccgacgccgggaaagaggtcacagagaagatcggtcttgtttatcagatcaacattgctccaaagaaattagggtttgaagaggttacttacatcgttgatctgaagaaaggcgaagtcaccaaagggaaatatgaaggagggaaagtggatgctacgttctccttcaaggatgatgattttgtcaaagttgccactggaaagatgaatcctcagatggctttcattaggggtgcgatgaagatcaagggtagtctcagtgctgcgcagaaattcacccc

SEQ ID NO: 157997 - DNA, 383 bp, Arabidopsis thaliana columbia
ggacgaccgacgcggccgaccattgctacttctgcttctacttctctccaagcacgttctaatcaactggtgattggggctaaacgagttaaaagctttagctatggaagcagaaacaatctttcttttaatcttcgccagcttcctacccgcttgactgtttactgcgctgcaaaacctgagacagtggacacggtgtgtgcagctgtcagaaagcaactctcactcaaagaggctgacgaaattaccgctgccaccaaatttgctgcactaggtgctgattcccttgatacagtggagatagttatggtattagaggaagagatagggataaggattgcgtcaaacatagcacaaattatacccacagctgagcaagcagc

SEQ ID NO: 157998 - DNA, 420 bp, Arabidopsis thaliana columbia
attgctttgtcaggggttgtgatgcttcccttttgatcgacccaagacctggaaggccatgagagaaaagcactggaccaaatgcaagcgtgagaggctacgagatcattgatgaggctaagagacagctcgaggctgcatgtccccgaactgtctcatgcgcagacattgtaactcttgccacaagagactcggtcgcattagctggtggtccaaggttctcagtaccaacaggaagacgtgatggattaaggtcaaaccccaatgatgtgaacttacccggaccaacaattccggttagcgcatctatccaattgtttgcagctcaaggtatgaataccaacgatatggttacacttattggtggtggccacagcgtcggtgttgcacattgcagtctcttccaggacaggcttttcg

SEQ ID NO: 157999 - DNA, 421 bp, Arabidopsis thaliana columbia
cttctccaatcaatctcagagaaaaaaagaaatggcaacaaaccctaaagtctacttcgacatgaccgtcggtggcaaatccgccggtcgtatcgtgatggagctttacgccgacacaacaccagaaaccgccgagaatttcagagcactctgtaccggagagagaggaatcggtaaacaaggtaagccattacactacaaaggatcaagctttcaccgagtgattccgaaattcatgtgtcaaggaggtgatttcacagccgggaatggtaccggaggtgaatctatctatggatcgaagttcaaagacgagaactttatcaagaaacatacaggaccaggtattttgtctatggctaacgctggtgcgaacacgaatggatctcagttttttatttgtactgagaagacttcgtggctc

SEQ ID NO: 158000 - DNA, 414 bp, Arabidopsis thaliana columbia
cagcaaaggctttggttaccgagctcaagaaattgtctaaggaggttgaagacagtgaacttgcagatgttgcagctgatagtgcggttaacaacgactaaattggaaatatgattgctgaagcaatgagcaaagtggtcaagaaaggtgtggtgacccttgaggaggataaaagagcagggaacagcctttaactacaaaagagaatgcttttagaccgtgattatataattcattacttagggacgtacttcgagagactggactggtacctcaagtaaatctatctatggatcgatgacaagagactaaaactttatcaagaaacatacaggaccaggtattatgtctatggctaacgctggtgcgaacacgaatggatctcagttttttatttgtactgagaagactttg

SEQ ID NO: 158001 - DNA, 369 bp, Arabidopsis thaliana columbia
aacaggatgtgccatttgtagcaacagaggaatcatcggcagaggttacagatcgtggattgttcgatttcttgggaaagaagaaagacgaaacaaaaccagaggagactccgatcgcttcagagtttgagcagaaggttcatatttcagagccggagccagaggttaaacacgaaagtcttcttgaaaagcttcaccgaagcgacagttcttctagctcctcaagtgaggaagaaggttcagatggtgagaagaggaagaagaagaaggagaagaagaagccaactactgaagttgaggtaaaggaggaagagaagaaagggtttatggagaagttgaaagagaagcttcctggacacaagaaacctt

SEQ ID NO: 158002 - DNA, 434 bp, Arabidopsis thaliana columbia
gaccacgcgtccggcgaaactcgtcgattttcaaaaccggagctcagagactgatctcggaaagtaaatcgcagccatggcggaaaaagctgtcactatcaggaccagaaacttcatgaccaacaggcttctcgccagaaagcaattcgttattgatgttcttcatcctggaagagccaatgtttcaaaggctgagcttaaggagaaattggcgaggatgtatgaggttaaggacccaaatgctatcttctgtttcaagttcagaactcactttggaggtggtaaatcttctggatatggtttgatctatgatactgtcgagaacgctaagaagtttgagcctaagtacagacttatcaggaatggacttgacaccaagattgagaaatcaaggaaacagatcaaggagaggaagaacagggcgaagaagatcc

SEQ ID NO: 158003 - DNA, 412 bp, Arabidopsis thaliana columbia
gaaattatacactccactagtagtggactagttaattttatcagcatctatctactcgagagaagaaaatggcagatgaagtagtagtgatctctaagagcattgttcgaccagagagctacaacgaggaatcggatcgggttaagatccatctcactccatgggatctcttctttcttcgatccgaatacccacaaagaggtcttctctttcctcaacccgacccggaaacccatataatctctcagttgaaatcatctctctctgtcgctttgaagatcttctacccattcgctggtcgtcttgtcaaggtctataactaatattcttgaacggcgtcgtattacgtcgattgtgatggctcaggtgttaaattcatccacgcttagttaaatccgtttcggatagtgat

SEQ ID NO: 158004 - DNA, 399 bp, Arabidopsis thaliana columbia
cagatggacctgtttgcccgccgtcgaacaaactaagccgggcaagtttccctgaaggtttgttatttggcacggctactgcggcataccaggtcgaaggtgcgattaatgaaacttgtcgtggaccagccttatgggacatctactgtagaagatatccagagaggtgcaataacgataacggcgatgtggccgttgatttcttccatcgttataaggaagatatccaactaatgaagaatctaaacacagacgcctttagaatgtctatcgcatggccaagaatatttcctcatgggagaaaggagaaaggagtgagtcaagctggtgtgcaattctaccacgacctcatcgacgagctcataaaaaatggtataacttcattcggtacttgttttt

SEQ ID NO: 158005 - DNA, 416 bp, Arabidopsis thaliana columbia
caaagcgtgagtgagatcgggaatcaaacattttctccgtctctcatttcaaacgctatcggcatctccttcctccgccgccgccatggaatctccgaagaattctctgatcccgagcttcctctattcatcatcttcatctccgagatctttcctcctcgaccaggtgctcaattccaactccaacgctgcattcgagaaatctccttctccggccccgcgttcctctcctacgtcgatgatttctcggaagaatttccttattgcatctcccaccgagccagggaaggggatcgagatgtattcacctgccttctacgctgcttgtacctttggtggaattctcagctgtggtcttactcacatgaccgtgactcctctcgatctcgtcaagtgcaatatgcagattgatccag

SEQ ID NO: 158006 - DNA, 422 bp, Arabidopsis thaliana columbia
cattaattcattatcatcaaataatacagcagcaagcaacacagtaaaacccaattccctaatcccaaaattcgatctctcatctgatggctggttacagagccgatgaagagtacgattacctcttcaagctcgtgttgatcggcgactctggtgtcggcaaatcgaatctgctctctcggttcaccaagaacgagttcaatctcgaatccaagtctactattggtgttgagttcgctaccaaaaccactaaagtcgaaggcaaagtcgtcaaagctcagatttgggatactgctggtcaagagagataccgagcaatcacaagcgcttattacagaggagctgttggtgctttgcttatttacgacgtgacaaggcacgcaacatttgagaatgcagcaagatggctaaaggaactaaga

SEQ ID NO: 158007 - DNA, 420 bp, Arabidopsis thaliana columbia
ggcttccactgctctctcaagcgccatcgtcggaacttcattcatccgtcgttccccagctccaatcagtctccgttcccttccatcagccaacacacaatccctcttcggtctcaaatcaggcaccgctcgtggtggacgtgtcacagccatggctacatacaaggtcaagttcatcacaccagaaggtgagctagaggttgagtgtgacgacgacgtctacgttcttgatgctgctgaggaagctggaatcgatttgccttactcttgccgtgctggttcttgttcgagctgtgctggtaaagttgtgtctggatctgttgatcagtctgaccagagtttccttgatgatgaacagattggtgaagggtttgttctcacttgtgctgcttaccctacctctgatgttaccattgaaac

SEQ ID NO: 158008 - DNA, 418 bp, Arabidopsis thaliana columbia
gtttccattgctgctctttgtcttatgaaccaagacaaggttctcatggaaagctggtaccatttgaaggatgcaattcttgatggtgggattccattcaacaaggcttatggaatgagcgcgttcgagtaccacgggactgaccctagattcaacaaggtctttaacaatggaatgtctaaccattccacaatcaccatgaagaagattcttgagacctataagggttttgaaggattgacttctttggttgatgttggtggtggcattggtgctacactcaaaatgattgtctccaagtaccctaatcttaaaggcatcaactttgatctcccacatgtcatcgaagatgctccttctcatcctggtattgagcatgttggaggagatatgtttgtaagtgtccctaaaggtgatg

SEQ ID NO: 158009 - DNA, 420 bp, Arabidopsis thaliana columbia
atttgattgaagtacagatccatcggagaagtagacagagagattgaagatcaatgacttcgagatattgggtggtgtctcttccagtgaaagactctgcttcttcgttatggaatcgattacaagagcagatctctaagcattcctttgatactccagtttatcggtttaacattcctaatcttcgtgttggaaccttagattctctactcgctctcggcgatgatctgcttaagtcgaacagctttgtggaaggagtttcgcaaaagatcaggagacagatcgaagaattggagaggatttctggtgttgagagcaacgctcttacagttgatggagttcctgttgattcttatctcaccaggtttgtgtgggatgaagctaagtacccaacaatgtcacctctgaaggaggttgtgg

SEQ ID NO: 158010 - DNA, 421 bp, Arabidopsis thaliana columbia
ggaggatgtctcgttcggcgacttgacctctctctctctctctcttttaccttcattgttcactgtttccagacattgaaagaaagatcattagtttctgaggggataaccatttttttttcttcttaaaaagttttttttttttgtcaattggtcttcttcttcctcatccgctcgcttatatttaatttaataataataaaaatcggtgttcatttttatataaaagtataaattttgtgtttggttgatccatccgtagtcgtagtagatctacaagctctgaaattccacgcccacatctcctccgtcctcttgagatccttctcttcattcattttcttgctcaacttgagttgcttccaacatcttgcaagattgtctttgagttcattcaggtcttgaagaagagcactctttt

SEQ ID NO: 158011 - DNA, 422 bp, Arabidopsis thaliana columbia
gtcgttgtaagctgctaacgtttgttgatcttagccgtaatgagctctcaggtgatattcctaatgaactcacaggtatgaagatcttgaattacttgaatctttcaagaaaccatctcgttggttccatacctgtgacgatagcatcaatgcagagtttgacatcggttgatttctcttacaacaatctctccggtttagttcccagcactggacagtttagttacttcaattacacatcgtttgtgggtaactctcatctttgtggtccgtatttgggtccttgcggcaaaggaactcaccagtctcatgtcaaacctttatctgctactacgaaactgttactcgtccttggattgctcttttgttcgatggtgtttgctatagtggccataatcaaagctcggtccttgcgaaatgcg

SEQ ID NO: 158012 - DNA, 425 bp, Arabidopsis thaliana columbia
caaagtgttcgttggaggattagcttgggaaacacacaaagtctctctcaggaattactttgaacagtttggtgacattgttgaagctgtcgttatcactgataaatctagtggtagatctaaaggctatggctttgttactttttgtgatccggaagcagctcagaaagcttgtgtagatccagctcctgttattgatggaagaagagctaattgtaatcttgctgcttttggtgttcagagatccaaaccttcttctcctattcatggacatgtaggaggaagaggcatgaaggtgactagccctttcaagacacactttgggaccgcggctactgctattccttccccacttccattctcccactacacacttccttacactaatccttttgggttctcttcatactcaatggattacaatt

SEQ ID NO: 158013 - DNA, 416 bp, Arabidopsis thaliana columbia
gattccattacaaataaacaattttcatatatatctatatcaaaaaaaaacaatggctacctcaagcatgaagagcattccaatggcgatcccaagtttctccatgtgtcacaagctcgagctccttaaagaaggcaaaactcgcgacgtcccgaaagccgaagaagatgaagggctaagctgcgagttccaagagatgttggattctcttcctaaggagagaggatggagaactcgttacctttacctattccaagggttttggtgccaagccaaagagattcaagccatcatgtctttccaaaaacatttccaatccctcgaaaacgacttttatctcgccaccatacctaaatccggtacaacctggctaaaagctttaactttcaccatccttaaccgtcaccggtttgatc

SEQ ID NO: 158014 - DNA, 413 bp, Arabidopsis thaliana columbia
gcacgtcgtcgtttttgcttctcacattggtctctaccttgtccattctccaaatctcctttgctcaacttgttccagcaatcatgacattcggtgactctgtagttgatgtcggcaacaacaactatcttccgacccttttcagagctgattatcctccttatggccgtgatttcgctaaccacaaagccaccggtcgtttctgcaacggcaaattagccactgatataactgctgagactttaggcttcactaagtacccaccagcttatctaagtcctgaagcttctggtaagaatcttctcattggtgctaatttcgcttctgcagcttcaggttatgatgacaaagctgctcttctcaatcacgcgatcccgttgtatcagcaagtagagtatttcaaggaatacaag

SEQ ID NO: 158015 - DNA, 360 bp, Arabidopsis thaliana columbia
gtagctctctgtctttcgaagcagaagtgagactttgacgacaacagtgggaggaactatgagttcttgtgttgtgacgacaagctgtttctatacaatttcagattctagtatacgtttgaaatcccccaagctcctcaatctgagtaaccagcagagaagacgctctcttaggtctcgaggtggtttaaaggttgaagcttactacggtctaaagacacctccttatccacttgatgctttggagccgtatatgagtagaagaacactagaagtgcattggggaaaacaccatcgaggttatgtagataatctgaattaacagttagggaaagatgatagactctatggattcaccat

SEQ ID NO: 158016 - DNA, 414 bp, Arabidopsis thaliana columbia
ccacgttttgcactcaatggccgactcttctttaagctttagccacaagatcagacgacacgcctcacctaaggctaaccacagttgtcgtggccaacaagtttgtcaacgatcaaacggcgtcgcatcggatgatgaaagagatcggaaaccgaatggagaaattcgctaggcttatgggagttcctttcaaatttaacattattcatcacgttggagatttatctgagtttgatctcaacgaactcgacgttaaaccagacgaagtcttggccattaactgcgtaggcgcgatgcatgggatcgcttcacgtggaagccctagagacgctgtgatatcgagtttccgacggttaagaccgaagattgtgacggtcgtagaagaagaagctgatcttgtcggagaagaagaag

SEQ ID NO: 158017 - DNA, 247 bp, Arabidopsis thaliana columbia
cggacgcgtgggttttgctaagtcaatggagaagatgggtagagttaaagtgaagactggctcagctggtgtgatcaggacacggtgttctgtcgctggaagttagtaagcttcagggtcggaatgtggtgtgttatggtcattgttgttttgtgtgactttcggaaaaaacaaatgttgttaatttaattttgttgttgtttgatttgtgtttatgcacccaagaatgatgtgttatggttcaatt

SEQ ID NO: 158018 - DNA, 418 bp, Arabidopsis thaliana columbia
gtgatttcaagtggttggttctgttccttttctcgtccccgatcaagtttcttctcctaaactccagaatttggtcttgaagatctctaaaggctcttcctttttgttcatttctctacccagatatcgatgggtacatacctaagttctccgaaaactgaaaagttatcagaagatggtgagaatgataagctcagatttggtttatcgtctatgcaaggttggcgcgctaccatggaagacgcgcatgctgcaattcttgatcttgatgataagacatcgttcttcggtgtgtatgatggccatggaggtaaagtcgttgcaaagttctgtgccaagtatctacaccagcaggttatcagtaatgaagcgtataaaactggagacgtcgaaacatctcttcgaagagcattcttta

SEQ ID NO: 158019 - DNA, 423 bp, Arabidopsis thaliana columbia
aaaggctctctctgtctctttctcaaaaatcatctgcaggaagtgaatcgtcaaaaccgagtttggaggatctgtcttgaggagtttttttttggttgagaaatggcttcgaaaaggatcttgaaagagctcaaggatctccagaaggatcctccaacttcctgcagtgctggcccagttgctgaagacatgtttcattggcaagctacaataatgggtccatctgatagtccttattcaggcggtgtctttctcgtaaccattcacttccctccggattatcctttcaaaccaccaaaggttgcattcaggacaaaagtgttccaccctaatgtcaacagcaatggaagcatttgccttgacattttgaaagaacaatggagtcctgcactcaccatatcgaaggttttgctttcgatatgt

SEQ ID NO: 158020 - DNA, 275 bp, Arabidopsis thaliana columbia
gccacgcgggcggtagacttagattgcgagctgccgctctagaggattcatgctgacgtacgcgagcatgcgacatcgtcactcaaatatagcgcgacgtaaatacagactagctggccggcgatgaacaacaccatagacgtggcaaaaccctggggtcgcccaactgaatcgctacgtaactcatccagcttatgccagttggtggaggacccaacaggccaggaccgatcgacgttgcgaacagttgtacaacctgaataggctaaagggac

SEQ ID NO: 158021 - DNA, 421 bp, Arabidopsis thaliana columbia
cggacgcgtgggtgggattcaagtaagagttttcgatgaagacccgggtccatttcagcatgtgatggatcagatttcatcttgtactcaaaaagagaaacttctacctgaagtagacacactagtggagagatctcgccatgttaatacccaaacacaaagccgtgcttgtcacatctttgaacgcgggttacgcggagaacttaaagagtatgtattgggaatatccgacatcaactggagaaatcatcggtgttcatcagccgagccaagaaggttatcagcagaccgaaaaaaagatgcataatggcaaagctcttgcggaaatgtatcttttgagtttgacagataatcttgtgacaagtgcttggtctacatttggatatgtagctcaaggtcttggaggtttaaagccttggat

SEQ ID NO: 158022 - DNA, 423 bp, Arabidopsis thaliana columbia
cttctcttccacaacgaagtttggttcatcaccggcgaatcctttctccgacgtcataatgccgtttaagacggtgatagaagtggagcctccgagtctgttacggtacttgatcggatcggcggtgatgatgatcggtgttgtattaccggttggttacatgatgtttcgcaacaaacgcgtccccttctcatcttcgtactctaaacagacgtggggaatccatggttgatagatgatcaaaaattatagttgctcctcttcgttaaagcttgtttaggctaaaaattggaaggaacaaagttttgatatagggggccagaggctgtggttgatttcaacactaaattgagaaggatgatgacatattgatgatttggacgactgtaaatatatgggggaatttttgtttttacatggctt

SEQ ID NO: 158023 - DNA, 426 bp, Arabidopsis thaliana columbia
tcagacaccgcttgtgaggcccaagaggaagaagacttgggttgattactttgtcaagttcagatggatcattgtcatcttcatcgtccttccattctcagccacattctacttcctcatctacctcggggacatgtggtcagagtccaagtcctttgagaaacgtcagaaggaacacgacgagaatgtcaagaaagtcatcaaaaggcttaagggtagggatgcttccaaggacgggcttgtctgcactgctcgtaagccctggatcgctgttggaatgaggaacgttgactacaagagagcccggcatttcgaggttgacttgggggagttccgtaacatccttgagatcaacaaggagaagatgactgctagagtggagcctcttgttaacatgggacagatttcccgtgctaccgtcccaat

SEQ ID NO: 158024 - DNA, 426 bp, Arabidopsis thaliana columbia
gaattatcgaaagcacaccaacaggttcatatatctgaagcaagggtttcgactgctttagacaagttagcccacatggaagaattggttaatgataggttgttacctggcagagttgtaacggaattagataaaccctcctcttcaaccactgcttctgctgtcgagttagatagggaaaagacaaacacgggtgcgaaaagcttgaatgtttctggtccggttccgccttatagtccacacttgaagaatttttggtatcccgttgctttcactgcagatctcaagcatgatacaatggtaccaattgaatgctttgaacaaccatgggttatctttaggggtgaagacgggaaaccaggatgtgtacggaatacatgtgcgcatagagcatgtcctcttgatcttggcacagtgaacgaggga

SEQ ID NO: 158025 - DNA, 427 bp, Arabidopsis thaliana columbia
gagacaaagttaaaagtagagaagaaaatgagtgaggaggagaggaagcaacacgtcgttctagtacatggtgcttgccatggcgcctggtgctggtacaaggttaagccgcagctcgaggcttctggccaccgcgtaaccgccgtagatctagctgcctccggtatagacatgaccaggtcaatcacagatatatccacatgcgaacaatactcagagccattgatgcagctaatgacctcactaccagatgatgagaaggttgtgcttgttggtcatagcttaggaggtttgagtttagctatggccatggatatgtttccgaccaaaatctctgtttctgtctttgtgactgctatgatgccagacaccaaacactcaccatccttcgtatgggataagctaagaaaagaaacttcacgagagg

SEQ ID NO: 158026 - DNA, 419 bp, Arabidopsis thaliana columbia
agagatttagatattgtagagtgagattctaaagagagagagagagagagatatggctagtggaatcgctcgtggtcgtttagctgaagagaggaaatcgtggaggaagaatcatcctcatggttttgtggcaaagccggagacggggcaggatggaactgtgaatctaatggtgtggcattgcactatacctggtaaagctgggactgattgggaaggtggattctttccattaacgatgcacttcagtgaggattatccgagcaaacctccgaaatgtaaatttccacaagggtttttccaccctaatgtctatccatctggaactgtctgtctctctatccttaacgaggattatggatggagaccagccatcaccgtgaagcagattcttgttggtattcaggatttacttgaca

SEQ ID NO: 158027 - DNA, 417 bp, Arabidopsis thaliana columbia
cttgaaaatcagtcatgggttctggaaaagagcgtgacactttcgtctacctcgctaagctgtctgagcaagctgagcgttatgaagaaatggtggaatcaatgaaaagtgttgcgaaattgaatgttgatctgacggtggaagagaggaacttactctctgtgggttacaagaacgtgattggttcaaggagagcttcgtggaggatcttctcgtcgattgaacaaaaggaagcagtgaaagggaatgatgttaatgtaaagaggatcaaagagtatatggagaaggttgagttagagctttctaacatatgcattgatattatgtctgtcttagatgagcatctcattccttcggcttccgagggtgaatctactgtcttcttcaacaagatgaaaggtgactattaccgctatc

SEQ ID NO: 158028 - DNA, 416 bp, Arabidopsis thaliana columbia
aaacgttggtcacgaggcctcatcaatgcttttgataccttccttcaccgcaaattctaacgaaccaccaccgtcgaagctttctctttccgatctttcaatggcgattctcaaatctcacttcttcttactcttccctcttcttcttctccactttcacactgtctcctttgctcagacgctctttgtgttcggagatggtctttacgacgccggaaacaaacagtttctctctcagaaccgagttgacgcaagctttcctccttatggagtcactgtaggacaagccaccggacggtggtccgatggttctatcgttcctgattatcttgctaaattcatgggaattcctaaaatctctccgattctcctaaccacggcggatttttctcacggagctaatttcgccatcgccg

SEQ ID NO: 158029 - DNA, 425 bp, Arabidopsis thaliana columbia
tcctgatcttgctgattatccgtacgacaccgttcctaacaaggttgaacacctcttcttcgctcagcagtaccatgacagaaagcagagggaggcaagaatgagcatgagcagagaagagaggacaaaaactccgttcgtggactacctaaagcccatcatcgccgacggagacaccggctttggcggcaccaccgccaccgtcaaactctgcaagcttttcgttgaaagaggcgccgctggggtccacatcgaggaccagtcctccgtcaccaagaagtgtggccacatggccggaaaggtcctcgtggcagtcagcgaacacatcaaccgccttgtcgcggctcggctccagttcgacgtgatgggtacagagaccgtccttgttgctagaacagatgcggtcgcagctactctgatccagt

SEQ ID NO: 158030 - DNA, 419 bp, Arabidopsis thaliana columbia
gagaaaacttcgtctctcttctctgcttcgccctctcatttcctgtgagataaaggcggagtctctctccagttattttgctcatccatcgattcttagagttcaaaatggttgatcaagttcagcaccccactattgcgcagaaagctgccgggcagttcatgcgttcaagtgtttccaaggacgttcaagtgggttaccagaggccttctatgtatcaaagacatgcaacctacggaaactactccaatgctgcatttcaatttcctccgacatcccggatgttggcaacaactgcttctcccgtgtttgtccaaaccccaggagagaaggggttcactaactttgcccttgactttctgatgggtggtgtttctgctgccgtctccaagactgctgctgctcctattgaacgtgtt

SEQ ID NO: 158031 - DNA, 418 bp, Arabidopsis thaliana columbia
attaataaaaagcattttcttctttcgattgcttcagattcgtcagctcactctttcctctccagaagaaaccctagacatctcatcgccaaaatgttcagatctatgctcgtccgatcttctgcctccgcgaagcaggcggttatccgccgtagcttctcctccggctccgtccccgagcgtaaagtcgccatccttggtgccgccggtggaattggtcagcctcttgctctcctcatgaagcttaatcctcttgtctcttccctctccctctacgatatcgctaacactcctggagttgctgctgatgttggtcacatcaacaccagatctgaggttgttggatacatgggcgatgataacttggccaaagctcttgaaggagctgatctcgttatcattccagctggtgtaccaa

SEQ ID NO: 158032 - DNA, 420 bp, Arabidopsis thaliana columbia
catcgatttggcttgctacttttgaatttacccgtgttctactacgattcgggattagggtttttttcttgagttagaaaagattgtttcttgattcttgggaatggctgggatttgaggaagaagaagtgcaaaagggttctttttttgagtttgtgaatttgctgcggagatgagtgcttcgaggtttataaagtgtgtcaccgtcggcgatggtgccgtcggaaaaacttgtatgctgatttcttacacaagcaacactttccctacggactatgttccaactgttttcgacaacttcagtgctaatgtggttgtagatgggaacacggtgaatcttggattgtgggatacagctggtcaagaagactataacaggttaagaccgttgagttaccgtggtgccgatgtcttcattct

SEQ ID NO: 158033 - DNA, 458 bp, Arabidopsis thaliana columbia
accgacccacattcccgaatcgccgcacgcgtccgagtttttgtgcggctgccattttcgatttccaaaggttttgagctttgaaaaatggtgagaatcagtgtgcttaacgatgctcttaagagtatgtacaatgctgagaagagagggaagaggcaagtcatgatcaggccttcctctaaagtgatcatcaagtttcttatcgtcatgcagaaacacggttacattggtgagtttgagtacgttgatgaccacaggtctggaaagatcgtggtcgagcttaatggaagacttaacaaatgtggagtcatcagtcctcgtttcgatgttggagttaaggagattgaaggctggaccgctcgtcttcttccttccagacagtttgggtacattgttcttacgacctcggctggtattatggaccacgaagaagccaggagaaagaatgttggtggcaa

SEQ ID NO: 158034 - DNA, 426 bp, Arabidopsis thaliana columbia
cagaccatccatggtgtggttgttaccagaaccttgactcttgtttatccttctacctttacgtccagacacaaagctctgaaccagatgacaagtagcagtaacagcggcttgcgacggttcctgttcactccgcctcagcggctaagccaaggtatctgttactggggagcagagctaagcaacaatgtgtcatggacttacaaaacgaaaatggttgttcgatccaaggccggagcagtgcctctgatgaagcatggcgaccggtttctctcctctctctcgtctccagccttagctggtgatccgtcagcgataaaccgacacattaagaagtttgtggctgcttcacccaaatcagttgctctcaatgtcctctctcatctcctctctgatcaaacttcccatcctcatctctccttcttt

SEQ ID NO: 158035 - DNA, 379 bp, Arabidopsis thaliana columbia
aatacgattcggcttgctactcttgtatctacctcacaagagagacaaatccatggctgctacttcttccctcgctctctctcaagctctcctagctcgtgcaaactctcaccatgggtcggaccagcagggatctttaccagctttctctggactcaaatccaccggttcacgcgcctcatcttcgtctcgtcgacgtatcgctcaatccatgaccaaaaaccgatctctccgtcctcttgttcgcgctgcagctgttgagactgttgagccaaccactgattcgtcgattgtggacaaatcggtcaactcgattaggtttttggctatcgatgcggtggagaaggccaaatcaggtcatcctggtcttcctatgggt

SEQ ID NO: 158036 - DNA, 422 bp, Arabidopsis thaliana columbia
caaagtgtcattaatagaaagacgagaaagaatgaccaaccctgaaacatggctgaagaacaacaaaactcagatcagagcaatggtggaaacgttattccaactcctgaagaagttgctacgttcctgcacaaaactgttgaagaaggtggatgggaaaaatgttgggaagaagagataacaccatgggaccaagggagagccacacctctcattgttcatcttgtcgacacttcctcactcccacttggccgtgctctggtccccggctgtggtggaggacacgacgtcgttgcgatggcaagtcctgaacgcttcgttgttggattggatatttccgaaagcgcactcgcgaaagctaatgagacttacggctcctcaccaaaggcagagtacttttcgttcgtgaaggaagatgtttt

SEQ ID NO: 158037 - DNA, 418 bp, Arabidopsis thaliana columbia
aaacgagcaaaagaagaagagaaacaacaagatgtagtaatggcttcctctatgctctcctccgccgctgtggttacatccccggctcaggccaccatggtcgctccattcaccggcttgaagtcatccgctgcattcccggtcacccgcaagaccaacaaggacatcacttccatcgcaagcaacgggggaagagttagctgcatgaaggtgtggccaccaattggaaagaagaagtttgagactctatcttacctccctgaccttagtgacgtcgaattggctaaggaagttgactaccttctccgcaacaagtggattccttgtgttgaattcgagttagagcacggatttgtgtaccgtgagcacggaaacactcccggatactacgatggacggtactggacaatgtggaagc

SEQ ID NO: 158038 - DNA, 263 bp, Arabidopsis thaliana columbia
aacaaaggcagttcttctcccgtggcttatcccatcgccgagacacgtatcgctgttcccagtggttcaattgccggcgttggagaccgccgggtggtgtgtaagaaagaggagggcagaagacgtagcagtctccgtcgccttcaatccttctggcaatttcgacatctctgccttcgagaatgaccaagattcagataaagtggaaccttcgatgcctccaacgaccggccggtacgaagtagtgatcgacaacgactcaa

SEQ ID NO: 158039 - DNA, 421 bp, Arabidopsis thaliana columbia
caatctcaaaaatatccatggcggcgattacagaatttctaccaaaagagtacggatatgtcgttctcgtcctcgtcttctactgtttcctcaacctctggatgggtgctcaagtcggcagagctcgcaaaaggtacaacgtcccgtatccaactctatatgcaatagaatcagaaaacaaagatgctaagctcttcaactgtgttcagagaggacatcaaaactctttagagatgatgccaatgtatttcatactgatgatcctcggtgggatgaagcaacccttgtatctgtactggccttggtttgctttacaacgttagccgattcttctactttaaaggttatgctactggagatcccatgaagcgttttacgatcgggaaataccgtttcttggggttgctaggtctgatgaata

SEQ ID NO: 158040 - DNA, 302 bp, Arabidopsis thaliana columbia
gaggaggactacgttaaagccatcaaggaagttatcaagaaagttgttgacctccaagagggagcttgacatcgatgttcttgtccacggagagccagagagaaacgacatggttgagtactttggtgagcagttgtctggttttgccttcactgcaaacggatgggtccaatcttatggatctcgctgtgtgaagccaccagttatctatggtgatgtgagccgtcccaaggcaatgaccgtcttctggtccgcaatggctcagagcatgacctcttccccaatgaatggtatgctttact

SEQ ID NO: 158041 - DNA, 344 bp, Arabidopsis thaliana columbia
cattttcgtagccgcaagactccttttttattcttacttgcagctatgggtaaagagaagtgtcacattaacattgtggtcattggtcatgttgattctggaaaatcgaccacaactggtcacttgatctataagcttggtggtattgacaagcgtgtcatcgagaggttcgagaaggaggctgctgagatgaacaagaggtccttcaagtacgcatgggtgttggacaaacttaaggccgagcgtgagcgtggtattaccatcgaattttgctctatggaagtttgagaccaccaagtactactgcacaagttattgatgccccaggacattcgtgattttta

SEQ ID NO: 158042 - DNA, 274 bp, Arabidopsis thaliana columbia
ctggatttgagggtgacaacatgattgagaggtccactcaaccttgactggtacaagggaccaactctccttgaggctcttgaccagatcaacgagcccaagaggccgtcagacaagccccttcgtctcccacttcaggatgtctacaagattggtggtattggaacggtgccagtgggacgtgttgagactggtatgatcaagcctggtatggttgtgacctttgctcccacaggattgaccacttgagtcaagtcttgtgagatgcaccacg

SEQ ID NO: 158043 - DNA, 348 bp, Arabidopsis thaliana columbia
agaaaagagtcctcaaagcccgccaaatgtgtttcagaccagagttcttggagctaaagactctgaagataaggttcttaacgagtctgttgcttctgctacgcctaaagataaccaaaaggcttgcctaatatcagaggactcatgtagaaaagaccaagagagtgaaaaagcagttgtatgttcttctgttggctcgggtaatagtctcgatggcccatccgaaagtccttcactttctttaaagagaaagcattcgaatattcaagacattgactgtcatagtgaagatgtggaagaagaatcaggagatggaagaaaggaagcaagttcatctcgaacgggttt

SEQ ID NO: 158044 - DNA, 319 bp, Arabidopsis thaliana columbia
ctcaaactctgaaatcgttctttcaaatctctcaatcgggatcaagatgcagatctttgttaagactctcaccggaaagactatcaccctcgaggtggaaagctctgacaccatcgacaacgttaaggccaagatccaggataaggaaggcattcctccggatcagcagaggcttattttcgccggaaaacagctagaggatggccgtacgttggctgattacaatatccagaaggaatccaccctccacttggttctcaggctccgtggtggaatgcagattttcgtcaagaccttaacggggaaagacgattactct

SEQ ID NO: 158045 - DNA, 375 bp, Arabidopsis thaliana columbia
attcagagaaaacagaagaaactatggcaactcaagccgccggaatcttcagccccgccataacaaccactacttccgccgtcaagaaactccacctcttctcatcaagccaccgtcccaagtctctctccttcaccaaaaccgccatccgcgccgagaaaacagagtcctcctctgctgccccagccgtgaaagaagctccagttggattcactcccccgcagctagacccaaacacaccatcaccaatcttcgccggaagcacaggaggtctcctccgtaaagcacaagtagaggaattttacgtgatcacatggaactcaccgaaagaacaaatctttgagatgccaacaggaggagcttgcgatatgagag

SEQ ID NO: 158046 - DNA, 257 bp, Arabidopsis thaliana columbia
  unsure (1)..(257): unsure at all n locations
ctggatttgagggtgacaacatgattgagaggtccaccaaccttgactggtacaagggaccaactctgcttgaggctctngaccagatcaactagagccaagaggacaagatgactggcacagagagaggaagcattagagcaactgtgcttatcgagaccctgccggctgtcttgcagatgaatgagatactctatgaactacgtgatcactcagtcggnttaaactgtggaagatgggattatatctacagctat

SEQ ID NO: 158047 - DNA, 317 bp, Arabidopsis thaliana columbia
ctttttcaaggccaagcgagcaagagacgttttagcggcggctactacttaggtttcagtttttgaaattttgaagaatggtgagaatcagtgtgctcaatgatggtcttaagagtatgtacaatgcagagaagagaggaaagaggcaggttatgatcaggccttcttctaaagttatcatcaagttccttatcgtcatgcaaaagcacggttacattggcgagtttgagtatgttgatgaccacaggtctggtaagattgttgttgagcttaatggaaggctgaacaagtgtggagttatcagtcctcgtttcgat

SEQ ID NO: 158048 - DNA, 335 bp, Arabidopsis thaliana columbia
gaaagggtcttgccagtttagggcatccttgtgggtgagagagcgattgagagatttcaaaaggaggaagaggaagatacgagtgtgagagagatttagagggagagaagaaagagagattctttttgagtgtgttagggtttcatttcctctgcagatctacatttatctcttctcatggaacggaagcttgtggttttgggaatcccgtgggatattgattccgatgggcttaaggattacatgtcaaaatttggagacttggaggattgtattgtcatgaaggatcgatcaactggaagatctcgtggatttggatatgtcacttttgcttt

SEQ ID NO: 158049 - DNA, 354 bp, Arabidopsis thaliana columbia
gttcacaacttcaaagcatcgaaaaggtttattctttacgtttttctctggaacccgattcgaagaaatcatcaagaagtttcctttcactgatttctcaatctattcctttcgcgcttatggaagattctggagtgaatccaatggattcaccatctaaaggcagtgactttggagtctatggaatcataggaggtggaatcgtggctttacttgtgcctgtgttactctttgtggtgttgaatggaaccaaaaaggggaaaaagagaggtgttcccatcaaagtaggtggcgaggaaggttacacaatgcgtcatgctcgagctcctgaattggttgatgtaccttgggaag

SEQ ID NO: 158050 - DNA, 369 bp, Arabidopsis thaliana columbia
cgaaacttagacatagccgccaccaccgacaagaacaacaaccagatcgactattatcagaagaagacaacttccgacaacatcaattccaactggaactggaagtcttctggttcaaacaacgacatgggtttaggattcggacctgtgggttcaaaatccaccgtcgatttaaacccaatcgacaaattcaactcaccgttcaacgacacgtggaaattcaactcagtcaacgttaacgttaacggttactcaccgtcaagcgccgttaacggagatttcaacaaaggggtttacacgtcgatgaagaagtatgggtacaacgtcaatctaaagaacaacaacatgaacaaaggaatcgatgaagat

SEQ ID NO: 158051 - DNA, 326 bp, Arabidopsis thaliana columbia
cttacttgcagctatgggtaaagagaagtttcacattaacattgtggtcattggtcatgttgattctggaaaatcgaccacaactggtcacttgatctataagcttggtggtattgacaagcgtgtcatcgagaggttcgagaaggaggctgctgagatgaacaagaggtccttcaagtacgcatgggtgttggacaaacttaaagccgagcgtgagcgtggtattaccatcgatattgctctatggaagttcgagaccaccaagtactactgcacagtcattgatgccccaggacatcgtgatttcattaagaacatgaatactg

SEQ ID NO: 158052 - DNA, 290 bp, Arabidopsis thaliana columbia
agcagccagacgaaacttttaacgatctaccatcgaaccaggatacttcttcattaccatggcaacaagaaatgctttgagaattgtgtctcgtaggttctctagtggcaaagttcttagcgaagaggagagagccgctgagaatgttttcattaagaaaatggagcaggagaagcttcagaagttagctcgacagggtcctggagaacaagcagcagggtcagcaagcgaagcaaaggttgctggtgcaacagcatctgcatcaactgagtcgggcccaaaggtgtcag

SEQ ID NO: 158053 - DNA, 307 bp, Arabidopsis thaliana columbia
gtttcttctcattcgtcatctagtcccattctctgtccataacaatgaatatcaattgttctccattagggtttctaatttcactcttcttcattgttacttttcttgcaccacaagtcaaatctagggctttctttgtctttggtgactctctcgtcgacaatggaaacaacgactacctcgtcaccactgcccgtgccgacaattacccgtatggtatcgactacccgacccgtagacccaccggacgtttctctaacggccttaacattcccgacattatcagtgaggctataggcatgccgtc

SEQ ID NO: 158054 - DNA, 411 bp, Arabidopsis thaliana columbia
aaatgggtcaaggtaaggtaagagcggtaaagaacgataaaatgaaagttgtcaaggaaaaaaagccagctgagatagtgtctcctttgttttctgcaaaatcctttgaggagcttggcctcccggattccttgttagacagtttggaaagagaaggtttctctgtcccaacagatgtccaatcagcagctgtcccggcaataatcaaaggtcacgatgcagtgattcagtcttacacaggatctggcaaaacattagcttatctgcttccaatattgtccgaaattggtcctctagcagaaaaatctagaagttcgcacagtgaaaatgataagaagactgagattcaggcaatgatcgtggctccatcaagagaactccgtatgcagatagtaagagaggtagagaaac

SEQ ID NO: 158055 - DNA, 297 bp, Arabidopsis thaliana columbia
aacctagctagctagtaaacagtattttctatataccaaaaatggcttcaagttccatagctcttttcttggctctcaatcttctctttttcacaacaatctccgcctgtggtagctgtactccgtgcggcggaggttgcccctctcccaagccaaagccaactcctaaaccaaccccaagccctagctctggctcgagcaagtgccctaaagacaccctcaagctcggtgtctgcgctaatgtgctcaacggcctcctggacttgacccttggcaagccaccggtcgagccatgct

SEQ ID NO: 158056 - DNA, 218 bp, Arabidopsis thaliana columbia
gaaatttgcagaagagagaaaaacaaaaatggcgggtctttgctcgtcttcgacggtgatactctcttcttcttccgtgaaatcctccggaagtgagagaaagtctacgtttttagggatctctttaacggctatctcaaagccgtctgtacgagacggcatttatgcgaattcaaaaagaggattgccagtgaactgtgaagctaagccgacgacca

SEQ ID NO: 158057 - DNA, 417 bp, Arabidopsis thaliana columbia
cgtttttcctctgcaacttctcgttgcctcacactatatgaatcatctgtaatttgtagcttctttaacaaccaaaaagtttcaagattcctatatcctaagcaaaaaatgaagttaccatcgattctttcacttgttgtttcttccatctttctctgcatgagcttttgctcctctctcaattccgacggtttatctctcctagctctcaaatccgccgtcgataacgacccgacccgagtaatgacccactggtctgaatccgacccgactccttgccattggtccggaatcgtcttgcacaaacggccgagtcacaacttcttgtactcttcggaaaaagtctttccggttacattccatcaaaacttcgtttacttaacttgctaaacccggcttgatctagcttacaacaat

SEQ ID NO: 158058 - DNA, 353 bp, Arabidopsis thaliana columbia
gaaatgttgtcggcgcttggctttgctttactcagcatcttcgcgatcctcttgtcgttatgaaccttgtctaatggattacttcaacctcgtaggatttctcatggcttgacggaaagtagcaagtacttgacgagggatgagctctggttcaatcaaaccctagatcattactctccttctgatcatcgcgaattcaaacagcgatactatgaatatctagaccatttacgagttcctgatggacctatctttatgatgatctgtggcgaaggaccttgcaatggaatccccaatgactatataactgtgttagcaaagaattttgatgcaggcattgtttcacttgagca

SEQ ID NO: 158059 - DNA, 310 bp, Arabidopsis thaliana columbia
cacgttacaaaatttagacaaaaaaataaatatggagctcgagacctcagtttatcgaccaaacgtcgccgtttatgattctccggatggtgtggaggttcgaggacggtacgaccaaatcttcgccaagattttgacgagagaagctcttagctttgtggctgagttacagagagagtttcgtggccatgtgaagtatgccatggagtgccggagagaggcaagacggcgttataactccggtgccgttcctgggtttgatccttccactaagttcatcagagacggtgattggagctgtgccttcgtc

SEQ ID NO: 158060 - DNA, 282 bp, Arabidopsis thaliana columbia
gagcgttggaggaagagatcgaagatattggtggtcacctgaacgcgtatacatcgagggaacagaccacttattatgctaaggttttggattccaatgtgaaccaggctttggatgtcttggctgatatcctacagaattctaagttcgaggaacagagaattaaccgcgaacgagatgttatcctcagggaaatgcaagaggtggagggacaaaccgatgaagtggttctagaccatttacatgccactgcatttcaatacacaccccttggaagaacta

SEQ ID NO: 158061 - DNA, 300 bp, Arabidopsis thaliana columbia
gtctctcgcaatcttcgctcttctctttgctctctctctctcaacgcggttcagatccgagtttgggagattcaagctccctgaaaaaagccctttactctcgcttaccaactttgctccagcatggcaggatctgcaccagaaggcacacagtttgatgcacgtcagtttgaccagaaactcaatgaagtacttgagggacaagatgagttcttcacatcctatgatgatgttcatgagagctttgatgccatgggtcttcaagagaaccttctcaggggtatttatgcttatgggttt

SEQ ID NO: 158062 - DNA, 395 bp, Arabidopsis thaliana columbia
  unsure (1)..(395): unsure at all n locations
cgtgaaatgtgcagctccggaaataaataatcactaaaataaccagatccgatctactgccgcggtttctcgccggaatctccattctgtaaccggcgatcctctttctgctcagttatggaagacgtgaaagggaaggagattattgatgatgctcctattgacaacaaggtttcagatgaaatggagagtgaggaaaatgcgatcaagaaaaagtatggaggattgttgcctaagaagattcctttgatatctaaggaccatgaacgtgcgttttttgactcagctgattgggctttaggcaagcaaaaaggacaaaagccgaaagggcctttggaagctctcncgccaaaactgcagccaaccccgcaacagcaaccaagagcaagacgaat

SEQ ID NO: 158063 - DNA, 384 bp, Arabidopsis thaliana columbia
gcgtccggtgacaaattaagaagagagaaatggggaatgtcggtgaaggagacaagaagcgagaaacagtggcggtgatgagcttaatgaaggatcaacagaatccaattcaacagtttcaagtcaaattcaaggagattgagactggtttcaagtcgtggttatcaaaacagaagttaccggtggaagccgccgttgtcacggccatgggtggtgttcagggagcttttatcggtggtttaatgggaactttatctcctgaaatgcctcaggctggtattgaccctcaagctatggcttcgctaaagcaaactcaggctcttgttggtgggcctttggttcaagctcggaactttgctgctataactggggttaatgctggta

SEQ ID NO: 158064 - DNA, 284 bp, Arabidopsis thaliana columbia
atagaacattacatatttatttcatcagacagttgagaatccgatagaatatgtctcgcaaaccggaaaacaaacgttaagtccggaaattaaaacccaagaaagaagaaaaaagcagaaaaacaagggataaaatcaaagatgggggataaagttttgaggtttacacaaaagcaaagggaaattaaccggtgaagcttggtggcttgtaggcaatgaaactgatgcactggacttgacgggtgttgtcgaatccgatgatcctaatgaaagcattggggtac

SEQ ID NO: 158065 - DNA, 356 bp, Arabidopsis thaliana columbia
  unsure (1)..(356): unsure at all n locations
agaacagcgattgtcttcaaggtttccaagtgtgtcattcattgggaggaggaactggatctggaatgggaactctattgatttctaagataagagaagagtatccagatcgtatgatgatgactttctcagtgtttccttctcctaaggtctctgacactgttgttgagccatacaatgcaactctctctgtgcatcagcttgtcgaaaacgctgacgagtgtatggttttggacaatgaggctctctacgatatctgtttccgtaccctcaagctcgctaatcctacctttggtgatcttaaccatctcatctctgctacaatgagtggtgtcactggctgncttcgtttccct

SEQ ID NO: 158066 - DNA, 424 bp, Arabidopsis thaliana columbia
gacaaatcaaacacgttctgaagctatctacttgatctacattggttctgatgattacttgagctatgctaagagtaatccaagtccatcagatactcagaaacaagcttttgttgatcaagtcatcactaccataaaagcagaaataaaggtggtttacgggtctggcggaaggaaattcgcattccagaacttggcaccgttaggttgcttaccggccgtgaaacaagcaagcggaaatgttcaagaatgtgtgaaattgccttcggaaatggctgctttgcataacaagaaacttttgcagctcttggttgaactatcaagagaactaaatggttttcagtactcgttttacgacttctttagctcgatccaaaacagaggtatcaagtctaagacttatacattcgagacaggaaacgct

SEQ ID NO: 158067 - DNA, 311 bp, Arabidopsis thaliana columbia
cttggattctttgattcgctgcagcctctattgatggaaagtctgtttgctgagggatttagtctaagtttggaagacttatccatgtctagggcagacatggatgtaattcacaacctaataatccgagagatttcacctatggtgtctcgcttgagattatcatatagagatgaattgcagctagagaacagcatccacaaagtgaaggaagtggctgctaactttatgctgaagtcatattccattcggaacttgattgatatcaagagtaactcagcaatcaccaagcttgtgcagcagacaggctt

SEQ ID NO: 158068 - DNA, 274 bp, Arabidopsis thaliana columbia
ctaactttctctctcttgcttctacgcttcttcttgtggcgtagattgttatagagagggaaaccaaaaaagggaatctcaaaagctcgagttcacagatttgacccgagtctttaatccaatctgctggttcgttttccacattcaaactcgactcttgaatatcaaatcagaagtctttgctatggctgctaccgctgctgcttctgttgtcccgtacgcacctgaggatcatactcttcccaagccctggaaaggccttatcgatgataga

SEQ ID NO: 158069 - DNA, 379 bp, Arabidopsis thaliana columbia
  unsure (1)..(379): unsure at all n locations
gacccagggataataccacgtaatctgtatcctcctgaaccagagagtaatgaaggcaatggagaaccacgtcttgctcatactcctcagagtcggttgcctcggacaaaggatatgattgtaaatggaattactgtcaagatcaaatactgtgacacatgcatgctttacagaccgccccgtgcttctcattgttcgatttgcaacaactgcgtcgagaagtttgatcaccactgtccttggcttggtcagtgcattggattgagaaactataggttctacttcatgtttgtgttgtgctcaactcttctctgcatttatgtccatgntgtctgctggatctacgtcaagcggataatggatagtgagaacataaaca

SEQ ID NO: 158070 - DNA, 329 bp, Arabidopsis thaliana columbia
tgcttatatttgaaccatggcgcaaccaaggtacactaggatagataacaggaggccctcatcaaattattgctctacagtgacagtagttgtgtttgtggccctatgcttagtcgggatctggatgatgacatcatcttctgttggaccggctcagaatgttgatgaggtttctctggacaacaaagatgggataaagaaacagatgaccccacctgcagaggagggtaatggtcagaagtttgaagacgcacctgttgaaacaccgaacgaggataaaaaaggagatggtgatgcaagcttgcccaaagaggatgagagctcaagca

SEQ ID NO: 158071 - DNA, 312 bp, Arabidopsis thaliana columbia
attggctataattatgacaaaaactaccaaaaccatgaatcctaagttttacttggttcttgccttaaccgcggttctggcctcaaacgcatatggtgcggttgtagacatcgatggaaacgccatgttccacgaaagttactacgttctccctgtcatccgtggccgaggcggaggcctgactctagcaggccgcggtgggcagccatgtccttacgatatcgtgcaggaatcttcagaagttgatgaggggcattcccgtaaaattctcaaactggaagcttaaaggttgcgttcgttcccgaatcacag

SEQ ID NO: 158072 - DNA, 283 bp, Arabidopsis thaliana columbia
acgcgtcacactgagggatactgagttgatgggtctgtgcacactgaaaacttgaacacaccaaatctacatggacgaagcagagagctttgtcccgtttcagggtataaagaaagatgtcaaagggagactcaactgctacaagcaagattggatcagtggtctcagagctggatttaggattctggcaccaacaacttacatattctttgcatccgctattccggtgattacatttggagaacagttggaaagagatactgatgggaagattaccgctgtt

SEQ ID NO: 158073 - DNA, 313 bp, Arabidopsis thaliana columbia
gagccatgacggagacgaaacagaaatctcccttcttcgtgaaagatggtctcgctcagatgcttcgtggcggtgtaatcatggatgtcgtcaacgcagagcaagctcgaatcgctgaagaagctggcgcatgcgccgtgatggctcttgaacgtgttcccgccgatattcgagctcaaggcggtgttgctcgaatgagcgatccagagatgatcaaagaaatcaaaaacgccgtgacgattccggtgatggcgaaagctagaattggtcatttcgttgaagctcaaatcctggaagcaatcggagttgatta

SEQ ID NO: 158074 - DNA, 451 bp, Arabidopsis thaliana columbia
  unsure (1)..(451): unsure at all n locations
ctgcgttttacttcttctccttgagtttcttcttctagatctgatcgcgaatcaccaaaaggttttattttatacaatgggtcgtggaaacagctgtggtggaggtcaaagctcattggattatctctttggtggtgacgctcctgctcctaagccagttccagctcctcgtcccgctcctactgagtctaacaacggacctgcaccaccagtaacagctgtgactgcaaccgcactcacgactgctactacttctgttgagcctgcagagcttaacaagcagattcctgctggtatcaaaactcctgttaacaactatgccagagctgaaggacagaacaccggcaacttncttactgaccgttcttcgaccaaagttcacgcagcttcgggaggaggatcatcccttggattatctcttcactggtggcaagtaaaattattgcaaaga

SEQ ID NO: 158075 - DNA, 396 bp, Arabidopsis thaliana columbia
  unsure (1)..(396): unsure at all n locations
gccttcctgactttctctctacgacagaatttttgtagcttctctctgcttatcgacacgatggttctcgaggcgactatgatatgtatcgacaactccgagtggatgcgaaacggagattactctccgtctaggttacaggcgcaaacggaagctgttaatcttctttgcggagccaaaacccagtcgaatccggagaatacggtggggattttgacaatggctggcaaaggagttagagtattgactactcctacctctgatcttggcanaattctggcctgtatgcacggccttgatgtgggaggagagatcaacttaaccgcagctatccagatcgcccagctagctcttaagcatcgccaaaacaagaatcaacgccaaaggatatttgtt

SEQ ID NO: 158076 - DNA, 307 bp, Arabidopsis thaliana columbia
atttacactgtgggtaactggattcgtggaactggtcaagctcttgatcgcgttggttctcttcttcaaggaagtcaccgtatcgaggaacatctgtcgaggcatcggacgttgatgaatgtgtttgataaatcaccattggtggataaagatgtgtttgtggctccgagtgcttctgttattggtgatgttcagatcggaaaaggctcgtcgatttggtatggctgtgttcttcgaggtgatgtgaataacatcagtgttggatctgggacgaatatgcaagataatacgctttgtacatgttgca

SEQ ID NO: 158077 - DNA, 458 bp, Arabidopsis thaliana columbia
cttaaaataaaacaaacaaaaaatctagtgttcggctctaacacgctcgacgaccatggcggtctcgtttaatacaacgcttcaccagccttctctgagtccgagctgtagcatcaagctttattctgggttaaagcctcaatctgcaagctttttggcaagtgggtatcagaatttgaacaaggagttctatggaagagtttataagagtctgcaatctgggactgggaaagcgagcaggtcacgggtaaagatgatgccaataggaacaccgagagtaccctacagaaaccgagaagaagggacttggcaatgggttgatatatggaatgccctttatcgagagcgtgtaatcttcattggacaaaacattgatgaagagtttagcaaccagatattagcaaccatgttgtaccttgatactcttgatgactcgaggaggatttatatgtacctaa

SEQ ID NO: 158078 - DNA, 324 bp, Arabidopsis thaliana columbia
cggacgcgtgggcgagattgtcgtgcattctaaggctacactgaaaacacgtctcctctttcacttcattgttgacattatctctgttctccccattcctcaggtggtggttctcactctcataccactgtctgcgtcgctggtgtcagagagaatactgaaatggattatacttagtcaatatgtaccaagaatcattcgtatgtatccgctttataaagaagtgacaagagcctttggtacggtagcagaatcaaagtgggctggagctgctttaaacttattcctttacatgctgcacagttatgtgtttggggctttttg

SEQ ID NO: 158079 - DNA, 361 bp, Arabidopsis thaliana columbia
cttggcaaggttaatattaagaggtttgctgatggagagatctatgttcagctacaagagagcgttaggggatgtgacgtctatttggtgcagcctacttgcactcccactaatgagaatctcatggagcttttgattatggtagatgcttgccgaagagcatcagctaagaaagttacagctgtgattccgtattttggatatgcaagagctgacaggaagacacaagggcgtgaatccattgctgccaaattggttgcaaatcttatcactgaagctggtgcagatcgagttcttgcttgtgatcttcattcaggacagtcgatgggttattttgacatttcaagcgaccatgtgtact

SEQ ID NO: 158080 - DNA, 198 bp, Arabidopsis thaliana columbia
ggggcgggccacacgttctttcgacaagactaacaacaccttgacttttatcgatagtggtattgggatgaccaagggtgggtctgtgaacaaccttgggacaattgtcagaacttgtaccaaagaattcatggaggcgttggctgctggagctgatgttagcatgattggacagtttggtgttggtttaagtcattt

SEQ ID NO: 158081 - DNA, 245 bp, Arabidopsis thaliana columbia
cgaccacgcgtccggcataccaaggttgcactgatgtgttgaatactgttttacgggctacttatagccagttgtgcagagatgattatgccaatggtgcgaagagctgctgcatctaacctggggaaatttgctacaactgtcgagtctacctttttgattgctgagatcatgactatgttcgatgatcttactaaagatgaccaagaatctgtgagactattggctgttgaagggtgtgcagc

SEQ ID NO: 158082 - DNA, 372 bp, Arabidopsis thaliana columbia
agaagatccaaacacggcgctaagctaagctccgttctcctcctcaaaactatccgacaaaagacagaagcagaaacctaaccctaatttccttttctcaaaatccccgaaaggtccgtctctctctctatctatctctctaacttagctctcctccaaattcggatgattacccattacgaatttgcagagaagaacaaatcctctctttcttcttcctccgtctctctacccctttcatgtcttctcaagtctacgactctcatccagggttgttggtgcatcaaaccctagtttttgatttcgcttttgagatttctcatgcttctttccgttcggatctctcttctgaatcaaaataacgtcttttgg

SEQ ID NO: 158083 - DNA, 248 bp, Arabidopsis thaliana columbia
cggacgcgtgggcttttttttttttttttcgtttcttaattgatattttattgaagcataagatagaaacgagacacacacgagtagagtagtctgttgctcttaggaaatgtcaataccgataaaagacgaaagtcacaagaacacatagattaaagcagagaggacccatatagtcatttgctggtatcgaggacacaacgaaggcaagtaccttcgtgcaatagatcgaaagccttattgatttt

SEQ ID NO: 158084 - DNA, 144 bp, Arabidopsis thaliana columbia
ctaagattgatcgtagaagcccgaggcatgttgtatcgctcagcagagtataaaacaggttgagatgcatgggaagagtcatccggcgataaactcaactcaagttcttgagctatcatggactggagttcaaatgataacaat

SEQ ID NO: 158085 - DNA, 425 bp, Arabidopsis thaliana columbia
aaggtgtcagagattgtaggttcccacttctgaaggatgaccatccattgatcatagtggtaaggcttattgtctagtactttttgcatgtcttcttcaaagtcaaaacaaaactggaagcagcctcttcccagatctgaacccgtagcttttcctttcagattccaccggtttgagaggaaaggaaagagagaccataatcgttggatagatgggtttgtgaggcgatccattagagttagggaattagcttcgatgaggtctgaagtgtccagttctggtgcacgaattcttcttcgaattggtggggatagttctctctctattcatttacctttgagatggtaggggattcttgaactcatgattacagaaggcgtaaggtttgaagcggagaggcatcagggattaagtagagattcaaa

SEQ ID NO: 158086 - DNA, 416 bp, Arabidopsis thaliana columbia
ctgcaaggagaaatagtatgcttgaagctatttaacgcgagtttgaagctgctacaaaagggcttgaagagctaaaggctaatgattcaaccggcgacaaggatgatgatgaacacgttgcaaggagaaaaattatgcttgaagctattgaacgcgagtttgaagccgcgacaaaaggccttgaagagttaaagaatgaatcagaacaagctgaaaacaagagaaacagtatgttggaagcattcgaacgcgaatttgaagctgctacaaatgcaaaggctaatggagaaaactctgcaaagaatccatcaaccataagtactacagtgcagaaatcttctggcggatacaatgctggtttaagaagtcttctaaagcctgcagatggtgtatgtggttgtttcaacaaggattaa

SEQ ID NO: 158087 - DNA, 331 bp, Arabidopsis thaliana columbia
  unsure (1)..(331): unsure at all n locations
ggaatctgacattgaagagactctcaagaggcttttgcagcttaacaagactcctgaagaggtctttgatgctcttaagaatcagactgttgacttggttttaactgctcatcccactcaatctgttcgtcggtctttgctccaaaagtttggaaggattcgtgattgtttgacgcagttatatgcaaaggacattactcctgatgacaaacaagaactcgatgaagctctgcaacgagagattcaagctgcttttcgcacagatgaaatccgaagaactcctnctacaccgcaagatgaaatgagagcagggatgagctactttcatgag

SEQ ID NO: 158088 - DNA, 237 bp, Arabidopsis thaliana columbia
  unsure (1)..(237): unsure at all n locations
agagagagagagagcattggccaatgcgaagcccttttgtctcctcggcttgttttgtctgttattacaggtattctccatcttccatatcggaaatggggaattggagatgaactattacaaagagaggttgccaaaagcggcagagataataagacaacaagtggagacgctntactacaaacacggtaacacagccgtatcttggctccagaatctcttcatgactgtgtcatc

SEQ ID NO: 158089 - DNA, 206 bp, Arabidopsis thaliana columbia
gtaaaactggtggtcttggtgatgttctcggtggtctacctccagctcttgctgctagaggccaccgtgtgatgacaatttgtcctcggtatgaccaatataaagatgcttgggacacttgtgttgtggttcagatcaaagttggggataaagttgagaatgttcgtttcttccattgctacaaacgaggagttgatcgtgtcttt

SEQ ID NO: 158090 - DNA, 291 bp, Arabidopsis thaliana columbia
cttcttcttcgatcaaaaaacctcgagcttctatacaatggagaccagcatcgcgtgctactcacgtgggatccttcccccaagtgtctcttctcaacgatcctctacattggtctctcctccttcctactccacatcctccagcttcaagcgtctaaaatcgagctcaatcttcggagattcactacgattagcaccaaaatcgcaacttaaagccacaaaagctaagagcaatggggcttcaactgtgaccaaaatgtggaattggcccaaagcttggaaagaagtttt

SEQ ID NO: 158091 - DNA, 350 bp, Arabidopsis thaliana columbia
  unsure (1)..(350): unsure at all n locations
ctttagacactcgccgtctccattttctctctctccgtagaaaaccaatcccattcgtcaaatctccggtggtctccggcgcagcttccgggtcgggtcaatactttgtggatcttcgtatcggacaaccgcctcaatcgttacttctgatcgccgacacaggaagcgatctcgtttgggttaaatgttcagcttgccggaactgttctcatcattctccggccaccgtcttcttccctcgccactcctcaacattctctcctcgccattgctacgacccggnttgtcgttagtacctaaacccgatcgagctccgatatgaaccatacccgatccatccacggtcatac

SEQ ID NO: 158092 - DNA, 354 bp, Arabidopsis thaliana columbia
gtggactttttgagtctgacgctgcattgactatgaatcctgcggcattggctcaggtcaaacgcttcgccggaggatcggagcaagagttctttgctgagttctccaactccatggagaaaatgggaaggattggggtcaaaacagggtcggatggggagattcgaagaacatgtgcatttgttaactaaaagtgtttcttactttttctttcgcaacttttttgttttggtttaaatatcttttatattgggttttatgttccttttgtcaacttttttgggtgtttggaagaatttcgagatatgtattattgtatgtggtgaatatgtgaatttcaaataaaattcacgt

SEQ ID NO: 158093 - DNA, 309 bp, Arabidopsis thaliana columbia
atcggattttctttctaagactcaaaatatctaaaaacaataatggctttttggtctgctgagaatgctactaaagcctatcttagtacattgaaaacggatcaaaggacaaaagaaccaaacgtcgccgaattcatatcagccctagccgccggaaatagcgctagaaagatagccgtggcttgcgccggagcagcaaacgccgacatactcgttgcactaatcgcagcggctaaccaaacgcgtggtcaagttgtatgcgttttacgtggtattcgaagaactaataatatccaaaaaaatgtggga

SEQ ID NO: 158094 - DNA, 341 bp, Arabidopsis thaliana columbia
caagtagaaactttaaaacgagagagagagaaagaaatggcgacatcgggaacgtacgtgacggaggttccgttgaaaggatcggcggagaaacactacaagagctggaagagcgagaaccatgtcttcgctgacgccattggccaccacatccaaaatgtcgttgttcacgaaagcgaacatgactctcacgggtctatcaggagttgggactacacatatgatggaaagaaagagatgttcaaagagaagagagagatagatgatgagaataaaacattgacgaaaagaggactggatggtcacgtgatggagcatctcaaagtatttgatatcatcta

SEQ ID NO: 158095 - DNA, 284 bp, Arabidopsis thaliana columbia
ataaaatcagaattacaaacaaaaatggttttgcaaaagcttcctctcattgggctgcttttgctcctgaccatcgtcgcctctccagcaaatgcagatggacctgtttgcccgccgtcgaacaaactaagccgggcaagtttccctgaaggttttttatttggcacggctactgcggcataccaggtcgaaggtgcgattaatgaaacttgtcggggaccagccttatgggacatctactgtagaagatatccagagaggtgcaataacgattacggcgatgt

SEQ ID NO: 158096 - DNA, 355 bp, Arabidopsis thaliana columbia
  unsure (1)..(355): unsure at all n locations
caaaagtacagtttctttattcccttttttgttcactttaaacatcatcactcttgaaacacttcaaatctccggtcaacaaaaaccatgacttcaatttcttaaacaaaaagtttcaatctttttccaaacaaaacccatttcagattttgttctttgagaaaccaacatgagaaagacttctgtttcatctaatagctttggtgggtttttaagtcccggagctccgagttacgctgacaacaaaggttggagctccgagagagttcctcatncttccttcactacttnctnctttgcaattaacgtggtcgtcgtcacatcggctcttcttccgcttaacgacgccgtttac

SEQ ID NO: 158097 - DNA, 298 bp, Arabidopsis thaliana columbia
caaaaaaaaaaaacatccaacaccaaagacaatggagatgagtttgcgtctcgcttcatcttcaacctcaaacccaatttgtctactaaaccctggaaaaaaccttaatttcccaatccgaaaccatagaatccctaaaacttcgaaacccttttgcgttaggtcttcaatgagcttgtctaaaccacccagacaaaccttatctagtaactgggatgtatctagcttctccattgattccgttgctcaatctccttcaagactcccaagtttcgaagaactcgataccaccaacatg

SEQ ID NO: 158098 - DNA, 208 bp, Arabidopsis thaliana columbia
ggagaattaagatttttaactttaaacgagagtttcgtttatttactcaaaaattgagcttgtgaaatctctatttgaatttcggggaaaaaaatcctaagtaagggaatgcagagagatggtcggagtatcgccggtgaagactaagctgtgtgatcggtttaaccgatccggcggcggcaggaaattgccacccggaaacacgtcg

SEQ ID NO: 158099 - DNA, 363 bp, Arabidopsis thaliana columbia
gcaagctgagatttctggaactgaaggctaaaaggacacaccgtttcatagtttacaagattgaggagaagcagaagcaagttgttgttgagaaagttggtcaaccgatccaaacttacgaggagtttgcagcatgtcttccagctgatgaatgccgttacgccatttacgattttgactttgtaactgctgagaattgccagaagagcaagatcttcttcatcgcgtggtgtccggatattgctaaggtgagaagcaagatgatctacgcgagctccaaggacaggttcaagagggaactagatgggattcaagtagagctacaggcaactgatccaacagaaatgggatttcgatgttttc

SEQ ID NO: 158100 - DNA, 391 bp, Arabidopsis thaliana columbia
aaaactgcgcgaagaaagctaaacggggcgtgttgttcccggcgaagaagacgaagagagatacgaaaatggcgactaatggatctgctagctcagcgcagctctctcagaaggaagctgatgtcaggatgatgtgtgccgctgaggttcatcttggaaccaagaattgcaattaccagatggagcgttacgtcttcaagagacgcaacgatggtatttacatcttcaaccttggcaaaacatgggaaaagctccagatggctgctagagttattgatgccattgagaacccacaggacatcatcgtccagtcagctaggccctatggacagagagctgtgttgaagtttgtcagtacactggagccaatgccattgcttgaagacacact

SEQ ID NO: 158101 - DNA, 153 bp, Arabidopsis thaliana columbia
caagaacgaaagttggggatatgtgataaaagttccttttttgaagtacttactaattgagagagttaagatgtcctgagttgtgtctgaataccccagagtttgttgaggcaaatatcgctgaagtttcatctataacctattgagaagttt

SEQ ID NO: 158102 - DNA, 126 bp, Arabidopsis thaliana columbia
cggacgcgtgggatgcttgggggctcgtttagagaaacaggcttccacggaagtgaccatttgggctagattgacccatgcaaatgttataaagtgtgttggagcgtgcaacgatacgtctggata

SEQ ID NO: 158103 - DNA, 382 bp, Arabidopsis thaliana columbia
ccagaatgcagcgagacaggcgcttgtacacgccagaaatgatgtcaacgctgccaccaacatccttcttgaagcacactctcactaaaccttctttactaggaagtttcagaaacattgttgattcgagatgaagacattgtacaacagaggtattcttctgctgcgttctaacaacggaaatggccttgcattgacgataatatgtccagtaaatgatctgatttacatcctctttatctttcttttagggtttcttttggcctcttttgtttgccgttgtagttttagaacaaagtgcctaggttatgttatgtaagtacagatttgaaaaaatatgaagaggcttatctgataaaatctactgatcccatttaccttt

SEQ ID NO: 158104 - DNA, 282 bp, Arabidopsis thaliana columbia
ctcggtgattgattttttcctagaaaaataaaatttcttcttaacgattgatcgattttggttttctatctttcgattctagatctagaattcaatttgtgaggtttggagatggcgagcgagctgatcaatcggcgacacgagacggatcaaccaaccgccgatgcttattacccgaaaccaatcaaaccatggttcacggtgactcgtccgatgcgttacatgctccgtgaacagagacttatcttcgttctcgttggcattgcaatcgctactttggtt

SEQ ID NO: 158105 - DNA, 351 bp, Arabidopsis thaliana columbia
  unsure (1)..(351): unsure at all n locations
aaaattccacaaagtttttcaaatggcgattgctttcaaatccggcgtcttcttcctccaatccccaaaatctcaaattggattccgccattcttctcctcctgattcatcgctttctttcaagagattcactcccatggcttctctctccacctcttctcctactctcggtctcgctgatactttcacacagctcaaaaaaacaaggcaaagtagcattcataccatatatcacagctggtgatccggatctctctactactgctgaagcattgaaagttcttgatgcttgtggttctgacataatcgaatngggtgttccttactctgaccctttagctgatggacctg

SEQ ID NO: 158106 - DNA, 390 bp, Arabidopsis thaliana columbia
aaagactcgagttgatatgtctagtactaaagatatgtcaactgtccaaaacgcaactccttttaacggcgttgccccatccaccaccgtgcgagttacaatcgtccaatcctccaccgtctataacgatactcctgccactatagacaaagcggagaagtatattgtggaggcggcaagcaagggagcagagctagtgttgttcccggaggggtttatcggtggctatcctcgaggttttaggttcggtttagcggttggcgttcataacgaagaagggcgtgatgagtttcggaagtaccatgcttctgctattcatgttcctggcccctgaagtagcaagatgggttgacgtggctagaaaaaaaccatgtgtacttggtaatggga

SEQ ID NO: 158107 - DNA, 228 bp, Arabidopsis thaliana columbia
caaaacacataattttggttcggtcttcttcatattttcaccgacacaaacccgtctgtgcctcttctctctcatttctatcaatttttctctacaattccccagtcgtcgaagaagctacagcttgcaatttgctcgtgttctcttccatcattccttggtaagagcctcttcatggcttctacgggtgattccaatttcttctcatccgtcccagctcttcacagt

SEQ ID NO: 158108 - DNA, 185 bp, Arabidopsis thaliana columbia
cccacgcgtccggaaattcgtaagtactatcaagaagcagaagatggcccaaaaggtggaagcacaaggagggaaaggagccaacctatgggacgatggatcgacacatgacgccgtgaccaagattcagctcgcagcaggcatagacggaattcaatatgttcagtttgattatgtcaagaacg

SEQ ID NO: 158109 - DNA, 184 bp, Arabidopsis thaliana columbia
acgggagaattaagatttttaactttaaacgagagtttcgtttatttactcaaaaatttgcttctgaaatctctatttgaatttcggggaaaaaaatcctaagtaagggaatgcagagagatggtcggagtatcgccggtgaagactaagctgtgtgatcgggttaaccgatccgtccgcggca

SEQ ID NO: 158110 - DNA, 381 bp, Arabidopsis thaliana columbia
tttgattccatttttattactgttactatcatccaaacccttggtatttgtagccatgagtcttgggtcagatctcatcaaccttaacctctcagactccactgacaaaatcattgctgaatacatatgggttggtggttctggaatggacatgagaagcaaagccaggactctacctggaccagtgactgacccttcgcagctaccaaagtggaactatgatggttcaagcacaggccaagctcctggtgaagacagtgaagtcatcttataccctcaagccatattcaaggatcctttccgtagaggaaacaacattcttgtcatgtgcgatgcgtacactcccgcgggtgaaccaatcccgacttacaaaagacacgc

SEQ ID NO: 158111 - DNA, 327 bp, Arabidopsis thaliana columbia
gcgtccgctccctcaattcttcatgatctaactactaagagatctgattcactttcttcacactctccgagggtcatcttcgcttcttccctagctcttatctggacacaatgatggacctaacgaaactgaagcctccacagatcactttttattgctcggcgttttccgtcttgctcacacttcatttcacgatacagcttgtatcgcagcatctcttccactggaagaaccctaaggaacaaaaggctatactcatcattgtgcttatggctcctatctacgccgttgtttcctttattggtttgttagaagtcaaaggaagtg

SEQ ID NO: 158112 - DNA, 145 bp, Arabidopsis thaliana columbia
agaacatagacactcgttttaacacacaagtcatcgggcggactggagctcacatcggtgcgttatcacatcgcgagaactcgagaccgagagttacacgggaagctcaccactgtctacaataaccactttactctttggagtt

SEQ ID NO: 158113 - DNA, 160 bp, Arabidopsis thaliana columbia
gcgacccatacgctacacccaaaaatggcttatctccggcgagctgccaccgcattggttctcattttgcagctgcatctcttactctctgtctcaaatgcacataacataacccgaatcttggccaaagaccctgatttcttcactttcaaccactatc

SEQ ID NO: 158114 - DNA, 398 bp, Arabidopsis thaliana columbia
ggacaaggatcgcattgagggagaaaggtgtttaatttgagtacagagaagaagatctaaggagcaagagtcctttgcttctccagatgaatccgattcacaagaagattcctgttctcatccacaatggtaaaccggttaacgaatctatcatccaggttcagtacattgacgaggtctggtctcacaagaaccctatccttccttctgatccttacctgagagctcaagctaggttctgggctgatttcattgacaagaagctgtatgatgctcagaggaaggtgtgggcgacaaagggtgaggaacaagaggcagggaagaaggatttcattgagatactcaagactcttgaatttgagcttggagacaaaccttacttagtggcgatgactttt

SEQ ID NO: 158115 - DNA, 339 bp, Arabidopsis thaliana columbia
  unsure (1)..(339): unsure at all n locations
gccataccgccgtantcgaagaagggccggtcacttagacctccgccganngtcctggggaactcggagcgtgccgtgtcttcgtattccctgcgtgttcccggtnggtggtacctcaaaccgtgctggtcannagctgcgttcggtaaccatgtnngtcgtggtggtcgtatgnttcgctccaactcaagatctggcgccgctggcaccgtcgtgtcaatgtcaacatgaagcgtcacgcaatcgtctcagctatcgctgcaactgctgttcctgcgcttgtgatggctcgtggtcacaagatcgagaatgttcctgagatgcctcttgttgtgagtg

SEQ ID NO: 158116 - DNA, 268 bp, Arabidopsis thaliana columbia
ctttttctcacttctcataaaaaaggtcattttaaaaaaaaatcagaaaccgtcaaaaagccgccgttgatatttcttccttgtggcttcttcaatggcgtcgttcgacgaagcacctcccggaaaccccaaagccggtgaaaagatcttcagaaccaagtgcgctcagtgtcacaccgtctagaaaggtgccggtcacaaacaaggaccgaatttgaatggattgtttggaagacaatcttgaacaacctccaggatattcttactc

SEQ ID NO: 158117 - DNA, 453 bp, Arabidopsis thaliana columbia
actgactatgaaagcggccagttgcacccaaaggatttgaaggacgctctgtcaaaagcgttgaataagatactgcaacctgttcgtgatcatttcaaaaccaacagccgcgccaagaatctgctcaaacaggtcaagggttacaaagtcaccagagtcataccaacagcttcatctacaaaggaggaggatctttccatcaacacatcagcatcttcttcggccgccggattacagatgagcgaggaggccgagatgaaatacaagattgtgaggagtattggtgaggaatgcatacaagaggatgagctgaagaatcttctagccaagaagcctgctcctatctggtacgatggttttgaaccatcaggaaggatgcacatcgcccagggagttatgaagggcaacaatgtgaacaaattgactttagctggttgtcaagtgaaaatttgg

SEQ ID NO: 158118 - DNA, 409 bp, Arabidopsis thaliana columbia
ctttgacaatggctgaagatgaaatagtagtcgaagaagagcaatcacagccacaggagattactccagttccaccatcttcttcgtcttcgccttcgttagtggtggaagacgacgatgagatgaagctcaagcacttggaattcattcaagtcgcggcggtttacttcgccgcctgtttctcgaccctctacgagttggctaaagacaacgctggtccactcaaactcggcgtcgagaacattgaagattgcgttcgaaccgtgcttgctccattatacgaaaaattccacgacgttcctttcaagcttctccttttcgtcgatcgtaaggtggacgatgtgttctttgatgttgagacatatgttccgtcattggtgaagcaagcctttagccaagcgctcacggt

SEQ ID NO: 158119 - DNA, 448 bp, Arabidopsis thaliana columbia
  unsure (1)..(448): unsure at all n locations
atcgattctcgtctctctctctttcatcgcagcgaataatccaaatcgaaagcaatttctctcgacgaagaaaagagaagcaatcggagtctgtggaggtaaagaagtacacgatcaaatttcaagtcagagtttcggggaaaaaaaaggaatgggggatcatctggtgagagctgaggaattcgagaagaaagctgagaaaaagctcaatggatggggaatattcggatctaagtacgaggatgctgctgatctgctcgaaaaagcagctaattcctataagctcgccaaatcatgggatcaagctggaaaagcttatctaaaacttgccgactgtcacttaaagtcagatagcaaacatgatgctgctaacgcctatgctgaggctgctaaatgctacaagaaagntgacactaatgaggctgcgtcttgcctagagcgagcgggg

SEQ ID NO: 158120 - DNA, 271 bp, Arabidopsis thaliana columbia
caactctttataccagcctctgtaacgttcgatcatcttgtatttcatttcaaccactcattgtttttagtttgttttacgaagaatcaactatggcgacgaagagaagcgttggaactttgaaggaagcggatctgaagggaaagagtgtgttcgtgagggttgatctcaacgttcctttggatgataactgtaacatcaccgatgacaccaggattcgtgccgttgttcccaccattaagttactgatgtggtatggatctagggatgt

SEQ ID NO: 158121 - DNA, 454 bp, Arabidopsis thaliana columbia
cccacgcgtccgaacaaatcccaaagcttcagaggaagaagaagaagagagtgagaaacaatggcgtcgacgactctctcaatcgcaacaacaatccgttcctcttctcctctcacttccgcttccactcatcacttcctttccaaacccaccgcaatcgaattcccatttcgtctcagctcttcttctagccaccgtgcaatcaacctccgtcctatctccgccgtcgaagctccggagaaaatcgagaaaatcggatccgaaatctcctccttaaccctcgaagaagctcgtatcctcgtcgactatctccaagacaaattcggtgtctccccactctccttagcccccgcagcagcggccggtgcagctccagccgacggtggcgcggcggctgtagtggaggagcaaacagagttcgatgtggttatcaatgaagttccgagtagttctc

SEQ ID NO: 158122 - DNA, 390 bp, Arabidopsis thaliana columbia
ctcagctcaccggtgctgcattatcaaaactgcaggaaggatttggttgtgaagatggcatcgaagttgatacaagttcaatcaaaggcatgtgaggcttcaaagtttgtggctaagcatggaacttcctactacagacagctgttggagaagaacaagcagtatatccaggaacctgccactgttgagaagtgccaagagttgtctaagcagttgctctacacccgtcttgctagcattcccggacgctatgaaaccttctggaaggaagtatactacgcaaagtacctatggaagaacatatccggtctgatggtagaagttgcaggttttcgctgcatatgttttggtttcgaatgcttatgtattgatatttgctactattttaat

SEQ ID NO: 158123 - DNA, 356 bp, Arabidopsis thaliana columbia
gagattgagagagcgaagagaagccatcatcagccatggcgatgaagaatctactgtccctagctcgccgatctcagaggcgtttattcctcactcaagccacacgatcttcctcttcgttttcagctatcgattcggtgccggcttccgcatctccgacggctctatctccaccgccgccgcatcttatgccatacgaccacgcggctgagattataaaaaataagatcaagaagctcgagaatcctgataagaggttccttaaatacgcatctccacatccgatcctcgcttcccacaatcacattttgtcagctccggagactcgtgtcactaccttgcccaatggtctacga

SEQ ID NO: 158124 - DNA, 428 bp, Arabidopsis thaliana columbia
gaacgagctcgaagacccctctcagataagacctgttgttcgatcagcacttatgctctgctcatctgtttacataatgacaagtattttcgggttcctcttgtttggtgatgatactcttgatgatgtccttgcaaactttgacactgatcttggaatcccttttggttctatccttaatgatgcggttcgagttagctacgcgcttcatttgatgctcgtgttcccgattgttttctaccctcttcggattaacattgacgggctcttgttcccttccgctcgatcattatctacctcaaatgtgaggttcggttgcctcactgccggtctcatctttgtaatcttcttgggtgcaaactttatcccaagcatttgggatgcttttcaatttactggagcaaccgccgctgttttgtctggcttta

SEQ ID NO: 158125 - DNA, 453 bp, Arabidopsis thaliana columbia
accagagagaagccatgtctgtgaaactaaacctatcttcctcaatcctattgattctctttgcggcggcggcgagtaaagagatcggattcgatgaatctaatccaatcaaaatggtctccgacaatctccatgagcttgaagacaccgtcgtccagatcctaggacagtcccgtcatgttctatccttttctcgcttcactcacaggtatgggaagaagtatcagagtgtggaggagatgaagttaagattctctgtttttaaggagaatcttgatttaatcagatccactaataagaaaggcttatcctataaactctctcttaatcagtttgctgacttgacatggcaagagtttcaaagatacaagcttggagctgctcaaaactgttctgctactttaaagggtagccacaagatcactgaagctacagttccagacacaaaagatt

SEQ ID NO: 158126 - DNA, 454 bp, Arabidopsis thaliana columbia
  unsure (1)..(454): unsure at all n locations
gaaatttttcttagagaagaagaagaagaagcaaaatggccacaagcgcatcagctttgctctcaccaaccacattctccactgcaatctcccacaaaaaccctaactccatctcattccatggccttcgtcccctccgtctaggtggctcctcctccgccctacccaaactatcaaccaccgggagaaaatcctcctccgctgtcgtgagagctgagctaagcccttccatcgtcataagtctcagcacaggtctctccctcttcctcggccgtttcgtcttcttcaacttccagagagagaacgtagcaaaacagggcttaccggagcagaacggaaaaacccatttcgaagctggagatgatcgtgctaaggagtaacgcagtctcttgaaatcgaacgatccaattggattcaacaatggtgatggtcttgcttggngttctattggaca

SEQ ID NO: 158127 - DNA, 332 bp, Arabidopsis thaliana columbia
cgaagctctctcttttttttttgggggggctaaatctctcacgcacgacgttgagagagctctttcctttgcgaacttgttgtcttcctctgctcccgacggaattacaacccgctttaataagcattgtagttcaacttgaatttattggccgttgttgaagctgtgtaactattaacaattggggctatgcattcaacgattttctgctcgtgaagaaggaatataacttatttataaggtttcagtcttagacatgtcgtgttttgaatgcagtggttatgatgtctcaagttggcttattcatttttgctgaattgcattctttggaa

SEQ ID NO: 158128 - DNA, 451 bp, Arabidopsis thaliana columbia
ctcatactcgtcgatgacatctccaagctcttctccactcacatccctaccgacgtcgttttagccgcgcctgagtactgcaacgcaaacttcacgacttactttactccgacgttttggtcaaacccttctctctccatcacactatccctcaaccgccgtgctacaccgtgttacttcaacaccggagtgatggtcatcgagttaaagaaatggcgagaaggagattacacgaggaagatcatagagtggatggagttacaaaaacggataagaatctacgagttaggctctttaccaccgtttttacttgtcttcgccggaaacatagctccggtagatcaccggtggaaccaacacggtttaggaggagataattttagaggactgtgtcgagatttgcatccaggtccagtgagtttgttgcattggagtgggaaagggaagccat

SEQ ID NO: 158129 - DNA, 423 bp, Arabidopsis thaliana columbia
ggaattgtaatcctttcgacttctcaaggtataatgacagaccgagaagctcgactaaaaagaatcggcggagaaattttgtgttatatatggtaatccttctaatataaaaattagatatctgtaacttacaatttgtgaaaaaagggggttgtgtaataccacccctgttcaaaaaagtttcggatgttttacttcgaatgaaattaaagaaaaaatgaattaataaaagttttctttcttaatcacttccgaacggcatggttcgattttgtttagatactaaagatttttttttcgttcatgcttttgaaaggattcgacatatttttgtataggtatacctataggataaaaaggtaaaaattttgagtaagttcttacgtataagttaataaggggacagccattttgtagactcca

SEQ ID NO: 158130 - DNA, 456 bp, Arabidopsis thaliana columbia
gttgaaaccattagtaaagaaatcataaagccatcttcgccaactccaaataatctccaaactctccaactctcaatttacgatcacatccttcctccagtttacacagtagcctttctcttctacaccaaaaatgatttgatctctcaagaacacacttcccacaaactcaagacttctctgtctgaaaccctgaccaagttctaccctcttgccggaagaatcaccggagtaaccgtcgattgtaccgatgaaggagctatctttgtcgatgctcgtgtcaataactgtcctctcactgaatttctcaagtgccctgatttcgacgccctccaacagttgcttcctctagatgttgtagacaacccatacgtggctgctgccacgtggcctttgctgctcgtgaaggcaacttacttcggatgcggaggcctggccataggaatctgcatcact

SEQ ID NO: 158131 - DNA, 457 bp, Arabidopsis thaliana columbia
cgcatctccaaatcgaaatcgctctctgcctctcttcgtctccgtctccgtctccgtctccatctctgtctccggtaagtcactgaaagatggggcgtgttagaaccaagacggtgaagaaatcttcacgtcaagtcattgagaagtactactctcgcatgactcttgactttcacactaacaagaagatccttgaagaggttgccatcatcccatcaaagagactccgcaacaagattgctggattctccacccacttgatgaaacgtatccagaagggaccagtccgtggaatctcactcaagcttcaagaagaagagcgtgaacgccgtatggactttgttcccgatgagtctgctatcaagactgatgagatcaaggtcgacaaagagactcttgagatgcttggcttttttaggaatgtttgacacatccggcatctttgcagtctagccac

SEQ ID NO: 158132 - DNA, 146 bp, Arabidopsis thaliana columbia
tcgaccacgcgtccaaccggaatgtaagcagcagtgaagaagtgaagaatcttggcttagttatgatgaagaagaagagtgaagagtgtctttgagccgaggttgtgtttctttaatttgcagagtcatggtccggtttattatat

SEQ ID NO: 158133 - DNA, 430 bp, Arabidopsis thaliana columbia
cgatagggtgagagaggaagagatccaaggaggattcgataaaatggctccaagatccgattcgcaaaccggctccagtgtatcagacggttcagatcaatcctcaatggatccaatattccaccttctccgaatcgtcccattctcatttctccgaccaccgcgcctccgtctgaagattccatcgttcacgcttccttctccgatgactgtatacgctctaattctccttacctactttttagtagtctccggtttcgtctacgacgtaattgtcgagcctccgggtatcggatcaactcaggatccgactactggaactattcgacccgttgtgtttatgtcgggtcgggttaacgggcaatatatcattgaaggtctctcttctggattcatgttcgttctcgggggaattgggattggtatgctt

SEQ ID NO: 158134 - DNA, 412 bp, Arabidopsis thaliana columbia
attctctcttttggacctttcatggctatgtttctctgcaatggaagtccaagctcgtgatcaccaacaccgacacgctaatggctattggagatagagctatgtttactgttttgcttctattcattgcttcgatctctggattctctgttgttcgttgtgttactgatccatctgatgttcaagcccttcaagttttgtatacttcactaaatagtccttcacagctaaccaattggaaaaatggtggtggtgatccatgtggagagtcatggtaagggatttcttttgagggctttatagtttgttatttatttttttatctttatctaaatatatactaatttctctgtgtatttttttttttttttcattataatttattaatatttactcgttttttctatatttt

SEQ ID NO: 158135 - DNA, 397 bp, Arabidopsis thaliana columbia
gtagctccttttttctctatctcgctttctctgtttcaccacagtcatggcgagtcggcgaatcttatcatcgcttctccgttcttcttcgagtagatctacttctaaatcctccttgatcgggagccgaaacccgaggcttttatcccccggtcccgcgcatggagccgctccatgtgggactctccttggccgagtcgccgagtattcgacttcttctccggctaattcggctgcaccatcttctgctcctgctaaagatgagggaaagaagacctatgattacggtggcaaaggcgcgatcgggcgtgtgtgtcaggttattggtgccattgttgatgtgagattcgaagatcaggagggattgcctccgatcatgacatctttcggggtacag

SEQ ID NO: 158136 - DNA, 340 bp, Arabidopsis thaliana columbia
aaataattgagttttttttttaattagaaacaaatggggttgagtggtgttcttcatgtggaggttgaggttaagtctccggctgaaaagttctggatagcccttggcgaccgcatcaatctcttccccaaagctttccctaacgactacaaaaccatccaagttctagccgtcgatggcaacgctcctggctccattcgcctcattacttatggagaaggatctccactggtgaagatatcgtcggagaggatcgaatctttgcatttttagaacaaaagcatttcttacagcattatttgctcaaaaatttttgagtactactataccttcaaagtaa

SEQ ID NO: 158137 - DNA, 459 bp, Arabidopsis thaliana columbia
caaatctagggctttctttgtctttggtgactctctcgtcgacaatggaaacaacgactacctcgtcaccactgcccgtgccgacaattacccgtatggtatcgactacccgacccgtagacccaccggacgtttctctaacggccttaacattcccgacattatcagtgaggctataggcatgccgtcgactttgccgtaccttagcccgcatctcaccggagaaaatcttctagtcggtgctaattttgcctccgcaggaattggaatcctcaacgacactggaattcaattcgtaaacataattagaatttctaaacagatggaatacttcgaacagtaccagctacgagtgagtgcattgatcggaccagaagctacacaacagctagttaaccaagctcttgttctaattacacttcggggtaatgatttcgtcaacaattattatctaattcc

SEQ ID NO: 158138 - DNA, 252 bp, Arabidopsis thaliana columbia
cgaaagtctcaacctttttcttatcctcaacaaggagaaatggcggcgactcaacttacagcgtcaccagtgactatgtcagcaaggagcttagcctcgctggatggtctcagagcttcgagtgtcaagttttcatctttgaaaccagggacccttagacagagccaggtccgtccgttggttgtcaaagctgcttctgttggtgcccctaagtatacttcaattaagccattgggagatcgagttttggtg

SEQ ID NO: 158139 - DNA, 445 bp, Arabidopsis thaliana columbia
caaccaaacactcatttctccacatcttgagagaaaaaaaaacagagcaagtatattagagatctcatggcgatggcggtctccggagctgtcctcagtgggcttggttcttcgttcctcaccggaggcaagagaggtgccaccgcattggcaagcggcgtaggcactggagctcagagagttggcaggaaaactcttattgtcgctgctgcggctgctcagcctaagaaatcttggatccctgccgttaaaggtggtggcaacttccttgaccctgaatggctcgatggctcgctaccaggagatttcgggttcgacccattgggtttggggaaagacccggcttttctgaaatggtacagagaggctgagctgatccatggccgatgggcgatggcagcggttcttgggatcttcgtcggtcaggcctggagcggtttggcat

SEQ ID NO: 158140 - DNA, 459 bp, Arabidopsis thaliana columbia
  unsure (1)..(459): unsure at all n locations
caatcacaacactcgccactgtttcgaatagatggcttctatttcaaccccttttccgatttctctccacccaaaaaccgtacgatcaaagccgttgaaattccgagttttgacccgtccgatcaaagcttccgggtcagaaactcctgatctaaccgtagcgacacgaaccggatccaaagatctcccgatccgaaacataccgggaaactacggtttaccaatcgtaggaccaatcaaagaccgttgggattacttttacgaccaaggagctgaagagttcttcaaatcacgaatccgtaaatacaactccacggtgtacagagtcaacatgccaccgggagcttttatcgccgagaatccacaagtcgtggctttactcgacggtaaaagctttccggttttatntgatgtcgataaagtcgaaaagaaagatcttttcaccggtacttacatgcc

SEQ ID NO: 158141 - DNA, 205 bp, Arabidopsis thaliana columbia
ctcgtgccagccactcgcatttctccagattttattatccttcctcgaaacaagagcttagctaagatgacgaagaactacccaaccgtgagcgaagattacaagaaggctgttgagaagtgcaggaggaagctcagaggtttgatcgctgagaagaactgtgcacccatcatggtccgactcgtatggtactctgctggatact

SEQ ID NO: 158142 - DNA, 340 bp, Arabidopsis thaliana columbia
gctgcattgggtttccatgaagaaagaataggtgatttgatcgtaagggtggctagagatgatcctgacgccagtgccaagcttgaccggaagagcgatgggacccaggttctggagatttctcaggaagagcttgctcaaaggaatttgcttaaagggatcactgctgatgagagtgcgacagttcatgatacgtctactttgggggtggtggtttttcaaaatttttattcttttaaatattttttaattttatattacttctatacttttttttatttttttaaattttctattttttttactacttttatttattttttattatcttattttttat

SEQ ID NO: 158143 - DNA, 249 bp, Arabidopsis thaliana columbia
aactaattaatattcaaaaagatggctcaaaaagtggaagcagggggtggcgcccgaggagctttatgggatgatggggtccacgatggcgttagaaaggggcatgtaaggcaaggccaaaaatgtgggtcatctatcaacgtcgtgtatgccaaggacttctaagatggtgaaggaggtgaacacggaaagaaaacgttacttggatttgaaacgtttgagggtgatgcaaacgactacatagtagca

SEQ ID NO: 158144 - DNA, 200 bp, Arabidopsis thaliana columbia
cttcttcttctgctttctcccctgaatccttaccgatcagacggatcgagctgtgtttccgaggagctatatgtgccgccgtacaaagaaactacgaagaaacgacctcctccgtggaagaggcagaggaagatgatgagtcatcatcatcgtacggagaagggaacaagaacattggaagccgaacgggggaggaagga

SEQ ID NO: 158145 - DNA, 374 bp, Arabidopsis thaliana columbia
accatctcctcgttttgataaaaatctctgaatctctccaagctctcttctcatcaaaccatggatccttacaagtatcgtccagctagttcttacaactctcccttcttcaccaccaactctggtgctcctgtatggaacaacaactcctccatgaccgttggacccagaggtcctatccttcttgaggattaccatctcgttgagaagcttgccaatttcgacagggaacggattccagagcgtgtggttcatgccagaggagccagtgctaaaggtttctttgaggtcactcatgatatctctaacctcacttgtgctgactttctccgagctcccggtggtcagacttctgtcattgttcgggtcttcac

SEQ ID NO: 158146 - DNA, 449 bp, Arabidopsis thaliana columbia
cctgaatacacttttctcatatatgcatctcccgtaggagattaccataaggtaagctcaggcttgaacctcaaagttgatcataagtatcaccgagcccattcaggtggaacggggggtgtcaagagctgcacaaactattctccagttgtgaaatcgttactcgaagcaaagtcagcgggtttctctgatgtcctgttcctggatgcagcaactggtagaaacatcgaagagcttactgcttgtaacatcttcattgtcaagggaaacattgtatccaccccaccaacttcaggaaccattttacctggagtcacgaggaaaagcataagtgagctggctcatgatattggctaccaggtcgaagaacgcgatgtatttgtggatgagctactagaggcatgagaagttttctgtacagggactgcagtggtcgttaatgtctgttg

SEQ ID NO: 158147 - DNA, 458 bp, Arabidopsis thaliana columbia
cttttgatctctttgacactaagaagaagcccaacaacatcaagctctatgtccgtcgtgtcttcatcatggacaactgtgaagacatcattcctgagtaccttgggtttgtcaagggtattgttgactctgaagatcttcctctcaacatctcaagagaaacattgcagcagaacaagatcctcaaggtcatccgcaagaaccttgtgaagaagtgtcttgagctcttctttgagattgctgagaacaaggaggactacaacaagttctatgaggctttctctaagaacctgaagctcggtatccatgaggactcccaaaacagaaccaagattgctgagttgctccgttaccactcaaccaagagcggtgatgaattgaccagtctcaaggactacgtgacaaggatgaaggaaggtcagaacgatatcttctatatcactggtgagagcatgaag

SEQ ID NO: 158148 - DNA, 457 bp, Arabidopsis thaliana columbia
gaaaagagtcagagaaaaaaaaaatcaaggaagatgagtagcattggaactgggtacgatctctccgtcaccactttctctcccgatggccgtgttttccagatcgagtacgccgctaaagctgtcgacaacagtgggactgttgttggaatcaagtgcaaagatgggattgttatgggagttgagaaacttattgcatcaaagatgatgctaccaggttccaacaggagaatccattctgttcatcgtcatgctggcatggctgttgctgggcttgcagctgatgggaggcaaattgttgcgcgtgctaagtctgaagcacgaagctatgagagtgtttatggcgatgctgtacctgtgaaggaactttctgagcgtgttgcaagttatgtacatctgtgtaccctgtattggtggctcatgctctttggctgtgggtttatttttggaggttatg

SEQ ID NO: 158149 - DNA, 228 bp, Arabidopsis thaliana columbia
cactgaggtaagttgttgagatgcaccacgagtctcttttgaggcacttccgtgacaagtggattaatgtaagaatgtgctgtaaggatcttagagaggatacgttgctttaactccaagatgatccaactaagggtgccgccaacttcaccttccaggtcattattatgaaacacccttggcagattggtaaaggttaccccccagttcttgattggcacaaccttt

SEQ ID NO: 158150 - DNA, 446 bp, Arabidopsis thaliana columbia
taaaaatatgaaaattaacatcagagattccaccatggtccggcctgccaccgagacaccaatcactaatctttggaactccaacgtcgaccttgtcatccccagattccatacccctagtgtctacttctacagacccaccggcgcttccaatttctttgaccctcaagtcatgaaggaagctctttccaaagcccttgtccctttttaccctatggctggtcgcttgaagagagacgatgatggtcgtattgagatcgattgtaacggtgctggtgttctctttgttgtggctgatactccttctgttatcgatgattttggtgattttgctcctacccttaatctccgtcagcttattcccgaagttgatcactccgctggcattcactctttcccgcttctcgttttgcaggtgactttctttaaatgtgggggagcttcac

SEQ ID NO: 158151 - DNA, 433 bp, Arabidopsis thaliana columbia
aaaagatgtggctctcctctgggatctccacgtttctctggttatacaccagaattatagggttcaatcccgctacaggaggcaataacttttagctttcatacgggtctgggcttgggtcatcaggaggtttatgggtagcttttacagctggtcttctttgcttttctatttcaggagaaacccggggtaacgggtggtcatctctcgatgaaaccaatcttgagttgctaaataaatgggctttcgaaggcgaaaagatcatccatgggaaaccttctgggatagacaacaccgtcagtgcatacggcaacatgatcaagttctgctcaagcgagataactcggttacaatccaacatgcctctgagaatgctaattaccaacactagagttgggcgaaacacaaaagctctggtctctggtgtgtcaca

SEQ ID NO: 158152 - DNA, 455 bp, Arabidopsis thaliana columbia
ctttggataacaatatcccaaactgaaaatggctaagtcatatggagctatcttcctcttgaccctcattgtcctcttcatgcttcaaaccatggttatggcctcaagtggatctaatgtgaagtggagccagaaacgttatggaccaggaagcctgaaacgtacccaatgcccatcggaatgtgataggaggtgtaaaaagacacagtaccacaaggcttgcattacgttctgcaacaaatgctgcaggaagtgtctctgtgtgcctccgggttactatgggaacaaacaagtttgctcctgctacaacaactggaaaactcaagagggtggaccaaaatgcccttgaaaaaatctccctttgttccctttttataataaaaaatttcaactataactaaaatttccttggtcaatgttttatctactttattcctaatggttgaatgtatgtc

SEQ ID NO: 158153 - DNA, 199 bp, Arabidopsis thaliana columbia
attcaaagagtattacaatggagatactttgtcttcttatgattaccctctcttccctaattacatggctaatactcagtcttctaaagccaaggctcggtctcaaagtgcgccgaagcagagacctcctgagatctatgagaagcagatgagtgggaggagaagatcttggctggaagcaccggggaataacggtgtt

SEQ ID NO: 158154 - DNA, 139 bp, Arabidopsis thaliana columbia
ctttaagacagctaaaactaaatacaaagaaacatagatgggtttggttacagaggaggtgagcgctaatgcagatatgtacacctgaagacagatatctggctagaagagcgcctgatcagtcacctacttagatcta

SEQ ID NO: 158155 - DNA, 357 bp, Arabidopsis thaliana columbia
cgttgagaaaaaaaaaaaagtaagaacgagagagttaaagccatgtctgcgaaaacaatcctatcatcagtagttttggtggttctcgtcgccgcatcagcagcggctaatatcggattcgatgagtcaaacccgatccgaatggtctccgatggtctccgggaggtagaagaatctgtttcccagatcttaggtcattctcgtcacgttctttctttcgctcgcttcacttaccgatatggttaaaagtatcagaacgtgttcggagttgttgctcctattcttctttcttatggtgttttctttttttgtcatatcctccatttttaaatatttttttttttttttttatttttt

SEQ ID NO: 158156 - DNA, 457 bp, Arabidopsis thaliana columbia
ccaagtaatcctaactatacaaaacacataacaatatggctccttcaacaaaagttctctctttacttctcttatatgtcgtcgtgtcattagcctccggtgatgagtccatcatcaacgaccatctccaacttccatcggacggcaagtggagaaccgatgaagaagtgaggtccatctacttacaatggtccgcagaacacgggaaaactaacaacaacaacaacggtatcatcaacgaccaagacaaaagattcaatattttcaaagacaacttaagattcatcgatctacacaacgaaaacaacaagaacgctacttacaagcttggtctcaccaaatttaccgatctcactaacgatgagtaccgcaagttgtacctcggggcaagaactgagcccgcccgccgcatcgctaaggccaagaatgtcaaccagaaatactcagccgctgtaaa

SEQ ID NO: 158157 - DNA, 430 bp, Arabidopsis thaliana columbia
ggaaaccattgatgcagacctcaatccatctctaacaccactgatctatctacttaggtcttctctaacaatacttgtaattttctttctttttgcttcttccgtcactacatctatggccgctgagtcttctaaccctcgcaccgtcgaagagatcttcaaggattttagcggtcgtcgctccggttttcttcgagctctctccgtagatgttgacaagttctactctttatgcgatccggaaatggagaatctgtgtttgtacggacacccgaatgggacatgggaagtgaatcttccagctgaggaagtgcctccggagctacctgagccagctcttggaatcaatttcgctagagatggtatgcagcgtaaagattggctctctttagttgctgtccacagtgattggtggttactctctgtttct

SEQ ID NO: 158158 - DNA, 462 bp, Arabidopsis thaliana columbia
  unsure (1)..(462): unsure at all n locations
gttgattccatacgatctccaagtcttgtcgttgcagaatctctaagaagctaacgaaaatggtccttcaaaacgatattgatctgcttaaccctcctgctgagctcgagaagaggaagcacaagctcaagcgtcttgttcaatcacccaattcgtttttcatggatgtcaagtgtcaaggctgctttaacattacgactgtgttcagccactctcagaccgttgtgatgtgtggaaactgccagactttgctctgcacacccacaggagggaaggcaaagctcactgaaggatgctctttcaggaaaaagtgagactgaagaagaagatatgactccattccattcactcacccacaaattttcttttcgtttattatgaatttttgttgatattngagctagtagtaacccttctttgtcgattatcctttgttttaatcagcgaagcttgttccttttt

SEQ ID NO: 158159 - DNA, 453 bp, Arabidopsis thaliana columbia
cacttccacaagcctatcctgggaagagtcttgctctagaacccggaaatccgcagaatccctctcttttcggtgttgatcccgactctggactcttcctccccagtacggttccccgctttgcttcttcatcaggagatgctgaagcttcccctatgtcactaacagattcaggatttcagaattccttatatagctgcatgcaagacacaactcatgagttattgcatggagctggacagattaactcgtccaaccaaaccaagaactttgtaaaggtttataaatctgggtcggttgggcgttcattagacatctcccgattcagcagctaccacgagctgcgagaagagttaggggaagatgtttgctatcgaagggttgttggaagacccccttagatcaggctggcagcttgtattcgttgacaaggaaaatgatattcttctcctt

SEQ ID NO: 158160 - DNA, 436 bp, Arabidopsis thaliana columbia
caggaactgtgaccccaatggacctctcatgctctacgtatccaagatgattccagcctctgacaagggtagattctttgccttcggtcgtgtctttgctggtaaggtttctactggtatgaaggtcagaatcatgggtcccaactatatccctggtgagaagaaggatctgtacactaagagtgttcagaggactgtcatttggatgggtaagaggcaagagacagtggaggatgtcccttgtggtaacactgttgctatggttgggctggatcaggtcatcaccaagaatgctacattgactaatgagaaggaagttgatgctcaccccattcgtgctatgaagttttatgtgacatctgttgtttgtttttaattatttttatgtttacattattttttacaattttttttttatttataattttattttatt

SEQ ID NO: 158161 - DNA, 332 bp, Arabidopsis thaliana columbia
tcgggcctggcggacttttttaatcttcggtcaaccattggccaaggggccggactttttaaccgtatcggcaagaaaagccaaaatctggttgacagggactaccaattccgtccgaaggtcaagattttcacttacaggggcctccgggggggccttaactctaactggtttgagaaaggagggggtcatgctggttgaggtggcaccccatacaagtacaagaatgctttggttgatgtaaaaacgacactgattctagtgttttgacaacagtcacacttaccgagatcctcccatcaacaaaagccattgccttcttcaaagtccct

SEQ ID NO: 158162 - DNA, 438 bp, Arabidopsis thaliana columbia
aaagaaacagagatgggtttggttacagaggaggtgagagctaaggcagagatgtacaccggagatgagatatgtagagagaagacaaagtgtttcctcaaggaaatatctatgcccaatggtttattaccattgaaggatatagaagaggttgggtatgacagagagtcaggtgttgtatggctgaagcagaagaagagcatcactcacaagttcacagagatagataagcttgtcttctatggaaccgaagtcacagtcattgttgagaccgggaaaatcaagaagctcactggagtcaaagtcaaggaactttttatttgggttactatcaatgagatctataccgaggaaccccctaccaagatcacgttcaatacatcgatcacactgttcattacttttccgttcacagctattatagttccaaaagaacct

SEQ ID NO: 158163 - DNA, 182 bp, Arabidopsis thaliana columbia
ccacgaggcaaagttacttgcggatgttgatcgtaaatgcaagttggtggattttgggaatgcttgttggacttataaacagtttacgagtgatattcagacaagacagtaccggtgtcctgaggttgctcttggctcaaaatactcaaccttagcggatattgggtcatttgcttgtattt

SEQ ID NO: 158164 - DNA, 366 bp, Arabidopsis thaliana columbia
atttcttttaaaaatgagaaagttgttggcatcgtcgtttagttcattactcgccgtcgttttcatttccgtcatctccgtcgtcagatgctgctctcctaaagatcagacggctctcaatgctttcaagtcgtcactgagcgaaccaaacctcggtatcttcaacacttggtctgaaaacactgattgttgcaaggaatggtacggtatcagctgcgatcctgattcgggtcgggtcactgatatttctctccggggagaatctgaagaccccattttccaaaaggcaggccggtccggttatatgttcggttcgattgatccagcattttgtgacttaaccgcacttactttcccttgttcttg

SEQ ID NO: 158165 - DNA, 301 bp, Arabidopsis thaliana columbia
cagatccttccaaggttctcgatcaatgttctgcagctgatgaaatcttctcaggcgcaacatggtctgcgtcatggtgactatgctcgctatcggaggtattgctccgcacgtttgaggaggttatacaagtccttgaaattcactcatggccgtggaaaatacactcgacgagccattcttgaatcaactgtcactgatgttaggttccttcatgtggttttctatatggcggaaagagcatggagccatgcaatggaaaaaagacagctaccagttggtcctaatgcacggcagcgga

SEQ ID NO: 158166 - DNA, 332 bp, Arabidopsis thaliana columbia
ttcttcttctccatttcgaaaagaagatgaaggtgatagataagatccagtcattagccgacgaaggcaaaacagcgttttccttcgaattcttcccaccaaagacagaagatggagtcgacaatctctttgagagaatggatcgaatggttgcttatggtccaacgttttgcgatatcacttggggagctggtggatctaccgcagatctaacgcttgatatagcttcgaggatgcaaaacgttgtttgtgttgagagtttgattcatcttacgagttctaacatgctttttgataagaaagatcattctcttgttactattttatctaat

SEQ ID NO: 158167 - DNA, 208 bp, Arabidopsis thaliana columbia
ggcgatgctttttcgacctcctccttcacaatgtagaagcttctctccttttgtcttcaactacagctccagagaagtttcttcgtcgtctcgtctctccttgaaaacctccggcgacgaagaaaactgggtttcacgtttccggtcgaaatctctcagttcggtgttttctggagctcttgctttcggattatctctatcacgcgtg

SEQ ID NO: 158168 - DNA, 281 bp, Arabidopsis thaliana columbia
caaccatggctttgtcctcccctgccttcgccggaaaggctgtgaagcctgccgcatcagatgtcctcggaagcggccgtgtgaccatgaggaagactgtcgccaagccaaagggtccatcaggcagcccatggtacggatctgaccgagtcaagtacttgggtccattctccggcgagcccccgagctaccttaccggtgagttccccggtgactacggatgggacaccggtggtctatccgccgacccagagacctttgccaggaaccgggagctagaa

SEQ ID NO: 158169 - DNA, 443 bp, Arabidopsis thaliana columbia
  unsure (1)..(443): unsure at all n locations
aaagcatctctatttttgttttcttcattcacaccaaaacaaganatcaaatttggtttgattgattgatacaaaagacttcttcagatatttacttcttcatttggagaagccgattaactgaaatgtcgatctccggcgcttgtgatgaagctgggactccacttctcgctgtcaccgtcgactacaggaacaaacccgccgtcaaatcttcctccggtggctggagatccgccggattcatcatcggtggtgaggttgctgagcgatttgcttactatgggatatcgtcgaatctgataacgtatttgaccggaccactgggacaatcgacggcggctgcggcggctaacgtgaacgcttggtctggaacggcgtcgttgcttcctctccttggtgcttttgtcgctgactcgtttctaggtcggttccggacaattctt

SEQ ID NO: 158170 - DNA, 415 bp, Arabidopsis thaliana columbia
accagatctgaacctcttccctttcctcgaaaatccttctaacatcatcatccatggcttcctctgatttcgatggaatccttttgggaatgggaaacccactcctcgacgtctctgccgtcgtcgaccaacagtttctcgacaaatacgacatcaaattgaacaatgcgattctcgcagaggacaaacatttgcccatgtacgatgaaatgagccagaagttcaatgttgaatacattgctggaggtgctacccagaactcaatcaaagtggcccagtggatgcttcaagttcctggggcaaccagttacatgggatccattggaaaggacaaatacggagaggcaatgaagaaggatgctacagcagctggtgtctatgtccactattacgaagatgaggcaacacctaccgg

SEQ ID NO: 158171 - DNA, 461 bp, Arabidopsis thaliana columbia
ctcttgcaaaccaacgtaaaacactaactaagagatcaatatggctggagtgatgaagttggcatgcatggtcttggcttgcatgattgtggccggtccaatcacagcgaacgcgcttatgagttgtggcaccgtcaacggcaacctggcagggtgcattgcctacttgacccgaggtgctccacttacccaagggtgctgcaacggcgttactaaccttaaaaacatggccagtacaaccccagaccgtcagcaagcttgccgttgccttcaatctgccgctaaagccgttggtcccggtctcaacactgcccgtgcagctggacttcctagcgcatgcaaagtcaatattccttacaaaatcagcgccagcaccaactgcaacaccgtgaggtgatgagcgacggtcaaatgaagctacttagcgatgtttcgaatattatataatcgatgagataata

SEQ ID NO: 158172 - DNA, 330 bp, Arabidopsis thaliana columbia
ataagaatatcaataatcatataaccaaagccaataacaccaaattccaaatatccatacaaagaagcaaaccccataaaatattgccccaaaccttttaacccaattattacgttgaagaagagaaatacaataacaaagatacatttattatctgtttctgtctttttttttcttttactcgggtgtccaaagatatatattgaagatagggtggttttcaagctttcctacgaagatgccgaaccgctttggtcggaccgccggattgaacatatgtcttacattttagacttggcgaccacaaggcttgtcccttcacccatttca

SEQ ID NO: 158173 - DNA, 325 bp, Arabidopsis thaliana columbia
aagtttctctgcagcttctcctcttctcagaaattagggttccgtctcaaattacgagcagatctcgtactctctgatgtctgaagatccggagtaccgttgcttcattggtgggcttgcttggacaacgtctgatcgtggtctcagagatgcctttgagaagtatggtcacctcgttgaggccaaggtggttcttgacaagttttctggtcgctcccgtggttttggattcatcactttcgatgagaaaaaagctatggatgaagctattgcagcaatgaatggaatggatttggatggtcgaactattactgtttgataaagt

SEQ ID NO: 158174 - DNA, 451 bp, Arabidopsis thaliana columbia
tggacggtggagcggaaggatctcagcagcctcactcttattctagccaacaagctcttcctcctcactcatccagatgttccagacatcgagaaagtccagctcaagtctgaggttttggatttcatcagatcccatggtatggctcctttgtacgaaaccctaattgcctcttcggtgctggatttggatcaaagcttgttagagtctatgcgggccgctaatgaagaggagcttaagaagctcgacgagaagattgcagatgcagaagaaaatttgggtgaaagtgaagttcgtgaagctcatcttgctaaggctctgtatttcatcaggattagtgataaggagaaagttttggagctatttaaatttacttgagtgtaaactgtatgttgtggactaaatattggcgttgcttttttttcatttcttttcacttttttttattttt

SEQ ID NO: 158175 - DNA, 418 bp, Arabidopsis thaliana columbia
cactttttgtttttgttaacactcacgtgaaagcttcgttcttcttcaaaccttttgaacaatttctccgatgccggtaaatcaccggtttacgtttagctaccggttactcttcctcatcttccttttgagtttcgaaacggcacagcgtttggtcaccggtgacccaaacgacgaagcatgcttgacgaatctccgtcagagtttagaagatccagctaataatctccgtaactggacaaaatccttcttcataaatccttgctccggcttctcttcttatcttcatggagtcatttgcaacaatggcagaatttacaaactctccttaacaaatctctctctccgtggctcaatctcttcgtttctctctaattgcacaaatctccaatccctagatctatcttccaaccagatc

SEQ ID NO: 158176 - DNA, 442 bp, Arabidopsis thaliana columbia
ctcctttcctttcattgtagttaacgaaaagattacgataatggcaacatcagctatccagcaatcctccttcgccggccaaacggctctcaagccctccaacgaactcctccgcaaggttggtgtatccggtggtggccgtgtgaccatgcgtcgtaccgtcaagtctactcctcaaagcatctggtacggaccagaccgtcccaagtacttaggaccattctcggagaatacaccgtcctacctaaccggagaataccccggagactacggctgggacaccgctggactctcggctgacccggagacattcgctaagaaccgtgagcttgaagtaatccacagcagatgggctatgttgggtgctctcggatgcacattccctgagattctctccaagaacggtgttaaattcggagaagccgtgtgggtaaaggcaggt

SEQ ID NO: 158177 - DNA, 462 bp, Arabidopsis thaliana columbia
agaaaatcagaaattaaattagagagagagcagagtgaatcaaaacttcaacttcacccaaaaagatgttcggagaacttagggatctgctcaccggcggcggaaatgagacgacgacgaagaaggtgaaaggaacggtggttctgatgaagaagaacgtcctcgatttcaacgatttcaatgcttcgtttctcgatcgtcttcatgaatttctcggaaacaaaatcactcttcgtcttgtaagctctgatgttactgattcagaaaacggttctaaaggcaaactagggaaggctgctcacttggaggattggatcacaacaatcacgtcgttaaccgcaggcgaatccgctttcaaggtcacgttcgattacgaaaccgatttcggttaccctggagcatttttgatcagaaacagccattttagggagtttcttctcaaaagtctcacacttgaagacg

SEQ ID NO: 158178 - DNA, 204 bp, Arabidopsis thaliana columbia
agcgaagaagttgttaaagaaagcgatgcacccatattctctgtgaaacctcaagttgctaagaaggctgccacagacttaaagtcgtagctttcaatgaataagatgctgccttctgacggaaatggcatccagctgcactattgacaaagctgggacttcacttatcgctgtcaccggccgctgcctaatacacctgccgct

SEQ ID NO: 158179 - DNA, 454 bp, Arabidopsis thaliana columbia
aaatctctctcgatctcaatttcgcaaaatggctgacaagaagatcagaatcggaatcaacggtttcggaagaatcggtcgtttggttgctagagttgttcttcagagggatgatgttgagctcgtcgctgttaacgatcctttcatcaccaccgagtacatgacatacatgtttaagtatgacagtgttcacggtcagtggaagcaccatgagcttaaggtgaaggatgacaaaactcttctcttcggtgagaagccagtcactgttttcggcatcaggaaccctgaggacatcccatggggtgaggctggagctgactttgttgctgagtccactgctgtcttcatctgacaaagacaggttttcttcttactttacttgttgttcctataatctgattccttttttttttttattttatatttcttccattttttacttttttttctccaa

SEQ ID NO: 158180 - DNA, 384 bp, Arabidopsis thaliana columbia
gagagaatcacgagggagaaggtgaatgcaacaatcgtcaacggtgcaattctgtcgaccgatgttgtcatgacagcccttgatctggatacaagtggctactatttcgagcagaggatgactatctgcacttacagtgcctgctgcgaggacgttactaatactgctctgaagaaaggatgagatcatcctgctgatgttgccacccaatacaagtacaagagtgctttgtttgatgtttaatttttcactgattctagtgttttttcttcggttacactttccttgttcttttcttttattatatgttattgtctcttattttgctcttatttatttcttctcctatcttttatatgcaattttttcaacttttctttatat

SEQ ID NO: 158181 - DNA, 428 bp, Arabidopsis thaliana columbia
cttcttcttccggacactgaacagtgagagcacccatcttcaacctcttcctgaacaagatgggaagcactgtgattttaagctcagatgatgaagattcagatattagtgaatctgaaatggatgagtatggagacaaaatgtacctaaaccttaaaggtgggaagctgaaagtgagactctcttctcaagcttttatctgtccttattgtccaaacaagaagaaaactagttttcaatacaaagatcttcttcaacatgcttctggagttggtaatagcaattctgattaaagaagtgcataggtgaaagcaagtcaccttgctcttgtcaaataccttcaacaggatcttgctgattcagcttcagaagcagagcctttatcaaagtgtcagaaaaacggaaactctattcaagagtgcgatcat

SEQ ID NO: 158182 - DNA, 375 bp, Arabidopsis thaliana columbia
atcgattcttcttcaaccatgtcttccttcaccttcaaattcgccgatgagctgattgctaacgctgcttacatcggaacacctggaaaaggtatccttgcggcagatgaatcaactggtactattgggaaacgtctcgctagcatcaacgttgagaacgttgaatccaacagacgtgctcttcgtgagcttctgttcactactcctggagctcttccttgcctcagtggtgttatcctctttgaagaaactctttaccagaagagctctgatggtacgccttttgttgatatgttgaagagtgcatgagttttgtctggtattaaggtggataagggtaccgatgtgcttgctgggaccaattgcgagactact

SEQ ID NO: 158183 - DNA, 468 bp, Arabidopsis thaliana columbia
  unsure (1)..(468): unsure at all n locations
tcgctttaacattttatatctaaaaccatttcatcttatgaatatcaacaacaatggcagaacaagaaactacgtcaaacataaacaccattaatgatcaagcagaagaagaaacaagaacaaaatctcagccattgatttcaggtctaccaaatgatatagctgagctttgtcttcttcgtcttccttacccataccatgctctatatcgctctgtttcatcttcatggaacaaaaccatcacaaaccctagattcctcttctccaagcaatctctttctatctcttctccttacctatttgtcttcgctttcaacaaatcaacggctaggattcaatggcaatcccttgaccttgcatcttgccccgtggttgttntacctcccatgccaaactctttcaccaaaatctcgtctcctcacgcactctcatgcgcgtcgatgccacgtcaggggaagctttttgtac

SEQ ID NO: 158184 - DNA, 459 bp, Arabidopsis thaliana columbia
aagttagtcaccaaaaaaaaaaaaaaaacacaaaaagtttcaatggccgcctccacaatggctctctcctcccctgccttcgccggaaaggctgtgaacctttcccccgcggcatctgaagtcctcggaagcggccgtgtgacaatgaggaagactgttgccaagccaaagggtccatcaggcagcccatggtacggatccgaccgagtcaagtacttgggtccattctctggcgagtcaccgagctaccttaccggagagttccccggagactacggatgggacaccgctggactttcagctgatcccgagacattcgcaaggaaccgtgagctagaagttatccacagcaggtgggctatgctcggagccctaggctgcgtcttccctgagcttttggctaggaacggagtcaagttcggagaggcggtttggttcaaggccggttcacagatcttt

SEQ ID NO: 158185 - DNA, 171 bp, Arabidopsis thaliana columbia
catttgataatgaagtctctcacttcattttgtttgggtgatgtaaaatgttgtcagtcgattttaggtgacccctaatcttatcgattattcttttgaaatcccctcatgtgaatcacgtaaaattgataaagtgatgatcaacttccttattttttaatactttatttg

SEQ ID NO: 158186 - DNA, 372 bp, Arabidopsis thaliana columbia
ggaagaaagtgtaaagacggagccttttacggcgaatggtaggaagacagagccaccatgaccggagctgtagccactcgagactcggtggaacccagcgaagacatactcatatgcgtcgatgttgatgcggaatcgacggtggagatgaagaccactggaactaacggtaagcctttgaacaggctcgagtgcctcaagctagccattactcgctttatccacgacaagctctccagaaattccgatcatcgctttgctttcgctaccctctcccagtcagccgcttggcttaaaaaggaattctccaacgatgctaaatctgctgctgcttctttaagagaaatgtcagctactagattctttggtcca

SEQ ID NO: 158187 - DNA, 295 bp, Arabidopsis thaliana columbia
aaattatataccctctatctaaagaagaagcagagaaatgggcagcaaagttgtacaccagtggagagagctcaacagaagctggaagcattctggattctcatttgaaaaccattctggagaatgttcggttagtttatctcttggaaagagacgtaggtggttgggatgctactaccaattgggaagacatattatctcttggagagcaacagagattaggcatggcacgtttattctttcacaggccgaagtttggagtccttgatgaatgcacaaatgcgacgagtgttga

SEQ ID NO: 158188 - DNA, 420 bp, Arabidopsis thaliana columbia
  unsure (1)..(420): unsure at all n locations
gagctcctcgaccatggcgtcttgtttacaagcatccatgaattctctgcttccacgctcttcttctttttctcctcatcctcctctatcttcgaattcatccgggagaagaaacttgaagacttttcgttacgcctttcgcgccaaagcctctgccaaaatccctatgcctccgataaatccaaaggatcctttcctctccacgctcgcttctattggcgggaattcttcggaaaagcttctcaatcggccggttaacgctgatgtgccgccatatcttgacatctttgactcccctcagctcatgtcttctcctgcacaggttgaaagatcagtggcttataacgagcaccgaccgagaactcctncaccagacttgccatctatgcttcttgacgggagaattggttacattggaat

SEQ ID NO: 158189 - DNA, 196 bp, Arabidopsis thaliana columbia
accacctccatattactcaccttctcctgtggtagactacaagtctcctccaccaccatatgtctacagttccccaccaccaccttattattctccttctccaaaggttgaatacaaatctcccccaccaccatatgtttacaaatccccacctccaccttcgtattcaccttctccaaaaactgagtactaaact

SEQ ID NO: 158190 - DNA, 300 bp, Arabidopsis thaliana columbia
cttgtctttttgagaggggaaagcagggaccagagggccttggaagccttacaccattaccaagcccaccccccataagaattcctttccccttttttttgggtaaaacctgcttttttgcttaaatttgcacaattgaaattttggggccaactttctgaacaaagctttttactttttgaaaaaacaaaaatctgggataggtttcctaaggggaaatgttgctagttacatttttatcgcttttgctgcttggaataaaatcgacgacgcaactccagtctgtctcgatgatttatc

SEQ ID NO: 158191 - DNA, 263 bp, Arabidopsis thaliana columbia
aaagagaaacgtatcattaccatattattgttggaagattgcgggaatataaacaaccagtctacacaaagagaactcaaagccaacaaaagaaacaagatataaaacatatgcaaagataaaatattaaaaaaaggcaaacacgttgattatacatgagtatacgtatatctatatatacgtatttaatgtttctcaagggtgtggaggcaacggaggccatttcccgaacttggggtggtgaatgtatttaagaggaagag

SEQ ID NO: 158192 - DNA, 244 bp, Arabidopsis thaliana columbia
tcttgaactggatccagtcaattaccaggaagaatgacttcaagttagaaagctttgcatcattggtggatggaaaggggatatggttcttgcttgactactattttcgtcaagaagtttgctgtcgatgtctacacagagaggatcctggtggtcatgaaggccctcaatcagtaatgtccaataccgattaccatgatgcagttcaaaattttattctgtcgtataagttgtcagcactttt

SEQ ID NO: 158193 - DNA, 84 bp, Arabidopsis thaliana columbia
tcttgaactggatccagtcaattaccatttttatttacttcaagttagaaagctctgcatcattggccgatggaaaggggatgt

SEQ ID NO: 158194 - DNA, 206 bp, Arabidopsis thaliana columbia
ttccgaggctacgacccacgcgtgcgctgtatttgtggtctacctattctactcatccgtgaccgtcagaattcaaactgctgctgttgaatcaccgaagcttacagtgaagtcatctctaaagaacttcggagtcgcggccgtagcggctgcagcttcaattgctttggccggaaacgccatggcaatagaagttctcttgggag

SEQ ID NO: 158195 - DNA, 229 bp, Arabidopsis thaliana columbia
gcctccaggtacggatctcgcaattccagccacgccgtccgatggaaattacggagccacccactttcatggggtttacactctaagttttttaaaccgcaaaggcacaacgaatgcttgaaataggggggggcccttattaccccttctcactatttttaaagcacttaacccgcactttaaccggggcagacaccttcattctttattggtcgctcgctggtctccc

SEQ ID NO: 158196 - DNA, 257 bp, Arabidopsis thaliana columbia
gtcaaagctgcttctgttgttgcccctaagtatacttcaattaaaccattgggagatccagttttggtggagatcaaaggggccgaggggaagaccttttgggggattttactttcattcactggtcaataaaaaccccaagggggggaaatcctttccccgggtgtaaggaaaaccatttggaaaaaccaaaatggtatcactgtcccttctggggcacaaaatatttactccaaatacccacggaccctgggggg

SEQ ID NO: 158197 - DNA, 300 bp, Arabidopsis thaliana columbia
  unsure (1)..(300): unsure at all n locations
ctctattcgtcgtcgacctattttcctcagccatggccgtcgggaaaaacaagagaatctctaagggtaggaagggaggaaagaagaaggctgttnatcctttctccaagaaagatcggtatgatgttaaggctccttcaatcttcactcacacgactgttgtatagacacttgtttccagaacttagtgttccatatttgcctcagaaggcttgaaacacagagttcttcgatttttctattttcatgttttctactcctatacattggtttactcttttcttgtattgtcttctcttt

SEQ ID NO: 158198 - DNA, 430 bp, Arabidopsis thaliana columbia
gagacaaagagagagagagagagagagagagatcttaacaaaaaaatgtctatatccatggcgttattctctccgccgatctcttcctcacttcagaaccctaatctcatccccaagatctcaacctctcttctctccaccaagcgtttctctctaatctccgtccctagagcttcctccgacaatggtacgacttcccccgtcgtggagattccgaagcctgcttctgtggctgtagaggaagttccagttaaatctccagccgaaagctcctccgcttctgaaaacggcgccgttggaggtgaagcgactgattcgagtactgagacggtaatcaaatatcagaatgcgaagtgggttaatggaacttgggatctgaaacaattcgagaaagatggcaaaactgattgggattctggtatcgtttctg

SEQ ID NO: 158199 - DNA, 289 bp, Arabidopsis thaliana columbia
cacaaatcaaggagaaaacttccacaaattgtctctctttctttcctacacaccaatttgttttgtgattctttcgattgcattcttctttttcgaattcccgatcactggattttcccgtttaaccggaaaatccagtggattagattttacccagtgttatctttttggattggattcgatgactgttacggaggacgaaaaaccggttcttgagctgctggtgagagttgtagacgacgatgagaaagggccttatgtgaaattgagtgaggtttttgagaacggt

SEQ ID NO: 158200 - DNA, 199 bp, Arabidopsis thaliana columbia
acttttgatgggtcttggacgcaaagcaaaccaggtgtacatcattgactatgggcttgccaagaagtatagagatcttcaaacacacaagcatattccatacagggaaaacaagaaccttactggaacagctcgatatgcaagggttaacacccatcttggaattgagcaaagtagaaaggatgatctggaatctcta

SEQ ID NO: 158201 - DNA, 212 bp, Arabidopsis thaliana columbia
gaaaaagaagagaaatgacagagaagaaagagatggaagtggtgaaagggctcaacgtggagagatacatgggccgttggtacgagattgcttatttcccattaaggtttcaaccaaagaacggcgtcgacactcgtgccatctacacccttaaccccaacggtaccatacacgtattgaaccaaacgtggagcaacgggaagaggggtttt

SEQ ID NO: 158202 - DNA, 198 bp, Arabidopsis thaliana columbia
gctgattcgttggagcttgatctctccgtggaaatgggtggtttccggtttcaccagtatcaagtggttgggagagcccttccgacaaaaaacgatgagcaccctaagatctacaggatgaaactttggggtagaaatgaaagatgcgccaaggccaaggtctggtactttatgaagaaactggaaaaaggggagaaa

SEQ ID NO: 158203 - DNA, 67 bp, Arabidopsis thaliana columbia
gtctcttctcaggtaactaattaatattcaaaaagatggctcaaaaagtggaagcagggggtggcgc

SEQ ID NO: 158204 - DNA, 428 bp, Arabidopsis thaliana columbia
  unsure (1)..(428): unsure at all n locations
gttagagtgcagaaggagcttgctgttgctgaatttgatggttattgtcaaggcgagcttgtcaaggttacattatcaggtaaccagcaaccaattcgcactgatatcactgatgcagcaatggagttaggttctgaaaaactttcactgctggtcacagaagcatacaaagacgcacattcaaagagtgtactggctatgaaagaaagaatgagtgatcttgcgcagagcttaaggatgccaccaggccttgatggnnttaagtnacaaaacttaatcttttttgtgatttctttcaacttataggtatggagaagccaagtctttttggtggatatcgatcaggcagagagaaatagagctctgttctactgaatcagagagaggaannagaacctttgtcttcttttgattatcaacaattactc

SEQ ID NO: 158205 - DNA, 408 bp, Arabidopsis thaliana columbia
  unsure (1)..(408): unsure at all n locations
gttctctcttccgtcaatatggaaggcgtcaccgtcgtgtctttcttccttcttttcatcgccaccgccatggccgccaagtccaccgtctccttccgtgacggcatgttaccaaacggagacttcgagctaggaccaaaaccatcagacatgaaaggaacagaaatactaaacaaactagcaataccaaactgggaagtcacaggattcgtcgaatacattaaatcaggacataaacaaggagacatgcttnctgttgttcccgccggtaaattcgctgtaagacttgggaaccaagcatcgatcaaacaaagacttaaagtggttaaaggaatgtattactcactcacttttagtgctgctagaacttgtgcacaagacgagagacttaacatatctgtagcacct

SEQ ID NO: 158206 - DNA, 391 bp, Arabidopsis thaliana columbia
gtccgcttctctgctctgctaagctctcagctagctgaaatctctctcaatccgtgtagcttagcttccctaatccaaccatggcaaagttcggtgaaggtgacaagagatggatcgtagaagacagacctgacggcaccaacgtccataactggcactggtccgaaaccaattgccttgaatggtctcgcaacttcttcaccaaacaattctccggcgttgatatcctctccggcgaagggaatcttttcatcaaagtcaagaagatcgagaaaggcgaaggcgaggcttatgtgaatgtgaggaaagggaagattatccctggcttccagcctaacggttttttattttgggaaggtgaggcgtaagaattcgatgggaagacgctttt

SEQ ID NO: 158207 - DNA, 328 bp, Arabidopsis thaliana columbia
aagaacaacaacactaagcaaaaaagaaaagctcaagccgagagagacaatggcatcaacattcacgagctcaagcagtgttcttaccccaacaacattccttggccagactaaagcctcaagctttaacccccttcgtgatggtgtctctctcggatctcccaagtacactatgggaaatgatctttggtatggacctgacagagtgaagtacttaagacccttttccggtcaaactccgtcttaccttaccggagaattccctggcgattatgggtgggacaccggccgtttattccgaaacccttgaagctttggcaaaaacaaa

SEQ ID NO: 158208 - DNA, 164 bp, Arabidopsis thaliana columbia
gtatcgcatctgtcaagtttgtgtatgacaagaacaaccagttggtactaggagaagagcatggaaagcatactttgcttggatacgaagagttcgagttggactatccgagtgaatacatcacagcggtagagggttattatgataaagtgtttggtagtgaa

SEQ ID NO: 158209 - DNA, 122 bp, Arabidopsis thaliana columbia
atgcactggtgagagtttcagcagttcttaccaatggacctttcatcttgaatcttgaatgtgatcattacataaataacagcaaagccttaaaaaaaagcaatgtgcttcctgatggaccc

SEQ ID NO: 158210 - DNA, 415 bp, Arabidopsis thaliana columbia
cgctttgtcgtcggaggcggcttcgatcgctcctgagatccgaagaaatgatgataacgtttctctaactgtcatcaaagctaaaatcgcttgtcatccttcgtatcctcgcttacttcaagcttacatcgattgccaaaaggtcggagcaccaccggagatagcgtgtttactagaggagattcaacgggagagtgatgtttataagcaagaggttgttccttcttcttgctttggagctgatcctgagcttgatgaatttatggaaacgctccttggatatattagtgaaatacaaatcggatctagcaagaccgtttgacgaggcaacgtgtttcttgaacaagattgggatgcagcttcggaacctatgtactggtgtcgagtctgccatgggagtttctgaggatggtgt

SEQ ID NO: 158211 - DNA, 445 bp, Arabidopsis thaliana columbia
gtcaaaatccccattctcaatcgctcatcgtcttgtagaactaattgactaaacaatggcggacaacacaggatccgagatgaaatcaggttcgtttatgttagagaaatccgccaagatctttgtcgctggacataggggattggttggatctgccattgtccgcaagctccaggatcagggtttcaccaatttggtccttcgaacccattcagagcttgatctcactagccaatcagatgttgaatctttctttgctacagagaaaccagtttatgtcatcctagctgctgctaaagtcggtgggattcatgctaacaacacatacccagctgatttcattggggtcaatctccaaatccagaccaatgtgatccaactctgttatacacacggtgggaagaaactcctctttcttggttcatcttgcatttaccccaaattt

SEQ ID NO: 158212 - DNA, 441 bp, Arabidopsis thaliana columbia
cgcaactgcagccaagaagaaagagatgaatttgagagatatgataaggttcaaaacatccgaccaaagatggtagctgaacttcgtgagcggtttgcacatcttaaccttactttctcaattgggggacagataagcttcgatgtcttccctaaagggtgggataagacttactgcttgcaatacctcgaggacttcagtgaaatccatttcttcggtgacaagacctatgagggtggaaatgactatgaaatctatgaatcaccaaaaacaattggccattcagttacgagtccagatgacacagtggcaaaatgcaagggcttggtcatgtcttgaaacactactcatctcaagaacacagtgtcaagagtttgattcttctttggcgaaatcttacaacttctgattacaagaaatggaaagaagtgtgttgaatgc

SEQ ID NO: 158213 - DNA, 374 bp, Arabidopsis thaliana columbia
cttttattatgatcaagcctgacggcgtccagagaggactcatcggtgaaggcatctgcaggttcgagaagacaggatccgtgatgaaggcctggtcgttgatcgttagagaaatgacccaagatctttgtcgctggacataggggattggttggatctgccttcagtggactcgttgactaccttggtttcacccctgtggttcttctgacccgtgcagagcttgatctcactagccaatcagatgttgaatctttctttgctacagagaaaccagtttatgtcatcctagctgctggtaaagttctgtgtagtcattcgaacgacccttacccactgttattcctttgggtcaatgtccaaatccagaccaa

SEQ ID NO: 158214 - DNA, 138 bp, Arabidopsis thaliana columbia
taactatcatgtattatctacctaccacttgttgctgcttgttttacctgtaataagatatcaatatcatcctgttccactaaaacttatccttaattatctataaactacaatacagctggttctgtatgtcacttc

SEQ ID NO: 158215 - DNA, 241 bp, Arabidopsis thaliana columbia
atttgctctctctctctcagatccgattcaagctttccgatttgcgatggacggtggagcggaaggatctcagcagcctcaccttattctagccaacaagctcttcctcctcactcatccagatgttccagacatcgagaaagtccagctcaagtctgaggttttggatttcatcagatcccatggtatggctcctttgtacgaaaccctaattgcctcttcggtgctggatttggatcaa

SEQ ID NO: 158216 - DNA, 423 bp, Arabidopsis thaliana columbia
gtacaacccaagagtgacctcttctcgcagaaagaacaggaaggctcatttcacagcttcctccagcgagaggcgtgtgataatgagctctcctctctccaccgatcttcgtcagaagtacaatgtcagatccatgccgatccgtaaagacgacgaggttcagatcgttcgtggtacttacaagggacgtgaaggcaaagttgttcaggtttaccgtcgcaaatgggtgattcacatcgagagaatcacgagggagaaggtgaatggaacaaccgtgaacgttgggattcagccgtcgaaagttgtgataacgaagcttcgtcttgataaagataggaaatcgcttttggaagagaaggctataaggacgtgctgctgctgataaggggaagggtactaaggttacgtctggagatgttatgc

SEQ ID NO: 158217 - DNA, 397 bp, Arabidopsis thaliana columbia
ataaaatcagaattacaaacaaaaatggttttgcaaaagcttcctctcattgggctgcttttgctcctgaccatcgtcgcctctccagcaaatgcagatggacctgtttgcccgccgtcgaacaaactaagccgggcaagtttccctgaaggttttttatttggcacggctactgcggcataccaggtcgaaggtgcgattaatgaaacttgtcgtggaccagccttatgggacatctactgtagaagatatccagagaggtgcaataacgataacggggatgtggccgttgatttcttccatcgttataagggagatattcaacttatgaagaaactaaacacagacgcctttagaatggctattgcatgggcaataatattttctcatgggagaa

SEQ ID NO: 158218 - DNA, 193 bp, Arabidopsis thaliana columbia
gacccagtggcaacttaattggggaacctttaggcttttgcggaatttaggcccgattttttgtggaagaaaaaaaattcaccttggtggaatctttcggattttcgggggatcatcaaaccttcttaaccaggttaaagactttgaagtatgggcgggatttccgggttttagttccctaggcccaaaaggc

SEQ ID NO: 158219 - DNA, 139 bp, Arabidopsis thaliana columbia
agagaacctaaaaagaagagaagagaaagagagatccgaaatgtcggtgacatcaacggtggaggagaaccaccagaaaaatccatcaacgccggcggcggtggaggagaagaagaagaggagatgggtgttttgggat

SEQ ID NO: 158220 - DNA, 195 bp, Arabidopsis thaliana columbia
gttggtggtggtgatctagttttcaaagaatcgtttttttcaagtgggttcttcttgataacctttcttcttctttgaaatgggttcttctgtggagcataacattcttgttactggtggtgctgtctttatcgggacgcatactgttgttcaacttttcaaagatggttttaaggtttttatcaattttttttt

SEQ ID NO: 158221 - DNA, 365 bp, Arabidopsis thaliana columbia
caagaaacacacttcggaagatggagatcactaacgttaccgagtatgatgcaatcgcaaagcagaagctgcctaagatggtgtacgactactatgcatctggtgcagaagaccaatggactcttcaagagaacagaaacgcttttgcaaggatcctctttcggcctcggattctgattgatgtgagcaagattgacatgacaaccaccgtcttggggttcaagatctcgatgcccatcatggttgctccaactgccatgcaaatgatggctcaccctgatggggaatatgctactgctagagctgcatttgtgctggaactattattgacctattttattgggctactttcattgttgtagtat

SEQ ID NO: 158222 - DNA, 443 bp, Arabidopsis thaliana columbia
aaaaaaaaaaaaacacaaaaaagtttcaatggccgcctcaacaatggctctctcctcccctgctttcgccggaaaggctgtgaacctttcccctgcggcatcagaagtccttggaagcggccgtgtgacaatgaggaagactgttgccaagccaaagggtccatcaggcagcccatggtacggatccgaccgagtcaagtacttgggtccattctctggcgagtcacccagctaccttaccggagagttccctggagactacggatgggacacagctggtctatccgctgaccccgagacattcgcaaggaaccgtgagctagaagttatccacagcaggtgggccatgctcggagccctaggctgcgtcttccctgagcttttggccaggaacggagtcaagtttggagaggcagtttggttcaaggctgtttcacatattc

SEQ ID NO: 158223 - DNA, 199 bp, Arabidopsis thaliana columbia
  unsure (1)..(199): unsure at all n locations
gggggatgttgacgctgctgcggttccttgtggttttggacgagcaattggtaacaagggtgctgtaggtgtgcgactcagaatgtattatcnaatactgtgctttgttaattgtcattttgctgcacatctagaagctgttaatcggcgaaatgctgacttcgaccatgtttatcgaacaatgaccttcttacgggag

SEQ ID NO: 158224 - DNA, 438 bp, Arabidopsis thaliana columbia
caaacttctctctgaatctcagtgaattctcataaaatgagagggatggtgagttttgccgtttgggctctctttgctgctttactctcacagcagctctttgcttctgttgcttccgtaaggtttgaggatgccaaaacatactacttatctcctccctctggctcacatggaactcctccatcacacacgcctccttcttctaactgtggaagtccaccttacgacccttcttcttcaactccttctcacccttcacctccatcacatactccaactccttccacttcatcacacactccaactccacacactccatcacacacgccaacttcacacaccccttcttttaactgtttaagtccaactttccaccctttcacgcctttacactctttcacttccttcgacccaacgccatcacacactccttttggt

SEQ ID NO: 158225 - DNA, 393 bp, Arabidopsis thaliana columbia
attgaaacgaccaactgctgatgaggcactaaatcatccatttttcagtatggctacgcaggcttcatatcctatccatgaccttgagctgaggcttgataatatggcggcgttgcctaatcttgagctaaatctctgggactttaacagagaacccgaagaatggtttcttggcttgacactagctgtgaaaccaaatgctcccaaactagaaatgctccgcaatgtatctcaagacatgagcgagaattttcttttttggcccggggtcaacaatgatcgagaaccatcaagtttctggtctctgctctcttctgatgaaaaccgccttcacgcgccaggtgaatcatctcccttatctttggctttcaatccaatgcagcaacacacagt

SEQ ID NO: 158226 - DNA, 269 bp, Arabidopsis thaliana columbia
aaaagattagggttagactcgatcattcatagctgcgactattctctgctctttctacattttctcattttctcttgggctacttttcgacttccaacaaatccaacggtggggggattggtgaaccagctcgtgtccagatctcttttcatcttcgggaaatggccaaaccaacaagttcggcgtcttaacatccacgagtatcaaggagccgaattggtggggaaatatggaggtaatgggcccgaaggaggagctgcttctttcgt

SEQ ID NO: 158227 - DNA, 200 bp, Arabidopsis thaliana columbia
cttctctgagaaaaaacaacagatccgaattttatctttaatcagccggaaaaaatggggaaagggatcgagagacaacgcggtttttttgagcattttccacccttttttttttttttggacaattaccagggttttctatttggctttggttggctgggttggggccaggcctgatattaaagggccctttttttttg

SEQ ID NO: 158228 - DNA, 390 bp, Arabidopsis thaliana columbia
ccaacatcttgttagacggtgaaatgtgcgcaagaattgcggatttcggattggtaagctcgaatgaaagggattcaagcaatagtgatagagaaggtgatgtgtatgactttggtattgttctacttgagatactaagcgggcgaaaagctatcgatagagagtctgatcctgcggggattgcggaatgggcggttcctttgatcaggaaaggaaaagcagcggcgataatcgataggaacatttgtttgccaagaaatgtatagccttttgcttaaattggctgagttagctgagcttgctgtgagggaaaattcgaatgaacgaccaaatatcagaaatattctgtgttttcttgatcttatcggtaagtcttgccttactttttaa

SEQ ID NO: 158229 - DNA, 250 bp, Arabidopsis thaliana columbia
gaatggttgatcaagttcagcaccccactattgcgcttaaagctgccgggcagttcatgcgttcaagtgtttccaaggacgttcaagtgggttaccagaggccttctatgtatcaaagacatgcaacctacggtaactactgcaatgctgcatttcaatttcctccgacatcccggatgttggcaacaactgcttttcccgtgtttgtccaaaccccaggagagaaggggttcacttaccttgtccttga

SEQ ID NO: 158230 - DNA, 395 bp, Arabidopsis thaliana columbia
acaaaaataaaatggagggaagcccagtgaccagtgtcaggctctcttcggtggtgcctgcttctgtggtaggtgagaacaagccacgacagctcacacccatggacttagccatgaagctccactacgtccgagccgtctacttcttcaagggtgcacgtgacttcactgtcgccgacgtgaagaacaccatgtttactctacagtctttactccaatcttatcaccacgtctcaagtcggattccggatgtccgacaacgacaacgacactttagctgcagccataccttacattcgctgcaacgacagtggcatacgcgtggtcgaggccaacgtcgaaaagttcacagtgtagaagtggctcgagttgggcgaccgttccattgaccaccg

SEQ ID NO: 158231 - DNA, 416 bp, Arabidopsis thaliana columbia
ggtacggatttgcaggttcgaccaaggcgtccgcttgatctccaatggtttcctaagaaccaccagtcctcctaatctccaatccccaaaccgttccatccgccgctccttactacggcgaatctcaaccaccgatcgctactccagctttccgcaatttcatcaatcagaacaccgaaaccgttaaaaacggtctttttaagcgtcgtccttgggctgagctcgcggatcgttcccgattatacaaacctgagtcgatctccgacgctgctgttcgtatccgcaagaaatactcggatttcaaggttaattacctcaccgtcgctacagcgatcgtcggattctctctcgtcactcatacctttctatctcgtattgctcctctggctactcgcgtcgtggctgtttctgtactt

SEQ ID NO: 158232 - DNA, 140 bp, Arabidopsis thaliana columbia
cgcttctgctaagctattctaagagaagccagactagcataaaacccttaatttaaagcattcggtttccttttggggaaaccaagtattttgggttcctggatcccggggtggaaataccaggtggtgggggggggaaa

SEQ ID NO: 158233 - DNA, 263 bp, Arabidopsis thaliana columbia
cctgggttgggtcgtgaagaaagagaagaagaatctcgaagaagctcgaagaagaacgaaggagattcttcctttccccagatttttcgtttgaagaagaatcgaaaaacttagatttttggctttgctttcggagttattcgaattttgaaatatctgaatttgtttgttatatttatttcttcggattaagcttgatgttggttttgtatttttaatgtattttattagtattcttttttgttacgttctaattttttttt

SEQ ID NO: 158234 - DNA, 56 bp, Arabidopsis thaliana columbia
  unsure (1)..(56): unsure at all n locations
tcctaacgagatcgaacactaagagatanctggtgctctactagcacaaagtatct

SEQ ID NO: 158235 - DNA, 365 bp, Arabidopsis thaliana columbia
atttcgaaaccctagtcgatttcgagatccaactaactctgctccttatctcagcttgttgaatttgcgaagtatgggagacgctagagacaacgaagcctacgaggaggagctcttggactatgaagaagaagacgagaaggtcccagattctggaaacaaagttaacggcgaagctgtgaaaaaagggtacgtgggaatacacagttctggattcaaagacttccttttgaaaccggagcttctcagagctattgttgactcaggatttgaacatccatctgaagtgcaacacgaatgtatccctcaagctatcttgggtattgatgttatctgccaagcaaagtctgggatggggaagactg

SEQ ID NO: 158236 - DNA, 351 bp, Arabidopsis thaliana columbia
ctccgctgtcgcattagccgacgatgaagcagattgtgtctacacattcttccttagaaccggatcaaccttcaaagccggtacagattcgatcataagcgctagagtctacgacaaatacggagactacatcgggatccgaaacctagaagcatggggtggtttaatgggaccaggttacaactactacgagaggggtaatctcgacattttcagtgggaaagcaccatgtcttccgagcccagtctgttcattaaatctgacctctgacggctccggtgaccaccacggttggtattgtaactacgtggaagtcacgacagccggagttcatgcaaagggctcgtacca

SEQ ID NO: 158237 - DNA, 330 bp, Arabidopsis thaliana columbia
cctaattccaaaaaagggggtctggctctaaaaacctttcctttctcgtcctcctcctccttggcttcgttgccgtctcctatgcttgcgactgtacccctcctaaaccatcaccagcacctcacaaaccaccaaaacattcagtcaaaccgcctaaacctcctgccgtcaaaccacctaaaccaccggcagtaaaaccacctacttcaaaacctcccaccgtgaaaccccattctaaaccaccaaccgttaaaccccattcttaaaccaccaacccgtaaaccccaccctaagccacccaacgtcaaaccaccccaccctaaaccaccc

SEQ ID NO: 158238 - DNA, 449 bp, Arabidopsis thaliana columbia
tttgaaattcggagaagctagagagttttctgagatggctcgtactaagcaaacagctcgtaagtctactggaggaaaggctcctaggaagcagcttgctacaaaggctgcacgtaagtctgcaccaaccactggaggagtcaagaagccccatcgttaccgtccaggaactgttgcactacgtgaaattcgtaagtaccagaagagtaccgagttgctgatcaggaagctccctttccagaggctagttcgtgagattgcccaggatttcaagactgacttgcgtttccagagccatgctgtgcttgcactccaggaggctgctgaagcataccttgtgggtctctttgaggacactaacctttgcgccatccatgccaagcgtgtgaccataatgcccaaagacattcagctcgctcgcaggatcagaggagaacgtgcttaattgt

SEQ ID NO: 158239 - DNA, 314 bp, Arabidopsis thaliana columbia
ctaggcgctgacagtcctgctattcgggagaatcttattaccaccgtggagtgtttgtctggtactgattctctgaaagttggaggagagttttttcctcaacattaccatcagaaagcactgcacatcactgaagcaagatagagggcccatccatacattatcacacttgctgctctacctgtgaaaacttaccaccactacaatcccgcgtcgcgtttcatgaacctccattgacaaaggctagtccttgagattgcccattatttcaagactgactttacttttcagagccattctatgctctacactta

SEQ ID NO: 158240 - DNA, 425 bp, Arabidopsis thaliana columbia
aacaaatcttaaacgttttactttgtgctgcactactcaacctcaatggccgcctcaacaatggctctctcctcccctgccttcgccggtaaggccgtcaagctttcccccgcggcatctgaagtccttggaagcggccgtgtgacaatgaggaagactgttgccaagccaaagggcccatcaggcagcccatggtacggatctgaccgtgtcaagtacttgggtccattctctggcgaatcaccgagctaccttaccggagagttccccggagactacggatgggacaccgccggactttcagctgaccccgagacattcgcaaggaaccgtgaaccagaagttatccacagcaggtgggccatgctcggagccctaggctgcgtcttccctgagcttttggctagaaacggaagcaagttcgg

SEQ ID NO: 158241 - DNA, 276 bp, Arabidopsis thaliana columbia
ccagaatgcagcgagacaggcgcttgtacacgccagaaatgatgtcaacgctgccaccaacatccttcttgaagcacactctcactaaaccttctttactaggaagtttcagaaacattgttgattcgagatgaagacattgtacaacagaggtattcttctgctgcgttctaacaacggaaatggccttgcattgacgataatatgtccagtaaatgatctgatttacatcctctttatctttcttttagggtttcttttggcctcttttggttt

SEQ ID NO: 158242 - DNA, 450 bp, Arabidopsis thaliana columbia
gcaattcggtattggtggagctttacctcctaagatggatctctctcgctacatcaaatggcccaaatccatccgtcttcaaaggcaaaagaggatcctgaagcagaggttgaaggtccctccagctcttaaccaattcaccaagactcttgacaagaatcttgctaccagcctcttcaaggtccttctgaagtacaggccagaagacaaagctgccaagaaggagcgtcttgtaaagaaggcccaagctgaagctgagggaaagccttctgagtctaagaagcccatttgtagtcaaatacggcctcaaccatgtgacctacctcattgagcagaacaaggcccaacttgttgttattgctcatgatgtcgacccaattgagttggttgtctggttgcctgctctgtgcaggaagatggaagtcccgtactgcattgtcaagggcaaat

SEQ ID NO: 158243 - DNA, 384 bp, Arabidopsis thaliana columbia
gtgcttcacatggacaggaatgactactatgggggggaatcaacttcccttaatctcaatcagctttggaagaaggtcaggggagaagagaaggctcctgagcatttaggcgctagccgggattacaatgttgacatgatgcctaagtttatgatgggaaatggcaagcttgttcgtacccttattcatacagatgttacaaagtatttgtccttcaaagctgttgatggaagctatgttttcgtcaaaggaaaggttcaaaaggtgccagctactcctatggaggccctgaaatcttctctcatgggcatatttgagaaacgtcgagccggcaaggtttttagagtttggtcaagaatacgatgagaagggcccaaaaacaca

SEQ ID NO: 158244 - DNA, 412 bp, Arabidopsis thaliana columbia
atcgtacggaagatgatgtcgttaacggacggcaatttcgtgataacggacgtcaacggaaacctgctgttcaaggtgaaggaaccggtgtttggtctccacgacaagagggtcttgctggatggttctggtactccggtcgttactttgagagaaaagatggtgagcatgcatgacaggtggcatgtgtttagaggtgggagtactgatagaagtgttctgttgcacacggtgaataggatggtcaacgttaccactcgacgctactaatatctttatcttcagatcctgatcagttgaagaacgcttgagaagatatcaaagagcttctcagcaccaaattctgccattcgattttggttagattatggtgtcatgatgctggctcgttttacaagtacatttttgaatg

SEQ ID NO: 158245 - DNA, 445 bp, Arabidopsis thaliana columbia
cttctctgagaaaaaacaacagatccgaattttatctttaatcagccggaaaaaatggagaaagcgatcgagagacaacgcgttcttcttgagcatctccgaccttcttcttcttcttcgcacaattacgaggcttctctatctgcttctgcttgcttggctggggacagtgctgcatatcagaggacctctctctatggagatgatgttgtcattgtcgcggcacataggactccactatgcaagtccaaacgtggcaatttcaaggatacatatcccgatgatttgctcgcacctgttttgagggcattgatagagaagacgaatctaaacccaagtgaagtaggtgacattgttgtgggtactgttttggcacctggatctcagagagccagtgaatgcaggatggctgcgttctatgctggtttccctgaaaccgtggctg

SEQ ID NO: 158246 - DNA, 413 bp, Arabidopsis thaliana columbia
attttactccttttcaccacctctagtagcagagagagagagagagtatggcgattacggtgccgagacggcaactcttcatcggcggtcaatggactgagcccgttctccgtaaaactctccctgttgtcaatcccgccaccgaagacatcatcggttatattccagctgcaacttctgaagatgtggagcttgctgtggaagctgctaggaaagcatttactaggaacaacggaaaggattgggctagagcaactggtgctgttcgtgccaaatacttgcgcgctattgcagctaaggtaatagagaggaagtctgaactagctaatcttgaggctattgattgcggtaaacctctagatgaagcagcatgggacatggatgatgttgctggatgttttgaatattatgct

SEQ ID NO: 158247 - DNA, 185 bp, Arabidopsis thaliana columbia
gccttccggaagctttttgttcaaataaaaaagagagatcgtccccaaaagtttccgatatggctcgctcgtttggagcaaacagcactgttgggcttgcggatcatcttcttcggatgtttatttgcgttttccactgcaaaagaagaggctacgaagttaggatcagttattgggatagatct

SEQ ID NO: 158248 - DNA, 239 bp, Arabidopsis thaliana columbia
cattccgatccataattctagatgtcgaggtttttaactgagacctgtcaaataagctaaagcttcttctaagagcttcaaggaaagcattgcattgttgtggtcttgtttgtgtccacagaaggcaggaactacgtgaggctccggatcccaagaacatggggtggccactggggtcacagatgtcactgcgctgtccgtcttcacggccaagagcctgtatgcttttatcgcggagg

SEQ ID NO: 158249 - DNA, 417 bp, Arabidopsis thaliana columbia
  unsure (1)..(417): unsure at all n locations
ctcaccttctcctgtggtagactacaagtctcctccaccaccatatgtctacagttccccaccaccaccttattattctccttctccaaaggttgaatacaaatctcccccaccaccatatgtttacaaatccccacctccaccttcgtattcaccttctccaaaaactgagtactaaacttcagctccaccatcatatttctattcttgaaaagagtaaaagggatttttaattaaataaattaccaaattttatttgatttcttctttccttttgttcttgtatcttttaattttcatttggtttgcatcaataatttgggtaaaaaacttttgtatggnttcatgttttcttcttctatatgtgtaaagggtgcttgcaatcaatctatatgaagtcctttggaaatttgaatt

SEQ ID NO: 158250 - DNA, 81 bp, Arabidopsis thaliana columbia
  unsure (1)..(81): unsure at all n locations
ggnaattctctctgcgtagtagatccaagtggtggtttctgagtagtagtaagcaagcaaatctggatgttattgtagtcg

SEQ ID NO: 158251 - DNA, 377 bp, Arabidopsis thaliana columbia
ccttactccctcaaactttctggccgtatggaaaatcccgagatgatcccaacggcaaattctccgacggcctcatcgctccagacttcctcgctaaattcatgaggattccgatcgtgatcccgccggcccttcaaccgaacgtcaatgtctcacgtggagctagtttcgccgtcgctgatgctactctactcggagctccggtggaatctttgactctgaatcaacaagtgagaaagttcaatcaaatgaaagcagcaaattggaatgatgatttcgtgaagaagtcagtgtttatgatatacattggtgcaaacgattacttgaatttcaccaagaacaaccctaacgccgatgcatctactcaacaagctttt

SEQ ID NO: 158252 - DNA, 324 bp, Arabidopsis thaliana columbia
caagtattttgatggcattgacaatcttgattacaccggttgctttgccatgactgaattacaccatgggtcaaatgtgcaaggtcttcagaccacggcgacattcgatccacttaaagacgaatttgtgatcgatacacctaatgatggagctatcaaatggtggattggaaatgctgcagttcatgggaagtttgccactgtttttgccaggcttatacttccaactcatgattccaaaggagtctcggatattggtgttcacgccttcattgttccgataagggatatgaaaacacaccagacactccctggtgttgaatc

SEQ ID NO: 158253 - DNA, 445 bp, Arabidopsis thaliana columbia
ctcaacggaaccctcctttctcctcctcccacaacaacaacaacaacaatgtcttcttctctccgatctaccaccgccgcttctcttctcctccgctcctcctcctcctcctccagatccactctcactctctccgcttcctcctctctctccttcgtcagatctctcgtctcttctccacgtctctcttcttcttcatccctctctcagaagaaatatcgaattgcgtcggtgaatcggagtttcaactccaccaccgccgctactaaatcttcatcttcagatcctgatcagttgaagaacgctagagaagatatcaaagagcttctcagcaccaaattctgccatccgattttggttagattaggttggcatgatgctggtacgtataacaagaacattaaggaatggccacaaagaggtggagctaaatggagtttgagat

SEQ ID NO: 158254 - DNA, 149 bp, Arabidopsis thaliana columbia
ttttggttcattaccaatttttaacgggacccttaaccttaaccggtcgtgcttttttccttttaaacctggatacccaattcccaaaacctaaactttccagggccagagccgccacactggtactccaatccaagggggatgattcc

SEQ ID NO: 158255 - DNA, 419 bp, Arabidopsis thaliana columbia
gagaagaagaagcaaagatataacccccaaaagtatcaattagtttccattttcgccgctaagattctgttttcgaacatttacaccctcaagaatcgccgccatgtgtggaggagctataatatccgatttcattccaccgccgaggtctcgccgtgttactagcgagtttatttggccggatctgaagaagaatttgaaaggatcgaagaaaagctcgaagaatcgttcgaatttcttcgattttgacgctgagttcgaagctgatttccaaggtttcaaagatgattcgtctatcgattgcgatgatgatttcgacgtcggtgatgttttcgccgatgtgaaaccattcgttttcacttcgactccaaaacccggcgtcttcggcgctggggaagggttaagttttgggtagaaag

SEQ ID NO: 158256 - DNA, 268 bp, Arabidopsis thaliana columbia
aatctctctcttctcttactctctacctctgtagctgatagggtcagcttcgtcggcgctatttctgccggatttcacggacgatttgagatctgttcttccttcttcttttttcctctcctgatctgattcaactctaatctgcttcagtctctgtgttacgaactgattcctgtcagtgaaaaaaaatgttgagcgtttcaagcttttgcagtttaatgggagactttggtgtcatttgagtgatacttttgtttatcttatgaaa

SEQ ID NO: 158257 - DNA, 426 bp, Arabidopsis thaliana columbia
tcacgaacgcgtcaacaagtgtcaggtgctttataggcatatgctagaagaaatggctcaagaagcggtgtggtacaagctgagcgatctaaaccaataacctcaaagaatgtattagcatcgtcaaaggatacaacaccacaaaactatgagagagtcgaaagaccaatctcttcaacaagacacgcaagttcttcaagaaaagctgttgtatcgagcgtacgagccacttcttcagctgatttcacagagaaccgctctagcaaagttgtcccaagcaatggccgttcctcaaccgctcaaaagactcagctcgttccttacccaaccactagaccgtcatcttcttcttttacccgagcttcgccgtcgaggactgtttgtgacatcacgctccagagctttgagctacttaccatatggaat

SEQ ID NO: 158258 - DNA, 189 bp, Arabidopsis thaliana columbia
caaaaatcctaatttttttgagaatctggggctttagctttggtaaaatgaagatatactctagaacggttgctgtttcactcattgtgtcattcctcctgtgtttctctgcctttgctgagcgcaatgacgggaccttcagagttggactgaaaaaactcaagttggattcgaaaaatcggcttgcag

SEQ ID NO: 158259 - DNA, 244 bp, Arabidopsis thaliana columbia
tttttggcggcaaaaggccaaagcttttggctttttggtcttaaggggttcaatctctggcatctcatttccgacgatcaattcaagaattctatcgactcaccacttttccaagcactcgacttcagcgtcttcttcatattcacttaagtttgctttgagacgtcaggaggataaacccaaagtctcgttttttctttcattaacgtcttcgttaatggcgaccccctattcaagcctcttt

SEQ ID NO: 158260 - DNA, 462 bp, Arabidopsis thaliana columbia
  unsure (1)..(462): unsure at all n locations
gagccacgcgcccgctttnctttcattgtagttaacgaaaagattacgataatggcaacatcagctatccagcaatcctctttcgccggccaaacggctctcaagccctccaacgaactcctccgcaaggttggtgtatccggtggtggccgagtgaccatgcgtcgtaccgtcaagtctactcctcaaagcatctggcacggaccagaccgttccaagtacttacgaccattctcggagaatacaccgcgctacctaaccggagaataccccggagactacggctggggcaaccggttgactctcggctgacccggagacattcgctaagaaccgtgagcttgaagtaatccacagcagatgggctatgttgggtgctctcggatgcacattccctgagattctctccaagaacggtgttaaattcggagaagccggtggttcaaggcaggttctcagatt

SEQ ID NO: 158261 - DNA, 451 bp, Arabidopsis thaliana columbia
acgcttgcctcaggggtctacgaggtgatgcaaacatcgttgagtgcgcatatgtggcatcccatgtgactgagcttcccttcttcgcatcgaaggtgcgtctgggacgatgtgggatcgatgaagtgtacggccttggaccattgaacgaatatgagaggatgggattagagaaggcaaagaaagagctttcagtaagtattcataaaggtgttacctttgcgaagaaataaagagactcgatcgtgaataaacacacttaagcgatggttttggaatagtcagagttttggaataagaataatgcctcacaataaaagctcttgcggtcttcttggatccaatcttaaaggttcaagaaactcatctcctttaggtaaaatcttcgattgttttatcgttccatcgaaccactttgttcttagatacaagaacgtttatgatttatgta

SEQ ID NO: 158262 - DNA, 232 bp, Arabidopsis thaliana columbia
  unsure (1)..(232): unsure at all n locations
tcacgggcgcgtcaacaagtgtagtatatgatgtggaacctaggaactgtccagggttcagctttagactgtcggtgtactgggaactaccancatgtcccgttcagatttccgctcatacatggagaagctttcaagaaagtacccttggtgacacttaccatctgattgccaagaactgtaaccatttcactgaagaaagatgcttgcagctaacacgaaagcctatttc

SEQ ID NO: 158263 - DNA, 271 bp, Arabidopsis thaliana columbia
atcaattttgcggtgtatggagcaaccgcattgtaccgagcgtttcttttgggaaaaggaattgaatctgatttcaccaatgttagtttaagtgttcagcttgacaccttcaagcagattttgcctaacttatgcccctcgtctactcgtgattgcaaagagatgcttggagactcgctgatacttatgggagagattggaagaaaccactattattacccatttttttgataggaaaagtgtcaatgaaatcaaaaagcttggtcctttt

SEQ ID NO: 158264 - DNA, 280 bp, Arabidopsis thaliana columbia
  unsure (1)..(280): unsure at all n locations
aaagagtctaaagagacggagagtgagagaagagagaaacatttcgagacaaatggccgccgccgctgctcgtcctctcgtcaccatccaaaccttggatggtgacatgtccaccgatcaatcctccaccgtcgtacttcccgacgtcatgacggcgccaggtcgaccagacatctttaacttcgttcacgcccaaatctncaacaacagccgtcagccatacgccgtatcgaagaaggccggtcaccagaccttcgtcgagtcctggggaaccggacgt

SEQ ID NO: 158265 - DNA, 411 bp, Arabidopsis thaliana columbia; identical to SEQ ID NO: 125987

SEQ ID NO: 158266 - DNA, 280 bp, Arabidopsis thaliana columbia
  unsure (1)..(280): unsure at all n locations
gtcaggtcagggaacaacaatggcttcttctgcaacagcaccaaattcgctatctttcttctcatcttctctctttntatcctcctctcaccaaatccctaaaacctacatttccgtttcaaaactcggctccggcagagtctcgaagccgctttctgtctcttcccagctagcgactctaccgattctatcattcgaaggagagaaggtcggagagacgtatctagacctcaaagcggcgccggaggataccgcgccgtgccgtgtgcaccgagccatc

SEQ ID NO: 158267 - DNA, 213 bp, Arabidopsis thaliana columbia
attggctctgtctcaaaaaatgaaattctctaattaaccacaacgatctttagagccttcttcgctcaccgatctctgaaaccctggtttgctctcgtcctcttcgttttctatgagtatgtcgcagtctcgagctgtccaaagatcgtcttcacctaatggggatagaggtgagaatcagttagtggtttatgacttggaagggaatgatga

SEQ ID NO: 158268 - DNA, 418 bp, Arabidopsis thaliana columbia
acccgcgcgacccgcacagtcggatgtctatcttttccaattttcccaccagaaagaaagcttctctctggttcgatatgaattcgactgagaattaattcttcaacaagcttgagagcaaagttatgctgcgtttaacttgttttacaccttctttttctcgagcgtgttgtcctttatttgcaatgatgctcaaagtcccatctgttcatctccaccatcctagattttctccatttcgtttctaccatacttccttacttgtgaaaggcaccagagatagacgtcttattcttgttgagcgtagcagacatctatgtacattgcctctcgctgctgctaaacaatcagcagcttctccttctgaaaacttatcgaggaaagcgaagagaaagctattaacagtcttctgagcatt

SEQ ID NO: 158269 - DNA, 318 bp, Arabidopsis thaliana columbia
ccgtaccggaatcgcagttccgagccagagcgacgcgtacggcaagaagacgattctctctcttgagttgaagaaatgaagcacaacaatgttatccccaatggtcacttcaaaaagcactggcagaattatgtcaagacatggttcaaccagcctgccaggaaaaccagaagaagaattgcgaggcaaaagaaggctgtgaagatcttccctcgtccaacttctggacctctccgccctgttgtgcatggtcagactcttaagtacaacatgaaggtcagaaccgcgaacggattcactcttgaagagctcaaggct

SEQ ID NO: 158270 - DNA, 198 bp, Arabidopsis thaliana columbia
ggcttatcaccgatttagatctaagcctgaggtttccttttgcattttagagattccgagaatgagacaacggcaactattttccgtgtttttgcttctcttagctttcgtttcgttccagaagctttgctactgtgacgatcaaacggttttgtatgaatcgttcgatgagcctcttgctggcccctttattttctt

SEQ ID NO: 158271 - DNA, 107 bp, Arabidopsis thaliana columbia
aacaaatccgatctattcattgaccatttagtgtccaggctccattctgttcataaacctcgatacctcgtaggaagagagcttactacacttgagattcgagattc

SEQ ID NO: 158272 - DNA, 237 bp, Arabidopsis thaliana columbia
agaaaccgaggaagaacgatctcagtgagaggacgatcacttcgccgtcgcagtcatgggtcgaatgcatagtagaggtaagggtatctcggcatctgctttgccgtacaagcgttcatctccgagctggctcaagacaacccctcaagatgttgatgagtccatctgcaaatttgcgaagaagggtttgaccccatcgcacattggctgtattcttcccgactctcacgcaactcc

SEQ ID NO: 158273 - DNA, 339 bp, Arabidopsis thaliana columbia
atagctatagacagacacacccaaaccctagatctaaccccagccgtcagatcagattgatcgggcaatcgcttctagaccgttggaatcaagcaatggtagaggtagaatcgtatttgtgggtatctagaagaggcgttaggattgtctccaagctgggtgttttttcatcttgatggccaactaatcgaatctcctactctaaagatatttttgtttatttctgtcatgtgtgatttggtcgcgcgtacgggtcgtcttcagcagcggtacgaggatggctttcgtcttgttgccgggtgtattccgttaggtatgtaaattttgccaaagatggta

SEQ ID NO: 158274 - DNA, 267 bp, Arabidopsis thaliana columbia
tcccggtcgaccacgcgtccgcttattatcctctgccaattgaattttttaaagcttgaagaaactagtagtagtaatcttcgctctgtcggctgatccattgttttatcaaaatcttgggctaaaaactcttgtgtttaagcaaatgaaatgcactgggtttgattttgagaattgatggaagtgaagcttgtttttcgaagaatttcatggagggctatatgtccctgatgtagggtctttgctagtaatcttagattcggcatt

SEQ ID NO: 158275 - DNA, 280 bp, Arabidopsis thaliana columbia
ttgaaactttgcctcaccaagacatcgatttgctcaaaatcgttaagaaggtgacgggtccgaaatcttccggtggtttaggattgcagcttccgttgatcgttcgtttccctgatgtgttgaagaaccgtctcgagtgtcttcaatctgcgtttgattacgcgattaaaagtcaaggatatgattctcattaccaaggtgtttatccggtgaaatgtaaccaagatcgattcgttgttggagattattgcaagtttggatcttcctttccattggtttt

SEQ ID NO: 158276 - DNA, 465 bp, Arabidopsis thaliana columbia
caaatttctgtgaaaacatgtctgacgacgagcaccactttgaggccagcgaatccggagcttccaagacctatcctcaatcagccggtaacatccgtaaaggtggtcacatcgtcatcaaaaaccgtccctgcaaggttgttgaggtttcgacttccaaaactggcaagcacggtcacgccaaatgtcactttgttgctattgatatcttcactgctaagaagcttgaagatattgttccatcttcccacaattgtgatgttccacatgtgaaccgtgttgattaccagttgattgatatcactgaggatggcttcgtgagccttctcactgacagtggtggcaccaaggatgatctcaagcttcccaccgatgatggtctcaccgcccagatgaggcttggattcgatgagggaaaggatattgtggtgtctgtcatgtcttccatgggagaggagcagatct

SEQ ID NO: 158277 - DNA, 126 bp, Arabidopsis thaliana columbia
  unsure (1)..(126): unsure at all n locations
atgcgtttttctttatcgtcttcctcaagcgtgagatnctangtggatatagacttaatacatgatgctctggctctttccatgatccggcggtacagtttttacggttttcatattgtgattaaa

SEQ ID NO: 158278 - DNA, 197 bp, Arabidopsis thaliana columbia
atctttttgaaattggattcatctaagaagcatactctgttttcatggctgtttacaataccaaactctgtttggcctctgttgtcttgctcttagggcttctcttggcttttgacttgaagggtatagaagcagaaagtcttaccaaacagaaactggactcgaagatacttcaggatgagattgtgaagaaagtc

SEQ ID NO: 158279 - DNA, 373 bp, Arabidopsis thaliana columbia
caagaatttgcaaaccagtgttttgggaacaaatctgattatggaaaaggcaggcagatgcccgtccactatggctctaacaagctcaattattttaccgtttctgcaaccattgctacgcagttaccaaacgcggttggtgctgcttattccttaaagatggacaagaaggatgcatgtgcggtcacatattttggcgatggtggcacgagtgagggagatttccatgctgctttgaatattgcagcagttatggaagctcctgttttatttatttgccggaacaatggatgggccatcagtactcccacctcagatcagttccgaagtgatggtgtagtggtcaaagtctcggcttatggaattttatgtt

SEQ ID NO: 158280 - DNA, 361 bp, Arabidopsis thaliana columbia
ccgaagacaaagaggaattctaagaattgatcaaaacttgggtcttgatagatcaaccagtgggattgtgtctggttatgcatcaagcaatacactcttcagaaagagatttgccgaagcattggtgaaaatgggtaccattaaggttcttaccggacgttctggagagatcaggagaaactgcagagtcttcaacaactgaggacgttgattcttgcacacattctttacaattattcacggagagatccaaagactgagcggaatcctacgttttttcttttctttgctttttttcttacaaatcaaatcggaaagtgtgtttgttccggtataatgttttaatttttcccttaaaaat

SEQ ID NO: 158281 - DNA, 423 bp, Arabidopsis thaliana columbia
  unsure (1)..(423): unsure at all n locations
accgactttttttctctttctctccgtaacaaaaaaatcaccaatggcaaaacaatatctctttggactcctctcaatctcctatctcttatcactggagctcacggcggncaccgcagcctcacagaccggagcttncaaaaaagccataaacttcatgcaatcttcttgcaaaaccaccacataccctgccttatgtgtccactcactctccgtctacgcaaacgacatccaaacaagccctaaacgtttagctgagaccgctatagccgtgacactaagccgagcccaatccacgaagctcttcgtctcgcgtctaacacgtatgaagggtcttaagaagcgcgaggtcgaagccatcaaagattgcgtcgaggagatgaacgataccgttgacccgttgaccaaatctgttcaagaact

SEQ ID NO: 158282 - DNA, 124 bp, Arabidopsis thaliana columbia
  unsure (1)..(124): unsure at all n locations
tctttcaatctctcttgattccaatccattcnttttctagtgccgggttctcgggtcggatctggcgagtttaactagggataagggcgactgtcaatactcatgcctcggcctcgattttccg

SEQ ID NO: 158283 - DNA, 301 bp, Arabidopsis thaliana columbia
attttctctagatccacggatccatttttctcgttaaaattcgaaatccgccggtgaaaagaaactcattcattgaattagctaaaacatggggacggagatccctagatcggcggagatatcagaggcattgttaccaccggaatctgagaaaaccgtgacggcgacggaggagcatgtacctgagtggaaagagcagataacgattcgaggattaaccgtgagtgcgttgctcgggactttgttctgtatcattactcataaactaaatctgacggttggaatcatcccgtcgttgaac

SEQ ID NO: 158284 - DNA, 323 bp, Arabidopsis thaliana columbia
cacagagaaaacttcgtctctcttctctgcttctccctctcatttcctgtgagataaaggcggagtctctctccagttattttgctcatccatcgattcttagagttcaaaatggttgatcaagttcagcaccccactattgcgcagaaagctgccgggcagttcatgcgttcaagtgtttccaaggacgttcaagtgggttaccagaggccttctatgtatcaaagacatgcaacctacggaaactactccaatgctgcattttaatttcctccgacatcccggatgttgccaacaactgcttcttccgtgttggtccaacc

SEQ ID NO: 158285 - DNA, 377 bp, Arabidopsis thaliana columbia
atttcgtcttccgtcgtcagctcatgaaactaaatctctcgaatctcagatttctacgtacccgaaaatcgttaatctcccagacgcgagcaatgactcaaaatccggatccaaaacctgatccatcgcaggttctagacgatatcctctgttcggagcagcgtgatgggcagattgaggaaacagtcgacacagcgccggcgagcttgggctctccaagtcgggtcttaagcattgatactagagtagagagagcttgggcacactggaaaaaactgggtagacccaagtatatcggtgctccaatgggtgataactctgagctttcgtttagattgttctggcagaaatacggagctcaggctgcttatactccg

SEQ ID NO: 158286 - DNA, 453 bp, Arabidopsis thaliana columbia
  unsure (1)..(453): unsure at all n locations
actactctaaaagaatcttcatcatggcctcagtaacctcagccaccgttgcaatcccatctttcaccggccttaaagcctcaaccatcaaatcatccgccaccgtcagaatccaaactgctgctgttgcatcaccgaagcttacagtgaagtcatctctaaagaacttcggagtcgcggccgtagcggctgcagcttcaattgctttggccggaaacgccatggcaatagaagttctcttgggaggaggggatgggtcgntagctnttattcccaacgacttctctatagctaaaggagagaagattgtgttcaagaacaacgctggatacccacacaatgttgtcttcgatgaagacgagatcccaagtggcggctacctggtcaagatctttatggacgagcaagatctactcaccgttgcggaagagtctttcttagtttgctttgacc

SEQ ID NO: 158287 - DNA, 242 bp, Arabidopsis thaliana columbia
  unsure (1)..(242): unsure at all n locations
tccaaacccaatccttcgctctcaatcttctgccatctccaaatttcgccaaacccatcgagagacgtgaattcatctctctaaaacgagacccatctcgtccaatttcactccgatgttccgtttccacgactntggatactccggcgaccgcttcgacccacaagccctttccggcggaggtttcaaggagtatcatggagctttcatctggtggaactctttccactttgacccacgac

SEQ ID NO: 158288 - DNA, 233 bp, Arabidopsis thaliana columbia
gccttaccaacaagtattctgagggactgcctggtaaaagatattatggtggcaatgagtacattgatcagttggagacgctttgccagaaccgggctttggcagccttccgcttagattctacgaaatggggggttaatgttcagccgttatctggttcacctgcaaactttgctgtctacactgcgatacttagccctcatgatcggatcatgggtttggaattaccttac

SEQ ID NO: 158289 - DNA, 189 bp, Arabidopsis thaliana columbia
cggacgcgtgggtgagaacgatcttcctgggcttaccgatactgagaagccaagaatgagaggaccaaagagagccttcaagatccgtaaactgtttaaccttaagaaggaagatgatgtcaggacctatgtcaacacttaccgccgcaaggttacaaacaagaagggcaaggaaggtagcaaagcccc

SEQ ID NO: 158290 - DNA, 434 bp, Arabidopsis thaliana columbia
gatcagtctttgaaagcctatgagattgctactactgctgctgaggctaagctccctccaacacaccctatcagattgggtttggctttgaatttctctgtcttctactacgagatcatgaacgcacctgaaagggcatgtcaccttgctaagcaggcgttcgatgaagctatctcagagcttgacactctgaacgaggaatcctacaaagatagcaccttaataatgcaactccttagggacaatctgaccttgtggacttctgacatctcagaagaaggaggagacgatgctcataagacgaatggttctgccaaacctggtgctggtggagacgatgcatagtgatatgatatgtgtgcacctggacaatatgtttcaagaactgaatgtgcggtgaataataaatgaaagtagagcttctcctgtcccta

SEQ ID NO: 158291 - DNA, 452 bp, Arabidopsis thaliana columbia
ggttgatacatttcagggtatccctgctcaagctgaaatcccaccagttgctcaagccccagctactggggaacaggcagccaatcctctagcacagccccaacaagcagcagctccagcagctgcaactggtggtccaaacgcaaatccattaaacctgttcccccagggcatgcccgctgcagatgctggtgctggagctggtaatcttgatttcctgcgtaacagtcaacagttccaagccttgcgagctatggtacaagcaaacccacaaattctacagcctatgcttcaggagctcggtaaacaaaacccccagcttgtgcgactaattcaagagcaccaggctgacttcctacgcttgataaacgaacctgtcgagggagaagagaatgttatggaacagttggaagcagcaatgccacaagctgttaccgttacacctgaagagc

SEQ ID NO: 158292 - DNA, 263 bp, Arabidopsis thaliana columbia
  unsure (1)..(263): unsure at all n locations
aaactnctctctgaatctcagtgaattctcaaataatgagagggatggtgagttcttaccacggggaatctttatagaggctgatggggtcatactaaaaggtttgctttgttgtcatcacatgatacattaaacatcgttttttcttttcttttactctttacttaaccaatttacccttaataaccttcttttattttaatcccaaaccttcctcaaattccttttattctctcctttttcttcatttaactactccttca

SEQ ID NO: 158293 - DNA, 423 bp, Arabidopsis thaliana columbia
tcccaatcacctatgtacatgcgacttgcttattactctcttcttctaagtctcctcctctccttcttcgctctaggtgaccccaacaatcgccatggcagcttcgtctctcaatctcctcctcattctctctcttctcactttcatttctctccagagatctgaatctctttccgataatccatctctcactcttctacccgacggattcgactggccgatctctcactccgatgaattcgatatcatcgacggtgaagaaagcttcgaagttacggaggaagacgacggcgtaacagatcgacggtcattgtactggcggaggacgaagtattacatatcgtacggtgcattgtcggcgaatagaggggccttgtctcccagaactggaagacgtactacactcataaactggttcagagc

SEQ ID NO: 158294 - DNA, 352 bp, Arabidopsis thaliana columbia
cgaaaacgaaagttccgaagaagaagaagaagaaggagaaaagatgatttaccgaaagtggagtttgctgtccggcccaccggttattctcggcggagcggtaattgctgccgtcgccgtcggattcgtcttgcaaaacgtaacgaaaggggagcagaagaagaatggcttaacaaacaagtgagaagacaaatggagagatgctacaaaatgtggtgatcatgtgatttgatacaatttagttcttgcagtgtataagctcaataatgcttttgtaagcttttgaatacacagatctttgtgggggttttagaatcttggtactaataatgatattttattttccaatttt

SEQ ID NO: 158295 - DNA, 313 bp, Arabidopsis thaliana columbia
gcagaagcaaatgctcttttgaagttgcaagataatattccagggagaccatttgcagctcggtccaaggctccgccattaccatttctcctttcatcgcttctgcaatcaagaccacaacctaagcttcctgaacagcagtatggtgatgaagaagatgaagatgatttagaagaatcatcagattcagacgaagaatcagagtatgatcagcttcctccgtttaagagtttgactaaagctcagatggctacgcttagtaaatctcagaagaagcagtatctcgatgaaatggagtaccgagagaaacttt

SEQ ID NO: 158296 - DNA, 370 bp, Arabidopsis thaliana columbia
caatcccagagtagcagaatctgatccatcccacctttttcaattctcaggcaaagtgtttgatctcatattcagataagtcaaacttgaaaaaatggaagggactgtgttcacgccttgtttggaaggaatgaagcatgtcaaatctgatcaaggcgagatgcttactaagccatttttagagctttgcaagaccatcttgcctgttatagataaatttggagctgctatgactctcgtgaaatctgacattggtggcaacataacgaggttggggaagaactacttatctgatcccgacacgttcaagtacttgtacacctttgttcaagtcgaaattgagtctaagatagcaaaaggatcgtctagc

SEQ ID NO: 158297 - DNA, 425 bp, Arabidopsis thaliana columbia
gtttccattgctgctctttgtcttatgaaccaagacatggttctcatggaaagctggtaccatttgaaggatgcaattcttgatggtgggattccattcaacaaggcttatggaatgagcgcgttcgagtaccacgggactgaccctagattcaacaaggtctttaacaatggaatgtctaaccattccacaatcaccatgaagaagattcttgagacctataagggttttgaaggattgacttctttggttgatgttggtggtggcattggtgctacactcaaaatgattgttttcaaggaccttaatcttaaagggatcaactttgatctcccacatgtcatcgtagatgcttcttctcattctggtattgagcatattggacgattattgtttattagcttctcttattttattttcacttc

SEQ ID NO: 158298 - DNA, 288 bp, Arabidopsis thaliana columbia
gtagaaactttaaaacgagagagagagaaagaaatggttacatcgggaacgtacgtgacggaggttccgttgaaaggatcggcggagaaacactacaagagctggaagagcgagaaccatgtcttcgctgacgccattggccaccacatccaaaatgtcgttgttcacgaaggcgaacatgactctcacgggtctatcaggagttgggactacacatatgatggaaagaaggagatgttcaaagagaagagagagatagatgatgagaataaaacattggcgaaaaga

SEQ ID NO: 158299 - DNA, 194 bp, Arabidopsis thaliana columbia
aaaccctagccgcttattcgtcttcttcgttctctagttttttcctcagtctctgttcttagatcccttgtagattccaaagcggccgataaaaatgtcggataaaggagaaggaccagctatcggtatcgatcttggtaccacttacttttgcgtgggtgtatggaacacagaccgtgtcgagacactttacc

SEQ ID NO: 158300 - DNA, 273 bp, Arabidopsis thaliana columbia
attcgaagtcggcacagtcccattcaattccgatggttggggaccaccagatgcttccgacacttgctccaccagcgtcgcggcggcgaatctcctcccaaacgtccccttcgcttccttctcacgatccgaaaaactcggacgcgttgctgattggactcgagctctctcaaatccatcagctcgtcctcacaccggatccaaatcagatccatcagcgatcttcgatttctcagcttttgcagtagatgaaggatttggtctaacaaactc

SEQ ID NO: 158301 - DNA, 253 bp, Arabidopsis thaliana columbia
tcgccgtcaaaatacaggaagccagcaaggtaaaacatctaatcatgttcctttagtagcagagtcgacaaaggctcctatagatttgtttcagttgccaggagcgccagtggctcaatctgtcgatacatttcaaccttcaatagcaccccgatctccacctgtgaatcttcaacaagctccacagacatactcatttaccccggcaaattcgtttgctggaaatttgtgtcagcaacccacttcaagacca

SEQ ID NO: 158302 - DNA, 227 bp, Arabidopsis thaliana columbia
gagaattgtctgagatcgctgagcaagctaagatatagagctgagatcgctaggcttagggagctgcacacactcaagggacatgtggaatcagtcgtgaagctaaagggcttggacattgaaactcccagtcactacactgtgtagtaaaaccaaacatatgactgatcttcgatcctctcatgttttgtctacttttaattcttttttacttaactcacccctta

SEQ ID NO: 158303 - DNA, 159 bp, Arabidopsis thaliana columbia
ctccttcctcaagagaacaacttcttaaccacgattcttcagagagagatttcaggaaacaaaatggtgaagatctgttgtattggagctggatatgtaggaggaccaacaatggcagtgattgcattgaaatgtccagatattgaagtggcagttgtt

SEQ ID NO: 158304 - DNA, 447 bp, Arabidopsis thaliana columbia
ctcaatctcaaatcaaacactcaagctcaagaaaaacttctcgaaccacgattcgatgcgatgtagcgataaaatccgcagattcgataaacgcagacgccaatccttcgtcctcaccgtcatcagaggaagaaatcgaagcggaagcgaaggcgaagataggatctagggttagagtaactgcaccgttgaaggtttatcatgtaaatcgagttccagaggttgatttagaaggtatggaaggtaaactcaaagattacgttgctgtttggaaagggaaacgaatctcagctaatcttccttataagattgagttcttcaaagaaattgaaggtcgtggtcttgttaaatttgtttcacatcttaaggaagaagagttcgagttcattgatcagtgatgaaacaagaaagacaatttttgttttctttctcagtgtttgttttggt

SEQ ID NO: 158305 - DNA, 430 bp, Arabidopsis thaliana columbia
  unsure (1)..(430): unsure at all n locations
gtctacagctcaccaccaccaccatactactcaccttcccctaaagtagactacaaatctcctccaccaccgtacgtctatagctcaccaccaccaccatactactcaccttccccgaaggtagactacaaatctcccccaccaccgtatgtctacagctcacccccaccaccatactactcacctgcccctaaggtagattacaaatctccaccaccaccatacgtctatagttcaccaccaccaccatactactcaccttcccctaaggttgactacaaatctcctccaccaccatactactcaccttcccnctaaggttgactacanatctcctncaccaccatatgtctacagttctccaccaccaccatcatactcaccttctccaaaaactgagtactaagcttcacattcaccttcgtattac

SEQ ID NO: 158306 - DNA, 464 bp, Arabidopsis thaliana columbia
gttccatcaccacaacgccggacgacaatgggtattgatctgatcgccggaggtaagagtaagaagaccaaaaggacagctccaaagtctgatgatgtctacctcaagcttactgtcaagctttaccggtttctggtaaggagaactaatagcaagttcaatggtgtgatattgaagaggcttttcatgagcaaagtcaacaaagctcctctttctctatctaggcttgtggagttcatgactggcaaggaagataagattgccgtcttggttggaactataactgatgatttgagggtacacgagattccagccatgaaagtgactgccttgaggttcacagagagagcaagggctcgcattgagaaagctggaggtgaatgcttaaccctttgaccagctcgctctcagagctccattgggccagaacacggttctttttagaggacctaagaattcacgtg

SEQ ID NO: 158307 - DNA, 292 bp, Arabidopsis thaliana columbia
aagagaagctctaaagattctttgtctctttctctgtcgcattgatttgtaaaaaagtgtggcagagagaaaccatggctatggcggaaatggcaacgaagtcttcactatctgcaaaactcactcttccttcttcttctactaagaagacactgagtctgagacaagtctctgtttcacttccaacatcaacttcaatctctctgttatctctctttgcatctcctcctcatgaagctaaagctgctgattccattcccaaggaccaaatcgtctcctttctcactgaagt

SEQ ID NO: 158308 - DNA, 280 bp, Arabidopsis thaliana columbia
agctagctagagagtaaaaagaacaaagatgtttatatgaagtgagcgaagaaggcaaaacccaccatggaaaagactacgtggatcctccaccagctcctcttctcgacatgggtgagctcaaatcctggtctttctacagagctctcatcgctgagttcatcgctacactcctcttcctctacgtcaccgtcgctactgtcatcggccacaagaagcaaaccggtccttgtgacggcgttggtttacttggtatcgcttgggctttcggtggtatgat

SEQ ID NO: 158309 - DNA, 295 bp, Arabidopsis thaliana columbia
ctgatatctggaacgctatcaagtttggaacagttttggaaaatgttgtgtttgatgagcacaccagagaagtggattactctgataaatctgttacagagaacacacgtgctgcctacccaattgagttcattccaaatgcgaaaataccttgtgttggtccacacccgacaaatgtgatacttctggcttgtgatgcctttggtgttctcccacctgtgagcaagctgaatctggcacaaaccatgtaccactttatcagtggttacactgctctggttgcttgcacagatga

SEQ ID NO: 158310 - DNA, 391 bp, Arabidopsis thaliana columbia
  unsure (1)..(391): unsure at all n locations
cggactctttcacggcgtcaatgtctgagaacgtagtcaacaacatcatggagaccaagatttgtgcagacgccatcgtgtctggattacagaagaagaaagttcatcttttttactgcttagagagcgaagaacttgctcgcaacatcggcgctgtatctgatcacatcaatcttcaattcattaactggaggaggagtggattaccaatctccaccaccaccaatcgttctttgtttaccaacaccaccatactactcaacttaccctaagggtgactacaaatcttcttcaccaccatactactcaccttcccctaaggnnnnnccctacttttttcccttaccttttgtttacggtttttctccaacttcattattatttttctttt

SEQ ID NO: 158311 - DNA, 229 bp, Arabidopsis thaliana columbia
gagagcttgcagctgtatctggacacaaggtttgatcagttgaaagttgctactgagcttggactttggcaggaagcttttcgctctgttgaagatatctatggattaatgtgcatggtcaaaaaaacgcccaagtcatctttattgatggtttattattccaaattgactgagatcttctggatttcttatagccatctttatcatgcttatgcatggtttaagctgt

SEQ ID NO: 158312 - DNA, 282 bp, Arabidopsis thaliana columbia
agagaaaacttcgtctctcttctctgcttcgccctctcatttcctgtgagataaaggcggagtctctctccagttattttgctcatccatcgattcttagagttcaaaatggttgatcaagttcagcaccccactattgcgcagaaagctgccgggcagttcatgcgttcaagtgtttccaaggacgttcaagtgggttaccagaggccttctatgtatcaaagacatgcaacctacggaaactactccaatgctgcatttcaatttcctccgacatcccgg

SEQ ID NO: 158313 - DNA, 211 bp, Arabidopsis thaliana columbia
cttcttcctccttcaatctctctcgttcgtatcatctgctctgcgatttcaatggcgagccgttggttgagacctgaggtgtatcctttgttcgctgctaccggagttgccgttgggatctgtgcgttttccttgatcagaaacatcaccggaaaccctgaagtcagatgcaccaaggagaacagggcttgtggaattttggataaccatg

SEQ ID NO: 158314 - DNA, 54 bp, Arabidopsis thaliana columbia
cctttcttttaacgctgatagcgctcagattgctcagctttttgagagcgctgg

SEQ ID NO: 158315 - DNA, 368 bp, Arabidopsis thaliana columbia
  unsure (1)..(368): unsure at all n locations
aaaaaaacccttcaaaacatttccttattctttcttcttcatctacaacaatggctggagttgcctttggttcctttgatgattcattcagcttggcttctctaagagcttacctcgctgagttcatctccactttactctttgttttcgctggtgttggctctgccattgcctacgcaaagctgacgtcggacgctgctcttgatacaccgggactagtggccatcgcggnttgtcatggttttgctctcttcgtggccgntgcaatcggagccaacatctccggtggccatgtgaacccagccgtcacttttggtcttgctgtcggtggtcaaatcacagtcatcacccggagtttctactggatc

SEQ ID NO: 158316 - DNA, 374 bp, Arabidopsis thaliana columbia
tgttgtctaaagcgaaccaacaaaaagtcttcatctttaatcattcaatggcttcttcgtcttctatgcagatggttcacacttcccgctccattgcccagattgggttcggtgttaagtcgcaattagtttctgcaaatcgaacaactcaatcagtttgctttggagctcgttcctctggaattgcattatcttcgagattgcactatgcatcacccattaagcaattttctggggtttatgcgaccaccaagcatcagagaaccgcttgtgttaaatccatggctgctgaggaagaagaagtaatcgaacctcaagctaaagtgacaaacacggtttactttgatgtggaaattggaggtgaagttgcttgc

SEQ ID NO: 158317 - DNA, 398 bp, Arabidopsis thaliana columbia
cccagacctcggttatgatgctgctaaaggtgaatatgtggatatggtgaaagctggaatcatagaccctctgaaagtgatcaggacagctttggttgatgctgcgagtgtgtcatctttgttgacgacaacggaagctgtagtggttgatcttccgaaagacgaaagcgagtcaggagcagcaggagcaggcatgggtggaatgggaggcatggactactagatccactaaattctgtcttttgttttcaccaatcaccatcttaacttgagaagagagatacgattcttttaggagttttagtcttcgtctttgccttattgttgctcaataacctcaaaagttttacaataaacagagcacacttggcaatgttacgagacacactattagcatc

SEQ ID NO: 158318 - DNA, 417 bp, Arabidopsis thaliana columbia
gaaaaatggcgactggagtattgccagctccggtttctgggatcaagataccggattcgaaagtcgggtttggtaaaagcatgaatcttgtgagaatttgtgatgttaggagtctaagatctgctaggagaagagtttcggttatccggaattcaaaccaaggctctgatttagctgagcttcaacctgcatccgaaggaagccctctcttagtgccaagacagaaatattgtgaatcattgcataagacggtgagaaggaagactcgtactgttatggttggaaatgtcgcccttggaagcgaacatccgataaggattcaaacgatgacctacttcggatacaaaagatattactggaactgttgatgaggttatgagaatagcggataaaggagcttgattttgtaaggataac

SEQ ID NO: 158319 - DNA, 150 bp, Arabidopsis thaliana columbia
ggtttgcttgttactgttgatggacctcatggtaagcatgttgaagaagtattagagtatgtccgatatggcttgtggagcatagcacttgctgatgaattttatattgagcttactgtcaagctttaacactttctggtaaggagaact

SEQ ID NO: 158320 - DNA, 286 bp, Arabidopsis thaliana columbia
ggaagggataaacaagatcagaacaaacaaactggtttcattgtctgaacaagagcttgtggattgtgacactgaagagaatcaaggttgtgcaggaggtctcatggaacctgcgtttgaatttataaagaacaatggtggcatcaaaaccgaagagacttatccttacgattccagtgacgttcaattctgtagagctaatagtattggtggagaaactgtaaccatcgatggacacgaacacgtccttgaaatggatgaggaggaccttttaaaagttgttgtt

SEQ ID NO: 158321 - DNA, 413 bp, Arabidopsis thaliana columbia
gtcgagagcattttatatcttcaatcatcttacgcaggctgttgtagcagcagtgtctatcggagacgatgaagttcaacgtcgccaatccgaccaccgggtgtcaaaagaaactcgagatcgatgacgatcaaaaactccgcgcctttttcgacaagaggctctctcaggaagttagcggagatgctctaggcgaggaattcaagggatacgtattcaagatcatgggaggatgtgacaagcaaggtttcccaatgaaacaaggagttctcactccagggcgtgtccgtcttttgcttcaccgaggtactccttgttttagaggacacggaaggaggactggagagaggagacgaaagtctgtccgtggttgcattgggagccctggcctgtctgttcttaacttggtcatt

SEQ ID NO: 158322 - DNA, 452 bp, Arabidopsis thaliana columbia
agctattccatcgccactaaatggaaaagtaatactaatagaagactgtgtagagacgagtggttcctttgtacttcaccagctaatgaaacgtgttctctcctctaactcctccgacgcacttatctttctcgcttttgctcgccctttctctcattatgatcgaatcttgcgtaaactgggatgtaatttagctacccataagtcgaataatcgattggtgttctttgacatgctcatggttaagtgttcagatggggatcaaatggaagacaatgtgagtgcagttgcgaaactatttcgggagatacaagaaaccgttcgaaagctacagagtgtaacaagtggtaacataactgttatggtggatgacatgtctctgctggaaattgctactaccggcaggaactcagatcacgtattggacttcttgcattattgccacacataag

SEQ ID NO: 158323 - DNA, 362 bp, Arabidopsis thaliana columbia
aaaaaccttgacgccgttttcttcttcgatcttcttcttcctccagagaaaacaacatggccatggcaacaaggactctaggctttgttttgcctacgagcttatcttcccagccttccttcgaccgtcgcggcggtggatttagggtttctgtcatccgttgctccacttctccactcacttttcccacttctggtgttgtggagaaaccttggacttcgtacaatgctaggcttgtgttagaagatggttctatctggcctgctaagtcttttggtgctcctggaacccgtattgctgaattggtggttaacacttccttgacaggggatcaagaaattttaactgatcctagttatgct

SEQ ID NO: 158324 - DNA, 456 bp, Arabidopsis thaliana columbia
aacaaatccaacgatgaggggattggtgaacaagctcgtgtccagatctctctccatctccgggaaatggcagaaccaacagcttcgtcgtctcaacatccacgagtatcagggagctgaattgatggggaaatatggagttaatgtgccgaaaggagtagctgcttcttcgttggaagaagttaaaaaggctattcaagatgttttccctaatgaaagcgagttggttgttaagagccagattttggctggtggaagaggtcttggaacattcaagagtggtcttaagggtggtgttcacattgttaaacgtgatgaggctgaagagattgctggaaagatgctaggacaagtacttgtcaccaagcaaactggtcctcaaggcataggagttagcaagggttacttgtgtgagaaattgtcactcggtaatgagatggtacttttcatttattt

SEQ ID NO: 158325 - DNA, 425 bp, Arabidopsis thaliana columbia
aaaaaaacctaacaacctctcttctctcttcctcgttcaacaacaatggagttctggggagttgcggtgacaccaaaaaacgctactaaggtgactcctgaagaagacagccttgtccacatttctcaggcttcacttgactgcacagtgaaatctggagaatctgtggttttgagtgtgactgttggtggggctaaacttgttattggaacactttcacaagacaagttccctcagattagctttgatttggtttttgataaagagtttgagctttcacacagcgggaccaaagcaaatggtcatttcattggctacaaatcccccaacaatgagcaggatgacttcactagttcggatgatgaggatggtcctgaagctgttcctgttctgcgccctactgttgttactgccaacggaaatgc

SEQ ID NO: 158326 - DNA, 451 bp, Arabidopsis thaliana columbia
  unsure (1)..(451): unsure at all n locations
cacacttaagtccatcgacatctggagagtgagaagagaggaatagccaaagatgactttcaagcgaaggaacggtgggaggaacaagcacaacagaggacacgtcaacccaatcagatgctccaactgcggcaaatgctgccctaaggacaaggccattaagaggttcattgtgaggaacattgtggagcaggctgctattagagatgttcaggaagctagcgtctatgagggatacacattgccgaagctatatgcaaagacgcaatactgtgtctcctgtgctatccactctcacgtcgttagagtccgttcccgcaccaaccgtagggttcgtactcctcctccacgtttcaccagacgcaaggaggatactcccaagcctggacagccaggacaggcccctcgtccagctgngcctggagctgcagctgcaccgcgtgtctgaagc

SEQ ID NO: 158327 - DNA, 442 bp, Arabidopsis thaliana columbia
  unsure (1)..(442): unsure at all n locations
acggacaccgtcgagtctttcttccttcttttcatcgccaccgccatggccgccaagtccaccgtctccttccgtgacggcatgttaccaaacggagacttcgagctaggaccaaaaccatcagacatgaaaggaacagaaatactaaacaaactagcaataccaaactgggaagtcacaggattcgtcgaatacattaaatcaggacataaacaaggagacatgcttctcgttgttcccgccggtaaattcgctgtaagacttgngaacgaagcatcgatcaaacaaagacttaaagtggttaaaggaatgtattactcactcacttttagtgctgctagaacttgtgcacaagacgagagacttaacatatctgtagcacctgactccgggtgattccgatcagacggttatagtagtagtgggtggggattacatgctt

SEQ ID NO: 158328 - DNA, 262 bp, Arabidopsis thaliana columbia
taacgaccaaaattcaactaattgtaaatgataaaccgttttttgcggaataaataacttgagaatcttccaacacagaaaacaagaagagagaaaagtaaactggcaggtaattttaataggggacgacgacgaaacacaggacaatataaagaaacataaacttagagagtcgctgcgcccgaccccagtaaccaaccaggggtttttttttaaaaattggccttcttcaaaccaatgaccaagttccaaaatggttggt

SEQ ID NO: 158329 - DNA, 397 bp, Arabidopsis thaliana columbia
taccgtactgaatgcccgaatcaacccatccgttcgtataaatgcaaaaaaagtcagaaatattacaattgtttgaaactaccctcagtatacccacagggtgttataacttacattgagggtgttatatttgaaactctacaccatttcattggtaaaaatatgtcttctttaatcatcaatcattccataaagttgaaacatgtttatcaatttactgcaggatcaccatgcttttgcagatcgctgtttcttcaacagtacccacccttcgtctcgaacggagagtagatatttttaatgccacttcttcattatttctctgtacatagaatttcaaaatgtggtactggcaatgttacaatgcttaatgttatttcaacaacgagcacaaaac

SEQ ID NO: 158330 - DNA, 430 bp, Arabidopsis thaliana columbia
cttcatcatcatcatcaaatcccagctttcttccaagtgatccttcactctctatactgcgaggtaccgttcttctgactcttggggcgaattcggatcggctgacgcagctccgattgcacaacaatggcttctcgtatcatcaatcattccaaaaagttgaaacatgtttccgctttactgcggcgtgaccatgctgtggcagtccgctgtttctccaacagtacccacccctctctcgttggaagagaagatatcttcaaggcccgcctgaattattcctctgtagagagaatttcaaaatgtggtactggcaatgtaacaatgcttagtggtatttcaacaacgagcacaaaactaagcagcccaatggcaggaccaaaactatttaaagaaattataagctcccagatgcgatcagtgagaggat

SEQ ID NO: 158331 - DNA, 443 bp, Arabidopsis thaliana columbia
gagaaattcgaaaacgttcagaaatattacaaacgtactaaagaaactcgcggtggtcgtcatgatggtaaagcttacaaggtcggctctcagcttgaagctctcaacactactcctccttcatcttccctcgacgttactcctctctccgtcgctaatcccattctcatgccttcttcttcttcttctccatttcccgtattctctcaaccgcaaccgcaaacgcaaacgcaaccgcctcaaacgcataatgtctcttttactcctactccaccacctcttccacttccttcaatgggtccgatatttaccggtgttactttctcgtctcatagctcatcgacggcttcaggaatggggtctgatgatgatgacgacgatatggacgttgatcaggctaacatttgcggttctagtagccgaaaacgcaaacgtggaaaccg

SEQ ID NO: 158332 - DNA, 420 bp, Arabidopsis thaliana columbia
agtcaatttgctacaacttagaaaatggcggcggctacttcatccatcgctccttctctttcatgcccatctccttcttcttcatccaaaaccctttggtcttccaaagccagaaccttggctctacccaatatcggtttcctctcgtcttcttccaagtctctgaggtcgcttactgccaccgtcgctggaaatggcgccactggatcctcccttgccgctcgcatggtttctccgtctgcgggtcaaagcccttgtttctctcgattttgagacatctgtcttcaaaaaggagaaaggttcttttgctggattaccaagagttccttgtgagagggtggaagaaaacttttttctaagcattaattcccatatggtttttaaagggggaattatccaattttggttttgcatgcctct

SEQ ID NO: 158333 - DNA, 379 bp, Arabidopsis thaliana columbia
ctttatcaccaccaaaaaccaaaattcactgccaaaaaaaacacatcaaaacgatgccgtcggaagcggagagctcagcgaattcagctccggcaactccgccaccaccaccgaatttctggggaaccatgccggaggaagagtactacacttcacaaggagtacgtaacagcaaatcatacttcgaaacaccaaacggcaagctcttcactcagagcttcttaccattagatggtgaaatcaaaggcactgtgtacatgtctcatggatacggatccgatacaagctggatgtttcagaagatctgtatgagtttctctagttggggttacgctgttttcgccgccgatcttctcggtcacggccgttccgatgggat

SEQ ID NO: 158334 - DNA, 183 bp, Arabidopsis thaliana columbia
gaactctgctcttcttcttcttcctccgccatatctacaatgcttagtctctcaatcgctacgccggggacggcggcgatttttcgtagaggaactgcttcggcgacttcaacttcgtcttcattccatggtgtcagaatccagcaccaggtttctgctcgcgtccccgcggcggcgacgatt

SEQ ID NO: 158335 - DNA, 272 bp, Arabidopsis thaliana columbia
agaaaaacaaaaatggctgccatagcttctactctctctctttcttcaaccaaacctcagagacttttcgattcttccttccatggctcagccatctccgcagctcctatctccatcggtctcaaaccacgatctttctccgttcgcgccacaaccgctggttacgacttgaacgctttcacgttcgacccgatcaaggaatcgatcgtgtcacgtgagatgacgagaaggaacatgacggatatgatcacttatgctgagactgaagtcgt

SEQ ID NO: 158336 - DNA, 77 bp, Arabidopsis thaliana columbia
gccatggctgcatctttctctgtcccctctatgataatggaagaagaagggagattcgaagcggaggttgcggaagt

SEQ ID NO: 158337 - DNA, 267 bp, Arabidopsis thaliana columbia
ctaagaattgatccggcgagattggcgagcatcaatgagtacgaggaaggtccaggggagagggagagtgggttcttcctcctttatgtcttctttttttctataatctttcttcttacatcttcctccttcaccttttttttccttttctttttcctatatctcctcctcatgttcttttactttcattttccacattcttaatttgtcttctttattctcttcccttatccttcctctctctcttctctttttcctttttctctt

SEQ ID NO: 158338 - DNA, 380 bp, Arabidopsis thaliana columbia
tcgaaccaaactaaatgaatacatacaaaaaatatattttaatatgtaaaaattaattatccgattccaaagttattgcaactaaagattcaagaaattccattcttacaggtaaatgctcaacacccacgtaagcttaaaaagtttatcatgattaagtgctttctgggtcgtctcataccttataaattcgtccttaatctcaacaattatatcgagatttttcaaatacaaaggatttacttgttactaatggagtctaccctctacttttcattagatcctgtattcactccgatagtatcataaatcgagtcgatgcagagaaaatgaatgcatttacatactattactattaataattatttctttttttttct

SEQ ID NO: 158339 - DNA, 378 bp, Arabidopsis thaliana columbia
ggagacactccttacagcattatgtttgggccagatatttgtggctacagcactaagaaagtacatgctatccttacttacaatggaaccaaccatttgatcaagaaggaggtcccatgtgagactgatcagcttactcacgtgtacaccttcgtcctccgtccagatgctacttacagtattttgattgataatgttgagaagcaaactggtagcctttactctgactgggatcttctcccagcaaagaagattaaggatccaagtgctaagaagcctgaggactgggatgacaaagagtacattccagatccagaagacactaagccagcgggatatgatgacatcccaaaggagatttcagacactgacgcaaag

SEQ ID NO: 158340 - DNA, 206 bp, Arabidopsis thaliana columbia
  unsure (1)..(206): unsure at all n locations
aatctccaccagagttatgggaatcaccggaagtctaacgccagatcagctcgattttttccactctcaagggtatttggtaatcgaatcgttcgcgagtgaggatgagataagaggcttaaggaagaggatggatgagttgcttaatnagtttgattgtatcgttatctatatttttttcaccaaaaatcatttgcaccccacat

SEQ ID NO: 158341 - DNA, 449 bp, Arabidopsis thaliana columbia
ctggttctcaagcagatttgtatcatgtaatgatatatatgttcctgagcccaatggacgagttaggagagaatcaactgttccctcaccagaaaacattacagcttgtgcttctctttctggctcttgtttctgttccgtgtatgttgcttccaaagccgttcatcttgaagaaacaacatgaagctaggcatcaaggccaggcgtacgcacctcttgacgagacagatgagagtcttcatgtagagacaaacggaggaggatcccatgggcatgaggagtttgaattcagcgagatatttgtgcatcagctgattcacaccatagagtttgtgcttggagctgttttcaacaccgtttttacctgcgtctatgggcttcagtcttgcccactcggagctgtcatcagtcttctattgaaaggtcctctttttcgttggggttacaac

SEQ ID NO: 158342 - DNA, 407 bp, Arabidopsis thaliana columbia
  unsure (1)..(407): unsure at all n locations
gccatctatgacatttgccgcagatccctagatatcgagaggtcaacctacacaaacttgaacaggttgatatcacagatcatttcatccttgacaacatctttgaggtttgatggtgccatcaacgtggatatcactgagttccagaccaatcttgtcccatatccccgtatccatttcatgctgtcatcttatgcaccagtcatctcagccgccaaggcttaccacgagcagctatcagtccctgagatcaccaatgccgtttttgagccagctagcatgatggcaaagtgtgacccgagacacggaaagtacatggcctgttgtttgatgtaccgaggagatgttgntcccaaagatgttaatgctgttgttggcaccatcaagacaaagaggactgttcagtt

SEQ ID NO: 158343 - DNA, 248 bp, Arabidopsis thaliana columbia
tacaagctcagccgcgaggcttttgagtgggtcattggtgagattgaatcaaggtttttacaatcgctagtggccccaggggaaatgatcggttgtgttgctgctcaatcaattggagaacctgctacgcagatgactctgaatacctttcattatgctggtgtcagtgcaaagaacgctacgctcggagttcccaggttgcgtgaaattattaatgtttcttagatgttcataactccattccttat

SEQ ID NO: 158344 - DNA, 344 bp, Arabidopsis thaliana columbia
ctgatacagaaattttttctcgggaaaattcagtgggaagatcgatactttccacaacggagaaggtgtttcgtttctgctgatcagcagattacttcttctttttctcggattgatccttttggattctttgaaagatggaccctaataatcagatacaggcaccagttgaaaattatgcaaacccaaggacatgtcttttccatgttctttttatgggtgctgtgttggttttttacattttttttttttttttttttatcttgttttttctattatctttttatttaactgttttttttatgttgatttttttttttcttcgtgtttttcttttatttttt

SEQ ID NO: 158345 - DNA, 237 bp, Arabidopsis thaliana columbia
agttggtgccatgattggtgctgcagctggaggttggatcaatgactactacggtcgtaaaaaggcgactctttttgcagatgttgtctttgcagctggagctatcgttatggctgctgctcctgatccgtatgttttgatatcgggtcgcctcttggtcggtttaggagttggcgtcttatcctacttcatgctctctttatttttttatttaagtattttcctccttttcctttt

SEQ ID NO: 158346 - DNA, 136 bp, Arabidopsis thaliana columbia
aaaaaaaaaaagtcgatcttgaagatttcatactttttctggcaattctgtttggtttcagaggaaggagtcaaaacaatggggatcgtttcacaagaagccattgatgaattccaagagctgatggatcaagttg

SEQ ID NO: 158347 - DNA, 400 bp, Arabidopsis thaliana columbia
atttataaacgtttcttctcattcgtcatctagtcccattctctgtccataacaatgaatatcaattgttctccattagggtttctaatttcactcttcttcattggtacttttcttgcaccacaagtcaaatctagggctttctttgtctttggtgactctctcgtcgacaatggaaacaacgactacctcgtcaccactggccgtgccgacaattacccgtatggtatcgactacccgacccgtagacccaccggacgtttctctaacggccttaacatttccgacattatcagtgaggctataggcatgccgttgactttggcgtaccttagcccgcatttaccggagaaaatcttttagtcggtgctatttttgccttccgaagaattggaatcct

SEQ ID NO: 158348 - DNA, 140 bp, Arabidopsis thaliana columbia
cggacgcgtgggattagccggagatggccgaaacatccgccgttgctgcagctgcttcttccatcatgggtactcgggtggcttccggtatccatcccggttcaggtcggttacagacgtgttcggtttggaaagaaaaa

SEQ ID NO: 158349 - DNA, 447 bp, Arabidopsis thaliana columbia
gaaacaagtgcaagcactccaacaaaggaaaatgtgattgcttcagcagctcgtatgtccatttcttcaaaggaactttctctggaaggtctcaacttgagtgatgtcccttcagaagtttgggaatctggtgagatcacgaaagttaatctttctaagaactctatcgaggaattgcctgctcaactttctacatctgtttcccttcagacattaattttgtcaaggaacaaaattaaagattggccaggtgcaatcttgaaatcacttcccaatcttatgtgcttgaagctggataataatcccctgaatcagattccactggatgggttccaagtagtctctgggcttcagattctagacctaagtgttaatgcagtttccttcagagagcatcctaagttttgccacttgccacaactgcgagagctttaattgagtcgaatc

SEQ ID NO: 158350 - DNA, 227 bp, Arabidopsis thaliana columbia
cacaaagagaaaacaaaaaaaaagtaaagaaaatgaaaattgtgaagcggtgaaaacaagagttccaaaaaggtggctcctttttgtttctggagatgcgttattgtgacccttctttgaaatttagggttcattttctcagatttcgagttcgttgcgttcgaatctttattgggtttactttttttttctattttcgggtctatgctctttttacttttttttca

SEQ ID NO: 158351 - DNA, 227 bp, Arabidopsis thaliana columbia
caacgttgcgaatccaactactggatgccagaagaagctcgagatcgacgatgaccagaaactacgtgcgttttacgacaagagaatctctcaagaagtcagtggagatgctttgggcgaggagttcaaaggatacgttttcaagatcaagggtggttgtgatatgctaggtttcttaatgaagtagggagctttgatttcatgtcgtgtatccattttttttttat

SEQ ID NO: 158352 - DNA, 308 bp, Arabidopsis thaliana columbia
gccatggcagcctctctccaatccaccgctacattcctccagtcggcgaagatcgccaccgctccttctcgcggaagttctcacctccgatcgactcaagccgtcggcaaatcttttgggctcgaaacttcctcggctcgcctcacttgctccttccagtctgactttaaggacttcaccggtaaatgctccgacgctgtcaaaatcgccggattcgctcttgccacctctgctctcgtcgtctcgggagcaagtgcggagggagcttcaaagagattggcctatgatgagattcagagcatgacata

SEQ ID NO: 158353 - DNA, 324 bp, Arabidopsis thaliana columbia
ctttatctcccaaaacacaaaacaaaaaaaaatggcttccactgctctctcaagcgccatcgtcggaacttcattcatccgtcgttccccagctccaatcagtctccgttcccttccatcagccaacacacaatccctcttcggtctcaaatcaggcaccgctcgtggtggacgtgtcacagccatggctacatacaaggtcaagttcatcacaccagaaggtgagctagaggttgagtgtgacgacgacgtctacgttcttgatgctgctgaggaagctggaatcgatttgccttactcttgccgggctgtgtcttgttcgag

SEQ ID NO: 158354 - DNA, 179 bp, Arabidopsis thaliana columbia
gtttgcttgctgtgcctgtgttggtcagtctttgaagaaatgttgaaatcgactagtaaggatgctcaggatctcttccattctcttcactctgcttataccgctacaccaacgaatctcaagatcatcgacctttatgtttgtttcgcggccttcacaggtttgattcaggttgctta

SEQ ID NO: 158355 - DNA, 446 bp, Arabidopsis thaliana columbia
  unsure (1)..(446): unsure at all n locations
accaaatcgccgccatgtttaaacaagcttctcgtctcctctcccgatctgtcgccgccgcatcttccaaatcggtgacgactcgtgccttttcaacggaacttccatcgacgctcgattccactttcgtcgaggcatggaagaaagtcgcaccgaatatggacccaccgcagactccttctgctttcatganaacctcgccttccactccttcttctatcccgacgaagctcaccgtcaattttgtcctcccttacacatctgagcttaccgggaaagaggtcgacatggtcatcattcccgcatcaacaggacaaatgggtgtcttgcccggaccgttccaacaattgctgagctaaaacctggcatcatgtccgtccatgaaggcactgacgtgaagaaatacttcttgagcaggggttttgattcctcacgcaaattccgtc

SEQ ID NO: 158356 - DNA, 360 bp, Arabidopsis thaliana columbia
gtcatagtcggagtctctgatgttatcagcaatggatacgactcgtggggaccggttttcggaagactgttctttggactttgggtcatcattcatctttacccgttccttaaaggtttgcttgggaaacaagatagaatgccaaccattatagttgtctggtccatccttctggcctcgattcttacacttctttgtgtccgttttaaatcagttttttcttaaaggtattttttttttattttaattatttgtattaatatacatttttcttattatcattctctttttttatctatttctttttattttttatgttttggtcgttatacttcttatttcatttattttattactttt

SEQ ID NO: 158357 - DNA, 347 bp, Arabidopsis thaliana columbia
gttaaattgagtttgtgtctcgtaacttatcctgtgagcgaaaatggtgaaagcaactaaggcagagaagaagatcgcctacgataccaagctatgtcagcttatcgatgagtacacccagatcttggtcgttgcggccgataacgtcggatcaactcagcttcagaacatcagaaagggtcttcgtggagactccgtcgtgcttatggggaagaacactatgatgaagcgttccgttaggattcactctgagaacaccggaaacactgcaatcctgaatctgcttcctctccttcagggaaacgttggtttgatctttaccaaaggtgacctcaaggaagtgagcg

SEQ ID NO: 158358 - DNA, 287 bp, Arabidopsis thaliana columbia
cctcacttcactcgtccttgaaacttgagcttcaattacaaagaatggctgcttcaagtgctgtcaccgcaaactacgtcctcaagccacctccattcgcactggatgctttggagccgcatatgagcaaacaaactctggagtttcactggggaaaacatcacagagcttacgtggacaacctcaagaaacaggttcttggaaccgagcttgaaggcaagcccttagagcacattatccacagcacttacaacaatggtgatctcctccctgctttcaacaacgct

SEQ ID NO: 158359 - DNA, 343 bp, Arabidopsis thaliana columbia
gccgcttcttcttcttcctcactgtagctcgtcgtcgctacaccatctagaagacccttaaccatggctgtcgggaagaacaagaggatttcaaagggtaggaaaggaggaaagaagaaggctgttgatcccttctccaagaaggattggtatgacgtgaaggctcctggttctttcacgaacaggaatgttgggaagactcttgcttccaggactcatggtaccaagactgtctctgagggactgaaacacatggtgtttgaggtttcctcattcatgttcttaaatataaattatctaaattttaataatttatgtatattttatttttatctttatcctt

SEQ ID NO: 158360 - DNA, 318 bp, Arabidopsis thaliana columbia
gttgtaatgtaaccgacgagacggatgtcgagatcgccgttaagttcaccgttgaaaaacacggaaagcttgacgttctgtttagtaacgccggggtcttggaagcgtttggaagcgttcttgatttggatcttgaggcgtttgatcgaacgatggcggttaacgttcgcggagcggttgcgtttatcaaacacgctgtacgttcgatggtgtctagtgtttcttgtggctccattttatgtactcactagtttttgcggtagatttaggttcttcctaattttatattttctctatctttatattttactctctttt

SEQ ID NO: 158361 - DNA, 411 bp, Arabidopsis thaliana columbia
  unsure (1)..(411): unsure at all n locations
ggcgtcggtggcggcatcatcgtcgatatcattcgctgcatcattcctcaaaatcaaagcattccctctctcccctcgcttcttccccatccgtacactccgttgctctgtctcctcctcctcctctgagcccattgaattcgacatctccttcgctcctcccaaacccaaaccctcctccactcacggcggcgtcacccctcaacaactcttcatcccttggatcgtccgtagtgatgacggcactctcaaactccaatctcaacctcctgctcgtttaatccacaacctcgccatcgatgccactactcaaaaccctaagaagaaagataaatctaaggagaaacaacctcaagctaccttctntttcttcgncaccaccaccgtcttatnttcagctttacactcaga

SEQ ID NO: 158362 - DNA, 329 bp, Arabidopsis thaliana columbia
ccaaaaaccaatcccagatctgaatctcaacctaaacctcagattcatcatcatggcttcttcttctaactacgatggaatccttctcggtatgggtaacccactcctcgatatctctgccgtcgtcgacgacgaatttctcaccaaatacgacatcaagttgaacaatgcgattctcgcggaagacaaacatttgcccatgtatgatgagatgagtagcaagttcaatgttgaatacattgccggaggtgctactcagaactcaatcaaagtggcttaaaggatgcttcaaacttctggggcaaccagtttcatgggatccatttgaa

SEQ ID NO: 158363 - DNA, 136 bp, Arabidopsis thaliana columbia
cataaactagggttcccccacaaatcatcttacatgtatcctttattccttccttcctttctccgtcatcatcattttttccaccgacaacaatctctcggagtttgggtataattacttctctattaaccaaatg

SEQ ID NO: 158364 - DNA, 305 bp, Arabidopsis thaliana columbia
cgataatggcggcgtcaacgaactcattcctcatcggaaaccaaacccaaatcccttctttgaaacccaaatcaatatcccaatcctttatccacttcactaaacccaacaccatcaacctcaccacccgaaccaaatccgtttcaatccgatgcgcttccgcttcaaccaccgtcggatccgagcagcgagtcatcaatttcgccgcaggtccagccgcattaccggaaaacgtcctcctcaaagctcaatcagatctctataactggcgtggatctggtatgagtgttatggagatgagtcat

SEQ ID NO: 158365 - DNA, 294 bp, Arabidopsis thaliana columbia
caccagtctctcgcaatcttcgctcttctctttgttctctctctctcaacgcggttcagatccgagtttgggagattcaagctccctgaaaaaagccctttactctcgcttaccaactttgctccagcatggcaggatctgcaccagaaggcacacagtttgatgcacgtcagtttgaccagaaactcaatgaagtacttgtgggacaagatgagttctttacatcctatgatgatgttcatgagagctttgatgccatgggtctttaagagaaccttttcaggggtatttatt

SEQ ID NO: 158366 - DNA, 204 bp, Arabidopsis thaliana columbia
  unsure (1)..(204): unsure at all n locations
attgaagatctccttacctctctctttctctcgctacttatatttatttccctaaatccttggagctaggagacatcgtgccgttttcttatttgaaagacaagagggagatagatggaggtgaaggntagaagagatgtgtttgatatattattaatgttataattattaaagtgtttgattttattatattttatattatta

SEQ ID NO: 158367 - DNA, 381 bp, Arabidopsis thaliana columbia
aaccattcagtggtttcctaaaggatctcttgaacctcaaaagtatgagggtccacgcaatgctgaagctttggctgaatacgtgaacaaggaaggaggcaccaacgtaaaattagctgcagttccacaaaacgtggttgttttgacacctgacaatttcgatgagattgttctggatcaaaacaaagatgtcctagtcgaattttatgcaccatggtgtggccactgcaaatcactcgcttccacatacgaaaaggtagccacagttgttaaacaggaagaaggtgtagtcatcgccaatttggatgcttatgcacacatagtccttggtgtgaaatttggagttagtggatttcccaacatttgaaattctttctatag

SEQ ID NO: 158368 - DNA, 421 bp, Arabidopsis thaliana columbia
caaaaatggcgacgtcgggaacgtacgtgacggaagttccgctaaaaggatcggccgagaaatactacaagaggtggaagaacgagaaccatgtcttccctgatgctatcggccaccacatccaaaatgttaccgttcacgaaggcgaacatgactctcacgggtctatcaggagttggaactacacatgggatggaaaggaggaggtgttcaaggagagaagagagatagacgatgagaccaaaacgttgacgttaagaggacttgagggtcacgtgatggagcagctcaaagtgtacgacgtcgtctaccaattcattcccaaatctgaggataccttgcttggcaaaatcactttaatatgggagaagcgcaacgatgattcctcagaaccaagcgggtacatgaaaattcgcaagag

SEQ ID NO: 158369 - DNA, 354 bp, Arabidopsis thaliana columbia
aaaaaaaaaaacagagagaggaaaaaaaaatgttgcagctgtttttcacgatagcgttctcggcggcgccgttaacgttgtacataccgccgataagatgtttgacggtgtttgtggagacgatggaggagatgggaatggaaggttatgttttttttttattatttttatatttttttttttattatttttttgttaatttttttatattttttttttttttatttattttatttatattttatatttattatattttttttaatttatatttatatagaaataatatttttatattttttttttaaaatttattatttgtatttatttaatttttgtttattttatttattt

SEQ ID NO: 158370 - DNA, 441 bp, Arabidopsis thaliana columbia
ctcattcgcgcgacgcaaacgatcttcagccatggccaccgccgcagatgttgacgctgagattcagcaggcgctcactaacgaagtcaagctcttcaaccgctggacctatgacgacgttacggtcacagacatcagtcttgttgactacattggagttcaggcagctaaacatgctacctttgttccccacaccgctggaagatactctgtgaagagattcaggaaggctcagtgccccattgttgagaggctcaccaactctctcatgatgcacgggaggaacaacggtaagaaattgatggctgtcaggatcgtcaagcacgccatggagattatccacctcttgtctgacttgaacccaattcaggtcataattgaccgcattgtcaacagtggttcaagtgaagaagctaccagaattggatctggtggtgttgt

SEQ ID NO: 158371 - DNA, 172 bp, Arabidopsis thaliana columbia
gttcctatctctcatgatagaacggatttcactgctaaaagagaagatgctcagcctttggttttcgaggtcacagagcgaagtaatcggggtttcgcagggacttggggccgagagaaagaaggtgggaaagggagtaatttactttggattgaagcaccttgtgttctgt

SEQ ID NO: 158372 - DNA, 456 bp, Arabidopsis thaliana columbia
atcagcaagactatatgggaacaaaagttttgtagatgaaagacaccgacacagatatgaggtgaatccagccatggttccacgttttgagagctctggactcacattcacaggaaaagacgagacagggcagcgaatggagatcattgaactgcctaaccatccgttttacgtcggagctcagttccatcccgagtacaaatcaagacccggaaaaccatctcctctgtttctaggactaattggagcagctagtggagaactagacactgttctgctacaaagctaccaagaaaccgtcgttccacgttctctacccaacggaaaactagagagagtttactggaaaggtgcagcgaagaaaccagtcagtgttgggtacagtttatgtgatcgtgtctactcgtggaccaccgtatctgcattaacaatgactttttttttaaaaagctattt

SEQ ID NO: 158373 - DNA, 313 bp, Arabidopsis thaliana columbia
gcccgtgacgtggtggctctacgtggccatctttagcaaggctatgcttcgaacgagatggctaataagatgcagcaagcgctcactaaccaagacaacatctttacccgctgtacctattacgacgcgctggacccagcaagggtgtcgatgagtctaacagtgacaccatatacatgttgcttggtgtctaaccattaaatactctatatagataggaggctaggccccattgtgaaggctacaatttttatgatgcacgaggacaacggagaaattgtggtgcaggacgtaaccccctggagtatatcca

SEQ ID NO: 158374 - DNA, 177 bp, Arabidopsis thaliana columbia
gttggtttcaagtattatcaatttcccggcgaattctccaccagagttatgggaatcaccggaagtctaacgccagatcagctcgattttttccactctcaagggtatttggtaatcgaatcgttcgcgagtgaggatgagataagaggcttaaggaagaggatggattagtttttt

SEQ ID NO: 158375 - DNA, 422 bp, Arabidopsis thaliana columbia
gttcctctcatcatcatccagactgctgacgactagaaatacctgaaaacaaatgttgaggttgaccagattgaatcatgggtcaaggacttcaaggatggaaaaattgctccccacaaaaaatctcaacctatcccagccgaaaacaacgagccagtgaaggttgttgtttctgacagccttgacgacattgtcttaaactctggaaagaacgttttgcttgaattctatgctccatggtgtggacactgccaaaagcttgctccaatcttggacgaagttgctgtgtcgtaccaaagcgactcaagtgtagtcatcgctaagctagatgcaaccgcaaacgacttcccaaaagatacctttgatgtgaagggatttccgaacatttacttcaaatcagcgagcggaaacgttgtggttta

SEQ ID NO: 158376 - DNA, 446 bp, Arabidopsis thaliana columbia
aacaaaaatggttttgcaaaagcttcctctcattgggctgcttttgctcctgaccatcgtcgcctctccagcaaatgcagatggacctgtttgcccgccgtcgaacaaactaagccgggcaagtttccctgaaggttttttatttggcacggctactgcggcataccaggtcgaaggtgcgattaatgaaacttgtcgtggaccagccttatgggacatctactgtagaagatatccagagaggtgcaataacgataacggcgatgtggccgttgatttcttccatcgttataaggaagatatccaactaatgaagaatctaaacacagacgcctttagaatgtctatcgcatggccaagaatattttcttatgggagaaaggagaaaggagtgagtcaagctggtgtgcaattttaccacgacctcatcgacgagctcataaaaa

SEQ ID NO: 158377 - DNA, 398 bp, Arabidopsis thaliana columbia
aaagcttttaacctcagccgttaaatctttctccgatcatgccgaccagaaacatcgccattggtggagtccaagaagaggtctatcaccccaacgcacttagggcggcgctcgctgagtttatctcgactttgatcttcgtcttcgccggctcaggctccggaattgctttcaacaagatcactgacaatggagcaaccactccttccggcctcgtcgccgctgccttagctcatgctttcggtctctttgtcgctgtctctgttggcgctaacatttccggtggccacgttaaccctgccgctaccttcggtgtcttactcggtggtaacatcactctccttcgtggtattttctactgtattgctccacttcttggcttccgtagccgtttgttt

SEQ ID NO: 158378 - DNA, 444 bp, Arabidopsis thaliana columbia
ctcaatctcaatctcacgtcaacgaccgtcgccgtcaccggaaggaaacgatttcatcatcttctacaatgatcccatacgcaacaatcgaagaagcgtcgatcgcattatctcgaaacctcacatggctagagactctctggttcgattactccgccaccaaatccgattactacctctactgccacaacattctcttcctcttcctcatcttctctctcgttcctctccctctcgttttcatcgaatcatctcaatccacctcagatttgttcaatcgctacaaaatccaaccaaaagtgaaaaactcattctcatcgatgttcaaatgttacaaagacgtcatgaagatgttcatcctcgtcgttggtccattacaactccgttcttatccttcgattcagatgattgagataccgaggggattaccattaccatcatgta

SEQ ID NO: 158379 - DNA, 426 bp, Arabidopsis thaliana columbia
gctctaatcacgtccttgtagaggaaaagaaaaaaaatggctgcttcatcttcctctttcactctctgtaatcacaccacacttcgtactctccctctgagaaagacccttgtcaccaaaacccaattttcagttcccacaaaatcatcagaatctaacttctttggctccacactcactcactcatcgtatatctccccagtctcttcctcttctctcaaaggcttaatctttgccaaggttaacaagggtcaggctgcaccagacttcacactaaaggatcaaaacggaaagccggtgagcctcaaaaagtataaagggaagcctgttgttctctacttctaccctgcagatgaaacccctggctgcaccaagcaggcttgtgctttcagagactcttatgagaaattcaagaaagctggtgca

SEQ ID NO: 158380 - DNA, 454 bp, Arabidopsis thaliana columbia
gtttcttccatccatggcgtctctttcttctacctctctctctctccccaagaattctcaccaactccatccttcatctggtttttctctgaatccaaatgctcgttgtgtcagtgtttcatttggactgaatcactccaacaaacttcatatttctgctcctagaaccaaaaggatcctaaccattcaatctgcatacagagatgatgatggttcaggcagcacaggcctattcgtcggagggtttattttgggcggacttatagtcggtgccctcggatgtgtatatgcaccacagatcagcaaggctatagctggagcagaccgaaaggatctcatgaggaagtcgccctaattcatatttgacgaggaaaaagctttggagaaaacacgtaaggtactagctgagaaaattgctcagctttacttctgttatcgactatgtcctcttttt

SEQ ID NO: 158381 - DNA, 190 bp, Arabidopsis thaliana columbia
accaaattggcaaagttccctgagagagagagagagacaacaccttcgcattcgctaactttctctgtaaccgccatgggtattaagggtttaacgaagcttttagccgacaatgcgcctagttgtatgaaagaacagaaattcgagagctattttggccggaaaatcgctgttgatgcttgcatgagca

SEQ ID NO: 158382 - DNA, 371 bp, Arabidopsis thaliana columbia
  unsure (1)..(371): unsure at all n locations
cagagaagagagagcgataataatggcgtttaagggtttcgcgtgtttttcgattcttttgttgttgactctattcgnttcctctatacgaagcgaggagacgaaggaatttgtcttgactctcgatcactctaacttcaccgaaaccatctccaagcacgatttcatcgtcgtcgagttctacgccccttggtgtggtcactgccagaagcttgctcctgagtacgagaaggctgcatcagagtttgagtgtcataacccttctcttgctctcgccaagatcgatgctagtgaagaagcaaacaaagaaatttgctaatgagtaccaagattcaagggttcccccacccttaaagaattttgagaaaatg

SEQ ID NO: 158383 - DNA, 458 bp, Arabidopsis thaliana columbia
gaaagtcgaagcctctaaaaccctaatcctctctgaaaccctagacatcgcagctgaaaatgaccggagaagtcgtcaaccctaaagcgtatccgcttgcagattctcagttatcgataacaattcttgacctcgttcaacaagctactaactacaagcagctcaagaagggtgctaatgaagctacgaagactcttaatcgtggaatctccgagtttgttgtcatggctgcagatgctgagcctctagagattcttcttcatcttcccctacttgctgaggataagaatgttccttatgtctttgtgccttcaaagcaagccttgggaagagcctgtggtgtgactagacctgttatcgcttgttcagtcacatctaacgaagctagtcaattgaaatcacagattcaacatctcaaggatgctattgagaagcttctgatctaaggcattctctga

SEQ ID NO: 158384 - DNA, 212 bp, Arabidopsis thaliana columbia
cgacttttgatgatggagatttcccagctcaaacccattctccgtctgaacacgaagactttggtggctacgataatttctccgaagcacagcaacctccgactcaacatcaatccggtggattctcttctttcaatggagatcctgcttccccaaatggatatggatttggtgcttcttcacctaaccatgactttttctcgtctcttgaa

SEQ ID NO: 158385 - DNA, 391 bp, Arabidopsis thaliana columbia
gaaggcgtcaccgtcgtgtctttcttccttcttttcatcgccaccgccatggccgccaagtccaccgtctccttccgtgacggcatgttaccaaacggagacttcgagctaggaccaaaaccatcagacatgaaaggaacagaaatactaaacaaactagcaataccaaactgggaagtcacaggattcgtcgaatacattaaatcaggacataaacaaggagacatgcttctcgttgttcccgccggtaaattcgctgtaagacttgggaacgaagcatcgatcaaacaaagacttaaaggggtttaaggaatggattactcactcacttttagggctggtagaacttgggcacaagacgagagacttaacatatttgtagcacctggct

SEQ ID NO: 158386 - DNA, 218 bp, Arabidopsis thaliana columbia
cagctaaactttattggagaaaccctaatcggtgacaatgggtatttctcgtgactctatccacaagaggcgtgccactggaggcaagcagaagcaatggaggaagaagcgaaagtatgagatgggaaggcagccagccaacaccaagctctcaagcaacaagacggccagaagaataagagctcgtggtggaaatgacaagtggcgtgcgatgaggc

SEQ ID NO: 158387 - DNA, 334 bp, Arabidopsis thaliana columbia
cagatctctgatgcagtcctcgatgcctgccttgaacaagaccctgacagcaaagttgcttgtgagacatgcaccaagaccaacatggtcatggtctttggtgagatcactaccaaggctactgttgactacgagaagattgtccgtgacacctgtcgcgccattggatttgtctctgatgatgttggtcttgatgctgacaaatgcaaagtcctagtcaacattgagcaacagagtccagacattgctcaaggagttcacggtcacttcaccaaatgttctgaagaaatttgtgccttgtgaccatgggcacattgttttggctttatccact

SEQ ID NO: 158388 - DNA, 408 bp, Arabidopsis thaliana columbia
agataatcgtttgtctgtgcagagagagagagagagaaaatgaggttgttcgatccatggccagtgttcttcaagagagaatggaaacgttgctggccattcctcaccggtttcgccgtcaccggcgttctcatcaccaagctaaccgccggactcactgaggaagatgctaagaactccaagttcgtccagcaacacagaaggtgattcactgaagcaaaatgtagaagctgacaaggcatatagatttgggactatagtgaatgcttcagctttgaaacatgttcaataacaaagaagatcattctatatactcttttattttctctgagtttcgaaatcagcttttccttttctgaaacttagcaatggaatggttttgttcacagtattttattcccatttgtt

SEQ ID NO: 158389 - DNA, 415 bp, Arabidopsis thaliana columbia
gtgcctaggctggaaggtgaagtggtttatggagtaagtccagtgttggctgcactctctgttgggagacgagagttctatgctctctatgttcaagaaggtttagatttgagcagtaacaataggaagaagaaagacaagaaaggcttcgagagagttttgaaaatctctgaaaaacttgggttaaacatcaagaaacttcgaagcatgatcttaacatggtcgctgataacagaccacatcaaggattggtgcttgatgcttctccattagaattggtgaaagtgaaagaactagatccgatttcatcagaggaagagaaatattctctctgggtagcttttgatgaggtcactgatccacatcacttagtctcgatcataacatcttgcttacttttttggatcctcgttgt

SEQ ID NO: 158390 - DNA, 408 bp, Arabidopsis thaliana columbia
tagtaaaataaccattttattaaccacacttgaaaccgaccaaagccgaacatatggaatcagcatacaatgcgactcaaaataaaaataacgacatacacaattgctaatgtatcattttattgcaataattaatttatcattttccatttaattaaataatataacaacgttacgaatgcatgagcatgagcctcaccactcatcagtgatggccaccaccaacataacctcctccaagaccttctccaccaccaatgcctttagttctccaccaccaccatcatactcacctttttcaaaaactgagtactaagctttacattcaccttcgtattacttgaaattgtaatgagattcttatataagctaccaaagtttatttcattttatctttgcttttggtct

SEQ ID NO: 158391 - DNA, 394 bp, Arabidopsis thaliana columbia
cttcttcaagccgcggctaaagatccctacttctctcgacacttatagagtttcagtcatggccgcctccgcagaaatcgacgctgagattcaacagcagcttaccaatgaggttaagctcttcaaccgttggagctttgatgacgtttcggttacggatattagtcttgtggactacattggtgttcagccatcgaagcacgcaacttttgttccccatactgctggacgatactctgtgaagaggttcagaaaggcgcagtgcccaattgttgagaggctcactaactctctcatgatgcacggaagaaacaatggtaagaagttgatggctggcaggatcggcaagcatgccatggagattatccaccttttgtttgctttgacccgattc

SEQ ID NO: 158392 - DNA, 292 bp, Arabidopsis thaliana columbia
  unsure (1)..(292): unsure at all n locations
cacaaaacagaagcatgaagatgaataacaacgacggccaacataataaaacggtgacatttcctcgaaaaagcatcgtgaaggctactgttttcatcgtcgntctattcatttcagctgctatcttagacttactgggctatctcgatttcaatgcttttgcaggtttaaagctaacaacaaagacaaaagaaccaaatccttacggatgcgacttcgtacagaaccaatcaagtcaaacttctatctcacaaaaccgcaaatcgagattaaaccccaacaacagttcaaa

SEQ ID NO: 158393 - DNA, 468 bp, Arabidopsis thaliana columbia
gaaataaatgagaaagtcgacttcacatggaagaagcttttgcaaaagaagactgatgagatactaagactgaataatatctacaagcggttattggcaaatgctgcggtgaaattgtatgaaggtgaaggaagagtagttggttccaacgaagtggaggtgagacaaattagatggcatacaaataagttattaccgcaagcacatattgattgccactggcagtcgggcgcaaaagcctaatattcctggacatgagctggctatttcatttgattgaacttttgagcttgtaagaattccccaagcgtgctatattgcttggatgaatggattattttctgccatgtttaactcatatttgttctttactagttgtttatttttactattctttttttttcgtgtctatttttattttagatgcttatatttctttatatttcattttttatcaaaatatattta

SEQ ID NO: 158394 - DNA, 252 bp, Arabidopsis thaliana columbia
  unsure (1)..(252): unsure at all n locations
cgaaacttttatcttcgattgtgatggtgtgatttggaagggagataaattgatagagggagttcctgaaactcttgatatgcttcgtgccaagggaaagagattggtttttgtgacaaacaactcaacaaaatctaggaaacagtatggaaaaaagttcgagactctnggcctgaatgttaacgaggaggagatatttgctttcatcttttgcttgttctgcatacttgcctattattaatttcccaaaag

SEQ ID NO: 158395 - DNA, 231 bp, Arabidopsis thaliana columbia
gcgataaatcctctcttccttctacatctctcttttcctctttttctttctctctctcagccctaagagagaagaaataggctctgctctgcgccttttctacaagaaattcaccaaaaaagcttgaatatttatcggaatcaaagcttgggtttttaatcctggtaaagccatgtcacatatggtgtttcagagcgttgtcgttcccaaacccttattcttcttttaaac

SEQ ID NO: 158396 - DNA, 353 bp, Arabidopsis thaliana columbia
ttacgaagaaatctgctgagaatgcatcggtagagcaattgatgtcatcaattgaatcattcaaacaatctagtctgagaaaatcgtctctaggccggtctctaagcaaaggaggatcatccagaggaaacagcagccgccattctttcaatatgtttggttttccagcaggaattgacggaaacgtcgttcaagatcaagaagaggatgatactacacaaccaaaaaccgaaccaaaaaaagtctccattttcagaattgctgctctaaacaaaccaaagattccggtgctaatacttggatcaatatccgcagcagcaaatggcgttatcctttcaatctttggcatacta

SEQ ID NO: 158397 - DNA, 386 bp, Arabidopsis thaliana columbia
gcgaaccaacaaaaagtcttcatctttaatcattcaatggcttcttcgtcttctatgcagatggttcacacttcccgctccattgcccagattgggttcggtgttaagtcgcaattagtttctgcaaatcgaacaactcaatcagtttgctttggagctcgttcctctggaattgcattatcttcgagattgcactatgcatcacccattaagcaattttctggggtttatgcgaccaccaagcatcagagaaccgcttgtgttaaatccatggctgctgaggaagaagaagtaatcgaacctcaagctaaagtgacaaacaaggtttactttgatgtggaaattggaggtgaaggttctgtccaatattgttatgggtctttttt

SEQ ID NO: 158398 - DNA, 82 bp, Arabidopsis thaliana columbia
  unsure (1)..(82): unsure at all n locations
cttgctgaagtatatgagaagttcacgaagtatttgacatgtgtgattctgctgntggnttgagccgacagctcaatggatc

SEQ ID NO: 158399 - DNA, 331 bp, Arabidopsis thaliana columbia
acatcgtagttaaacctagaatagctcgtgagaagccgtgtcaatggcgccggaagcagagaagcaagcccgctgagaagaaaccagcttccgagaagccggtggaggagaaatcaaaagccgagaaagctccggcggagaagaaaccaaaggccggaaagaagctcccgaaggaagctggtgccggaggcgacaagaagaaaaagatgaagaagaagagtgtcgagacttacaagatctacatcttcaaggtgcttaagcaagttcatcccgatattggaatctccagcaaagcgatggggatcatgaaccggttcattaacgatattct

SEQ ID NO: 158400 - DNA, 297 bp, Arabidopsis thaliana columbia
  unsure (1)..(297): unsure at all n locations
atttatacaaaacttctaccccgagcacacgcattggagccgtagacagtcaagtgaaatccaatccacgaaataatttgatctgtgggcagcatcattgtggtaaaggtcgtaatgccagaggaataattaccgcaaggcatagagggggaggtcataagcgtctataccgtaaaatagattttcgacgaaatgcaaaagacatatatggtagaatcgtaaccatagaatacgaccctaatcgaaatgcatacatttgtctcatacactatggggatggtgagangagatatattt

SEQ ID NO: 158401 - DNA, 266 bp, Arabidopsis thaliana columbia
cacaacttctacaagactcaaatagtttctatttaattactaaaaagaaaaatgggtcgtggttacaatttgctattcgttctagtaacgtttttagtattggttgcagctgtaaccgcacaagggaaccgtggctcaaacagcggtggtggtcgaagaccacatgttgggttttatgggaatagatgccgaaacgttgagtctattgtgagatctgtagattagtcttattgttcatctatccttggtttatgcatatttttttt

SEQ ID NO: 158402 - DNA, 292 bp, Arabidopsis thaliana columbia
cgcatctcattgcttcatcattaccaaatcatcaacttaatcgtttctctcaaatttagggttttctcttttctcgaaagtcttgcggttttctgaatcatctctatctggtttgagggtttcgtttgatatctggagaaaggggtttctggaaacaaggagttcataattcgcgatcttgatctatcgatcttcatttatatataaaagcgtgaatgagattatgatggagtcgaaaggtggtaaaaagaagtccagcagtcgtagttccttattttacgaatctcccctc

SEQ ID NO: 158403 - DNA, 199 bp, Arabidopsis thaliana columbia
  unsure (1)..(199): unsure at all n locations
tttgattgagaagggtcataggaggattagtccattttttatattttatgctataacaaatatgggttctgcgtgtgttggcgattgatcttggggttatggntcctaactattcgatttcaactgcttgtgctacttcgaattactgcctttttacttgctgcgaattacattcttcgtgtttataatttttatccta

SEQ ID NO: 158404 - DNA, 205 bp, Arabidopsis thaliana columbia
ctctttaaaagaaattcgtaagtactatcaagaagcagaagatggcccaaaaggtggaaggacagggagggaaaggagccaacctatggtacgatggatcgacacatgacgccgtgaccaagatttagctctcttttttcttagacggaattcaatatggtcagtttgattatgttaagaacggataattcgtacaagttctttt

SEQ ID NO: 158405 - DNA, 285 bp, Arabidopsis thaliana columbia
  unsure (1)..(285): unsure at all n locations
gttaatcaaagggtttcttgtgaacagaacaatatatgtcttgctctatgttgatcgtttggatgtgtatagagtcgatgagctagataagcaagttgttatagcaatcacccaaacctttgtaaaagagatatnnagcaaaaccttgcttgttctgactcatgctcaattttcccctcccgatgaactttcctacaaaactttttcctacaagagatcagatttttttctcaaaactatccgtactggttcttaaaatcgataacaatatcttgaggattcttc

SEQ ID NO: 158406 - DNA, 240 bp, Arabidopsis thaliana columbia
  unsure (1)..(240): unsure at all n locations
cacgctttcctcttactctcttctccaagaaaacactgaataagatatggggttccttaagccaaccatggcgaggcgtttttctagcgatgggcgccgtttcatcagccgtggacatgtcaatcatctcctacgacgagaaacatggnnnctccaccaccggtggccgtagcgaagccgaggttatgagtatctactaggcatgattcggagtatcactgcaaggctcatagtcagccc

SEQ ID NO: 158407 - DNA, 158 bp, Arabidopsis thaliana columbia
  unsure (1)..(158): unsure at all n locations
accggttacatttgcttcgtacgagatttgaaggnctttactctcactcggnatgcttccaagtagaagacgacacgtgagtgcactgacacaggtgatgcgaaattattggcgccttttggcgggataatctttagcaggacagttgtttctgtcat

SEQ ID NO: 158408 - DNA, 130 bp, Arabidopsis thaliana columbia
gaaaatattagtcaccggctctactggttacttaggcgcacgactctgccacgttctcctccgtcgtggccactccgtacgtgcatgggtgcgtcgcaccatctatctctttgacttaccttcagaagtt

SEQ ID NO: 158409 - DNA, 393 bp, Arabidopsis thaliana columbia
  unsure (1)..(393): unsure at all n locations
cgctttcgtataaacttcacaagatctccaaaggcacatctctctccaccacactttaccaaaccaccggaagcgctcccggaaacctaggattcgtcaacatcaccgatcttaaaggaggcaaagtcggatttggctccgccgctnnaggttccaaactcgattcatcttacaccaaatccgttaaacaaatcccttacaacatctcaatcctcgagattgatgctccgatcatcgctcccggagttttaaccgctcctgctcctttcgcctccttgtcaaacatcaccggattactcgaaaaagccgtttgcaaaacctttgctaatttgcttgtctcaagtggagtactcatgacttacgtttcttcgtagttatttgtttctcactttt

SEQ ID NO: 158410 - DNA, 159 bp, Arabidopsis thaliana columbia
aatcccggtcgacgccacgcgtccgcaaaatcctaatcgatcaaatgaaactttcttcattttcctcgtaaaatcatacttaatgcgaggcagatttcaactccagatcatgtttcaaagtagttgttgaagaatgtttagtgaagatgtatttattaa

SEQ ID NO: 158411 - DNA, 183 bp, Arabidopsis thaliana columbia
cggacgcgtgggcttctctctgaatcaatccaatcatggttgagccggcgaacaccgttggaagtgccggtgaaccacatccgattgttgaaggatgagctcgatatcgtgatccccacgatccgtaacctctccctttctgagatttggaggttttttctttagtcttacttttttttttat

SEQ ID NO: 158412 - DNA, 274 bp, Arabidopsis thaliana columbia
  unsure (1)..(274): unsure at all n locations
ttctgcgtttcctctttggcttctcgaagaggaagaaaactttggcagagagcgaagcatgacacatattttggcctctccttcacgatattcgaagaagtctcctcctccttctccaacgaatcccagatcagnnngcaagtaggcgaatccttacgaagaattctaacttcatcatcaacgatagatactctagtttgattttcaaagtagtagtgtaaaggaatcagaaatggcggtgggagagaaggagcacgaatgatctgtggttgaa

SEQ ID NO: 158413 - DNA, 229 bp, Arabidopsis thaliana columbia
  unsure (1)..(229): unsure at all n locations
gagcaagcagcgtcgcagaagttgaacacaagtgtatctcacaatggcgaggattaaggttcacaaatggagggagaagtcgaagagcgatcttcaaaaccagctgaaggaactcaaagctgagctcgctctcctccgtcgnnctaaagtcaccggaggcgctccaaacacgctctctaatatcaagtgtgctcgtaaatccatagctcatgttttgaccgacttcttt

SEQ ID NO: 158414 - DNA, 233 bp, Arabidopsis thaliana columbia
  unsure (1)..(233): unsure at all n locations
caggtttcaccagtaccaggttgtgggaagagctctcccgacagagaaggatgtgcagcctaaaatttacaggatgaagctctgggctacgaacgaggttcgtgccaagtccaagttctggtatttcttgaggaagctccnnnttctcaagaagagtaatggacagatgctcgccatcaacgagatctatgagaagaacccaacaacgatcaagaactttggtatttggttgt

SEQ ID NO: 158415 - DNA, 118 bp, Arabidopsis thaliana columbia
aaagactccatgtcgagcatgtccatgtcggccttctcagctccagcttttccaccggaccagggttgatctacggaccagctgtggtacgtccattgcagcttctgcgacactgacc

SEQ ID NO: 158416 - DNA, 410 bp, Arabidopsis thaliana columbia
  unsure (1)..(410): unsure at all n locations
atgacataccatctttcatggatcttcattatacttcatgagattcctaaagcaccacccggtaagcgtcctccagagaaaaggcagagagtcccatccgcatataaccgattcatcaaggaggagatccaacgtatnnnagctggtaatcctgatataagccacagagaagcctttagtgctgctgccaagaattgggcccacttcccccacatacacttcgggctcgtgccagacaatcaacccgtgaagaaaaccaacatgccccaacaggagggagaggataacatggtgatgaaagaagggctttacgcttctgcagctgcttacgttcctgtgacttcttattactaggatttacttactctactttacttttttaaagttcaaattttcaattctctttattt

SEQ ID NO: 158417 - DNA, 116 bp, Arabidopsis thaliana columbia
  unsure (1)..(116): unsure at all n locations
ctttcctttgccatatttataaaataaaagagagagaaagaattttcaataattttcaggagagcaaagttcatgatggggaataagcgaaatctcggatttngatcttttttggc

SEQ ID NO: 158418 - DNA, 193 bp, Arabidopsis thaliana columbia
  unsure (1)..(193): unsure at all n locations
gtcgtctttcatcaactctctgcctcacgtttctgattttggccacagttgcatttggtgtacggcctaaaaagtccattaatgggccatttgggaggaactacttccccacttgggcttttgatcacattaagtatctcnncggtggatctgaagtgcatcttgtcctcgacatgtacactggcactggctt

SEQ ID NO: 158419 - DNA, 265 bp, Arabidopsis thaliana columbia
  unsure (1)..(265): unsure at all n locations
cacgaattgctaatccaaggatacgtaatcatgtgttcgtactcaatagcaagtgctatatctggcatatcacctctaattcgtttcgttaaaccttattccaccggtttttctttcatcacttgcgcttgcaannntacccggaggccaaagagatttgatcagctttgtgtgttttccatggcgtcggaagcgagggaatcacctgcattcaatcctggcttgtcatccgaattgagatgaggctacataaggatacatcttg

SEQ ID NO: 158420 - DNA, 378 bp, Arabidopsis thaliana columbia
  unsure (1)..(378): unsure at all n locations
cacattctctctaaactctcttcactgttactcgacaatggctactacttctaactcgggactgttcctaagttctgactcactgattcatcatcatcatcatcaacctctccatctatcttcctccagatctcnnnctgtttctctcccacccaacaagcgatccaattctctcacgcttcgttgttcaacaaatggcgatagcacctcaaccgaaaaggaaacaccaatcgaactcaaattcccagcatttccaacggtaatggacattaaccaaatcagagagatattgcctcacaggtttccgtttctgctggtagatagagtgatagagcatactcctggtgtttcagcatgagctattaaaaattgtcacca

SEQ ID NO: 158421 - DNA, 118 bp, Arabidopsis thaliana columbia
cttgaaaacgttaaatgatcttctcctccgatcattagtctctttaatctttctcagcctgttgttgttcgtgatctctcttcctccggaaaaagatgtcggccggtaacggaaatgc

SEQ ID NO: 158422 - DNA, 200 bp, Arabidopsis thaliana columbia
  unsure (1)..(200): unsure at all n locations
tgaactcctcactgactggaaaaagattttcagccgggcatcggttgtagtcttccataattatggcggtccgatactctacaccgagtttgatgctggcaacttctatgtgattcccggatctcctgaagaagtatgtnnnacaaagaatctagagtttcctccacagaaagatgatgtggacattttcattgagggaa

SEQ ID NO: 158423 - DNA, 131 bp, Arabidopsis thaliana columbia
ctgtagttcagtctcatgtccggtctatcccggctaatgcacctggaattttgcgaatgcatttccacgattgctttgtccatggctgcgatggctcggttctcctcgctggtaacacctcagagagaacc

SEQ ID NO: 158424 - DNA, 275 bp, Arabidopsis thaliana columbia
  unsure (1)..(275): unsure at all n locations
ataaaatcagaattacaaacaaaaatggttttgcaaaagcttcctctcattgggctgcttttgcgtgctgaccatcgtcgcctctccagcaaatgcagatggacctgtttgcccgccgtcgaacaaactaagccgggcaannntccctgaaggttttttatttggcacggctactgcggcataccaggtcgaaggtgcgattaatgaaacttgtcgtggaccagccttatgggacatctactgtagaagatatccagcggggtgcaataacgatt

SEQ ID NO: 158425 - DNA, 276 bp, Arabidopsis thaliana columbia
aaggaccctttttttacaattatacccttctccttcccagttctctcattatcctcctaacatggcttctctagatctgagaaatcaccatgggagtcgctgttcttcatcctcatgattctataatcaatccccggggctcaaacacgtgccctcctcttcgtcataaaaaaccgatcaccaatcgccgtcgccggagtccgtcaagtcaccaatcccagatctctcattcttcttcgtcttctcataaccacaccaatcatgtacgaattctga

SEQ ID NO: 158426 - DNA, 175 bp, Arabidopsis thaliana columbia
  unsure (1)..(175): unsure at all n locations
gagagagcagcacaagagagcatagaaggaccgattggggattagttagcgtgaaaggagatcctagtagcagctatggatagagaatggggttccaagcctggttgtggcggcgccgcctccggccaaccccccgnnnccgatcgccgtgtgcgtnttcgttagtttgtttttg

SEQ ID NO: 158427 - DNA, 188 bp, Arabidopsis thaliana columbia
  unsure (1)..(188): unsure at all n locations
gaaatcttttccttcgttattgcttaccaaatacataccctagccgccttattcgtctgggtcgttctctagttttttcctgaggctctgttcttagatcccttgtagtttccaaatcttccgataaaaatgtcgnnnaaaggagacggaccagctatcggtatcaatcttggtaccacttactcttg

SEQ ID NO: 158428 - DNA, 131 bp, Arabidopsis thaliana columbia
gaaaaaagtttcaatttttcttgaagatgacggtgtatgagaatgggaagaagaggaaagtacgagtcaaacaacaagtaaatgtacagttcttgtctcaaaggtatctaatcttatgcttttgttgtctc

SEQ ID NO: 158429 - DNA, 219 bp, Arabidopsis thaliana columbia
  unsure (1)..(219): unsure at all n locations
gaaatctagatacaacgatggtatctcctagaagatcagcttttgctaaggtcgatcactccatcgctgggtcatgaatatggagatgtgtgccgtcaaaatggcgatctgagtgggaagggcgctcctataggtactctnnccgccggggcggctgggggagtcctagctggtagggttgctgatggaactacaattaggggcagacttatgtgtcat

SEQ ID NO: 158430 - DNA, 226 bp, Arabidopsis thaliana columbia
  unsure (1)..(226): unsure at all n locations
gaacaacaacactaagcaaaaaagaaaagctcaagccgagagagacaatggcatcaacattcacagtctgaagcagtgttcttaccccaacaacattccttggccagactaaagcctcaagctttaacccccttcgtgatnncggctctctcggatctcccaagtacactatgggaaatgatctttggtatggacctgacagagtgaaggtcttacgacccttttt

SEQ ID NO: 158431 - DNA, 130 bp, Arabidopsis thaliana columbia
ctagccgctttactctcttgcgatatctctgagatttgtttgacagtctctaaccatgggtaaagagaagtttcacatcaacattgtggtcattggccacgtcgattctggaaagttgaccaccactgga

SEQ ID NO: 158432 - DNA, 169 bp, Arabidopsis thaliana columbia
ctgacctgtgatgtgagtttgcagatattcaaacaactcaatcctcattccctttgtttcgccgctctggatttcgaagagctgagagattagggtttctcgattttcgagattagagtctaatccccaccacccccctgcttcatatcctgaaggagagaatgacgga

SEQ ID NO: 158433 - DNA, 198 bp, Arabidopsis thaliana columbia
  unsure (1)..(198): unsure at all n locations
gagcttgtaaaaatgctaatactgtttgagacgctcaggtggttttgccatcttcaaagtattaggcgaaggaaagctctctaatgttgaggatttgtntaatgagttctcgaccgcaaagttagcccgattttttttttttctagtagcttttgacaagtttgacaacacagtctgaagctcttgaagcagtggctt

SEQ ID NO: 158434 - DNA, 72 bp, Arabidopsis thaliana columbia
atttcttgttctttggacgaccatcggcgacagtgttaagtctagagtcttcttcttctggggggggatttt

SEQ ID NO: 158435 - DNA, 244 bp, Arabidopsis thaliana columbia
ctaattttctgctctgaggtatcagatgagtagccgatggaatcgtacgatctacgttgggaatgtggctggagatattcgcaagtgtgaggttgaagatctcttctacaagtatggaccaattgtggacattttctttttcctttcaccgagacctcctggttatgcctttgtcgagtttgaagatcctagttattcatatgatttcaatttatttatcgttaattcttttatattaattctt

SEQ ID NO: 158436 - DNA, 349 bp, Arabidopsis thaliana columbia
  unsure (1)..(349): unsure at all n locations
gtcttcacaatttcccttctcttggttgctttccaagcagtccatgcagactattaccgtcagagggcgaccggttacccctaccccttacgttcctaagccacggtacccacttccgagcccgagccccaagcctgttnnncgaccacctactacccctagtctacccgctggctcaatcgctagactattccttgatccacataacgctcttcggtccggactaggtttgcctccattgatttgggacggtaaactagcgagctacgcaacatggtgggctaaccagaggcgttacaactgctccttaacccattccaccggcccattactgtgagaacttttttct

SEQ ID NO: 158437 - DNA, 205 bp, Arabidopsis thaliana columbia
  unsure (1)..(205): unsure at all n locations
gcctctaaaaccctaatcctctctgaaaccctagtacatttcagctgaaaatgaccggagaagtgtcggccctaaagcgtatccgcgttgcagattctcagttatcgataacaattcttgacctcgttcaacaagctacgnnctacaagcagctcaagaagggcgctaatgaagctacgaagactcttaatcgcggaatctccga

SEQ ID NO: 158438 - DNA, 289 bp, Arabidopsis thaliana columbia
  unsure (1)..(289): unsure at all n locations
cgcgtaccgctcattactcccctttctcaatgatcataaaacctacttcgattctactccttatcaactgaatgaccgaaaaacctcaccttttttctttttccgatcatggggaatctgatcagtttgatcttctgctgcgggagacnncagaggagcaatattcctccggcgatggaaacggctccttttgaactcccaccgaacagatttgtattcgccgccgtgccaccatatttggaccctatccctaactacggtttaccaggttttcaggtatcctgctctt

SEQ ID NO: 158439 - DNA, 196 bp, Arabidopsis thaliana columbia
  unsure (1)..(196): unsure at all n locations
aaatcttgttgttttcttaaacgaagagagaagttagaaagaaaaaaacgttacggattcggtggttcggtttcgcgattgaggctggagatttcatcttgaacatccgatatggctgaaatcaaggatgacccanccccaagggctatgctttgcctattaggaaccttaatgttacgcttaatgagatatactt

SEQ ID NO: 158440 - DNA, 229 bp, Arabidopsis thaliana columbia
  unsure (1)..(229): unsure at all n locations
accagatctactaattacctgagagaaaaaagatctgctctgtttgtctgaaacagacagaagggaacaaatctttcatttgttttttagcaaatcaaagaaatggccggagggttcgtcagtcaaacgccgggtnnncggaactacaattacaaactgacaccgaaagtgtttgtgacatgtttcatcggggcttttggtggtctcatctctggattcgatttagtta

SEQ ID NO: 158441 - DNA, 56 bp, Arabidopsis thaliana columbia
gagagaattctcatctgattcagaccatggctgttcgtctcttttccgatcgattc

SEQ ID NO: 158442 - DNA, 300 bp, Arabidopsis thaliana columbia
  unsure (1)..(300): unsure at all n locations
aaatctctcactctcaccagccaaatctctccaacttcctctttctctccacccaaatctcgccggcgatcgtcactgacgaatctgattcgtccccaacactcaacgggaggtagaagaatggcgactcctgttnnnccacctaatggaattaggaatcaagggaagcattacttctcaatgtggcaaacacttttcgagatcgataccaaatacgtgcctatcaaaccgataggccgaggcgcgtacggtgtggtttgctcttcggttaacagagagagtaatgagagagaggcgatc

SEQ ID NO: 158443 - DNA, 451 bp, Arabidopsis thaliana columbia
  unsure (1)..(451): unsure at all n locations
aacaaaatcttctccatctctgaactcaaaaactcattcactgagaaaaatggagacccttctcggcggtcgtgcgctctctcctcctctcaatcccaaacctttgtcccttcaccagaccaaacccacttcacattgnnaggctctctcaaaacccaccaccttctccggtcctaaacacctctccacccggttcactaaaccggaatcaagaaactggttaatagatgcaaagcaaggactagctgctttagctttatctctaactctcactttctcacctgttggcactgctttagcctctgagttcaatatcctcaacgatggtccacctaaagaaacttacgtagtcgatgacgctggtgttcttagtcgagtgacgaagtcagatcttaagaagcttttgtctgatcttgaatacagaaagaaactgagactcaatttcatcact

SEQ ID NO: 158444 - DNA, 130 bp, Arabidopsis thaliana columbia
atcattttgtggaaactcaccaaggacgacaaatctctactgtgtagctcagaggcgtctcactggtcagtctcacttcgttgaggatgttggtctctccttctatggacaattcgcgctttccggctgc

SEQ ID NO: 158445 - DNA, 216 bp, Arabidopsis thaliana columbia
  unsure (1)..(216): unsure at all n locations
gaacttcgatcgtagaaaccttgaaaatccgancttccacaatgccgtcaaagttggatccgagtcagatcgttgacgtgtacgtgcgagtaaccgggggagaagtcggagcagcgagttctctagctctttttttttttccgctaggtctcgcaccaaataagatcggataagatatttgcgaatgaaaccgcaatggtttgtaatggattacgt

SEQ ID NO: 158446 - DNA, 369 bp, Arabidopsis thaliana columbia
  unsure (1)..(369): unsure at all n locations
ggcacctaagcttgctgaagaggaagaggcaccaaagcccaaagccaagaaccctcttgacttggtaccaccaagccctatggttctagatgattggaagaggctttactcaaacaccaaatctaacttccgcggnnntgctattaaaggattctgggacatgtatgacccagagggatactcactatggttctgtgactacaagtacaacgatgagaacatggtgtcatttgtcacgctcaacaaggttggtgggttccttcagcgtatggacttggcacgtaaatactcctttggaaagatgctgatttgtgggtcagagggtccagtcaaggtgaagggtttatggctgtttcgtgtaccataaat

SEQ ID NO: 158447 - DNA, 228 bp, Arabidopsis thaliana columbia
  unsure (1)..(228): unsure at all n locations
gacagatttgattccatttttattactgttactatcatccaaacccttggtatttgtagccatgagtcttgtttcagatctcatgagccttaacctctcagactccactgacaaaatcattgctgaatacatatgggnncgtggttctggaatggacatgagaagcaaagccaggacttttcctggaccagtgtctgacccttcgcagctacctaagtggcactatga

SEQ ID NO: 158448 - DNA, 331 bp, Arabidopsis thaliana columbia
  unsure (1)..(331): unsure at all n locations
aaactgtgagtaaaaaagagaagaaagaaaaatggtgctaaaggtgtacggacctcactgtgcttcaccaaagagagctttggtcacactgatcgagaagggcgttgccttcgagaccatccccgtcgatctcatgnnnagagaacacaagcagcctgcttatctcgctctacagccttttggtactgttcctgctgttgttgacggtgactacaaaatcttcgagtcccgtgcggtgatgaggtacgtagctgagaagtacaggtcacaaggacctgatcttttggggaaaaccgttgaagacagaggtcaagttgaacaatggctttga

SEQ ID NO: 158449 - DNA, 298 bp, Arabidopsis thaliana columbia
gagatcggaaacgacaaacctaattttcccgaagtatcgagaccattatgtggaggagaatcgggggatcgcatcttaaatccatctgcgccgtcgggtcctgcgcggctccgtcgtgcaggcacgccgtcgtagagggggggggggctttctctctcgactcgtgcatcctccattcccgcatattcctccatattctctcgtttaatcggctccgctgcagcggatactgctgtgaagaagcgtgttgtagatgttttttcctttttgcatacttgtctatttgtatagtatgatc

SEQ ID NO: 158450 - DNA, 255 bp, Arabidopsis thaliana columbia
  unsure (1)..(255): unsure at all n locations
ggagtgagcgcaaaaaatcaaaaattcgccgagagcacttaccctaatggcttctctctcaatggcgtgcgttaacgttagcttctgtcatcctttacgctcttcttctccaaaggtctcacttcgcagttccgttcnnntcgcgacgagtctttcctcaagtcactccatttctgggcttcgcgctgttttgcctctgaagatttctactgttgctttccccaattctcaaaagctttattctttcaccgtttt

SEQ ID NO: 158451 - DNA, 228 bp, Arabidopsis thaliana columbia
  unsure (1)..(228): unsure at all n locations
gaaagatgcggagcacaccgttggggacgactgctgtttcaccagcttcaatcaaacacagctgggatgggtatggccgcttggtttcctcttcaggagtctctaatttctctatccatcgtcggagacgccacnnncgccgtttctatctttcaagcccctttacatactaacttttgagctttcattgcaagtcaactagctgatactcttacccgttatttacct

SEQ ID NO: 158452 - DNA, 274 bp, Arabidopsis thaliana columbia
  unsure (1)..(274): unsure at all n locations
caaattctctccgtgtttccttctgcttcaggtgatattttaacaaagttcttagtacaatgggatctgttgatgctgctaatggaagtgggaagaaacctacagttatatttgttcttggtggtccaggaagnnnaaaaggtacccagtgtgcttatattgttgaacattatggttacacacatctgagtgctggagatctttttagagttgagattaaattaggttctgaatatgtaactatgatccataatatgattaatgaggtgttgat

SEQ ID NO: 158453 - DNA, 335 bp, Arabidopsis thaliana columbia
gaattacaccatgggtcaaatgtgcaaggtcttcagaccacggcgacattcgatccacttaaagacgaatttgtgatcgatacacctaatgatggagctatcaaatggtggattggaaatgctgcagttcatggggagtttgccactgtttttgccaggcttatacttccaactcatgattccaaaggagtctcggatatgggtgttcacgccttcattgttccgataagggatatgaaaacacaccagacactccctggtgttgaaatccaagattgtggacataaagtgggacttaatggagtggataatggtgcgttgagattccgatctgt

SEQ ID NO: 158454 - DNA, 287 bp, Arabidopsis thaliana columbia
  unsure (1)..(287): unsure at all n locations
cctgatattactccgtctaactcggagaggttcaccattgattcaagcactattgattctgagacactcactgggtcttttcgaaacgatatcgttgatgatccttctttcttgaatagacacaacagtaaaggttnnncggaaactacgtttaaggcaatctcaggtgcttcggttagtgccaatgtttccacggctaggactgggaatcaaatggcattgtgttcaagtgacgttttggagcctgctgcttcatttgagagcacttactcgattgcttctattcc

SEQ ID NO: 158455 - DNA, 321 bp, Arabidopsis thaliana columbia
  unsure (1)..(321): unsure at all n locations
actatttatgcttctttaggagaagagtctttgatttactcactcaatgagactcgagtgtcagccttaatatgtgactcaaaacaacttaagaagttgtctgcgatacaatcaagcttgaaaactgtgccctctnnnccctacattgaagaaaatggagtattattttatttattgtaattattattggatattaaattatatagtttatttttttattatatttaattaaatgttttttattatttatttgttttttttaaatttttgtttatatatatttatatttttttattcaataatttttataattttttttta

SEQ ID NO: 158456 - DNA, 258 bp, Arabidopsis thaliana columbia
  unsure (1)..(258): unsure at all n locations
gagcagaccattttggatttacttttgtctgagacccaaccgaagaaaatctgctcgcagattggtctgtgtacttttgatggtacccgtggtgtcagtatgggcattgagtcggtggtggacaaggaaaacgccnnnttgtctaatggtgttggagatgctgcgtgttctgcatgtgagatggctgatgtgtggatccagtatccagttgaggcattacatgacttaagatttcatattgtactacgttaacgagct

SEQ ID NO: 158457 - DNA, 321 bp, Arabidopsis thaliana columbia
  unsure (1)..(321): unsure at all n locations
ggttcgtggacccatcacagaatcaacagccctgtgtgctactgcacttccagtaccaaaagccatacgctgagcaatggttgaaccaatgcctgagaacatgccaccaccaccaccgctggcctgagctggagctgnnngaggtgcacggtgtacaggttgaggagctgggctgcgtgcagcagcaggacgagggcgaggggcagatcttcctcctgagctacggcgacccattcagcatgaggctgttgaggctgcttctgcatctgcagcccctgctggaagcgccatgctttttagcaccttggacattcatgctaa

SEQ ID NO: 158458 - DNA, 132 bp, Arabidopsis thaliana columbia
gcttccttcaatctaattgcaaatcaaatggatcgtcttaagctttatttctccgttttcgtttgtgcgttctttatcgtctcggggtcgtcgtctgatgtcaacgacagcgatgatctcgtgatccgtcag

SEQ ID NO: 158459 - DNA, 339 bp, Arabidopsis thaliana columbia
  unsure (1)..(339): unsure at all n locations
gtttttcagaggagtccatcacgcaatcaaactaattgattgatcttattaagaaatcgatgtgttactccatgacttttttttaggaaaaaagaggagaacaacagcctgacattaggtcctattaaagtaccccgttnnnnagggaatgaatagaacccatcattgatttgagatattgatagggtgaatacccagtctactcaatgctaggtagaatgagtataaggaactcaaaaatgatcttttcgtcctatgaaccttaaggtgtatcaagtttcatgtttgattttttaatcaggatgtcagagtctatatttaacttaagtagatctagac

SEQ ID NO: 158460 - DNA, 273 bp, Arabidopsis thaliana columbia
  unsure (1)..(273): unsure at all n locations
atttctttagctcaaccttcattactaatctccttttaaggtttctttcgtgaatcagatcggggaaatggaatcttttttggtcacatctgaatccgtcaacgagggacatcccgacaagctttgtgatcatnnttccgacgctatcctcgatgcttgccttgaacaagaccctgagagcaaagttgcttgtgagacttgtaccaagactaacatggtcatggtttttggagatatcaccaccaatgctaacgttgacttcgtgcagatttg

SEQ ID NO: 158461 - DNA, 374 bp, Arabidopsis thaliana columbia
  unsure (1)..(374): unsure at all n locations
aaagcattctaaaagaagtttcaaagaagaagtgaaaatggaaaccactgcttttaacacaacatcacgaattggaaactggtcatcggctatttctccacctctacaaacatgtggatctttcaagtgccaatnnncaacacgaagaggtgttattgtagctgatcttcgaaactcatacttccgatggaggaaagcaacgacaacaagcagaggaaatgttgcagcagaggcagttaaaattcctacgtcagtaccagtaagagtggcgcgtgagctagctcaagcaggataccgctatttcgacgtgtggtcaccagacgaattcagcattgttcattcgactagagccattaacgtaccttacatgtaca

SEQ ID NO: 158462 - DNA, 264 bp, Arabidopsis thaliana columbia
ggagagtgttgctttgctcagcaaacatactatcattattgcgagcaaaaaacttgtcctacagtgcacgcttcatgagacaatgcgtgtgaaaagtggagcatgggacgacaatggtgtcttcatttacactactctgaaccacatcaagtactgtctgcctaatggagatagtggaatcatcagaaccctggatgtcccaatctacatcaccaaggtgtttggaaatacaattcttttgtttggaccgtgattgggaaaaac

SEQ ID NO: 158463 - DNA, 133 bp, Arabidopsis thaliana columbia
cggacgcgtgggtgaatggagatatcagagtgatttcgagctcgattagctgttctctcagggcatttattttatgtgaagcaggattctccagctatctagctatgtagcacgttttcgtattctatttttt

SEQ ID NO: 158464 - DNA, 235 bp, Arabidopsis thaliana columbia
  unsure (1)..(235): unsure at all n locations
cgcagaggaaccaaaacttccgatttttcgttactaacgcatcgtgctgcggagttgggacacatgatgcttatggntgcgggtttcctaacgtacattcgaggctatgcgagtaccaacggtcttacctattcttcgacggacgtcacaacactgagaaggcgcatgagatgtttggtcatttttttcttggtgccgatacaaatgctttccaaccgtttaacatcctcgtgct

SEQ ID NO: 158465 - DNA, 341 bp, Arabidopsis thaliana columbia
gatctgatttatacacagacgacatccgagccagtaacatgaatcctggagtgatgacagggacgctagatgcaatcagagaaaggatgaagaacatgcaactggcttcatcagagccagtaagcaaaccgctgatgccaacaaacgataacttatcaatgaaccaacagagcgttcccccgagccaaatgggacaagagacagtccacacacacccagtggttcttccaatggatgagaaagcattgtccggtcttcaagcccgtatggagaggctcaaaggtggatcactggaacatatgtagaactagagaccccaagctttggagtctgaagttaca

SEQ ID NO: 158466 - DNA, 193 bp, Arabidopsis thaliana columbia
atctctccctccctctttctccgatctcagatctattcaacaatctacaaagaagatggaaccaggctcttcatggggtgacacctgtgtcgtctccgtagatccagagatccacgacctaatcgagaaggagaaacgtcggcaatgtcgtggaatcgaacttatcgcttacgagaatttcacttccttcgcc

SEQ ID NO: 158467 - DNA, 376 bp, Arabidopsis thaliana columbia
gtctcctacctcctttgcctacaagctttcacgcgggagctcaacatcagccatggcggaacagactgagaaagcttttcttaagcagcctaaggtcttccttagctcgaagaaatctggaaagggaaagagacctggaaaaggtggaaaccgtttctggaagaacattggtttgggcttcaagactcctcgtgaagccattgatggagcttacgttgacaagaaatgccccttcactggaactgtttccatttgaggtcgtatcttagctggtacttgccacagtgcgaaaatgcataggaccattattgtgcgaagggattaccttcactttgtgaagaagtatcataggtatcagaagaggcatttaaacatt

SEQ ID NO: 158468 - DNA, 253 bp, Arabidopsis thaliana columbia
cgcatctcttttcatttctctctgatttctcgatctctccgtccaactatgtctgccttcacaagcaaattcgccgatgggttgatcgccaacgctgcctacatcggcacacctggaaaaggtattttggctgctgatgagtccactggtaccattggaaagcgtcttgcgagcatcaactgcgagaacgtttagaccaactgacgtatcctccgtgagtttctttttaccgcctctggtgctttttcatgcc

SEQ ID NO: 158469 - DNA, 221 bp, Arabidopsis thaliana columbia
  unsure (1)..(221): unsure at all n locations
gtgcttcctgcaaatagctctttgctgttgatctttctcctccatcaacaaacatgggtaagacacgtggtatgggagcngggcgtaagctgaagagactccgaattaaccagaggtgggctgacaagcagtacaagaagtctcacttgggaaatgagtggaagaagccttttgctggttttttttacgcttaaggaattgtacttgagaaaattggtatt

SEQ ID NO: 158470 - DNA, 258 bp, Arabidopsis thaliana columbia
atcttggacaaaatctgtaagacgttctatcttctgtcttggtgctccaccgatgattatgtcaacttgcttcaatcccattcgctccaggatattaagtgtgcggattggtcagagaacgtagctcctttctggcctgcggttatacggactgcattaacatggaagggccttgtgtctctgcttcgtagtggtatgaaaagtattaaaggagcattgacattgcctttgatgattgatggttacatgactggtgtc

SEQ ID NO: 158471 - DNA, 262 bp, Arabidopsis thaliana columbia
  unsure (1)..(262): unsure at all n locations
tgttacgccattttcgtgagtaagaagaagaatctcgaaaacctcaaaccatggccgagggactcgtattgaaggncattatgcgcgcccacaccgacattgtcacggccatcgctacgccgatcgacaattccgacatcatcgtcacagcgtcgcgtgacaaatccatcatcctctggaaactcacaaaggacgataagtcttacggtgtcgctcagcgtaggctcacaggttactcttacttcgtggaagatgttgtact

SEQ ID NO: 158472 - DNA, 376 bp, Arabidopsis thaliana columbia
gagaagaagcaggagagtatcattccaaagattttgaatgggaatttctcaagaacatcgtcgagaacgatccttctctctcccaccatctccaccaccaccaccaaaatctctccaaatatttaccagattcgcagccatggcaagattttcactcccgtcactcctccggaaaattcttcaaggaaagaaggtatctgttgaaggaatttcctgaattagtttcttgtggagagaactcaaaacttttggaaattggttgtggtaatggcagtaccgtgcttccgattttacgtggaagcaagaacattactgtgtatgcctgtgattgtagcattgacacctcttgttaggacttatagagaacattgtatcg

SEQ ID NO: 158473 - DNA, 285 bp, Arabidopsis thaliana columbia
atcttggacaaaatctgtaagacgttctatctcccggcttggtgctccaccgatgattatgtcaacttgcttcaatcccattcgctccaggatattaagtgtgcggattggtcagagaacgtagctcctttctggcctgcggttatacggactgcattaacatggaagggccttgtgtctctgcttcgtagtggtatgaaaagtattaaaggtgcattgacaatgccattgatgattgtaggctacatgaatggtgctattcactttggttttattacttgctaa

SEQ ID NO: 158474 - DNA, 346 bp, Arabidopsis thaliana columbia
gggcaacaacaagctctctcgagaagaaagccattatcatcatcatcatcatcttcatcatctcctcctccgtcttcctcacctgttcgagctcctgcggcgaagaaaccgagtccggaatacccattttggcagcagaactggtttatcggtctgctattcgtgatggctttaggattcttctgtctcgctatcttcctttacctaagtctcgatcctgattccggttacacgtctgcctccgccgctgcttctggtaaagaaggtgtcgtgattacttatggaagtgcgatcaagttgatgcaccgagattactaatttttgattaaattttcccaaagagggg

SEQ ID NO: 158475 - DNA, 304 bp, Arabidopsis thaliana columbia
  unsure (1)..(304): unsure at all n locations
ctccttcactcttcatcttcaaagactgcgccttttagctcagtgaaaaaggttcgagcttcggaaactatggcagcatnccctaaccttaactctgatgctggattgaagaagctcgacgagcatcttctcactcgcagttacattactggataccaggcttcaaaggatgatatcaccgtctttgcagctcttgcaaagcccccaacttcacagtatgtgaacgcttctcgttggtacaatcacattgatgccctcttgaggatctctggtgtctctgctgaaggaagcggtgtcattgttg

SEQ ID NO: 158476 - DNA, 244 bp, Arabidopsis thaliana columbia
ttttatttttcatcaagtttcttagatcatcagtatattggcgtctaattcttctaacgggacgacgacgacaaagccaccacctatgccgtctcctctgcgtaattccaagttttttcagtcgaatatgaggatcttggtgaccggaggagctggattcattggttcacatttcgttgataaattgatgcaaaacgaaaagtatgaagttatcgttgtggataaatacttcacaggatcaaaa

SEQ ID NO: 158477 - DNA, 162 bp, Arabidopsis thaliana columbia
  unsure (1)..(162): unsure at all n locations
gcttgatgatgaaatcaagtcatggttgttgtttgctgcccagaaggtcgttgaagtgagacgctttggccatggctttgngtggtgagaaggacgaggctcttttctctgccattgctgtggttttggcttcatggggatattccgtcagtagttaacatc

SEQ ID NO: 158478 - DNA, 304 bp, Arabidopsis thaliana columbia
gtctctctccagacgaaaaatgggtgctttcaggtttcaccagtaccaggttgtgggaagagctctcccgacagagaaggatgtgcagcctaagatttacaggatgaagctctgggctacgaacgaggttcgtgccaagtccaagttctggtatttcttgaggaagctcaagaaggtgaagaagagtaatggacagatgctcgccatcaacgagatctatgagaagaacccaacaacgatcaagaactacggtatttggttgaggtaccatagtttaactgtgtaccacaacatgttcaaggtg

SEQ ID NO: 158479 - DNA, 217 bp, Arabidopsis thaliana columbia
  unsure (1)..(217): unsure at all n locations
cgacgatgcaattaactcttgaattcgggggtgggttagagctgctctgtgattctgaaaagattcataaagtaaacgttganttgcccaatggagctgactctgatgattttaccatgaagcatttgctttcatgggttcgtacaaatctgatcaaagagagacctgagatgttcatgaaaggagatactgtgagacctgtggttcttgtgcagtt

SEQ ID NO: 158480 - DNA, 195 bp, Arabidopsis thaliana columbia
ggacaagtgaaggactttccaaatggtatccctgaatgtggcactgacgctcttcggtttgcgctcgtgtcttacactgctgagtctgataaaattaacttggacattcttcgagttgttggttaccgtcaatggtgtaattaactgtggaacgccgtcagatttgcaatgatgaagcttgtcgatgttatactt

SEQ ID NO: 158481 - DNA, 247 bp, Arabidopsis thaliana columbia
ggaacaagtcttctccacctactcagacaaccaactctgtgtgtgttgatccaggtgtacgaaggagagagagccagaaccgaggacaacaaccttcttggtaaatttgagctctccggaattcctccagctcctcgtggtgtcccccagatcacagtctgctttgacattgatgccaatggtatcctcaatgtctctgctgaggacaagaccaccggacagaagaacatgatcaccatcaccaatg

SEQ ID NO: 158482 - DNA, 223 bp, Arabidopsis thaliana columbia
  unsure (1)..(223): unsure at all n locations
gatcgtgtaactgagaacgaaggatgcatgtagtttccaggagattagttcaacggcctctcgtcggaggagcttcganctattgcatcttcttctctcagatcgctctaccgagtctctaatcacctgaatgggactgataaatgtcgctattcgttcttccctcgctactaaaggcgagggatcaccttgcttgcaatgggtacctggttgggatattttt

SEQ ID NO: 158483 - DNA, 245 bp, Arabidopsis thaliana columbia
ctctctgcttctcctttccctttttcaaaatctctctctctctctctctttttagatccagttttagggttatcttctctgtgagcgaagatgcgtgagattcttcatattcaaggaggtcaatgcggaaaccaaatcggttccaagttttgggaagtggttaatctcgagcacgggattgatcagacgggacggtatgtaggagattccgtgttacagcttgtgaggttcaatgatttctacat

SEQ ID NO: 158484 - DNA, 222 bp, Arabidopsis thaliana columbia
gctgaatctcagtggatcgtggcagcaaggccactctgccacttacaataccccgtcgcgtatttaagtcgtctgcagaggattctacccgccgctcggtggtaattataattcaaggcggtccgaacgacgctttcgcctaacggacttagccaacgacacgtgcctttgggagcctatgctcctactgagggtcgtcaattggtcggttggctcatgctt

SEQ ID NO: 158485 - DNA, 169 bp, Arabidopsis thaliana columbia
ggccacccacgcgtccggcgagttctcgggaaccaatctgtgaggaggattgttgcacagagagagagagagagagaggggcgatttctatagtgatgataggaccaacattatcgggctattcatggttcttatgttgcttctcatctcccttatcatccttttcttc

SEQ ID NO: 158486 - DNA, 261 bp, Arabidopsis thaliana columbia
cggacgcgtgggcgcatatctcctgtatcatcactcttttacttccggcgatctctctccgacggccaatggacgccgtcctttactctgttccactctccttcactcccctacgcgcatcatcctctccttcctcgccgtatcttcttctgccgaggtttctctccgttcagtcatgtcacaaattcaccttctctcgaagcttccctttcaaatcccggattccctcagcttcttccgccgccggatccacgttgatga

SEQ ID NO: 158487 - DNA, 185 bp, Arabidopsis thaliana columbia
ttcttgaataaaatcagaattacaaacaaaaatggttttgcaaaagcttcctctcattgggctgcttttgctcctggccatcgtggcctctccagcaaatgcagatggacctgtttgcccgccgtcgaacaaactaagccgggcaagtttccctgaagggtttttatttggctatggctactgcg

SEQ ID NO: 158488 - DNA, 263 bp, Arabidopsis thaliana columbia
ctcatttactgttctgtttcactttctctctctctgtatactctctaaatgatggcaaaaaactgtaatttagtcagtgtgctatgtgtatttttggtattgaccctctttaacaaacccatcaccgtcgccgggcagaatattccggcggtggtcttgttcaccttttgttgtctccaactcttactcctttattcatacactcattttcctcaatactttacttcttcaaacacttccggacttatcggacttatcttctt

SEQ ID NO: 158489 - DNA, 289 bp, Arabidopsis thaliana columbia
ctttgaacttgtgattgatgatcatttgaagagtgggaaaatcgaagatcactcagacatcatcagtgtcatgttggataggatcaacaaacccaccgaagttggttcttataaagtcaccgatgatcatcttaaaggacttatgtcggatgtgttttcggttgtagagaactctggtttcattacttcgattttgactatgtcagtattttattagttattctcttgtgtattttttctttcataatagtctattttatctttttttctttactttttttattctctt

SEQ ID NO: 158490 - DNA, 77 bp, Arabidopsis thaliana columbia
  unsure (1)..(77): unsure at all n locations
cgaccacgcgtccgggcgacttctcaacctcacaggtattgcaacatnctcatatgatccttctaagccaatacgtg

SEQ ID NO: 158491 - DNA, 228 bp, Arabidopsis thaliana columbia
gatctctctttcttatacatccatatcaccgattatgcttcgccgtgacgtcctcttcctctgactggtgcctcgtcatcgccaccggctgcgctgtcgcattagccgacgatgaagcagattgtgtctacacattcttccttagaaccggatcaaccttcaaagccggtacagattctatcataagcgctagagtcttactacaattacggagactacattgggatc

SEQ ID NO: 158492 - DNA, 238 bp, Arabidopsis thaliana columbia
ggcagattcccacatttgcaaacatgacgactcatattttcaagaagagaaagtttgtagcggacggtgtgttctacgctgaattgaatgaggttcttacaagagagctagcataggatggttactttggtgttgatgtttttattatttaaatttatatttttttaacatccttattatttttatttcattcatttttttcttttttattacatttattttttttttatccttattt

SEQ ID NO: 158493 - DNA, 164 bp, Arabidopsis thaliana columbia
  unsure (1)..(164): unsure at all n locations
agaagacaaagtgtttcctcaaggaaatatctatgcccaatggtttattaccattgaaggatatagaagaggttgggnatggcagatagtaatttttttattgtttatatgttgtttttgaattctattattttatatattttttttttttatttatttttatt

SEQ ID NO: 158494 - DNA, 163 bp, Arabidopsis thaliana columbia
atctcacaatcttttctctccaaattctcttctttctgaatcaatccaatcatggttgagcgcggcgaacaccgttggaatgtgcggtgaaccacattccattgttgaaggatgagctcgatatcgtgatccccacgatccgtatcctttattatcaggagat

SEQ ID NO: 158495 - DNA, 220 bp, Arabidopsis thaliana columbia
actctacactgcttcgtctcttagctcgacatttatctccttaaaatggcgtcggagaagaagctctcgaaccccaggagggacattaaggttcagaaacttgttctcaacatttccgttggtgagagtggtgatcgtctcactctttcctccttgtagttggattagtttcatcttccttctcttcttgacttttctttctatatatttttattttttt

SEQ ID NO: 158496 - DNA, 358 bp, Arabidopsis thaliana columbia
gggagtagctgcaaagatcacaccaaccgttctgctattgaccggtgttgccttcttctctctgatactgtttggtggcccattcgcaccattggttgccaagcttggtatgacaccgctactcgcagcagtgtacgttggtgccctccagaatatcttcagcaagagtgccaagtacagcttgttcgatccttgcaaagaaatggcttatatcccattggatgaggacaccaaggttaaaggcaaagctgcaattgatgtggtctgcaacccattggggaaatcaggcggtgctttaatccagcagttcatgatccttacattctgctcactcgtcaattccacaccttaccttgga

SEQ ID NO: 158497 - DNA, 72 bp, Arabidopsis thaliana columbia
  unsure (1)..(72): unsure at all n locations
gtgttgcaatcgctggtctcacagccgacggtttttttttgtctcggnatatgagatcggattgggttttct

SEQ ID NO: 158498 - DNA, 186 bp, Arabidopsis thaliana columbia
gcttcgtcatctctctcacaagctcacaaagtcgttcttacgcgtcaaccttcttcccgggtcaacacctgctcccttgggtcgggctccgctatcggattctctcttccgcagattagctctccagctttaggtaaatgtcgccggaaacaaagctcttctgggttcgagaaagacttgttgtgc

SEQ ID NO: 158499 - DNA, 258 bp, Arabidopsis thaliana columbia
caaaagagttctttctctctatcttattctccgatcatcatgatgcagcagccaccacccggaggtatgcttccacatcacgctgctcctccttctgcgcaacaacagtacggttaccaacaaccttacgggattgctggagctgctccaccaccaccacagatgtggaatcctcaagcggcggcgccgccatcagatcagcctacgaccgttgacgagatccggactctttggatcggtgacttacagtattggatg

SEQ ID NO: 158500 - DNA, 153 bp, Arabidopsis thaliana columbia
ctctctcagacgagatttcctcttcatcttaagtatgaaatggctgaatccaaggtagtgggtccagagtctgtgctagagaagatcaagaggcaagaggaatgggcattggccaagaaagatgaagctgtatctgttaagaagaagagtgtt

SEQ ID NO: 158501 - DNA, 67 bp, Arabidopsis thaliana columbia
tgatcatgcagctttttcgtgacaatctctttttttggacatctgatatgcaggatgatgctggggt

SEQ ID NO: 158502 - DNA, 125 bp, Arabidopsis thaliana columbia
gctctctcaaaagtcgaatatcccaaattcgattcgttttccggcgataatctccgatctagagccgatggcgaaggaaccagtgtggtgtgctcgttactggagctgtaggacaaattggatat

SEQ ID NO: 158503 - DNA, 415 bp, Arabidopsis thaliana columbia
cacatttctcctcctctttcaaaaccgcagctaccttcatcgagcaacagtcttctgttaacaagggagagagcaccaagtaccatttcctggtagcaaacgctaaattcatgcttgacgaagaggagcacttccaggagcaattgtttgaacgtctccgttacttcggtgagcgtgaattagtgcaagacttctggcttgtcattgagcctaaattccttgacaatttccccaaaattactcaaagacttcgtcgtcctgctgttgctcttgtttccaccaatggcacctggatcacgtttatgaagttaagattggatcgtgttctgtatgattcctttgaagctacctctcttgatgaagtcttggcctccaatcctaccactcttgagttcgatatgcctaaaaattgggt

SEQ ID NO: 158504 - DNA, 286 bp, Arabidopsis thaliana columbia
cttgaataaaatcagaattacaaacaaaaatggttttgcaaaagcttcctctcattgggctgcttttgctcctgaccatcgtcgcctctccagcaaatgcagatggacctgtttgcccgccgtcgaacaaactaagccgggcaagtttccctgaaggttttttatttggcacggctactgcggcataccaggtcgaaggtgcgattaatgaaacttgtcgtggaccagccttatgggacatctactgtagaagatatccagagaggtgcaataactataacgtcga

SEQ ID NO: 158505 - DNA, 185 bp, Arabidopsis thaliana columbia
  unsure (1)..(185): unsure at all n locations
atcggatctatggctgaggctcaagtattttcattgttttatctcagcgcatggtccaacaaatgttactttaaacctgntgtgtggagcagcatcgcactctttatcggaaatttgatgtatgcgttggcatatgatgccaattccatagcgcttcttttactcggtcgtgtctgttgtgggtt

SEQ ID NO: 158506 - DNA, 152 bp, Arabidopsis thaliana columbia
tgttgctctcttctctaagaaaaagccagctcctgtctatagtccaaggctgtctctgagactagcgatgagctcgccaagtgggatggtcctgacaggagaattttcttgcctgatggcctcttggatagatcagatatcccatagtactt

SEQ ID NO: 158507 - DNA, 256 bp, Arabidopsis thaliana columbia
  unsure (1)..(256): unsure at all n locations
aatggcttcacacattgttggatacccacgtatgggccctaagagagagctcaagtttgcattggaatctttctggganggtaagagcactgctgaggatcttcagaaggtgtctgctgatctcaggtcatccatctggaaacagatgtctgccgctgggactaagttcatccctagcaacacctttgctcactacgaccaggttcttgacaccaccgccatgctcggtgctgttccacctaggtatggatacact

SEQ ID NO: 158508 - DNA, 457 bp, Arabidopsis thaliana columbia
tttagggttccatggattcagctcccaacttcatccctcggttacttctactatcacttctcatcgtatcaattcctgtaacatcatcacaatccgacgccaacactactaatccgtcaccgtcaccaccgtcagattcggatctatgcaacggtgtattcgtttcatacactcacactaaaggatctaagatcccacccaacgacaccgcaaatcaaccctaccggttcgaatctgtgataacagtgctcaaccacggccgcgacgagctcaaatcatggcgtgtcttcgtcaaattcgcacaccgagagatcctcgtctctgcttcaaacgctgtactctcagacggctcgagcttaccggtgagcgttgaaaacggtaccgtttttcgttggtattctttggcggatttggaatcagctattcaaactggtggtgatgtcactcaaatgcaagc

SEQ ID NO: 158509 - DNA, 367 bp, Arabidopsis thaliana columbia
  unsure (1)..(367): unsure at all n locations
aataaagcgaatgggagacgcgtctacaccaactctatccttctacacttcagcgaaggtatactacacaggatcagacgctncaccatagcgggtacagttcctcaccagcaccttactactttcattctactaaggtttactacaagttccccacctccaccatacgtgtacagatccccaccttcaccatactactgtctttatcctaaggtttactacaagttcccaccttcaccatacgtttacagttcctcacctccaccatactacttttcttttccaaaggtttactacatgtctccaccaccaccatacgtttacaacttttccactcaacaccatatcttctttacttcttctaagg

SEQ ID NO: 158510 - DNA, 212 bp, Arabidopsis thaliana columbia
gataaagtgtatgggagaagcggtgatcccaactctgtctctttacaatttagtggatctatggctccagaaaagttcagaccaccaacggtttgctgcattggtaggttcttctgcaaaggattttacgatggtttttgtctatgctcggaagctaccagatgtcatcatgttaaggactttaatgactcatgttgctgtataagaagata

SEQ ID NO: 158511 - DNA, 132 bp, Arabidopsis thaliana columbia
gtctacatttacactcggagcttagaccttccaatctactcggcggcgaaaatgggtttcaagaggtacgtttagatcgggagagtagcacttgtgaactacggagaagatcatggaaagcttgtcgttatt

SEQ ID NO: 158512 - DNA, 283 bp, Arabidopsis thaliana columbia
  unsure (1)..(283): unsure at all n locations
gaaggtcgttgtagaactaggcgatgagatatgatgcaaaaaaagcttgtgaaagacaactaagacagaaatacaagnctcttggtgcgttgaagattgtaaccgagcgagggctacaggtgggagatctagcagttgttgatatttctgctacaactatagatgaggactggttaacgggtcatgcgattccagatgcttgtaagcaaaggtttttactttgcttctgaatatgggaattgttcactttctggttttcttttatgctataatattgtatttt

SEQ ID NO: 158513 - DNA, 131 bp, Arabidopsis thaliana columbia
gtcatgagagctttattgagtcactttctaatatgtccctaacagtattcttagtggcatgaattcaattcctaattgtagcagcagcagtagcagtggaagtggtggctcttgctctggtaatataacag

SEQ ID NO: 158514 - DNA, 76 bp, Arabidopsis thaliana columbia
aattttctccaaatcttgttacgaaacgctggggtcggtttgcccgcaagtggaaaagcaaacgctgatgaacaag

SEQ ID NO: 158515 - DNA, 257 bp, Arabidopsis thaliana columbia
catcaaaaaagagcgtcttcataaacgcccttcgtcttcttccctggaaatctaggttctttcttccacggaaatgagagagtgcatttcgatccacattggtcaggctggtatccaggtcggaaatgcttgctgggagctgtactgtcttgaacatggcattcagcctgatggccagatgccgagtgacaagactgttggtggaggtgacgatgcttcaacaccttcttcagtgaaaccggtgctggttagcactt

SEQ ID NO: 158516 - DNA, 239 bp, Arabidopsis thaliana columbia
accgatcttcgtcagaagtacaatgtcagattcatgccgatccgtaaagacgacgaggttcagatcgttcggggtactaacaagggacgtgaaggcaaagttgttcatgtttaccgtcgtaaatgggtgatttacattgagtgtaatacgtgggtgaattgtttttgttatcattctttgtaactttgttattttactcttcttattagttttatttttttaaattttttctttttttt

SEQ ID NO: 158517 - DNA, 294 bp, Arabidopsis thaliana columbia
aaaaaaaacagagctttacaatttctctctacagagatcgaagatatggaaggcaaggaagaagacgttagagttggagctaacaagttcccggagagacaaccaatcggaacatcagctcagagtgacaaggactacaaggaaccaccaccagctccgtttttcgaacctggtgagctttcttcatggtctttttggagagctgggatcgctgagttcatcgctacttttttctttctctacatcactgtcttgactgttatgggagtgaaaaggtcaacgaacatgtgtgct

SEQ ID NO: 158518 - DNA, 264 bp, Arabidopsis thaliana columbia
ctagtctcatcctcagaaagaatggctcaaaccatgctgcttacttgaggcgtcaccgccggccattttttgaggaacaagagccctttggctcagcccaaagttcaccatctcttcctctctggaaactctccggttgcactaccatctaggagacaatcattcgttcctctcgctctcttcaaacccaaaaccaaagctgctcctaaaaaggttgagaagccgaagagcaaggttgaggatggcatctttggaacgtctgtt

SEQ ID NO: 158519 - DNA, 79 bp, Arabidopsis thaliana columbia
ataatgagccgatatttctccttcttcttcttatctctcttcctccattatcgtattatcggagctgctccattcgaag

SEQ ID NO: 158520 - DNA, 215 bp, Arabidopsis thaliana columbia
  unsure (1)..(215): unsure at all n locations
gtcaaatccgtggaggagcacctcgccggaaaaacctacatctccggagatcaattgtctgtggatgatgtcaaggnttacgctgccgttccagtgaaacccagcgatgccttccccaatgctagcaagtggtacgagtccgtggcttcccaacttgctaaaagtttccctggaaaggccgctggagtacaattcggtgtctctgctgctgctgt

SEQ ID NO: 158521 - DNA, 236 bp, Arabidopsis thaliana columbia
attctctcttttggacctttcatggctatgtttctctgtaatggaagtccaagctcgtgatcaccaagaccgacacgctaatgggtatgggagatagagctatgtttactgctttgcttctattcattgcttcgatctctggattctctgttgctcgctgagttactgatccatttgatgttcatgccctttaagttttgttaacttcactaaatagatcttcacagctaaccaat

SEQ ID NO: 158522 - DNA, 440 bp, Arabidopsis thaliana columbia
ctctaaaccattcctctctctttctctctaccaccatttattctctccttaatcactgactcgactcgggtcgtgaccagttttgggtatctgagctatggcaacgggacagcttttttctcgtaccacacaagctttgttctacaactataagcagcttcctgttcaacgaatgctcgatttcgactttctctgtggacgtgaaacgccttctgttgctggaatcataaatcctggttctgaaggttttcaaaagctctttttcgggcaggaggaaatcgctatccctgttcatgccgccattgaggcagcttgtgctgcgcatccaacagcggatgtattcatcaactttgcatcttttaggagtgctgctgcttcatccatggctgctttgaagcagccgactattaaaggtgggggaattatagctgaaggtggtc

SEQ ID NO: 158523 - DNA, 237 bp, Arabidopsis thaliana columbia
ctgcgaatcttcgaaaatgggtgcgtacaagtatgtatctgagctatggaggaagaaacagtgcgatgtgatgagattcctgcagagggttaggtgctgggagtacagacagcaaccttcgattgttcgtctcgtcaggcctactcgtcctgataaggctcgtcgtttgggttacaaggccaagcagggctttgttgtgtaccgtgtacgtgtgagacgtggtggacgcaagaggcc

SEQ ID NO: 158524 - DNA, 189 bp, Arabidopsis thaliana columbia
  unsure (1)..(189): unsure at all n locations
tcgcactcatcttcacaggaaacaatggtgttttttttgtcctccaaatcgaatgcttacttcagnaggtaccaagtgaagttcatgagaaggatatatgttaagactgtttacagttcatggattcgttttattaatttaattatatgaacatgtactacacccctatatacctgttttttttttctt

SEQ ID NO: 158525 - DNA, 290 bp, Arabidopsis thaliana columbia
atctcaataaagcaaaacgaacaagaaaatggcgtgcacggaagctctcttacccgtcacgtccgtacaagatccattatctgagtgaagatccgaccagatcccggagacccgtcggagacgacccatcaaagttcatcttgcagtctattccggtttgctcttgatcgctttgtacgtcactctcatcgtcacacacgacggctccaaggctgaaatagcgacggagtcacgtcctcgtatggccggcgtgtcggagaagagcaacgacggggtttggatatcatccg

SEQ ID NO: 158526 - DNA, 314 bp, Arabidopsis thaliana columbia
caaaaaaatcatggcagaagcgtctagtttggtggtgaaacttgagacagaagtggagatcagggcttcggccaaaaagttcggatgagcatgtttaccgagagaccacaccatgtctccaaagcaactccagataaaattcatggatgtgagctgcacgaaggcgactggggcaaagtcggctctatcgtcatctggaaatacgttcatgatggaaagttaacagtggggaagaataagatcgaggcggtggatccgtgtaagtaccttatcacgttcaacgatttagaccgtgattctgttatttgtgttca

SEQ ID NO: 158527 - DNA, 332 bp, Arabidopsis thaliana columbia
  unsure (1)..(332): unsure at all n locations
tcaaaagcctatttgggggatcatcaaccttctatcatcaccatggatccttacaagtatcgtgcttcaagcgcgtacaacgcccgattctacaccacaaacggtggtgctccagtctccaacaacatctcttccctcaccatcggagaaagaggtccggttcttcttgaggattatcatttgatcgagaaggttgctaatttcaccagagagaggatccctgagagagtggttcatgctagaggaatcagtgctaagggtttctttgaagtcacccatgacatnttaaacctcacttgtgctgattttctcagagcccctggtgttcaaac

SEQ ID NO: 158528 - DNA, 262 bp, Arabidopsis thaliana columbia
atcttcccaccgttctcgtcaccggcgctagtggttgaacaggccagattgtgtataagaagctgagagaggggtcagacaagttgggagcaaagggtttagttagaagtgctcaaggaaaagagaaaattggaggagaagctgatgttttcattggggatataacagatgctgattgcattaaccctgtgtttcaaggaatcgatgcgcttgtgattctcactagtgttgtgcctaaaatgaaacctggttctgatcccac

SEQ ID NO: 158529 - DNA, 163 bp, Arabidopsis thaliana columbia
aatccgtacacgtacgacagatcctgaccgttgtatctacttaccttgggaaaaaagtttccattgccgcgttttttttacagtacgaggagcggatctctcaaaccttttcttctttaatatcaataacttttaccatcatactttaaaatattctttactt

SEQ ID NO: 158530 - DNA, 179 bp, Arabidopsis thaliana columbia
  unsure (1)..(179): unsure at all n locations
gtgaaatggaagctgtggatgctcagaaagagtttttgaattcgcaaaaggataaggttcctgattatgtggattctaccatgggtgtttagttcnttgtgccntcttcttcacagtcttctagtttgtacaaagtttcaatttctatcccttggaagctttgtgacctgtttgttttt

SEQ ID NO: 158531 - DNA, 142 bp, Arabidopsis thaliana columbia
gcacagcgatcatggttatcatctatatatttctttttctctcctcagccattatagattcaagtgtgttgtcaaaggcccaaaggtttctttcaacttttggtaaggtattcattcatcttctcttatcttattttctact

SEQ ID NO: 158532 - DNA, 350 bp, Arabidopsis thaliana columbia
tgcgtttaccgatcttctcgattctccaattccataccctaacattttgattagtccttctgggttgcgcacagccttgagagatgcggaaccaatgatgatgcgtgctgttataaggagagctgccagtaatggctcttctccttcgttattcgcaaaatcactgcagtcttctcgtgttgctgcatcttcccctagcttgctatcaggttcagaaacaggggcatatctgcatcgtggaaatcatgctcatagctttcataaccttgctttgccagggaacttgggcatcttgaggtctgcgagtttagttttcttcaaccctgcaaagatggctacaagcctttttt

SEQ ID NO: 158533 - DNA, 366 bp, Arabidopsis thaliana columbia
ctcgattgtgagatcaattattaatattcatctggtgtattatcgtctcttttctccattgcgtgtgggtctctcaactactgctggtgagatgtccgttgcacttccaactagaattgatgggtcgagccgatctatgattaagggtcaaagtataagcttcactgataagtcatggggtcctcctctgctgagactagattcgaaatctagaagcttaggtgtgaaaaaaaggtccacaatatgcatgtcacttcagcaatcaagccaatccaaagtcttgggtactcctctagaacttgaagatcccaaagaggctcgcttaaaccttgttaggtctaaagaggcctatactgcacctttctg

SEQ ID NO: 158534 - DNA, 245 bp, Arabidopsis thaliana columbia
gtagttcatagagagtctgagtcgatgtcaaagtagacgcttcgcagtaacgcggagaagtttgagttccaagctgaggtttctcggcttatggacattattatcaactctctatacagtaacaaggacattttcttaagagagttgatctccaatgcttctgatgccttggacaaaattaggttccttgcactcactgacaaagacgttttgggtgaaggtgacactgttaagcttgagatcca

SEQ ID NO: 158535 - DNA, 166 bp, Arabidopsis thaliana columbia
gaaccaccggaggagctcgatccattgatttttttatgacaactccacaagtgaagaccggtttgttcgttgggttgagcaggggacatgttgttaccagacgtgaattatctcctcgtcctcgctctcgcaaaggaaaatcgagcatgatgacaatctttatcat

SEQ ID NO: 158536 - DNA, 440 bp, Arabidopsis thaliana columbia
caaaaatcaaacacagagaagagaaaatggccgcagaaggagaagttatcgcttgccacaccggggaagattggaccgagaagctcaaagccgccaacgaatccaagaaactgattgtgatagacttcactgcaacatggtgcccaccttgccgtttcattgcacccgtctttgctgacttagccaagaagcacctcgacgtagtcttcttcaaggtcgatgttgacgaattgaacactgttgctgaggagtttaaagttcaggcaatgccaacgtttatcttcatgaaagaaggagagatcaaggagactgtggttggtgctgctaaagaagaaatcattgccaatctcgagaagcacaagacaggtgttgctgctgcttgatttgcttttctctcttacctattttgctaaaatatggttggtggtttaataaatcct

SEQ ID NO: 158537 - DNA, 176 bp, Arabidopsis thaliana columbia
  unsure (1)..(176): unsure at all n locations
gtcaactccacatagatctcctcatggctccaatctctgtcggcgatgtcttaccanacaagactatctccttcttcgaggagaaggatcaacttcataccccctcctttcactctctcgccatccttaaaaaagtcattctcttttatgttcctagatctttcactcccactttc

SEQ ID NO: 158538 - DNA, 219 bp, Arabidopsis thaliana columbia
cgaactcgagctcgccgaagttgagatgcctgtttcatgtcttgtcgtaccgaattcttaccggggggagtcattcaaaggcgctaggagtcaccggatctcttcacatgaccatccaaaccgccgtactcatcgaaaccctaactgctctcggtgctgaagtcagatggtgttactacctcatcttttccactcaaataccactccttcgtatccttc

SEQ ID NO: 158539 - DNA, 141 bp, Arabidopsis thaliana columbia
atttcttggggtgttgtccaagctgcttttatattttgaagggatattgccctctctctggggggaagatccattcgccaggggtgtataccattctctataactttcgatcatcttttatttcattttcaactcactcat

SEQ ID NO: 158540 - DNA, 188 bp, Arabidopsis thaliana columbia
gagaagctgaagagcttacaacatgagctcgagttttctcagagagacgctgatacctacatagacaagctcaacgcagagaagagagaagtcttgaagttgcaggagagattggcaatggtgaaaacatcaggaagcttgtgaaggatggtttcattattatgaagtcatccatgatttactctcgt

SEQ ID NO: 158541 - DNA, 385 bp, Arabidopsis thaliana columbia
cgctcttctcttctcttctcttctcttctcttcttttctctcctcttcaacctcaatcacgtggcaaaaccctcaggagagggcttccactaagtttttagtcatcgttggttttcacaataaagcagctcacatgcaaacattctcgtttaagaggagacccaaccattcacatttcccatcaactctcttcttcttctttctctctttaactctgttcatctctggtgtgagttctcgtgtactaagtcctgtccctctagataactcgagcttgatctctgatggtgtccatggcgcctcggattacaaggatctcactcttgaccctccaaagaacgtttccaaagcagcttgcatacatgtcttctggttcctttcatgt

SEQ ID NO: 158542 - DNA, 69 bp, Arabidopsis thaliana columbia
ggccgagcggccgaaagccatggctgcatctttctctgtcccctgtatgataatggaagaagaagggag

SEQ ID NO: 158543 - DNA, 171 bp, Arabidopsis thaliana columbia
cggacgcgtgggcggaaatatctgaaccaacgctatgccgtcgacgcagtccttgaccgtcgcagcgaagacgctacgaaatcgggtcttctctaggtctggatctacatccgccggtccgagtcggtgggcgacgccaggtcactaggagccgacctaagggttacttta

SEQ ID NO: 158544 - DNA, 224 bp, Arabidopsis thaliana columbia
attggtagcaagcctttgaccgctgcattgaacgtttactcgagaggttttagaagtctgttgaaggacattaaggacaaatacgcagatccggaaattatgatcatggaaaacggatatggagaagaactaggggcctcagattctgttgctggtggtaccgctgatcataacaggaaatattatcttcagaggcatcttttgagtttgcaagaagctgtttg

SEQ ID NO: 158545 - DNA, 199 bp, Arabidopsis thaliana columbia
gttgattggctaaccgacaaaatgagaagtcttttccacactgtttcagctacacacggacagatggaccatatcacatgaggcagcatcattctctaattccgctctgtgtctttccgtgttctcataaccactgaccttcttgtttgtggtatggattgttcattattttttttttgtcatatatttttatcttatt

SEQ ID NO: 158546 - DNA, 381 bp, Arabidopsis thaliana columbia
cttggaaattcttgtcagataaggaaaagagagcttcttatgatcgtaggaaaagtttgcactggaggtatcagaaggtctcaggggcatcttctaataacgggttctgcaatttcgccaagactactttcactacaaatgcaaggacgacgaccccgagaaacaatccgccggtccaaaagaccaatccgccagcccagaagaccaatccccctgcccagaagaccaatccgccagcccagaagaacaatcctccgacccaaaagaacaatccgcaaaagccaggtgtttctacacagaaaacaggacttactgattatcacacaccaacaccaaacttatttacctgatttgggtcatcagaccaatcaaagtcgtatt

SEQ ID NO: 158547 - DNA, 86 bp, Arabidopsis thaliana columbia
  unsure (1)..(86): unsure at all n locations
acatgctnggactngagacttaccttggtgtgaagcgtatcaccatcaatgggcgcggtgacaggtggggggggggggggaccaat

SEQ ID NO: 158548 - DNA, 92 bp, Arabidopsis thaliana columbia
atcgcttcatcttcttcttcttcaacaaatttattcctttttctgataactcatttctatgccgcaaactttccaagaactggagactcttt

SEQ ID NO: 158549 - DNA, 303 bp, Arabidopsis thaliana columbia
  unsure (1)..(303): unsure at all n locations
caggacctggtcacatcccaacattctcttgtactgtggagcttgctggaatgagttttaatncggaatcagcaaagactaagaggcaagctcagaagaatgcagccattgcagcttggttctccttgagaaaaatgccaagattggacccattgagaggggaagagaaggtacaagagataagttcatgagtcctcttaagattttgacccaaagaagtgtaaagaagagaaccaaaccattcatgatgtacaactgtcttcattactatctttcaatacacatcatcaatctcatcaacca

SEQ ID NO: 158550 - DNA, 166 bp, Arabidopsis thaliana columbia
cggacgcgtgggaccaaatggtggaaaatccctatccattgcctgtcggggaggaatatgcatgggggctgcttcatatccgggtaacatggcattggttagatctggtggttccgcattgaggggaagtctctctcgaggatctggaactcggtggagtttgggg

SEQ ID NO: 158551 - DNA, 158 bp, Arabidopsis thaliana columbia
  unsure (1)..(158): unsure at all n locations
gctttcttcaccattcaggatcagagattcgttatctcttagaagacactcaatatgantaagcttcagacggtttctgttagaggaggcggaactactatcaagggaaaatctgaggagaagaagcgtaactttgttgagacagtgaatcttcatac

SEQ ID NO: 158552 - DNA, 100 bp, Arabidopsis thaliana columbia
gtcgtcgaaaagctttaccaaaatctcacgcccctctacgattcatcgggatttgagtttgggggggacccacaatggggggggggggtacttccacata

SEQ ID NO: 158553 - DNA, 202 bp, Arabidopsis thaliana columbia
cctttctctcgtacaagtcaaaatggcgtccgttgttcttcgaaaccctagctcgaatcgccttagtccattctcttcccagatcgactctcgctgtggtgcttccgttacttcctcttactcgatctctcattctatcggtggagacgatctctcttcctttaccttcagtaccttcctcttttgcacaccctaggcctct

SEQ ID NO: 158554 - DNA, 103 bp, Arabidopsis thaliana columbia
cagagcaaaaattccatctccgatttcggttgtttgttgttctcttctctgagaataggagaggatattagagggggggggggttctttcttttcattatatt

SEQ ID NO: 158555 - DNA, 224 bp, Arabidopsis thaliana columbia
ctcatcttcacaggaaacaatggtgtttgtgaagtcctccaaatcgaatgcttacttcaagaggtaccaagtgaagttcaggagaaggagagatgggaagactgattacagggcaaggatccgtcttatcaatcaagacaagaacaagtacatcacccctaagtaccgttttgttggtcgatttaccaacaaatacattgtggctcagattgtatcttcaagca

SEQ ID NO: 158556 - DNA, 237 bp, Arabidopsis thaliana columbia
aattggcagagttaaagctaatctccagagccgtgttttgaagggaagcatgtctcaggaaaaagttgagaaaaccatgtctgtccgtaagggttctcttgattatgaaagctttagagatgtggacatggtcattgaggctgttattgagaatatatcttttaagcaacaaatttttgctgatctggagaaatactcgcctcagtattgtttccttgttagccacacatttaccat

SEQ ID NO: 158557 - DNA, 242 bp, Arabidopsis thaliana columbia
attagatcatcacttctcagatttcgatattcccaataaataataaatactctcagttcttctgtgctccaagaacaaaaaaaaagaaaatgaattcagaatcgctagaaaatcttcaccgtccattaatcgaatcatcgaagtcgttcgtcgattatcgtctcgagactgtgttaacagatcgagagttaccgtattttcgccggatttatctagcgatgatgattgagatgaagctcctc

SEQ ID NO: 158558 - DNA, 316 bp, Arabidopsis thaliana columbia
cgaaaaaaacaatggcaactcaagccgccgggatcttcatttccgccataacaaccgccgcaacctgcggggtcaagaaactccactgggggtcaacaacccaccgtcccaaatccctctccttcaccaaaaccgcaatccgcgccgagaaaacagattccttcgccgccgctgctgcagcccccgccacgaaagaagctcccgtgggattcacgccaccgcagctagacccaaacacaccgtcttcgatcttcgctggaagcaccggtggtcttctacgtaaagcgcaagtggaagagttctacgttatcacgtg

SEQ ID NO: 158559 - DNA, 129 bp, Arabidopsis thaliana columbia
gatcgattcgtggtttgtaacacgcaaaaccagtttcttcatcagaaccgctcttatccacgtctgtaactttatctccggtgttgccagatgtttctcttacaagattatattcttttacccacattt

SEQ ID NO: 158560 - DNA, 218 bp, Arabidopsis thaliana columbia
ccgcaaccttcgattttcgtttattcgcatccatcggtgagagaaaacaatcaataagcgacgcgatggtggtgtaccaagatcttgtgacgcggtgatgagcttctgtctgactctttcccttacaaggagattgagaatggaatcctctgggaagtagaaggaaagtgggttactgtgggagctgtagatgttaacactgtttgcctaatcctatc

SEQ ID NO: 158561 - DNA, 246 bp, Arabidopsis thaliana columbia
gatatctctgaggtaattctggagcagcataaacaatcaattgattcattcttcttgataccaggttgtggaaactctaggagtggttgctatttgtttgacagtctctaaccatgggtaaagagaagtttcacatcaacattgtggtcattggccacgtcgattctgtaaagtcgaccaccactggacacttgatctacaagttgtgtggtattgacatgcgtttcattgataggttcgagatgg

SEQ ID NO: 158562 - DNA, 165 bp, Arabidopsis thaliana columbia
atttgagagatgtctttgctaagcagatggtcttatctgacaaagacattgtcgctttatcgggtgcccacactctgggacgaggccacaaggataggtctggcttctaaggtgcatggacatcaaaccctctaatctttcacaactcttacttcaaggaactct

SEQ ID NO: 158563 - DNA, 350 bp, Arabidopsis thaliana columbia
cataacccttatcggagatttgaagccatgggaagaagaaaaatcgagatcaagcgaatggaggacaaaagcagtcgacaaggcactttctccaaacgacgcaatggtctcatcgacaaagctcgacaactttcgattctctgtgaatcctccgtcgctgttgtcgtcgtatctgcctccggaaaactctatgactcttcctccggtgacgacatttccaagatcattgaacgttatgaaatacaacatgctgatgaacttagagccttagatcttgaagaaaaaattcagaattatctttcacacaaggggtttctagatacagttcatagcaggctttaataaccaaa

SEQ ID NO: 158564 - DNA, 395 bp, Arabidopsis thaliana columbia
cggacgcgtgggctctctacttcaataaatctccaccttactttaagaacaagaaaaacacagggttaacaaatgggaggggtcaaagttttcggtcacccagcttccacagccactagaagagttctcatcgctcttcacgagaagaatgtcgactttgaattcgttcatgtcgagctcaaagatggtgaacacaagaaagagcctttcatccttcgcaacccctttggtaaagttccagcctttgaagatggagacttcaagattttcgaatcaagagcaattactcaatacatagctcatgaattctcagacaaaggaaacaaccttctctcaactggcaaggacattgcgatcatagccatgggcattgaaattgagtcgcatgagtttga

SEQ ID NO: 158565 - DNA, 147 bp, Arabidopsis thaliana columbia
tcctatttcccgttcgaccacgcgtccgaacctgtcctttttctctttcaattgcgtttgatagtatgtggcggggaatttccgttatcgatgaattctacctggttgagcgtgcagttttcatatgcttgtttcaataattaaacc

SEQ ID NO: 158566 - DNA, 231 bp, Arabidopsis thaliana columbia
cgaaaagttcgccggaaaaacaaaaacatgccgacgaacaacactccgttcctcactatttttctgctctttcttggcttacgtggcggtcgattcatttcccgggttagaagctgcaaccgggaaattagcttcgattccaggattatacgtgttcggagattcgttagttgatgccggcaacattaattactcaccaactccaaattctaaagctttatatccacataa

SEQ ID NO: 158567 - DNA, 63 bp, Arabidopsis thaliana columbia
ctttttatctctcgctgataactctgttttggttgtataaaggcaaaaagagcttttgggtgg

SEQ ID NO: 158568 - DNA, 383 bp, Arabidopsis thaliana columbia
gaattcccggtcgagccagcgcgttacaaaacccaaaccctcattccaaaaaatgatttttttttctcaaaacctctcctttctcctgcacgtccttctagactacgagggcgcctcctatacttaccactatacccctcctaaaccatcaccaacacctcacaaatcaccaaaacattcagtctaaccacctaaatctcctttcctcaaaccacctaaaccacctcctctacaaccacctactccaaaacctaccaccctcaaaccccatccttaatcaccaacccccaaacctcatccctaaccaccaaccctctaacctcaccctaaatcacccaccactaaagccaccccaccctaaaacaccctaccaaactctccac

SEQ ID NO: 158569 - DNA, 182 bp, Arabidopsis thaliana columbia
ccactaccagaaacactaagcgctattgtcttattctattgctttggctcttcattacatcgtgggactgcacattccttcatgcgacaaatcactgattacctcaaaacaaatcttcagcagaaggtaagagcacaaccacttcaacaacctgaacgctggacattactttcacgaaaata

SEQ ID NO: 158570 - DNA, 308 bp, Arabidopsis thaliana columbia
agccgcgcgacccgtctcagctaccttaaatcagaattctagggttcttcctattagggtaaaatcgaatccagagtgccgaaaattctgatctttgggtatgaaagatgtctcaaaacgggaagataatcccaaatctggaccaaaacagtacgaggctcctcaatctcacagttctccagcggatcgatccatacatcgaggaaatcctcatcacagccgctcatgtcactttctatgaattcaacattgagctcagccaatggagtcctaaggaccgtgaaggatctttgtttggtggcaaaaga

SEQ ID NO: 158571 - DNA, 208 bp, Arabidopsis thaliana columbia
ctctctctctcttattaactcaatgacggcgactgcgtttagggtcggcttgtggttgggccgtacggcttcctttctgtggagcgcaacaaacgccaaaatccccggcgtttacagtggcggaccgtggcagaatgcacacgccactttctacggtggcagtgacgcctccttcacaatgggcggcgcgagtggataccttaacttg

SEQ ID NO: 158572 - DNA, 159 bp, Arabidopsis thaliana columbia
atttatcatatcaaaggaagaaactttaaaatgtcaaccgattctgatgatggtttcccgttcgtcattactactactttgggttgctttcatttttttctctttctctctactctcatattcattttatctaccttactcataccctattactttctt

SEQ ID NO: 158573 - DNA, 290 bp, Arabidopsis thaliana columbia
gagaaacttgtcatatcgtcatcgatcatgatggtaaccttccttactgggaaggacagagttgcagtgtgattcctccaggtgagaacccgaataaaccgggagcgccacacaatgtgcgcctttactcaattgcatcaacaaggtacggagatttctttgacggtaaaacagcgagtttgtgtgtacgtagagctgtttattacgaccctgagactggaaaagatgattcttcaaagatcggactctgctactactttttatgttattcaaagacccgtttacaagat

SEQ ID NO: 158574 - DNA, 378 bp, Arabidopsis thaliana columbia
aaaaaaccctaaatataatttcacgcagctgcctctcttttcttcttccgatcctccttccgccgagtgaagccgcgactgtgaaatcatgagaggagtaaaacgcgccgccatctccgaatcgaatgactctccctttaagaatgcaaaaccagtggaaggaatcttttttggtactcagaagaatgtggtaccgatgcagcagagttcagtaacatcagcatcattggataaacagagggctgagttagctaggaagcatgtgagagctcttaataaccaatttgtaagttgggtgcagttacagctgaagaatcatcctgatgaactttgggaagatgggatgaatgactacattacgcatgcttcaaacattct

SEQ ID NO: 158575 - DNA, 156 bp, Arabidopsis thaliana columbia
tttttggatccaagctgatgagctctacgtcttcctcccagatggttcagctcgtagctgacaagcatgtacgttacattctgatggcagaaaagaagaaagagagttttgagtctgtggtgaaggatcatctaagaaaggatggggcatactggg

SEQ ID NO: 158576 - DNA, 218 bp, Arabidopsis thaliana columbia
  unsure (1)..(218): unsure at all n locations
actctctttaaaagaaattcgtaagtactatcatttatcagaagatggcccaaaaggtggaagcagagggagtgaaaggagcgaacgatgggacaatngatcgacacatgacgccgtgaccaatattcagcttgcagcatgcatagacggaattcaatatgttcagtttgattattttttgaaccgccaaccttaacacgtttcttttttttgttcct

SEQ ID NO: 158577 - DNA, 194 bp, Arabidopsis thaliana columbia
caatctttctctttctctctgttcttgctctcgcaaatcgcaatggattcgtttgatttcgatgacgtgaaagcagagagggcgcagggcgttgcggcgtttcaaccgcttctgtagaattggccgtttcttccgtgcggcggaggtttgcgttgttctactcttcatctttttttcatttcttcacctttctt

SEQ ID NO: 158578 - DNA, 477 bp, Arabidopsis thaliana columbia
  unsure (1)..(477): unsure at all n locations
acggaattccagggncgggcagcggtgcgtttaaatcgatcacaatctactcacttttgaaggttgattcaaaaggagggaaaggagtcaaccagattgtacgattgatccggtcagtaggccttgaccaanattcatgttgcagtaggcggaatgggaattcaatacattcagttcgattacgttaagagcggacaaaccgaacaaatttctctttgtggtatcaaaggcaataccatttctactgattctgtttgtgatttaccatcctgaggatcatatattttctatttaaatattttataatcctgattgttcttttctaattttctttatctttttttctaccgatataatttaatatttttatttctatctcttctctttttcacattctcttttaacttttactttatatgtatttttattcatatacttttctctcttatttttttatcttcttttttctttttatta

SEQ ID NO: 158579 - DNA, 263 bp, Arabidopsis thaliana columbia
ggtgcggtctctctctccttttcatcttctttaacgcttctcttttccagaacttgctctctctctctctttctgtcatctcctcaccggttcctagatctctatagcggtcttccttccctcctttgtttccgggctgttccttaatcactatctctttctctttcttctgccatcgccaaaccttatctgggttttgcttcttatttgaagatttatatgggctttactaggaatttcatgggatgttttcatgattcttt

SEQ ID NO: 158580 - DNA, 180 bp, Arabidopsis thaliana columbia
cccaaatagtactttttttttggttggcctttttatagaaagaagaactcaaagcgcgagagagaagatgagcggagaacagacgcgacacgccaatctagcggttcccgcgtttaaaactgagaaagagcccataacgcaaacacgaaatggtcaaagtagcgtttggcgtttctgtgg

SEQ ID NO: 158581 - DNA, 219 bp, Arabidopsis thaliana columbia
gaaatgttctccctcttagatctattcctgaaggagctgttgtctgcaacgtcgagcatcacggcggtgatcgtggtgtcctcgctagagcttctggtgattacgccattgttatcgctcacaaccctgacagcgacactactaggattaagttgccatcgggttcgaagaagattgtcccaagtggatgcagggctatgattggacaagttgctggag

SEQ ID NO: 158582 - DNA, 250 bp, Arabidopsis thaliana columbia
atagacacacttttttacgtatatgtgtgtcttctttcgtctctgttgggaatagatcttgtggtaagagatcacttcgaggctggtctaaagtgagaaactttggttcttgttttggtttctggcttctcgtctattctgcttcagttaatgtcgtggtagttcctcttcctttttcttatttctatattattatccttctttctttctttttttatttatcttttttcacttatgcctttttttcttt

SEQ ID NO: 158583 - DNA, 63 bp, Arabidopsis thaliana columbia
aagcaaagcctctcgttgctagaggaatcaaacaattttttttttgaaggccaccaattctaa

SEQ ID NO: 158584 - DNA, 217 bp, Arabidopsis thaliana columbia
ttggatttgagggtgacaacatgattgagaggtccaccaaccttgactggtacaagggaccagctctgcttgaggctcttggccagatcaacgagcccaagaggccgtcagacaagccccttcgtctcccacttcaggatgtctacaagattggtggtattggaacggtgccagtggtacgtgttgagactggtatgatcaagcctggtatggttga

SEQ ID NO: 158585 - DNA, 178 bp, Arabidopsis thaliana columbia
  unsure (1)..(178): unsure at all n locations
atgggtttcaagaggtacgttgagatcgttagagtagcacttgtgaactacggagaagagcatggaaagctcgtcggtagtggggcgacgttgttnaccagaacagagctttggtggatgcccctgatatggagaggatccagatgaacttcaagagggtgtttcttacctatatttt

SEQ ID NO: 158586 - DNA, 162 bp, Arabidopsis thaliana columbia
cgactgcaactatgttgcgttatttgagatcaaatgctagagtcttggccattcctgatgatctagcaaatgtgtcatgcggtgtggaacagattgaagaactgaaaggattgaaccttgttgagaaagatggtggttcattttcttttgacggggctagga

SEQ ID NO: 158587 - DNA, 194 bp, Arabidopsis thaliana columbia
gcggaagaaagtacttcacgaagagatgatattgctattagttacacagaagaagtattaagttccaggtcgagatttgcttctgctgaggatgccacaactatcaaaacacctcttgaagtaatgcaagagtctttcccaaatcatcttgtaatgtcaagtaagaagttcattggaaatttttttctacctac

SEQ ID NO: 158588 - DNA, 69 bp, Arabidopsis thaliana columbia
  unsure (1)..(69): unsure at all n locations
acaaacaaatcttaaacgttttactttgntcttcactactcaacctcaatcgcctcctcaacagatggg

SEQ ID NO: 158589 - DNA, 61 bp, Arabidopsis thaliana columbia
caaatctcagatctagctcaaccatggtgttgtttttctagaagacctcaattctccggga

SEQ ID NO: 158590 - DNA, 185 bp, Arabidopsis thaliana columbia
ctaattaccactttcttctccatatacaaaaaatacagagaactcacaatgtgcgattcagatgttctctctcgttggtcggcctacgaagcagacgttgattccgacagcgagatctcgacctccagtttcagttcttgttcgtacagtgaatctgaggaagaagagatcaacactggttttgg

SEQ ID NO: 158591 - DNA, 239 bp, Arabidopsis thaliana columbia
cgcactctccgccaccttcttccctaattctctctctctcgctacctctctacgtgataaacaggaatggcgactgtacgaatctcctccactagcatgaccaaggccgttcttagaagccagacaaccaacaagctcattactaacaagagctacaacttatctgttggatcaacgaaaagggtttcgagatcttttggtttgaaatgctcaattaattctggtggtgctactatgtc

SEQ ID NO: 158592 - DNA, 210 bp, Arabidopsis thaliana columbia
gaaaagaaatggattgaagaaaccccatcttcttctttaccattcagaatcatcaaaggatcgagccctggccaccggcgtgcttcaaacggtttgagctcaatcttctcggattcttcaaaatcacagtggcagaaacaaaatggtgagaaaagcggcaagaacgttgctcatgctggagtttctgttggatctgtcgacctgtaagag

SEQ ID NO: 158593 - DNA, 200 bp, Arabidopsis thaliana columbia
ggcgctcagctcgtgactggaacatcctgagccagcttaaagttaccacaaccaccacgaagactaggcaaaggggcgtcacatctttgagaggctcccaacctaaacggatactgcgagagctgtagagtcaacgtggagcttaacaacataatggactttaagggggcaccacaatcaattttttttcctcttctctt

SEQ ID NO: 158594 - DNA, 234 bp, Arabidopsis thaliana columbia
gccgtggttcaagacgataagcttgttcctctttacggtagaggcaagaaccagactgacccgagatcaaaacgttatccgggtttacggattcctaaccgaccaacaggtcaaagacctgagactgctgctcctcctcctcagcctgaagctgcgagtaattttttcaactacggtattggtttgatgggtggaattatgccgatgatggcgactacgaggtttgggaatttc

SEQ ID NO: 158595 - DNA, 319 bp, Arabidopsis thaliana columbia
aaaatttagacaaaaaaataaatatggatctctttacctcagtttatcgaccaaacgtcgcccgttatgattctccggatggtgtggattttttattactttccatttttatttttctttatcttttttattctttttttattttttatcattattgtgtgttttttatattttttttttttttattttattcttttttctattttttttctctattttttttttttattcttttttattcatctttctttttctcttttttcttttttcactattatattttttattattttttttctatttttttctattttttttt

SEQ ID NO: 158596 - DNA, 105 bp, Arabidopsis thaliana columbia
ggagatttgaatctcatcttcactaaagtaaattttaacactcagaaatcgaagagggggagggaacgaatgagaagaggtttaggttttgtacttttgttcgta

SEQ ID NO: 158597 - DNA, 177 bp, Arabidopsis thaliana columbia
gtctctgtagaaaatgccggactattggccttgacactagttggtagtcgaagggttgtccagagaggtgcaggcttcatgagatgcttctctattctcggaaaatttggagctgcgtttgcttcaattcctgcgcccatcattgctgctttaatctggctcttcttcgcatacctt

SEQ ID NO: 158598 - DNA, 241 bp, Arabidopsis thaliana columbia
aatggcttcctctatgctctcttccgctactattgttgcctctccggctcatgccactatgggcgctcctttcaacggacgtaaggcctccgctgccttcccagccacccgcaaggctaacaactacattactttcatcacaagcaacggtggaagagttaactgcatgcatttgtgtcctcctatttgaaagaataatctctacatctctctcttacctatctccttccctaccctatac

SEQ ID NO: 158599 - DNA, 327 bp, Arabidopsis thaliana columbia
atttgctcattagagaacagaaaaaaaaaaaacaatggcaactcaagccgccgggatcttcaggtccgccataacaaccggcggaacctccggcgtcaagaaactccactttttctcaacaacccaccgtcccaaatccctctccttcaccaaaaccgcaatccgcgccgagaaaacagattcctccgccgccgctgctgcagcccccgccacgaaagaagctcccgtgggattcacgccaccgcagctagacccaaacacaccgtctccgatcttcgctggaagcaccggtggtcttctacggaaagcgcaaggggaagagttcta

SEQ ID NO: 158600 - DNA, 184 bp, Arabidopsis thaliana columbia
ctgccttgctcctcttgccaaggttattaatgacaggtttggcattgttgagggactgatgggcactgtccactctatgagtggtactcagaagacagttgatggtccatcaatgaaggactggagaggtggaagagcctctttcttcaacattatttctagcagcactggtgcctccaaggct

SEQ ID NO: 158601 - DNA, 160 bp, Arabidopsis thaliana columbia
ttcgttgctaaggatccatctggaaaagctgtgaacgctcttgagcaacacatcaagaaccttggtgtggcatcaactccatgtttcttcaacaccttgtacgacccataccgtgaaggtgctgacttcgtccgtggataccctttcaggctccgggagg

SEQ ID NO: 158602 - DNA, 195 bp, Arabidopsis thaliana columbia
caaagacggagatggttgcatcacaactaattatttatgaacagtgattagatcattagggcaaggatccaacagagggggaggtactttatattataaactatttatatgcttatttttacttaaccatatacttttctatttttttttacttatttgctagtatttatttttttttttattttcttttctttt

SEQ ID NO: 158603 - DNA, 309 bp, Arabidopsis thaliana columbia
ttcttccgcttctgtcgtcctccgcaaccgtgccacctccctcaccgtccgtgccgcgtcctgctacgccgatgagctgggtaagacagcgaaaactattgcgtctcccggacgtggaatcttggcgatggacgagtcaaacgcgacttgcgggaaacgtttggattcgatagggctagagaacactgaggcaaatcgtcaagctttccggactttgctggtctctgcaccgggactcggacagtacgtctccggcgcaattctatttgaggagactctgtaccagtctaccaccgaaggcgagaaaat

SEQ ID NO: 158604 - DNA, 371 bp, Arabidopsis thaliana columbia
gtatctacacctctcctcagtctcatactcaaatcaataatccaaaccccaaaaaagagaaaaccagagaagagagtttaaaaaatgagaggttcttgcaaagtctctatagttcttcttctggttttaatcaatggtgtgcttggagataacccttatagattcttcacctggaaaattacttatggcgacatttatccccttggtgttaaacaacagggaatattgataaatgggcagtttcctggacctcacattgacgcaatcacaaatgataatatcattatcagtgttttcaaggacttgaaagagcctattctcatttcttggaacggagtgcatcagatgaagaacttatggcatgatggagt

SEQ ID NO: 158605 - DNA, 61 bp, Arabidopsis thaliana columbia
atcatttccaatttataaaagttaaagccatggttgcatctttctctggcccctctatgat

SEQ ID NO: 158606 - DNA, 372 bp, Arabidopsis thaliana columbia
atttcaatccttctccgtcagattatctcctctgtcacgatgtctctccgccgcactatcctggggctgcaccgtcaaacccagagagccactctctcaaagtctctacctttctcgatgagtcacatctcctccgcatccgccaccgccgccgtgagaaacccactgggaagagacctctcttcaatccccttcgcacaagcccagaaactgaaaccagattcaaccaatctcgtcaccgatcgctcgatttcgtcttcaattgggcaatctgaactcaacaaggcagccaaattctcgcgtcaatcgtctttctgagggtacactaatggctctttcttacgcaaaacccctggagtctttcacatacat

SEQ ID NO: 158607 - DNA, 91 bp, Arabidopsis thaliana columbia
taaaatcagaattacaaacaaaaatggttttgcataatcttcctctcattagactgctgttgcgcctgaccatcggcggctgtccagcaaa

SEQ ID NO: 158608 - DNA, 349 bp, Arabidopsis thaliana columbia
atcctaagctcatctctctatctccaatggagttcgccgcactatcccgaatcggtctcgccggactcgccgtgatgggccaaaacctcgccttaaacatcgccgagaaaggtttcccaatctcagtctacaatcgaaccacttccaaagtcgacgaaaccctagatcgagccgccgtcgaaggaaacctcccagtctccggccaatactctccccgcgatttcgtcctctcgatccaacggcctagatctctcatcatcctcgtcaaagctgtagctcctgttgtccaaacaatcgacgccttcttcgaatacaatggagccaggagattgtatcattttacggtgga

SEQ ID NO: 158609 - DNA, 444 bp, Arabidopsis thaliana columbia
cacttttctagtatcatgaagctgagaattcagccgtccgatcatgccgatcagaaacatcggcattgggcgaacagaagaagccacccgtgccgatgccttaaaggcgggggtggcgtgagttcatttcaactttgatctttgtcgtcgccggttcaggctctggcatggctttcaacaagctcactgaaaacggagccaccactccttctggtctcgtagctgctgcagtggctcatgcctttggactcttcgtcgctgtctcaggtggtgccaacatctctggtggacacgttaaccctgccgtcactttcggtgctttcattggtggtaacatcactctcctccgtggtatcctctactggattgctcagcttctcggctccgtcgtcgcttgccttatccttaaatttgccatcggcgggcttggctgggccggctttt

SEQ ID NO: 158610 - DNA, 134 bp, Arabidopsis thaliana columbia
atcatttcctccgaagaagaagataagaggttgaagaagaagaagatgccaggtccagttattgaggaagtgaatgaggaggctcttatggatgccattaaagagcagatgaagctccagaaggagaacgatgt

SEQ ID NO: 158611 - DNA, 301 bp, Arabidopsis thaliana columbia
caatgctaaatgccaagacggacgatcaggatacgaggcttaccttgtcactcacaatctccttatctctcacgcagaagcagttgaagcttaccggaaatgcgaaaagtgtaaaggtgggaagatcggaattgcacatagtcctgcttggttcgaagcacatgaccttgctgattcacaagacggtgcgttcatcgaccgtgcacttgactttattttgggatggcatttatacacaactacatttggagattattctcagatcatgaaagacattgttggacatagattgtttaatatt

SEQ ID NO: 158612 - DNA, 161 bp, Arabidopsis thaliana columbia
gagtgatgggtcaaaggttcttcaagttgattggtagaagttttcttctgctcttcctaaaatgagttttgaccgtcatgaggaatatctctacttaaatctggtcaaagagataatctcaaatggaaacttaaaagacgataggacagggactgatacat

SEQ ID NO: 158613 - DNA, 330 bp, Arabidopsis thaliana columbia
aaagagaaaaagattaatcatcatcaatctaaagatttaggaatctacaatttcccagtagacagatttcacttttgcgtcttcttcttattccatttgatctaagtttctcgaaataggtacaaagttcgagtctttttcttgtaaccgcgtgaaaccaccaagaaacctatagtaagagtttccgcaaatgtgaattaaagacagctcatcactctgtcaaacttctacagtattaagttaacgaagcaggtacagccaaactaaaataacgcggtgttatgggaatcatcgacgcgtctttgtttcggcggttgattcttctttgca

SEQ ID NO: 158614 - DNA, 408 bp, Arabidopsis thaliana columbia
aaaaaaaaaaatctctctcaatctctctcagatctgaatccatccatcaccgatctctaatggcggcaccaccagcatcatcctcggcgagggaagagttcgtgtacctcgcaaagctcgcagagcaagcggaacgttacgaagaaatggttgaattcatggaaaaagtcgctgaagccgttgacaaagacgaactcaccgtcgaagaacgtaatctcctctccgtcgcttacaaaaacgtaatcggcgctcgtcgtgcttcctggagaatcatctcttccattgaacaaaaagaagagagtcgtggtaacgatgaccatgtgaccacgatccgtgattacagaagcaagatcgaatctgagttatcgaaaatctgtgacggttttcttaagcttcttgatactagac

SEQ ID NO: 158615 - DNA, 273 bp, Arabidopsis thaliana columbia
cagtgaaaaaatcatatcgaatttggttatcctctttcaccaaaaccaccgatcatacctgattaatcacatttggttcattgagcatatcaaattattactatagttgggcctaacccgcaactgaaaatctggagaagatttaacgaataaaaaagagtggtaaaaccgttaaagttttttttttcagtttatctcataaccaccagaatttaaaaatcaaatgttttaactattgtcatcttgattaggcttttctgtttgcggttttac

SEQ ID NO: 158616 - DNA, 297 bp, Arabidopsis thaliana columbia
cttcttcttcttctgtaacctcgtcttcttcagcttatactcatagctataccaaagaaaacctcttaaaacccttcttctctcgatccatcgatcagcaacaattcacttctaatcgatcaagagctttccgatctcgtcgatcccaattaacatggctttcaacggcgcttctccgagaattgttgatgctactgagaacagcttggataagatcaagcgacaattggcatctggctctggtcggaacttgctacaaggacctcttttcaagcgatctgaaactttgtgaaaatg

SEQ ID NO: 158617 - DNA, 404 bp, Arabidopsis thaliana columbia
gagagatgatcggacggcgattgttcggcgccgacgccgatcataaagctgacgagtttcgatcaatggtgacggaaatgatggctctcgccggagtattcaacatcggagacttcgtgccgtcacttgattggttagatttacaaggcgtcgctggtaaaatgaaacggcttcacaagagattcgacgcttttctatcgtcgattttgaaagagcacgaaatgaacggtcaagatcaaaagcatacagatatgcttagcactttaatctcccttaaaggaactgatcttgacggtgacggaggaagcttaacggatactgagattaaagccttgctattggtcagttttttgacaattaatttccttaaaaatcgtatattatgaaagttagatttgtttttt

SEQ ID NO: 158618 - DNA, 176 bp, Arabidopsis thaliana columbia
gctttctcgatggcagattcaaagaatccacggatctctctcattctacgggtctggtttccgagttacagacggagatttccgaattggatcagagattggccggattaaatcgtcagctcgagtcaggtttcgctgcttacgcttcgtttttcgatcgtttaatgttttttttt

SEQ ID NO: 158619 - DNA, 363 bp, Arabidopsis thaliana columbia
ctcgattacttcctttttaatttccatggctctctaaaaatctctctctctttctctctctcttacttgtattgttacgatctctgcttgaagattatggacggcgccgatggaaccgttcgcgtcaagcctggtcgcggattcgaaacggagacggatgttgcggttttgtcgccagtgactcgtcagaaagcttgctgcagttaagcaattcatcgagaatcattataagaattacttgcaaggcttgctcgatcgtatggagagactcagggagttttatagtatatgtgcagaagcttaaatatctgttgttgatcatgacgatgatttttggatatttattattgtgtttaacttttt

SEQ ID NO: 158620 - DNA, 169 bp, Arabidopsis thaliana columbia
ctccgctgtcgcattagccgacgatgaagcagattgtgtctacacattcttccttagaaccggatcaaccttcaaagccggtacagattcgatcataagcgctagagtctacgacaaatacggagactacatcgggatccgaaacctagaagcatggggtggtttaatg

SEQ ID NO: 158621 - DNA, 188 bp, Arabidopsis thaliana columbia
taccgtcccgattcccggtcgaccccgcgtccgcagtaactctcaggtgcgtgtgctctccgctggttccttagaacaatcggcacacgctgtttcatttcaatcttcttcttctactcttaagtatctcaggtctgttgagagatggctgatcgattgacacgtattgttattgtgaggtcagactc

SEQ ID NO: 158622 - DNA, 464 bp, Arabidopsis thaliana columbia
  unsure (1)..(464): unsure at all n locations
gccttttgcttcattctcacttccttcctcatccaaaaaagctcctccatttcaatggcgacagcatcagctctctcatcactctcttcactctcactccacacccgaacctcttctctcatctcctcttcctccacaaaatccatcgtctctttctcctccttcctcaaccgccgcttctcatctctcactctcgtcaaagcctcatcgaccgataccgaaaccatcttcttcgaagacgaaacaccagaaataaccgcaaatgtcgtcttcgacccaccaattgctcccgaaggattcgtctctcctccgtatttcgacgaaggaagcgacgagacagaggaagagatcgctaccgcttttgaagagctctatggacctgcgtatagtggtgagagtatgcttgngaaagatattatgtgatggactcaaagcataagaagagttcaggtattggtgggaag

SEQ ID NO: 158623 - DNA, 380 bp, Arabidopsis thaliana columbia
ctctacgctctctcaaaagtcgaatatcccaaattcgatccgttttccggcgataatctccgatctagatccgatggcgaaagaaccagttcgtgtgctcgttactggagctgcaggacaaatcggatatgctcttgtacctatgattgcaaggggtatcatgcttggtgctgaccaacctgttatcctccacatgttggatattcctccagctgctgaagctttgaacggtgttaagatggagttgatcgatgctgctttccctcttcttaaaggtgttgttgctacaactgatgccgttgagggatgtactggagtcaatggtgctgttatggttggtggtttcccgaggaaagaaggtatggagaggaaggatgtga

SEQ ID NO: 158624 - DNA, 471 bp, Arabidopsis thaliana columbia
ccagattttattatccttcctcgaaacaagagcttagctaagatgacgaagaactacccaaccgtgagcgaagattacaagaaggctgttgagaagtgcaggaggaagctcagaggtttgatcgctgagaagaactgtgcacccatcatggtccgactcgcatggcactctgctggaactttcgattgtcaatcaaggactggaggtccattcggaacaatgaggtttgacgctgagcaagctcatggagccaacagtggtatccacattgctcttaggttgttggaccccatcagggagcaattccctaccatctcttttgctgatttccatcagcttgctggtgttgtggccgttgaagttactggtggccctgacattcctttccaccctggaagagaggacaagccccaaccacctccagagggtcgtcttcctgatgcttaccaagggttgtgaccatttgagaga

SEQ ID NO: 158625 - DNA, 187 bp, Arabidopsis thaliana columbia
gtcaaatggagcctgcttccattgcgcagatacatcttgatattggcaatgcctctgaatccatcatcttcagatcatcatgctcaaaagttgaattccttgggtaccaggcagtttacgaggatcctgaagctaaggcaatcaaaaataacgttaatgatcagagtagtgagcgtgaggatacttt

SEQ ID NO: 158626 - DNA, 398 bp, Arabidopsis thaliana columbia
ctctcactggtcttcctatgaaaatgggtagaggaattgtaaacagacttcattcgggacccgatgtgcagaaactttgctcttctgctcttgaatctcttgaaactatagcaactacacctcctgatgttgctgcattaccttcacctcgcagctccaagatgcagcaagatacagcaaccacaggatcaaccaagatcaggttcgaggatgtaaacgcgacttcacttacagtggttctcgcctctaatgaaattccctcacctccaaacatcgttcactacagtatttggcatcgtaaggtaccagaaaaagattacccggagaaatcgacttgcacattgtttattccaaacacatgatttgttgtctctggattagctccagcttttgagtac

SEQ ID NO: 158627 - DNA, 337 bp, Arabidopsis thaliana columbia
caatttgaaaaaccaagtccaacaatggcggtctctccgcatatttcgcctactctttcccgctacaaattcttctctacttccgttgttgaaaaccctaatttctctccgtatcgtatctatagtcggcggagagttaccaaatcacatctccaggcgcacaacagtaccactagctatggccggacggaactctcctcctcgaagaagctatggattaggcaacgaagcttcagcgaaatggaggttgagcaagcacaattagaagatgatgaagaacaagtggagatcgatatcgatcacgatagccagtctttcctccctgtgcatgataccg

SEQ ID NO: 158628 - DNA, 372 bp, Arabidopsis thaliana columbia
aagaaatcaagggaatatgaccatgttagtagaagaagcctctagtgtggataacaagggaccacattttacaccggtaaagaaatcttcggaagaaacagaagagaaggctaactcagggggaccagatataatcaaacatactatctctgagaaaagcagggaagatagtaaagtatcgagctttggtggtttgaggtctggctcaagggttgcaccttgtagtgacgatggtgattctgtaaagaattgtaaagatgatgttgaagagagctagaaagatagtgaggaactgtctttgatacgggaacagcttgctctgattgagaaccaacagtttagtctcttagacttactacagaaattcatggg

SEQ ID NO: 158629 - DNA, 159 bp, Arabidopsis thaliana columbia
cacgaagaaaaccatttgttttcttagagagagctcaagaatattaaaagagatatagagaaaagatttgctttaataatgccaacgtcgatacagtttcagagatcctccatcgccgcagaatcagccaacgccaccgtaagaatctatcttcaccac

SEQ ID NO: 158630 - DNA, 239 bp, Arabidopsis thaliana columbia
tgtcaaactaggtatcattgaggatgctgctaacaggaaccgcttggcaaaacttcttcgttttgagacaacaaagtccgatggaaaattgacttccctggatcagtacattaagagaatgaaaaagagccaacaggacatattttacatctcaggaagcagattggaacagctagagaaatctccatttctggagaggcttattaagtaaggtttttgatgttatttactttactata

SEQ ID NO: 158631 - DNA, 376 bp, Arabidopsis thaliana columbia
gtttagagtcacaagatgtgagcgaaggagatgagagcgaaggagatgcgagcgaaggagatgtgagcgaaggagatgagagcgaaggagatgtgagcgaaggagctgtgagcgaaagagctgagttcccggagccatcggaagaagccaagcttttcgtcggaaatttggcttatgatgttaatagccaagctttggctatgctctttgagcaagccggtactgttgaaatcgccgaggttatatacaatagggaaactgaccagagtcgtggtgttggatttgttacattgagattctgttttctgtatgttatatattttttgtttattctattctttttccatttttatatatttattactctttattatta

SEQ ID NO: 158632 - DNA, 273 bp, Arabidopsis thaliana columbia
caattttctcaaactctaaaatcaatctctcaaatctctcaaccgtgatcaagatgcagatcttcgttaagactctcaccggaaagactatcaccctcgaggtggaaagctctgacaccatcgacaacgttaaggccaagatccaggataaggaaggtattcctccggatcagcagaggcttatcttcgccggaaagcagttggaggatggccgcacgttggcggattacaatatccagaaggaatccaccctccacttggttctcaggctcc

SEQ ID NO: 158633 - DNA, 427 bp, Arabidopsis thaliana columbia
cttctggtcaagctagaggctttcacagctgtaatacagaattctccagttccattgaagtcggagatcgtaccgtcaccggaatctgatttcagggctcaggttaagatgagtttaagtagagcaaaggatttgagacttccgttgatgaatttggtttgacttaaaggttcaccaattttggagcaacttcatttagaagaaaggtcttttataacattttttgataattgttgcattgttaaagtttgaactcatgtttctaccatttgtttgggatttgtattttattctttatcatctttttttgtgtttagtattttattatatgttatttttctcattctttttacctattagttgtatatatcttatgtatttttgtttgtttttctatatctattatattttatatcttctttatttt

SEQ ID NO: 158634 - DNA, 223 bp, Arabidopsis thaliana columbia
gccgatacaaatgttatccaaccgatgaacattctgtgagcttgtcgtttaccctgccgatgaacctatgcgtgagtcttgggtgcccccaacgtcagccaccgttcaactcagggagagccgcgggtacgagtattactgagtctctaaaatcaatatttagggatcgatcggggtttctataagggttatgagtcaaattataactggatcaatatcggaa

SEQ ID NO: 158635 - DNA, 460 bp, Arabidopsis thaliana columbia
aaaaaaaaacacaaaaaagtttcaatggccgcctcaacaatggctctctcctcccctgctttcgccggaaaggctgtgaacctttcccctgcggcatcagaagtccttggaagcggccgtgtgacaatgaggaagactgttgccaagccaaagggtccatcaggcagcccatggtacggatccgaccgagtcaagtacttgggtccattctctggcgagtcacccagctaccttaccggagagttccctggagactactgatgggacacagctggtctatccgctgaccctgagacattcgcaaggaaccgtgagctagaagttatccacagcaggtgggccatgctcggagccctaggctgcgtctttcctgagcttttggccaggaacggagacaaagttgtagaggcagtttggtttaaggctgtttcacagatcttatcgatggatggtttgatta

SEQ ID NO: 158636 - DNA, 252 bp, Arabidopsis thaliana columbia
gggttctctcatcgatctcggtttgtgatcttcttcttcatcaatggcgtctagtgataaacaaacaagcccaaagcctcctccttcaccgtctcctctccgtaattccaagttttgtcagtcaaatatgaggattttgatctcaggaggagctggattcattggttctcatcttgttgataagctgatggaaaacgaaaagaatgaggtgattgttgctgataactattttactggtttaatggtcaacct

SEQ ID NO: 158637 - DNA, 216 bp, Arabidopsis thaliana columbia
aagatcttagatcgatttctaaagtcttcgtcttcttcttcttctgataactagctttttcaatcttctgaagctttaattttttcatacccatggctaatcgttatgatccaaatcctttcgctgaggaagaagaagtcaatcctttcgctaatgctagaggagttccacctgcgtctaattcgagacttttgcctttgccttcagagcctgttg

SEQ ID NO: 158638 - DNA, 331 bp, Arabidopsis thaliana columbia
cgcaaacaacaaggcaattcgacaattgctgcactttgctgtatctgatgtcagtgatgatgttaggaggactgccgttctggcacttggatttgccttgtactctgatccagagcagactctccgtattgtatcattgctttctgagaaatacaatccacatgttctttatggtgctgattttgctgttgtatttttatataattatttatgttctaatcatataaattactcattttatttatttttttatttttatactttttatattctcttaaatattatttttaatatattatgaaatatattttttatatattcttctttttat

SEQ ID NO: 158639 - DNA, 461 bp, Arabidopsis thaliana columbia
ctcgccgatcgttactccgtcgaaatcaccatggcgccaaagaaggataaggttccaccaccgtcatcaaagccggccaaatctggaggtggaaaacagaagaagaagaagtggagcaagggaaagcaaaaggagaaggtgaacaacatggtgttgtttgatcaaggcacttatgacaagcttctcactgaagctcccaagttcaagctcatcactccatcaatcctctccgaccgtatgaggattaatgggtctcttgcgaggagggcgattagggagctaatggcaaaaggtttgatcaggatggtctctgcacactcgagccagcagatctacactcgtgccaccaacacctaaaaagcgtgacctttcaatggtttggttctcgactcttttcttggtttttgtcttttgatgtatacattaatcatcagaactcttatagttcctttttgggtctc

SEQ ID NO: 158640 - DNA, 269 bp, Arabidopsis thaliana columbia
aaagctctcttttctctccagatttcgattcccgaggctcgagagaaaaccgtaaatctcttctccgttcactcaatcaaccaaagatgcgtgagattcttcacatccagggtggtcaatgcggtaaccagatcggagccaagttctgggaagtggtttgcgccgagcacggtatcgatccaaccggaaggtacaccggagactcagatctgtaacttgagcgtcatatcgattactacaatgtagcgagtttttttagatttatatcc

SEQ ID NO: 158641 - DNA, 98 bp, Arabidopsis thaliana columbia
gtctctctcccgcaaccttcgattttcgttcattcgcattcatcggagagagaaaacaatcaataagcgaccatgttgacgcaccaagatctcctcac

SEQ ID NO: 158642 - DNA, 403 bp, Arabidopsis thaliana columbia
ctaaaaccctatcagagaccatttcgcgtgaacaaagatggcggggcctttgcttcgatctctttggtcaaacaccactcgaagatccttctcttctcattcatcaccttccaaattcggatactcgctctcctccttacgctccttttcagcagccaccgcttccacagctgcagccggagctcctaatagctcgcttgaccctaatcgactaagaaacgtggctgtgatagctcatgtcgatcacgggaagacaacacttatggacaggcttcttcgtcagtgtggtgctgatatccctcacgagcgtgctatggattctattaatcttgagcgtgaacgagggatcactatttcttcaaaggtgacatcaaatatttggaaggacaacgaacttaacatg

SEQ ID NO: 158643 - DNA, 336 bp, Arabidopsis thaliana columbia
aacaaagaaaaaagatagttgcaatgggtgtgattagaacctcaagaacgatggggttaggacagtgcatggtttatgttgtcgggctatgtgccattgcggctacagtgacatcatacccttacacatcctctcaaacttcacattacatttcttcaagccatgaacacaatattcttaattactcaccacatcctaatccatctatttacagctcttttccaccttcattatactactcttccttctccaaaggctgattacaatttttttatcatcattatacgcttacaggttcttactaccactatactactctttgtcttctataggttt

SEQ ID NO: 158644 - DNA, 181 bp, Arabidopsis thaliana columbia
caaagcaatatcatttccaatttataaaagttattgccatggctgcatctttctctgtcccctctatgataatggaagaagaagggagattctaagcgtaggtttcggtagttcatacttgttttttctctattttgctatctcttttcttgtctttttttttttttttctttatcttttt

SEQ ID NO: 158645 - DNA, 439 bp, Arabidopsis thaliana columbia
cggacgcgtgggatctccaccaccaccatacgtttacagctccccacccccaccatactactcttcttcgcctaaggttaactacaagtctcccccaccaccatacgtttacagttctccgcccccaccatactactctccttctcctatggttgactacaagtctacccccccaccatacgtctatagcttcccacccctaccatattattctccttctccaaaggttgactacaagtctccaccactaccatacgtttacagctccccacccccactatattactctccttctccaaaggttcattacaaatcttcaccaccaccatacgtgtataactctccaccttcaccatactattctccttctccaaaggtcacttacaagtctccaccacccccatatgtctacaaggcgccttactattgattttgaatt

SEQ ID NO: 158646 - DNA, 340 bp, Arabidopsis thaliana columbia
atctttacgcaacatccataccaactccttccgcacaacaaattatatctgccattaaagttattctgggagaggatggttcaaatcgaggggcacaaaagctagcaagaatacgtgagaacagcaactttttccgggctgagctgcagaagatgggatttgaggtacttggagacaatgactctcaccagtcacaaccaaaaaaaagaaaacacataaacaaagattataatggcttccttaaccatggctttgtcctcccctgccttcgccggaaaggctgtgaagcctgccgcattagatgttctcggaagcggtcgtgtgaccatgaggtagattg

SEQ ID NO: 158647 - DNA, 266 bp, Arabidopsis thaliana columbia
cagaaaaggggagaagcaaaaatggtttctctgaagctccagaagcggctcgccgcatcagtgatgaagtgcggtaagggcaaagtttggctcgatcccaacgaaagctccgacatctccatggccaattcccgccaaaacatcaggaagcttgtgaaggatggtttcatcatcaggaagccaaccaagattcactctcgttccagagctcgcaaaatgaagattgccaagatgaatggtcgtcactctggatacggtaagaggaa

SEQ ID NO: 158648 - DNA, 138 bp, Arabidopsis thaliana columbia
gaagaaatggggttccttaagccaaccatggcgattctttttctagcgatggtcgccggttcatcagccgtggacatgtggggtcatcttctacgacgagaaacatggcgtctccaccaccggtggccgtagcgaagc

SEQ ID NO: 158649 - DNA, 114 bp, Arabidopsis thaliana columbia
tttcatagctcctaacaaagcaatatcatttccaatttataaaagttaaagccatggctgcatctttctctgtcccctctatgataatggaagaagaagggtgattcgaagcgg

SEQ ID NO: 158650 - DNA, 441 bp, Arabidopsis thaliana columbia
gggggtggcgccggaggagcttcatgggatgatggtgttcacgatggcgttagaaaggtgcatgtagggcaaggccaagatggtgtgtcatctatcaacgtcgtgtatgctaaggactctcatgatgtttaatgaggtgaacacgtaaagaaaactttacttggttttgaaactgctttatgttgattcatacgactatttattttgtttatgcttgtaatctttatacatttcatttgtctatttacttttacattcatatctatcattttcctattattcatttctcgttattttctttatttattctcttctttttttatcattctattgtattttttattattattctttatttttttcgtatatattatttattttttcttttttatcttttttctatagtttattttttgattttttttacctttaattttatta

SEQ ID NO: 158651 - DNA, 225 bp, Arabidopsis thaliana columbia
taaagacatcaacaaggcaatactgatcagtgatgcaatgtagacaggaaccgttcagatcaactctgcgccagctcgtggaccggaccacttccctttccagggacttaaggacagtggaatagggtcacaaggtgtgacaaatagcatcaatttgatgactaaagtgaagaccactgtcattaacttgcctacaccttcttactctatgggttagtttccctt

SEQ ID NO: 158652 - DNA, 217 bp, Arabidopsis thaliana columbia
gttcttcagctctccttatcgctctctaaaatccactataagaggttctatcttcttataattgggaaagtatatagcatcgagagcactttgaatgtaaaaatatatacatattataatagttatgcagtacttaaatatgcttagttaattagatttgattattatatgtatctttgttgattattattttttatgtgattattagtagttgtct

SEQ ID NO: 158653 - DNA, 350 bp, Arabidopsis thaliana columbia
tgcctgtcaaatgagcaaggccgagtgttagcagcaaaacttggtgtgacagatcttttctgggactgggacttgccgagaaccagagaaggattctaccggttccaaggctcggtcgcagcggccgtggtccgtggctgggcctttgcacagatcgcagacatcatctggatggaaacggcaagccctgatctcaatgaatgcacccaattcgccgaaggtatcaagtccaagacaccggaggtcatgctcgcctacaatctctcgccgtccttcaactgggacgctttcggtatgacggatcagcagatggatgagttcattccgcggattgctaggctcggatattg

SEQ ID NO: 158654 - DNA, 365 bp, Arabidopsis thaliana columbia
gagaaatcctccacgtccaaggcggccaatgcggttaccaaatcggttccaaattctgggaagttatctgcgacgaacacggcgttgatcccaccggacgttacaacggtgattccgccgatcttcagctcgaacgtatcattgtttattacaatgaagctttaggttggttgttatcttttctagtgttgttttttattgtatttttatgtttttttgctttatgattagtttttatctttattattctcattgtattttatatttctactatatttttattattttgttatttgtatttcttctgtttgtatatttatttaatttgtttatttttatttataattatattattcagttatctc

SEQ ID NO: 158655 - DNA, 179 bp, Arabidopsis thaliana columbia
ctcccaaattgaacaaccaaagaagttgcagagcacacacacacactttcaagtttcaatacagagatggcgagcactgagccagagcgtgagaaccgtgaagatgaaaccgaagtcaacgaagatgaagacaccggagctcaggtagctccgatcgttaggcttgaagaggttgcagt

SEQ ID NO: 158656 - DNA, 531 bp, Arabidopsis thaliana columbia
tggccgaggaaggataaagagagacgccatgggaagaagacctgcgaggtgttaccgtcagatcaagggtaagccatacccaaagtctcgctactgtcgtggtgtgccagatccaaaaattaggatctacgatgttggtatgattaggaagggtgtttttttttttttttatattttctctttttttatttttttgtatatttttttatatagttttttattatattttttatattgtttttttttttttttaaatttattattttttatctattatatttttttgttatatatcttctatgtattattattactttatttaatttttatttatttatttatttttttaaatgtatttatttatatattatttatctttatttatttttttagttatgttattttttttatatttatcatttttttttatttatatttctttatatgattttttatattgatgtatagttctatatatttttgtttattagttgttctatatttcttttatatttttttttattattacat

SEQ ID NO: 158657 - DNA, 83 bp, Arabidopsis thaliana columbia
ctgaaggacagacgaatgatttcttgcgtgacatcgcagagcttaagaagaggcagaagagtggtatgatcggagataggaag

SEQ ID NO: 158658 - DNA, 154 bp, Arabidopsis thaliana columbia
aattgggtgaaagatgggtaacgctcttacgtttctctacggaaaatgctgcaaacccacaacaaccgatgactctcttggtcctcacggcgtcttcgccgccaccgtctgtgttttatttcttgctcacgatctcttttatctatttagatta

SEQ ID NO: 158659 - DNA, 399 bp, Arabidopsis thaliana columbia
ctcactttctctctcttatcatcatctcctggtattctctctctctcatctccgtgatggtgctctcccacgccgtatcggagtcggacgtctccgtccactccacattcgcatcacgttacgtccgtacttcacttcctaggttcaagatgccggaaaactcgattcctaaggaagcggcgtatcagatcatcaacgacgagctgatgcttgacgggaatccacggttgaacttagcctcctttgtgacgacatggatggagcctgagtgtgataaactcatcatgtcctccatcaacaagaactatgttgacatggacgagtaccccgtcaccaccgaactttagaaccgatgtgtgaacatgattgcacatctattcaatgcacctgtagaagagg

SEQ ID NO: 158660 - DNA, 442 bp, Arabidopsis thaliana columbia
gttaactacaagtctcccccaccaccatacgtttacagttcttcgcccccaccatactactctccttctcctatggttgactacaagtctacccccccaccatacgtctatagcttcccacccctaccatattattctccttctccaaagggtgactacaagtctccaccactaccatacgtttacagctccccacccccactatattactctccttctccaaaggttcattacaaatctccaccaccaccatacgtgtataactctccacctccaccatactattctccttctccaaaggtcacttacaagtctccaccacccccatatgtctacaaggcgccttactattgattttgaattgtttcattaaaaggaaacgttgatgcaataatttggttttatgatttttttctcttgaatcttctgatattggtctttt

SEQ ID NO: 158661 - DNA, 252 bp, Arabidopsis thaliana columbia
tgagatttgttgacagtctctaaccatgggtaaagagaagtttcacatcaacattgtggtcattggccacgtcgattctggaaagtcgaccaccactgggcacttgatctacaagttgggtggtattgacaagcgtgttattgagaggttttagatggaggctgctgttatgaacaagatgtcttttatgtctgtaatgggttttaacattcttttttgtttagcttattttgtaatattatcctttttttt

SEQ ID NO: 158662 - DNA, 213 bp, Arabidopsis thaliana columbia
cttctccgatttcgactttgaatcatttcttcgagagaggtagcgagaaagggatcgccttttggcactctctgcggattctcagggttgggcaagaagagtttttatcgcaattgagtcttgaagaccacaaggatttgatcacattggtgcttctgcctgtttatctgagattgaggacaagaactactggggcgtttataattttgtcat

SEQ ID NO: 158663 - DNA, 318 bp, Arabidopsis thaliana columbia
agagtcccgacatggccactgatgcagcaaaccatgacagaaatggtaacggagaacttggtgctactggggaaagaattcatacatcagtcaatgcaaatcagaaaccgaatggcacaacacgctcagatcaggctagcgagaaagagcgtccctacaaaactctaagtggacacagagcaggagaagccgcaattgtttatgagcacggtgcagatatcgaggctcttatgccgaagctacgacaatctgattattttacagagccacgtatccaagaactagcagctaaggaaagtgcggatccgggttactgca

SEQ ID NO: 158664 - DNA, 394 bp, Arabidopsis thaliana columbia
cctagattcgttttccaatctcgtccttcttcttctcacacggcggaggaagaagaagaagctagaatccctaacaagcttttcatttcaatctccgtctcaatctccctcatcatattatctctctccttcttctacttcgaatctgaacctgccaaatcgctactattatggctttccctctctttcctcgtcggtcctttcgctcctagctcgctcaccggaggtaagattcgcgtcggttatggtcagatcttggagccagaacagattcacgatgagtcatccacggataacgaacgtgaatccaggaggaaatcggtgaataagcgatctaaaggttcgacgaagagcgataatccgccggaaaatgcttttgcggtgactgaagttt

SEQ ID NO: 158665 - DNA, 441 bp, Arabidopsis thaliana columbia
cgctctgtacgtacctgccacgtggcgtaatctctctgcacgacgcgcttcttttctttctatatacatctctccgacacaaacctaacccttcttctgaatcactttagttatcaatcgatagaaacgcctttcaattaccaaacatcgaaaccaccatgagggttatctcaaaactgttcgattccgacagaagacgaatacccaaatcgccgaagcatttggattccggcgaaagcgccacgtcatcttcctcactcagcgacgtaaccaccggctcaagcagccttcatagcagtctctctctccaaacgcttccttcagttccctctcttcagaaaatcccattcaccaccgtcaccgtttctcactccgttaccttctcgtttaaactccgtgatcggagactttttgtaacttgtctcgccttcatatggtggt

SEQ ID NO: 158666 - DNA, 288 bp, Arabidopsis thaliana columbia
cagagattcgtgacctgagaagacactcaatatgagtaagcttcagagtgaggctgttagagaagccataacgactatcaagggaaaatctgaggagaagaagcgtaactttgttgagacagtggagcttcagattgctctgaagaactatgacccacaaaaggataagcgtttcagtggatctgtgaagctcccacatattcctcgcccaaaaatgaagatctgtatgcttggagatgctcagcatgttgaggaggcagagaaaatgggacatagtaacatggatgt

SEQ ID NO: 158667 - DNA, 270 bp, Arabidopsis thaliana columbia
ggttgatgtgccattgtttccgttagaccagcaaggatctctagatttgtctgcgataaacccgaaccaaacgacatctatcggagctccatctggaagctgggaaactcaatcacagagtctctacaacacatctagcctcggttttcattactaagcatgattcattgaaacatcatggttggcatcaatctatcatcaaattctgaagcatattctatttcattagctcattaaagtagttattctcgaaatttggttagtgcatta

SEQ ID NO: 158668 - DNA, 275 bp, Arabidopsis thaliana columbia
caaaagcctcagcctttgacatggcacaagacttattttgatgcgcccgaaggaaatgagccgcttgctttggacatggaaggaatgggaaaaggtcagatttgggtgaacggtgagagcatcggaagatactggacagcatttgcgactggtgactgcagtcattgtagctacactggaacatataaaccgaacaaatgccaaaccggctgtggtcaatctacacaaaggtggtaccatgtgccgagagcttggttaaagccgagccaaaatct

SEQ ID NO: 158669 - DNA, 216 bp, Arabidopsis thaliana columbia
atgctgggcagtttgtgctaatgacaaacccacatattggtaatactggtgtcaatcctgatgatgaagaatctgggcaatgctttcttactggtttggtgataagaaacctaagcattagtacctcaaactggagatgcacgaagacacttgctgattatctaaccgaaagggacatcatgggagtttatgatcttgacacttgagcaataaccc

SEQ ID NO: 158670 - DNA, 298 bp, Arabidopsis thaliana columbia
attgcctaaatttacaactgagcagaaagcaaaactgaaagcttctaccgatttcgttgggctcaactactatacttcagtgttttgaaaccatttggagaaacctgatccttcaaaaccaagatggatgcaagattctcttattacatgggagtctaagaatgcgcaaaattacgccattggtagcaagcctttgaccgctgcattgaacgtttactcgagaggttttagaagtctgttgaagtacattaaggtcaaatacgcaaatccggttattatgatctttgttaacgtatat

SEQ ID NO: 158671 - DNA, 460 bp, Arabidopsis thaliana columbia
gttaactacaagtctcccccaccaccatacgtttacagttctccgcccccaccatactactctccttctcctatggttgactacaagtctacccccccaccatacgtctatagcttcccacccctaccatattattctccttctccaaaggttgactacaagtctccaccactaccatacgtttacagctccccacccccactatattactctccttctccaaaggttcattacaaatctccaccaccaccatacgtgtataactctccaccttcaccatactattctccttctccaaaggtcacttacaagtcttcaccacccccatatgtctacaaggcgccttactattgattttgaattgtttcattaaaaggaaacgtgattgcaataatttgtttttatgaattttttctcttgaatcttctgattttgttcctttaattagttccttatcttg

SEQ ID NO: 158672 - DNA, 352 bp, Arabidopsis thaliana columbia
aggaacaccacaattccgaccaagaaagagcagatattctctacctattcagacaaccagcccggtgtactgatccaggtctacgaaggagagagggcacgaacaaaggacaacaaccttttgggaaagttcgagctcagtggtataccacctgctccacgaggtgtaccgcagattactgtctgtttcgacatcgacgccaatggtatcctgaatgtgtcggctgaggacaagacgactggtcagaagaacaagatcacaattacaaacgacaagggaaggttatcaaaggaagagatcgagaatatggtacaagaggctgagtagtacttatgctgatgtttgtataaca

SEQ ID NO: 158673 - DNA, 269 bp, Arabidopsis thaliana columbia
ctctcgctcactcttctccaatccttattttattttttgaaagtttaaaattttatacaacatatcaatttggggtagaaaaattcgaaagaaatgaaagagatgggagtgatagtgcttcttctccttcactcgttcttctacgttgccttttgcttcaatgatggactactaccaaacggtgactttgtactcgttccactacattctgtcatgaaaggatcacatgttatcaacttatcattattcccatactgggaactcttagg

SEQ ID NO: 158674 - DNA, 252 bp, Arabidopsis thaliana columbia
cgtgaagctgatcggtgcatgggcgagtccctttgtgatgaggccgaggattgctctaaacctcaagtctgtcccctacgagttcctccaagagacgtttgggtctaagagcgagttgcttcttaaatcaaacccggttcacaagaagatcccggttctgcttcatgctgataaaccggtgagtgagtccatcatcatcgttgagtatatcgatgacacttggagctcatatggaccgttcattctctcttt

SEQ ID NO: 158675 - DNA, 198 bp, Arabidopsis thaliana columbia
attcgacaaaagctaaaaataaaataaaagaagatagcaaaaccctagagctcaaggtaatcgccgtcgatttcttaatctcttaccgtcgattacattccgatgtaagttttacaattgctgttgttattttgatttattattattatatttatttgtttattttttttatttttttttttttttattttttttttt

SEQ ID NO: 158676 - DNA, 105 bp, Arabidopsis thaliana columbia
ggaaaggtgggtgtattatcagggcggttttcttggacaggatcaagaaagcttaccagagaaacccgaatttggcgagcttagtggttgatccttattttgcta

SEQ ID NO: 158677 - DNA, 407 bp, Arabidopsis thaliana columbia
tgatggtccatcaatgaaggactggagaggtggaagagctgcttccttcaacattattcctagcatcactggtgccgtcatggctgttgttaatgatttttcatttttcattggtattttttctatttttttttcgtttttattatttttttttttttttatttattttcttttttttttatttttctttttatttttttattttgtttttttttttttttttttttttctttttttttttttatattttttttttttttttatattcttttatttttttttttttttttttttctttatcatttttttttcattttcttattttcttttttttctttatttatttttttataatttttttttttttttttttcttttttttttaattttttatttttattcttttt

SEQ ID NO: 158678 - DNA, 391 bp, Arabidopsis thaliana columbia
aaactaatgtcgacttctaagaccataaccttcactctcttcatagcagcactactctcgtcctgcgacgcagccacaaacgctacatcgcaaccactatttccagcgattcttatctttggcgattcaacagttgacacaggtaacaacaactaccactcacaaacaatcttcaaagccaaacatcttccttacggaatcgatctcccaaaccacaaagctagtggaagatttacaaatggcaaaatcttttccgacataatcgcaacaaaactcaacatcaaacagtttgttcctcccttcttacaaccaaatctctctgaccaagagattgtaaccggagtctgttttgcattcagccggtgcgggttacgatgaccataccagtctt

SEQ ID NO: 158679 - DNA, 388 bp, Arabidopsis thaliana columbia
cttctccaaacaaatttcaaaccctagcttctcgatttctctcctctgctctccaattccatcttcccatggcgatttcggctccagccgcttgttcttcctcctctagaattctctgttcctactcctctccttctccttctctctgtcccgccatttccacctctggtaaactcaaaaccctaactctctcttccttcttcctcccttcttactcattaaccaccacctccgcttctcaatccactcgtcgctccttcaccgttcgcgccgctcgtggaaagttcgagaggaagaagccttatgttaacatcggaaccatcggtcatgttgaccatgggaaaactactttaaccgctgctctaaccatgggctcttgctttcattg

SEQ ID NO: 158680 - DNA, 382 bp, Arabidopsis thaliana columbia
gaacagccaaccagcgcactgtaaaaattggataggtcctatctatagtcattgggtcctcctaaaaagatctactaaattcatcgagttgttccaaaggatcaaaacggcctgttattaatggaatgccttgtcggctctctgtaaaatactcgtttggacgagggctcccgaacacatcgtaagctaaaccggtgctgacgaataaccagcccgcaatgaatagggaaggtatagtaatgctatgaatgacccagtattgaatactgttaataatattcagaaaagaacgttctcctgtgctatcagacatactgaactctcaattttctcgtattgaatcgattttgttaatgtagtatcatgtttattatttttctct

SEQ ID NO: 158681 - DNA, 364 bp, Arabidopsis thaliana columbia
gcaaggaacgctcctggtggaggtcgtggtgctgtacgtggagggagttatggtcgtggtggacgatggggtttctttatgtttgtgttgtgactattttttttttttttttttatttttttatatttgattttttttttttattttatctttaattttttatttttttttttttttttttttattcatattttttttttttttttttatttttttttttttatttttttttttttttttatattttttttttttttttttttttttttttttttttttttttttttttttaatttttttttttttttttttttttttttttttttatttttttttttttatattttctttttttttttctttt

SEQ ID NO: 158682 - DNA, 154 bp, Arabidopsis thaliana columbia
  unsure (1)..(154): unsure at all n locations
gngtagaaattagggaaaaacaaaacaaataaaatctgggtgtaggggagagagagctcgtgctcgtgattttgatatctatcacttcgttatcgattttaacttccacattgttttagattcttgtattaaacacgtttctgttttacttttt

SEQ ID NO: 158683 - DNA, 203 bp, Arabidopsis thaliana columbia
gagagactccattgttgaagtgtgttcactgaactcctcctcaaacaacaatggcgacgacgggtacactcaaatccttcaccgggcttcgtcaatcatcaacggagctaacaaactttgtctctcatgtaccgtcatcactttctcttcctcaacgacggacctttcttcgagtaaccgtagtcagagccactttcaaactt

SEQ ID NO: 158684 - DNA, 149 bp, Arabidopsis thaliana columbia
cacgctacagaagaagaggaagaagaagaagatgtcttagacaacaagaagaagaagaaacagtctcatctcgccggagaagaagaaggatgtcttgtcaatcatacgtcgatgaccatcttatgtgctaggttttatgttatttattt

SEQ ID NO: 158685 - DNA, 249 bp, Arabidopsis thaliana columbia
tcgcagttaagtactactcccctcctccagtttacaagtctccaccaccaccggttcactactctcctcctacggtagtataccattccccaccaccaccggttcactactctcctcctcccgtagtatatcactccctaccaccaccgtgtcactactctcctccttcagtcgtataccactctccaccaccaccggttcactactcacctccttcagtcggataccactttccaccaccaccggttc

SEQ ID NO: 158686 - DNA, 248 bp, Arabidopsis thaliana columbia
ctataacctgagaggaaaagccagaagaaccaaactcagaccgagagatagagattgagggagagctctagctctgtagaaaagaaggattcattcatcatatccagaaatggctctaaagtttaaccctttggtggcatctcagccttacaaattcccttcctcgactcgtccgccaactccttctttcagatctcccaagttcctctgcctcgcttcttcttctccggctcttaacttcggcccca

SEQ ID NO: 158687 - DNA, 253 bp, Arabidopsis thaliana columbia
acgcgtccgtgagagcaaaaaaggcttctctgtatctccattaacggctcgccgcatcaatgatgaaatgcgggtagggctaagtttgagtcgatcccaaccaaagctccgacatctccatgtacaatttccgccaaaacatcatgaagcttgtgaaggatggttttattatcaggtaaccaaccaagattcattcttagttcatatctcctataataatttaatttctttaatttaagtaattcagtttttt

SEQ ID NO: 158688 - DNA, 178 bp, Arabidopsis thaliana columbia
cgtccgaatcaatagccaaccatcagccaatgcacccaaatccgattctccagctattggatagagggtaggtcctggtggttacgtctaccagaaagcctatctatagttcttccgctcaaaggataagttagacacacttgtggagaaatccaaagcctgtccttctatcacctac

SEQ ID NO: 158689 - DNA, 216 bp, Arabidopsis thaliana columbia
  unsure (1)..(216): unsure at all n locations
cggatgacccacgcgtccgatttagacaaaaaaataaatatggagctcgagacctcagtttatcgaccaaacgtcgccgtttatgattctccggatggtgtggaggatccaggtcnaatccttccaaatcccttccttgaaccagacatgagatgccctgacctttaaaaccgtatgacagagccggtctttttgctctttttgtaaaaacgcatc

SEQ ID NO: 158690 - DNA, 391 bp, Arabidopsis thaliana columbia
accgactctctctctctctctctccgtaacaaataaatcaccaatggcaaaacaatatctctttgtactcctctcaatctcctatctcttatcactggagctcacggcggccaccgcagcctcacagaccggagcttccaaaaaagccataaacttcatccaatcttcttgcaaaaccaccacataccctgccttatgtgtccactcactctccgtctacgcaaacgacatccaaacaagccctaaacgtttagctgagaccgctatagccgtgacactaagccgagcccaatccacgaagctcttcgtctcgcgtctaacacgtatgaagggtcttaagaagcgcgaggtcgtagccatcatagattgcgtcgaggagatgatcgattcc

SEQ ID NO: 158691 - DNA, 460 bp, Arabidopsis thaliana columbia
acaaaacacataacaatatggctccttcaacaaaagttctctctttacttctcttatatgtcgtcgtgtcattagcctccggtgatgagtccatcatcaacgaccatctccaacttccatcggacggcaagtggagaaccgatgaagaagtgaggtccatctacttacaatggtccgcagaacacgggaaaactaacaacaacaacaacggtatcatcaacgaccaagacaaaagattcaatattttcaaagacaacttaagattcatcgatctacacaacgaaaacatcaagaacgctacttacaagcttggtctcaccaaatttaccgatctcactaacgatgagtaccgcaagttgtacctcggggcaagaactgagcccgcccgccgcatcgctaaggccaagaatgtcatccagaaatactcagccgctgtatacggctaggaggttccagagac

SEQ ID NO: 158692 - DNA, 311 bp, Arabidopsis thaliana columbia
ctggaacaactccaggatattcttactctgctgctaacaaaagcatggctgtgaattgggaggagaagactctttacgattacttgttgaatcctaagaagtacatccctggaacaaaaatggtgtttcctggactgaaaaaaccgcaagatcgtgccgatctcatcgcttatttgaaggaaggtactgcttagacaggctcgtccagatatatgaagctggcatttttttttctcacagctaaataaaatcagaccaaaaatattatggtcatgaactgctttttgtatgggcttttattctttctttct

SEQ ID NO: 158693 - DNA, 408 bp, Arabidopsis thaliana columbia
acccacgcgtccgagaggaatcatcggcgccagagattaaggagcggggaatgttcgatttcttgaagaaaaaggaggaagttaaacctcaagaaacgacgactctcgcgtctgagtttgagcacaagactcagatctctgaaccagagtcgtttgtggccaagcacgaagaagaggaacataagcctactcttctcgagcagcttcaccagaagcacgaggaggaagaagaaaacaagccaagtctcctcgacaaactccaccgatccaacagctcttcttcctcttcgagtgatgaagaaggtgaagacggtgagaagaagaagaaggagataaagaagaagattgttgaaggagatcatgtgaaaacagtggaagaagagtatcaaggagttttggacaggattt

SEQ ID NO: 158694 - DNA, 363 bp, Arabidopsis thaliana columbia
cggacgcgtgggctctctgtttcttttctttttgtttcattttcttatctcctcacactcttcgaacaaggaagaaccctaatctcaagatgaatagggagaagttgatgaagatggctaataccgtccgcactggcggaaagggtactgtcagaagaaagaagaaggctgtgcacaagaccaatacaactgatgacaagaggcttcaaagcactcttaagagaattggagttaactccattcccgctattgaagaagttaacatctttaaggatgatgttgttattcaggtcatcaaccctaaggtttcattgcttcaattgctgcatacacatgggttgttagtcggttatcctataccat

SEQ ID NO: 158695 - DNA, 254 bp, Arabidopsis thaliana columbia
cttttagtttccttttatccaaaaatattaaaaagtcttagtgtttctcttaggttggttgagaatcatttcatttcaatggaatccaattgtgttcaatttctcggttacaagaccattctcatcacaggagctcctggttttcttgccaaggttttggtatttaatatacttatttttcatccaattgttagttttttatttcctttttattagtttcttttatttttttttattcaatttttgattatttc

SEQ ID NO: 158696 - DNA, 329 bp, Arabidopsis thaliana columbia
caaaacagagtaacccaaaaaacagagcaatctctaaaaaatctcaagaaacctcactaaaatgggttcaacggcagagacacaattaactccggtgcaagtcaccgacgacgaagctgccctcttcgccatgcaactagccagtgcttccgttcttccgatggctttaaaatccgccttagagcttgaccttcttgagattatggccaagaatggttcttccatgtcttctaccgagatcgcttctaaacttccgaccaaaaatcctgaagcttcggtcatgctcgaccgtatcctccgtcttctttacgtgtactccgttttaacct

SEQ ID NO: 158697 - DNA, 263 bp, Arabidopsis thaliana columbia
gaggagaagacgaaagagggctcatcgtataggtactgggtgagagaagccacctcagacgcagctcctcctcctctgccccaaaagctcagcaacaacgacgtctctctcaatactgctcctgcgtcccttggctctctctggaatcgggctggcacttgggaggagaagagtctcaccaaatgggctactgaccgattaaaggagctgttgggatcagtgggttcattgcagtactcttctggaaaagctgtgattataga

SEQ ID NO: 158698 - DNA, 125 bp, Arabidopsis thaliana columbia
ccacgcgtccgctgaggcttacctaggagtcacaatcaagaacgctgttgtttccgatccacctcacttcaacgagtctgagtgctatgctacaaaggatgcgtggcaccaactctctctctcaa

SEQ ID NO: 158699 - DNA, 389 bp, Arabidopsis thaliana columbia
atcttcttctccaatcaatctcagagaaaaaaagaaatggcaacaaaccctaaagtctacttcgacatgaccgtcggtggcaaatccgccggtcgtatcgtgatggagctttacgccgacacaacaccagaaaccgccgagaatttcagagcactctgtaccggagagagaggaatcggtaaacaaggtaagccattacactacaaaggatcaagctttcaccgagtgattccgaaattcatgtgtcaaggaggtgatttcacagccgggaatggtaccggaggtgaatctatctatggatcgaagttcaaagacgagatctttatcaagaaacatacaggaccaggtattttgtctatggctaacgctggtgcgaacacgaatggatc

SEQ ID NO: 158700 - DNA, 196 bp, Arabidopsis thaliana columbia
cataccctaaaggctacttcgacatgaccgtcggtggcaaatgcgccgttcgtatcgtgatggagctttacgccgacacatcaccagaaaccggcgagaattttagagctctctgtaccggattgagaggaatctttattcatggtatgtcatttcactacaaaggatcaagcgttttccgagtgaattcgaaatt

SEQ ID NO: 158701 - DNA, 309 bp, Arabidopsis thaliana columbia
tttcacttcatcacactctctgcaaaaaaacaaaaatgagctctcaaatctgcagatctgcttccaaagcagccaaatctcttctctcttcagctaaaaatgctcgcttcttctctgaaggacgagccattggtgctgcggcagcggtttcggcgtcaggaaaaattcctttgtatgcatctaactttgcaagatcatcaggttctggtgttgcttctaagagttggatcactggactcttagctcttcctgctgcagctcatatgattctagatcaagaggttccttgctagcctttattgtaactta

SEQ ID NO: 158702 - DNA, 389 bp, Arabidopsis thaliana columbia
agcagccagagagagagacaagtgagagggatctaccaaacgaagcaacaatggtgaagttcttgaagcagaacaaggccgtgatccttcttcaaggacgttacgccggaaagaaagccgtcatcatcaaatccttcgacgacggtaaccgtgatcgtccttacggacactgcctcgtcgccggactcaagaagtacccgagcaaagtcatccgcaaagactcagctaagaagacagctaagaaatctagggttaagtgtttcatcaagcttgttaattaccagcatctgatgcctactcgttacacactcgacgtggatctcaaggaagtggcgactcttgatgctcttcagagtaaggataagaaggttgctgctcttaaagaagct

SEQ ID NO: 158703 - DNA, 408 bp, Arabidopsis thaliana columbia
atcattttgtggaaactcaccaaggtcgacaaagtcctacggtgtagctcagaggcgtctcactggtcactctcacttcgttgaggatgttgttctctcctccgatggacaattcgcgctttccggcagctgggacggcgagctccgtctttgggatcttgctgctggtgtctccactcgtagattcgttggacacaccaaggacgtgctctccgtcgccttctcactcgacaaccgtcagatcgtctctgcatctcgtgaccgtacgatcaagctgtggaacactcttggtgagtgcaagtacaccatttcagaaggtggtgtgggacaccgtgattgggttagctgcgtcagattcagtcctaacactgcttttaccgtcgattgtttctacttcgttttaccttg

SEQ ID NO: 158704 - DNA, 228 bp, Arabidopsis thaliana columbia
cagaatacaaggtctatgattatttggtggagtctgctgcttccactcaaacacgagagagcgttaacatatccgcagacaagtgtaaagatttcaaactcgctaaagctgagattctcaatatcatcaatctctggccttcttctatagtcgaactgttaccgatcatagagaaccttgatgatcgagaaatcgacacatatgggatatttgagcttgtgaaggatt

SEQ ID NO: 158705 - DNA, 235 bp, Arabidopsis thaliana columbia
aggacgcgtgggcgcaaatccggaaattatgatcatggaattcggatatggagaagaactaggggcctcagattctgttgctgttggtaccaggtgatcataacaggaaatattatcttcagaggcatcttttgagtatgcaagaagctgtttgcatcgactaagagaatggtacaggatactttgtattgacatagctgtataacttcaagtggtaagactgttacttaaacac

SEQ ID NO: 158706 - DNA, 118 bp, Arabidopsis thaliana columbia
cggacgcgtgggagaagacgttatacaacgcattcaagaatttgacaaagaacattcaggttgagctggaggagtttaacataatgagagcaggtgatccatagcttaccgtgaggcc

SEQ ID NO: 158707 - DNA, 176 bp, Arabidopsis thaliana columbia
gggagggaggagagtgtatcttatcggcgaattttactactttattcaagaagaacaggaagaagagaggtgacgttattgccggacgtgggcgtatcttttttcaccgtatgcattcctttggtttatattttctctgtatctatttattttctttatttttttttatttttttt

SEQ ID NO: 158708 - DNA, 252 bp, Arabidopsis thaliana columbia
agtcgctgtaaagtttgatttgcttctttttatatacacacatacttctcctccatacactttcctcttcaatcctcagttttttttctaagccctaataccatctcaaagaagagatcaagatttgaaatcaagaagacaccattactcagatcaacatgcttgccgttcaccgtccttcttccgccgtatcagacggagattccgttcagattccgatgatgatcgcgtcgtttcaaaaacgtgtttctt

SEQ ID NO: 158709 - DNA, 215 bp, Arabidopsis thaliana columbia
catagctcctaacaaagcaatatcatttccaatttataaaagttaaagccatggctgcatctttctctgtcccctctatgataatggaagaagaagggagattcgaagcggaggttgcggaagtgcagacttggtggagctcagagaggttcaagctaacaaggcgcccttacactgcccgtgacgtggtggctttacatggtcatttcaagcaa

SEQ ID NO: 158710 - DNA, 337 bp, Arabidopsis thaliana columbia
gctagggttcgcaattgtagttttcgagcgaagtagatgatcgaggtggttctcaacgatcgtttagggaaaaaagttagggtgaagtgtaacgatgatgacacgatcggtgatctgaagaagcttgtcgcggcacaaaccggaacacgagccgagaagatcagaattcagaagtggtacaacatctacaaggatcacatcactctcaaggactatgagatccatgacggcatgggtcttgagctttactacaactaggccaatcgaaggagctaagctgaaggtgtgttgttgatttagtcactttacatatactttttcaaccatgttacttttt

SEQ ID NO: 158711 - DNA, 181 bp, Arabidopsis thaliana columbia
cgatctcaatttcgcaaaataggctgacaagaagatcagaatcggaatcaacggtttcggaagaatcggtcgtttggttgctagagttgttcttcagaggcatgatgttgagctcgtcgctgttaacattcctttcattcactaccattttcatttcatacatttctaattttgacatttt

SEQ ID NO: 158712 - DNA, 172 bp, Arabidopsis thaliana columbia
cttctatcgaaaggtaaagagtttgaagaagtttgtcacagagaaagagaagatgtctgagaaaaagggaaggaaagaggaagtgattaccatatagtactccattaaccttcacagacgccttcacatatgcacctttatgaagaaggcaccttaagccattaatgttatt

SEQ ID NO: 158713 - DNA, 434 bp, Arabidopsis thaliana columbia
tctctctctccctctctctcattaagaaaaaattagagaatcagagaagaaataaaaagaaagcaactcaaatctttaacctacaaaaacccagatttgttaactctctcattcttcttcttcttctcaacaacatttgatctttttgattctcaaagtattctcaaagtaaaagagaaacacactttgttgtctcaacaagcaagcaaacaaaacccatcttggtaaaatctcatttctttcccttgatattcttattattatctgttacttcttttttcttataatatgtttattttcggaaattattgattttttttatttttttatttctatttttatattcttatgcttaattttctttgtattgccttatttctttaattctctgtattttacttttattctttttatttcatttattttattttttt

SEQ ID NO: 158714 - DNA, 255 bp, Arabidopsis thaliana columbia
gttcaagctcccattcttagtggccttcacgcttcaggaacatagaccagtatctctctgaaagactacttctcggaaattttcgtctccatggcacccgtgagggggattcttggcttgcaaagggcagtgtccatttggaaggaaagtaacagactgactccagctttgagatcattcagcactcaagctggatccacttccaccacttcacagtcttcttcaccttcttcgacttctgaatagactcaattt

SEQ ID NO: 158715 - DNA, 191 bp, Arabidopsis thaliana columbia
agagaaaacttcgtctctcttctctgcttcgccctctcatttcctgtgagataaaggcggaggctctctccagttattttgctcatccatcgattcttagagttcaaaatggttgatcaagttcagcaccccactattgcgcagaaagctgccgggcagttcatgctttcaagtgtgttcaaggacatttc

SEQ ID NO: 158716 - DNA, 237 bp, Arabidopsis thaliana columbia
aagaaataaaaaaaagctctcaagaatggcgaacaaaccatgaaccagatgggttcttccttacaagaccaaaaacgttgaagacaattactttcttggtcaagtccttggacaaggccaattcggaaccactttcctctgtacccataaacagacaggtcaaaagcttgcctgcatatccatacccaaaaggaagctcctttgtcaagaagattacgacgtcgttctgtgagagat

SEQ ID NO: 158717 - DNA, 155 bp, Arabidopsis thaliana columbia
gctaagttcaaggacgagtacaagattgacgttttccatattgctaaggcttctctcaggctccgagctacatgcgagaaactgaaaaaggttctaagcgctaatcctctggcaccgttgaatatcgagtgtttgatggatgagaaagttgttag

SEQ ID NO: 158718 - DNA, 225 bp, Arabidopsis thaliana columbia
agcaatatcatttccaatttataaaagttaaagccatggctgcatctttctctgtcccctctatgataatggaagaagaagggagattcgaagcggaggttgcggaagtgcagacttggtggagctcagagaggttcaagctaacatggcgcccttacactgcccgtgacgtggtggctctacgttgccatctttagcttggctatgcttcgtatgaggatggct

SEQ ID NO: 158719 - DNA, 455 bp, Arabidopsis thaliana columbia
caaaaatgggacacctaattcctcaaaccggagatgaagagaccgagcttggtttagctgcggttaggctagctaactgtgcagccttcccaatggttttcaaagctgccatcgagctcggtgtcatcgacactctctacttagctgctcgtgatgacgtcaccggatccagttccttcctcacaccttctgagatagctattaggctccccacaaaacctagtaaccctgaagcaccagctctgttggatcgtattcttcgtttacttgctagctactccatggtcaagtgccaaattatcgatggtaacagagtctacaaagcagagccgatttgtcgatatttcttgaaagataatgttgatgaagaattaggaacactttgctctcaacttattgtcactctcgataccgtctttcttaatacatggggaagattatatattgtggtactt

SEQ ID NO: 158720 - DNA, 186 bp, Arabidopsis thaliana columbia
aagaagaagagaaacaacaagaagtagtaataggtttcctctatgctctcctccgccgctgtgggtacatccccggctcaggccaccatggtcgctccattcaccggcttgaagtcatccgctgcattcccggtcacccgcaagaccaacaaggacatcactttcatcgcatgcaacgggggaaga

SEQ ID NO: 158721 - DNA, 316 bp, Arabidopsis thaliana columbia
ctttttccttcctcctctccgattcttcctccgtcagtaaaagaaaatcaaaatggcttcacacattgttggatacccacgtatgggccctaagagagagctcaagtttgcattggaatctttctgggatggtaagagcactgctgaggatcttcagaaggtgtctgctgatctcaggtcatccatctggaaacagatgtctgccgctgggactaagttcattcctagcaacacctttgctcactacgaccaggttcttgactccaccatcatgcttaggtgctgtttcatctttgtttggtattcactttttttt

SEQ ID NO: 158722 - DNA, 430 bp, Arabidopsis thaliana columbia
ctccaatctctctgcagccacagaattagtgcgatttacgaaaatctctgaaacctccgatcagttaacggcgaccgccgattttcccggtaaaaatgaacgacggagatgtatcgaggcagatccagcagatggtgagatttatccgccaagaagcggaagagaaagcaaacgagatctcggtttctgctgaagaagaattcaacattgagaaactccagcttgttgaggcggagaagtagattatctggcaagattatgagatgaatgttttgtttgctgttgttttttataattttgatttcttctttgattgtttaaacttttatatttataagttttttttattcaattctgttcttttatattattattttatatttatttcttttaattttaattttttaatgtcatttatttattttcgttt

SEQ ID NO: 158723 - DNA, 150 bp, Arabidopsis thaliana columbia
attctcttctctctcgatatcatctaaatctctctcgatctctatttcgcaaaatggctgacaagaagatgggaatcggaatcaacggtttcggaagaatcggtcgtttggttgctagagttgttcttcagagggttgatgttgagcctt

SEQ ID NO: 158724 - DNA, 285 bp, Arabidopsis thaliana columbia
ctagatggtagtagagagttcactgttaaagatggtcatttctgccctgcacttactaaggctgtgaatactatgaaatagggtgataatctcctttcttacagttaatccacaatatttttttttttaaattcttttctctattttcttctttctttttcttcgttccattctttatctaatctcttatctgattatttctataaagccttccctctatacatttacgctccttattacttcaaaactcatctcatagttttgtaataaccctaaaatcatata

SEQ ID NO: 158725 - DNA, 181 bp, Arabidopsis thaliana columbia
tttcagttcaattggatagccggaaaggctctcctccaagtgtcgtttatatggaggtgacaaatacgagcagcatcatgtgggtcttcagggtcaaatgttttgatgttccgagtatcgacaagatgatttgatattgcatacatgttggatatatgcttcaattctgatttgtttttca

SEQ ID NO: 158726 - DNA, 381 bp, Arabidopsis thaliana columbia
cggacgcgtgggtgttgagcaggctgctattagtgatgttcaagaagctagcgtctacgaagggtacactctcccaaagctttacgctaagacgcagtactgtgtctcgtgtgctatccattctcacgttgtgagagtccgatcccgcaccaaccgtagagttcgtaccccaccacctcgttttgccagacgcatggaggatacacccatgcctgcacaacctggtcaggctcctcgccctgccggtggtgctcctgctgctcctcgtgcctgaagacttcaagaagctggcaatccgaaacttcttatattggagggggaatctctcttttgtctgaaatttttgaagatgttttctacattttaggtatagatgatttt

SEQ ID NO: 158727 - DNA, 357 bp, Arabidopsis thaliana columbia
ccaattcggaatcttcctatcacaatttcaaggctcctttaacccttgatcatcaccgattcaatcaattcggaatcacaatttcaaatcgagagaatttcaatttctcttgtaaaaccctaaattatgtacagcaatttcaaggaacaagcgatcgagtacgtgaagcaagcggttcatgaagacaatgctgggaattacaataaagctttccctctatacatgaacgcgcttgagtacttcaaaactcatctcaagtatgagaagaaccctaagatcagagaagctattacccataaattcaccgagtatcttcgtcgtgctgaggaaatccgtgctgttcttgatgaatgtgga

SEQ ID NO: 158728 - DNA, 260 bp, Arabidopsis thaliana columbia
cgcgtccgttttgatctctcacccactcgaatggccatctctcaccgttcattgggttccatcgacgccaaatccttacgtagcagactcttacttcggtgtccacaagcttatactcggtactcatacttccggtagtgctcaagattttctcatggtcgccgacgtcgttaccccgacaccaaacgcagatcctgtgataggcggcgctaatcaggatccccttattcctaaggtggagttttggctgaggatacttg

SEQ ID NO: 158729 - DNA, 184 bp, Arabidopsis thaliana columbia
cgcgtccggaagaaatcagaaaagagtcagagaaaaaaaaaatcaaggaagatgagtagcattggaactgggtacgatctctccgtcaccactttctctcccgatggccgtgttttccagatcgagtacgccgctaaagctgtcgacaacagtgggactgttgttggaatcaagcgcaaagatg

SEQ ID NO: 158730 - DNA, 310 bp, Arabidopsis thaliana columbia
ggctcagaaatcggttttgatgttatgcggagagttcatggtagcctacgagactatagtacctctctacgtcctccaagcgtttggtgttagcgtccactgcgtttctcctggtcgcaaaactggcgacaagtgcgtcatggccgctcacgatctccttggcctcgagatatacaccgaactggtggttgaccatctaacactaaacgctaacttcgatggcgtcatccccgaccaatacgtcgccatcatcattcccggtggacgtttcacggaacttttgagcgccatctattattgcgttagtctt

SEQ ID NO: 158731 - DNA, 307 bp, Arabidopsis thaliana columbia
gaaaaaacaaaaagaacaaaatttgttatctctctttcctctcattttgaccctcttcacttctttttgatccctaaatggaacacgagagcaagaacaaggtggatgggatggagatggagaaaggaaaaaaagagagtgggtcgagaaaaggacttgagttaacgatgagagttttggctttggtcctaacaatggtagctgcgacagtacttggtgttgcgaaacaaacaaaggttgtgcctataaagcttattcctactttacctgctcttaaagtctctacaaccgccaaatccttttactt

SEQ ID NO: 158732 - DNA, 186 bp, Arabidopsis thaliana columbia
atcttctactcatttactgttctgtttcactttctctctctctgtatactctctaaatgatggcaaaaaactgtaatttagtcagtgttctatgtgtatttttggtattgaccctctttaacaaacccatcaccgtcgtcggtcagaatattccgtcggtgtttctgtttaccttttaagtcttca

SEQ ID NO: 158733 - DNA, 229 bp, Arabidopsis thaliana columbia
ctcgtccacatctttctcctttggtggcaaacacaacgacagatagagagaaacgatggcgtcgaactcgcttatgagctgtggcatagccgccgtgtacccttcgcttctctcttcttccaagtctaaattcgtatccgccggagttccactcccaaacgccgggaatgttggtcgtttcagattggcttcttactgtatgcctgactagccacgatcagcttacctt

SEQ ID NO: 158734 - DNA, 398 bp, Arabidopsis thaliana columbia
ctattgctgataaagtacatgggaagcctctacctacaatcaaagtagaagagccaactgtgaaaatgtccttctctgtaaacacctctccattttctggtcgtgaggggaagtatgtaacaagcaggaacttacgagatcgtttaaaccgtgaacttgaaagaaatctagctatgaaagtggaagatggtgagacagcagacacattcattgttagtgggcgtggtacattacacattaccatcctgatagaaaacatgcgaagagaaggatatgaatttatggttggccccccgaaaagtatcaacaaaagggttaacgataaattgctggagccatatgagatagcaactggtgaagtaccataggctcacatggggcctggtgttgatactttt

SEQ ID NO: 158735 - DNA, 153 bp, Arabidopsis thaliana columbia
aaagtgtgagaatctgccaccatgggtcgtatgctcagtcgaggaaagggtatttcagcctctgcgtcgccttacaagagatcgtctactacctgcctcacgaccacctctcatgatggtgattaactaattttcagatttgtcaaaatggtt

SEQ ID NO: 158736 - DNA, 379 bp, Arabidopsis thaliana columbia
gcgtgctgttacgcgccaccgcgaatgtcgttggaattccgaaattgagacgaccaatcggagcgatccaccgtcaattcagcactgcatcgtcttcctcgttctcggttaaaccaatcggaggaatcggagagggagcgaatctgatctccggtcgtcagcttcgtccaattcttcttctcgattcgtcggcgatcaacggaggagagaaaagagaaattctcaaaccggttaaagccgccgctgctgaaggtggagataccgctggggatgctaaagttggattcctcgccaagtatccatggctagtcactggattcttcttcttcatgtggtacttcttgaatgtgattctcaacatccttaacaagaagatcta

SEQ ID NO: 158737 - DNA, 270 bp, Arabidopsis thaliana columbia
atatttctaagattctttttcaggaatccttattctctaccaaattggcgataattaaaatatatataagtagagagactagagacaaaggaaggggtcctcgagtttcgaagacgacccattctcttcttattttggactaaagattcttaaaatcaaactggttattaaaatactgagataacaagttataaacctacattacattctttctttctctttcaatctaaattcgctgatggaagatggaacaggtctttctctttgacg

SEQ ID NO: 158738 - DNA, 442 bp, Arabidopsis thaliana columbia
gagagctttaccatctccttcctcactgctcttcttctttctcctgataacaccactcttcctctgccaagaaaacagagtctctgcctcaatgcctccatctgagtcagaaactctcttcaagatcatggaatcaatgtcttctgatcaacaatggcgtcaatcccacccaaacccttgtgcacctggctcatcttggccaggcattgagtgcaaaaccggtccagaccacttatcacacgtctctcgactcgatttcggctctgctccaaacccctcttgtaaatcctctgcttctttcccttcttcaatcttcactcttccttttctccaatcagtcttcttcttcaactgcttcactcacttcccaaccacaatcatgttccctataaaactcatccctaactcttctctttaacaacttaacctcagatcaaaccct

SEQ ID NO: 158739 - DNA, 208 bp, Arabidopsis thaliana columbia
cccgaacaagctactcttcgtgggaccaaaggtcttgttcttccagctaacaccactcttcctatgcctagagaccagctactagggtctcaatgccttcatctgattcagaaactctctccaagatcatgcaatcaatgtctcctaatcaacattggcgaatgtcctacccaaacccttgagcacctggttcattttggccattcat

SEQ ID NO: 158740 - DNA, 209 bp, Arabidopsis thaliana columbia
aagagagctggtgaagccactcgcaaaggtttctatttgtatgatgataagcgcaaggcgaaacctgatcctgagctaaagaaatatatcgaaaaggcaagaagcatatctggagtaaagcttgaccctaagttggcgaatttgtcggagaaggacattattgaaatgacattcttcccagtagttaacgaggcgtgtaggttttttgt

SEQ ID NO: 158741 - DNA, 345 bp, Arabidopsis thaliana columbia
ctttttgaattggattcatctaagaagcagactctgttttcatggctgtttacaataccaaactctgtttggcctctgttttcttgctcttagggcttctcttggcttttgacttgaagggtatagaagcagaaagtcttaccaaacagaaactggactcgaagatacttcaggatgagattgtgaagaaagtcaacgaaaacccaaacgctggatggaaagctgctataaatgatcgattttcaaacgccactgttgcagagtttaagcgtcttctcggtggtaaaccaacaccaaagaaacatttcttatgtggttctattggaagccatgattcatttttta

SEQ ID NO: 158742 - DNA, 308 bp, Arabidopsis thaliana columbia
gagaaatctgctcctgcgaagaagaaaccggcgactgtggcggttaccaaggcgaagagaaaggtcgctgcggcttccaaggctaagaaaacaatcgccgttaaacctaagactgctgctgctaagaaagtgaccgcgaaggctaaggctaagcccgttcctcgtgccactgctgctgcaactaagaggaaagctgttgatgcgaagcccaaggctaaggctagaccagccaaggcagccaaaacggccaaggttacatctccggcttaaaaagcttgtgctgccacgattaatagtttcttctgttg

SEQ ID NO: 158743 - DNA, 256 bp, Arabidopsis thaliana columbia
taaacacaaagagttgaaaacattaaatcgatatatcagaactaaaccggatctgaaaaatggcgaacgaccaagtgattcttcttgattactggccaagcatgttcgggatgaggacgaagatggctttggctgagaaaggagtcaagtatgagtacaaggaaacagatccatgggttaagactcctttactcatagagatgaacccgattcacaagaagattccggttctcatccacatcggttaaccgatttg

SEQ ID NO: 158744 - DNA, 296 bp, Arabidopsis thaliana columbia
cggacgcgtgggtgagcctggtcctgatcttgctgattatccgtacgacaccgttcctaacaaggttgaacacctcttcttcgctcagcagtaccatgacagaaagcagagggaggcaagaatgagcatgagcagagaagagaggacaaaaactccgttcgtggactacctaaagcccatcatcgccgacggagacaccggctttggcggcaccaccgccaccgtcaaactctgcaagcttttcgttgaaagaggcgccgctggggtccacatcgaggaccagtccttcgttacca

SEQ ID NO: 158745 - DNA, 153 bp, Arabidopsis thaliana columbia
gtaactaattaatattcaaaaagatggctcaaaaagtggaagcagggggtggcgccggaggagcttcatgggatgatggtgtccacgatggcgttagaaaggtgcatgtagggcaaggccaagatggtgtggcatctatcaacgtcgagtatg

SEQ ID NO: 158746 - DNA, 223 bp, Arabidopsis thaliana columbia
ggccgataggtgaggatattcagccacttgtctgtgacaatggaactggaatggtgaaggctggttttgctggtgatgatgccccgagagcagtgttcccaagtattgttggtcgtcctaggcacactggtgtcatggttggcatgggtcagatagatgcttacgttgtttatgtatctcttttccagtaagtttattcttcttttgatattatccaattctt

SEQ ID NO: 158747 - DNA, 296 bp, Arabidopsis thaliana columbia
cgcttctagggtttcatcaaccaaattcgctttcgccgcctttccacaagcaatcatggtgctccaaaacgacatcgatctccttcatccgccacctgagcttgagaagagaaagcataagctcaagcgtctcgtgcaatctcccaactccttcttcatggatgttaagtgtcagggatgcttcaacataaccactgtgttcagccattctcaaactgttgtggtatgtggaaactgtcagacagttctgtgcctgcccaccgtcggtaaatcgaggcttcaataggtatgcttct

SEQ ID NO: 158748 - DNA, 163 bp, Arabidopsis thaliana columbia
catgattctccggctagtagctgagctgtagtaatatgtttgattcgttagttttcatgtttttatttcggaggtaataagggacaggcaatgtgagtcatatatttgatttgatgtaccctctcaaattcaattaggtaaatttatgttcaaatttcatatt

SEQ ID NO: 158749 - DNA, 359 bp, Arabidopsis thaliana columbia
ccaagtaatcctaactatacaaaacacataacaatatggctccttcaacaaaagttctctctttacttctcttatatgtcgtcgtgtcattagcctccggtgatgagtccatcatcaacgaccatctccaacttccatcggacggcaagtggagaaccgatgaagaagtgaggtccatctacttacaatggtccgcagaacacgggaaaactaacaacaacaacaacggtatcatcaacgaccaagacaaaagattcaatattttcaaagacaacttaagattcatcgatctacacaacgaatacaacaagaacgctacttacaagcttggtcttacctaatttaccgatcttactaac

SEQ ID NO: 158750 - DNA, 285 bp, Arabidopsis thaliana columbia
gggcaacaacaagctctctcgagaagaaagccattatcatcatcatcatcatcttcatcatctcctcctccgtcttcctcacctgttcgagctcctgcggcgaagaaaccgagtccggaatacccattttggcagcagaactggtttatcggtctgctattcgtgaaggctttaggattcttctgtctcgctatcttcctttacctaagtctcgatcctgattccggttacacgtctgcctccgccgctgcttctggtaaagaaggtgtcgagattacttatgga

SEQ ID NO: 158751 - DNA, 339 bp, Arabidopsis thaliana columbia
ggcgaattcactatgcttcttctcttctcctcctaccttttgcttccaatctccaagcaaaaaccctaaaccttctcacttcttctcaactaatgataacacctcttccttggtacagaagagagaactgcttcagacttcaagatcccaaagttttgaagttaaggccgcaaacaataatcctcagggcactaaaccaaacagtttagtttgtgcaaattgtgaaggggaaggttgtgtggcatgttctcaatgcaaaggaggtggtgtgaatttgattgatcatttcaatggtcagtttaaagctggtgcactctgttggctttgcagaggtaaaat

SEQ ID NO: 158752 - DNA, 236 bp, Arabidopsis thaliana columbia
  unsure (1)..(236): unsure at all n locations
aagaaactgatagtagaaaaaaaaaagagagaagaaaaatggtgttgacaatctatgctcctttattcgcttcttcaaagagagctgttgtgacattggtggagaagggagtatcatncgaaactgtcaatgtcgatctcatgaaaggagaacagagacagcctgagtatctcgcgattcagcctttcggtgaaattccagtccttttcgtcggttactacatattcttaaatttt

SEQ ID NO: 158753 - DNA, 196 bp, Arabidopsis thaliana columbia
ttttaagttcaagctctcaagcagagagcattccaactttgtcaactgtgtgaggtttgcaccagatggaagtaagttcattactgtgagttcagataagaagggaatcatatatgatggaaagacttgtgagatactgggagaactgttttctgaggatgggcataaaggtagtatttattgcagtcttttgtag

SEQ ID NO: 158754 - DNA, 231 bp, Arabidopsis thaliana columbia
ctctcaggtgcgtgtgctctccgctggttccttagaacaatcggcacacgctttttcatttcaatcttcttcttctactcttaagtatctcaggtctgttgagagatggcagatcgattgacacgtattgctattgtgagttcagaccgttgcaagccaaagaaatgtcgtcaagtgtgcaagatgagttgtcctgtggtcatgacaggaaaactttgtattgttgtgact

SEQ ID NO: 158755 - DNA, 198 bp, Arabidopsis thaliana columbia
cggacgcgtgggcgaagaagcaaatatggcggtcccattgcttaccaagaaggttgtgaagaagaggtctgctaagttcatcagaccccagagtgaccgtataatcaccgtcaaggaaagctggtggaggccaaagggtattgattcaagggtgagattttagtttaaatgtgttactttgtttcccaatgttgtttt

SEQ ID NO: 158756 - DNA, 198 bp, Arabidopsis thaliana columbia
atttgtggattctacccacaaccaacagaagaactctgcaaccgttggatcgaagtaggcgcgttttacccgttttcaagagatcacgccaattactactcaccaagacatgagctttaccaatgggacacagttgcagactcagcttgtatcgctcttggtatgagatacaagatcctttctttcctctacactctt

SEQ ID NO: 158757 - DNA, 466 bp, Arabidopsis thaliana columbia
  unsure (1)..(466): unsure at all n locations
cgttatcagtccccgccgagaatcgagaagcagcagccatggccgacgtagttcaataccgcctcgagcggatggttgacgagcttgatgatctagaacgaagagaaatcttcactcgtgctgagatagctgagatcgtgaagcagcggcgtaagtttgagtaccggctcaagcgttcaagcccactcaaagaagatttcatagcctatattgactatgaggntaagctcgatgagctccgtcagctacggaggaaatcggtggcgcgtgtgactaagaagggatagatgaattcagtatctggtttcgccggtgtggctaggattgttgggatttattgtttgtctatttttaggttttaaagttttttttcattttgtttttaatgttatctctattttctgctattctttttattatttttttaaatttttttatacttttttataccattattttttaattc

SEQ ID NO: 158758 - DNA, 53 bp, Arabidopsis thaliana columbia
atggcccaaaagctagaagcaaagggtggtgagatgggagatgtatgggatga

SEQ ID NO: 158759 - DNA, 337 bp, Arabidopsis thaliana columbia
atcaaactctaataaacccaagttggtgtatactataatggtgatggctggtgcttcttctttggatgagatcagacaggctcagagagctgatggacctgcaggcatcttggctattggcactgctaaccctgagaaccatgtgcttcaggcggagtatcctgactactacttccgcatcaccaacagtgaacacatgaccgacctcaaggagaagttcaagcgcatgtgcgacaagtcgacaattcggaaacgtcacatgcatctgacggaggaatttctcaaggaaaacccacacatgtgtgcttacatggctccttctctggacaccagacag

SEQ ID NO: 158760 - DNA, 146 bp, Arabidopsis thaliana columbia
tccacactggagaaagtagtgtctgctgttgaagttcttcacggcgttcagattgatgaggatgctcttgttggaaaatctactaatgctgctggttaccttgagaaagcaacacaagaggttgaaagagatcttagttcaggaca

SEQ ID NO: 158761 - DNA, 345 bp, Arabidopsis thaliana columbia
gaacaatggctaattcagcgtctgggatgcacgttagcgatgagtgcaagctcaagttcttggagttaaaagcaaagaggaactataggttcattgtgttcaaaattgatgagaaggcttagcaagttatgatagacaagcttgggaattcagattaaacttactaagtatttttcatatctatttcttgttgttgagtttttttttgcttttttaagattattattattattattatactttatttctgcttttaatttcttacaatatttattatattattatgtgtttttcttttgattattttttttttctttatttttttatatttatttttagttattt

SEQ ID NO: 158762 - DNA, 404 bp, Arabidopsis thaliana columbia
aaaaaatatgcaatcactactcttgccgccggcgagttcctccggcgtatccgccgtcgcgctacggccaggtttccagcactcatttaaccaccaaagcctctctactcgctccctgccattgtttaatccacttctcttagctccgaagaagaaaaccaccatctcctcatatcaatcgccaccgtctctgtccgtctacggtttccaaatcggaggatctaaacctagtttcacaccatccacggtggcattttcatatccgacttcttcgtcttccgttcccggtgataatgaggtcgacaaagcaaaactcgctcaggttgcaaagagattggagaagacttcaggtactttaagagactagggaggattgttttctgggggcagctttgtgtcaaact

SEQ ID NO: 158763 - DNA, 342 bp, Arabidopsis thaliana columbia
gcgaagagaagccatcatcagccatggcgatgaagaatctactgtccctagctcgccgatctcagaggcgtttattcctcactcaagccacacgatcttcctcttcgttttcagctatcgattcggtgccggcttccgcatctccgacggctctatctccaccgccgccgcatcttatgccatacgaccacgcggctgagattataaaaaataagatcaagaagctcgagaatcctgataagaggttccttaaatacgcatctccacatccgatcctcgctttccacaatcacatcttgtcagctccggagactcgtgtcactaccttgcccaatgggctac

SEQ ID NO: 158764 - DNA, 369 bp, Arabidopsis thaliana columbia
tggagagttcgaggaaagattgaagaagcttatggaggaaatcaggcaaagtgatgagataattctgtgtattgatgaagtgtacacgctcatcgtttcattattccgtttaatgttcgatctgttctttaatttttaatccgttctttttgggtttattttttttttgttttatatatttacttttttttatttgttttgttttattttttttattttttatttatttttttattactttttgtttttgttttttttatttttttttttttttcttttttattttttttttttttttatttttttttatttttagtatatgtcttttttgtcatttattttattttattttttttattttttttattt

SEQ ID NO: 158765 - DNA, 422 bp, Arabidopsis thaliana columbia
caagaactccggttgttgtgactccaccatcacccattgttgatccaggcacacccatcattggaggaagcccaccaactcctatcattgacccaggcactcctggaactcctttcattcctgctcctttcccaccaatcactggaacatgcgattactggagaaaccaccctacattgatatggggcttgcttggatggtggggaactgttggaggagcttttggtacagtcagtatttccagtagcattccagggtttgatcctcacatgaaccttcttcaggcactttccaacacccgcttctattccattggtgctttctaccgagaatgcacagtttcttggtttaacttcatggtcaaccataagttctctttcacaacccctctagttagagactcactagtttgatggcttttt

SEQ ID NO: 158766 - DNA, 202 bp, Arabidopsis thaliana columbia
gagaaaccctaatcggcgacaatgggtatttctcgtgactctatccacaagaggcgtgccactggaggcaagcagaagcaatggaggaagaagcgaaagtatgagatgggaaggcagccagccaacaccaagctctcaagcaacaagacggtcagaagaataagagttcgtggtggaaatgttaagtgtcgtccgctgtggc

SEQ ID NO: 158767 - DNA, 217 bp, Arabidopsis thaliana columbia
gttaaattgagtttgtgtctcgtaacttatcctgtgagcgaaaatggtgaaagcaactaaggcagagaagaagatcgcctacgataccaagctatgtcagcttatcgatgagtacacccagatcttggtcgttgcggccgataacgtcggatcaactcagcttcagaacatcagaaagggtcttcgtggagacttccgtcggcttatggggaagtac

SEQ ID NO: 158768 - DNA, 267 bp, Arabidopsis thaliana columbia
cctaattcctcaaaccggagatgaagagaccgagcttggtttagctgcggttaggctagctaactgtgcagccttcccaatggttttcaaagctgccatcgagctcggtgtcatcgacactctctacttagctgctcgtgatgacgtcaccggatccagttccttcctcacaccttctgagatagctattaggctccccacaaaacctagtaaccctgtagcaccagctcttgtggatcgcattcttcgtattacttgctagctact

SEQ ID NO: 158769 - DNA, 165 bp, Arabidopsis thaliana columbia
ctttcgttgagcactactactccaccttcgatgcatatcgtccagggttggtttctctataccaagaaggatccatggtgggcttcgaaggccataagatccaaggctcttagatcatcgttcctaatctcaccggcctcccttttcagcggtgtctgcacaaca

SEQ ID NO: 158770 - DNA, 209 bp, Arabidopsis thaliana columbia
ccctctttctccgatctcagatccattcaacaatctacaaagaagatggaaccagtctcttcatggggtaacacctctctcgtctgcgtagatccagagatccacgacctaatcgagaaggagaaacgttggcaatgtcgaggaatcgaacttattgcttccgagaatttcacttccttcgccgtcatcgaagctctcggaagtgcctt

SEQ ID NO: 158771 - DNA, 147 bp, Arabidopsis thaliana columbia
cgatacttcatctctcgagccggagccgcgttgcgaaagcatttcaatcgtagtctaagagaatgtcgacagtgggagagctcgcttgcagctacactgttatgatcctcgaggatgagggtattgctatcacggttgacaaaattc

SEQ ID NO: 158772 - DNA, 293 bp, Arabidopsis thaliana columbia
agcctctaggatgttctttgctaccagactctctggttgcatctcaacaggaagtttaaagtcaacgacaactatatcaaggagaagaagtttgaagactaatggtctttttatgagaacatatcttcacagctatctttatactctgatttttaagagactgatttcttattttttagatgttttttatatatttatttttttttatatcttttttttcttgtgtttttaattattttttttctctctttttttatttattttaagtcactgatttattattacattatttt

SEQ ID NO: 158773 - DNA, 364 bp, Arabidopsis thaliana columbia
aacacaacgacagatagagagaaacgatggcgtcgaactcgcttatgagctgtggcatagccgccgtgtacccttcgcttctctcttcttccaagtctaaattcgtatccgccggagttccactcccaaacgccgggaatgttggtcgtatcagaatggctgctcactggatgcctggcgagccacgaccagcttaccttgacggttctgctcctggtgactttgggtttgacccacttggacttggagaagttccagcgaaccttgagagatacaaagaggcagagctcatccactgtagatgggctatgcttgctggttctgggatttttggtcctaaagctttattatattgtatctgggt

SEQ ID NO: 158774 - DNA, 303 bp, Arabidopsis thaliana columbia
ctggagaagactcccgctgaagtgaatgcatatctttctagcccagttgagtacactaactcaatgatgagtgctggtgatgctcaggcgagggacacattggagaggattgttgagtgccttgaaaaggagaagtgtgagaccttccaagactgcttaacctgggcacgactgaggtttgaggattactttgtgaaccgtgtcaagcatttgatatacacatttcctgaagatgctgtgactagtaccggagcttcattcttgtctgctttaaaaagatttcttcttccactccagtttttg

SEQ ID NO: 158775 - DNA, 331 bp, Arabidopsis thaliana columbia
atcatcacacgtttctctctctctctttcctctccgtcgtctctctctctctagccaccaccaaaatccttaaaacctagacttttctcttccatcgatggcggctaataacagatccgatcatgggtcagacgaaaacacaagactttacaatccttaccaaaactacgaagtcccaatcaacaaatctcagtacctttacaagcttcctacctcccctgagtttctcttcacggaggaggctttaaggcaacgtagatcttggggtgagaatctcactttctacaccggaacagcttacctcggtggctccgatgtcggagcttctgtt

SEQ ID NO: 158776 - DNA, 115 bp, Arabidopsis thaliana columbia
gcaagatctgctctctaccgagatcgttaatcgtgggatcgaaccatccggtcctaacgccggctcaccaacgttctcgggggggggcactagacattttgcctgtttttcttag

SEQ ID NO: 158777 - DNA, 87 bp, Arabidopsis thaliana columbia
aaatttagacaaaaaataaatatggagctcgagacctcagtttatcgaccaaacgtcgccgtttatgattctccggatggtgtggag

SEQ ID NO: 158778 - DNA, 281 bp, Arabidopsis thaliana columbia
ggtcgagatccgtcaactttgcgttaacgccagacaaatcttcctttctcagcctaatcttctggagcttcatgcccccattcgcatctgcggtgatatccatggacagtaccaagatcttctgaggctattcgaatacggaggctatcctccttcagcgaactatctcttcctcggcgattacgttgatagaggcaagcaaagtcttgaaacattatgtttacttttggcttacaaaattctggtctcatccaagaaatttttcttgagtggtatccatt

SEQ ID NO: 158779 - DNA, 408 bp, Arabidopsis thaliana columbia
gcaaaagaagaagagaaacaacaagaagtagtaatggcttcctctatgctctcctccgccgctgtggttacatccccggctcaggccaccatggtcgctccattcaccggcttgaagtcatccgctgcattcccggtcacccgcaagaccaacaaggacatcacttccatcgcaagcaacgggggaagagttagctgcatgaaggtgtggccaccaattggaaagaagaagtttgagactctatcttacctccctgaccttagtgacgtcgaattggctaaggaagttgactaccttctccgcaacaagtggattccttgtgttgaattcgagttagagcacggatttgtgtaccgtgagcacggaaacactccctgatactacgatggacggttctgtacaatgtgg

SEQ ID NO: 158780 - DNA, 267 bp, Arabidopsis thaliana columbia
gaagatggtttcgctgacgtcgctccgccaaaagagcaatctttctctgctgaccttaaactcttcgttggtaaccttcctttcaacgttgacagtgctcagctcgctcagctctttgagagtgccggaaatgttgagatggttgaggtaatctatgacaaaattacaggaagaagcagaggttttggattcgtgactatgtcttcagtttctgaagttgatgcagttgctcagcagtttaatggctatgagttggatggttgactc

SEQ ID NO: 158781 - DNA, 426 bp, Arabidopsis thaliana columbia
ctaaactttattggagaaaccctaatcggcgacaatgggtatttctcgtgactctatccacaagaggcgtgccactggaggcaagcagaagcaatggaggaagaagcgaaagtatgagatgggaaggcagccagccaacaccaagctctcaagcaacaagacggtcagaagaataagagttcgtggtggaaatgttaagtggcgtgcgttgaggctcgatactggtaactactcgtggggaagtgaagtaactactctgaagatcagagtctttgttgaggtcttatttgccttcaaaattttgctttatttataagacttttgttatttttccttttttatagttgttgttatttctttaaaaatgttaatttttccatatttttaaaagtttcgttctttttttaaattttgttgcttttttta

SEQ ID NO: 158782 - DNA, 233 bp, Arabidopsis thaliana columbia
gcctatttgggggatcatcaaccttctatcatcaccatggatccttacaagtatcgtccttcaagcgcgtacaacgccccattctacaccacaaacggtggtgctccagtctccaacaacatctcttccctcaccatcggagaaagaggtccggttcttcttgaggattatcatttgatcgagaaggttgctaatttcaccagagagaggatccctgagagagtggttcatgc

SEQ ID NO: 158783 - DNA, 334 bp, Arabidopsis thaliana columbia
ccaccatactactctccttctcctaaggtagtctacaagtctcccccaccaccgtacgtctacagcttaccaccaccaccatactactctgcttctcctaaagtagtttacaagtctcccccaccaccgtacgtttacagctcaccaccaccaccatactactcaccttcccctaaggtagactacaaatctcccccaccaccgtacgtctacagctcaccaccaccaccatactactcaccttcccctaaagtagactacaaatctcctccaccaccgtacgtctatagctcaacaccatcaccatactactcacctttcccgaaggtagact

SEQ ID NO: 158784 - DNA, 321 bp, Arabidopsis thaliana columbia
  unsure (1)..(321): unsure at all n locations
caaaagtggaaatacaacaaaacaatgtcgggacttagattggatggcaagatcgcaattataacaggcggagctagtgggattggagctgaagcggttaggttgnttacgtaccattgtgcttatgtgtttattgtgtacatatctttatagtttgtttatttccttgtttttttatttgtttttttctattctattattttttatgtttatttatattatatttttattttttaatttttgtattttttcttaatttttttatttttattcttattatttttttatatttatataattttatttttttttatttatatt

SEQ ID NO: 158785 - DNA, 234 bp, Arabidopsis thaliana columbia
ggaaataccatttcagagaaacatgttttgcatgcaggttcaattcttggtaacttggaagagattgttttattgagggggtggttttttttcatttttattttatttaattttttttttatttgatttttttattgttctttttcttttcttttttatttttcttttttttttttttttttttttttgctattttttattttttttttatttttttattctattttttatttt

SEQ ID NO: 158786 - DNA, 185 bp, Arabidopsis thaliana columbia
atcaaaaacagtaataaaagatcaactgcaagaaaatggctcttcctctcgagctcgaaagcctcactgaagccatctcagctgggatgggaatgggagttgatgagaatgcattgataagcacactggggaaatcgcaaaaggaacatagaaaattgtttaggaaagcaagcaaaagtttcttt

SEQ ID NO: 158787 - DNA, 436 bp, Arabidopsis thaliana columbia
caaaatccatggccaagaaaggtatcccagagtggctcaacagttctctctggtcctcctctcctcccatcgacgatcgccacctccgcaatcctgccgccacttccatcacccctccatctcctccgatcgtcgagcgtcctcctttttcttcctctccctccgcgatttccaccgcaccagctcctcctcttcctgttcgtcctccttccaaatctgagattaacgatttgcagaatgggagtggtaacgatggtgctggaattgaaactcccgcagtttcttctgttgaagatgtttctcgaaaagcgcaggtccgggcttgagtatcgaagaaggtgatagacttgaaggaattgaggaagatagcttcacaaggtctaccttgttgatgctggaattcgatccattgtttggaagcttctgttggatattt

SEQ ID NO: 158788 - DNA, 157 bp, Arabidopsis thaliana columbia
aaattttctgctcctgagaaacaagtagagatactaaagatggaatctttgaactaaattcgaaaccttttaatgggtaccgagtcgggttcggatccagaatcgagctcaaacgggtggagccgtgctcgtggtctagttgtcaagacttttggtt

SEQ ID NO: 158789 - DNA, 193 bp, Arabidopsis thaliana columbia
ctccattgagaccttttcgaccgtaaaccgattgcgatcaaattagctgatctgatcggaaaatcacaagaaaaccctagaaaactcctccggattcgaattctcgactcgattcaatgtatcaattgagaaaatttgacttcttcgaggagaaatacggtggcaagatacctgaggatgtaaccggagatat

SEQ ID NO: 158790 - DNA, 309 bp, Arabidopsis thaliana columbia
atgcaccagtcatctcagccgccaaggcttaccacgagcagctatcagtccctgagatcaccaatgccgtttttgagccagctagcatgatggcaaagtgtgacccgagacacggaaagtacatgggcctgttgtttgatgtaccgaggagatgttgttcccaaagatgttaatgctgctgttggcactcattaagacatataggattttttagtttttttactttttgcaaatttgttttatttttcgtaatttttataaaaaatctataactatattttataatttttgtgattttttttcattttt

SEQ ID NO: 158791 - DNA, 287 bp, Arabidopsis thaliana columbia
ccaagtttgggtttgatgatgcatttaactacaaggaagaatctgaccttactgctgccctaaaaaggtgtttccctaatggcattgacatatactttgagaatgtaggaggcaaaatgctagatgcagtgcttgtgaacatgaacatgcacgggcgtatcgctgtctgtggaatgatctcacagtacaatcttgagaaccaggaaggtgtacacaacctatccaacataatttacaaaagaatccgcatttaaggctttgtagtgtctgatttcttcgacaaatac

SEQ ID NO: 158792 - DNA, 144 bp, Arabidopsis thaliana columbia
aaaaatgttttgcaaaagcttctctcattgggctgcttttgctcctgaccatcgtcgcctctccagcaaatgcagatggacctgtttgcccgtcgtcaaacaaactaagtctttcaagttttcctgaatgttttttattattta

SEQ ID NO: 158793 - DNA, 240 bp, Arabidopsis thaliana columbia
gacatgagttcttatgcagatgctcttcgtgaggtttctgctgctcgagaagaagttcctggaagacgtggatatccggggtatatgtatacagatcttgcaactatttatgaacgcgcgggacgtattgaaggaagaaagggtttcattacccaaattcttatcctgactatgcccaatgacgatatcactcaccctactccggatcttactggttacattactgagggtctgatatat

SEQ ID NO: 158794 - DNA, 345 bp, Arabidopsis thaliana columbia
ttcattttagcggcagacgagagagcaaaagcatggagaaaccctaaccatggcgacacaaccagctactgaatctgtgcaatgcttcggaaggaagaagaccgcagtggccgtcactcactgcaagcgtggatctggtttaattaagctcaacggttgcccaatcgagcttttccagccagagatcctccgattcaagatcttcgagccgattcttctcctcggaaagcaccgtttcgcaggtgtgaacatgaggatccgtgtcaacggtggtggtcacacatcacaggtttacgccatccgtcagagtatcgcgaaggctcttgttgcgtactaccagaagta

SEQ ID NO: 158795 - DNA, 332 bp, Arabidopsis thaliana columbia
gttctacgccgaggaagagaagaatgatcctgaatttgcaaagaagcttgctgctcttgccgatgtttacgttaatgatgccttcggaactgctcacagagctcatgcttccactgagggagttgccaaattcttgaagccttcagttgctggttacctcatgcagaaggtacttgattaccttgtctgagctgtttcataccctaataagccttttgctgccatattagtaggttcaaagtttttatcattttattggtgtttctgagttttatcttattttcatttgaccttctctatgtcttggtttgtttaatttttattttttataa

SEQ ID NO: 158796 - DNA, 431 bp, Arabidopsis thaliana columbia
gagagattcagctgcgttgggcaaaatcccagacgaagatcagtgattagtcttttgataacttgagccatggcaactggtaaaactgtgaaagacgtctcgcctcatgacttcgtcaaggcttatgcttctcatctcaagcgatctggcaagatcgagcttcccacatggacagacattgtgaagaccggaaagttgaaggagcttgcaccatatgatcctgattggtactacatcagagctgcatctatggcaaggaaggtttacctgatgggaggacttggtgttgtgtcttttcttaaatttttgttgattgctatttttttcttctctttcttacattttttctttgttatatcttatattttcactttctttatatatttttcatattttttataatattttcctaccttttatatacttttatt

SEQ ID NO: 158797 - DNA, 104 bp, Arabidopsis thaliana columbia
  unsure (1)..(104): unsure at all n locations
caaagatggagtttcttacatttatctgcttttataattgatcaaatcaaggttgctgcttaggagncatttttccagtatgagcaagcatctaaccttgtatt

SEQ ID NO: 158798 - DNA, 373 bp, Arabidopsis thaliana columbia
cggtcgaccacgcgtccggacgccatgggaagaagacctgcgaggtgttaccgtcagatcaagggtaagccatacccaaagtctcgctactgtcgtggtgtgccagatccaaaaatcaggatctacgatgttggtatgaagaggaagggtgtttattttttttttttttttttttcattttttatttatgtatgtttttttttttgattttttttattattttattgttttttttattttttttttttttttatttttattattttttgttttttttgagttaatatgtgttatttgtttgtttactagtatttttttctcttattatttttcattttttgttatattttcttttgtctaattgttatttata

SEQ ID NO: 158799 - DNA, 462 bp, Arabidopsis thaliana columbia
gttgaagaagacgaagaagataccttcctctttatcttctccgatttctcaaccttcccgtctgcttgtcgtaaagaaatggcgccgagtagacgggatttacagcttactccggtcaccggaggttcttcttcccagatcagtgatatggaagaagatgttctcttcgtttcgtattctcatcgtatctttactctctttgcatattttactaatattcgtaatttgtaaaattatttttccttttatttcttatttttctcatgttttcttatattattttgcaacttttttttttttattctttctattttcttcatataatttttgttttttcgttttctgcttaattgtttttcttttttctacaattttcttcatttttattttcttttattttttatttcattttcttctatattttctatcttcttcttctcacattttttttcccatttttta

SEQ ID NO: 158800 - DNA, 447 bp, Arabidopsis thaliana columbia
tccagatttcgattcccgaggctcgagagaaaattgtttatctcttctccgttcactcaatcaagcaaagatgcttgagattctgggcatccattgtggttatttttattatttatattggatactttattatgattagttgtatgttttttattttttttgtggattatatttttcgttatatttttactatcttatttttttatctttattatttctttctgttatttttatgtttttttattaatttttatatatttataattttatatttaatttaatattttgtcgtattttttttaatttttttttttttattgttttttttttcttaatatatttctttttttataattcttatttcattttaattttgttgatattttattttttttctgttttatatttattttttgtttattatttttttttatatatattattttt

SEQ ID NO: 158801 - DNA, 258 bp, Arabidopsis thaliana columbia
atcgagctccggcggatcttcactcgtctcggacctacttttgttaaattgggtcaagggttgtccacccgacccgacctctgtccacccgattaccttgaagaacttgcagagcttcaggatgctttgccaaccttccctgatgcagaggcatttgcttgcattgagagagagttggatttgtcgctagagaccattttctcgtctgtatctcctgagccaatcgcagcagctagtcttggccaggtttacaaagct

SEQ ID NO: 158802 - DNA, 251 bp, Arabidopsis thaliana columbia
cccacgcgtccgctaaaatctctctctgccaatctcatcttcaacctctctctaactctcgttttcgattctacaatggctgacaagaagattaggatcggaatcaacggattcggaagaattggtcgtttggttgctagagttgtttttcagttgaacgatgtttaatttttatattttttttcaaacctttttgtaatttttatttgttttacattgtactttttttgtcatttgttttatgtattttc

SEQ ID NO: 158803 - DNA, 276 bp, Arabidopsis thaliana columbia
gcgattctcactaaaaccctcgaacacatcgcctttatctctttctctagatctactcgctatggctactatcaccgttgttaaggctagacagatcttcgacagtcgtggtaatcccaccgttgaggttgatatccacacgtcaaatggtattaaggttacagcagctgttccaagttggagcttccactggtatctatgaggctcttgagctgagggattgagtgatctacttaccttggaaaggctgtattttttagcttttttcatatagtc

SEQ ID NO: 158804 - DNA, 216 bp, Arabidopsis thaliana columbia
tgaaaaaaacagaggaaaaaaaggagctcccttttctatctctaagggaaaatgggtagcaagatgttgtttagtttgacaagtcctcgacttttctccgccgtttctcgcaaaccttcctcttctttctctccttctcctccgtcgccgtcttcgaggactcaatggactcagctcattcctggaaaatcgatttctttgagaagaagagtcttc

SEQ ID NO: 158805 - DNA, 136 bp, Arabidopsis thaliana columbia
gaaaaatggtgtctggatcaggaatttgcgcgaagcgcgtggtggttgatgctcgtcaccacatgctaggtcgcttggctgtgggtgtagcataggatctgctcaatggttcataatatttgtggttatttttgtt

SEQ ID NO: 158806 - DNA, 207 bp, Arabidopsis thaliana columbia
gaagaatcagagaaaatgccgccgaaattggatccatctcaaatcgtcgacgtctacgtccgagtcaccggaggtgagggcggagcatctttttcactcgctccaaagatcggtccactcggtctggcaccaaagaagatcggagaagacatttcctaagtgacagcgaatgaatggtatggttttcgagttaccgtgattttttac

SEQ ID NO: 158807 - DNA, 338 bp, Arabidopsis thaliana columbia
cagactcaaacagagagtgaaaatgccggcgggacacggagtgagggcgagaacaagagatctgttcgcgagaccattcaggaagaagggttatattccactctccacttacctcagaaccttcaaggtcggcgattacgtcgatgtcaaggttaatggagctatccacaagggtatgcctcataagttctaccatggtcgtactggtcgcatctggaatgtcactaagcgtgccgttggtgttgaagtcaacaaacagattgggaacagatttatatggaagaggatacttgtgcgtgttgagcatgtgctacatttaaggttttgctgtggtgttt

SEQ ID NO: 158808 - DNA, 157 bp, Arabidopsis thaliana columbia
gagagagggacgatcttttctataactgaaacactactcgaggccaagttgctttagccgtaatcgtcgtcgtccctcttcccgagattatctcttctctgttcttcgatttcgaaaccctaaccttctctctttaattcgcgttttctgtatcgta

SEQ ID NO: 158809 - DNA, 197 bp, Arabidopsis thaliana columbia
gttgactactacaactccgttgactcctgccaagcagctaacggcatttggtagtgatgacggaactgtatgggatgatggtgcttacgttggggttaataaggtgtacgttggacatgcccaaaatggaattttagttgttatgtttgtgatcttctaaattatttgtaatatgttttaaattgttattataattt

SEQ ID NO: 158810 - DNA, 218 bp, Arabidopsis thaliana columbia
atttttagggttttatcctccgaaagtctcaacctttttcttatcctcaacaaggagaaatggcggcgactcaacttacagcgtcaccagtgactatgtcagcaaggagcttagcctcgctggatggtctcagagcttcgagtgtcaagttttcatctttgaaaccagggacccttagacagagccagttccgtcgtttggttgtcaaagctgcttct

SEQ ID NO: 158811 - DNA, 368 bp, Arabidopsis thaliana columbia
aaaacatcgcacaagaaaataaaagatttgtagaatcaactaagaaaatggctagcactatgatgactacattgcctcagttcaatggtcttcgagccaccaaaatctctgcagctcctgtacaaggcctggcaagtgttcagcccatgagacgcaagggaaatggagctttgggtgcaaagtgtgacttcatcggttcatcaacaaatctgataatggtaacgtcgacgaccctgatgttgttcgcggggagattcggacttgcgccatcagccaatatgaaggcgacagctgtacttaggttggaggcacgtgacttaggtctacaaacgggtgatccggccgtttttactctttgcggacacttt

SEQ ID NO: 158812 - DNA, 306 bp, Arabidopsis thaliana columbia
  unsure (1)..(306): unsure at all n locations
gaatcaagcgatgatgaatcttagggttttgttttttgctctncttctccttgcatctcctctgcttcaagttgctagatgtctttcttattccggtgatcattcaagctttttgtgttttttttttttttctttctttttttttttttttttttttattttttttttttttttttcttttttttttttttttttttctttttatttttttctttttttttttttttttttttttttttttttttttattttttttttttttattttttttttttattcttttttttttttgtttttttttttttt

SEQ ID NO: 158813 - DNA, 198 bp, Arabidopsis thaliana columbia
gctgagaagagataaaaaaagccttggagaagaggttttcttcttcttcttcttcttctggttgggcttccctcctctgcggtgaacgatgtcgtatcacgcttcttcttatcttctccgtcgtcgtcttactttcgtataacctcgatctctcactcgtgtatcttcctcagctttcttccttggagatctcttttt

SEQ ID NO: 158814 - DNA, 221 bp, Arabidopsis thaliana columbia
tcaagatctagctccggtcatgaagtcgtcggaattccaataccacgaggaatacgtgagaaattcaagaggtgtagagttgttcgcatgtagatggatcccatcttcttcgtcttctcccaaagctctggtttttctctgccatggttatggaatggagtgtatcgactccatgtaagaatgctgaatcaggctggctttagctggattcgcggtttttg

SEQ ID NO: 158815 - DNA, 306 bp, Arabidopsis thaliana columbia
  unsure (1)..(306): unsure at all n locations
cccacgcgtccgccgatcttctcctcataaaaacacctcttcctcaacgaattttttatccatgagtcgcataatgggattgttcgatctcgagaaacacttcgccttctacggtgcttaccatagcaatccgatcaacattctaatccacatcatcttcgtttggccaatcttcttctcagntttacttctcctccactcgttgaccccaattttcgacccctctcaattagggttttctcaatcgatgtcccttgacggcgttttgcgatttaacgttggggttatattctgtcttgatttaat

SEQ ID NO: 158816 - DNA, 329 bp, Arabidopsis thaliana columbia
gcaaattctgaagttgaaggatgttttggggatattgattcagttgatgttgtttgatttgtggggcgtctttattatgggggtttttattttatttccatatttatttagtttttttgttaattttttttattttttttttttttttttttttttttttttttttttattttttttttttctttttgtttttttttttttttttttttttttgttatttcatttatttttttttttttttttttaatttttttttttttatttttattattttttttttttttttttttttttttttttttttttttttttttttttattcttttttt

SEQ ID NO: 158817 - DNA, 267 bp, Arabidopsis thaliana columbia
ggaagacctgagttcttctttgatgatggagcttatccagaacaggttgactggattggtcagaagaatcagatagacgctgctaaggctgcaggagttaagcagattgttttggttgggtcgatgggaggaacaaacattaatcaccctctcaatagtattggcattgctaacattctgttctggaagagaaaggctgagctctacttttctgtttttggtattctcataacctattattacgtgtcttaatttctttttatttta

SEQ ID NO: 158818 - DNA, 167 bp, Arabidopsis thaliana columbia
ggatgatgtcaaggtttacgctgccgttccagtgaaacccagcgatgccttccccaatgctagcaagtggtacgagtccgtggcttcccaacttgctaaaagtttccctggaaaggccgttggagtacaattcggtggctctgctgctgctgctccagctgttgaag

SEQ ID NO: 158819 - DNA, 76 bp, Arabidopsis thaliana columbia
gattctctactagatcccatccgaaaaatcctacttgctttccaaagttgcaatctttgaggatctttgtcataac

SEQ ID NO: 158820 - DNA, 241 bp, Arabidopsis thaliana columbia
cttgattatcgtccagggattgcaacagagagaaagtaacgatgccggcgaaacagaggacagctaaggtcaacaggaatcctgatctgatcaggggagttggtaaatactcaaggtctcagatgtaccataagagaggtttgtgggctattaaggtcaaatatggatgcttttttttttgcctttactctaattctaatgttgattctcttgcgaataatgtcttctttttttctttttt

SEQ ID NO: 158821 - DNA, 354 bp, Arabidopsis thaliana columbia
ttcatcgatttctctcttccaaatctcccaaaagatgtcgaaccctagagttttcttcgacatgagtctcagcggtactcccatcggacggatcgagatggagcttttcgctgatacaaccccaaacacggcggagaatttccgtgctctctgtaccggcgagaaaggaatgggaaagctaggtaagccacttcacttcaaaggatcgatcttccaccgtgtgattcccggattcatgtgtcaaggaggtgatttcaccgccaagaacggatccggtggtgaatcgatctacggtgctatgttcaaggacgagaactttattaagatagatacaggagctgggattttctttat

SEQ ID NO: 158822 - DNA, 345 bp, Arabidopsis thaliana columbia
agatcctctcggcttgttcgttcttcgtgaacgatcccatctattgtttctcgctagtctcagattcgactaacttggatatctccgatactgaagaagcctccttcttctttttccgctcttcccgatgccgatcgataagatcttcaaagatgatgctagtgaagagaagggagaacgtgcgaggatggcatcatttgttggtgcaatggctatcagtgatctggttaagtctactttagggccaaagggcatggataaaatcttgcaatctactggtagaggtcatgcggtcactgttactaacgatggtgctactattcttatgtcacttcacatagacat

SEQ ID NO: 158823 - DNA, 396 bp, Arabidopsis thaliana columbia
agatcctctcggcttgttcgttcttcgtgaacgatcccatctattgtttctcgctagtctcagattcgactaacttggatatctccgatactgaagaagcctccttcttctttttccgctcttcccgatgccgatcgataagatcttcaaagatgatgctagtgaagagaagggagaacgtgcgaggatggcatcatttgttggtgcaatggctatcagtgatctggttaagtctactttagggccaaagggcatggataaaatcttgcaatctactggtagaggtcatgcggtcactgttactaacgatgtggctactattcttaagtcacttcacataatacaccctgctgactaaagtcttgatgtcatttttaaagtatatgatgtatgtgg

SEQ ID NO: 158824 - DNA, 124 bp, Arabidopsis thaliana columbia
cgcagtctcccactgattcagcagctctttgaactactcttcgacaatggccgaacgtggtggagaacgtggtgttgagcgtggtggagaacgtggtgatttcgttcgaggattctgatgcctg

SEQ ID NO: 158825 - DNA, 398 bp, Arabidopsis thaliana columbia
gccacctttcccacaaaccacacaacaaccaatgatgggtcacagggaccagttttggtctaatacagctgagtctcccgtctcagagtatatgcgttatcttcaaagttcacttggagattcaggacccaatgctaaccaaatgcagccaggtcatgagcagcggccttatatcccaggtcatgagcaacggccatatgtgccaggtaatgagcagcagccatatatgccaggtaatgagcagcggccatatatcccaggtcatgagcagcggtcatatatgccagctcaatctcagtctcagtctcaacctcaacctcaacctcaacctcagcaacatatgatgcctggaccgcaacctcgaatgaacatgcagggccctcttcaacctaaccagt

SEQ ID NO: 158826 - DNA, 144 bp, Arabidopsis thaliana columbia
cttcgacgtctcttgttactgtgcgccgtcttagccttacgtgcgccaacggcgcactctcctatcctacgctcatctatcggcactcccacagcgagagctgtctcggaagtttccggttgtactacgatcgattcatatttt

SEQ ID NO: 158827 - DNA, 280 bp, Arabidopsis thaliana columbia
gcgtccgcggacgcgtgggtgttggtacagcatatgttttttccgaggaaaatgaaccaactaagggaaggatacttgtgtttatagttgaagaaggaagactgcagcttatcacagagaaggaaaccaagggagctgtttatttttttaatgcctaattgacttactttttgcttctttttaataattatttagttgataatattattttatctatattttttcttgtgatttttttattttgtttctatatatattattatttttatattcatttttt

SEQ ID NO: 158828 - DNA, 230 bp, Arabidopsis thaliana columbia
attcgtcttcttcgttctctagttttttcctcagtctctgttcttagatcccttgtagtttccaaatcttccgataaaaatgtcgggtaaaggagaaggaccagctatcggtatcgatcttggtaccacttactcttgcgtcggagtatggcaacacgaccgtgttgagatcattgctaatgatcaaggaaactgaaccacgccatcttacgttgctttcaccgactcct

SEQ ID NO: 158829 - DNA, 238 bp, Arabidopsis thaliana columbia
gagagaaagagagacagagataatggcgtacagtgcgtgtttcctacaccagagcgcattggcttcatcagccgcacgatcatcatcttcctcctcatcccagcgtcacgtgtcgctctccaaacctgttcagatcatctgtaaagctcaacagtctcatgaagacgataactccgccgtctcccgccgtcttgctctcactctccttgtcggcgccgctgctgctggttccaaagtt

SEQ ID NO: 158830 - DNA, 370 bp, Arabidopsis thaliana columbia
acgacggcaaaacgaatatccacaggcggagaaatcaaaaaaccaaaaatccaatctttggattcttacttctacgatttgtgtgtttcctcaaacccaaatgtctcgtctcccgattttaatcgcttcgtgtctcttcctctcttcactcaccgccgccgtcgtcaccgccgccgaatccgatactccgacggcttattcactcctccaaagctacaacttccccgtcggaatccttccaaaaggagtcgtagcttatgatttatacacaacaacaggcaaattccatgcgtatttcaacgattcatgtagcttcaatcatgttggttctcaccaattgaaatacaaatcatcattcattgcgtacatc

SEQ ID NO: 158831 - DNA, 172 bp, Arabidopsis thaliana columbia
ctcaatggcgtcgttactcgattccgtcaccgtgacccgcgtgttttctctgccgattgcggcttcggtctcgtcttcttcagctgctccgtcggtttcacgacgccggatttctcccgccaggtttctggaattcagaggtttgaagtcttcgcggagtttggcgtctcat

SEQ ID NO: 158832 - DNA, 411 bp, Arabidopsis thaliana columbia
gcccttgcaaaccataaccaaaccatcatcatcatcatctcttggtgacagaagaaaagagttgaggaacagagaaaatggcagcacaagcacttgtgtcttcttcacttacctcctctgttcagacagctagacagatatttggctcaaaaccagttgcgtctgcctcacagaagaagagttcctttgttgttaaagctgctgcaactccacctgtcaagcaaggagccaacagaccattgtggtttgcttcatcgcagagtctctcttacttggatggcagcttacctggtgactatggattcgaccctcttggtctttcagacccagaaggtactggaggattcattgagccaagatggctagcatacggagagatcattaacggacggttcgccctgttgggtgcat

SEQ ID NO: 158833 - DNA, 463 bp, Arabidopsis thaliana columbia
  unsure (1)..(463): unsure at all n locations
aaaaaaaccttcgtttgtgtctcagaatttacaaagttttgagtcagtagagaaatggcgggaatcgtgacagagccgtggtcagtagctgagaacggaaacccaagcataacggcgaaaggatcgagcagagaactaagacttggaagaaccgctcacaacatgtcttcttcttctttgaggaaaaaatcagacctccgagtgattcagaaggttccatacaaaggtcttaaagattttctctctaatctccaagaagtcattctcggaacaaagcttgccattctttttccggccattcctgccgccattatttgcacctattgtggcgtcagtcagccttggatatttggacttagcttgctaggactgacacncttggctgagcgagtcaactttttgacagaacaactagctttttacaccggtcctacattgggtggtctattgaacgcaacgtgtg

SEQ ID NO: 158834 - DNA, 319 bp, Arabidopsis thaliana columbia
agaggctcaaaggtagtcctgctattcctggtgataaagacgaggatggcttagctgatgaaggtactgttgagttcaactaccctcagaaggagaaaatttcagagcggatgcttggttggcatcttactcgtgggaagggagaggaaatgggggaaccccagtatgataaagaggtctttcacaatcatcttcctcgtctcacgagcagacaagatactttaggagagttttctgctgccttacctgatcgcctctctgtatgctctactatctgtgggggaaagcgcctttcctattcttatgatttcagtcaatc

SEQ ID NO: 158835 - DNA, 348 bp, Arabidopsis thaliana columbia
ctccaagctctcttctcatcaaaccatggatccttacaagtatcgtccagctagttcttacaactctcccttcttcaccaccaactctggtgctcctgtatggaacaacaactcctccatgaccgttggacccagaggtcctatccttcttgaggattaccatctcgttgagaagcttgccaatttcgacagggaacggattccagagcgtgtggttcatgccagaggagccagtgctaaaggtttctttgagggcactcatgatatctctaacctcacttgtgctgactttctccgagcctccggtgttcagactcctgtcatttgccggttctccaccgttatcca

SEQ ID NO: 158836 - DNA, 455 bp, Arabidopsis thaliana columbia
cggacgcgtgggtccagatctgcggtagagtttgtaagaccacgactgatcctgaaaggaatgaatggaaaaaatagcatgtcgtatcaagggagaattcagataacatttttttttgctttcctgatcggtacaatcttattttgatgtcgaaaaaaaaaaaagaattccaatttgggtcaagtgaataaatataaatggatggataaaaaaaccagttttccttattccaggaaaaaaaaagaaacgagcttccattcgtaatttgaaaaattaccccaactaattaaatgttaaaaatagattagtgcctaatacgggtatgggaaggcatttttttcttgcgtgttattatcaattttttcatgagtcctaattattgttttaactagtccatttggattaggttggagtgtgtaaaagaagcagtatattgataaaaaatatatatattt

SEQ ID NO: 158837 - DNA, 432 bp, Arabidopsis thaliana columbia
cttttcacagttctgtttctccctctctctaaatgatggcaaacaactgtaatttagtcagtgttctatgtgtaattttggtattgaccctctttcacaaccccatcactgtcgccggacagaatagtccggtggtcgccttgttcacctttggtgactccaacttcgacgccggaaacaaacagactctcaccaaaaccttagtcgctcaaggtttctggccgtacggaaaatctcgagatgatcccaacggcaaattctccgacggcctcatcactccggacttcctcgctaaattcatgaagattccggtcgcgatcgcgccggcgcttcaaccgaacgtcaaagtctcacgtggagctagtttcgccgtcgaaggagcttctctacttctagctccggtggaatttatgtctctcgaataacaagtga

SEQ ID NO: 158838 - DNA, 397 bp, Arabidopsis thaliana columbia
cgcgaagttttcaacagattcgccggagaatcttcgaatcaacggcggagaaatggctctatcacgcctctcatcacgatccaacatcatcactcgtcccttctccgccgccttcagccgattaatctcaacggacacaactccgatcacaatcgagacttcgcttcctttcacagctcacttatgtgatccaccgtcacgctccgtcgaatcatcgagtcaagagcttctcgatttcttcagaaccatggcgttgatgcgacgtatggaaatcgcagccgattcgctttacaaagcgaagctaatccgagggttttgtcatctctacgacggccaagaagctgtagctataggcatggaagctgcgattcaaataaagactcgattattactgctt

SEQ ID NO: 158839 - DNA, 434 bp, Arabidopsis thaliana columbia
gcaaagcttagtaatggcttcaatgcacgaagctctgttctcttctcggcttcttcaagtcaattcttctttttccttccgttgcgctcttccaattatctcttcaccagctgcagtatcttgcgcaatcaaatcgacccagttttttaaacagcgttgtagaaccaaagtgagggacttttctctatcttcactgtcccggagagggttcgtttgcagagctgctgagtacaagtttccggatcccatacctgaattcgccgaagctgagactgagaaatttagggaccatatgttaaacaaactatcaaaaagagatctttttgaagactctgttgatgaaattgttggagtctgcactgagatcctcgagacgttcttgcgcagtgagtatggaggacctgggtcacttctggtgatacctttcattgaca

SEQ ID NO: 158840 - DNA, 327 bp, Arabidopsis thaliana columbia
gccgccatggtgaagtactcgcaagaacccgacaatcataccaagtcttgcaaggctagaggatccgatcttagggttcacttcaagaatactagggaaacagcgcacgcaatcaggaagctaccattgatcaaggcgaagaggtaccttgaggatgtgatagctcacaagcaagcaattcccttcacacgtttctgcagaggtgttgggagaactgctcaagctaagaacaggcactctaatggtcaaggacgttggccagccaagtctgctcagtttgttcttgatttgctcaagaacgctgagagcaatgctgaggtgtaaggt

SEQ ID NO: 158841 - DNA, 163 bp, Arabidopsis thaliana columbia
gttttcaaacttaatacatgttatagatcatgtattaaaaaggtaaaaataagatttggccaaaagacatgtatagatcatgtatgttgccaaaaaaaactaagaatgtaagattctccactgatggatgcagaagcaatttgtgatatattattcttgtttt

SEQ ID NO: 158842 - DNA, 426 bp, Arabidopsis thaliana columbia
aaaaatcttgacgtctcttcttgtctgaagtcttaagtatataactggaaagtccgtattggagttcaacaaaagaagaaaacgaagacttttagttagatcctacattactgaactcattatatatatctggtgagacattctcctatatatgcagtttcaactttcaaagccagcaaataataaacagaggagaaatatggaaacacaaggcaaagtaatcacttgcaaagctgctgtggcatggggagctggagagcctctagtaatggaagatgtaaaagtggatcctcctcaaagattggaagggagaattcgaatcctcttcacttccatctgtcacactgatctcagcgcatggaaaggcgagaacgaggctcagcgagcatacccttgaattcttggccatgatgcagcatggatagt

SEQ ID NO: 158843 - DNA, 462 bp, Arabidopsis thaliana columbia
cacaatcgtttaatctcacccaagaagacaaaaacacagagagagaaagagagagaaatggcgacgacaacaacagaagcaacgaagacatcatcgaccaatggagaagatcagaagcagtctcagaatcttcgacatcaagaagttggtcacaagagtctcttacagagcgatgatctctaccagtatatactggagacaagtgtgtatcctagagaaccagaatcaatgaaggaactcagggaagtgacagcaaaacatccatggaacataatgaccacatcagctgatgaaggacagttcttaaacatgcttatcaagctcgttaacgccaagaacacaatggagatcggagtttacactggctactctcttctcgccaccgctcttgctctccctgaagacggcaaaattctggctatggatgtcaacagagagaattacgaattgggtttaccgatc

SEQ ID NO: 158844 - DNA, 154 bp, Arabidopsis thaliana columbia
  unsure (1)..(154): unsure at all n locations
caaaatttagacaaaaaaataaatatggagctcgatacctcagtttatcgaccaaacgtcgccgtttatgattctccggatggtgtggaggttcgaggacnttactaccaattcttctcctagatttttacgagagtatctcttatctttattt

SEQ ID NO: 158845 - DNA, 328 bp, Arabidopsis thaliana columbia
aaagacttcacattttaccattatttgctctgagctcagtaggagagttcaagaaacaatggcaaagatgcaattatcaatctttatcgctgtcgttgcgcttatcgtctgctctgcatctgctaaaaccgcaagccctccagctccagtgctgccaccgacaccagctccagcaccagccccggaaaatgtgaatctcaccgagcttttaagtgtagctggtccgttccacacattcctcgactaccttctctcgactggagtcattgagactttccaaaacctagctaacaacactgtggaaggcatcacaatctttgcccctaaa

SEQ ID NO: 158846 - DNA, 355 bp, Arabidopsis thaliana columbia
attttcaattgcttctctcttctctcttctatagccccattgtcgtgggttcccactagcagctttcttgtcttcctccattttcttttccttcattctactaaaacagaggtttttgcctcttcctctcttgtttcactctttagggtacacacaaattcactcttttttcttctttgtttgggaggggaaaagttacagttttttcctctgttttggatcaaaatttcgtttttttggttgtgttaagaaagcaacagagagagagagaaagattgaaactttggatgtgaatttagggttttgtgaattggggaaaaagcaatccatagatggctcaacagtaacaatttca

SEQ ID NO: 158847 - DNA, 284 bp, Arabidopsis thaliana columbia
ccaaaaggtggaagcacaaggagggaaaggagccttctctatgggacgatggatcgacacatgacgccgtgaccaagattcagctcgcagcaggcatagacggaattcaatatgttcagtttgattatgtcaagaacggacaacccgaacaagctcctcttcgtggtaccaaaggccgtgttctcccagctgatccgtttgtgattaaccatccagacgaacatctagtttctggagaaggttggtattggcccttgaatgtttcttttcagggtattaaattt

SEQ ID NO: 158848 - DNA, 449 bp, Arabidopsis thaliana columbia
attcgaaatctccaaagaacccgacaaagcgccatgtcgctcactatcccggcgaatctcgttctcaacccgagatctaacaaatctctcactcaatccgtacctaaatcctccgcaagattcgtctgctccgatgacaaatcctcctcctccacacctcaatccatgaaagctttctccgccgccgtcgccctctcttccatcctcctctctgctcctatgccagctgtcgctgatatctcaggtttgactccttgcaaggactcaaaacagttcgctaaaagagagaagcaacagatcaagaagcttgaatcttctcttaagctctacgctcctgaatctgcccctgctcttgctctcaatgctcagatcgagaaaaccaaacgcaggttcgacaactacgggaagtacggattgttatgcgggtcagacggtttaccgtacttgat

SEQ ID NO: 158849 - DNA, 436 bp, Arabidopsis thaliana columbia
caaaatttagacaaaaaaataaatatggagctcgagacctcagtttatcgaccaaacgtcgccgtttatgattctccggatggtgtggaggttctatttttttttctatttttctttgtttctttcttaatgttgattactcttttttttttttctctttctaattttttttcttttcttctctttgtttttttttttatctcattttagtattatttttttatttttttgtcatttttcattcttttttttttttttttttttttaattatattttttttctatttctcattttctttgttttcttcttagtttttttcttttttgtttttattatttttctgtttcattcttcgttgtttttttatctcattgtttttcttttttttattttttttttttatttttcttgtatttgcttattcgtttttttttt

SEQ ID NO: 158850 - DNA, 168 bp, Arabidopsis thaliana columbia
aacgctgtttcattcttccgattacaatggcgactagaagacgtactttgctcaaggtcattgtcctcggtgacagtggggttggaaaaacctccttgatgaatcaatatgtgcataagaagtttagtatgcagtataaagcaacgattggtgctgtttttgtaacca

SEQ ID NO: 158851 - DNA, 419 bp, Arabidopsis thaliana columbia
agagacagagagagagagagattctgcggaggagcttcttcttcgtagggtgttcatcgttattaacgttatcgcccctacgtcagctccatctccagaaacatgggtgcaggtggaagaatgccggttcctacttcttccaagaaatcggataccgacaccacatagcgtgtgccgtgcgagaaaccgcctttctcggtgggagatctgattatagcaatcccgtcttattttttcaaacgcttaattcttcgcttttttttctaccttatatattacttcattcatttcctatatcttttatttttttattaccatataactcttgattgtatatatcatatttatttcttattttgttttgcgtttatttttttaagtcctttcggaattcttaatgtattattcttgtgtttctg

SEQ ID NO: 158852 - DNA, 223 bp, Arabidopsis thaliana columbia
cagagctctattcccatcaagaaacacacttcggaagatggagatcactaacgttaccgagtatgatgcaatcgcaaagcagaagctgcctaagatggtgtacgactactatgcatctggtgcagaagaccaatggactcttcaagagaacagaaacgcttttgcaaggatcctatttcggcctcggattctgattgatgtgtgcaagattgtcattacatcc

SEQ ID NO: 158853 - DNA, 348 bp, Arabidopsis thaliana columbia
cattttcagacgaaagcaatcagaaactcaggtgaatcagaagcatgattcgagttacgaaaccaaaagcgatcatcgaatcactgagttaccatcttatccaaagatgctccgcaagtggaactcctaaaggaaaagcaaagctgaagacaggtcagccattgaagcgtaacaaactctccatcaagaaaggtggtggcggcggcggagcacctgttgaaggagaggaagcagttaaaggaaaaggtagaatttccgatgagaagcagaaactctacgagcaatgcttaaacgctccttgtcctgttcgctacttgaccccccaagagatcgagcgtgtggcgcaac

SEQ ID NO: 158854 - DNA, 396 bp, Arabidopsis thaliana columbia
gccgaaaccctaaatctcgacctcaaaccctgaaccatggctgaaggactcgtgttgaaaggcacaatgtgtgcccacactgatatggtcaccgccattgctacaccggtcgataactccgacgtgattgtaacttcgtcgcgtgacaaatcaatcatcctctggaaactcacaaaggaagacaagtcatacggtgttgctcagcggaggatgactggtcactctcacttcgttcaagacgttgttctctcctccgatggacaattcgctctctccggatcttgggacggtgagcttcgtctctgggatctcgctaccggagaatctactcgtcgtttcgttggtcacacgaaagatgttctctctgttgctttctctaccgatatccggcagaat

SEQ ID NO: 158855 - DNA, 418 bp, Arabidopsis thaliana columbia
acagactcagcagcttaccacattgttgctgggggctacattaggggagcccgggagccgatggccgacctgcaattatcgatctgtgatcggggtaccagcgctgatggcctggtctgcgtgcgcttaatccggacgcgctacctcttccgcgctgcgaccgacgcctgctcccgcaccagcccgggaaaatgtgaatctcaccgagcttttaagtgtagctggtccgttccacacattcctcgactaccttctctcgactggagtcattgagactttccaaaaccaagctaacaacactgaggaaggcatcacaatctttgtccctaatgatgatgctttcaaagctcatatgattcctcctttgtcaaatctcacataaggatcagcttatgcagcgtgtgtctctttcatgctt

SEQ ID NO: 158856 - DNA, 312 bp, Arabidopsis thaliana columbia
gggagaagagagtaggcgttggtggttgggtatttaaacataagcttaagacttcagctaagtacccatggcttatgctttaccttagagctgatgccactaaaggattctctggtggataccattatgacactagaggaatgctcaaaacacttccggagtcaccaaactttaaagtgagactaacactaaatgtaaaacatggatgcggagccaagagtcaattctattcttttgacattggaagctgttgtaaaaacaacggtatgccctgcgactgtgactgtactaccgacgtaactcgttacttgg

SEQ ID NO: 158857 - DNA, 435 bp, Arabidopsis thaliana columbia
atctcaacaagacaccacaaaccctaaatttcgtcaactccacagcgactcgattcgatcaaggaaatggcgtacgcttctcgttttctctccagatctaagcagctacaggggggtctggtcattttgcagcagcaacatgctattccagtccgagcttttgctaaggaagctgctcgtccaacctttaaaggagatgagatgttgaagggtgtcttttttgatatcaagaacaaattccaggctgctgttgatattctccgtaaggaaaagatcacccttgatccagaggacccagctgccgtaaaacagtatgcaaatgtaatgaagaccatcaggcaaaaggcagacatgttctcagaatctcagcgcattaaacatgacattgatactgagactcaagacattccagatgctcgtgcatacttgttgaag

SEQ ID NO: 158858 - DNA, 187 bp, Arabidopsis thaliana columbia
gtcttcctttggaacaatgagtgacgtgtttgatggatatgagcgacaatactgtgagctctcggcgagtctttcaaagaagtgttcctctgctatttcgcttgatggagaacaaaagaagcagaagttgtctgaaataaaatccgggctggaaaatgcagaagtatctattacgaaaatgtatttt

SEQ ID NO: 158859 - DNA, 144 bp, Arabidopsis thaliana columbia
gtgaagaaccctatttcccaacaaggtgacgatttcttcagctagcttgaatgcatctggaaaaggatcgaataaaccaaatggggtgaaatatttttctttaaagatctattaatctcttattttcttaaacttttaattctc

SEQ ID NO: 158860 - DNA, 362 bp, Arabidopsis thaliana columbia
cgaaaacactcaagcttgcagagatctttcactttaatccttgagaagtagcaaaaatggctgaaaaggcggtcaccatccgaaccaggaaattcatgaccaacagacttctctccaggaagcagttcgttattgatgttcttcaccctggaagagccaatgtttcaaaggctgagctgaaggagaagctagcaaggatgtacgaggtcaaggatccaaatgcaatcttcgtattcaaattcagaacccactttggaggtggtaaatcatccgggtttggtttgatctatgatactgttgagagcgctaagaagtttgtacccaaatacagacttattaggaatggacttgtcacttatatt

SEQ ID NO: 158861 - DNA, 225 bp, Arabidopsis thaliana columbia
gcgatatctctgagatttgtttgacagtctctaaccatgggtaaagagaagtttcacatcaacattgtggtcattggccacgtcgattctggaaagtcgaccaccactggacacttgatctacaagttgggtggtattgacaagcgtgtcattgagaggttcgagaaggaggctgctgagatgaacaaaaggttcttcaagtacgcatgggttttgaacaaactt

SEQ ID NO: 158862 - DNA, 164 bp, Arabidopsis thaliana columbia
attttcttcaaaacgattcgggtcaaggttattgactttctcattcagtgaagcttgaatcatggcctcgagaattgctaaagatgtgactgaattgattgggaacactccattggtgtatttgaacaatgttgctgaaggatgtgttggtcgtgttgttttta

SEQ ID NO: 158863 - DNA, 428 bp, Arabidopsis thaliana columbia
agagaacacagacgataccaactttcttcaatctcgttgccgcagtataattatctcattcctcggatatatctctccttctgcggcggcgacaagaagctacaagaataaaaagtctgttttctctcttttcaagaaaccacttacttcgaaaatggctcgttctatctctaacgttaagatcgtatctgctttcgtctctcgtgaactctccaatgctatcttccgacgtggttatgcggccacggcggcgcaagggagcgttttgagcggtgtatgaagtgtatccgttcctatcattatatttattactataaattctttataccgtttctatctttatgtaattcttactttatcaatttacacttatctgtaatatttatgttctttcttctctacattatatattgttcttttcattatat

SEQ ID NO: 158864 - DNA, 441 bp, Arabidopsis thaliana columbia
cccttctcccaatctcatcttctccgaaaacctttcttctctcaaatttctgtgaaaacatgtctgacgacgagcaccactttgaggccagcgaatccggagcttccaagacctatcctcaatcagccggtaacatccgtaaaggtggtcacatcgtcatcaaaaaccgtccctgcaaggttgttgaggtttcgacttccaaaactggcaagcacggtcacgccaaatgtcactttgttgctattgatatcttcactgctaagaagcttgaagatattgttccatcttcccacaattgtgatgttccacatgtgaaccgtgttgattaccagttgattgatatcactgaggatggcttcgtgagccttctcactgacagtggtggcaccaaggatgatctcaagcttcccaccgatgatggtctcaccgcccagatgaggc

SEQ ID NO: 158865 - DNA, 166 bp, Arabidopsis thaliana columbia
cgcgtcctggtttttgtctctagcctcctcaagctttgcatacaatcatggcgacccatatcagcaagaagagaaagttcgtagccgatggtgtgttttacgctgaactcaatgaggttctaaccagagagcttgctgaggatggttactctgatgttgaggtttt

SEQ ID NO: 158866 - DNA, 382 bp, Arabidopsis thaliana columbia
caaaaatcgaaattcacaatttctcttcttctaaatccatggagtgatgatgatgatagatagattgaatccaaacacaaaccggatccgagattaaaaacaatccggattgtttatatttactttagatcggagaaagatgccgccggcgaccggagatatcgatcgtcagatcgagcagcttatggagtgtaaagcgttatctgaaacggaggtgaagatgttgtgtgagcacgcaaagacgatttcttgtggtattatataatgttttaccgttttattgcgcgtctaccgtttagttttgtttctttttgctgattttaattttttattttatttgtttgtttggtaatggcgagaactttaatagttgttttttttt

SEQ ID NO: 158867 - DNA, 253 bp, Arabidopsis thaliana columbia
caaaaatcgaaattcacaatttctcttcttctaaatccatggagtgatgatgatgatagatagattgaatccaaacacaaaccggatccgagattaaaaacaatccggattgtttatatttactttagatcggagaaagatgccgccggcgaccggagatattgatcgtcagatcgagcatcttatggagtgtattgttttttattgattcggtggttgtatttttttttatttgtcattgttctttttttat

SEQ ID NO: 158868 - DNA, 220 bp, Arabidopsis thaliana columbia
cttttcgtttgccactttttgatcaagcgaaactccaaaacacagagccatgccgccgaagttggacccgagccagatcgtcgatgtgtacgtccgtgtaaccggaggagaagtgggagccgccagttctctagctccaaagatcggtcctttcggtctcgcaccaaagaagatcggagaagacatcgcgaaagagacggtcaatgtatggaaaggactt

SEQ ID NO: 158869 - DNA, 405 bp, Arabidopsis thaliana columbia
ggtcactgaggtgaaattgaaagacggaagaacgttagaagctgatattgtgatagtgggtgtcggtggtagaccaattatatcactcttcaaagatcaagttgaagaagagaagggtggtttgaagactgatgggttcttcaaaacaagccttccagatgtatacgccattggtgatgtagccaccttcccaatgaaactctacaatgaaatgagacgcgttgaacacgttgaccatgctcgcaaatccgctgaacaagccgtataggcaatcaaggcggctgaggaagggaactcaattccggtatatgactatcttccatacttttactctcgagcctttgatctctcatggcaattctccggtgacaacgtttggaaaagcgtattgtttggggacaatga

SEQ ID NO: 158870 - DNA, 383 bp, Arabidopsis thaliana columbia
tgcgccttttagctcagtgaaaaaggttcgagcttcggaaactatggcagcattccctaaccttaactctgatgctggattgaagaagctcgacgagcatcttctcactcgcagttacattactggataccaggcttcaaaggatgatatcaccgtctttgcagctcttgcaaagcccccaacttcacagtatgtgaacgcttctcgttggtacaatcacattgatgccctcttgaggatctctggtgtctctgctgaaggaagcggtgtcattgttgagggatcagctcctatcactgaggaggctgttgctactccccctgcagctgattctaaggatgctgcggctgatgaagaagatgttgatgatgttgaccttttcc

SEQ ID NO: 158871 - DNA, 328 bp, Arabidopsis thaliana columbia
gcagaaatccgagttctgcgttgtgattcgagtaaagttgtcgcaaaaccgaagtttaggaacaatcttgttaggcctgatggtcaaggatcttcattgttgttgtatccaaaacataagtcgagatttcgggttaatgccactgcgggtcagcctgaggctttcgactcgaatagcaaacagaagtcttttagagactcgttagatgcgttttacaggttttctaggcctcatacagttattggcacagtgcttagcattttatctgtatctttcttagcagtagataaggtttctgatttatctcctttacttttcactgtcattt

SEQ ID NO: 158872 - DNA, 276 bp, Arabidopsis thaliana columbia
agaaggtttgctatattatctggacctactatacctataattggtgaaggtgatgaagaggctaatgataggtatgtagagcaactggtggcaagtgccgaagctgctgtagaggaagtcgtcaggcgtggagtggctgatcgaagcaaaattgcagttgggggacactcctatggagcttttatgactgctaatcttcttgctcatgctcgctatctttttgcctgctggtttgccagatctggtgcttacaacagaacacttacgccctttgtt

SEQ ID NO: 158873 - DNA, 406 bp, Arabidopsis thaliana columbia
gtggttaacccatgcaaggtatgagaactgcctgtcaaatgagcaaggccgagtgttagcagcaaaacttggtgtgacagatcttttctgggactgggacttgccgagaaccagagaaggattctaccggttccaaggctcggtcgcagcggccgtggtccgtggctgggcctttgcacagatcgcagacatcatctggatggaaacggcaagccctgattctcaatgaatgcacccaattcgtcgaaggtatcaagtccaagacaccggaggtcatgctcgcctacaatctttcgcctgccttcaactgtgacgcttccgtgttgacggatcatctgatgtgttgaatcattccgttaattgctttgcctcgtaattggtggccctttttatcgcctgtgtttat

SEQ ID NO: 158874 - DNA, 309 bp, Arabidopsis thaliana columbia
gccgccttattcgtcttcttcgttctctagttttttcctcagtctctgttcttagatcccttgtagtttccaaatcttccgataaaaatgtcgggtaaaggagaaggaccagctatcggtatcgatcttggtaccacttactcttgcgtcggagtatggcaacacgaccgtgttgagatcattgctaatgatcaaggaaccagaaccacgccatcttacgttgctttaaccgactccgagaggttgatcggtgacccagctaaaaatcaggtcgccatgaaccccgttacacaccgttttccactctaa

SEQ ID NO: 158875 - DNA, 308 bp, Arabidopsis thaliana columbia
cggacgcgtgggctttgggacgtttcgctgttagggacatgaggcagaccgttgctgttggtgttattaagagcgtggacaagaaggacccaactggagccaaggtcaccaaggctgcagtgaagaagggtgccaaatgatgagactttcgttatgatcgactctcttatggttttctttggttcttaaaactttgatggcgattgagcctttttcttttttctctttatttctgtgactttctctctccctcctttttggatatctctgagactttttattatggttttcaattatgcagctcttcg

SEQ ID NO: 158876 - DNA, 176 bp, Arabidopsis thaliana columbia
atggcagcaaatctagcgcgacggctgatcggataccgatcgactcagatccttggagccgtgaactctagctcaggtgcggctagttctgtcgctagggctttctgctcctccaccactccgatcaccgcaactctcttccctggcgatgggatcggtcccgagatcgccgaatc

SEQ ID NO: 158877 - DNA, 289 bp, Arabidopsis thaliana columbia
tagagagtaaaaagaacaaagatgtcgaaagaagtgagcgaagaaggcaaaacccaccatggaaaagactacgtggatcctccaccagctcctcttctcgacatgggtgagctcaaatcctggtctttctacagagctctcatcgctgagttcatcgctacactcctcttcctctacgtcaccgtcgctactgtcatcggccacaagaagcaaaccggtccttgtgacggcgttggtttacttggtatcgcttgggctttcggtggtatgatcttttgtcctcgtttac

SEQ ID NO: 158878 - DNA, 184 bp, Arabidopsis thaliana columbia
gaaacgacatggttgagtactttggtgagcagttgtctggttttgccttcactgcaaacggatgggtccaatcttatggatctcgctgtgtgaagccaccagttatctatggtgatgtgagccgtcccaaggcaatgaccgtcttctgttccgcattggctcatatcatgtcctctttcccatt

SEQ ID NO: 158879 - DNA, 214 bp, Arabidopsis thaliana columbia
ggaactttcgattgtcaatcaaggactggaggtccattcggaacaatgaggtttgacgctgagcaagctcatggagccaacagtggtatccacattgctcttaggttgttggaccccatcagggagcaattccctaccatctcttttgctgatttccatcagcttgctggtgttgtggccgattaagtttctggttgtcctgtctttcctttcc

SEQ ID NO: 158880 - DNA, 318 bp, Arabidopsis thaliana columbia
ggaagaacgatctcagtgagaggacgatcacttcgccgtcgcagtcatgggtcgaatgcatagtagaggtaagggtatctcggcatctgctttgccgtacaagcgttcatctccgagctggctcaagacaacccctcaagatgttgatgagtccatctgcaaatttgcgaagaagggtttgaccccatcgcatattggtgtcattcttcgtgactctcacggaattccacaggtgaaaagtgttactggaagcatgattctcagaattttgaaagctcatgttctttgctctatagatccctgaggatctgtttcact

SEQ ID NO: 158881 - DNA, 270 bp, Arabidopsis thaliana columbia
cttccggtggttccggtggctctagtggatctgcgccgtcttctggtggttcggcgtcttcaacgaacactaacagctccatagaagcgaagaactattcggatttagtgagaggtaaccgtatcggaagcggagcaggtggaacggtatacaaagtgattcaccgtccgagttctcggctatatgcacttaaggcgatatacggtaaccacgtggagactgtgagacttcagatctgcagagagattcggatatttcaagatgtgaata

SEQ ID NO: 158882 - DNA, 208 bp, Arabidopsis thaliana columbia
atcaaagagaactgaagcaataggcttttgaagctctctgcataaacatgactttcaagcgcaggaatggtggcaggaacaagcataaccgtggtcatgtgaaaccaatcaggtgttccaactgtggaaagtgttgccccaaggacaaggcgattaagagatttatcgttaggaacattgttgagcaggctgttattagagatgttca

SEQ ID NO: 158883 - DNA, 255 bp, Arabidopsis thaliana columbia
cacgaattctgatggcaatggctagggatggtctgctcccttctattttttcagacattaataaacgcacacaggttccggttaaagcaacagtggcaactgggttgtgtgctgcaaccttagcgttctttatggatgtttcacagcttgcagggatggtgagtgttgggacacttctggcatttacaatggtggcaatatcagtgttgatactaattatatgttcctccagatgagctacctcttccgatatct

SEQ ID NO: 158884 - DNA, 339 bp, Arabidopsis thaliana columbia
gattctcctaaccacggcggatttttctcacggagctaatttcgccatcgccgacgctaccgttcttggctctcctccggagacgatgactttgtcacaacaagtgaagaaattctcggaaaacaagaataagtggacaaatcaaacacgttctgaagctatctacttgatctacattggttctgatgattacttgagctatgctaagagtaatccaagtccatcagatactcagaaacaagcttttgttgatcaagtcatcactaccataaaagcagaaataaaggtgttttacgggtctggcgtaaggaaattatcattataaaacttgttactttt

SEQ ID NO: 158885 - DNA, 387 bp, Arabidopsis thaliana columbia
gaatcaatggcgtcttcttctctatcaactctttgcagctcaacttcttcttctctacatcccaactccaaactctcacattctctttcagctaaattatcctccaaagcaaatgtttccgtccaatttctgggaaagaaacagtctccgcttctctcctcaactccgagatttctcactgttatcgccatggctccacctaaacccggaggcaaagctaaaaaagttgtgggagttatcaaacttgctttagaggcgggaaaagcaactccggcaccaccggttggtccggcgcttggttctaagggagttaacattatggctttttgcaaggattataatgcaagaactgctgataaagctggttattcattcctgttggaatca

SEQ ID NO: 158886 - DNA, 456 bp, Arabidopsis thaliana columbia
cttacgtggacaacctcaagaaacaggttcttggaaccgagcttgaaggcaagcccttagagcacattatccacagcacttacaacaatggtgatctcctccctgctttcaacaacgctgctcaggcgtggaaccacgagttcttctgggagtcaatgaaaccaggtggtggaggaaaaccatcaggagagcttcttgctttgcttgaaagagatttcacttcttatgagaagttctatgaagagttcaatgctgctgcagccactcagtttggagctggctgggcctggcttgcttattcaaatgaaaaactcaaagtagtgaaaactcccaatgctgtgaatccccttgtgctcggctctttcccattgcttaccattgatgtctgggagcatgcttactaccttgactttcagaaccgaagaccagattacataaagacattcatgaccaatc

SEQ ID NO: 158887 - DNA, 398 bp, Arabidopsis thaliana columbia
aacaactatctcctcgtctactctctcatgatggctggggactggttgcagggtccgtatgtgtactatctctacagcacttatggctttggaaagggagagatcggtcagctctttattgctggttttggatcttccatgttgtttggcaccattgttggatctcttgccgacaaacagggtcgcaagagagcttctatcacctactgtatcacctacattctcagctgtatcaccaaacattctccccagtacaaagttttgatggtcggtcgtgttctttggggatcgcttcttctcttcttttctctgccttagaatcctggctcgtcgctgatgcacatcaagagaggcttctggctgctaatgctttttgttacttctcttcaaggctattt

SEQ ID NO: 158888 - DNA, 292 bp, Arabidopsis thaliana columbia
atggcagcaaatctagcgcgacggctgatcggaaaccgatcgactcagatccttggagccgtgaactctagctcaggtgcggctagttctgtcgctagggctttctgctcctccaccactccgatcaccgcaactctcttccctggcgatgggatcggtcccgagatcgccgaatctgtcaaaaaggtgtttacaacagctggtgtaccaattgagtgggaagaacactatgttgggactgagatagatccgagaacacagtagttcttgacatgggaaaagtcttgaatct

SEQ ID NO: 158889 - DNA, 373 bp, Arabidopsis thaliana columbia
tggatacttgtgctctagtaatccatcagtctctgtctcgcatcaaactttctcctcccaaatcttcttcttcttcttcttctgctttctcccctgaatccttaccgatcagacggatcgagctgtgtttccgaggagctatatgtgccgccgtacaaagaaactacgaagaaacgacctcctccgtggaagaggcagaggaagatgatgagtcatcatcatcgtacggagaagtgaacaagatcattggaagccgaacggcgggggaaggagccatggagtaccttatcgagtggaaggacgggcattctccgtcggggtttccatctagctacatactatcatacgtgttgtcgggtaactaaacatcctt

SEQ ID NO: 158890 - DNA, 302 bp, Arabidopsis thaliana columbia
cgcaagtatcaccgggaattgcaaagaagcagaggaccatgtacggagacgctacaaactggaatgaagatgagtatagagaatcaattttgaaggagcgagagatagagacacgcaccgtcttcagaaccgcctgggctcctccggcgagaatctctaatccagacgcatttgttgtagcctccagcgatggaactttagctttccattcactgaactcgcttgtgtctcaatcggcgagttttggctactcgaaaggtcaagatgttatggtggcttgacctgtgagagtgggttagggc

SEQ ID NO: 158891 - DNA, 256 bp, Arabidopsis thaliana columbia
tggatacttgtgctctagtaatccatcagtctctgtctcgcatcaaactttctcctcccaaatcttcttcttcttcttcttctgctttctcccctgaatccttaccgatcagacggatcgagctgtgtttccgaggagctatatgtgccgccgtacaaagaaactacgaagaaacgacctcctccgtggaagaggcagaggaagatgatgagtcatcatcatcgcacggagaagttatcatcttcatttgtttgtc

SEQ ID NO: 158892 - DNA, 89 bp, Arabidopsis thaliana columbia
tctaaatctctctcgatctcaatttcgcaaaatggctgacaagaagatcagaatcggaatcaacggtttcggaagaatccgccgttggg

SEQ ID NO: 158893 - DNA, 429 bp, Arabidopsis thaliana columbia
gtccttgtagaggaaaagaaaaaaaatggctgcttcatcttcctctttcactctctgtaatcacaccacacttcgtactctccctctgagaaagacccttgtcaccaaaacccaattttcagttcccacaaaatcatcagaatctaacttctttggctccacactcactcactcatcgtatatctccccagtctcttcctcttctctcaaaggcttaatctttgccaaggttaacaagggtcaggctgcaccagacttcacactaaaggatcaaaacggaaagccggtgagcctcaaaaagtataaagggaagcctgttgttctctacttctaccctgcagatgaaacccctggctgcaccaagcaggcttgtgctttcagagactcttatgagaaaattcaaagaagctggtgcagagggcattggca

SEQ ID NO: 158894 - DNA, 190 bp, Arabidopsis thaliana columbia
gactcttcctacagcagaagctttgccaagaaacgaaaccattggtggttacatctttgtctgcaacaacgataccatggaagagaatctcaaacgccagcttttctgattgccaccaagatacagggactcggttagagcgatatctccaggacttcctctgtttctttactactactccacttaccaa

SEQ ID NO: 158895 - DNA, 283 bp, Arabidopsis thaliana columbia
gactcttcctccagcagaagctttgccaagaaacgaaaccattggtggttacatctttgtctgcaacaacgataccatggaagagaatctcaaacgccagcttttcggattgccaccaagatacagggactcggttagagcgataactccaggacttcctctgtttctttacaactactccactcaccaacttcatggaatctacgtggcagctagcttcggaggaacaaacattgagttgaatgcttttgaagacaagaaatgacctggcgattctcgtttc

SEQ ID NO: 158896 - DNA, 376 bp, Arabidopsis thaliana columbia
tcattcgtcatctagtcccattctctgtccataacaatgaatatcaattgttctccattagggtttctaatttcactcttcttcattgttacttttcttgcaccacaagtcaaatctagggctttctttgtctttggtgactctctcgtcgacaatggaaacaacgactacctcgtcaccactgcccgtgccgacaattacccgtatggtatcgactacccgacccgtatacccaccggacgtttctctaacggccttaacattcccgacattatcagtgaggctataggcatgccgtcgactttgccggaccttagcccgcatctcacccggagaaaatcttctagtcggtgcttattttgccttcgtatgaatt

SEQ ID NO: 158897 - DNA, 435 bp, Arabidopsis thaliana columbia
ccatctgtcttctaactcctttttattaagtttcttaaagaaggttaaagaaaaaccctataaaataaatatcccaacgaaggcgataaaacccagattttccagatcttaaattctctcctcccccaattccatcttcgcaaattctccagattcttccgtcaatctttgagtttggtagagaaatggatcaacaaggacaatcatcagctatgaactatggttcaaacccatatcaaaccaacgccatgaccactacaccaaccggttcagaccatccagcttaccatcagatccaccagcaacaacaacaacagctcactcaacagcttcaatctttctgggagactcaattcaaagagattgagaaaaccactgatttcaagaaccatagccttccattggcaagaatcaagaaaatcatggaagctgatg

SEQ ID NO: 158898 - DNA, 332 bp, Arabidopsis thaliana columbia
ccgtccgtactcccggtcgaccacgcgtccggacgcccaaagcaattcggtattggtggcgctttgcctcctaagaaggatctttctcgttacatcaaatggcctaagtcaatccgtcttcaaaggcagaagcgtatccttaagcagaggttgaaggttcctccagctcttaaccagttcaccaagacccttgataagaatctcgccaccagcctcttcaagattcttctgaagtataggccagaggacaaagccgcaaatgaatgaacgcctttgaacaatgctcaagcctgtgcagaatgaaagcctgctgaatccaaatatcccatttc

SEQ ID NO: 158899 - DNA, 100 bp, Arabidopsis thaliana columbia
gtaaaaaaaaaatcctaatctttgcgtcaccgttcgtgtttcctcttctctctagggttctcctgcaactgttttccagtttgcatgagccgtcatcctg

SEQ ID NO: 158900 - DNA, 231 bp, Arabidopsis thaliana columbia
gaactaatagcaagttcaatggtgtgatattgaagaggcttttcatgagcaaagtcaacaaagctcctctttctctatctaggcttgtggagttcatgactggcaaggaagataagattgccgtcttggttggaactataactgatgatttgagggtacacgagattccagccatgtatgtgtctgccttgaggtttacagagagagcatggtctcgcaatgagaaagctg

SEQ ID NO: 158901 - DNA, 186 bp, Arabidopsis thaliana columbia
ctcctaacaaagcaatatcatttccaatttataaaagttaaagccatggctgcatctttctctgtcccctctatgataatggaagaagaagggagattcgaagcggaggttgcggaagtgcagacttggtggagctcagataggttcacgctttcaaggcgcctttacactgcccgtgtcgcggtg

SEQ ID NO: 158902 - DNA, 276 bp, Arabidopsis thaliana columbia
cttcttcgacgacgttggttcttcttcctttgtcctgcgccgcgatctctccttctccaacttccctcgtcctgtccaaagaaaatgccaaaggttaaaactaaccgagtcaagtacccagaaggatgggagttgatcgagcctactcttcgagagcttgatgccaagatgagagaagctgagactgattcacatgatggtaagagaaagtgtgaaactttatggccaatcttcaaagtttctcatcagaggagtcggtatgtatatgatctttat

SEQ ID NO: 158903 - DNA, 249 bp, Arabidopsis thaliana columbia
aaacagtgttcaccggtcggaaaccgattctcggattctccggccgatcgattcacgagctacgcaaaactgggaatttcgtaatccctcgtgttttctccgtgtcgcgaaatctaacgacgaaggcttcgtcttcttcttcgaaacaacctgcgtttctacgatggtatttgagaaagctcgaatcacatccttttatgactaagagtatcactacttttgtcatctatatggctgcagatctcactt

SEQ ID NO: 158904 - DNA, 352 bp, Arabidopsis thaliana columbia
cgccacgcgtccggcaggatgtcaggtggtcgttgaggagtttctcgagggagaagaagcgtccttcttcgcacttgtggatggagaaaacgccattcctctagaatctgctcaggaccacaagcgtgttggagatggagataccggtcctaacacaggcggcatgggagcgtattctcctgcaccggtcttgaccaaggagcttcaggattttgtgatggagtctataatccatcccactgttaaaggaatggctgaagaaggatgtaagtttgtcggcgttctgtttgcgggtcttatgatcgagaagaaattcggtttggctaagcttattgaggtcaatgtacggttt

SEQ ID NO: 158905 - DNA, 306 bp, Arabidopsis thaliana columbia
cccacgcgtccgcttgttctttggacgaccatcggcgacagtgttaagtctagagtcttcttcttcttcggcgtagttttttccccggcttgaaaaatgggtctatccttcggaaagttgttcagcaagctctttgcaaagaaagagatgcgtatcctcatggtgggtctcgatgcagctggtaagactacgatcttgtacaagctcaagcttggagagatcgtgactacgattccaaccattggtttcaatgtggagactgtggaatacaagaacattagctctaccgtgtgggatgtcggtggt

SEQ ID NO: 158906 - DNA, 222 bp, Arabidopsis thaliana columbia
ctcaaaaccaaaatcactaaagaggagaagattgctaaagtttgataaaacattccaaaatcaatggctgataggatcaaaggtccatggagtcctgaagaagacgagcagcttcgtaggcttgttgttaaatacggtccaagaaactggacagtgattagcaaatctattcccggtagatcggggaaatcgtgtcgtttacggtggtgcatccagtttttc

SEQ ID NO: 158907 - DNA, 358 bp, Arabidopsis thaliana columbia
  unsure (1)..(358): unsure at all n locations
ctaatcttcttctccaatcaatctcagagaaaaaaagaaatggcaacaaaccctaaagtctacttcgacatgaccgtcggtggcaaatccgccggtcgtatcgtgatggagctttacgccgacacaacaccagaaaccgccgagaatttcagagcactctgtaccggagagagaggaatcggtaaacaaggtaagccattacactacaaaggatcaagctttcaccgagtgattccgaaattcatgtgtcaaggaggtgatttcacanccnngaatggtaccggaggtgaatctatctatggatcgaagttcatagacctgaatcttatcttgtaacatacaggaatcggtttttttt

SEQ ID NO: 158908 - DNA, 159 bp, Arabidopsis thaliana columbia
  unsure (1)..(159): unsure at all n locations
cgcgtccggctgctgatattgcctatggtcttgataagaagggtggcgagaagaatatccttgtgtttgaacttggtggggggactataaaaaacacanncttgtactattattacacaccgctcctaacactaaaagaaaattaaaaaatttttctgc

SEQ ID NO: 158909 - DNA, 397 bp, Arabidopsis thaliana columbia
gtcaatgccatgtctgcactttgtgaatccactggtgctgatgttactcaagtgtcttacgctgttggtactgattcaagaatcggttccaaattcttgaacgctagtgttggattcggaggttcttgtttccagaaggacattctgaatctcgtctacatctgtcaatgcaacggacttccagaagtggcggaatactggaaacaagtgatcaagatcaacgattaccaaaagaaccggttcgtgaacagaatcgtgtcctctatgttcaacactgtctccaacaagaaggttgcgattcttggattcgcattcaagaaagacactggtgacacaagggaaacacctgccattgatgtgtgtaaaggtctattaggagacaaagcacaaatcagta

SEQ ID NO: 158910 - DNA, 420 bp, Arabidopsis thaliana columbia
ctggtgctgatgttactcaagtgtcttacgctgttggtactgattcaagaatcggttccaaattcttgaacgctagtgttggattcggaggttcttgtttacacaaggacattctgaatctcgtctacatctgtcaatgcaacggacttccagaagtggcggaatactggaaacaagtgatcaagatcaacgattaccaaaagaaccggttcgtgaacagaatcgtgtcctctatgttcaacactgtctccaacaagaaggctgcgattcttggattcgcattcaagaaagacactggtgacacaagggaaacacctgccaattgagtggggaaaaggtctattaggagacaaagcactaaactgtatctatgatccctcaatcacataggtaccagatttcctagagaacttttttatt

SEQ ID NO: 158911 - DNA, 343 bp, Arabidopsis thaliana columbia
caaggcaactaggcttaggactcatggcaagccttcctctggtgattttagccatggcagtggtggtggattttcgttgaagtcgcttggtgatccgaatactgcttctcatggttttaaacctataaatttcagaatgcctgaacccaatttatctcacgatctgcattatgctgatgagcaagatcatcgattaccagaaaaccagtttattaaacacaatgttgcattttattctcaactctgtcttcaacaatgattttaatattcttgaatttatatataataaaaaaacttatgattcaaattacattcctatccatttatttgtttaaagttttta

SEQ ID NO: 158912 - DNA, 394 bp, Arabidopsis thaliana columbia
cttaaacgttttactttgtgctgcactactcaacctcaatggccgcctcaacaatggctctctcctcccctgccttcgccgggaaggccgtcaagctttcccccgcggcatctgaagtccttggaagcggccgtgtgacaatgaggaagactgttgccaagccaaagggcccatcaggcagcccatggtacggatctgaccgtgtcaagtacttgggtccattctctggcgaatcaccgagctaccttaccggagagttccccggagactacggatgggacaccgccggactttcagctgaccccgagacattcgcaaggaaccgtgaactagaaggttatcacagcaggtgggccatgctcggagccctaagctgcgtcttccctgagctttt

SEQ ID NO: 158913 - DNA, 459 bp, Arabidopsis thaliana columbia
  unsure (1)..(459): unsure at all n locations
gattatatcaaaattatagaacaataaggaattttaacttatcatggggaaagacaccattgctgatataataacctctatacgaaatgctgacatgaatagaaaaggaacggttcggataggatcgactaacatcacggaaagtattgttaaaatccttttacgagagggttttatcgaaaacgtaaggaaacatcgcgaaaacaaccaatattttttgattttaaccctaagacatagacgaaataagaaagaatcctacaaaacgattttaaatttaaagagaataagtcgaccgggtctacgaatctattctaactctcaacgaattccacgaattttaggcggaataagaattgtaatcctttcgacttctcaaggtataatgacagaccgagaagctcgactaaaaagaatcggcggagaaattttgtgtatatatgngaatccttctaatat

SEQ ID NO: 158914 - DNA, 309 bp, Arabidopsis thaliana columbia
ctgatactaaaatggcgacggcgttgaagaagaacagaaagaagagaggtcacgtcagcgccggacatggacgtatcggtaagcaccgtaagcatcccggaggtcgtggaaacgcaggaggtatgcatcaccacaggatcctcttcgacaagtaccatccaggttacttcgggaaagttggtatgaggtatttccacaagcttcgtaacaagttcttttgcccaatcgtgaacctggacaagctatggtcacttgttcctgaagacgtgaaggcgaaatcgagcaaggataatgttccgttgatcgatg

SEQ ID NO: 158915 - DNA, 254 bp, Arabidopsis thaliana columbia
gtttctcataaagatctcaaagatattcctactacacatgggttctcttgacttgccttacgcttcatcgatcaagggaggaagcgcgacgcatctccagaatgtatgtaaacgctatgcttataccgcatcacaggatcctctggaacgagtaccatccatgttacttcgggaaagtcgggatcagggattaacacaggcttcgcaacaagtttttttgcccaatcgcgctcctgcgacatgctatggtcact

SEQ ID NO: 158916 - DNA, 417 bp, Arabidopsis thaliana columbia
gatcagtctttgaaagcctatgagattgctactactgctgctgaggctaagctccctccaacacaccctatcagattgggtttggctttgaatttctctgtcttctactacgagatcatgaacgcacctgaaagggcatgtcaccttgctaagcaggcgttcgatgaagctatctcagagcttgacactctgaacgaggaatcctacaaagatagcaccttaataatgcaactccttagggacaatctgaccttgtggacttctgacatctcaaaaaaaaggaggagacgatgctcataagacgaatggttctgccaaacctggtgctggtggagacgatgcagagtgatatgatatgtgtgcacctggacaatatgtttcaagaactgaatgtgcggtgaataattaagaaaagta

SEQ ID NO: 158917 - DNA, 273 bp, Arabidopsis thaliana columbia
agaaaactctcgtctgttaaagctttcctctgtttaccttcggagtcaatcttgattccgatgggactcgaatcgggttgtggagcgtttgggtgaagacatggagaaactaatgactgaatcacgtttgaaaccagatgttattgatttgaatcaagatttatctagggtatattgggggatgtcgactttaactgggaatgctacaaagataggagcttaataatgcaactccttaaggacaatctgaccttgtggactattcacatttta

SEQ ID NO: 158918 - DNA, 262 bp, Arabidopsis thaliana columbia
gcgtccgaaggtcaacaacgtcgagaataatggcatcatctctttgtgcttcttctgccatcgctgccatttcttctccaagtttcttgggtgggaagaaactgaggctgaagaagaagttgactgttccagctgtgtccaggccagatgcgtcggtgcgcgccgtcgcagctgatccagatagaccaatctggttcccgggaagcactccttcagagaggctagacggtagcctccctggtgacttcggatttgatcctct

SEQ ID NO: 158919 - DNA, 78 bp, Arabidopsis thaliana columbia
cggacgcgtgggcaaaaatcgaaattcataatttttcttcttctaaatccatgaactgatgatggtgataaatacagg

SEQ ID NO: 158920 - DNA, 391 bp, Arabidopsis thaliana columbia
gtcattttcattttctccatttgatttttgccgaccggagaaaatatcttcttgccgtcttcttcttcatttcaccaggaacttttatttgaaatcggtttgatttagccatggcaaacgcggcatcgggaatggctgtgcatgatgattgcaagctgaaatttatggaactgaaggcgaaaagaacattccgtaccatagtctacaagattgaggataagcaagtgattgtagagaaactcggtgaacctgaacaatcatatgatgactttgcagctagtcttccagctgatgattgccgatattgcatttacgatttcgactttgtcactggggagaactggcaagagagcaagaacttttttgattgcatggtctccggccacctgcc

SEQ ID NO: 158921 - DNA, 333 bp, Arabidopsis thaliana columbia
caaaatcttaaaaactttctctcaattctctctaccgtgatcaagatgcagatctttgttaagactctcaccggaaagacaatcaccctcgaggtggaaagctccgacaccatcgacaacgttaaggccaagatccaggataaggagggcattcctccggatcagcagaggcttattttcgccggcaagcagctagaggatggccgtacgttggctgattacaatatccagaaggaatccaccctccacttggtccttaggctccgtggtggtatgcagattttcgttaaaaccctaacggtaaagacgattactcttgaggtggatagtttt

SEQ ID NO: 158922 - DNA, 319 bp, Arabidopsis thaliana columbia
ctttgagattctccgattgcatctcaaaaaatctcagctatggctacctcctccgcttggaagctcgatgaccaccccaagctccgcaagggtaagaccatcgccgtaatcgtcttagatggttggggtgaatctgcccctgatcagtacaactgtattcacaacgctccaacttcagccatggattctcttaaacatggagctcctgatacttggactttgatcaaagcttcacggaactggtgtaggactttctagtgaagattttttttgaaacttcttgggttttttttctttcttttttttgcttatttttttt

SEQ ID NO: 158923 - DNA, 360 bp, Arabidopsis thaliana columbia
aaaaaaagatgcagatcttcgtgaaaaccctaacggggaagacgatcactctcgaggtcgagtcctctgacaccatcgacaatgtcaaggccaagatccaagacaaggaaggaatcccaccggaccagcagcgattgattttcgccggaaagcagctcgaagacggacgtaccttagccgattacaacatccagaaggaatcaacgcttcaccttgtccttcgtctccgtggaggtgctaagaagaggaagaagaagacctacaccaagcctaagaagatcaagcacaagcacaagaaggtcaagctcgctgttcttcagttctacaaggttgatggttcaagtaaggttcaacgtttga

SEQ ID NO: 158924 - DNA, 384 bp, Arabidopsis thaliana columbia
gtccgcggacgcgtgggttgcctcactgttcttcgtcatggcgaacaatccttcacagcttcttccttcagagctaatcgataggtgtatagggtctaagatttgggcgataatgaaaggagataaggccctcgttgatattctcaaagcattcagcgtctatgacaccatcgttccttaacctattacaacatccagaaagactcaacgcttgaccttgtccttcgtctccggggaggagcttacaagaggaagacgacgacctacacctagcctaagaagatcatgcacaagctcaagaaggtcaagctcggtgttctttcagtctacaacggtttatgtttcaaggtaaggttccaccgtttgtgttgaaggatttgccct

SEQ ID NO: 158925 - DNA, 311 bp, Arabidopsis thaliana columbia
catggcctcattaccattggggcctcagcctcattctcttgctccgccgctgcagcttcacgacggcgacgctttgaaacgccgggcggaattggattctgataaggaaatgactgcagctgaccttgagggatagaatggctgcgcatggcgattggaagacggacttactttaaccgattacaacatgcacattgaatcaacgcttcatcttgatctttgtctccgtggaggtgtttttaataggatgaagtatgtcctacaccaatcctaataagatctagctctatgccatgctggttaaacctcgc

SEQ ID NO: 158926 - DNA, 340 bp, Arabidopsis thaliana columbia
  unsure (1)..(340): unsure at all n locations
caaaaagcttttaacctcagccgttaaatctttctccgatcatgccgaccagaaacatcgccattggtggagtccaagaagaggtctatcaccccaacgcacttagggcggcgctcgctgagtttatctcgactttgatcttcgtcttcgccggctcaggctccggaattgctttcaacaagatcactgacaatggagcaaccactccttccggcctcgtcgccgctgccttagctcatgctttcggtctctttgtcgctgtctctgttggcgctaacatttccggtggccacgttaaccctgccggtaccttcggtgtcttactcggngggaacatcac

SEQ ID NO: 158927 - DNA, 377 bp, Arabidopsis thaliana columbia
cagatcttagctaaattgagacaagctcaaaatgagtaagcttcagagtgaggccgttcgtgaagccatcactactatcacagggaaatccgaggcaaagaaacgtaactttgtcgagactattgagctccagatcggtctgaagaactatgaccctcaaaaggacaagcgtttcagtggatctgtcaagttaccacatatcccccgtcctaaaatgaagatctgcatgctcggagatgcccagcatgttgaagaggctgagaagatggggttggaaaacatggatgttgagtctttaaaaaagcttaacaagaacaagaaactcgttaagaagcttgcaaagaaataccatgctttcttggcctctgagtctggca

SEQ ID NO: 158928 - DNA, 276 bp, Arabidopsis thaliana columbia
ctcaatcgattcaagaggcaccaagaaatcaatgaagacgttattaatcccagaaccagaaccaacttcccctgaagttatagaaagttctgtgtcctctgtttcagctgaatccgagacaccaatttcgattatacgtatgaagaaacaatcagagccaaggttttactctagcccaaccaacacgttttacacagaagcaaaacaaagctttaccaacacagaattgagtgaatgtgcaagcataagcactattggtataggtggtattgattt

SEQ ID NO: 158929 - DNA, 357 bp, Arabidopsis thaliana columbia
gcgtccgaaaaaaaatgcaacagaaggaaaaaaccccatcaacatgaactctatgtcttcaagtcttgcaagaaccggtcaatgggttttttctcaagatattccgaccgatgttgttgttgaagtcggagaagccaatttctctcttcataagttcatgttagtggctaagagtaactacataaggaagctaataatggaatccaaagatagcgacgtgacaagaatcaatctctcggatatacccggaggtcctgagatatttgagaaagctgccaagttctgttacggtgttaacttcgagatcaccggtcagaacgtggcggctttttattcgctcacccaattttttttctt

SEQ ID NO: 158930 - DNA, 304 bp, Arabidopsis thaliana columbia
aataaacagagggagtcgccaaattttctcatcattttctcgagaaaatagactaaaagcgattcccgagagaaagaaagaacaaaaaaaaaacatccgagtgaaaatgagagaaattcttcatattcaaggaggtcagtgcggaaaccagatcggagctaagttctgggaagttatttgcggcgagcacggtattgatcaaaccggtcagtcatgtggcgatacagatctacagcttgaaaggatcaatgtctattttaactaagcttgcggtggcaaatactttcctaagagctgtttttat

SEQ ID NO: 158931 - DNA, 215 bp, Arabidopsis thaliana columbia
agaaaaacctagaaagctctagagagaaagagagagagagatggaaggtaaagaagaagatgttagagtcggagctaacaagtttccggagaggcaaccgatcggaacttcggctcatagtgacaaggactacaaagagccaccacctgcgccggtgttcgagccctgcgagctagcttcatggtccttctggagagctgggattgctgagttta

SEQ ID NO: 158932 - DNA, 288 bp, Arabidopsis thaliana columbia
ctaatttctttacgtcaaactctctctatacacagagttaaattgagtttgtgtctcgtaacttatcctgtgagcgaaaatggtgaaagcaactaaggcagagaagaagatcgcctacgataccaagctatgtcagcttatcgatgagtacacccagatcttggtcgttgcggccgataacgtcggatcaactcagcttcagaacatcagaaagggtcttcgtggagacttcgtcgtgcttatggggaagaacactatgatgaagtgttccggttggattcactctta

SEQ ID NO: 158933 - DNA, 351 bp, Arabidopsis thaliana columbia
gtgagaaacgcaacaacaccaccgaaagagagagtccaaattcgaaagagaaaaagaatcaaattccttcttcttccttttttgattttcaattattactttaatcttctttcccgctctctattcttcttcttctttaggatcaatcaccgtttagctttcttcccatacgtctctccgtttacgaccagtatacagaggctggagctggggaagaaaaggattgtctatggagggagacgtcggaataggtttggtatgccagaatactatggatgggaaggcgagtaatggaaatggtttatagaagacctgaccttcttgttgtcttaaggctattgcattgtgtac

SEQ ID NO: 158934 - DNA, 223 bp, Arabidopsis thaliana columbia
  unsure (1)..(223): unsure at all n locations
tcgtgttattgctcantaacagtgacatgtgtttatgtgtgttatgatttaaaagttttgtttttttttgctgatggatttgtgttttttcttatttctcgaaaatggctttcgcagctttgcggatcttcataagcctgagactgaacttgatgggaaggcttgcgctcgtgtttgccaaaacaaccttattgcttactctgagactatgttagacccagct

SEQ ID NO: 158935 - DNA, 344 bp, Arabidopsis thaliana columbia
ctctcttctcttcgacactgatggcttcgctcaggctccccgctcaactagttacacgtggcaatctcatccaccacaactcttcatcctcctcctccgggcgtctgtcttggcgacgttctctcacaccggaaaatacaatcccgctcttcccatcttcctcatcctcatcccttaaccgggaacgatcaatagtagttccggttacatgcagtgctgcagcggttaatcttgctccggggacaccagtccgacccacgagcatcttggtggttggagccactggaactttgggaagacaaatcgtccggagagctttagatgaagggtatgatgttaggtgt

SEQ ID NO: 158936 - DNA, 203 bp, Arabidopsis thaliana columbia
acgcgtccgagcgatcaaaagtcttattcttgtgaatctgttatctcaattgcttcttaaacaatggcgactgttgatgatagaaatactcgaggtgatactcatactaccgtttgtcacgaagacgtttgttgatactataaaatacaataagcatattaccatctttctcatccatattccttagccgtgaacgatcaata

SEQ ID NO: 158937 - DNA, 278 bp, Arabidopsis thaliana columbia
cttaacagtggctgaaacttgagagagagagagagaggaagagagcgacactatggcgatgacacttattaacagagcaatctgtagaaccgaaaccgttggtgctttcagactctcgcttaatctcttaagaaatttctctgcggcgccggcgagtgaaaaccctagctccgattcgagtaaaccgaaacgaagaaagaagaagaacttaatcgaagttgctcagttcttacctaattggggaatcggataccatatggctaaagctcattggaatg

SEQ ID NO: 158938 - DNA, 429 bp, Arabidopsis thaliana columbia
atgagtttgacccagttggttcaaagcttgtttgggagcaagtcttaaagcctttgtatggtatgaccacagacaaaaccgttgttgaagaagaagaggctaagctagccaaagtcctcgatgtttacgaacacaggcttggtgagtccaagtatttggcttatgaccacttcactttggtcgatcttcacactatccctgtgattcaatacttacttggaactccaactaagaaactcttcgacgagcgtccacatgtgagtgtttgggttgctgacattactttaaggtctttttgttcaagaatgttttttatagggtattcttaaaactatttttttgtctcagttatatttttattctaatgttgtttgtttttttttatatgtttcaagattttttataaatatttcctgtattttacttttt

SEQ ID NO: 158939 - DNA, 418 bp, Arabidopsis thaliana columbia
atcgtttcaaaggcggagcttgataacttgcgccagagcggcgcaccagtcgtgcttcacttctgggcttcttggtgtgatgcttcgaagcagatggatcaagttttctctcatctcgctactgatttccctcgtgctcacttctttagggttgaagctgaggaacatcctgagatatctgaggcttactctgttgctgctgtgccttatttcgtcttcttcaaggatggtaaaactgtggatacacttgagggtgcagatccatcaagtttagctaataaggttggcaaagttgctggttctagtacttctgcggagcctgctgctcctgcaagcttaaggttggctgctgggccaacgattcttgaaactgtgaaagaaaatgcgaaagcttttttacaagaccgagctcaacctg

SEQ ID NO: 158940 - DNA, 265 bp, Arabidopsis thaliana columbia
ggcttcttctatagttacctctagcttgaagcctttagccatggccgattcttcctggtctaccattttctcccatccttgcatctcctctaccatctcttcctccagaattcgcagctccagtgtttccctccttaccggacgcattaacctgcccctctctttctctcgcgtctctctatctcttaaaaccaaaacccaccttaaaaaatccccctttgtctccttcggtgcccagacttcggattgggctgaagaaggtgga

SEQ ID NO: 158941 - DNA, 315 bp, Arabidopsis thaliana columbia
gaagaacaatggcttcctctatgctctcttccgctactatggttgcctctccggctcaggccactatggtcgctcctttcaacggacttaagtcctccgctgccttcccagccacccgcaaggctaacaacgacattacttccatcacaagcaacggcggaagagttaactgcatgcaggtgtggcctccgattggaaagaagaagtttgagactctctcttaccttcctgaccttaccgattccgaattggctaaggaagttgactaccttatccgcaacaagtggattccttgtgttgaattcgagctggagc

SEQ ID NO: 158942 - DNA, 334 bp, Arabidopsis thaliana columbia
gttagccaaaagtttagcaggtgacgtatatgggaaacggcgagaaaaaggacttctccctagatcagttagagctggaataattggataccctaatgttgggaaatcatctctgatcaatcgtctattgaaacgaaaaatttgcgcagcagctccaagaccaggtgtaactagagaaatgaaatgggtcaagcttgggaaagatcttgatctcttagattcacctggaatgctttctatgcgtatcgatgatcaagcagctgctataaagctggcaatttgtgatgacattggagagaaagcttatgactttactggtgatgctggaatcttt

SEQ ID NO: 158943 - DNA, 316 bp, Arabidopsis thaliana columbia
ttaataataatattatattattattgattatattattattgatattcgaatgagtcaaattcaacagcgatacataatagagagataaaagacatcaaacataaccaacatgaaatcaactagaactcaaaacaagaccagacttaaacatcatcaattagttgattttactttaaattcatttaaacataaaaagcaaagaagaaacttcttaaaagaagaatccaaaggccatcaccgctacggaggcgaagaaagtagggataaatgaggaagcatcggaagtagggctaggcgcgggagcgtcaaccgctgc

SEQ ID NO: 158944 - DNA, 303 bp, Arabidopsis thaliana columbia
ctcactgccaccaatttctattgaatcttttgatgtttcatgtgtataaaaatagttaacaaatgcgtgtttgaatttcttacaccacgcctaaatttaagagctgagtgaatcagagtaaatatctatgctaaaaacatcacaatcaaagacatttgatatctgtaaaacccagaattaaatatccatagcttggacccgtaggaaagcacaagagttttaaagaatagagtatgcacgaacttcctcaattacaggggcttgacacatgggtcaatttcctcccctttcccataccttttt

SEQ ID NO: 158945 - DNA, 246 bp, Arabidopsis thaliana columbia
caagaagaagagtggtgacataacaaaaccccataagctcccaagcctagagattctgttgttgatccgattcccgctctccttctgcggtagtacaatctccgtcgccggttacatcagccagggaagagttttaagagatggcatcaaagttgctacaattgaaatccaaggcatgtgaagcatcaaagattgtttccaagcatggatcaacttactacaaacagttgttggattagaacaaga

SEQ ID NO: 158946 - DNA, 289 bp, Arabidopsis thaliana columbia
ggttcattcagcacaagaaggaggcttactggttctacaggttcttatccatcgtatacgaccatgtcatcaatcctgggcattggaccgaggatatgagagacgacgctcttgagccagcggatctcagccatccggacatgcgagtggtcgatgtcggcggcggaactggtttcactactctgggcatagtcaagacagtgaaggccaagaatgtgaccattctggaccagtcgccacatcagctggccaaagcaaagcaaaaggagccgttgaaagaatgcaagat

SEQ ID NO: 158947 - DNA, 363 bp, Arabidopsis thaliana columbia
aaaagtcacacattctctctattaattaaacatgttgcttgttgcgtttgtgactcttttggtagcagtagctttgcagccactaccgtcagtgttgtctttggacgttcaccttcttcggcagctagccgcaaagcacaatgtgacatcgatacttgtgtttggagattctagtgtcgatccagggaacaataatttcattaaaaccgaaatgaaagggaattttccaccttatggtgaaaatttcatcaaccataaacccaccggtagattatgcgatggattactcgctcccgattatattgcggaggccatgggttacccttccataccggcttttcttgatccatccctaacccaagc

SEQ ID NO: 158948 - DNA, 396 bp, Arabidopsis thaliana columbia
cggaaagtctcttcttgattatcgtccagggattgcaacagagagaaagtaacgatgccggcgaaacagaggacagctaaggtcaacaggaatcctgatctgatcaggggagttggtaaatactcaaggtctcagatgtaccataagagaggtttgtgggcaatcaaggccaaaaatggaggcgttttcccccgccacgacgctaaatctaaggttgatgctccggtggagaagccaccgaagttctatccagctgaagacgtgaagaaaccttttcccaacaggcgcacggcaaaaccagtcaaggctcagagctagcattacttcaaggacagtgcttatcattcttgctggtatatttaaggtcaagagaaatgttttttcttaaacagtttt

SEQ ID NO: 158949 - DNA, 301 bp, Arabidopsis thaliana columbia
ctctggtgattttaccaatggcgatggcaacatcgatgagtttgaatctaattggggcattcaaaggcttgtctctttcttcgacttcgtcttttcttagaggcgatttgagtttttcccccaaaacctctttcacggtgactcttcctctggaaaatcttcaagctccgattccgttgacaattgaatcggcccataagaaaggagctggtagcaccaagaacggtcgtgattctcctgggcaacgactcggcggtaagatctacggtgaccaagttgcttatccttggtgctatcattg

SEQ ID NO: 158950 - DNA, 211 bp, Arabidopsis thaliana columbia
gagagaatttggcagaatgtacacagtctgagatatccttcctacaatgaagatcaacgtcaagaatgcaaagaagcgcgaggacgtgagatgataaaacctacactcaatcatccgggaacattcgtttaggtggtcacatcgtcatcaaaaaccgtccctgcaaggttgatgaggtatccacttcctaaattgttatgcacgttctctc

SEQ ID NO: 158951 - DNA, 366 bp, Arabidopsis thaliana columbia
gtcatggacggtcgttttgttcccaacattactatcggacctctcgtggttgatgctttgcgcgctgtgacagatcttcctttggatgttcatctgatgatagtggaacccgagcagagagtaccggatttcatcaaagcaggtgcagatattgtcagtgtacattgtgaacagcaatccaccatccatttgcatcgtaccgtcaatcaaataaaaagcttaagggctaaagctggagttgttctaaaccctggaaccccattgagtgcaatagaatatgtcttggatatggtggatctggtcttgatcatgtcgggcaaccctggattttgtggacagaactttattgtaagccaaataaagaaa

SEQ ID NO: 158952 - DNA, 354 bp, Arabidopsis thaliana columbia
cttatataaaggctttgacagagcccgacaatggaagcgatgcaagtggtctaggaacgactgcaacaaaggttgaaggaggttggaaaattaatggacaaaagcgttggattggaaacagcacctttgcagatctgttgatcatctttgcgaggaatacaacaactaaccaaatcaacgggtaagtcagattattggctttcttagatctctcagattttgtatcttaagtgtagaggtcgttcccagaaaactgaaggtaatgaggtggctcttgatttcatcttatggtagtgctgtaaaaatgcattttcataaagaatgctaaataggttggtacgcaatttgatgttc

SEQ ID NO: 158953 - DNA, 350 bp, Arabidopsis thaliana columbia
gattgaacgtgaatttgaagctgctacaaatagtcttaagcaactaaaccttgacgatttcagtgaaggagatgacagtgcagaatctgcaaggagaaatagtatgcttgaagctatcgaacgcgagtttgaagctgctacaaaaggtcttgaagagctaaaggctaatgattcaaccggcgacaaggatgatgatgaacacgttgcaaggagaaaaattatgcttgaagctattgaacgcgagtttgaagccgcgacaaaaggccttgaagagttaaagaatgaaataagaacaagctgaaaacaggagaaacagtatggtggaagcattcgaacgctaatttgaagct

SEQ ID NO: 158954 - DNA, 266 bp, Arabidopsis thaliana columbia
gaagaatcaacgatgacgacggcgacgaacaagcatgttatattgaaagactacgtgagtgggtgccctacggaatccaatttcgatttcactaccaccaccgacgaacttagggttccggaagccaatagaagggtacggagtgtctacagtgatagaatctgcgcattcagattacaaaaaaggagacctactctggggtataggtgcatgggaggagtacagtgtgattattttgcctcacgagcatttcaagatccaacata

SEQ ID NO: 158955 - DNA, 257 bp, Arabidopsis thaliana columbia
atttgcatcgaagaaactgactcgcttgtgggaatcaacaacaagacgatgtggcgctgcgtctctcgtggctttcgagctcctgcttcaaagacctcttcactctttgatggcgtctctggatctcgcttttccagattcttctccactggttctaccgatacgagatcctcttatacgatagtggatcacacttatgatgcggttgtggtgggagctggtggtgctggttttagggtggtgattgggttattgga

SEQ ID NO: 158956 - DNA, 336 bp, Arabidopsis thaliana columbia
ctgttcagtgcaggcactgaagcctcggcgaacactatacagtggaccatggcggagatcattaagaatgctaagatttgtgagagactgagagaagaaattgattctgttgtagggaaaacaaggttggttcaagagactgatctaccaaatctcccttacttgcaagcaatagttaaagaagggctaagattgcatcctccgggaccagtggtaaggacgttcaaagagacatgtgaaatcaaaggattctacataccggagaagacaagactttttgttaatgtttatgccaaaatgagagatcctgattttttgggaagacctctgataatt

SEQ ID NO: 158957 - DNA, 441 bp, Arabidopsis thaliana columbia
cttcttctatctctcacaattcagcaatggcttcttctatagttacctctagcttgaagcctttagccatggccgattcttcctcttctaccattttctcccatccttccatctcctctaccatctcttcctccagaattcgcagctccagtgtttccctccttaccggacgcattaacctgcccctctctttctctcgcgtctctctatctcttaaaaccaaaacccaccttaaaaaatccccctttgtctccttcgttgcccagacttcggattgggctgaagaaggtggagaaggaagcgtcgctgttgaggagaccgagaacagtttagagtcacaagatgtgagcgaaggagatgagagcgaaagagatgcgagcgaaagagatgtgagcgaaggagatgagagcgaaggagatgtgagcgaaggagctgtgagcg

SEQ ID NO: 158958 - DNA, 376 bp, Arabidopsis thaliana columbia
catcaaaaaagagcgtctttataaacgcccttcgtcttctttcctggaaatctagtttctttcttccacgaaaacgagagagagcaatttcgatccacacttggaaggctgtaataccggttgctaaagaatgctgagcgccagagtgtccctaacttaccggacgcattaaccggcccctctctttctgtcgcgactgtctatctcttaaaaccaaaacccaccttaaaaaatccccctttgtctccttcgttgcccagacttcggattgggctgaagaaagtggagaatgaagcgtcgctgttgaggggaccgaaaacagtttatgagtcacaagatgtgagccgaggtgatgagagcgaatgatatgcgagcg

SEQ ID NO: 158959 - DNA, 403 bp, Arabidopsis thaliana columbia
ctcatcttctccgaaaacctttcttctctcaaatttctgtgaaaacatgtctgacgacgagcaccactttgaggccagcgaatccggagcttccaagacctatcctcaatcagccggtaacatccgtaaaggtggtcacatcgtcatcaaaaaccgtccctgcaaggttgttgaggtttcgacttccaaaactggcaagcacgggcacgccaaatgtcactttgttgctattgatatcttcactgctaaaaaagcttggagatattgttccatctttccacaattgggatgttccacatgtgaaccgtgttgattaccagttggttgacattactgagggatggttttggggaccatttttaatggcaggggggggcatccaagggataatgtaaagctttcc

SEQ ID NO: 158960 - DNA, 248 bp, Arabidopsis thaliana columbia
agcagctaaaatactgtgttctttgttttttccatcgaaatcgaacaaagctaacatctttgcgttttgaaacgacggcggatgagcatattcatggagaaattgtgattgatcctgaaacatctgttaaggtggtcacatcgtcatcaaaaaccgttcctgcaaggttgttgaagtttcgacttccaaaactggtatggacggtctctctaattgaaaatttgtagctaacgttatgattactgctt

SEQ ID NO: 158961 - DNA, 355 bp, Arabidopsis thaliana columbia
ggcagcccatggtacggatctgaccgtgtcaagtacttgggtccattctctggcgaatcaccgagctaccttaccggagaggtccccggagactacggatgggacaccgccggactttcagctgaccccgagacattcgcaaggaaccgtgaactagaagttatccacagcaggtgggccatgctcggagccctaggctgcgtcttccctgagcttttggctagaaacggagtcaagttcggagaggcggtttggttcaaggccggttcacagatcttcagcgatggagggctcgattacttgggaaaccctagcttggttcacactcagagcattttgtccatttggggccaca

SEQ ID NO: 158962 - DNA, 313 bp, Arabidopsis thaliana columbia
cattttcgaaagccttgagagagagaacacagacgataccaactttcttcaatctcgttgccgcagtataattatctcattcctcggatatatctctccttctgcggcggcgacaagaagctacaagaataaaaagtctgttttctctcttttcaagaaaccacttacttcgaaaatggctcgttctatctctaacgttaagatcgtatctgctttcgtctctcgtgaactctccaatgctatcttccgacgtggttatgcggccacggcggcgcaagggagcgtttcgagcggtggaagaagtggagctgtt

SEQ ID NO: 158963 - DNA, 163 bp, Arabidopsis thaliana columbia
gtcacttccatttcatttctatttgaatcttctcaaagctacacagatctctgaaatcgaaaaagcttgagctgtgttaatggcggaggagaaatgggtggtgatggtgacggcgcaaacttcaacgaatatcggcgtgattaagtattggggaaagagagat

SEQ ID NO: 158964 - DNA, 353 bp, Arabidopsis thaliana columbia
gcagaaactctacgagcaatgcttaaacgctccttgtcctgttcgctacttgaccccccaagagatcgagcgtgaggcgcaacgtgagaagctaggtttgattagtaaagagaagcaacgagatatggagatccagaagaaaggaggagctgcttcaatgggagtcaccgatgagccgatgcgaattgggacgccaggtttggattacatttcgttagggatttttgaagctgaggaattgcctaagtataagcttacggaagaagatggagagagacttgcgaaggagtatagtaaagtcgtgatgagagagcatagaaaggcgtcttccatcttaaactttgctttttgaa

SEQ ID NO: 158965 - DNA, 378 bp, Arabidopsis thaliana columbia
tctctctctgcctcctttcggattcaaatctcagatctagctcaaccatggcgttgctcgtcgagaagacctcaagtggccgtgaatacaaggtcaaagacatgtctcaagccgatttcggtcgtctcgaactcgagctcgccgaagttgagatgcctggactcatggcttgtcgtaccgaattcggaccttctcagccattcaaaggcgctagaatcaccggatctcttcacatgaccatccaaaccgccgtactcatcgaaaccctaactgctctcggtgctgaagtcagatggtgttcctgcaacatctttttcactcaagaccacgccgtcgcaaccatcgctcgtgactccgccgctgttttcgcctggaaag

SEQ ID NO: 158966 - DNA, 209 bp, Arabidopsis thaliana columbia
attacttacctattcacagagatgctccggctttggttgatctagccactgggcaagagatcctggccactggtattaaggttgttgatcttcttgctccttaccaaagaggaggaaagattggtctctttggcggggctggtgatgggaaaactgggcttattatggagctgatcaacaatgttgccaaagctcatggtggaatatct

SEQ ID NO: 158967 - DNA, 345 bp, Arabidopsis thaliana columbia
aaggaaacagggattgctcgcaacctttgttccaaagtatgattattgtgacattggttctggatcacatgtgcatctaagtctttggaaaaacggcgaaaatgtcttcccggcatctaataactcatcttctcatggaatctcttccgttggagaagagttcatggccggagttctatttcatcttccatcaatcttagctattatagctccactcccaaacagctacgaccgaatccaacctaatacatggagtggagcattccaatgttggggcaaagaaaaccgcgaagcaccgttaagagcagcttctccaccaggaactcctgatggtttagttactaa

SEQ ID NO: 158968 - DNA, 156 bp, Arabidopsis thaliana columbia
cacacacccaaaacaaaaaaaaaaacaaaaaaactaaaaagaaagcttcgtctctctctctctatccctcgtgcgccagtctgacaaagacttagagatagattcagagattcagagctcttcaatggccgccggaggaggaggaggaggaggagg

SEQ ID NO: 158969 - DNA, 268 bp, Arabidopsis thaliana columbia
caggtaccgtccggatcctgatcgaccacgcgtccggcttacttcaggcgtcaccgccggccattttttgaggaacaagagccctttggctcagcccaaagttcaccatctcttcctctctggaaactctccggttgcactaccatctaggagacaatcattcgttcctctcgctctcttcaaacccaaaaccaaagctgctcctaaaaaggttgagaagccgaagagcaaggttgaggatggcatctttggaacgtctggtgggatt

SEQ ID NO: 158970 - DNA, 73 bp, Arabidopsis thaliana columbia
cgctattcttattctcttcatcctccttctggagcagagcttagagctccatcatcaaatcttatcaatggct

SEQ ID NO: 158971 - DNA, 339 bp, Arabidopsis thaliana columbia
cctaaacggaaaacttcttacttgcttaatggagtccctactcaggattggttcaccattgatttcaacttcaaggatctgacaaaagttatcttgaaacaaggaatattatcacggtcagcggcattcgatggaaacagttacgggatatcgacagttaaagatatatctacgcagttaaaacctgagggtttttggttaaatgttcagcacgacgcattctatgctcaacataatctgagcatgagcagctttctgctatcaatttccaagactgtgattattgactatctctcttcccctgaggtgaatttctttcggaacattggtaggcgtttt

SEQ ID NO: 158972 - DNA, 337 bp, Arabidopsis thaliana columbia
  unsure (1)..(337): unsure at all n locations
gcgcgatggtgcatgcattcgagtgcatatactacaatacaatgtcggagaaggaccaaatgaaggcgcgctcatgccgtggaccttgtcacagaaaattgccaaactgtacccatttgtgtccggagatatgtcatcctgggcagtgtccattgccagagaagtgtggtaaaaaggtggttgttcgttgcaagtgcctaaccttgaagaaagaatgggtatgccaggatgttcaagcagcccatagggccacaggttctgatcctaaagaagtaccaaagaaccagttcggngttggcctcctcccttgtgattccaactgtaagagcaaactaca

SEQ ID NO: 158973 - DNA, 255 bp, Arabidopsis thaliana columbia
atctctattttcttcctttcccctaagtcttggttcttcttctctctaatacgagaagaaaaaggcgaaaacctcgccaatccgattacgcgaaaaatcaaaggtttttggatatggcgtcgaagcggatcttgaaggaattgaaggatctccagaaggatccacctacatcatgtagcgcaagtcctggtgctgaagacatgtttcactggcaggcaacgataatgggtccttcagagaggccttatgctggag

SEQ ID NO: 158974 - DNA, 394 bp, Arabidopsis thaliana columbia
caaaactctcactatccaacctcaaatcttttccggcgtaagccatcacaaactccaaacccagcgcataatagcctgcctcgactaaccccgttataacgtgcgcatgcgtcgagtacaacacagtcacaccatcctcctccatcctcctcaatatcgccatcgccgcttccactttacccgccctacacgcgccgagcacaagcgcgtcgtagctacgcgaatccggcgaattcccgtcttcttcaatcttacgcatcacctcgctagccgattccaattcgccgtcgtaacaatgcgaagtaaggaagtaattgtacgccgtcacatccatcgaaaccggtttggatctcattgattcaacaaactttgaagctgttttcgattttgtact

SEQ ID NO: 158975 - DNA, 342 bp, Arabidopsis thaliana columbia
cggacgcgtgggtaagagtagagactctctcaatcccggcggcgaagatgaagtacaacccaagagtgacctcttctcgcagaaagaacaggaaggctcatttcacagcttcctccagcgagaggcgtgtgataatgagctctcctctctccaccgatcttcgtcagaagtacaatgtcagatccatgccgatccgtaaagacgacgaggttcagatcgttcgtggtacttacaagggacgtgaaggcaaagttgttcaggtttaccgtcgcaaatgggtgattcacatcgagagaatcacgagggagaaggtgaatggaacaaccgggaacgttgggattc

SEQ ID NO: 158976 - DNA, 197 bp, Arabidopsis thaliana columbia
taaacacagaccctttaaatgtctatcgcatggccaagaatatttctatggagaaaggagaaaggagtgagtcaagctggtgtcaatttaccacacctatcgacggctcataaaaaaggtataactccattcgtactgttttactggacactccacaagatttagaagatgaatatggcggtttttaagcaaggatt

SEQ ID NO: 158977 - DNA, 383 bp, Arabidopsis thaliana columbia
ctgacttcgttggcgacaacaggtcgagcatttttgacgccaaggctggaattgcattgagcgacaagtttgtgaaattggtgtcatggtacgacaacgaatggggttacagttcccgtgtggtcgacttgatcgtccacatgtcaaaggcctaagctaagaagcagatctcgaatgatagggagtggaaagtcatctgttcatccccttttatggtctgaatttgtcgttttcgaataaaatttctttgaacttggaactttttttttttttggttttcttaattctcattcatgtgaggtgatgggagtttgtagaccgatgttttactggaagccctttgtttttggcttttgatatattgagttaacgttatggttttc

SEQ ID NO: 158978 - DNA, 328 bp, Arabidopsis thaliana columbia
cttgtttctccaccattgattgacagaacttctggtgaatatctggcacacaatggcgttcgtacttttgcttgcagtgagactgtgaagtttggccatgtaaccttcttctggaatggcaaccgctctggatatttcaatgaaaagttagaagagtacgttgagattccaagtgatagtggaatatcattcaatgtccagccaaagatgaaagcactgaaattggcgagaaagcaagggatgctattcttaatggcaaggttgaccaagtgcgtgtaaacctggcaaatggagatatggtggggcatactggtgatattgaaacaac

SEQ ID NO: 158979 - DNA, 339 bp, Arabidopsis thaliana columbia
ccttctccctaaacgatgaagattttcgtgaagactctcagtggttcgaacttcgagatcgaagtaaaacctgcagataaggtttctgatgttaaaacggctatagaaactgttaaaggtgcagaataccctgctgctaagcagatgctgatccaccaaggaaaggttctaaaggatgagaccacattggaagagaacaatgttgttgagaacaagttcattggtatgatgtggaccaagaccaaagcttctccaagtggggcatcaaccgcatctggaccaacacctaatgcttcacagccacagacagtatctacacctcaggtttctgctcctact

SEQ ID NO: 158980 - DNA, 142 bp, Arabidopsis thaliana columbia
atcttcttctctgcgtctttgaggcaagaaaaatagagaagatgaaagcacccaacatggagacgataacggagtctctagggaaatcgatgatgaattgttctctgaatgatcggagaagaaaggtcgtcggagatgggtt

SEQ ID NO: 158981 - DNA, 273 bp, Arabidopsis thaliana columbia
aaaacaagtagaaactttaaaacgagagagagagaaagaaatggcgacatcgggaacgtacgtgacggaggttccgttgaaaggatcggcggataaacactacaagagctggaagagcgagaaccatgtcttcgctgacgccattggccaccacatccaaaatgtcgttgttcacgaaggcgaacatgactctcacgggtctatcaggagttgggactacacatatgatggaaagaaggagatgttcatagagaagagagtgatagatgatga

SEQ ID NO: 158982 - DNA, 179 bp, Arabidopsis thaliana columbia
cttttctacagccgcatcatccttctcccttgtgcgatatcgtttgcgtgagatttgtctgaaaaggagctaaccatgggtgaagagaaggttcacatcaacattgtggacattggccacgtcgattctggaaagtcgacaaccactggacacttgatctacaagatgggtgtttttta

SEQ ID NO: 158983 - DNA, 355 bp, Arabidopsis thaliana columbia
gttgagagaagagcgaccatcgagtaagatagtttcaataacaagcttctcagtgattagggggagatgagaaccctgtgggtggtctgtttttgaggctgctggttacaaatggagattggatatgttcgaacatgggaactctacctttgatggccggtatatttttttttttacttaatcttttaaacctatttttctttttttctttctaatcatttttgaccctttcttaccaataccttgaggggagcatttctaatttttggcaataaaaaccgtgaagcatctttaaaagcaggtgggggggaggaactcctgatggtttaattactaactttgagataaagtcttt

SEQ ID NO: 158984 - DNA, 434 bp, Arabidopsis thaliana columbia
cacttattgggtatggtaacaactatggagtagtccctaataggtcttctgctaatagctacttcaatagttttcctcctggttataataataataatctaggctctgctggccggtttagtcctattggtagcggtagaaatgctttctctagcttcgggctcggattgaatcaagaactgaatttgaattcaaactttgatggaaacactcttgggtatagccggatccctggcaaccaatacttcaacagtgcttcaccaaaccgttacaactctccaattgggtacaacagaggagactctgcttacaacccgagcaacagagacttgtggggaaacagaagcgattcctctggtccagggtggaacttgggagtttcggttggtaacaacagaggaaactgaggacttttctttgtggggagcgataac

SEQ ID NO: 158985 - DNA, 356 bp, Arabidopsis thaliana columbia
  unsure (1)..(356): unsure at all n locations
aaaacattcgtctcttcttcttctgacttacgcccttctctattttcctcgtgagatannaaggacggagtgctgctgctccagtatattggtgcgtcatggcgatgcgattcttaagacgttnncaaaatggtttgatcaacgttcacgcacccccactttatttgcgcagaaaggcttgccgggcgagttcatgccgttcaatgtgtttccaagngacgttcaatgtgggttacccagaggctcttctatgtatcaaagacatgcaacctactgaaactacttcaatgctgcatttcaatttccttcgacatcccggatgttggcaacaactgtttcttctatgtttggggggg

SEQ ID NO: 158986 - DNA, 246 bp, Arabidopsis thaliana columbia
gcgaatttgccgcatggacgcttgtctacggctacacaatgaaccatcttgctttcgcgggtgagcgtcttaaacaccgggtcagcgacatcaaatgcgtcaaagagtattttgaagaaaacggtttcgaactcaacaaggatggaggagtcctcaaagtgagtgaagacagtctactgttacaagtgtcggctatgtcggagaaacttgtggctgaatttgcagacttagtttctcaattcgatc

SEQ ID NO: 158987 - DNA, 200 bp, Arabidopsis thaliana columbia
aaagcttccaattttggcaatttcttggatcttaccttcatgtgttgatgtcgcttgtgtctctagcgcatctggtgatggggtgacaacctctgatgtaagaattagcttgtccagagcgacaatcgtagtaagaagctcctggtttctgacaaggaaccatgtctctccttaacggttcgtaaccgatgtaccgtttt

SEQ ID NO: 158988 - DNA, 223 bp, Arabidopsis thaliana columbia
accggaacggaattaacgggccgggccgcgcgaccccacttattgggtatgggaacaactatggaggagtccctaatagggcttctgctaatagctacggcgaatagttttcctcctgtggtaataataataatctaggctctgctggccggttaagtctatttggagcgggagaaatgccttctctagctttgggctcggattgaattattcactgaacttg

SEQ ID NO: 158989 - DNA, 433 bp, Arabidopsis thaliana columbia
gagaaaacgaaaaccctagtttcagaggcatctccagacaccgaaaatggcggaaggactcgttttgaagggcaccatgcgtgcacacactgacatggtgacggcaatcgccaccccaatcgataacgcagacatcatcgtctcagcttcccgcgacaaatccatcattttgtggaaactcaccaaggacgacaaagcctacggtgtagctcagaggcgtctcactggtcactctcacttcgttgaggatgttgttctctcctccgatggacaattcgcgctttccggcagctgggacggcgagctccgtctttgggatcttgctgctggtgtctccactcgtagattcgttggacacaccaaggacgtgctctccgtcgccttctcactcgacaaccgtcagatcgtctctgcatctcgtgaccgtacgatc

SEQ ID NO: 158990 - DNA, 360 bp, Arabidopsis thaliana columbia
tcctgccagtattcatattcttgtctcaaatatttagccatgcatgtgtaagtataaactcgttcatactataaaacttgtcctggctcattaaatcaactatactttattccccaaattctactactcttataaccattctatttctatatttcttaccttcatcttacctcttcttttttccactactacattctttctctctctcttttcacctttctcctccccatcctttttttctctccttatacatcttccccttcctttcttaattctcctttatctccatttttcctcttactatatatttctctgtttgttttacctctatcaaatcccctctctatttttttacctttt

SEQ ID NO: 158991 - DNA, 358 bp, Arabidopsis thaliana columbia
gagctcacatataactatggtgttagctcatatgatattggaactggctttgggcattttgccatttcaactcaagatgtttgcaaactggttgagaacgtccgtgccaagggtggaaatgtgactagggaacctggtccagtcaaaggtggaggcagtgtcattgcgtttgtgaaggaccctgatggctacacttttgagctcatccagagaggtccaactcctgaacctttctgccaagtcatgcttcgtgttggtgatctcgaccgtgccattaaattctatgaaaaggccctctggatgagactctgtgtggatgattgactagtcctgatatcaagtacacttttcgcatgat

SEQ ID NO: 158992 - DNA, 220 bp, Arabidopsis thaliana columbia
  unsure (1)..(220): unsure at all n locations
ggtactttgggtgatatatgggaaactatctctggcagtgatcttgtattgcttttgatgtctgattctactcaagctggtggctatnaaaaaatattctctcacatgaagccaaacagcattcttggtttatcacacgcatttctactagggcatttacagacctcgttactcgatttcccaaagaacatcactgtggtcgctgtatgccctaatggaa

SEQ ID NO: 158993 - DNA, 271 bp, Arabidopsis thaliana columbia
aaatctttctcatgcgttttttactttcttgatttggcaatcctcatgagctgattttgatttcttctttatggttgccgacacgaaagaagaagctaggacacaaaacaactcaaattttgtttggtgagaaaaatcaaccaagaaaatattgattcttttggagcaaggagttggtttgattgaaggaatggtggctagtctacatgctatatacaatggatcttgtcatgtcacctttcctatgaatgatctttggcttgttatttat

SEQ ID NO: 158994 - DNA, 377 bp, Arabidopsis thaliana columbia
aaggaaacagggattgctcgcaacctttgttccaaagtatgattattgtgacattggttctgtgtcacatgtgcatctaaggctggggaaaaacggcgaaaatgtcttcccggcatctaataactcatcttctcatggaatctcttccgttggagaagagttcatggccggagttctatttcatcttccatcaatcttagctattatagctccactcccaaacagctacgaccgaatccaacctaatacatggagtggagcattccaatgttggggcaaagaaaaccgcgaagcagcgttaagagcagcttgtggcccgggaactcctgatggtttaattactaactttgagataaagtcttttgatggctcttcaa

SEQ ID NO: 158995 - DNA, 436 bp, Arabidopsis thaliana columbia
atctctctacctcctcctcattttctcctcttgattcactaattcttcttcttcttcttcttttgcgagacatgactcttccttatcggttctcttccgttagaaaccactcacttctacttaagacttctcatctctgcacacccagatcagctcttgggtggtggttctctcccaaggaatcccctttcttcaggaagaacactgcccaattcctttctcctcagaaacacacttctcttcctctgaaacttggctgccctttagctagtttctcttcttatgcggattctgagggagaagagcaacaccatgctgatcaaccgatacagaaccctcacgaatcttctaccgtttcaaacgaatcagatgggaaaggtaatgcagaagctactggagacttttctggaatggctcaagccctttcacatttttt

SEQ ID NO: 158996 - DNA, 431 bp, Arabidopsis thaliana columbia
aagatattcaacacaaacaacctatgggttaacttgaaggccatcaaaaagcttgtggaagctgatgcacttaaaatggagatgcgtgcgcaaacccaaaggaagttgatggagacaaaggtcttcaactggaaactgcagccggtgctgcgataaggttctttgacaacgctatcggtgttaatgtacctcgctcacggttcttgccagtgaaggcaagttcagacttgctgctcgtccagtctgatctctacaccttagttgatggcttagtcactcgaaacaaagctagaactaaccccttgaacccggtggtgggggttggacctcagataaataatgtggctattttcttgggcctggttatgttcatttctatgattttctttctcctctgcctttatgtgtttggcgtattcatgtttttgctt

SEQ ID NO: 158997 - DNA, 134 bp, Arabidopsis thaliana columbia
cggacgcgtgggcggacgcgtgggaaaaaataatctaatagtttgcttatgagcgtatatataaatgtatcaacttttgggatgcatttgtacttgtagtgtgagtttatcaataaaatttgctttgtgaattg

SEQ ID NO: 158998 - DNA, 245 bp, Arabidopsis thaliana columbia
caccaccaccatacgtctacagctcccattccctaccatactactctccttcgcctaaggtaagcgtacaaatctgcacgcaccgcgcgtgacgtctacagctccccacccccaccatactactcttcttcgcctaagggtaactacaagtctcccccaccaccatacggttacaggtcttccgccccaacataactattttgctgctcctaaggatgactacaagaataacaccccaccgtaca

SEQ ID NO: 158999 - DNA, 404 bp, Arabidopsis thaliana columbia
aaactctcaacacattagacctcgtgactcttgttggcggacacacaataggaactgctggctgcggtctagtaaggggaaggttcgttaacttcaacggcacaggacaacctgacccatcaatcgacccgagttttgtgccgctgattctggctcagtgccctcaaaatggaggcacccgagtggagttagacgagggaagtgttgacaagtttgacacatcgttcctaaggaaggtgacgtcaagtcgcgtggttctccaatccgatctagtcctatggaaggatcccgagacccgagccatcattgaacgtttattaggattacgccgaccatccttgagggtcggaaccgagttcgggaagtcgatggtcaaaatgagtctcatagaaattaagactgga

SEQ ID NO: 159000 - DNA, 248 bp, Arabidopsis thaliana columbia
  unsure (1)..(248): unsure at all n locations
cgaatacattggcgggtaatgtaccaccgaattttaatctcggtgatttgaggggtttaggcggcggattaaacggttgaggcggctcanctatgattgatggaggagatttcgacggttcaaaggcttacaaagacagtaaagtcttcaatatggtgactaatcattatttttacatgcttcctctttaataaactatattcattttttctttctttcatcccatatttcttatacttccaattttt

SEQ ID NO: 159001 - DNA, 305 bp, Arabidopsis thaliana columbia
cttaaacgttttactttgtgctgcactactcaacctcaatggccgcctcaacaatggctgtctcctcccctgccttgggcggggaggccgacaagctttcccccgcggcatctgaagtccttggaagcggccgtgtgacaatgaggaagactgttgccaagccaaagggcccatcaggcagcccatggtacggatctgaccgtgtcaagtacttgggtccattctctggcgaatcaccgagctaccttaccggagagttccccggagactacggatgggacaccgccggactttcacttgacccc

SEQ ID NO: 159002 - DNA, 411 bp, Arabidopsis thaliana columbia
caccacataatccacaataaccagctactaattgttttattgacacacaatactgaacatctctctgccgactaatacaggtagggggtgcaccctacaacaacctactacaaccctacccatcaataaaccaccattgtaatccgcttcttctagcgcccatccttcttaagaactacgaccgcctcaacgtccgtaccggtcactacactccaatcagcgccggtcactctcctctgaaacgtcctcttcaagagtatatcacgtacggtgtcatcaatctcgataaacccgcgaacccttcttctcacgaagttcgtgcttggattaagcgtatcctccgtgttgagaaaaccggtcacagtggtactcttgacccaaaagtcactggaaacctcattgtctgtattg

SEQ ID NO: 159003 - DNA, 417 bp, Arabidopsis thaliana columbia
actcgcttcctgataatcaaatcaaaagcttctctatcaagcttatcgaaaagtcacatcttgtggaagaaacaatggctgcggccaagcaaaccgctaggaaatccaccggaggtaaagctcccaggaagcagcttgccaccaaggcggcgaggaaatcagcaccaaccaccggaggagtcaagaagcctcaccgttaccgtccaggaaccgtcgctcttcgtgagattcgtaagtaccagaagagtactgaattgttgatccgcaagcttcccttccagcgtctcgttcgggaaatagctcaagacttcaagacggatctgaggtttcagagtcacgccggggtagctcttcaagaggcggctgaggcatacctagttggacttttcgaggatactaatctctgtgcttttcacg

SEQ ID NO: 159004 - DNA, 375 bp, Arabidopsis thaliana columbia
cggaacggaaaacccgggacgggccgcgcctaccaacctcgtttcctgataatcaaatcaaaagcttctctttcaagcttatcgaaaagtcacatctttgtgaagaaacaatggctgcggcggagcaaaccgctaggaaatccaccggaggtaaagctcccaggaagcagcttgccaccaaggcggcgaggaaatcagcaccaaccaccggaggagtcaagaagcctcaccgttaccgtccaggaaccgtcgctcttcgtgagattcgtaagtaccagaagagtactgaattgttgatccgtaagcttcccttccagcgtctcgttctgtaaataacttatgactttaaggctgatcttattttaatttatttta

SEQ ID NO: 159005 - DNA, 221 bp, Arabidopsis thaliana columbia
caaacctttaggaaatccaccgcaggtaaagctcccaggaagcatcttgccaccaatgcggctatgaaatcatcaccaaccactctatgagtcaagaagcctcaccgttaccgttcattaaccttcgctcttcgttagattcttaattaccattatagtacttaattttttatcctcatgctttctttcctacttctcgtttcacaaatttctcaattctt

SEQ ID NO: 159006 - DNA, 207 bp, Arabidopsis thaliana columbia
gagaaaacgaaaaccctagtttcagaggcattttcagacaccgaaaatggcggaaggactcgtgttgaagggcaccatgcgtgcgcacactgacatggtgacggcaatcgccaccccaatcgataacgcagacatcatcgtctcagcttcccgcgacaaatccatcattttgtggaaactcaccaaggacgacaaagcctacggtgt

SEQ ID NO: 159007 - DNA, 451 bp, Arabidopsis thaliana columbia
caaaaccctaatccgaccggagccatggcggaggtcgacatctcacactcgaagaagaagaagcaagacaaaacggagaacgatgccgccgacaccggagactacatgatcaagccacagagtttcactccagccatcgacacttctcagtggcccatcctcctcaagaactacgaccgcctcaacgtccgtaccggtcactacactccaatcagcgccggtcactctcctctgaaacgtcctcttcaagagtatatcaggtacggtgtcatcaatctcgataaacccgcgaacccttcttctcacgaggtcgttgcttggattaagcgtatcctccgtgttgagaaaaccggtcacagtggtactcttgacccaaaagtcactggaaacctcattgtctgtattgaccgagccacacggcttgtgaaatcgcagcaaggtgcgggtaaag

SEQ ID NO: 159008 - DNA, 460 bp, Arabidopsis thaliana columbia
ggactcctccaaactctcatctctctctctttgcctcttcctcatttgcattatctatctcccccaacattctctcgcatgcggctcttgcaacccacggaagggcggaaagcactcccctaaagcccctaagctaccagttcctccggtgaccgtccctaagctaccagttcctccggtgaccgtccctaagctaccagtccctccggtgaccgtccctaagctacccgttcctcctgtgaccatccctaagctacccgttccaccagtgactgtacctaagctacccgttcctcctgtgaccgtacccaagctacccgttcctccagtgaccgtccccaagctacccgttcctccagtgacagtccctaagctacccgttcccccggtaactgtacctaagctacccgttccttcagtgaccgtacctaagctaccccttcctccgattttaaggcta

SEQ ID NO: 159009 - DNA, 184 bp, Arabidopsis thaliana columbia
gccgcgctttttggccgaggaaggataaagagatacgccatgggaagaagacctgcgagtgtgtaccgtcagatcaagggtgggccatacccaaagtctcgctactgtcgtggtgtgccagatccaaaaatcaggatctacgatgttggtatgaagaggaagggtgtatttttttaataattct

SEQ ID NO: 159010 - DNA, 252 bp, Arabidopsis thaliana columbia
cttttctacagccgcatcatccttctcccttgtgcgatatcgtttgcgtgagatttgtctgaaaaggagctaaccatgggtaaagagaagtttcacatcaacattgtggtcattggccacgtcgattctggaaagtcgacaaccactggacacttgatctacaagttgggtggtattgacaagcgtgtgatcgagaggttcgagaaggaggctgctgagatgaacaagaggtccttcaagtacgcatgggtg

SEQ ID NO: 159011 - DNA, 220 bp, Arabidopsis thaliana columbia
tctcaatctttctctcctgcgttttaatttctctcggattgaaatcatccatggctgccaccgcgaaccgagaagctccctcagcgcaaatccgccgtcgatggacttactgagatgagcgagaatgagaagagtggattcatcaacctcgtttcacgttacctcagtggtgaagcccagcacattgaatggagcaagaaccagacacctactgaggtaa

SEQ ID NO: 159012 - DNA, 299 bp, Arabidopsis thaliana columbia
acaatttttgtctctttggctatatatattcaaacattgtttgaacagaacacaaatcaacacatcgcacacatctttatgttctgtaaggtttgaaacaaagatcaatgaccgggactggattgtttgctgagattctttatataaaagtatacatatactacccttatgttttttttaaaacttattattcaaataatattttttcctttattaactcacttcatatttattctctatattatttttttattttttcctttatttttttttttttcttttttttctattcttttatt

SEQ ID NO: 159013 - DNA, 164 bp, Arabidopsis thaliana columbia
  unsure (1)..(164): unsure at all n locations
atacccggtcgaccacgcgtccgatcggagcttcatgagagatccaaagagagagattgttgatgtctcacagtcacggaaacgcttgctcggtgaacgatccacggcagcngtgtcgacagaaaaaccttacattccacagcctgtagcgcccgaagatcttt

SEQ ID NO: 159014 - DNA, 203 bp, Arabidopsis thaliana columbia
atggcttcgtcatctacaagtatctctctccttctcttcgtctctttcattcttcttctcgtgtaactcgcgtgcagagaatgcgtccagtggatcggatctcgacgaagaattggctttcctcgccgcggaggaatccaaggaacaaagccacggcggcggttcggaccacgaggaggagcgcgatcatcaacaccgctact

SEQ ID NO: 159015 - DNA, 286 bp, Arabidopsis thaliana columbia
gcaaaatacggtaaccagagacaaggtagaaaccgaaatgattgcgcgtggtcgtcatgatccttgtgttgttccacgagctgtgccaatggtggaagcaatggtggctctagttcttgtggatcaattgatggcgcaatacgcacaatgccatttgtttccaataaatccagagttgcaggaacctttccagatagagcagcctcttaatgctactgctttgttagcaaatctcgagaagataatagagtataaatatgtgaaatttctttttttttgattttat

SEQ ID NO: 159016 - DNA, 403 bp, Arabidopsis thaliana columbia
cttcagcaatcacactctctctttgttcgagtaccaacaatggcccttcaagctgcttctttggtctcctctgctttctctggtggcaaagatgcgaagttgaatgcttcttcatcatctttcaaggactcgagtctttttggtgcctccattaccgaccaaatcaaatccgaacatggatcttcctcgttaagattcaagagagaacaaagcttaaggaatctagcaaatcgagcccaaaccggtgctacttcaagccctacagtcacaaaatccgtgggcggcaacaaaacgtctgggaaaggaaatgaggcgggcccttatgcctctgttggattaatacatcagagacgaaaaagattgacctgcccatgtgccatgatatgttcatgccggttaaggg

SEQ ID NO: 159017 - DNA, 328 bp, Arabidopsis thaliana columbia
cagaaaaggggagaagcaaaaatggtttctctgaagctccagaagcggctcgccgcatcagtgatgaagtgcgggaagggcaaaggttggctcgatcccaacgaaagctccgacatctccatggccaattcccgccaaaacatcaggaagcttgtgaaggatggtttcatcatcaggaagccaaccaagattcactctcgttccagagctcgcaaaatgaagattgccaagatgaagggtcgtcactctggatacggtaagaggaagggtacccgtgaagctaggttgccaacaaaggtactgtggatgcgtaggatgcgtgttctta

SEQ ID NO: 159018 - DNA, 267 bp, Arabidopsis thaliana columbia
ccactcttctagcatcttgaagcttaaatctcatccgtccgatcatgccgatcagaaacgtcggcattggccgtgcgggtgggggcacccgtcccgatgccttaaaggcggcgttggctgagttcatttcaactttgatctttgtcgtcgccgggtcaggctctggcatgtctttcaacaagctcactgaaaacggagccaccactccttctggtctcgtaactgctgcagtggctcatgcctttggactcttcgtcgctgtcttat

SEQ ID NO: 159019 - DNA, 378 bp, Arabidopsis thaliana columbia
gtttgaaacattcgaactctgcacgctcttcttcccttgctcctttctcccaccaccatgtaacaccataccttccttcatgcttcttcatccaattccaattttaaaatcagtccccttcgcttccttctcaccttcttcttctttcatcatcatggccaatatcactgttcacctatttcccatgtccacccccacaatccccgtcctcactactctttactaaaaaaatctccagttctagctcatccccgtcgatatgagagccggtgcccacaagcaagaggcccaccttgccctcaaccccttcggtcaaattcctgctctcgaagaccgtgatttgacgcttttcgagtcaagagccatcacacaatacct

SEQ ID NO: 159020 - DNA, 408 bp, Arabidopsis thaliana columbia
  unsure (1)..(408): unsure at all n locations
gatgctgcgtgtagcagggaggaggcttttctctgtctcgcagagatcttcgactgcgacctccttcgtcgtctcccgtgaccataccctttccgatggtggcggcgactcctcttcagctcccagatccctcccctctgcagatctctcatcttaccaccgtagccttatcagaggcttctcttctcaagtccttgctcaaggaaatgagataggttttggttcagaagtcccagccacagtcgaagctgtcaaaacgcctaactcaaagattgtctatgatgaccataaccatgagcgttacccacctggggaccctagcaagcgtgcattcgcctattttgtcttgtcgggtgggaggtttgnttatgacctttgtccttcgtctttcttgttttgaaacttatt

SEQ ID NO: 159021 - DNA, 392 bp, Arabidopsis thaliana columbia
tctcaacatccaaaactctccatcactgcttctcctccattggtccatacccaaacaaccaaacccatctctgtaaaacggaaaatcataactctagcagctccagagacactcaccgctgaaacagtcaccggaattgatacttccgacaacactccacaacaaaccataaaagggggggaagccggatgagaaatcaagaggggaactcaggtttggggggatggagaagaacataggattaggatgggaccaacatgtacctggacatggcacaatcccactaagtctttactttttctggcctaggaaagaagcttgggaagagcttaaggctactcttgaagctaaaccatggatctcttaaaagaagatgatcattcttttaaacc

SEQ ID NO: 159022 - DNA, 350 bp, Arabidopsis thaliana columbia
gaaacttttgacaacttgtagtattaagatccaacttcaaaccaacggcaattgcattttcagctaaaagcaatggagtcatcacttccccaagttgctgcacttgatcgttcaactctactcaaagctttcgacgagactaaaaccggcgtgaaaggccttatcgacgccggaatcacagagattccttcgatatttcgtgcacctccggctactttaacaagtccaaaaccaccttcctcctctgatttctccatccccacaatcgatctcaaaggaggtggcacggactcgatcacgcggcggaacttggtggagaagatcggagactcggcagagaaatggggatt

SEQ ID NO: 159023 - DNA, 209 bp, Arabidopsis thaliana columbia
ataaaacaaaagaacagcgttcgccgagagatatacatactcggatcagtcgtcaaaagctttggaatttgatactttggagggttggagaatcttgaaaatcagtcatgggttctggaaaagagcgtgacactttcgtctacctcgctaagctctctgagcaagctgagcgttatgaacaaatggtggaatcaatgaaaaggtgttgc

SEQ ID NO: 159024 - DNA, 202 bp, Arabidopsis thaliana columbia
ccatgattctgcaaaaccaccaggatctgagcctatcttgtttcgccaacctacagctggcttgcaatttcaacagggattggtgaaggatactgatgagagagcatgtgcatacattgcgggaccagcgccaaatcgatggggctttacagttgacggggatgaccttttttagtctgttagcatacttcttgttgctcat

SEQ ID NO: 159025 - DNA, 430 bp, Arabidopsis thaliana columbia
caaaccctaaaccatctttctcaacatggcgcttcttcacaagcaaaacatttcctttgtgagactcctcctcctcgggctgcttgccgtctcttatgcttgtgattgtagtgaccctcctaaaccatcaccacaccctgttaaaccgccaaaacatcccgctaaaccacctaagccccctaccgttaaaccacctactcacaccccaaagcctcccactgtgaagcctccacctccatacattccatgccctcctccgccctatactccaaaacctccaaccgtgaagccaccaccacctccctacgtgaagccaccaccacctcccactgtgaagccaccaccacctccttacgtgaagccaccaccaccccctaccgtgaagccaccaccaccacccacgccgtatactccaccaccacccacgccg

SEQ ID NO: 159026 - DNA, 266 bp, Arabidopsis thaliana columbia
gaaattttgtctctctcgccgccttgcgaaaagcattttcgatcttactcttaggataaaaaaatgtcgacagttggagagcttgcttgcagctacgctgttatgatcctcgaggacgagggtatcgctatcacggctgacaaaatcgcgaccttggtgaaagctgctggtgttagtattgagtcatactggccaatgctattcgccaagatggctgagaaacgtaacgtgactgatctcatcatgaacgttggtgctggtggtgg

SEQ ID NO: 159027 - DNA, 339 bp, Arabidopsis thaliana columbia
  unsure (1)..(339): unsure at all n locations
cgcaaaatctcaacgaagctcgaaaantgattcatgatactcaaggnaagacggtgatggaagttggtggcgatggcgttgccgtgggggcactcatcaatcctcccgtcaattctctatccttcgacgtgctatacaatctcaaaagtaattacgaggtggctcttatcctgattgatcttaaaatttatttttattatcttaatccaaatgtttaatacttccttttttatttaatcatattatctttttaatctatattctaatctcttttatattaattttttttattaatcttgtttttctaatttttattattcaattttcttttctctatta

SEQ ID NO: 159028 - DNA, 212 bp, Arabidopsis thaliana columbia
gcttacctcaaacctcagtctccgttgactactgagactcgtcgacctctgatccgcttcttcgacgtgatacggatctacttgcgagcttgatgatggccggaggtaacgtacggtttctggttttgatactcgccgtagcaatttgcggtgctgcttctgttttccagccgatcttagactcttaccgatctgtggcttttgatgtgttt

SEQ ID NO: 159029 - DNA, 404 bp, Arabidopsis thaliana columbia
agattctggaaaaatgggagcaattcaagctcgtcttcccttgttcctttctcccccttctatgagacaccataccttcctgcatgcttcttcatccaattccaatttcaaaatcagatccaacaaatcttcttcttcttcttcttcttcgatcatcatggccagtatcaaggttcacggagttcccatgtccaccgccacaatgcgcgtcctcgctactctttacgagaaagatctccagttcgagctcatccccgtcgatatgagagccggtgcccacaagcaagaggcccaccttgccctcaaccccttcggtcaaattcctgctctcgaggacggtgatttgacgcttttcgagtcaagagccatcacacagtacctagcagaggaatacagtgagaaag

SEQ ID NO: 159030 - DNA, 441 bp, Arabidopsis thaliana columbia
aacttgtgggccatccaaatgtctcacttgagatcttcttcacaagcaaaacatttccttagggggctgcttttgggatgcctggtgttcatgttgacggcatggatgtcttgaaagccaacaaagcctctaaatattcttcttcttcaactataatagccgctaaaccacctaagccccctaccgttaaaccacctactcacaccccaaagcctcccactgtgaagcctccacctccatacattccatgccctcctccgccctatactccaaaaccttcaaccgtgaagccaccaccacctccctacgtgaagccaccaccacctcccactgtgaagccaccaccacctccttacgtgaagccaccaccaccccctaccgtgaagccaccaccaccacccacgccgtttacttcatcaccacccactctgtatactcttc

SEQ ID NO: 159031 - DNA, 254 bp, Arabidopsis thaliana columbia
attcgatgtcgttcgaggaagaagaagaggaggaaacattcgagcatacacttctcgtggtgcgtgaggtctccgtttacaagagcccgccgcgaaccacatccggcggatacaagtgcggcgaatggcttcaatccgataagatctggtctggtagactccgcgtcgtatcgtgcaaggatcgatgcgagatccgcctcgaggattcgaattccggggatcttttcacaacttgttttgtggatcctggactt

SEQ ID NO: 159032 - DNA, 307 bp, Arabidopsis thaliana columbia
gaaaccctaatttcttcacaaagcaaaacacagaaaaagccattctttttgccccttgagtgctttcagctcttcccacaaggttacagaagtaatgtcacgtgtgtacgtcggaaatttggacccgcgagttactgagcgtgaacttgaggatgagttccgtgcctttggagttgtcaggagtgtttgggttgcccgtagaccacctggttacgcttttctagatttcgaagatcctagggatgcccgtgatgctatcctggctttagatggcaagaatggctggagggttgaacagtctcacaat

SEQ ID NO: 159033 - DNA, 158 bp, Arabidopsis thaliana columbia
gcggagaaaattgaaatggagctcagcttgagcacttcctccgcttctcctgcggttttgaggagacaagcttctcctcttgttgacaagcagcaagtgctcggcgtcagctttgctttcgtgctcaaacctggaggaggagctcttctatttccttt

SEQ ID NO: 159034 - DNA, 286 bp, Arabidopsis thaliana columbia
  unsure (1)..(286): unsure at all n locations
ggagagacttgttggtgtctctgaggaaactaccactggtgttaagaggctttaccagatgcagcaaaatggaactcttttgtgtgccctgccattaacgttaacgactctgtcaccaagagcaagttcgacaacttgtatggttgccgtcactcactccctgatggtctcatgagggccactgatgtcatgatcgctggaaaggttgctgttatctgtggatatggtgatggtggaaagggttgtnttgttgtattaaaattgttggggtatattatttttttta

SEQ ID NO: 159035 - DNA, 222 bp, Arabidopsis thaliana columbia
  unsure (1)..(222): unsure at all n locations
caaactgcgagttgatggcaccgaccaacaacttatacatctcgatagagaagcttacgctgcgattggttgaggaaggagggagtgacncanccattcaagactgcgaacaaatcacgaggtctgagttctcgccaatttatagccatcttttgcttcttaaacaaaagcaattccttttcatttatacactcacaccatttgacacagataaagcactat

SEQ ID NO: 159036 - DNA, 218 bp, Arabidopsis thaliana columbia
cgatcacaaagcacttcacgagacattttcagcctttggtcccattctatcttgcaaagtggccggtgatccctctggtcaggcgaaaggctatgggtttgtgcagtacgacactgatgaagcagctcaaggagccattgataaactgaatggaatgctttttaacgataagcaagtttatgttggaccctttgtttacaaactgtagagagatcctt

SEQ ID NO: 159037 - DNA, 387 bp, Arabidopsis thaliana columbia
gacttttcctttgcctctgcgtggcatccggatggagtcactttctctacaggaaaccaagataagacttgtcgtgtatgggacatccgtaacctatctcagtctgttactgtcttgaagggtaacctgggagcaatccggtcaatccgctacacatcagatggaaaatacatggccatggctgaaccggctgactttgtccatgtctatgatgtctcaaacgggtatgaaacagagcaggaaatcgacttctttggggaaatctctggaatatctttcagccctgacacagaggcgctatttattgggggatgggaccgcacttatggtagccttcttgaggttggacggtgcaagaactaattcttaccttgtcttcgatcttta

SEQ ID NO: 159038 - DNA, 207 bp, Arabidopsis thaliana columbia
tcttcatcttcaaagactgcgccttttagctcagtgtttaaaggttcgagcttcggaaactattgcagcattccctaacctgaacgtgtgatgctggattgaagaagctcgacgagcatcttctcactcgcagttacattactggataccaggcttcaaaggatgatattacctgttttgcaactcttgcaatttccccatctttta

SEQ ID NO: 159039 - DNA, 253 bp, Arabidopsis thaliana columbia
agaggctaaaatggtttcgttgaagctccagaagcgtttcgcatcctcagtactcaagtgcgggaagagaaaagtatggctcgacgccgaacgaaggaagtgatatctccatggccaattcgcgtcaaaacatcaggaagcttgtgaaggatggattcatcatcaggaagccaacgaagatccactcacgatccagggcacgtcaattgaatatagccaagagaaagggacgtcactctggttatggtaagag

SEQ ID NO: 159040 - DNA, 140 bp, Arabidopsis thaliana columbia
gaggcgaattcgaatcgagaagatggtgtctgggtcagggatatgttcaaagcgtgtcgttgttgacgcacgtcaccatatgtgtggtcgacttgcttcgatcatagctaaagagttgctcaatggacagagtgttgttg

SEQ ID NO: 159041 - DNA, 270 bp, Arabidopsis thaliana columbia
gcagctgcaaacatggcaagaggattgaagtattcatctaaagaggctcaatgctcctaaggagtggatgcttgacaaacttgggggtgccttcactcccaaaccatcttctggacctcacaagtcgagggagtgtcttcctcttgtcctgatcatcaggaacaggtttaatttttctttgacttaccgagaacatatctctaccctttttcagacgcatatctctccttattactaaaattttttttaccatgcatatccttttctttt

SEQ ID NO: 159042 - DNA, 342 bp, Arabidopsis thaliana columbia
ggaagaacgatctcagtgagaggacgatcacttcgccgtcgcagtcatgggtcgaatgcatagtagaggtaagggtatctcggcatctgctttgccgtacaagcgttcatctccgagctggctcaagacaacccctcaagatgttgatgagtccatctgcaaatttgcgaagaagggtttgaccccatcgcagattggtgtcattcttcgtgactctcacggaattccacaggtgaaaagtgttactggaagcaagattctcagaattatgaaagctcatggtctagcacctgatatccctgaggatctgtatcacttgttcaagaatggcttgtttctatc

SEQ ID NO: 159043 - DNA, 306 bp, Arabidopsis thaliana columbia
gaacaacaacattctcagggaaacttggaagaagagaagatgatgactatgatgatgcaaacaccgaaaaatgttgctgcaatgattccaatcccgtcgacaccagcaacagtctctgtcccaatgcacaccgcaccaacaccattcaccaacaatgcaagattgatgtctgaaaagcctgaagttgttgagtactcgtttgaggaacgaagactcgccttcatgctacagtctgaatgtcgtttggtttgatcatcaatccgttggattcaacttaagttctttaatttgtaaaactcaaattga

SEQ ID NO: 159044 - DNA, 363 bp, Arabidopsis thaliana columbia
gtaaaaccctacatttctccgcccgcctttgatttctccccggccgttcccgccgccggtctgcgatttaaccaggattgagtgtgattccttctttttgtgctcattgctgtcggattctctaccggcgttacatcgaccagccagactcttccccatttgactgctttactgattcaatcgctcttttagattctggaagttgtgactcagtatctccccttcaacgaattaacatcctgcgcaagaatgtctattgcatcatcacttactttagccacactttgtggcgcctcaagttttttctaatacagtatccctgcagctctggaatacccctatcagatcttaccagcccctttt

SEQ ID NO: 159045 - DNA, 145 bp, Arabidopsis thaliana columbia
atgagaaggagcttatgggtaaacctctaatgaagcgtgttatgcagacttggctccctgcaagtactgcactacttgagatgatgatctttcatttgccatctccccacactgcccagaggtaccgtgttgagaatctgtatgt

SEQ ID NO: 159046 - DNA, 485 bp, Arabidopsis thaliana columbia
atcacaacaaagacccacaaaattcttttttttttctttttcaaatcccattaataaaaaccttaccaacccatgaagtaaagtaaactcctttcttataaactctcttttgttctttttttttcaacttcatcagtctcttaactcaccatcacaagaacaagaaagatgaagagaggatacggagaaacatgggatccgccaccaaaaccactaccagcttctcgttccggagaaggtccttcaatggcggataagaagaaggctgatgatgacaacaacaacagcaacatggatgatgagcttcttgctgttcttggctacaaggttcgatcttctgagatggctgaagtagcacagaagcttgaacaacttgagatggtcttgtctaatgatgatgttggttctactgtcttaaacgactctgttcattataacccatctgatctctctaactgggtcgagagcatgctttctgagctgaa

SEQ ID NO: 159047 - DNA, 229 bp, Arabidopsis thaliana columbia
gaaatgcctctgtgcctgccatggaaatgaccaatggttcgacaccaactaccattacatcgtccctgagttgggccctgaggttaacttctcttacgcatcccacaaggcggtgaatgagtacaaggaggccaaggctcttggtgttgacaccgtccctgtacttgtagtcctagtctcttacttgctgctttccaaggctgccaaggttgatgacaagtctttcgaa

SEQ ID NO: 159048 - DNA, 195 bp, Arabidopsis thaliana columbia
agtctctctcttacattttgaaaccctaatttctcttcttttccccaaaaaaaaatgtctgaagttgagtaccggtgctttgtcggcggccttgcctgggccaccaatgatgaagatcttcaaaggacgttctcacagtacggcgacgcaatcgattctaagatcattaacgtccgtgagagtggataatcaagg

SEQ ID NO: 159049 - DNA, 230 bp, Arabidopsis thaliana columbia
gaagaagtttaagaagcagagtgtataacaagtaacatggactcaagagccttacccttctccgttctcgtcatcctcattgctacggcggtgttggccaacgcttacactcctcctcctcctcctccaaccaccgcataccctgccgtgaaaaccgtggaagcggcagcggaaggaatggtgtactgtcaatcctgcgacaaattcggatcatggtcattggccggagc

SEQ ID NO: 159050 - DNA, 124 bp, Arabidopsis thaliana columbia
gtgaattcaaatatttcttgtacaagcacattcagtttgagattctatacaataaggaccgtgtgatcgagatcagtgctagaatggatcctcattcgcttgtggatctcactgaggataatga

SEQ ID NO: 159051 - DNA, 353 bp, Arabidopsis thaliana columbia
caaatcttatcaatggcttcctcactcgtctcatcttttcaacccaggtcagcatttttgggagatagaaatgtgttcaaggtctcaagcacaccttttgctcaagtgggttactccagtaagaccattgagtgcaaagaatcaaggataggaaagcaaccgatcgctgtaccttccaatgtaaccattgcattggaaggtcaagacttgaaagtgaagggtccattatgagagctggctttaacttacccacgcgaagttgagcttacaaaggaagaatcctgtttcttaagggtcaaaaaaaccggctaaactagatgagccatccaaatgcacggtctttttaggacgct

SEQ ID NO: 159052 - DNA, 314 bp, Arabidopsis thaliana columbia
gcagcggaggcggtggtggatactcaggaggcgttggcggttgatactcctcctgtgaaatcggctcctgctccatattattacgactccgcaccttctccggtgaaatccccaccaccaccatacctttacagctctccaccaccaccggtaaaatctcccccacctcctgtctacatctacgcttctcccccaccttccacacattactaggctcatcaaattcaacaaattttccccattattcaagttttcttttaaaaaatgaaattaaggaaggggcaaagtcaaagagaagaagaagtgtaccaaat

SEQ ID NO: 159053 - DNA, 118 bp, Arabidopsis thaliana columbia
agaaggtttgctatattatctggacctactatacctataattggtgaaggtgatgaagaggctaatgataggtatgtagagcaacgtggcggcaagtgccgaatctgctgtataggaa

SEQ ID NO: 159054 - DNA, 453 bp, Arabidopsis thaliana columbia
cagaaagcactagaagaggcggaagctcttaagaagcttactgctagacaagaacctgtagtggattcaaccaagtacactgctgctgacgtgcgcattacagaccagaagctgcgtctatgtgacatatgcggagcatttttgagcgtctatgacagtgatcgtcggttagctgatcattttggagggaagcttcacttgggttacatgctgatccgcgacaaattggcagagcttcaggaggagaagaacaaagttcacaaggaacgggtcgaagaaaggagatcaaaggagaggagtagagagcgagaatcaagtaaagacagagacggaggagataaccgtgaccgaggaagagatgttgaccgcaggagtagagatcgtgacaggcaccatgaccaccgagaacatgacagaaactataatcagtcacgtggctattgactcaagaag

SEQ ID NO: 159055 - DNA, 67 bp, Arabidopsis thaliana columbia
cgtaaagagtcgttacctagggccctattgtacataatcgtccagtgtttgagtgcaatttgtggag

SEQ ID NO: 159056 - DNA, 336 bp, Arabidopsis thaliana columbia
atttcaatccttctccgtcagattatctcctcggccacgatgtctctccgccgcactatcctcgatctccaccgtcaaacccagagagccactctctcaaagtctctacctttctcgatgagtcacatctcctccgcatccgccaccgccgccgtgagaaacccactgggaagagacctctcttcaatccccttcgcacacgcccggagactgaaacctcgaccaaccactctcgtcaccgatcgctcgagttcgtcctcaattgggcaatttgaacttaacaaggcagccaaattctcgcgtcaatcggcttctcgaggttacactattggctct

SEQ ID NO: 159057 - DNA, 64 bp, Arabidopsis thaliana columbia
gaatacaaacaaaaatggttttgcaaaagctttttctcattgggctagcttttgcttcctgacc

SEQ ID NO: 159058 - DNA, 200 bp, Arabidopsis thaliana columbia
caactttcttcaccaaatcgattcttcttcaaccatgtcttccttcacctccaaattcgccgatgagctgattgctaacgctgcttacatcggaacacctggaaaaggtatccttgcggcagatgaatcaactggtactattgggaaacgtctcgctagcatcaacgttgagatcggtgaattccaacagacgtgctttt

SEQ ID NO: 159059 - DNA, 288 bp, Arabidopsis thaliana columbia
tgagaaggctattcagaattggattcagtatgagggagacgtttttagattccctggtggtggaactcagttccctcaaggtgctgataagtatatcgatcagcttgcttccgtgatacctatggagaacggatctgttaggactgctttggacactgtttgtgttgtttcaagtcttttaactaacttatagttctttattgtgtttgcattcaatatcttatctatttattaatttcttttgttattgttacttatcttttttttttaaaattatttttgttaatt

SEQ ID NO: 159060 - DNA, 144 bp, Arabidopsis thaliana columbia
gcttgcttttggatgcagaaatattacatggcttcttcaagagaattggttcggatagttaggatccagaagtctccaatgattgatctttttggagaatcaattgctggtgctgccacaatatgaggatttggccagtttata

SEQ ID NO: 159061 - DNA, 265 bp, Arabidopsis thaliana columbia
atgagaactgcctgtcaaatgagcaaggccgagtgttagcagcaaaacttggtgtgacagatcttttctgggactgggacttgccgagaaccagagaaggattctaccggttccaaggctcggtcgcagcggccgtggtccgtggctgggcctttgcacagatcgcagacatcatctggatggaaacggcaagccctgttctcaatgaattgcacccaattcgccgaaggtttcatgttccaagacatccggtggtctatgctcg

SEQ ID NO: 159062 - DNA, 99 bp, Arabidopsis thaliana columbia
cttcaatcataagcccacccacttcgattaccatcttcgatcgccagagacagcgagtttcagatcaaagatgtcggcgacgcttacaggagcggcaac

SEQ ID NO: 159063 - DNA, 199 bp, Arabidopsis thaliana columbia
gcgaagacgctacgaaatcggatcttctctaggtctggatctacatccgccggtccgagtcggtgggcgacgccaggtcacgaggagcgacctaagggttactttatgaaccgtactcctccggcaccaggacagtcgcgaaaaagggaagattgggagcttcctttgttcattacctgttatcttacaattgttattc

SEQ ID NO: 159064 - DNA, 348 bp, Arabidopsis thaliana columbia
cgcgaagttttcaacagattcgccggagaatcttcgaatcaacggcggagaaatggctctatcacgcctctcatcacgatccaacatcatcactcgtcccttctccgccgccttcagccgattaatctcaacggacacaactccgatcacaatcgagacttcgcttcctttcacagctcacttatgtgatccaccgtcacgctccgtcgaatcatcgagtcaagagcttctcgatttcttcagaaccatggcgttgatgcgacgtatggaaatcgcagccgattcgctttacaaagcgaagctaatccgaggggtttgttatctttacgacggccataaagctgtagc

SEQ ID NO: 159065 - DNA, 170 bp, Arabidopsis thaliana columbia
ggaaacagaaccacgccatcttacgttgctttctctcgactccgagaggttgatcggtgacgcagctaagaatcaggtcgccatgaaccccgttaacaccgttttcgacgctaagaggttgatcggtcgtcgtttttctgactgttctgttcatagtgacatgatattgt

SEQ ID NO: 159066 - DNA, 108 bp, Arabidopsis thaliana columbia
aaacacggcaaggctcagagccagaactctcttgttgagaaagatcgacggttcgagatctttaaagacaatcttcgtttcgtcgatgaacataacgagaagaatctt

SEQ ID NO: 159067 - DNA, 307 bp, Arabidopsis thaliana columbia
cggacgcgtgggttaaaatccttttacgagagggttttatcgaaaacgtaaggaaacatcgcgaaaacaaccaatattttttgattttaaccctaagacatagacgaaataagaaagaatcctacaaaacgattttaaatttaaagagaataagtcgaccgggtctacgaatctattctaactctcaacgaattccacgaattttaggcggaataggaatcgtaatcctttcgacttcttaagggataatgacagaccgagaatctcgtctaaaatgttacgacggagaaactttgtagttttatat

SEQ ID NO: 159068 - DNA, 315 bp, Arabidopsis thaliana columbia
gcaaaaccctccagcgccgcttggatctctctctcctctgttctctcttcccttatcttcttcttatacccttcgaccaacgaagaaccctagaaatcgattaacaagatgaatagggaaaagttgatgaagatggctaacactgtccgcactggcggaaaggggacagtaagaagaaagaagaaggctgttcacaagaccactacaaccgatgacaagaggctccagagcactcttaagagagttggagtcaatttcatttccgccatttgagaagttaacatttttaaggttgatgtaatcattctattcatt

SEQ ID NO: 159069 - DNA, 248 bp, Arabidopsis thaliana columbia
gccgattcttctattagccgccatggtgaagtactcgcaagaacccgacaatcagaccaagtcttgcaaggctagaggatccgatcttagggttcacttcaagaatactagggaaacagcgcacgcaatcaggaagctaccattgatcaaggcgaagaggtaccttgaggatgtgatagctcacaagcaagcaattcccttcacacgtttctgcagaggtgttgggagaactgctcaagctaataaca

SEQ ID NO: 159070 - DNA, 252 bp, Arabidopsis thaliana columbia
gtttcagatataggcagattctcacatttgcaaacatgacgactcagatcagcaagaagagaaagtttgtagcggacggtgtgttctacgctgaattgaatgaggttcttacaagagagctagcagaggatggttactctggtgttgaggttagggttacttctatgaggactgagattatgattagagctacacgtacttatattgttctcgtttagaatgtggggtttttttttctttttaattcttttt

SEQ ID NO: 159071 - DNA, 241 bp, Arabidopsis thaliana columbia
gagaagtttgcttaacgcggaacatatatacactcaagtatttaaagaagatcacgcgcggcgattgattaagcgagaacgacgctacagttaaccaaaaccaaatctagatctgtgcctctccggtcacggtgcttctcaccggtggccggagagggcttctcccttttcttctttcctctctcttatctcctctgcctttcctttgaagctttggtggtgttctatactaggcttgatt

SEQ ID NO: 159072 - DNA, 174 bp, Arabidopsis thaliana columbia
aattattcaaagcagataaaaaaaaaatggctcaagcagtgacttcgatggctggcttacgtggagcatctcaggctgtccttgaaggaagtttacagatcaacggctcaaaccgtttgaacatctcaagagtctcggttgggtctcatagaaccggacttgtgatcagggctc

SEQ ID NO: 159073 - DNA, 108 bp, Arabidopsis thaliana columbia
attttctccgagtaactgagagtttgctgcagctatggcgatgagctttcatcgtcttcctcaggcattgcatatgatacccagaaaccctacgcaatcatcgaagaa

SEQ ID NO: 159074 - DNA, 121 bp, Arabidopsis thaliana columbia
cttattctgtagattataaaatagcagacttgcatagaatcataacatgtattacaaacttggttaggcagaacttgaagaagaagggtaagtgtcttaaagagctttgcagatccatggc

SEQ ID NO: 159075 - DNA, 302 bp, Arabidopsis thaliana columbia
cgcaagtatcaccgggaattgcaaagaagcagaggaccatgtacggagacgctacaaactggaatgaagatgagtatagagaatcaattttgaaggagcgagagatagagacacgcaccgtcttcagaaccgcctgggctcctccggcgagaatctctaatccagacgcatttgttgtagcctccagcgatggaactttagctttccattcactgaactcgcttgtgtctcaatcggcgagttttggctactcgaaaggtcaagatgttatggtggctgaacctgagagagtggttagggct

SEQ ID NO: 159076 - DNA, 94 bp, Arabidopsis thaliana columbia
  unsure (1)..(94): unsure at all n locations
caaaatttagacaaaaaaantaaatatgagctcgagacctcagtttatcgaccaaacgtcgccgtttatgattctccggatggtgtggaggttc

SEQ ID NO: 159077 - DNA, 225 bp, Arabidopsis thaliana columbia
cgattccaaatcggaaggatgataacgtcgtccctaacctcatctctgcaagctctcaagctttcgtctccgttcgcccatggctccactgctctctcatctctctctaagcccaattccttcccgaaccacagaatgcccgctttagttccggtcatcagagccatgaaaacgatgcaggggcgcgtggtgtgcgcaaccagtgacaagactgcggcggtgtta

SEQ ID NO: 159078 - DNA, 137 bp, Arabidopsis thaliana columbia
  unsure (1)..(137): unsure at all n locations
tgaattacaaacaaaaatggttttgcaaaagctttctctcattgngctgcttttgctcctgaccatcgtcgcctctccagcaaatgcagatggacctgtttgcccggcgtcgaacaaactaagccggcaagtttccc

SEQ ID NO: 159079 - DNA, 410 bp, Arabidopsis thaliana columbia
  unsure (1)..(410): unsure at all n locations
tcgacgcgccaacagacggagcgggatctgaagagggagaagaggaaacttggaactatcgaacacatgtgtcaggttgtcaaacaagaaggatgggagaggttatatggtggattgttangttttttaattgttattaattttatattttttttatttttgtttttttttattttttattatatattttttttttaattttttgttatattattttttattttattttttttagtttaatttttttttgttttatgttttttttagttaatatttatatttttttttttattttttttttattatttttttattttttttatttagttttttaattttttttatattttttaatatttttgtaatttattattattatttttttttattgtagaatttatatttttttt

SEQ ID NO: 159080 - DNA, 209 bp, Arabidopsis thaliana columbia
cttgaatcagacgaatatataacatccgtggaaggatactacgaaaaaaactttggagttgatactgtagtgacaacgctgattttcaagactagcaagaacaaaacagctggaccgtttgggattgtatctggcacaaagtttgaattcaagaaggaaggttacatgatcactgggttccacggacgagctggtgagtatgttaattc

SEQ ID NO: 159081 - DNA, 264 bp, Arabidopsis thaliana columbia
gggcgattcattcacaatctcggcgattctctcttccgtctcgagtcgctgagatccatcagtaaaaggtctgcaaaatggttgctcagggattcactgtggatcttaaaaagccccttgtatttcaggttggtcatcttggagaagattatgaggaatgggttcaccaacctatcgcgaccaatgaaggccctcggtttttcctaagtgactttttatgaggtatttactatctctcaattctttactttttttcatcctact

SEQ ID NO: 159082 - DNA, 352 bp, Arabidopsis thaliana columbia
gcgaactcttctaatgagacatgaagctgaactcaagtccaatgcctattggcttaatctattagctcacttgcaggcctcctctgttccgaggaaggaactgtcatgcattaaagaacttgtttcattgtatgaagctgcttcgatcgaggacatatacctagcttataatcaattaagagtggacgaggactctctgtactcctgtattggtattgctggggcacaggcgggtgaagagattactgttctctcagaagaggaagaaccagaagaagttttctcaggagatgttccttgtgggacgatggcttattgatgacctcttgaccattatctttttcgtcatata

SEQ ID NO: 159083 - DNA, 209 bp, Arabidopsis thaliana columbia
gaaaaacgcaacaaaagacaatgaaacgacgtgaattaatgtcgtattgtgagctaccggagtacatgaaagacaacgaatacatattgaattattacagagctgattggtccattagagatgctttcttcagcgtatttagtttccacaatgagtccctcaatgtttggacacatttgattggttttattttctttgtggcactaacc

SEQ ID NO: 159084 - DNA, 281 bp, Arabidopsis thaliana columbia
atttctttagctcaaccttcattactaatctccttttaaggtttctttcgtgaatcagatcggaaaaatggaatcttttttgttcacatctgaatccgtcaacgagggacatcccgacaagctttgtgatcagatctccgacgctatcctcgatgcttgccttgaacaagaccctgagagcaaagttgcttgtgagacttgtaccaagactaacatggtcatggtttttggagaaatcaccacctaggctaacgttgattaccagcagattggttcgtaaa

SEQ ID NO: 159085 - DNA, 415 bp, Arabidopsis thaliana columbia
gaaagaaaaaaaaaaacctcctctgcttttgtgatcctttaaggaaaaagacgaaatggcaacggaatcgtacgaagccgccattaaaggactcaatgatcttctcagtacgaaagcggatctcggaaacgtcgccgccgcgaagatcaaagcgttgacggcggagctaaaggagcttgactcaagcaattcagacgcaattgaacgaatcaagaccggttttactcaattcaaaaccgagaaatatttgaagaatagtactttgttcaatcatcttgccaagactcagaccccaaagtttctggtgtttgcttgctctgattctcgagtttgtccatctcacatcttgaatttccaacctggtgaggcttttgttgtcagaaacataaccaatatggttccaccttttgaccag

SEQ ID NO: 159086 - DNA, 160 bp, Arabidopsis thaliana columbia
gaaaaagccattctttttgccccttgagtgctttcagctcttcccacaaggttacagaagtaatgtcacgtgtgtacgtcggaaatttggacccgcgagttactgagcgtgaacttgaggatgagttccgtgcctttggagttgtcaggagtgtttggtg

SEQ ID NO: 159087 - DNA, 239 bp, Arabidopsis thaliana columbia
gtttttcaaatctgtgaactcataatatagcttttgaagaagtgcttaaagatgagcttagttctcagattcaggcaacatttagctcaaacctcatccagattatcacttctttctcgaatcggcggttaccggagttacacccaaccggtgaagattgaagatgtataataagcattacttcgttcacagtaagctctcatacgtattactatccttcttttatctgatcctaccat

SEQ ID NO: 159088 - DNA, 300 bp, Arabidopsis thaliana columbia
cacacatctcctattgcaaacgaacataaaacactacctaagagatcaatatggctggagtgatgaagttggcatgcttgctcttggcctgcatgattgtggccggtccaatcacatcgaacgctgcgctaagctgtggctcagttaacagcaacttggcagcgtgcattggctacgtgctccaaggtggtgtcattcccccagcgtgttgctccggcgttaaaaacctcaacagcatatccaagacgaccccagaccgtcagcaagcttgcaattgcattcaaggtgccgctagagcct

SEQ ID NO: 159089 - DNA, 293 bp, Arabidopsis thaliana columbia
gtcgtattccaagaaaatagaaaagtaggatcatggtggcgatgatcatggcttcaaggtttaaccgggaagctaagctcgcatctcaaatcttgtctacacttttgggaaaccgaagctgctacacatccatggccgccacatcttcctctgctttacttcttaatccgttgacttcttcttcttcttcttctactctccgtcgtttcagatgctcgccagagatctcttctctctccttctcctccgcttctgatttctctctagcgatgaagaggcagagtcggagtttt

SEQ ID NO: 159090 - DNA, 327 bp, Arabidopsis thaliana columbia
cgcgtccgtgttttcaaaccatttggagaaacctgatccttcaaaaccaagatggatgcaagattctcttattacatgggagtctaagaatgcgcaaaattacgccattggtagcaagcctttgaccgctgcattgaacgtttactcgagaggttttagaagtctgttgaagttcattaatgacttatacgcttatccggaaattatgatcatggaaaacggttttgtagtagtactatggtccttattattttgttggttttggatatcttctatttttttattgttgaatttcgttactttttaatctgttttctttatgaattt

SEQ ID NO: 159091 - DNA, 227 bp, Arabidopsis thaliana columbia
  unsure (1)..(227): unsure at all n locations
ccacagagcttgtaccctataagcttcagagattagtcaaggaattcaaatccttgacagagccaattgatcgactcaaatgggttctccattacgctagtctccttcctcaaatgcccgagtcgtccaagactgaatcaaacagagttatgggctgcacagctcgtgtttggctagatgctgagttaggtcaagatgggaagatgaggttttgtgcanatagtgat

SEQ ID NO: 159092 - DNA, 242 bp, Arabidopsis thaliana columbia
ggagagaagagagaaagagagaaagagagacagtgataatggcgtacagtgcgtgtttcctacaccagagcgcattggcttcatcagccgcacgatcatcatcttcctcctcatcccagcgtcacgtgtcgctctccaaacctgttcagatcatctgtaaagctcaacagtctcatgaagacgataactccgccgactcccgtcgtcttgctctcactctcccttgtttcgtccgttgttgt

SEQ ID NO: 159093 - DNA, 350 bp, Arabidopsis thaliana columbia
ggagagaagagagaaagagagaaagagagacagatataatggcgtacagtgcgtgtttcctacaccagagcgcattggcttcatcagccgcacgatcatcatcttcctcctcatcccagcgtcacgtgtcgctctccaaacctgttcagatcatctgtaaagctcaacagtctcatgaagacgattactccgccgtctcccgccgtcttgctctcactctcctcgtcggcgccgctgcttgtggttccaaagtatcttctgctgatgccgtctaccgtgatacttcatacgtgttttgtaatccttggtctataccttaccttttttcctttccattaggtaatagggtt

SEQ ID NO: 159094 - DNA, 221 bp, Arabidopsis thaliana columbia
tggatacttgtgctctagtaatccatcagtctctgtctcgcatcaaactttctcctcccaaatcttcttcttcttcttcttctgctttctcccctgaatccttaccgatcagacggatcgagctgtgtttccgaggagctatatgtgccgccgtacaaagaaactacgaagaaacgacctcctccgtggaagaggcagaggaagatgatgagtcatcttca

SEQ ID NO: 159095 - DNA, 139 bp, Arabidopsis thaliana columbia
cgggttctcgggtcggatcttctaagtctagcctgtgataatggctactgtcactactcatgcctcggcctcgattttcggaccttgtacttcaaagccaagattcctcaccggttcttccggttggttgaaccgtgac

SEQ ID NO: 159096 - DNA, 152 bp, Arabidopsis thaliana columbia
tcggtgtattgatcactgatcaaaagatcattatggtcgacggagccaccggttttggcggcaccaccgtcaccgtcaaactgtgcaagcttttcgttgaaagaggcgccgctggggtccacatcgaggaccagtcctccgtcaccaagaag

SEQ ID NO: 159097 - DNA, 308 bp, Arabidopsis thaliana columbia
acaaaaactccgttcgtggactacctaaagcccatcatcgtcgacggagacaccggctttggcggcaccaccgccaccgtcaaactctgcaagcttttcgttgaaagaggcgccgctggggtccacatcgaggaccagtcctccgtcaccaagaagagtggccacatggccggaaaggtcctcgtggcagtcagcgaacacatcaaccgccttgtcgcggctcggctccagttcgacgtgatgggtacagagaccgtccttgttgctagaacagatgcggttgcagctactctgatccagtccaacat

SEQ ID NO: 159098 - DNA, 300 bp, Arabidopsis thaliana columbia
aaagaagtaaagaagaagaacttctctgcatcaatggcgatctccaagctccatctactcttccttctctcagtctttctctcccttcatcctcttgttctttccgacaccgccgatgaagaagatgttcttcttacaggcatcaacagttacagagcatcactaaacctaacaaccttaatacacaaccacaacgcagaatgtctagcagacgaaatcgcagaccaattcaagaaccaaccttgcacaaacaccactggctcaacctctgtccctggaaccacacctggattcccaaac

SEQ ID NO: 159099 - DNA, 237 bp, Arabidopsis thaliana columbia
cagagatgacggtgaagataaggctcgcgcgtcttggttgtaaacaccgacccttctatcgtgtagttgtcgccgatgaaaaatcgcgcatggacggtaaacaaatcgaggtgttaggcttttatgatccactccaaggcaaagaagatgcggatagagtgagcctcaaattcgacagaatcaagtactggttatctgttggagctcaaccatcatacacagtggaaagcatgcttt

SEQ ID NO: 159100 - DNA, 302 bp, Arabidopsis thaliana columbia
tgcagagatctttcactttaatccttgagaagtagcaaaatggctgaaaaggcggtcaccatccgaaccaggaaattcatgaccaacagacttctctccaggaagcagttcgttattgatgttcttcaccctggaagagccaatgtttcaaaggctgagctgaaggagaagctagcaaggatgtacgaggtcaaggatccaaatgcaatcttcgtattcaaattcagaacccactttggaggtggaaatcatccgggtttggttgatctatgatactgttgagagcgctaagaagtttgaac

SEQ ID NO: 159101 - DNA, 286 bp, Arabidopsis thaliana columbia
gaaatgcctctgtgcctgccatggaaatgaccaatggttcgacaccaactaccattacatcgtccctgagttgggccctgaggttaacttctcttacgcatcccacaaggcggtgaatgagtacaaggaggccaaggctcttggtgttgacaccgtccctgtacttgttggcccagtctcttacttgctgctttccaaggctgccaagggtgttgacaagacattcgaacttctttttcttctccctaagatatctccgatctacaaggaagtgattaccgagctt

SEQ ID NO: 159102 - DNA, 159 bp, Arabidopsis thaliana columbia
acgcgtccggagtagtttgcttaacgcggaacatatatacactcaagtatttaaagaagatcacgcgcggcgattgattaagcgagaacgacgctacagtaaaccaaaaccaaatctagatctgtgcctctccggtcacggtgcttgtcatcgttggtc

SEQ ID NO: 159103 - DNA, 236 bp, Arabidopsis thaliana columbia
gtcttactcgtgccagccactcgcatttctccagattttattatccttcctcgaaacaagagcttagctaagatgacgaagaactacccaaccgtgagcgaagattacaagaaggctgttgagaagtgcaggaggaagctcagaggtttgatcgctgagaagaactgtgcacccatcatggtccgactcgcatggcactctgctggaactttctgatgtcaatcaaggactggagg

SEQ ID NO: 159104 - DNA, 239 bp, Arabidopsis thaliana columbia
ctcatttactgttctgtttcactttctctctctctgtatactctctaaatgatggcaaaaaactgtaatttagtcagtgttctatgtgtatttttggtattgaccctctttaacaaacccatcaccgtcgccgggcagaatattccggcggtgggcttgttcacctttggtgactccaacttcgacgccggatacaaacagactctcaccaaaaccttactccctcaaactttctggcc

SEQ ID NO: 159105 - DNA, 127 bp, Arabidopsis thaliana columbia
gctctcttttctctccagatttcgattcccgagttctcgagagaaaaccgtaaatctcttctccgttcactcaatcaaccagagatgcgtgagattcttcacatccagtgtggtcaatgcggttacc

SEQ ID NO: 159106 - DNA, 201 bp, Arabidopsis thaliana columbia
gataatccacacgcaaaaatgggaagccaacaagcggctgtttcgttcctttccaatttggcgaaggctgctttcggtcttggaacggcggcgacggtgctgaatacatcgcttttcaccgttgacggcggagaaagagctgttatcttcgatcgattcaggggagtgatggatcagactgtgggcgaagggactcacctt

SEQ ID NO: 159107 - DNA, 274 bp, Arabidopsis thaliana columbia
caaaacataaaaaacaagtggaagctttaaaacgagagggagagagcaaaaatggcgacgtcgggaacgtacgtgacggaagttccgctaaaaggatcggccgagaaatactacaagaggtggaagaacgagaaccatgtcttccctgatgctatcggccaccacatccaaaatgttaccgttcacgaaggcgaacatgactctcacgggtctatcaggagttggaactacacatgggatggaaaggaggaggtgtttcttttcttataattgt

SEQ ID NO: 159108 - DNA, 278 bp, Arabidopsis thaliana columbia
gatggggaaagtaagcccagtgagcggagaagatagaatggtggaaagagaagaaagaaggacaggagtctcaaggtctcgacactgcgaggaccatcaataagatactgacgatattgatgatactattcttgactatgttctcttataacaagctcttatgatagtgtttgtttatggtcttttttttataattcccttcgtggagtgttttatttcttttgttaagatattctatttatacaagatttatatttaatctgtatttgattttaatt

SEQ ID NO: 159109 - DNA, 186 bp, Arabidopsis thaliana columbia
caaaggcttatgaaggtgttttctacaattacttatgcataggtatggatgctcaagtagcatatggcttccaccatcttggcggcactaaaccatatcttgcttaaggccctattttatataagtatatttattcaagttttggttttattcatggttgcgatttatgttctatttttgtttttt

SEQ ID NO: 159110 - DNA, 187 bp, Arabidopsis thaliana columbia
gagaggttcgagaaggaggctgctgagatgaactttatttccttcaagtacgcatagatgttgggattattttaagaatagggggggggttttataaatattattcttttttattaaattttttattctttaatattttatatttttataatttaactatttatatttatatttaataattttttta

SEQ ID NO: 159111 - DNA, 235 bp, Arabidopsis thaliana columbia
ctctgtctctctccaatctctctgcgccacagaattgtgcgatttacgaaaatctctgaaacctccgatcgttaacggcgaccgccgattttcccggtaaaaatgaacgacggagatgtatcgaggcagatccagcagatggtgtgatttatccgccaagaagcggttgagaaagcattcgtgatcttgtgtttttgtgtaataagatttattaattgtttatctttaattatgt

SEQ ID NO: 159112 - DNA, 111 bp, Arabidopsis thaliana columbia
gatgtaacaataccaaaactaggttacaaaacttcattacaagcagcaaacatacctaatctcgacgcaattgcatcagctggtatcaacggtttaatggatccagtagaa

SEQ ID NO: 159113 - DNA, 363 bp, Arabidopsis thaliana columbia
ctttgttccccaatgattattcttcttgaagacgttatctgatgcattttggtgttttgaacggctcatgcgtcgattgcgaggaagggtgcgttttacctgtatatttgttggttttttaatctttctactttttattttttttttctctttgtttcattctgttttttttttatttttgtttttgattttttttttttttttttgttctttacttttttttttttttttatttatattttagtgatttgcttctttttttttttttttttttctttttctttctctttttttttttttattagtttgttactctatttcaatttttttcttttttttataattttttttttttttttttat

SEQ ID NO: 159114 - DNA, 281 bp, Arabidopsis thaliana columbia
atttccccaatttctcagagagactcattttcactaccaccaccaaatcgccgtcatgtgtaaacaagcttctcgtctccggtcccgatctgtcgccgccgcatcttccaaattggtgtctactcgtgccttttcaacggaactttcatcgacgcttgattccacttttgttcgggcttggaattaagtcttcatccgaattttgacttcaccgtgattattatctttttgttcttttttgtattcctttatttttttttcttcttttcttactattcttt

SEQ ID NO: 159115 - DNA, 258 bp, Arabidopsis thaliana columbia
atgcacacttgtatagttcctccactctctgataaggctagtacatcagacggtgataaattcattactaccgtggaatctatagaatcggctcaatcccaattacttgacgcggatactgaaaacactttcgcaaatacatctgtaagagaaggtggtcagattttacggtttggtgctcttagagagaaaatcaacagcgagatcatctttcacttggtgaaaatactactagtttattcactgaagctatttttt

SEQ ID NO: 159116 - DNA, 236 bp, Arabidopsis thaliana columbia
gaaaagatctggcatcacactttctacaatgagcttcgtattgctcctgaagagcaccctgttcttcttaccgaggctcctcttaacccaaaggccaacagagagaagatgactcaaatcatgtttgagacctttaactctcccgctatgtatgtcgccatccaagctgttctctccttgtacgccagtggtcgatcaatccggtttgtgctggaatcttgtgttgtttacttttt

SEQ ID NO: 159117 - DNA, 111 bp, Arabidopsis thaliana columbia
aggaggagagtgtagcagatcggcgaaaatgacaaccagattcaagaagaacaggaagaagagaggtcacgtcagcgccggacatggacgtatcgttagcaccgtaagcat

SEQ ID NO: 159118 - DNA, 299 bp, Arabidopsis thaliana columbia
catctttcttctttctctaaaatcttctaagaataaccattttctaaagatatcttttaacgagacaacaaacaacagaaaaacacacaaaaacacaaaacttctgtttccctgtttctccggattctctccggctctgagctttcggcttctcctctccggagatgttactctgcttccctcttttgtgttctttttgttttctgggtgaatattgtatgaacctttgactgggatttttccgaagaagaattccagacgacgtaatttttttccaagctatggcttgtgaagagatg

SEQ ID NO: 159119 - DNA, 213 bp, Arabidopsis thaliana columbia
ctggcatacactagaaagatcatcgatgcaatccattcgggcagtctcttgaaggcaaactacaagaaaaccgaaatctttggatttgaaatcccaactgagatcgaagggataccttcagagatcttggaccccgtcaactcctggtctgataagaaggcacacaaagatactctggtgaaactgggaggtctgttcaagaagaacttcgag

SEQ ID NO: 159120 - DNA, 385 bp, Arabidopsis thaliana columbia
gttgcctctaactccaaggatgatccagctaaggtgtgcctccaacttcacctcccaggtcatcatcatgaaccaccctggtcagattggtaacggttacgccccagttctcgattgccacacctctcacattgcagtcaagttctctgagatcttgaccaagattgacaggcgttctggtaaggagattgagaaggagcccaagtttttgtagaatggtgacgctggtatggttaatttttccttcatacttgcctatgttgttgtttttattagttttctttaatttctatattttatttatttattttctatgctgtttcttagtttttttattactcttttcttatttttcattttttttattatttcgttttttttttat

SEQ ID NO: 159121 - DNA, 148 bp, Arabidopsis thaliana columbia
aaaaaatcaaaatcaaatcagagcaccaaaaccgactcagatctagatcggatttctccaatggctctcgaatgggttgtgttagggtacgcatcatcatctgaatgcgatcatggtgatttttcttacttattctattctttatttt

SEQ ID NO: 159122 - DNA, 89 bp, Arabidopsis thaliana columbia
gcgccacagaattgtgcgatttacgaaaatctctgtaaacctccgatcgttaacggcgaccgccgattttcccggtaaaaatgaacgac

SEQ ID NO: 159123 - DNA, 327 bp, Arabidopsis thaliana columbia
gattcttggcgaatcaccgagctaccttaccggagagttccccggagactacggatgggacaccgcggactttcagctgaccccgagacattccaaggaaccgtgaactagaagtatccacagcaggtgggccatgctcggagccctaggctgcgtcttcctgagctttatctagaactggtcaagtcggagaggtgtttgtttatgttatattatattatataatatatatttatatttttatatttatttttttatctttattttattttatgaattattatttttttttttttatagtatatgtatatgtaatttatttttttt

SEQ ID NO: 159124 - DNA, 286 bp, Arabidopsis thaliana columbia
  unsure (1)..(286): unsure at all n locations
aagaaggaggtggtggaagacagtttgtattatttgttgatgnctacagaaagacacttaaggctgatggtattgctggggggtggcgaggatacaacatctcatgtgttggttttattgtctacctagtttatttctttttttatttatttatagttattatttttattttttctttacatttttatttctttttttattttttttttttttttataaataattatatttttttatttttctttattttttttattgattttttctttttattttttttttattt

SEQ ID NO: 159125 - DNA, 158 bp, Arabidopsis thaliana columbia
ctttggtctgatcctgatcagaagaatgaagggtggactgatagcgatcgaggtatctcctgcacgtttggagccgatgtagtcgctgactttttggataagaatgatctcgatctcatttgcagaggccatcatgttgtgtatgattgtattgttta

SEQ ID NO: 159126 - DNA, 65 bp, Arabidopsis thaliana columbia
gcgattaggctcttcctatatcctctcgttccgcttaatcgtcaacaccagagaagctggaacct

SEQ ID NO: 159127 - DNA, 293 bp, Arabidopsis thaliana columbia
aaagactcgagttgatatgtctagtactaaagatatgttaactgtccaaaacgcaactccttttaacggcgttgccccatccaccaccgtgcgagttacaatcgtccaatcctccaccgtctataacgatactcctgccactatagacaaagcggagaagtatattgtggaggcggcaagcaagggagcagagctagtgttgttcccggaggggtttattcggttctattttcgtgcgttatgttttttttctttacttattattttttttctttttatattttttatttttt

SEQ ID NO: 159128 - DNA, 151 bp, Arabidopsis thaliana columbia
  unsure (1)..(151): unsure at all n locations
agaagcccttaaagcttcaccgtnnctctctctcttttctttctcgngnagcccttcaattcgaatcggcgcgggtcttnnncttcttcttccctccgaatctctgttacctccaatggaagaggacgatgagttcggagatctatattcc

SEQ ID NO: 159129 - DNA, 176 bp, Arabidopsis thaliana columbia
catagctcctaacaaagcaatatcatttccaatttataaaagttaaagccatggctgcatctttctctgtcccctctatgataatggaagaagaagggagattcgaagcggaggttgcggaagtgcatacttggtggagctcagagagggtcaagcttacaaggtgcccttacact

SEQ ID NO: 159130 - DNA, 356 bp, Arabidopsis thaliana columbia
acaagcagctaaggatcttctgaacgttattcttgttgagtatgcctacaaacagctcctcagaggatctaattgttcagtggttgcttctggtgatagaaccttctgtgttgtcttgtttgctaatctaattttatcttttatttatgatgtgttttctttatttttttttctttatttttttatttatctatttttttttttttctttttacgttttattttattttatttttttttttataattttttgttatttatttaattgtcttttctattttattttaatttttacttttttctttatttttattattttagttattttttatttttttcttttttttttattatttt

SEQ ID NO: 159131 - DNA, 249 bp, Arabidopsis thaliana columbia
cttttgtttgcatccatcgctctctcatacaaatttcagatctgaagcacacacaagcttcggattccagatcaaatccggcgattcaagccgctttcccaaattcaccgtcgatctggagccgttacaggatccgccgcagaccacggcgtcctccggtaccggcaacggcaacggtaagatacgctaccgttcgcctttttccactgagctcctggagtctgttttcctatttcctacattcgtctt

SEQ ID NO: 159132 - DNA, 250 bp, Arabidopsis thaliana columbia
aagcgagtatctattccttttggaataggagctggcacagccttcgaattcaagaaggacggtcaaaagatagttggtttccatggaagagctggtgatctacttcacaaatttggagtccatgtcgcgccaataaccaaataattatggagattttaagtatcttttgatgatagtttacacactttgaataagctgattctactttatttctctctgtttgtttactgcttcagtgttttaagtcttc

SEQ ID NO: 159133 - DNA, 295 bp, Arabidopsis thaliana columbia
tcgattttcgtttattcgcatccatcggagagagaaaacaatcaataagcgaccatgttggtgtaccaagatcttctcaccggtgatgagcttctgtctgactctttcccttacaaggagattgagaatggaatcctctgtgaagtataaggaaagtgggttactgtggtatctgttttacttatcaattttatttttattattattatttttatattattttttgtttatattattttttcttatatttttcttttatattttatttttatctattagttttctttgtatttta

SEQ ID NO: 159134 - DNA, 427 bp, Arabidopsis thaliana columbia
gagagccgaaaacgaataagaagattaattgaggagaaatcgaagatgtctatagcgttagtggagaagattcaagccaaattttgaagaagtctagtagattctgtattgtaagctactaaaatctgcgatggtgaggcatttcaatcgtcgccggaaaattcatcggagatattaaaattgaatcaagcttcgaattggtcaaccgatctattaatttgactagagaggaacgagctgtatgatatatctgcttccgaattgagtctccatggctagtggaagcagcagcatcgcaatcgttgttttgtttgttatctcgttttattcttacctattgttttttcttaattttttttctattctgattgttattttttttttttttttacttttttttattttttttttttactttcatttattt

SEQ ID NO: 159135 - DNA, 109 bp, Arabidopsis thaliana columbia
cccaaaatggcatcggcggttcagaaatcagcgttgttcttatgtggagactacatggaagcctatgaaacgattgttcctctctatggacttcaatcgtttggggtta

SEQ ID NO: 159136 - DNA, 169 bp, Arabidopsis thaliana columbia
acataatgttcacggtttgactcccagtgttgcatctgcacaccatcttatgtcatatgcactagagcacaagaattctgaactcatggaagaagtaatgcaactcctgaaaacgaatgatctgcctctacaacccggtacagcagatttagtttttaggatctgtcat

SEQ ID NO: 159137 - DNA, 286 bp, Arabidopsis thaliana columbia
gatgattttgagcttttgaccgttattggcaaaggtgcctttggtgaggttagattatgtcgtttgagatctacatctgaagtttatgccatgaagaaattgaaaaaaactgagatgcttagccgtggacaggtagagcatgtcaggtcctagaggtacttacttgtagaagttgtcagccgttacattgtatagcttttttactctttttttttttgtgttagctttttttttttattaatattttattttgtatattaatatatgttttatatttttttttttt

SEQ ID NO: 159138 - DNA, 99 bp, Arabidopsis thaliana columbia
cgccggtggagctttcagcggagcttccatgaacccagccgttgctttcggaccagccgtcgtaagctggacgtggaccaaccaggggtttactgggct

SEQ ID NO: 159139 - DNA, 305 bp, Arabidopsis thaliana columbia
cgaagaagcaaatatggcggtcccattgcttaccaagaaggttgtgaagaagaggtctgctaagttcattagaccccagagtgaccgtagaatcaccgtcaaggaaagctggaggaggccaaagggtattgattcaagggtgagaagaaagttcaaaggtgtgtctttgttttctaatgttggtttctggttttgttaagttgttttttatcttatttttctttcgtttttttaatttttatttttttattaatttttattttatatattttataattttatctttatttttttttttttttttt

SEQ ID NO: 159140 - DNA, 321 bp, Arabidopsis thaliana columbia
aagttttcaactttaccggttaaagccgagtcttcggttacgactatcgaaaagacctacgaggaagtgaaagaagagaaactgtctgagatcacgccattatctgagcttttggattccactcctgaggccgtcgagacgctgagatcactcctgcagcagaagctagagaagggagaagatgtataagcttttaagctattatagagactagtttctggacaaccagaagaaactgagtggattttcttatttggcttttcttttatgtttatatttttttttctttttattctctatttctttttcttttaagtattt

SEQ ID NO: 159141 - DNA, 393 bp, Arabidopsis thaliana columbia
gccgctacacacttttctgcgatatctctgtatatttgttgacagtctctaaccatgggtaaagagaagtttcacatcaacattgtggtcattggccacgtcgattctggaaagtcgaccaccactgggcacttgatctacaagttgggtggtattgacaagcgtgtcattgagaggttcgagaaggaggctgctgagatgaacaagaggtccttcaagtacgcatgggttttggacaaacttaaggctgagcgtgagcgttttattaccattgacatttttttctttaagttcgtaaccacttagtactattgtgcatgtttttgttgcttcttgtcttcgtttttttatttataacttgttttcttgtactctcctttgatgtattgttct

SEQ ID NO: 159142 - DNA, 400 bp, Arabidopsis thaliana columbia
tgcaaacatggcaagaggattgaagaagcatctaaagaggctcaatgctcctaagcattggatgcttgacaaacttggtggtgccttcgctcccaaaccatcttctggacctcacaagtcgagggagtgtcttcctcttgtcctgatcatcaggaacaggttgaagtatgctttgacttaccgtgaagttatctctatcttgatgcaaaggcatatccaagttgatggcaaagtcaggactgacaagacttaccctgctggtttcatggatgttgtatccatccccaagaccaatgagaacttccgtcttctctacgacaccaagggacgtttccgtctccacttcatcaaggatgaggaagcaaagttcaagctttgtatggttagatctattccattt

SEQ ID NO: 159143 - DNA, 140 bp, Arabidopsis thaliana columbia
tcgaatcccggtcgaccacgcgtccgcccaattctctttcaaaagtcttaccaagatttacattttgatggtctcttgtttcttggcattggaggcaagttctcttttctgtggctactgctttgttttaattacttgag

SEQ ID NO: 159144 - DNA, 142 bp, Arabidopsis thaliana columbia
gtggcgaggcttgtggatagttatctcaccgaagttgctagagatcggaatttgccgttgacaaagtttcaggttttggctgaggcgtgaccggaatctgctaggactgtgacgatgactttacttagcctttatatattta

SEQ ID NO: 159145 - DNA, 125 bp, Arabidopsis thaliana columbia
ctgaagaaaacattcgtagatctatttccgcatctgcttaaacacctacatcgtcgtagatcgcaaaccatggccgtcgctgtagctaagcttctgatctccgccatggcggtttttatgcttgt

SEQ ID NO: 159146 - DNA, 389 bp, Arabidopsis thaliana columbia
gcaatggcgtacaagcttatatctcttacagagttatcaccaagactaacttgccggagtaccaaggacccgagaagattgttattagacgatacagtgatttcgtctggttacgggatcggctttttgaaaagtacaagggcattttcattcctcctcttccagagaagagtgctgtagaaaaattccgctttagtgccgaatttattgaaatgaggcgagcagcattggatatatttgttaatcgaatagcattacaccctgagcttcagcagagtgaggatcttaggacctttttgcaagcagatgaagagacaatggacagattcaggtttcaggaaactagtatatttatgaagcctgcatatctaatgcaaatgtttagggat

SEQ ID NO: 159147 - DNA, 351 bp, Arabidopsis thaliana columbia; identical to SEQ ID NO: 131373

SEQ ID NO: 159148 - DNA, 252 bp, Arabidopsis thaliana columbia
gccaagtgccaaaaatcatcaccaccacaggacatagtccccagacaagaagagagcccctagacataatggggactatgcctatggtgataacttggtaggtccatcagctcaacctttcaagcctcacacgggaggggacgtgaggtgggatgccattaactcaatcgcttttaaaggtcctcaaataggtttcgacaactttatgcttttgaaacttctatggtatggtgatttaggcagttgtttatt

SEQ ID NO: 159149 - DNA, 247 bp, Arabidopsis thaliana columbia
gcttcttcttctaccaatctaattcctctcttcttcttcttgtgttgtgacgcatactcgtcgcagtcttgatatatggccgccggggggttcactcgtttttctatctacatacctttcatattttttgtatgttactttctatggtacttatattttttctatttttgtattatttttttttttcttttttttttcttgttttctattatttttcttaatatttttataattttttttttttttt

SEQ ID NO: 159150 - DNA, 244 bp, Arabidopsis thaliana columbia
cagtaacttattcttaggtagaaccagctaggctttaccttgaaatcctatctttgttatacctacagaaacagagcgctcgtctgcggtggaacataaaccgaggatgaagcagaatgtgactacacatgctttcttagcaccggatcacaccttaaagccgttacagattcgagcgtacgcgctggagtctacgacacatacggagactacatcgggatccgaaacctagaatcatgggggg

SEQ ID NO: 159151 - DNA, 393 bp, Arabidopsis thaliana columbia
gctgcaatcagagagttttcgatagcacaagcacattctttcgattcgttgagtgttcaaatttcaagctttttacaaggggttccttaattgatctgttactgtaagatggctcactcagatcccaacagtgtcgtggctgtctagatagattaactcctttaaggtcttttttttgatcaattattgtttttattttttttatttttttattatattttttaattttattattttttttttttattatttatatatttttactatattttcttttttatttgtttttttatttttttatttttttaattcatttattttatttttttttatttttatattatttttatttttttttattaattttatattttctacatattatatttttta

SEQ ID NO: 159152 - DNA, 328 bp, Arabidopsis thaliana columbia
gggattgcggttgaagcctcgtacccggttaagtacagcccaaacccggttcgtggaaatactatcagcagtgtttgaaatcaagacgctcgataaacatttgggattcttataactgaatttaatctcgtattgttattattgtttgtatgtattgtatttcaacaacaattttataaattagttgattcatcatatggttatttaatttatttattctttatgttgatcaatttctttttttatttaagattagattttttgttagtatttttataatttttattatatttatattttataagtctttttattttgttatattttt

SEQ ID NO: 159153 - DNA, 325 bp, Arabidopsis thaliana columbia
gtcgaccacgcgtccgataaaatagaattacaaacaaaaatggttttgctaagcttcctctcattgggctgcttttgctcctgaccatcgtcgcctctgcagcaaatgcagatggacctgtttgcccgccgtcgaacaaactaagccgttcaagttttcctgaaggttttttttttttttcttcttctgtattttatattaattatttttcttttttttatatttatattttatttttatttttatatttatttatttatttatttttttattctatctaatctttcttatattatattttctatttaacttttattttaataat

SEQ ID NO: 159154 - DNA, 141 bp, Arabidopsis thaliana columbia
gaaccgtgctggttcagctaaccggtctaacgttcgatacgttctctgagctttggtctaaccaggcggttcaactcgacgcggggacttgacttacctgcttggttttcctctccttcgttttgaccctttacttggcta

SEQ ID NO: 159155 - DNA, 283 bp, Arabidopsis thaliana columbia
tgttgatccaactatcttcacccaagcgatcctatttcataccaggtgtgactgcacctccaaattcgccgatgagctgattgctagcgctggttacatccgaacacctggaaaaggtattcttgcggcagatgaatcaactggtactattgggaaacgtttcgctagcatcaacgttgagaacgatgaattcaaacagacgtgctttttgtgagtctcttttttactacctaccgggaggcctttactttgtccaaaaatgtgtttattccttcttttggaa

SEQ ID NO: 159156 - DNA, 145 bp, Arabidopsis thaliana columbia
cgaggacacttagagacaaagagcagctcgtcagtttacccgtctgaagtatctcgccagccggcccgtctcaagcagctcgtcagagcacccgtctgaagcatcttgtcagccggtccgtctcaagttgctcatcagctcgccc

SEQ ID NO: 159157 - DNA, 310 bp, Arabidopsis thaliana columbia
gaggacctggcgttgaatactgtgattgtgcttgagcaagaagaagagcttgatctggttattgagctgagccagaagatgaatgtgaggcctgtcattgggttaagggctaagctgaggactaagcattcgggtcatttcggatcaacttctgttgaattgggtatatttggattgactactacttatattgatcgtgtgttttaggttgctttttatctcatttcttgtttgtatttatcttttgtatcttatttttttttttttttttttgtatatatttatttttttttatattatttttttttat

SEQ ID NO: 159158 - DNA, 196 bp, Arabidopsis thaliana columbia
accgaattcccgcccgaccacgcgtccgaaccatggttgagccggcgaatactgttggtcttcctttgaacccgactccgttgctgaaagatgagctcgatatcgtgattccgactatcagaaacctcgatttcctcgagatgtggaggccttttcttcagccttaccatcttatcattgtccaggactgagatcc

SEQ ID NO: 159159 - DNA, 58 bp, Arabidopsis thaliana columbia
ggcaaattctccgacggcctcatcgctccagtactttctcgctaaattcatgaggatt

SEQ ID NO: 159160 - DNA, 348 bp, Arabidopsis thaliana columbia
gaatataacctacaaattttaatatttaattactctttctaaagaataagatcgccggtttaaaacaattacctggtcatcagtttggattaaactcattaggcattcattatataattgcaccatacaagaatgtgatcaagaaatttactaatttcttgtgctattaatagtgctgaggtaggacgaccttatagttctcacctaatttgttttttacttatgtttttcttattctttgttactttattttttgtcctttatttatttttctattttatttttattcttatctttttttttatattttcttcttttttttttttttttttcttttattatattttt

SEQ ID NO: 159161 - DNA, 336 bp, Arabidopsis thaliana columbia
ggataataccacgtaatctgtatcctcctgaaccagagagtaatgaaggcaatggagaaccacgtcttgctcatactcctcagagtcggttgcctcggacaaaggatatgaattgtaaatggaattactgtcaagatcaaatactgtgacacatgcatgctttacagaccggcccgggcttctcaatggtcggtttgcaacaaccgggttgaggaagttggtcaccactgtccttggcttggtcagtgcattggattgagaaactataggttctacttcatgtttgggttgtgctcaactcttctctgcatttaagtccatgtgttctgctggatc

SEQ ID NO: 159162 - DNA, 263 bp, Arabidopsis thaliana columbia
gaatcccggtcgaccacgcgtccgggcagattctcacatttgcaaacatgacgactcagatcagcaagaagagaaagtttgtagcggacggagtgtactacgcttaattgaatgaggattcatacagagagctaggacatgtatgttacatgctcacaaaggtgttctcacgcgtcaacctttttcccgggtcaacacctgtttccttggcttgggctccgctatcggattctttctttcggagattaacttttcaagcttta

SEQ ID NO: 159163 - DNA, 161 bp, Arabidopsis thaliana columbia
ctaagatggacaagagcactgttcacgagattgttcttgttggtggatccacccgtatccctaaggttcagcaattgcttcaggacttcttcaacggcaaagagctttgcaagtctatcaaccctgatgaggctgtagcttatggtgcagctgttcaggct

SEQ ID NO: 159164 - DNA, 53 bp, Arabidopsis thaliana columbia
aacttatacaagactcaaatagtttctatataattactaataagaaaaagggt

SEQ ID NO: 159165 - DNA, 297 bp, Arabidopsis thaliana columbia
ctacgatatttttcgagaatatgacgactttttctgttccgattgataacggagattctatgaagatcgcagaagaagaatcacaaagaacactgtacccatatgttactggaacttcaattgttgcaatcaagtacaaagatggggttttgatggcttctgatatgggaggttcatatggatcaaccttaagatacaagaacatcgagagagtgatggctatttggaagcattctcttcttgttgctcagttggagaatacagcgtctttttaggagatctttctgctgttttgat

SEQ ID NO: 159166 - DNA, 376 bp, Arabidopsis thaliana columbia
cgaccagacagaagagaaggcaagatgagataacgtctctcgcaagaagaatcaccatagcaagagctacatgagttccagcctgagtgatgaagttcatcttcaaggtaaggcattggtaatctgtggataacactcgagtatgtggatgaactcggttccacattcacagtagctaagtaatctggcttcgcttgcccggttccagtgtatatggcagcaacatatatgagatttttttgtggaccatacatcgcgaggagggttgtcttatattcaattttcttttttgttctatttttattttttataatttttttttattccttttaatttttattgttattttattttattatatttattttttttatat

SEQ ID NO: 159167 - DNA, 273 bp, Arabidopsis thaliana columbia
tcgaccacgcgtccgatggattgtatctctcggtcgatccaggcttcgtgagtgacttcgacgacgacgacgagtcacactactcttgagcttctcatacttcacccaggtcgatttgggaaataatggatgaatctctggagcatcaaactcaaacacatgaccaagagagcgaaatagttactgaaggaagtgccgttgtgcatagtgagccatcttaagagggtaatgttcctcctaaagttgatagtgaagctgaggtcttggttgaga

SEQ ID NO: 159168 - DNA, 367 bp, Arabidopsis thaliana columbia
gcaatcttcgctcttctctttgctctctctctctcaacgcggttcagatccgagtttgggagattcaagctccctgaaaaaagccctttactctcgcttaccaactttgctccagcatggcaggatctgcaccagaaggcacacagtttgatgcacgtcagtttgaccagaaactcaatgaagtacttgagggacaagatgagttcttcacatcctatgatgatgttcatgagagctttgatgccatgggtcttcaagagaaccttctcaggggtatttatgcttatggttttgagaagccttctgctattcagcaaagaggaatcgtccccttctggaaagggtcttgatgggattcaacaggctc

SEQ ID NO: 159169 - DNA, 128 bp, Arabidopsis thaliana columbia
atcgtcgaaaaatggatcaaacagtatcggttaatctcattcaggtgaagaaagaatcaggcgggatcgccgtcatcacaatcaaccgtccgaaatctttcaattcacttacgagagcgatgatggtt

SEQ ID NO: 159170 - DNA, 257 bp, Arabidopsis thaliana columbia
ctcgattgtttttggaaatcgtcaatcagatatttctcgttcgtctccgccttcgatttatccaaaggctcttgttattgaaaatggcagattccaccaaagcagggttgaagaagccagctttcactaaggttgatcagctgcgtcctgggactagcggacacaatgtcaatgtgaagattgtcagcacgaaaatggtgttacagaaaggtcgtgctgatggtccttaagcttcgccagtagcggatttctgaatg

SEQ ID NO: 159171 - DNA, 228 bp, Arabidopsis thaliana columbia
tgtcaatctctctaaactctcaatttcagtaatcgataaccgtagcaatggaatccaccggaaaagtgaagaaagctttcggaggaagaaaaccacctggtgccccaaaaaccaaatcggtttcgaaatcgatgaaagccggtcttcaattcccagtgggaagaatcactcgtttcctgaagaaaggacgatacgctcagagacttggtggtggtgctccggtttaca

SEQ ID NO: 159172 - DNA, 330 bp, Arabidopsis thaliana columbia
cagagcagctgcaaacatggcaagaggattgaagaagcatctaaagaggctcaatgctcctaagcattggatgcttgacaaacttggtggtgccttcgctcccaaaccatcttctggacctcacaagtcgagggagtgtcttcctcttgtcctgatcatcaggaacaggttgaagtatgctttgacttaccgtgaagttatctctatcttgatgcaaaggcatatccaagttgatggcaaagtcaggactgacaagacttaccctgctggtttcatggatgttgtatccatccccaagaccaaagagaacttccgtctttttttactaca

SEQ ID NO: 159173 - DNA, 96 bp, Arabidopsis thaliana columbia
gtcaccacgcgtcgcgagacgacgctacagtaaaccaaaaccaaatcagatctgtgcctctccggtcacggaggtgctgaccgttggccggagagg

SEQ ID NO: 159174 - DNA, 147 bp, Arabidopsis thaliana columbia
caatttataaaagttaaagccatggctgcatctttctctgtcccctctatgataatggaagaagaagggagattcgaagcggaggttgcggaagtgcagacttggtggagctcagagaggttcatgctaacatggcgcccttacact

SEQ ID NO: 159175 - DNA, 228 bp, Arabidopsis thaliana columbia
agggagagcaaaacaaagatcggagaagagatgacgattctttcttccgaaacgatggacatgcccgacagtgttaccatcaaggttcacgctaaagtgatcgaagtcgaaggaccttgcgggaagcttgtttgctgatttaagcatttcaacctcgatttccatgtttatcaaggtttcatattcttgttaataattagcttttgttttagatttttttttttttat

SEQ ID NO: 159176 - DNA, 201 bp, Arabidopsis thaliana columbia
gaagaggtctatcaccccaacgcacttagggcggcgctcgctgagtttatctcgactttgatcttcgtcttcgccggctcaggctccggaattgctttcaacaagatcactgacaatggagcaaccactccttccggcctcgtcgccgctgccttagctcatgctttcggtctctttgtcgctgtctcttgtggcgctaac

SEQ ID NO: 159177 - DNA, 179 bp, Arabidopsis thaliana columbia
cttcgattttcgtttattcgcatccatcggagattgataacaatcaataagcgaccatgttggtgtaccaagatcttctcaccggtgatgagcttctgtctgactattatttttacaatgagtacgtaattggttttttctttttatgttttattatatacttccttattttctttaat

SEQ ID NO: 159178 - DNA, 324 bp, Arabidopsis thaliana columbia
ccgtcctctgttcttcccgtcagagtaagttggtttgtatgaaatcagcagcaaggtcagagagttagctacaacaagaggacaatcagacgttttagtgttagagctaatgtaaaggaaatagcttttgaccagcactctagagctgctttacaagctgttattgataagtttgttgatatgttttgctttctatttgctatttaattattttaaattatttattttatttttattttttttttttattattttatattttatattttattttattgatttattattatttattttttttatatattaacttttttatttttt

SEQ ID NO: 159179 - DNA, 212 bp, Arabidopsis thaliana columbia
caatcataagcccacccacttcgattaccaacttctaccgccagagacagcgagtttcagatcaaagatgtcggcgacgcttacaggatcgggaactgctttggggttttcgtgttcctcgaagatctcgaaaagagtttcttcttcaccagcttctaaccgatgctgcatcaagatgtctgtttccgatgacgagaagaataaaagtttta

SEQ ID NO: 159180 - DNA, 205 bp, Arabidopsis thaliana columbia
agggaattggaaatggattgccattaggagctgtggtgactacaccagaaatcgcaagtgttttagctagcaagattctgttcaacacttttggtgggaacccggtttgttcagctggtggacttgcggttctaaacgttattgttaaggtgaaacgcctagaacattgtgctgaagtttgttctatattttttactacgtttgt

SEQ ID NO: 159181 - DNA, 379 bp, Arabidopsis thaliana columbia
ctcgattcatccaacccgcgaagacccagtaaaccaaaatcgaagacccaacaaaacccacaagtcgaaatctcgaaatccgttgagagtttgttcctttttttgtttgctcggagatggaggctttgccggaggatgaagagtacagtttcagggaagtagtgttgccgtctttgattccggtagtgccggagccgtaacttgagagatagagctgtgagagtagttgtgtgagtgtttttatttttgctggtatttctttttttcttattatttttttttttattttattttggatattcttttgttattttttttttaatttttttttttttttttttttattttttatttattttgttttttttagttctttttt

SEQ ID NO: 159182 - DNA, 59 bp, Arabidopsis thaliana columbia
cggacgcgtgggttttgctaagtcaatggagattatggggagagttaaagtgaagactg

SEQ ID NO: 159183 - DNA, 449 bp, Arabidopsis thaliana columbia
gcgacagcccatttgtgtgaagctgtcttgtctcagaaagaacaggacaaggtctcgaaattgcctggtcagaattttaatgttagttttgctcactactctgggtttgttgctacttatgagcattttttatgagctttttttttctgataatttgtatgtctttttatttctttttcttttctccctttcatttttttcttttttataatattatttcttctttaatattttcattatttctatttttttttctttttattttttatttttttttagttatttattgttatttccttttctatcttttttattctctttttatttattttttttttatttatttgttttttttttttcttttatacgttgttatttttgttattttttttacctcgcttattttctttgtttcttcattttcttaattttttattttttcttttttt

SEQ ID NO: 159184 - DNA, 346 bp, Arabidopsis thaliana columbia
cttcctccttctttcacttagctcttcctagtgttaaaccagagtaaagcttgaaactttggactaaaagaatggcgtctttgggtgtgtcggaaatgcttggtactccccttaacttcagggcagtttcaagatcgtctgctccgttggcatcaagcccatccacgttcaagactgttgctctcttctctaagaaaaagccagctcctgctaagtccaaggctgtttctgagactagtgattagctctccaagctgaatggtccctgcagtatgtattttttgtttgtttgtcttatttatttattttagtttccattttctttatcgtttaatacatttttttt

SEQ ID NO: 159185 - DNA, 123 bp, Arabidopsis thaliana columbia
gagaaatggaggaaggtctaaagattcaatctttggtcatttatccgatcaaatcttgccgtggaatctctgttcctcaggctaccgttactcatactggttttcagtgggacctgtattggt

SEQ ID NO: 159186 - DNA, 464 bp, Arabidopsis thaliana columbia
gccgctacacacttttctgcgatatctctgagatttgttgacagtctctaaccatgggtaaagagaagtttcacatcaacattgtggtcattggccacgtcgattctggaaagtcgaccaccactgggcacttgatctacaagttgggtggtattgacaagcgtgtcattgagaggttcgtgaaggatgctgctgtgattaacatagaggttctttaagtacgcatgttgttcgttacatcttaaatattttgcaagttctttttattttatttgtttcttttttactaattatatttatttttttctttttatttttttttctttttgatttcttctgttcttttctttttattattattttttatttattttatttttaatttatttttaatttttaattttcattattatttttttaattcatttattattttgttctgtttatattttttatgtttttac

SEQ ID NO: 159187 - DNA, 419 bp, Arabidopsis thaliana columbia
caatctctcatttccaaccatggcttcctccgccgcccaaattcacatcctcggcggaatcggattccctacttcgtcttcttcctcctccaccaaaaacctcgacaacaaaaccaattccattccacgaagcgtcttcttcggcaacagaacaagtcctttcactactccaacctccgccttccttcgtatgggacgaagaaacaacaacgcttcccgatacaccgttggtccagtccgtgtggttaacgagaaagtcgtcggaatcgatttaggcacgacgaattcagctgttgctgctatggaaggaggtaaaccaacgattgtgactaacgctgaaggtcaaagaactacaccttctgttgtggcttatactaagagtaaagatagacttgttggtcagatggctaaacgtcaag

SEQ ID NO: 159188 - DNA, 377 bp, Arabidopsis thaliana columbia
agaagctctcctttgttgctgttgactacgagcaggagatggaaacctcaaagaccagctcttccatcgagaagaactatgaattacccgatgggcaagtcatcacgattggtgctgagagattcagatgcccagaagtcttgttccagccctcgtttgtgggaatggaagctgctggaatccacgagacaacctataactcaatcatgaagtgtgatgtggatatcaggaaggatctgtacggtaacattgtgctcagtggtggaaccactatgttctcaggtatcgctgaccgtatgagcaaagaaatcacagcacttgcaccaagcagcatgaagattaaggtcgttgcaccacctgaaaggaagtacagtgtc

SEQ ID NO: 159189 - DNA, 389 bp, Arabidopsis thaliana columbia
gaggaaatcaagaatgttcctgaacaggaggtgccaaaggtagcaacagaggaatcatcggcagaggttacagatcgtggattgttcgatttcttgggaaagaagaaagacgaaacaaaaccagaggagactccgatcgcttcagagtttgagcagaaggttcatatttcagagccggagccagaggttaaacacgaaagtcttcttgaaaagcttcaccgaagcgacagttcttctagctcctcaagtgaggaagaaggttcagatggtgagaagaggaagaagaagaaggagaagaagaagccaactactgaagttgaggtaaaggaggaagagaagaaagggtttatgtagaagttgaaagagtagctttttggacacaataaacc

SEQ ID NO: 159190 - DNA, 332 bp, Arabidopsis thaliana columbia
gaaataaattgcacacttttgaaggtcatgaggcacctgtttattccgtgtgcccacaccagaaagagaatattcagttcatattctcaactgctgttgatgggaaaataaaggcttggttatatgacaacatgggttctagagtggattatgatgcccccggtcgatcttgcacgtcgatggcatattgtgctgatgggactagattatattcttgtggtctagtaatgttttttatgtttttttttttaatttgtatctttttatttattttttttttcttttttttattttttactttttatttttttttcatttttattattattttt

SEQ ID NO: 159191 - DNA, 402 bp, Arabidopsis thaliana columbia
cttctttgttcttcatctttttatcttaaattattttgtctataaaatcgagtttttttttgtctacgttggggaatttgtggaaatagtgggaaggagctgttgctgaagatggaagaactcctagcgtctgggatactttctcacacacttacaatagaggtaatttaggtaatggagatataacatccgatgggtatcacaaatacaaggaagatgttaagctgatggcagaaatgggcttagaatcattcagaatctctatctcctggtcaagacttatacctaatggaaggggtctcattaacccaaaaggtctactgatttacaagaactctattcaagaacttataagccatgtaatcgaactacatgttacactttaacactatgatctttctt

SEQ ID NO: 159192 - DNA, 356 bp, Arabidopsis thaliana columbia
acgcgttcgagtaaaatggaagagcatgcggattcgatctcgtatttcagtagatcatcagaatacaggacaggaagcaacggtgacacgccaagacgaaagataatactaaaaaccacaaatgcttatttctactgtttcacaagagaacaaggctcttttgattggttcaaaggtgttatgaacttagatgcataatctttattacgatgttttttagtttttctttctttttaataagtatatagaatagtttattaattcttattttatttttatttttatatttattttttaataattttatttttttattttattttttttattttatagtttattttactttatattat

SEQ ID NO: 159193 - DNA, 332 bp, Arabidopsis thaliana columbia
ctcatcctcagaaagaatggctcaaaccatgctgcttacttcaggcgtcaccgccggccattttttgaggaacaagagccctttggctcagcccaaagttcaccatctcttcctctctggaaactctccggttgcactaccatctaggagacaatcattcgttcctctcgctctcttcaaacccaaaaccaaagctgctcctaaggttgagaagccgaagagcaaggttgaggatggcatctttggaacgtctggtgggattggtttcacataggcgaatgagctattcgttggtcgtgttgctatgatcggttttgctgcattcttgtttt

SEQ ID NO: 159194 - DNA, 250 bp, Arabidopsis thaliana columbia
cttaccgattccgaattggctaaggaagttgactaccttatccgcaacaagtggattccttgtgttgaattcgagttggagcacggatttgtgtaccgtgagcacggtaactcacccggatactatgatggacggtactggacaatgtggaagcttcccttgttcggttgcaccgactccgctcaagtgttgaaggaagtggaagagtgcaagaaggagaaccctcattgcctttatttaaatcatcgta

SEQ ID NO: 159195 - DNA, 275 bp, Arabidopsis thaliana columbia
cggacgcgtggggtcaggcttcaattagaagaagttcttcatatctgattggttacttcttcaagagtagcaagctttacttaagggatgaagcttcaaacatgatatctaccttgattgatatgctcaagtattcagattcaactactttttggttttttttttaattttttaattataaattattttttttattttttctttctttttttttattttattttttcatatttattttttatttatatatttatttatttttttcttttaatttt

SEQ ID NO: 159196 - DNA, 196 bp, Arabidopsis thaliana columbia
cttaaaaaccatttccacgatcttcttcttcttcttccctcaaatatagcttaggattttcttaatttcctctacccaagctccatggctgctttcaatttcttcctctcttcttaattctctcaggtaggggagatttgagtagtagtagattgttagatttgtaattcagctattggtgaagaggaagggagag

SEQ ID NO: 159197 - DNA, 249 bp, Arabidopsis thaliana columbia
cttcttcctccttcaatctctctcgttcgtatcatctgctctgcgatttcaatggcgagccgttggttgagacctgaggtgtatcctttgttcgctgctaccggagttgccgttgggatctgtgcgttttccttgatcagaaacatcaccggaaaccctgaagtcagatgcaccaaggagaacagggcggctggaattttggattaccatgcagagggtgagttgtatattgtaatattttttgtagta

SEQ ID NO: 159198 - DNA, 218 bp, Arabidopsis thaliana columbia
cgcacatccgccgttgctgcagctgcttcttccatcatgggtactcgggtggctcccggtatccatcccggttcaggtcggttcacagccgtgttcggtttcggaaagaagaaggcagctcccaaaaagagtgccaaaaagacggtgactacggaccggcctctttggtacccaggcgccatttctcctgactggcttgatggttccttggttggaga

SEQ ID NO: 159199 - DNA, 385 bp, Arabidopsis thaliana columbia
gtgatgtgaacaatctcactctctttctctatctctctttcgagtttctttggagtattatataacaaatcagtccaagacacctcttttctcacaccaatctcgctctcaccacaaaacagagaatctcagatcgaagaagcaaagaaagagagaatgggtttcacttcccgaggaaacccttcttttctcttcttcttcttcttcttcctctgtctctccacagtctctgcttacatcaacagcacaagcagcaataatgatgaagtaagaagagagctagcttctgggagatgtaattggtttagagggaattgggtttatgatgtaaagtacccactttatgatccttaataatgtccattcatagatccacaggttaact

SEQ ID NO: 159200 - DNA, 344 bp, Arabidopsis thaliana columbia
ctcttgactatgcacgtacccgtcttgccaatgactccaagtctgccaagaagggaggaggtgaaaggcagttcaatggtcttgttgatgtctacaagaagaccctcaagtcagatggtattgctggactttaccgtggtttcaacatctcgtgtgctggtatcattgtctaccgtggtctctactttggactgtacgactctgtgaagcctgtcctcctcactggagacctgcaggacagtatcttcgctagtttttgctcttggatggctcatcaccaatggtgctggtcttgctttttcccttttgacacttttagaaatattttgtttattacttttttt

SEQ ID NO: 159201 - DNA, 301 bp, Arabidopsis thaliana columbia
gctctgtatcgctcgctgctcttcctcccacagatcgaaaaccatgaatcctgagtacgactatcttttcaagctcctgcttatcggggattctggcgtaggcaagtcttgtcttcttttgagattctctgatgattcttatgtagaaagttacattagcactattggagtcgattttaaaattaggactgtggaacaagatggcaaaacaattaatgctccaaatttgggacactgctggtcaagaacggttcaggactattactagcagttactaccgtggtgcacatggaaaatttat

SEQ ID NO: 159202 - DNA, 198 bp, Arabidopsis thaliana columbia
aaaaaaaaatggctcaagcagtgacttcgatggctggcttacgtggagcatctcaggctgtccttgaaggaagtttacagatcaacggctcaaaccgtttgaacatctcaagagtctcggttgggtctcagagaaccggacttgtgatcagggctcatcagaacgtgtcagtaccataatgtagactccgttcagtga

SEQ ID NO: 159203 - DNA, 325 bp, Arabidopsis thaliana columbia
gcaatatcatttccaatttataaaagttaaagccatggctgcatctttctctgtcccctctatgataatggaagaagaagggagattcgaagcggaggttgcggaagtgcagacttggtggagctcagagaggttcaagctaacaaggcgcccttacactgcccgtgacgtggtggctctacgtggccatctcaagcaaggctatgcttcgaacgagatggctaagaagctgtggagaacgctcaaaagccatcaagccaacggttcggcctctcgcaccttcggagcgttggaccctgttcaggtgtccatgttggctaaacat

SEQ ID NO: 159204 - DNA, 117 bp, Arabidopsis thaliana columbia
caatgggtcaaggaccttccggcggattgaatcggcatggagatcggaaaccagatggtggagagaagaaggagaagaagtttggaccagtcgatccacctgttagtgttttgtgga

SEQ ID NO: 159205 - DNA, 297 bp, Arabidopsis thaliana columbia
cttcactgaagaagcttatctcaagctttctacttgtcttatactccaccaccatcattgttgcttcatcagaatctcgatgtaggcgttttaaatcgatcatcagctttggtgattccatcgcagacaccggaaattatctccatctctctgatgtcaatcaccttcctcaatccgcctttcttccttatggcgaaagcttcttccatcctccctccggtcgtgcctctaatggccgtctcatcatcgactttattgccgaattcttgggacttccatacgtaccgccttactttg

SEQ ID NO: 159206 - DNA, 341 bp, Arabidopsis thaliana columbia
acgcaagctaccacagatttagagtttatccaccttatctttcgccgagatccaacaatggctgatgtggaaccagaggttgcagcagcaggagttccaaagaagagaacgttcaagaaattcgccttcaaaggagtcgatctcgatgctcttctcgacatgtctaccgatgatcttgtcaagctcttctcttcccgtattcgcagaaggttctctagaggattgacgagaaagcctatggctttgattaagaaactccgcaaggcgaaaagagaggcaccagctggtgagaagccagaaccagtgagaacccacttgatggacatgatcattgtgcctga

SEQ ID NO: 159207 - DNA, 158 bp, Arabidopsis thaliana columbia
aattgagtttgtgtctcgtaacttatcctgtgtgcgaaaatggtgaaagcaactaaggcagagaagaagatcgcctacgataccaagctatgtcagcttatcgatgagtacacccagatcttggtcgttgcggtcgaaatcgttggatcatcttagct

SEQ ID NO: 159208 - DNA, 427 bp, Arabidopsis thaliana columbia
ggccaattagcatcctttaacacgttgcttcaactggaaaatgaacatatgaaggcgataatagcaaaaatagagtcccttcgtcctaatgttctgctggtagagaaaagtgcatcttcatatgcccagcaataccttctagagaaggaaatttcattggtgctcaatgtgaaaaggtcattgctgtaccgtattgcccgttgcactgttgctttttttttattttttttatatacattttgctatttactattttataatatttaattttttattattttatgctcctttattaatatttttattttaacttcttattttttaattttttatattatatctttttttcgaattttttatcttttatttaatatttttttgtcttctactattttcttatgtttttacttttttattatattttttt

SEQ ID NO: 159209 - DNA, 264 bp, Arabidopsis thaliana columbia
gaaaaatcccccaaagccatgtcttaccttcttttctccgatccggtttcacgaatccacccagaacctcaatctctaacctctttcgaccacttcgatctcctccctgactctctcctcctcttaatcttcgacaaagtcgccgacgtcaaagatctcggccgttgctgcatcgtatctcgtagattccactctctcgtccctttcgttgagaacgttctcgtccgtgttgattgcgttatctccgactttggttcctttttc

SEQ ID NO: 159210 - DNA, 406 bp, Arabidopsis thaliana columbia
cggacgcgtggggttgaagattaatcggacaaaggagtttagaagagtagaaaaaacgacaagaagaaagaaacacagttgcaggagagaaagagatatggctgtccggataaacgcgatggcggttgacgttgtggcgcacgcgctggcggtaatagcggcgattattgttctggtttgtagtttcattattagaggtttattgtttttgtattgtatttttaatgtattttgtcttttaatctttatttttgtatctgatattcttctttgattttatttagtttgtttagttgtcttatcatattatagttatttattttatttatattgttttttttatttttatttatttatactttattttcatttttttatatttttatatctttatttatattatttt

SEQ ID NO: 159211 - DNA, 338 bp, Arabidopsis thaliana columbia
  unsure (1)..(338): unsure at all n locations
tgatctttgtgataacaatcttccaccatgggaacaaagtttttagctctgggtttgtctctgtgtcttgttctctcaagcttctatcaagtttcttgccaggatgaaggaactggaagtttgagtactttagatctaattgagcatgaatatcaaactagtgtcaattctctccaaggcaatgaagcagtagatcaaactgagaccagtggtcagaaaaacagtacagtgtctgataacaacactatttctttgtctctatctgaagaacctgcattggaaactcttaaagaatctgnttgatacatcagttgagttaggagctgttcctgatgaat

SEQ ID NO: 159212 - DNA, 299 bp, Arabidopsis thaliana columbia
aaaagagagatttaatacaaaagaaagagaaaaaagaaagatatggcaggactcatcaacaagatcggagacgcactccacattggaggaggcaacaaggaaggtgagcacaagaaggaagaggaacacaagaaacacgttgacgagcacaagagtggtgagcacaaagaaggtattgttgacaagatcaaagacaagatccacggtggtgaaggtaaaagccacgacggagaaggcaaaagccacgacggtgagaagaaaaagaataaggacatgaaggagaagtaacatcatgatga

SEQ ID NO: 159213 - DNA, 295 bp, Arabidopsis thaliana columbia
gaaatgggaggagtgtccttcctctccactgttccttccttcaccaacacaaccaatcatcaacatctcactacactctcttcttcttctcatcgctctgctgttatacgatgttccaagattgaacctcaagtttccggtgaaagtttagctttccaccgccgtgatgttctcaaactcgccggcactgcagtcggaatggaattaataggcaacggtttcattaacaatgtgggtgatgcaaaagctgctgacttgaatcatcgtagacaacgatccgagtttcaatcaaaga

SEQ ID NO: 159214 - DNA, 243 bp, Arabidopsis thaliana columbia
ctacaactccgttgactcctgccaagcagctaacggcatttggtagtgatgacggaactgtatgggatgatggtgcttacgttgggggtgtcataatatactgtttataatattataatttgtgttatctcatatagtttcatagctaacaagttttccttacactgtctttgactaattttaatttttattattttaatttattttttttttatatatatcatatattttatatattattta

SEQ ID NO: 159215 - DNA, 260 bp, Arabidopsis thaliana columbia
gaagaacaatggcttcctctatgctctcttccgctactatggttgcctctccggctcaggccactatggtcgctcctttcaacggacttaagtcctccgctgccttcccagccacccgcaaggctaacaacgacattacttccatcacaagcaacggcggaagagttaactgcatgcaggtgtggcctccgattggaaagaagaagtttgagactctctcttaccttcctgaccttaccgattccgaattggctaaggaa

SEQ ID NO: 159216 - DNA, 464 bp, Arabidopsis thaliana columbia
atataggttgctggcacagaggatggtatcaaggagccaacagcaacattctcagcttgctttggtgcagctttcataatgttgcatcccacaaagtatgcagctatgttagctgagaagatgaagtcacaaggtgctactggttggctcgtcaacactggttggtctggtggcaggtatatatgtccttctatggaaatcgatacaacaaaacgctgccttgtaacacatgtttgtaggctattaacatgatctgtaatgttttatttcctgcagttatggtgttggaaacagaatcaagctggcatacactagaaagatcatcgatgcaatccattcgggcagtctcttgaaggcaaactacaagaaaaccgaaatctttggatttgaaatcccaactgagatcgaagggataccttcagagatcttggaccccgtcaacttcgtaagtttctgcaaatctg

SEQ ID NO: 159217 - DNA, 331 bp, Arabidopsis thaliana columbia
cgtcattagaaagtagccaggccacaaaagaaaaaaggtaaagagagagaccaatcacaggagataacgctaagataaggcttcttacatttaccatcacatataacataacgttactattattctaaaatccaaaaaaactatatgttataacattggaatcatcagtctctaagcagtatcacaccaactcaatatggctaccaccactgcagcagcagcctcaggtatttttgggatccggattcaagatcctagacctggaaccggtagggtccaagcccggttcggtttcagtttcggtaaaaagaaatcggctttatctgtcaat

SEQ ID NO: 159218 - DNA, 252 bp, Arabidopsis thaliana columbia
tcgagagatatgatccagaaatggacggacgtgttattttggcaaaagttgactgcacccaagaaggtgatctttgtcgggggggggacatacaccattacacataccttagcgttactattattgcactttctctttacgttatctgttctcacatagtcttcatattttactaatttgtacctcatcacctcattttttcttccaccattgttttttatttccttattttctttatatctatctttattt

SEQ ID NO: 159219 - DNA, 274 bp, Arabidopsis thaliana columbia
  unsure (1)..(274): unsure at all n locations
gtttgaagcattcgaagtcggcacagtcccattcaattccgatggttggggaccaccagatgcttccgacacttcctccaccagcgtcgcggcggcgaatctcctcccaaacgtccccttcgcttccttctcacgatccgaaaaactcggacgcgttgctgattggactcgagctctctcaaatccatcagctcgtcctcacaccggatccaaatcagatccatcagcgatcttcgatntctcagcttttgcagtagatgaaggatttggtcta

SEQ ID NO: 159220 - DNA, 165 bp, Arabidopsis thaliana columbia
gcagcttcaaaactcttccgatctctccctcacgctcgcaattctctcgtctccattttaatagtttttcttctcggaatcacaaatcttcggcttcttgttccttggcgtgtgtgtgtgttgttgaatggctcttgttcagcggattccaatttccttctccag

SEQ ID NO: 159221 - DNA, 459 bp, Arabidopsis thaliana columbia
ccttcgcctgaattgatgaaaggcttgtacgttgagatgaaattcgaaaagcctagcacgatccaagctattagtttgcctatgataatgacgccgccacacaagcatctgattgcccaggctcataacggatctggaaagacgacttgtttcgttcttggaatgttgagtcgtgttgatcccacattgagagagcctcaagctctctgtatttgtcccactagagaattagctaatcagaatatggaagttcttcagaagatggggaagtttactgggatcactgctgagttggctgtgcctgactcaacgagaggtgcaccggcggcaacaagaggagctcctgtttctgctcatgttgtgattggcacccctggaacgcttaagaaatggatggcatttaagagactaggtctaaatcaattgaagattctggtttttggtgaggctgaccatatg

SEQ ID NO: 159222 - DNA, 266 bp, Arabidopsis thaliana columbia
agaacatcctccaactttctcagataagcaacaatggtgaaaggtcccggtctctacaccgaaatcggcaaaaaggccagagatcttctgtacaaagaccacaacagtgaccagaaattcagtatcaccactttctctcctgccggtgttgccatcacctcaaccggaactaagaaaggtgacttattgttgggagatgtcgcttttcagacgaggcgaaagaacattactactgatttgtaagtttgcactgattctactttttt

SEQ ID NO: 159223 - DNA, 311 bp, Arabidopsis thaliana columbia
caaaaaaaagaaaacacaaaaacaaagattataatggcttcctcaaccatggctttgtcctcccctgccttcgccggaaaggctgtgaagcctgccgcatcagatgtcctcggaagcggccgtgtgaccatgaggaagactgtcgccaagccaaagggtccatcaggcagcccatggtacggatctgaccgagtcaagtacttgggtccattctccggcgagcccccgagctaccttaccggtgagttccccggtgactactgatgggacaccgttggtctatacgccgacccatataccttcttcaggaa

SEQ ID NO: 159224 - DNA, 296 bp, Arabidopsis thaliana columbia
  unsure (1)..(296): unsure at all n locations
ttcccttcttattcttcccctatattcactgcgataactttgcctctcatctcataaattaaaaaaaaaacactcttctcacaaattctttataattccccttttgatgtgtacggacacaccaccgaagcagaagcagaagaagaagaacacttctatcttcgccgccgccgtcgttttcatcatgatagacgccgntaaatgggtgagcctaaagacagtctcgctctctttctctgtcactaatcggagtcttctctaaacgaagactacgtcgtgacgattgagagatctga

SEQ ID NO: 159225 - DNA, 371 bp, Arabidopsis thaliana columbia
caaaggtattgttttgtgcccactcgtatgcctcgttgtgactataggcaactccgcggtcatactgagtcttctaccagtccacatcgtttcgactttctattcaatcgtgagtgccaaacaagtaggaccaatcttgaagatctttctatgcttatgtcttcctgctgccatcattctctggcctattgttggtattttaggaagtgttttgggaggagctttatatggtttcttctccccaattttcgccacctttgatgctgttggtgaaggcaagccttaccagtttttccaatgctttattgatgggactttgaagatatatgcatttgcagttttttctgatgtttctttattttttaaaagtt

SEQ ID NO: 159226 - DNA, 233 bp, Arabidopsis thaliana columbia
gaagaagataactccaataccagagtgaaagcattcaggaaacatgcctcctcagaagattgaaactggtcatagcgacactattcatgatgtggtcatggattactatggaaagcgagtagcaactgcctcgtctgactgcacgatcaagataaccggagtaagcaacagcggtggatctcagcatctagctaccttaaccggtcatcgaggtcctgtttgtcatgtttctt

SEQ ID NO: 159227 - DNA, 393 bp, Arabidopsis thaliana columbia
gaaattataaacccattttccttcataaatttctaaaataaaaccccttaaactttcattcacatcatccaacccccaatgggtcgaatcttgaaccgtaccgtgttaatgactcttctagtcgtaacaatggccggaacagcattctccggtagcttcaacgaagagtttgacttaacttggggtgaacacagaggcaaaatcttcagtggaggaaaaatgttgtcactctcactagaccgggtttcctgttctggtttttatattagtaagttattttgtattttttatcttacttttattttttttattattggttggtgttttttaaattattattactttattttttagttactatttttttctttttatttttttttttttttttat

SEQ ID NO: 159228 - DNA, 303 bp, Arabidopsis thaliana columbia
aaatctcaaacctttttcttcatttcttcccccctctctctctctcactctgtttctgatgggtctccgattcccacctaaggtgttggaacatatcctctccttcattgattccaacgaggaccggaactctgtttctctggtctgcaagtcatggtttgagacagaacggaagactaggaagcgagtctttgtcggaaactgttacgcggtcagtcctgctgcggttacacgacggttcccggagatgatgatctttgactttgttggtgattctcattctttctttgacttataatctct

SEQ ID NO: 159229 - DNA, 407 bp, Arabidopsis thaliana columbia
  unsure (1)..(407): unsure at all n locations
acgattcccgtcgaccccctcggagagaagaagaacctcgaactcaaaaatgagagagaagagaatcatgggacagccatcgggaggattgaatcggcaaggagatcggaaacctgatggtggagatagaagagagaagttggcttngaccacctctcgtgaggggtgagcatgtagcttttgtttcttgcttcttgttacttttattttacttcttttttttttttgtatttttttttttattttttcttattttttttattttattttctatttttttcttattcttttattttgttttttttttctttatttatttttattattttcttttctctttattttttttttatttttttatatctttatattttttttctcgttcctctcattttatctttattttt

SEQ ID NO: 159230 - DNA, 296 bp, Arabidopsis thaliana columbia
tgtaccaaccgaaactttcttcgtcttcctctgtatttaagctttaacaccctgtttttggtttccaacgttcaatcttcatcttcttctcgctgaaggtgtgtttggctctaacggtttaaagctttcttgaaacaccaattgaatcttttctctctaccggcaaaaaaaaaaagattagtccttttaggtctggaaacgccaagatcactcgttctaaaccttagattttgtctgcattttgggataatcatttttatcgtcaggtgttttcatccaatcttcatttacagatt

SEQ ID NO: 159231 - DNA, 185 bp, Arabidopsis thaliana columbia
cggtgcaggtaagcacgtctccacgtgctgtctttgttgatcttgagccaactgtgatcgacgaggtcaggactggtacttaccgtcagcttttccaccctgaacaactcatcagtggtaaagaagacgctgctaacaatttcgcccgtggtcattacaccattgggaaagagattgttgatctt

SEQ ID NO: 159232 - DNA, 304 bp, Arabidopsis thaliana columbia
gttgcaacaacaacaaatttcagaagatccgaagacgaaacgatgcctataagtgcgacaatggtcggagctttgctgggtctcggtacccagatgtactccaacgccctccgcaagctcccttatatgcgtcatccgtgggagcatgtggtgggtatgggacttggtgctgtgtttgcgaaccagctcgtgaaatgggatgtgaagcttaaggaagatcttgatgtgatgcttgctatggctagagctgttaatgagtgccgttacttagttgaagatcgggataaattttgtgtgatttttt

SEQ ID NO: 159233 - DNA, 293 bp, Arabidopsis thaliana columbia
accgaagttccgcccacgcgtccgcaccgaagctgtggattaacctattttcaccttctaaggttcttcgccgttcttatcgagccgcgaagatggatccttgccacagcctgatccacaccgatgacgttccagccacccccaaggctaacaacgacattacttacatcacaagcaacggcggaagagctaactgcatgcaggagtggcctccgattggaaagaagaagtacgagactgtctataaccttactgaccttaccgagtccgaattggctaatgatgttgactac

SEQ ID NO: 159234 - DNA, 153 bp, Arabidopsis thaliana columbia
gagaggctcgaaactttggactaaagaatggcgctttgggtgtgtcggaaatgcttggtactccccttaacttcagggcagtttcaagatcgtctgctccgttggcatcaagcccatccacgttcaagactgttgctctcttctctattaaaa

SEQ ID NO: 159235 - DNA, 397 bp, Arabidopsis thaliana columbia
atttctcacattttcgtagccgcaagactcctttcagattcttacttgcagctatgggtaaagagaagtttcacattaacattgtggtcattggtcatgttgattctggaaaatcgaccacaactggtcacttgatctataagcttggtggtattgacatgcgtgtcatttttagcgtcttgtatgattcttgtttttttttcttgatgttcttttattgtcttttttgtcttttccttatctcttatatcctttcattcttttccactcttttcttatatactttttttctattctttttttttttatcttttattgtctaattctttctttcattctttttctccccttttttctttttttttcctattactttttacttgtttctttcttttcc

SEQ ID NO: 159236 - DNA, 283 bp, Arabidopsis thaliana columbia
gccggaggagcttcatgggatgatggtgttcattatggcgttagaaaggtgcatgtagtgcaaggccaagatggtgtgtcatttatcaacttcatttatacgaatgtcttttattattcatttatttttctttattcttatattatttaattatattattttttaaatctttttattttattatttatttattatttttcattattatttattattttatttttttatttaattttttatttatattttattatttcattttttatatatatcttattatttt

SEQ ID NO: 159237 - DNA, 283 bp, Arabidopsis thaliana columbia
cttttcttcttcctttcatttgggttaagagaagccatggataccgagtttctccgaaccctagatcgtcagattcttttgggtgtcttcgttgctttcgtcgccgttggtgctggtgctgcttattttcttacatcctccaagaaacgcagagtgtgtttggatccagagaatttcaaggagttcatgtttgttaagagacttttgcttattcacaatgctgcctagtctcgtttttgttttttttctttcacttttgtcttttgtgtccttttttcgtttt

SEQ ID NO: 159238 - DNA, 412 bp, Arabidopsis thaliana columbia
caaatttagggttttctctttttttcttacttagttatcatcagatcttcaaaaccccaaaatttgcaaatcagatctcagcttcccggttagtactaccctcaaatcaactaagtttcatgtctgaacttgactcccaggttcccactgcctttgatccgtttgctgatgcgaatgttgaggactcaggtgccggaacaaaagaatacgttcatatccgtgtccagcagcgaaatggtaggaaaagcttgacaaccgtccagggcctgaagaaagagtacagctataccaagatacttaaggacctcaagaaagagttttgctgcaacggcactgtggttcaggattcagaactcggacaggttatacagcttcaaggtgaccaacgtaagaacgtctccacattccttgt

SEQ ID NO: 159239 - DNA, 424 bp, Arabidopsis thaliana columbia
  unsure (1)..(424): unsure at all n locations
ccggaaatcaaaaacagtaataaaagatcaactgcaagaaaatggctcttcctctcgagctcgaaagcctcactgaagccatctcagctgggatgggaatggggagtggntgagnatgcatggntnngccccccggggaaatcccaaagggaccataaaaaattgttaagaaagcaggcaaagttttttttgttgagattgtggaaggccttttttttattgccttatctctttctgttatcctctaaccttagttcttccctttcttttttttcgtttttttatcttcttatttctcatttggggtttttcattttttttatttccttttttttttaatctttttcactttttttctttttattattaatcttatttttctttttttatgtctttctttttttaatttcttttctattttttt

SEQ ID NO: 159240 - DNA, 196 bp, Arabidopsis thaliana columbia
cactcccaagattcgcattacctttcttataatcgccgagattgttcgagcctgaataatcaaaatggttgtgcttgctgctgcgattgtggtcaagtctgggaaagtgattgtttccagacactatgtggatatgtcccgtatcataatcgaaggtctacttgcagcttttcctaagctggttggcatgtgtatg

SEQ ID NO: 159241 - DNA, 440 bp, Arabidopsis thaliana columbia
cttaggttcatcgtcagcacaatatggtgcaacccaggctccaaaagctggcacagatctgttgctggatattctatcaattggaacaccttctcctgcacaaaacagcacatcatctattggtttattatcaatagctgacgttaacaataatccctcaattgcgctagacacactttcttcaccagctccacctcacgtagcaacaacttcgtccaccggtatgtttgatttgctagatggtctttctccaagcccatcgaaggaagccaccaatggtccagcttatgcacctattgttgcatacgagagcagctccttgaagattgagttcaccttcttaaagacaccagggaatctgcaaacgacaaatgtccaggcttactttactaatttattctccaatactttcacagaatttatattccaagctggctgtc

SEQ ID NO: 159242 - DNA, 377 bp, Arabidopsis thaliana columbia
cagaagatggcccaaaaggtggaagcacaaggaggtaaaggagccaacctatgggacgatggatcgacacatgacgccgtgaccaagattcagctcgcagcaggcatagacggaattcaatatgttcagtttgattatgtcaagaacggacaacccgaacaagctcctcttcgtggtaccaaaggccgtgttctcccagctgatccgtttgtgattaaccatccagacgaacatctagtttctgtagaaggttggtatagccctgaaggtatcattcaaggaattaagttcatcttcaacaagaagacttctgatgtcattggatccgatgagggtacttacttcactctacaagttaaagacaagaagattattgg

SEQ ID NO: 159243 - DNA, 165 bp, Arabidopsis thaliana columbia
ctcatcttcacaggaaacaatggtgtttgtgaagtcctccaaatcgaatgcttacttcaagaggtaccaagtgaagttcaggagaaggagagatgcgaagactgattacagggcaaggatccgtcttatcaatcaagacaagaacaagttcaacacccctaagta

SEQ ID NO: 159244 - DNA, 322 bp, Arabidopsis thaliana columbia
attttcgtagccgcaagactcctttcagattcttacttgcagctatgggtaaagagaagtttcacattaacattgtggtcattggtcatgttgattctggaaaatcgaccacaactggtcacttgatctataagcttggtggtattgacaagcgtgtcatcgagaggttcgagaaggaggctgctgagatgaacaagaggtccttcaagtacgcatgggtgttggacaaacttaaggccgagcgtgagcgtggtattaccatcgattttgctctatggaagttcgagaccaccaagttctactgcacaagcattggtgcccc

SEQ ID NO: 159245 - DNA, 288 bp, Arabidopsis thaliana columbia
ctggatttgaaagttcgataaaaatctactgatacatcgacttctggaagcgatctcgatctctctagaattgtttcgacgacgaagatgaagaagattcaaattggtgcggtggcgctattggtgtttctatctgtggcctctctctttgaaatcggattggcttctccgaacacagttcctgctttcctctggtctccgcatcttcagtctgctaatggtgaattggatgaggctgtaaattatcaggtcatgtctgcaaaggatctagttggttctgtgtttact

SEQ ID NO: 159246 - DNA, 293 bp, Arabidopsis thaliana columbia
cttttaacacttgttcttttaaggcaaaaaggctcgagccacagagatctgagtttctcttcttcgagatctgatcgccgaatcgcataatctcccatcgaagcagaatggagacttttctattcacatctgagtctgtaaacgagggacacccagacaagctctgtgaccagatctctgatgcagtcctcgatgcctgccttgaacaagaccctgacagcaaagttgcttgtgagacatgcaccaagaccaacatggtcatggtctttggtgagagcactaccaaggctact

SEQ ID NO: 159247 - DNA, 383 bp, Arabidopsis thaliana columbia
agcgagttcatcatcttcttcgcctggattcgatcaagactagcactttcatcagatttgattacaatctctcttatcttccaagttataatcataatatccgagcaatttgggatctgggtctttcctctacattcaatttcttaataaagctggcctctttcttccgagatggttcttgagcgatgatgagtgactctcagcgatcactttctgtgcgattgagccgccggggtgagagaagcaatcattactcacaatctaaagatgctgtggctggcttcttctctcccaccagattgcatgctgattacactttgaaaaaaatttggaaggcaggcttccttcgcttgcttcttgttggcggcattgtctggatgcta

SEQ ID NO: 159248 - DNA, 347 bp, Arabidopsis thaliana columbia
cgcatggccaagaatatttcctcatgggagaaaggagaaaggagtgagtcaagctggtgtgcaattctaccacgacctcatcgacgagctcataaaaaatggtataactccattcgttactgtttttcactgggacactccacaagatttagaagatgaatatggcggctttttaagcgaaaggattgtgaaggatttccgagagtatgcagattttgttttccaagaatacggtggaaaagtgaaacattggatcactttcaatgagccatgggttttcttgcacgctggctatgacgtatgcaaaaaggcacctgtttcgtgctttttttacctcaatgcttaat

SEQ ID NO: 159249 - DNA, 285 bp, Arabidopsis thaliana columbia
aaaacatttgagataaaaatcagaaaagtaaagagacgaaaatggcggatcaacaagcaggaacaatcgtcggaggagttcgcgatattgatgcaaatgctaatgatcttcaagtcgagagtctcgctcgtttcgctgtcgatgagcataacaagaacgagaacttgactctggagtacaagaggctccttggtgcgaaaacacaggttgtggcaggaacaatgcaccatctaactgtggaggtggctgatggtgagaccaataaggtttatgaggtctaggttt

SEQ ID NO: 159250 - DNA, 438 bp, Arabidopsis thaliana columbia
attctaaagaaaaatgaagatgataatccaaattttcttcatcatctccctcatttcaaccatctcttttgcctctgttcaagacttttgtgtagctgacccaaagggtcctcaaagcccatcaggttactcttgcaagaaccctgaccaagtcaccgaaaatgactttgcatttaccggcctcggcacagctggaaacacttccaacatcattaaagccgcagtgactccagcctttgctcctgcttacgcaggcatcaatggccttggcgtatctctggctcgtcttgacttagccggtggtggtgtcatccctctccacactcatcctggtgcttctgaggtccttgtagtcattcaaggcaccatttgcgccggatttatctcctccgccaacaaagtttacttgaagactctcaacagaggagattctatggt

SEQ ID NO: 159251 - DNA, 251 bp, Arabidopsis thaliana columbia
atcgaattaaagtcaatggcgtcacgtttatgtcttttccttctcgttgcgtgtatcgccggagcatttgccggagacgtcatcgagctcaatcgatctcagagggagttcgattatttcgctctatctcttcaatggcctggaacctattgccgtggaactcgccattgttgctccaataacgctagctgtagaggttccgatgctctaactcaattgacaattcatgggttatggcctgactttaacga

SEQ ID NO: 159252 - DNA, 411 bp, Arabidopsis thaliana columbia
ccaaaatcctttttctttgttttggtaaaataagtaaacccaaaatcttcccaaatcaatcaaagcgagaaagagctatgggtgcaagcaatcacgataacgatttcaattctacgacaaactggaaactcgtcgacggtacactcatagacgccatctcatttgaatcctccttcactgcaaaccccgaatctgacgacggaatcatctctgccgccgtcgatcatgtaaccaaatccccgttacttcttctccctccggttcccaacggcgagccttgtgaaattacaattacatttgcacaagaacatgaattaaggcaaatctacatccgaagtagtgcacgagtatacgaagtgtattacacgaaaaagcgacgacatgataaggaatatctgtgtactgttcgat

SEQ ID NO: 159253 - DNA, 457 bp, Arabidopsis thaliana columbia
gtgaaacattgagagtcatgtacgaacaatggtttgtcaaatacaaggttgatgttgtgtttgaagttcatgttaatgcgggggggataaaaaatattataattttatttgttactgatttttacttagtcactccacaagtttttatagattaattttgttgttttttaatccatatgatttgtatggatttttttgttagtttttcttattttgtttttttaatattattgtttttaatttttcttactattttttttttttataattttttttttattttcttgctggatatattttatttttatttttttttttacttattatttttttttttgtcgtctttatttttatttttttttttttatattctattttttattatttatttcttttatatttaatatttttattttttttttatttatttctcattaatatattttttattcttttt

SEQ ID NO: 159254 - DNA, 448 bp, Arabidopsis thaliana columbia
cacaatgggggcaccaatggcctctttccttgttttagcattctcccttgcttttgtcggtcaaaccaccgcaaattactggtactcttcccctccaccaccggttaagcattactctcctcctcctgtttacaagtccccaccaccaccggttaagcactactcgcctcctccggtttacaagtctcccccaccaccggttaagtactactcccctcctccggtttacaagtctcccccaccaccggtttacaagtcttccccaccaccggttaagcactactcccctcctccggtttacaagtcctccccaccaccggttaagcactactcccctcctccggtttataagttttccccaccaccggtttaacactactcccctcctccggtttacaagtctccccctccaccggttaaccactactccccttctccggtttacaag

SEQ ID NO: 159255 - DNA, 364 bp, Arabidopsis thaliana columbia
  unsure (1)..(364): unsure at all n locations
ggatcagcaagtgcaattacaggttcgagaagtttcgatcttcccgatgaacttcttcaagttctaccgtccgatccattcgagcagctagatgtagctcgcaaaatcacatccattgctctctcgacacgtgtctcagctctcgaatcagagtcgtcggatctccgggaacttctcgccgagaaagaaaaagaatttgaagaactccagtctcacgttgagtctctcgaggcttctctttccgatgcgtttcataagctttctctcgctgatggtgaaaaggagaatctgataagagaaaatgcttctttgtctaatactgncaagagacttcagagagatgtctcaaagcttgagggtttta

SEQ ID NO: 159256 - DNA, 263 bp, Arabidopsis thaliana columbia
attttctcttcttcttctccaagaaaacactgaagaagaaatggggttccttaagccaaccatggcgattctttttctagcgatggtcgccgtttcatcagccgtggacatgtcaatcatctcctacgacgagaaacatggcgtctccaccaccggtggccgtagcgaagccgaggttatgagtatctacgaggcatggttggtgaaacacggcaaggctcagagccagaactctcttgttgagaaagatcgacggttcgaga

SEQ ID NO: 159257 - DNA, 407 bp, Arabidopsis thaliana columbia
aacttgttgatacatataagtttcgtctgccaaagtttactgtaaaatttgctatacagtttatgcggagagctattcagaaaaaagcaaagtttgatataatggaattgaacaccattaaggtggcaaaggctagttttgttccggttttatttggacatgccttagatgatgactttatccgccctcatcattcagatcgtatatatgaagcttacgtaggtgacaaaaatatcatcaaatttccgggagaccacaactccccaaggcctccattctattttgattcgatcaatatctttttccataacgttcttcaacccccagaggtggtggggccgacattttatgacccattggatgattactttgcaaatggcagttggggaactatgaatgacacaaat

SEQ ID NO: 159258 - DNA, 319 bp, Arabidopsis thaliana columbia
ctttaattgatcatagcaccgataacaatctactctctttaaaagaaattcgtaagtactatcaagaagcagaagatggcccaaaaggtggaagcacaaggagggaaaggagccaacctatgggacgatggatcgacacatgacgccgtgaccaagattcagctcgcagcaggcatagacggaattcaatatgttcagtttgattatgtcaagaacggacaacccgaacaagctcctcttcgtggtaccaaaggccgtgttctcccagctgattccgttgtgattaaccattcagacgaacatcttgtttctggagaag

SEQ ID NO: 159259 - DNA, 324 bp, Arabidopsis thaliana columbia
ctttcacccacaaaaagggttttttcttttcttcatcacattctacaccccaaagttttaatctgtttttatttgttctcttcaattaatatattgaaataccaaaaaaaccttgattgttgtaatggctgagttcaagagtaagttaaacaaaggtcacgcctttacaagcaaatgtgcttccttggtgaaggagcaacgagctcgtctctacattcttcgtcgttgtgctaccatgctttgttgctggtacatccaaggcgatgagtaaagagatgactcttctccttaattatatataaatctatatataaaatatatata

SEQ ID NO: 159260 - DNA, 270 bp, Arabidopsis thaliana columbia
ttcagatataggcagattctcacatttgcaaacatgacgactcagatcagcaagaagagaaagtttgtagcggacggtgtgttctacgctgaattgaatgaggttcttacaagagagctagcagaggatggttactctggtgttgaggttagggttactcctatgaggactgagattatcatcagagctacacgtactcagaatgttctcggtgagaaggggaggagaattagggaattgtctttccttgttcagaagagatttaagttt

SEQ ID NO: 159261 - DNA, 320 bp, Arabidopsis thaliana columbia
cgctgttacttttaagtgtcagtcttcactcactcattcaacatcgtttcaaatttcagagcggaggtctctaaacccaaagcctgtgcacttaattgcctattcttcaaaaggcgagtttcctttaccaagcttgcaaagttatctaaactccaaacgatattgaaaacgcgtgtgctcatttctcttattctttcttcttacgccatgactaaagatgaagactttaagctcctaaagatccagacgttgtcactcagagtcaacattcactgcgagggctgtaacaagaaagtcaagaaactttttagaggatcgaa

SEQ ID NO: 159262 - DNA, 454 bp, Arabidopsis thaliana columbia
  unsure (1)..(454): unsure at all n locations
cttcaacaacacagcagcttaaagacaattaagaagaagcttatccgaaaggcgcttgatatgatccgcaagcttgctgaagaagatcctgatgaaatccatgatgatgagaaaaaagatgtggagaagtctggtgagaacgatgagaagaagggtcaatacacaaaattctggaacgagtttggcaagtctgtcaaactaggtatcattgaggatgctgctaacaggaaccgcttggcaaaacttcttcgttttgagacaacaaagtccgatggaaaattgacttccctggatcagtacattaagagaatgaaaaagagccaaaaggacatatnttacatcacaggaagcagcaaggaacagctagagaaatctccattcctggagaggctcatcaagaaaggctttgaggtcattttttcacagacccagttgatgaatacttgatgcaata

SEQ ID NO: 159263 - DNA, 176 bp, Arabidopsis thaliana columbia
catagagaagatgactcaaatcatgtttgtgtcttttaactctcccgctatgtatgtcggcatgcaagctgttctctgctggtacgccagttattatacaacctgtattgtgctggattctggttaatggtgcgattttacattatgtcaaattttctttctaacttttatatttt

SEQ ID NO: 159264 - DNA, 148 bp, Arabidopsis thaliana columbia
atttattctgacgaatttgtgatcggtggctgcaaatggcgtcttatagcctatcccatgggaaataggattaaaaagtatatgtctttgtatgtggaagttgctgattctaaacatttgccttctggttggagtattaacacacaat

SEQ ID NO: 159265 - DNA, 416 bp, Arabidopsis thaliana columbia
accttgctgattcacaagacggtgcgtccatcgaccgtgcacttgactttattttgggatggcatctagacacaactacatttggagattatccacagatcatgaaagacattgttggacatagattgcctaaatttacaactgagcagaaagcaaaactgaaagcttctaccgatttcgttgggctcaactactatacttcagtgttttcaaaccatttggagaaacctgatccttcaaaaccaagatggatgcaagattctcttattacatgggagtctaagaatgcgcaaaattacgccattggtagcaagcctttgaccgctgcattgaacgtttactcgagaggttttagaagtctgttggagtacattaagggcaaatacgcaaattcggaaattattgacatggtaaac

SEQ ID NO: 159266 - DNA, 259 bp, Arabidopsis thaliana columbia
atagaaatgagagctctcttgtgctcacaccgtttactaccattatcatctctctcaagaacaaccgtcaaaaccaaatctcacaatccaaaaaccctatatcctaacaacaaaccaagatgggaatccaagctccacgctggacctaaagggtttcaatcttctagaacctctgaaaaacccggccggccagacccggacccggaagacgatcccccgatacctcaagaagtgttcgagaggatgatggggaggattg

SEQ ID NO: 159267 - DNA, 253 bp, Arabidopsis thaliana columbia
  unsure (1)..(253): unsure at all n locations
tcgaaaacaaagtctattccatacgaataagagcctcaggttaattttttaaaagatgggttattggaagtcgaaggttgttccagggatgaanaaattgttcgagaagagtccagcaaaaaaggaagttgttgtggaggagttgtcattattggattcttgtccattctattcttactttcttatctctcttatatattttctttacttttctttttatcttttctcttttttctatttactgtgtcttttt

SEQ ID NO: 159268 - DNA, 232 bp, Arabidopsis thaliana columbia
cttgaacttcaaagaagagaacaacaatggctctcagaagatttctggtgatgctctaaaggacgctgtgacaagtcctttgtcgctgagtacccaatcgtgtccattgaggacccatttgaccaagatgactgggagcactatgctaagatgaccactgagtgtggaaccgaggttcagattgtcggtgatgatttgttggtttttaaccccatgagagttgcttaggcaa

SEQ ID NO: 159269 - DNA, 186 bp, Arabidopsis thaliana columbia
  unsure (1)..(186): unsure at all n locations
taaacctcaatcaaaacaaacaaacaaaaaaccatgatgcagcgagtattcacctttggaaaaggaagaagcgaaggcaacaacggcatgaagtccttgttgggagggaaaggagccaacctggcggagatggctagcataggcttggcggngccggcggtgctaaccatattttctgtggtttgt

SEQ ID NO: 159270 - DNA, 215 bp, Arabidopsis thaliana columbia
aacccttcttcatcttcttcttctcctccacctaaccaatgggagcaattgatctctctttctgacagagtcttctcttctcttcggcgcgttccaatctttcctcctccacacaccgttccgtctcttttttgccgccgggaagcaagtcacggtgtctgccgtcggaacctcaatgagacatgacgaccacacggcctcccaggaggcgaagc

SEQ ID NO: 159271 - DNA, 315 bp, Arabidopsis thaliana columbia
cttagaaattgtttactgcttcaagaaacattgatttattgtaaaaagagattacaaagacagtgagagtagaaaggaaggaaacatgagtttttgggattacaagcattattattatatagacaagaaacaacaacacatgtgattatctttttgacggatttaacgaccaagcgatgatagatcgatgagattgattgtacctcacatagactgagcttatatggagattggcctctagatgcttggcctcacgttcagacggcttgcaagtttctgtcccaaggatcgatcagcctgagaccagtaagagat

SEQ ID NO: 159272 - DNA, 216 bp, Arabidopsis thaliana columbia
  unsure (1)..(216): unsure at all n locations
aacgaagctccaaccacaaacaattatattctgtagcttggtacccgattcgaagcgattatggtgtgggagtgaacaatataagattgatgtcanagctaaaagatgcatcaaaagggtatatggtgaatgatgccattatctttgaagctgaaatggttaaggtctctgtgacaaacatagtctccgtttaaatatcacgttctttttttttta

SEQ ID NO: 159273 - DNA, 341 bp, Arabidopsis thaliana columbia
aggaacttaagtttctgagtccatgaagatgccagtggcattggtctggctactggcattcactattctactgatcagtggggaaggcaataatgccatctgcaaggagaattttaagttagaccctagacctcatagtgtttcgatcctcgagtttggagcggttggtgatgggaagacgctcaacactattgctttccagaacgctgttttctatctcaagtcttttgcggattaaggcggtgctcatctttatgttccaccaggtaaatggctcaccggaagccttaatctcacaagctatcttactctcttcttggagaaaggagcaaccaattctt

SEQ ID NO: 159274 - DNA, 156 bp, Arabidopsis thaliana columbia
atctcagttccttacagaagaatctccgactcgtttctttgccggcattctcagatttccggatactagccatgagcagtgagggttccgccggaaaggcggttgttgaagccaaaggattgaaccctggattgatagtgctgcttgttattggag

SEQ ID NO: 159275 - DNA, 245 bp, Arabidopsis thaliana columbia
ctaaccatgggtaaagagaagtttcacatcaacattgtggtcattggccacgtcgattctggaaagtcgaccaccactggacacttgatctacaagttgggtggtattgacaagcgtgtcattgagaggttcgagaaggaggctgctgagatgaacaagaggtccttcaagtacgcatgggttttggacaaacttaaggctgagcgtgagcgtggtattaccattgacattgctttctggaagtt

SEQ ID NO: 159276 - DNA, 426 bp, Arabidopsis thaliana columbia
caatcttccaccatgggaacaaagtttttagctctgggtttgtctctgtgtcttgttctctcaagcttctatcaagtttcttgccaggatgaaggaactggaagtttgagtactttagatctaattgagcatgaatatcaaactagtgtcaattctctccaaggcaatgaagcagtagatcaaactgagaccagtggtcagaaaaacagtacagtgtctgataacaacactatttctttgtctctatctgaagaacctgcattggaaactcttaaagaatctgttgatacatcagctgagttaggagctgttactgatgaagtcgataaaccttcaagtatgttggaccatattgaacttgagttcgaagcacatatcaatgaacttaaagaagctggatctgatggtatcaacaaagttgaggaa

SEQ ID NO: 159277 - DNA, 73 bp, Arabidopsis thaliana columbia
  unsure (1)..(73): unsure at all n locations
agcagactctgttttcatggctgtttacaatacttatttttgtttggcctctgngtacttgcgggggggctta

SEQ ID NO: 159278 - DNA, 228 bp, Arabidopsis thaliana columbia
cagccttgtgcctgttctcagtgttgttggtgttcagaagacgaagccaacccagcatagtgtgcgaggcctcaggagccttggggtgacaccaaatatcctagcatgtcgcagcacgaaggcacttgaagaaaatgtcaagacaaaactatctgaattttgccatgtgccggaagtgaatataggaacgctctatgatgttccaaatatttggtacgttcctttgct

SEQ ID NO: 159279 - DNA, 343 bp, Arabidopsis thaliana columbia
caaagactcgagttgatatgtctagtactaaagatatgtcaactgtccaaaacgcaactccttttaacggcgttgccccatccaccaccgtgcgagttacaatcgtccaatcctccaccgtctataacgatactcctgccactatagacaaagcggagaagtatattgtggaggcggcaagcaagggagcagagctagtgttgttcccggaggggtttatcggtggctatcctcgaggttttaggttcggtttagcgtttgtctgttcttattgaatagtggtgtgatgagtttgctttatgtatctcgcttatgttattcggttttcttgttttttatctat

SEQ ID NO: 159280 - DNA, 368 bp, Arabidopsis thaliana columbia
gtattactctccttctccaaaggttgactacatttcttcaccactaccatacgtctacagctgcgggccttcaccgtactactggggggtgcgccaaaggttgactacaaatctccaccaccaccatacgtctacagctccccaccaccaccgtactactctccttcgccaaaggttgactacaaatctccaccaccaccatacgtttacagctccccaccaccaccgtactactctccttctccaaaggttgactacaagtctccaccaccaccatacgtttacagctccccaccaccaccgtactactctcctacgccaaaggttgactacaagtctccaccaccaccatacgtttacagctcccc

SEQ ID NO: 159281 - DNA, 370 bp, Arabidopsis thaliana columbia
caaatcttaaacgttttactttgtgctgcactactcaacctcaatggccgcctcaacaatggctctctcctcccctgccttcgccggtaaggccgtcaagctttcccccgcggcatctgaagtccttggaagcggccgtgtgacaatgaggaagactgttgccaagccaaagggcccatcaggcagcccatggtacggatctgaccgtgtcaagtacttgggtccattctctggcgaatcaccgagctaccttaccggagagttccccggagactacggatgggacaccgccggactttcagctgaccccgagacattcgcaaggaaccgtgaactagaaattatccacagcaggtgggccatgctcgga

SEQ ID NO: 159282 - DNA, 240 bp, Arabidopsis thaliana columbia
gaaattagagtggtcaaagcaaccaaacacatatatagagagatttaatacaaaagaaagagaaaaaagaaagatatggcaggactcatcaacaagatcggagacgcactccacattggaggaggcaacaaggaaggtgagcacaagaaggaagaggaacacaagaaacacgttgacgagcacaagagtggtgagcacaaagaaggtattgttgacatgatcaaagacatgatccactgt

SEQ ID NO: 159283 - DNA, 150 bp, Arabidopsis thaliana columbia
  unsure (1)..(150): unsure at all n locations
tccgcacgcgtaatcgtagacgacgacgaaacatanttttctttagtgtttattttatttttgcgtggggtttcagtttcaaagagggccgccaattaccaaaaagtgctccaatgcatgattattacgttggagccttttacatacaga

SEQ ID NO: 159284 - DNA, 237 bp, Arabidopsis thaliana columbia
cttcaagcggaaatattgaactggcactgggtatgcgatcagcaattacagttggatggaaaaagagagacgagaatgtatctgctgctggtgactttaagattgaatctggtggactcggagcatcagctcgttatactcgtaaactttcatccaaatctcatggtcgcattgtgggtagaatcggaagcaatgctcttgagattgagctcggcggtggaaggcatatttctgagt

SEQ ID NO: 159285 - DNA, 398 bp, Arabidopsis thaliana columbia
cttcgataaggattttactctccagagaaagaaaaaaaaaacctcctctgcttttgtgatcctttaaggaaaaagacgaaatggcaacggaatcgtacgaagccgccattaaaggactcaatgatcttctcagtacgaaagcggatctcggaaacgtcgccgccgcgaagatcaaagcgttgacggcggagctaaaggagcttgactcaagcaattcagacgcaattgaacgaatcaagaccggttttactcaattcaaaaccgagaaatatttgaagaatagtactttgttcaatcatcttgccaagactcagaccccaaagtttctggtgtttgcttgctctgattctcgagtttgtccattttacatttagtattttcaacctgttagaggcttt

SEQ ID NO: 159286 - DNA, 304 bp, Arabidopsis thaliana columbia
cgataaaacattctttttgcaactgagacttggcaacttggttttactcaaagtaagatttcttcttgttgatggtgataagttcaatatgatgaaaagtttggctagtgcggttggagggaagacggcgagggcatgtgatagctgcgtgaagaggcgggcacgttggtattgcgcagctgatgatgcctttctttgccatgcttgtgacggttcggtccactcggcaaacccttttgctcgtaggcacgagagagttcgcttgatatcgcctagcgcccgattgtattgtcatgttctgtcg

SEQ ID NO: 159287 - DNA, 273 bp, Arabidopsis thaliana columbia
gaaatttgcagaagagagaaaaacaaaaatggcggttctttgctcgtcttcgacggtgatactctcttcttcttccgtgaaatcgggcggaggagagaaagtctcgttttaggtcttttacgggttctgtattccttgttcttttgtttttccttttatattttatttttatttcttttttttttttttgatttttatttttctttttttttttttttctttttttatttatctgttatctttattttattactttttttatttttttcattt

SEQ ID NO: 159288 - DNA, 346 bp, Arabidopsis thaliana columbia
ctctcttaccaatttccatttctcgggggaaaataataatacgacttttgaaatctctcactaatatttcccaagaaaacctgatgaattaaaagttcatattttcttggtgttgattggtattagatgactatttcttagtattagtcaattctctgtttccatcttatatggatagtctagacacagagcaaagatccttctttggagaaaaagaagatgagagacgagagaggatcgtttcttcacgtattggtcgtagatagatcttaatcgataaccatctaggccttgatctaaccattcaatataaactttatttccttctgcttttcgatctcaattg

SEQ ID NO: 159289 - DNA, 475 bp, Arabidopsis thaliana columbia
tttctctttctctttcgccattaaaactctgtttcctttttcagagattctcagagaagattcattttaccctaagaaaaaaaatgtcgaacattcttcagaatcggcgatcttcgttttcctcttcgacgaaatcttcattagcgaagcgtcaagcaccatcttcatcggagaattctgttaaacttatgccggcgatgacgaagaaacgagcaccgttaagtaacattaccaatcaaaaaatcgcctcacgattacaaaattctgattcggtacattgttcaaacaagtcagcgaaattgaagatagcaccaagtgtttgcgttaatgccagtttctctagcaatctgcaacaaagcatagttcctcacaaagttgcttcttcacctagcaaatctgatgatggctcagtatcaatggacgagactaggtcttcaagtgattcctacaagagttctcatgttgagtatatcga

SEQ ID NO: 159290 - DNA, 442 bp, Arabidopsis thaliana columbia
taaaagctcactcactcacacttttattcatttctctgaaaacccttaaatctccggatttcgattcccgaggctcgaaaaaaccctaaatctcttctccgttcactcatccaaccgaagatgcgtgagattcttcacatccagggtggtcaatgcggtaaccagatcggcgccaagttctgggaagtggtttgcgccgagcacggcatcgatccaaccggaaggtacaccggagactcagatctgcaacttgagcgcatcaacgtttactacaatgaagcgagttgcggtagattcgttcctcgtgcagtgctcatggatttggagcctgggactatggatagtctcagaactggaccgttcggtcagaccctttgatctggatacttcgtctttggccaatccggtgctggtaccactgggctcagggtcactatttgta

SEQ ID NO: 159291 - DNA, 393 bp, Arabidopsis thaliana columbia
cgaaaagtgtaaaggtgggaagatcggaattgcacatagtcctgcttggttcgaagcacatgaccttgctgattcacaagacggggcgtccatcgaccgtgcacttgactttattttgggatggcatctagacacaactacatttggagattatccacagatcatgaaagacattgttggacatagattgcctaaatttacaactgagcagaaagcaaaactgaaagcttctaccgatttcgttgggctcaactactatacttcagtgttttcaaaccatttggagaaacctgatccttcaaaaccaagatggatgcaagattctcttattacatgggagtctaagaatgcgctaaattacgccattgttagcaagcctttgaccgctgcatt

SEQ ID NO: 159292 - DNA, 176 bp, Arabidopsis thaliana columbia
ccaagacccaaccatcggagggagggggcgtgatgatgggattgagttccttggtctttaccgagtttcacagcctcggctgctctgaccttatagtttttgttgcgccactctggattgctgtggctgccggtgttttggttggtcgggtttgctggacttaatcgtcacttttt

SEQ ID NO: 159293 - DNA, 303 bp, Arabidopsis thaliana columbia
attaaaacaaaaaaaagtggcaaagagagagctttaatggagttagcttctttccttggtagagctctgtttgtttccggatggggtctctccacatggcaagagttcaatgattttggtgaagatggtggccgatcagctaaatctttgaaaccaaaattcaatgcctttgtaaaccatgtgacaactcacactggccagcaattgccaccagtcgatatgaagattcttgttgctgttgctatagccttgaagggtattgctggactattgtgtgtcttcagcagctcatttgttttcttt

SEQ ID NO: 159294 - DNA, 436 bp, Arabidopsis thaliana columbia
ccagacatcagcaagattcaggagattaaaaccttaaattaaaacaatacaaactccaaattcaccggaggaaataacttaaaacttgaatctgaaaagatgagctgcaatggttgccgtgttctccggaaaggttgcagcgagaattgtatcctccggccatgtattcaatggattgaaaccgccgatgctcaaggccacgccaccgtcttcgtcgctaaattcttcggccgtgctggtctcatgtcctttatcttcgcttgttcggattctcaacgtcctgctttgtttcagtcgttgctctaacaagcttgtggaagaactggcaattcagtttaccgagcaattgggatggtatggacttggaactggaatattttgtaagccggttggtttaaaaaaagttttacgttggtttttttatactttttctttt

SEQ ID NO: 159295 - DNA, 180 bp, Arabidopsis thaliana columbia
ggctcattgacagaaagagagtgggagagagacatgacgggctgtgtgaattctatttgtccgccgccggtgactttataccggcgtcgtgcctctccgtcacggtcgttcttctcattatccggcgatgccttacactctctttaccggcaccgacgtgtatcaagatctcttttgatt

SEQ ID NO: 159296 - DNA, 367 bp, Arabidopsis thaliana columbia
gaacaattgctcccatcgcaatcggtttcattgttggagccaacatcttagctggaggagctttctctggagcctccatgaatcccgccgtggctttcggaccagcggtggtgagctggacatggaccaaccactgggtctactgggccggacctctcgtcggcggtggaatcgctggactcatctacgaagttttcttcatcaacaccacacacgagcagctcccaaccacagactactgaattaatctctctttttctctcttgtgtaattttattcgactttgaatttgaattttaatgtctttttaatttccgtttgtgtaatttcgaatcatcaaggggtttatgaatcgtcgatcttttag

SEQ ID NO: 159297 - DNA, 437 bp, Arabidopsis thaliana columbia
ttcacttcctctaaacttcttcttctccttccttcaaatctgactctgttggtagcacaaccactgcctctgccgcaaatctctcagcgtctctttctctctctgtctccggagcaacaaacaacaacaacagcaagcttccgtttttgttagctaagaagaagaagaagatgcttactgcttcttcttcttcttcgaccacggctaatattgtctacaagagaagtcaatctacaaggactacgaagacaacgtacggagattcagatttgagcccgagaaagagaaatgggttttggtccttttttcatctctactcttcgaaacaacatggtagcagtaagaaagttggaaactttcatcaacccataagccagactgagacaaaaacagagttggcagagactacaacagtgggatcttcgtcttcttcggca

SEQ ID NO: 159298 - DNA, 435 bp, Arabidopsis thaliana columbia
cacagagagaagaaaaactcagaagaaaagccaaagagtgaaacaaaaatggcgtcgacgactctctcaatcgcaacaacaatccgttcctcatcttatcctactctcgcttccatcaatcacttcccttcccgaaccaccaccatcgaattcccctctcgcttcggtggtggttcatcatccacattgacccaccgtgcaacccatctccgtccaatcgccgccgtcgaagctccggagaaaatcgagaagatcggatccgaaatctcatccctaaccctcgaagaagctcgtatcctcgtcgactatctccaagacaaattcggtgtctccccactctctttagcccccgcagcagcggcggttgctgctccagccgacggtggcgcggcggctgtagtggaggagcaaacagagttcgatgtggttatcaat

SEQ ID NO: 159299 - DNA, 324 bp, Arabidopsis thaliana columbia
cagagttatttcgtcggatcaaaatggtgaagattgagataggaagtgtgggtgactcctttagtggagcatctcttaaggcttgctggtctgaatttatcgcaactcttctctttgtgtctgctgcctccgactcttctcttgcttatgccaagctcacatccgatgcagccttggacccacctggtcttgccgcctatctccttttttttttcctctccttcttttcctctctctttatctttatccttccttctctgtattcttaatttcccttcctttctccccttctttacctttctccttatctcttcttccaccttt

SEQ ID NO: 159300 - DNA, 237 bp, Arabidopsis thaliana columbia
  unsure (1)..(237): unsure at all n locations
ccaacaccgaagatccaacacgatgggacgaagacctgcgagatgttaccgtcagattaagggaaagccatacccgaaatcacgatactgtcgtggtgtgccagatcccaaaatcaggatctacgatgttggtatgaagaggaaaggtgttgatgagtttncattctgtgtttatttggttttatgggagaaagagaatgtgttaagttaagttttttgtggtttatgtattgtttg

SEQ ID NO: 159301 - DNA, 436 bp, Arabidopsis thaliana columbia
atggtggctcatcttcaacctcctaagatcatctagacctgtcacatctctcccccaaagggcgaccgttccatcaaccactctgggctctcaccttcttcgatgccccctggctctctctcccactcgccgattctctcttcttcttctcttaccaaaactcaactgaatctttcctccaagactttgtacccaacctcaaacattccctctccatcactctccaacatttcttcccttacgccggtaaactgattatcccgcctcgtcccgaccctccatatttacactacaacgatggccaagactctcttgttttcaccgtaacagagtctacttgaaccgacttttaccaactgaagtctgattctcctaaagatatcactgtgttgtatggcgtctatcccactggtttcttttttattacgatttttcg

SEQ ID NO: 159302 - DNA, 398 bp, Arabidopsis thaliana columbia
aatccatccatcaccgatctctaatggcggcaccaccagcatcatcctcggcgagggaagagttcgtgtacctcgcaaagctcgcagagcaagcggaacgttacgaagaaatggttgaattcatggaaaaagtcgctgaagccgttgacaaagacgaactcaccgtcgaagaacgtaatctcctctccgtcgcttacaaaaacgtaattggcgctcgtcgtgcttcctggagaatcatctttttcattgaacaaaaagaagagagttttggtatctatttacatgtgacctcatattctatattacagaaagcttgtttcgtattcttatttttctttttttcttattccattttttttttaattttttttttttactattattatttacttattatt

SEQ ID NO: 159303 - DNA, 397 bp, Arabidopsis thaliana columbia
actactccctgggcctataaatatttctctgcttttaatttccaatttgctctgattcattcacaaataacaatcctctcttcgttttggtttttcttttggatccaaagctctcttaaatctgtaaatcaacaatggccgccaccactgagaatctccctcaactcaaatccgccgtcgatggccttactgagatgagtgagagtgagaagagcggattcatcagcctggtttcacgttacctgagcggtgaggcacaacacattgagtggagtaagatccagactcctaccgatgaaatcgttgttccctacgagaaaatgacccctgtctcccaagatgttgccgagaccaagaatctgttggacaaacttgttgtggttgaagcttaatggag

SEQ ID NO: 159304 - DNA, 361 bp, Arabidopsis thaliana columbia
agcaaatcacagctcccgatggccgccacgtcatcatcaccgccgtgtaacatctccgcgtgcgtccctcctcctccgtcaacctggctcgctcaatccttaaagtgttcggtttattaccacctgtaagtaggaataaccgtaaactcggccggttaacggtgacccggtctaatctggcgcaggattttcttggtgacttcggagctcgtgacccttacccggaggagatagcgagtcaattcggagataaagtgttgggatgccaaagcactgagcacaagattttgataccaaacgcatctggtttgtctctcttccagcttcagtgttcccctgttttgtcttcacagccttcttt

SEQ ID NO: 159305 - DNA, 474 bp, Arabidopsis thaliana columbia
ttcttaatcagaaattgaagccgaatcattttataaaacacgaagtgaagcacaaatggttggtggcacatcttcacgtatgggagggtccaccaccacttccatcttattctgcatcccctaaggttgtgtacaagtctcctccaccaccatatgtctacaattccccaccaccaccatactactcaccttctccaaaagtttactacaagtctcctccaccaccatcttattattctccctctccaaaggttgaatacaaatcttcaccttcaccatcgtattcaccttcttcaaaaacttagtactaaatttttcggcttcctttatattagtgaaacttaaaaaagtaattctttaaatagttaatcgaatattatttcgatttttatttttcctttttgttctcggtttttaaatttctttttatctaattccaatttttaattttctcttgggaataaaaaataaaaa

SEQ ID NO: 159306 - DNA, 254 bp, Arabidopsis thaliana columbia
cattatcccagctgatgcccgtctacttgaaggtgatcctttaaaggttgaccaatctgctgtaactggagagtcccttgctgtgaccaagcacccgggtcaagaagttttctctggttcaacctgcaaacaaggagaaatcgaggcggttgttattgccactggggttcataccttcttcggtaaagctgttcaccttgtggataggactaaaccaatttggacattttatagattgttttttatttcttttg

SEQ ID NO: 159307 - DNA, 379 bp, Arabidopsis thaliana columbia
ttcttattgccaaatctggaaaagttctctttgtgaagttccactggaaaccaacttgtgggatcaagaatctgactgatgaagaggccaaggttgttggaggagccaatcacagccacgccactaaggatctccacgatgccattgcatctggcaactaccccgagtggaaacttttcatccagaccatggatcctgcagatgaggataagtttgactttgacccacttgatgtgaccaagatctggcctgaggatattttgcctctgcaaccggttggtcgcttggttctgaacaggaccattgacaattttcttcaatgaaactgatctatttgcgttcaacccgggtcttgtgatttctgcaatttactatttat

SEQ ID NO: 159308 - DNA, 309 bp, Arabidopsis thaliana columbia
ggcgatgtggccgttgatttcttccatcgttataaggaagatatccaactaatgaagaatctaaacgcagacgcctttagaatggctatcgcatggccaagaatatttcctcatgggagaaaggagaaaggagtgagtcaagctggtgtgcaattctaccacgacctcatcgacgagctcataaaaaatggtataactccattcgttactgtttttcactgggacactccacaagatttagaagatgaatatggcggctttttaagcgaaaggattgtgaaggatttccgagagtatgcagattttgtt

SEQ ID NO: 159309 - DNA, 206 bp, Arabidopsis thaliana columbia
cggtcgaccacgcgtccgattcgaggagcagttcaagtcactaattgttctatcacactaccttgagactgggaggttcgcgaacagttctgggatgaagctggcaagaaccttcacattctcgaggctgttccaggttttgagcaagctattcaagcatatgcaagtcaccttcttagcttaagctacctataatttttcacatc

SEQ ID NO: 159310 - DNA, 253 bp, Arabidopsis thaliana columbia
tcttcttcttcttcttttcagacatgactctttcttatcgtttctcttccgttagaaaccacgcacggctacttaagactgtctgagctctgcacacccagatcagctcttggttgttgtttctctcccaaggaagcccatttcttcagtaagaccacttgcccaatccccttctccttataaacacacttttcttcctctgaaactttgactgccctttagctagcttttttttcttatgcggattcttgag

SEQ ID NO: 159311 - DNA, 221 bp, Arabidopsis thaliana columbia
cccttcaaaacatttccttattctttcttcttcatctacaacaatggctggagttgcctttggttcctttgatgatgcattcagcttggcttctctaagagcttacctcgctgagttcatctccactttactctttgttttcgctggtgttggctctgccattgcctacgcaaagctgacgtctgacgctgctcttgatacaccttgtactagtgaccatt

SEQ ID NO: 159312 - DNA, 386 bp, Arabidopsis thaliana columbia
ctcctttcggattcaaatctcagatctagctcaaccatggcgttgctcgtcgagaagacctcgggtggccgtgaatacaagggcagagacatgtctcaagccgatttcggtcgtctcgaactcgagctcgccgaagttgagatgcctggactcatggcttgtcgtaccgaattctgacctttttagtcatttaaaggctctagaaatactctatctttttatatgatcattcaaacctcttttctcttcgattccttaactgttttcgctgcttcgaatttttatttcttcctatctattatttttttttacttgggaattgtgtacttcttatattattttttttatttttcttttaatttttttttttatcttttatcatgctt

SEQ ID NO: 159313 - DNA, 357 bp, Arabidopsis thaliana columbia
acactttaactaagcaaaccaataatggctaccactcgtctaactctagctcctctcctcctgagcgcagccgtactactcgcaggcaaggcaacggctcagccggcagcccccgctccagagcctgctggtcccatcaacctcactgcgatcctcgaaaaaggtggtcaattcactactttcatccatcttctaaacatcactcaagtcggtagtcaagtgaacattcaagtcaatagttcatccgaaggtatgacggtgttcgcaccaacagacattgcttttcaaaaccttaaaccccggaaccctaagccagtgaagccctgacgattaagttaaactcattctttatcacgt

SEQ ID NO: 159314 - DNA, 187 bp, Arabidopsis thaliana columbia
cgaatttgtcggagaaggacattattgaaatgacattcttcccagtagtaaacgaggcgtgtagggtttttgctgaaggtagcggtgtcaaaacagcataccttgacattgctggcataataggaatgggtttccaacaatacaaatgagaaacttaaaatatgggctcaattcattacttccaaac

SEQ ID NO: 159315 - DNA, 405 bp, Arabidopsis thaliana columbia
accaaaagtagttttgtaacagagagatagatagaaagctcttgaagatctaaccaaaatctacttttgttcttcttcttcttcttttcataaattttcggagtggtcctatttattgtttcttggatcaattagagagacagctatcgatggatgaagatggaaacttgcagattagtaatagtaattacaatggagaagaagaaggagaagatccagagaacaacactttgaatcaaccactgcttaagagacatagaactctttcttcaactcctcttgctttggtcggtgccaaggtttcacacatcgagagtttagattatgaaataaacgagaatgatctgttcaagcatgactggagaagcagatcaaaagcacaagtgtttcaatacatattcttaa

SEQ ID NO: 159316 - DNA, 466 bp, Arabidopsis thaliana columbia
cttctactcatttactgttctgtttcactttctctctctctgtatactctctaaatgatggcaaaaaactgtaatttagtcagtgttctatgtgtatttttggtattgaccctctttaacaaacccatcaccgtcgccgggcagaatattccggcggtgggcttgttcacctttggtgactccaacttcgacgccggaaacaaacagactctcaccaaaaccttactccctcaaactttctggccgtatggaaaatcccgagatgatcccaacggcaaattctccgacggcctcatcgctccagacttcctcgctaaattcatgaggattccgatcgtgatcccgccggcccttcaaccgaacgtcaatgtctcacgtggagctagtttcgccgtcgctgatgctactctactcggagctccggtggaatctttgactctgaatcaacaagtgagaaagttcaatc

SEQ ID NO: 159317 - DNA, 396 bp, Arabidopsis thaliana columbia
aaacattaagaaatgggtagtgatatatccagtctatattaactcaaagaaaactgtagctgagggaagaagaatcagtgtgagtaagtcatgtgagaacccgaattgcatcgagattagtgattgttgcaagcatttgaaactccctagtgccgtcgagattgacaaagcatacccgcgagatttcatgcaagtagggagagtgagggtgcaattgaaaagagaagatggtactttactcaatccagccattacttcaaggaagcatctgatgcagaaaattgcagagttggtaccaagacatccagagagagtaaagaagcaggaagctcagaaagcgaagaagcaggaacctcaggccacaacttcaacctctggaacttcttcaaagtcagg

SEQ ID NO: 159318 - DNA, 235 bp, Arabidopsis thaliana columbia
  unsure (1)..(235): unsure at all n locations
cccgtgtcctcataaccactgacctccttgctcgtggtatcgatgtgcagcaagacnctctggggatagactttgaccttcatcaaccggttaatttcatccctgcatcttattgttagcagtttagactacttagatctccagacggttacgaaccattgttgtttgcgttttgtagactgagtattagtacgaaattagataagcctgatgccttcggtgaaattgattgctc

SEQ ID NO: 159319 - DNA, 465 bp, Arabidopsis thaliana columbia
caacaacgtcgagaataatggcatcatctctttgtgcttcttctgccatcgctgccatttcttctccaagtttcttgggtggtaagaaactgaggctgaagaagaagttgactgttccagctgtgtccaggccagatgcgtcggtgcgcgccgtcgcagctgatccagatagaccaatctggttcccgggaagcactcctccagagtggctagacggtagcctccctggtgacttcggatttgatcctcttggtctttcatcggacccggacagtctaaaatggaacgtacaagccgagatagtccactgccgatgggctatgctaggagccgccgggatattcatcccagagttcctaacgaagatcggaatcctcaacactccgtcatggtacacggcgggagagcaagagtatttcacggacaaaaccacactcttttgtcgtgagctcattttgatcggat

SEQ ID NO: 159320 - DNA, 399 bp, Arabidopsis thaliana columbia
acaccagagtgtcaaaagggaatgaaactgatcttgtctttgtgcttagctgaagggtttgacacgtttcctacactgctttgtgctgatggatgttccatgattgatcgaagaatgggtgtttatgggtatcccattgagatccaagcgttgttcttcatggctttgagatctgctttgtcgatgttaaagcccgatggagatggcagagaggtcattgagaggatcgttaagcgacttcatgccttgagcttccatatgcgcaattacttctggcttgatcatcagaacctcaatgacatttacaggttcaagactgaggaatactctcacacggcggtgaacaagttcaatgtgatgcctgattttattcccgagtgggttttttgacttaatgcc

SEQ ID NO: 159321 - DNA, 404 bp, Arabidopsis thaliana columbia
cgcaaaatctcaacgaagctcgaaaatggattcacgaaccaaggggaagacggtgatggaagttggtggcgatggcgttgccgtcataacactcatcaatcctcccgtcaattctctatccttcgacgtgctatacaatctcaaaagtaattacgaggaggccttgagcaggaatgatgttaaagctattgttattactggtgcaaaggggaggttctctggtggctttgatatatctggttttggtgaaatgcagaaggggaatgtcaaagagccaaaggctggttacatttcgattgacatcataaccgacttgcttgaagctgctaggaaaccgtctgtcgctgccattgatggacttgcctggggaggaggattagaacttgctatggcttgtcatgcta

SEQ ID NO: 159322 - DNA, 335 bp, Arabidopsis thaliana columbia
ataagaatatcaataatcatataaccaaagccaataacaccaaattccaaatatccatacaaagaagcaaaccccataaaatattgccccaaaccttttaacccaattattacgttgaagaagagaaatacaataacaaagatacatttattatctgtttctgtctttttttttcttttactcgggtgtccaaagatatatattgaagatagtgtggtttccaagctttcctacgaagatgccgcaccgctttggccgcaccgccgtaatgaacatatgtcttacattcttgacttggcgaccacaaggctagtcccttcacccattccatcagc

SEQ ID NO: 159323 - DNA, 394 bp, Arabidopsis thaliana columbia
gcggcgattcctctcaaagctccttctcttcctggaacgagagagtgttctcccttccttaaccggttcgtcactcatcaaccggttaatttcatccggaagtttcatccttccttagatgaagcatcgttctccagacggggacgaaccactgttgttcgcgttttggagacggagaagagtacgaaaatagagaagcctgagcctccggtgaaattgattgctctcgtcggaaaaggagaagtaagcccactcaaatccacctcttgggaagaagttatgctccacactgcgagaagattgaaatgggttgatgaaggatatgaaatgctcgtctttgatgatgaaattgtgagttcaaatgatcagagagctatgaatctgacacaggaac

SEQ ID NO: 159324 - DNA, 471 bp, Arabidopsis thaliana columbia
ctcctttcggattcaaatctcagatctagctcaaccatggcgttgctcgtcgagaagacctcaagtggccgtgaatacaaggtcaaagacatgtctcaagccgatttcggtcgtctcgaactcgagctcgccgaagttgagatgcctggactcatggcttgtcgtaccgaattcggaccttctcagccattcaaaggcgctagaatcaccggatctcttcacatgaccatccaaaccgccgtactcatcgaaaccctaactgctctcggtgctgaagtcagatggtgttcctgcaacatcttttccactcaagaccacgccgccgcagccatcgctcgtgactccgccgcttgtttcgcctggaaaggtgggactcttcaggagtactggtggtgtaccgagcgtgctctaaattggggtccaggtggtggtcctgaactgattggtgtgatgggggtgacgctactcttt

SEQ ID NO: 159325 - DNA, 374 bp, Arabidopsis thaliana columbia
agaaaagggaaaacaaaggatcttccatgggcgatcgctgagaagatccgcaagaacaaaaacatcaaattccttgaaatcaggaatcttattcgatagtctatttgagcccttgatctggttttttatttggtgaaagttttgaaatggtgctggtattggcattgggggatctccatgtaccccatagagcggctgatctacctcctaagttcaaatcaatgcttgttcctgggaagattcaacacatcatctgcactggaaatctctgcatcaaagaaatccatgactacttgaagactatctgccctgatttgcatatagttcgaggggagtttgacgaagatgcgcgataccctgagaataaaaccttg

SEQ ID NO: 159326 - DNA, 442 bp, Arabidopsis thaliana columbia
catttattttctcgaatcttcttcttcttcctagattccagcgacttaacaacaacaacaacaacatattctctgctgggtattagattcgaatttctctttttgtgatcagaaatggatcgagctccggtgaccacaggaccgttggatatgccgattatgcacgacagtgatcgatatgacttcgttaaggatattggttctggtaatttcggtgttgctcgtcttatgagagataaactcactaaagagcttgttgctgtcaagtacatcgagagaggagacaagattgatgaaaatgttcaaagggagatcattaaccacaggtcactaaggcatcctaatattgtcagatttaaagaggtcattttgacgccgactcatctggctatcataaaggaatatgcttctggcggtgaactttacgagcggatttgcaatg

SEQ ID NO: 159327 - DNA, 448 bp, Arabidopsis thaliana columbia
cggacgcgtgggtatttattgaatgttctttgaagaagaagaaggcgacgacacaaaaaccttgcatttgcatccatggcgtcgatgccgagcaaacttcttccagtcctagtctgctacgtttttcttttcccctttgcatcatcatctgattattctggggtatctcttccatcttcgtcgcctaaagtctcggtgggcctgtactacgagtctctctgtccctactgctcttccttcattgataaccacctcgcgaagctcttcgaagacgatctcatatcaatcgtcgatctccatctctctccgtggggcaataccaagctccgttccgataacgtcactgccgtttgccagcatggggcatttgaatgcttcttggataccgtagaagcttgtgcaattgatgcttggcctaaagtaagcgaacatttcccgttcatatact

SEQ ID NO: 159328 - DNA, 397 bp, Arabidopsis thaliana columbia
ggataccgaaacaagaaagtatccaaatagaagagacaacattcaacacagtactgtgaagcaagtgtgatccgaaaatgaaaagagaaagttcttagacatacaagtgaaggataaacattatctgaaaacaggtcatatcctagccacataagaattcgcctgtgtcacatatttcacccaacgatatggattataactacttgatttctttgctatctgcaagtatttgacctgaagtttagaaacattgaacataggtatcgtgaacgttatgctgactggccctgctttctttgtgatattaccatgaaaattctgtgaaaatgtaagctttgcacgcagtgtttgctcacccccgtcaacattctttttatattccaatcaagcttttggt

SEQ ID NO: 159329 - DNA, 169 bp, Arabidopsis thaliana columbia
gccacgcgtcgatttcttgagatctgtgctttagctttggtaaaagaagatatactctagaacggtgctgttcactcattgtgtcattcctcctgggttctctgctttgtgagcgcatgacgggaccttcaaagttggactgaaaaaactcaagttggattctaaaaat

SEQ ID NO: 159330 - DNA, 471 bp, Arabidopsis thaliana columbia
cacaaacagaggcagagatcttaagagttaaagactaatcccaacaatggcgtctctcaaagtcccaagcaatgttcctcttcccgaagatgacgccgagcaactccacaaggctttttcaggatggggtaccaacgagaagctgatcatatcaatactagctcacaggaacgcagcacaacgcagcttgatccgcagcgtttatgcagctacctacaatgaggatcttctcaaagcattagacaaagagctttctagcgactttgagagagctgtgatgttgtggactcttgatccaccagagagagatgcttatttggctaaagaatccaccaagatgttcaccaagaacaattgggttcttgttgaaatcgcttgcacaaggcctgctcttgagcttatcaaggtcaagcaagcttaccaagctcgatacaagaaatcaatcgaggaagatgtcgcgcaacacacatt

SEQ ID NO: 159331 - DNA, 455 bp, Arabidopsis thaliana columbia
ctctctctttcaaccaaacccctaaacaaaaaaaaaatacattttctgatctctctaaaaatctttctccttcgttaatctcgtgatctctttctttttctatatatggacagaggatggtctggtctcactcttgattcatcttctcttgatcttttaaaccctaatcgtatttctcataagaatcaccgacggttctcaaatcctttggcgatgtctagaattggccaaaaagatgatccgaagaccaggatatcaacccacggtaggggatttagggttccggtgaggctctcaaggattcctgatcgggaagatgaagatttttcatctggcgttgctggagataatgaccgtgaagttcccggcgaagtggatttcttcttcgacaagaaatctagggtttgtcgtgaagactaccaaggatttcgtgtgaagaaggaagaacaagatga

SEQ ID NO: 159332 - DNA, 382 bp, Arabidopsis thaliana columbia
gttcgcaacttgtaacgctattttgctctctcgattcctttctctcttctcttatctttgctgcttcttttgctccgccgtcttcagctcagtcctgcttcagctctccggcgaaattgaagaagaaggttgcaatggctgatcccagtgaacaaaaagaaaaggttgtgaaagaaaagaaagaaaaggttaagaaagaaaaggttggggaaagaaaaggttgcaaaggcttcttcgagtggacagaagaagaaggacgtcaagaaggaaacgggtctcggactcagtgttaagaaagatgagaacttcggggaatggtattctgaggtttgtaaacaagatatgattgagtactacgatatctctggatgttatattctac

SEQ ID NO: 159333 - DNA, 141 bp, Arabidopsis thaliana columbia
gtttcgtcctcgaagcttttagaacttagccaagcagctgttgcttcttagttgactccctctccgacgaaaatggtgtccacgagcaagatcaaatccgttgatttctataggaaaatcccgagggatgtgacagaggct

SEQ ID NO: 159334 - DNA, 303 bp, Arabidopsis thaliana columbia
atcatatttccctttacgcaaggatcgaagagacaaactctcttccattaggttgggaagtgaatgttgatctcaaactctttgtccataatgggaagctacacaaatatttgactgttacagatggcttagtgaagcgatataacaatgcgaaaaaagaatggggtttcggacaattgatttcttgatcaacattctacaacgctaacgaaggttaccttgaccaggacactgtttctttttgtgctatgatctttattgttaaatttttctcttactttactgtaattgtattatttaatt

SEQ ID NO: 159335 - DNA, 362 bp, Arabidopsis thaliana columbia
cgcaaccttcgattttcgtttattcgcatccatcggagagagaaaacaatcaataagcgaccatgttggtgtaccaagatcttctcaccggtgatgagcttctgtctgactctttcccttacaaggagattgagaatggaatcctctgggaagtagaaggaaagtgggttactgtgggagctgtagatgttaacattggtgccaatccatctgctgaagaaggtggtgaggatgaaggtgttgatgactctactcaaaaggttgttgacattgtcgacaccttcagacttcaggagcaaccaacttatgacaagaagggattcatcgcttacattaagaaatacatttaggcttttgacacc

SEQ ID NO: 159336 - DNA, 240 bp, Arabidopsis thaliana columbia
aacggcgtcgggttagtccgacggaggaaccatgtctttgcgtccacttatgtccgcctttacaggaaaattctcggttaagtggtcggctacgcttgctacattgggacacctggaaaaggtattttggctggtgatgagttcactggtaccaatggaaagcgtgttgcgagcattaacgtcgagaacgttgagaccaacagacgttacctccgtgagcgtttttttaccgcccctggg

SEQ ID NO: 159337 - DNA, 121 bp, Arabidopsis thaliana columbia
cttcttcttcttcgtgtgagtttcaattctctaatttactaaaaattaatcaaatcgcaaggagtttctctgtgttaacgattgattcatcgttgagttttctttgtggttaaaatgcgtt

SEQ ID NO: 159338 - DNA, 162 bp, Arabidopsis thaliana columbia
gagctcatccactgtagatgggctatgctcgctgttcctgggattttggtaccagaagcattaggatgtggaaactgggttaaggctgaggaatggtcaacactaccagggggacaagcctcttacttgtgaaacccattcccgtgaggaacctgagcacac

SEQ ID NO: 159339 - DNA, 384 bp, Arabidopsis thaliana columbia
ctcctttcagattcttacttgcagctatgggtaaagagaagtttcacattaacattgtggtcaggggtcatgatgatttgggagggttatcatatttttattttttttattattttggtaatttattttatattttttaatattttttattaatttattttatttttatttttatttgattttttattttatttaatattattattatttataatttatttattatatttttatatttttatatataatatattatttattttttttattttaatattatttttttttttttatattttgtatatttaattatattttttattataatatatattttttatatgattatattttttatttatttatttatatatattttttttt

SEQ ID NO: 159340 - DNA, 321 bp, Arabidopsis thaliana columbia
ctcttttcatttctctctgatttctcgatctctccgtccaactatgtctgccttcacaagcaaattcgccgatgagttgatcgccaacgctgcctacatcggcacacctggaaaaggtattttggctgctgatgagtccactggtaccattggaaagcgtcttgcgagcatcaacgtcgagaacgttgagaccaacagacgtaacctccgtgagcttttcttcaccgcccctggtgctcttccatgcctcagtggtgtcatccttttcgaagagactctgtaccaaaagagttccgatggtaagcttttcgttgatatctt

SEQ ID NO: 159341 - DNA, 285 bp, Arabidopsis thaliana columbia
gtcaaacataaagttaggccaagaaacccatttaaaaaaaaagagagagagatggagagtttcccgatcatcaatctcgcgaagcttaatggagatattacagccgtcaatgtggttactactggatgcagttactgttgacctcgacgttgttgctaggatggatttgttggagttctttaaagaagaatgtgaacagagaggagctacaattggatttgcaactcatattttcgacgggctcgagacatgggctagtcatttggcttacatttatggaggaga

SEQ ID NO: 159342 - DNA, 463 bp, Arabidopsis thaliana columbia
gtaagctcttgcttcctcttgtgagcactttcaggtatgaaggagatgatgtgaacatgatgcttgcaagatctgaagctaagatacttcacgagaaggtctcagagaaatcttacagtgacgatgacttcatcagaatcttgacaacaagaagcaaagcacagctcggtgcaacactcaaccactacaacaacgagtatggaaacgccattaacaagaacttgaaggaagagtcggacgacaatgactacatgaaactactaagagctgtaatcacatgtttgacataccctgagaagcattttgagaaggttcttcgtctatcaatcaacaaaatgggaacagacgaatggggactaacccgagtcgtgactacacgaactgaagttgacatggaacgcatcaaagaggaatatcagcgaagaaacagcattcctttggaccgtgctatcgccaaagacac

SEQ ID NO: 159343 - DNA, 354 bp, Arabidopsis thaliana columbia
gagaaatctcgccgccgtttgaagaaagaatattttatgaaagatatgatgtgaacatgatgcgtgcaagatctgatgctaggaggctttacaagaaggtcttaaagaaattttacagtgacgatgacttcatcagaatcttgacaactagaagcaaagtttatcttttttgcatcactcaaccactacttcaactagtatggaatcttcattaacatgaatttgaaggaagagtcttacgattatgacttcatgaaatctacttagtgctgtaattactagtttgtcatactctgattatgcttttgagaaggttttttaattatttaatcatatttattttaatattcttat

SEQ ID NO: 159344 - DNA, 354 bp, Arabidopsis thaliana columbia
ctcagagcttttgagtcttctaaatctctatcgaatttttctagggttagggctcctgatcgatttcgcgagctctgcgattattttaagtattaggatcctaaattagaaattgtcggagagtgatatattattataactatttaattggatcttttattcatttttgtgtgttatcttaatgtaaaattactttttgtaattcttattttattatacatatatttattaaataattttttttttttatatttatatttataataatttattaaaaattatttatttagttaatatatttatttataaatgtttataatctatctaattttatttattttatataatcttcta

SEQ ID NO: 159345 - DNA, 372 bp, Arabidopsis thaliana columbia
  unsure (1)..(372): unsure at all n locations
tgtgataacaatcttccaccatggtgaacaaagtttttagctctgggnntngtcttctgtgtttttgggggggtctttcttcttatgatgggggggggataatattttttttttctcttttttattttcatttttgcgttactttttttttttttttttttttttaattgtttttattttttttctttttttgtcttgtttttttttttttttttttttttttttgtttttctatttttttttttttttttttttctttttttttatatttttgtgtttttttttttttttttttttttgttttatttttttttttttattttttttttttttttttttttttttttttttgtttttttttttttttttttt

SEQ ID NO: 159346 - DNA, 407 bp, Arabidopsis thaliana columbia
agttgattgatcttcttgatatcaatcttcaatggcgtatgcataaggtttctgatgggcagagacgtcgagtgcaaatatgtatgggtctattacatccgttcaaggtattactactggatgaagttactgttgacctcgacgttgttgctaggatggatttgttggagttctttaaagaagaatgtgaacagagaggagctacaattgtatatgcaactcatattttcgacgggctcgagacatgggctagtcatttggcttacattaatggaggagagctgaaactctcggccaagttagatgagatcaaggatctcaaaacctcaccaaatctgctatctgttgttgaagcttggctccggtctgaaaccaaagttgagaaaaagaccaagaagaaacctgtt

SEQ ID NO: 159347 - DNA, 221 bp, Arabidopsis thaliana columbia
ctcattaatcctcacaactctctatctctctctcgccccattctctatcataatgacaggtgccacaccggaaaaccgaacggccccgtcgccaccaccggtgaaacatgtgccggagtcagttctgccggctaaaccaccaaagaggaacaattatgcattcgcgtgtgctattttagctttcatgacttttatcctccttgtgtatgatataggagtgt

SEQ ID NO: 159348 - DNA, 241 bp, Arabidopsis thaliana columbia
atttgcttcaatcttctctttatcgctccaccagatccaagttcgcgagatttcaagctctctaacaaagttcttcacttttactctcaaagctttcatctttcattcaactacttaagctccaagtatggcaggatccgcaccggaaggaacacaatttgatacgcgtcagtttgaccagaggctgaatgaagttctcgatggacaggatgagttcttcatcttatatgatttggttctt

SEQ ID NO: 159349 - DNA, 451 bp, Arabidopsis thaliana columbia
ccgaggttgaagattaatcggacaaaggagattagaagagtagaaaaaacgacaagaagaaagaaacacagttgcaggagagaaagagatatggctgtccggataaacgcgatggcggtgacgtttgtggcgcacgcgctggcggtaatagcggcgattatggtactggtttggagtatcagttacagaggtggattggcctgggaagctactaacaagaatctcatcttcaatctgcatcctgttctgatgctcatcggatttataatcttgggaggagaagccatcataagttacaaaatcgctttccgctggagaaaccagtgaagaagttgatccaccttatactccatgccattgctctggctcttgggatatttggcatctgtgcagcctttaagaaccacaatgaaagccatatccctaatctctacagtcttcattcctggat

SEQ ID NO: 159350 - DNA, 249 bp, Arabidopsis thaliana columbia
caaaatcagatccaacaaatcttcttcttcttcttcttcttcgatcatcatggccagtatcaaggttcacggagttcccatgtccaccgccacaatgcgcgtcctcgctactctttacgagaatgatcttcagttcgagctcatccccgtttatatttgatccgtttcctcatatcaatgttgtcttcttgttcttaatcttttttatattattttcttctatttattctcctttatttttattttatt

SEQ ID NO: 159351 - DNA, 425 bp, Arabidopsis thaliana columbia
gtcttacctccagaagtcgacgacaacaatggcaccgaagaagggagttaaagtggcttcaaagaagaagccggagaaagttaccaacccattgtttgagagacgcccaaagcaattcggtattggtggcgctttgcctcctaagaaggatctttctcgttacatcaaatggcctaagtcaatccgtcttcaaaggcagaagcgtatccttaagcagaggttgaaggttcctccagctcttaaccagttcaccaagacccttgataagaatctcgccaccagcctcttcaagattcttctgaagtataggccagaggacaaagccgtaaagaaggaacgccttttgaacaaggctcaagctgaggcagaaggaaagcctgcttaattcaagaatgcccattgttttaaagtatggtcttaattca

SEQ ID NO: 159352 - DNA, 235 bp, Arabidopsis thaliana columbia
gggaccaactggaatttgatttaaacggtaaattaccaaaaaattcaccatacaaacattacaaaaggcactactcagcttttttttggtgggttttgaaatccaacaacattagaaatgaatttgacttacaaactgggacaagcggcgagtctgtaaaaaaaacggtttttgattatttaaagcagttggacttttaagcagctttttggaaagaaagttttttcctgggttt

SEQ ID NO: 159353 - DNA, 204 bp, Arabidopsis thaliana columbia
tctcattcgtcgttgatccatctttttcccccaatattcatatccttccttagatatttttctccttcttcttcttctagattccagctactccagaagattcttcgacttaatctgatgtgattaggaagagcaatagaggaagagaagaatcataaataatggatccgtcgactaattcactcgattatgccgattgattta

SEQ ID NO: 159354 - DNA, 177 bp, Arabidopsis thaliana columbia
gaaaagcttcacttcccactctcatactctctctctctcttcctacggctgcgaaaatgacaatcggttacagagacgccgtctgagacccgctcttcccgtggcttatggagaataaaaattcgatggaggatttatacgctgttaaaaatttccggattctatcctgatatgttt

SEQ ID NO: 159355 - DNA, 277 bp, Arabidopsis thaliana columbia
gcatctcttttcatttctctctgatttctcgatctctccgtccaactatgtctgccttcacaagcaaattcgccgatgagttgatcgccaacgctgcctacatcggcacacctggaaaaggtattttggctgctgatgagtccactggtaccattggaaagcgtcttgcgagcattaacgttttgaacgttgttaccaacatacgtttcctctgtgagcttctttttattggccatggtgcttttttattcctcagtggtttaatcctttatttatg

SEQ ID NO: 159356 - DNA, 361 bp, Arabidopsis thaliana columbia
gtaaagaagaagatgttagagtcggagttatacaagtttccggagaggcaaccgatcggaacttcggctcagagtgacaaggactacaaagagccaccacctgcgccgttgttcgagcccggcgagctagcttcatggtccttttggagagctgtgattgttgtagttatagctacgtattatgttttctttattcttgttctatttttttttttttattatttttgttttttttattttttataacatatttttttttttttttttaatttattttcttttctttttccttgttttttctcttttcttttgtatttattatttattttcttttatttaattttctatataattctttttt

SEQ ID NO: 159357 - DNA, 251 bp, Arabidopsis thaliana columbia
acttctcactgccaaaggttatggatggacttttcagtctagctaagacactttttggaattgatattgaaccagcagatggtttagctccggtctggaacaatgatgttcggttctaccgcgtcaaagattcttctgggaacccaatcgcttacttttactttgatccatactctcgcccgtcagagaaaagaggtggcgcttgtatggattaggtttgttatcatttttatattttttatttttttttt

SEQ ID NO: 159358 - DNA, 477 bp, Arabidopsis thaliana columbia
aatccatccatcaccgatctctaatggcggcaccaccagcatcatcctcggcgagggaagagttcgtgtacctcgcaaagctcgcagagcaagcggaacgttacgaagaaatggttgaattcatggaaaaagtcgctgaagccgttgacaaagacgaactcaccgtcgaagaacgtaatctcctctccgtcgcttacaaaaacgtaatcggcgctcgtcgtgcttcctggagaatcatctcttccattgaacaaaaagaagagagtcgtggtaacgatgaccatgtgaccacgatccgtgattacagaagcaagatcgaatctgagttatcgaaaatctgtgacggtattcttaagcttcttgatactagacttgttcctgcttctgctaatggagattctaaggttttttaccttaagatgaagggagattttatagggatttggctgagtttaagactggtcaagagaggaaaga

SEQ ID NO: 159359 - DNA, 81 bp, Arabidopsis thaliana columbia
aattccgagttttctgagtcgtaatttagagagaatccaattcgatggatttagatatgaacggaggaaacaagagagtct

SEQ ID NO: 159360 - DNA, 425 bp, Arabidopsis thaliana columbia
ctcatcttctccgaaaacctttcttctctcaaatttctgtgaaaacatgtctgacgacgagcaccactttgaggccagcgaatccggagcttccaagacctatcctcaatcagccggtaacatccgtaaaggtggtcacatcgtcatcaaaaaccgtccctgcaaggttgttgaggtttcgacttccaaaactggcaagcacggtcacgccaaatgtcactttgttgctattgatatcttcactgctaagaagcttgaagatattgttccatcttcccacaattgtgatgttccacatgtgaaccgtgttgattaccagttgattgatatcactgaggatggcttcgtgagccttctcactgacagtggtggcaccaaggatgatctcaagcttcccaccgatgatggtctcaccgcccagatga

SEQ ID NO: 159361 - DNA, 407 bp, Arabidopsis thaliana columbia
aagattcctcaccggttcttccggtaggtcgaactcgcttttagtacatgtctgacgacgagcactagtttgaggcctgcgaatgcggagcttccaagacctattcttaatcagccggtaacattcgtataggtgtttacattgtaatcaaaaaccgtccttgcaaggttgttgatgttttgatttacaatactgactagcactgttacgctaaaagtcacttagtttgtattgatatgattattgtttagaagcttgtaaatattgatcctttttatcactattgatactttactacattttttccttgttgattacctgatgtttgatatcattgatggttgctttgttagtttttttattgttagtgtttgatctattgttgtttaaagatttctaattatttt

SEQ ID NO: 159362 - DNA, 222 bp, Arabidopsis thaliana columbia
cgctagtcaggcgtttactctctctctctctcacattttctcattctctcctacaacaagtttccgccgctaagccactcactacgcagccatggcaaatcctgaccatgtttcagatgtgctacataatttgtcgattgatccaacaaccaaggctttagctcctgattctgaaacaaagggggcttatggcggaaacggtaaagactttttgcttaatga

SEQ ID NO: 159363 - DNA, 281 bp, Arabidopsis thaliana columbia
tttgttttataaatgcttcatctctcttgagaggcgttcacggtgaacagctctctcgtcctcctttggttgaagcaatagcttttgatccacttcttgcggagaccaaactaatagctgattgctgggatccacttgaatatgccaaaagaagtacggttcccacattggaagcgatgggcagaactcaacacaagatattgtcgaaatgtaagaaattttttaaggggaagaggcgttcttagtgatctggctacaagaaattgtggaagtggtgacgt

SEQ ID NO: 159364 - DNA, 62 bp, Arabidopsis thaliana columbia
caacaaacttctctctgaatctcagtgaattcttataaaatgagagggatggtgagttttgc

SEQ ID NO: 159365 - DNA, 88 bp, Arabidopsis thaliana columbia
ttcagttgttgctggtttccagtgggcgttcaaggaaggtcctcttgctgaagagaacatgagaggtatctgttttgagggatgtgat

SEQ ID NO: 159366 - DNA, 375 bp, Arabidopsis thaliana columbia
gaaaattcaccccaatccaacggtccataatcgtcgatttcatccgctctatcagttctgtcaccgccgccaaaggtccatccgtcgcgtcgtggtggaagacgacggagaagtacaaaaccggcgtttcaactcttgttgtcggtaaacagctcctccttgagaattaccctctcggaaaatccctaaagagcccttaccttcgtgctctgtcaagcaaacttaacgctggtggtgctcggtcaataaccgtcgtcttaacggcgaaagacgtcaccgttgagggactctgtatgaaccgatgcgggactcacgggtcaaagtcaagttccgttaacagtggagcttacgtgtgggtcggaaactttgaaacgc

SEQ ID NO: 159367 - DNA, 287 bp, Arabidopsis thaliana columbia
cagcttcttggctccgtcgccgcttgtttcctccttagctttgccaccggtggcgagccaattccagcgttcggtctctctgccggagtcggatcattaaacgctctcgtcttcgagatcgtgatgaccttcgggctcgtctacaccgtctacgccacagccgttgaccccaagaacggtagtctcggaacaatcgcaccaatcgccataggtttcatcgttggagctaacatcctcgccggtggagctttcagcggagcttccatgaacccagccgttgctttcgg

SEQ ID NO: 159368 - DNA, 260 bp, Arabidopsis thaliana columbia
  unsure (1)..(260): unsure at all n locations
ctttagtagcagctgcacagttgtcataccagtttataagtgatcgnnnnctttctgacaaggcggatgacttgattgtaggagggggttcttctttaattcttttttaacatttatattttatttattactttataatttttttaatttttttgttattatttttttctatatttttcttattattttttttttttattaatttatttatttttttagattttagttttcattttttaatatttcattatttttatatt

SEQ ID NO: 159369 - DNA, 286 bp, Arabidopsis thaliana columbia
ctcaaactctcaaactctctctctctcttcccttcttcttcgttactttgcccgaaacactgactgttgcagaagcagatttaattcttctttagggaatcttcgaattggttagcgcagagagatgaagcatttcatgatgccaaggaacgctatcttgcgtgatatcggagagtcacaatcgccaaaccctagcttgacgaaatcgaagttacaaaggaagattaaatcttttaaagagaatgctccatcttcggatttgaatcttgtttatatttgagtaata

SEQ ID NO: 159370 - DNA, 233 bp, Arabidopsis thaliana columbia
ccctgacagaattcccgtgattgtggagaaggctggacaaagtgatgttcctgacattgacaagaagaagtatcttgtaccagctgatctaacagtgggacaatttgtatacgtggttcgtaaaagaatcaagcttggagctgagaaagctatttttgtctttgttaagaacacattgcctccaactgctgcattgatgtctgcgatctatgaagaacacatagatgaggatg

SEQ ID NO: 159371 - DNA, 281 bp, Arabidopsis thaliana columbia
aagaggaaagtcgtcactaaggaggaggcccaagcgatcaaagcagcaggcaaggcttggtatcagactatgatttcagacagtgactacaccgagttcgataacttcaccaagtggcttggcgctagtcagtaatgatgctctcgtcatcgcaaagtctcttatatctaggcaaagattttggttttctgatttatgttcttcgtttgtattggatttatctgggattttatgttgttgagttggtaagacgatttttaagaactatgatggtgtttttc

SEQ ID NO: 159372 - DNA, 480 bp, Arabidopsis thaliana columbia
ctcaattctccgtccgtcgaagaagcgaatcgctcgaaattagggtttctactgagagaagatgcgagaaatcataagcattcacatcggacaagctgggatccaggtcggaaattcgtgttgggagctttactgtctcgaacatggaatccagccggacggaatgatgccgagtgatactacagttggtgttgcacacgatgcgttcaatactttctttagcgagactggtgctgggaagcatgtccctagggctgtcttcgttgatctcgagcctaccgttatcgacgaagttcgtactggtacttaccgtcaacttttccatccagagcagctcatttctgggaaagaagatgctgctaacaacttcgctagaggacattacactgttgggaaggaaattgtggatctatgtcttgaccgtgtgaggaaacttgccgacaactgtactggcttacaagggtttttggtgttcaatgc

SEQ ID NO: 159373 - DNA, 198 bp, Arabidopsis thaliana columbia
tcacggagttcccatgtccaccgccacaatgcgcgtcctcgctactctttacgagaaagatctccagttcgagctcatccccgtcgatatgagagccggtgcccacaagcaagaggcccaccttgccctcaaccccttcggtcaaattcctgctctcgaggacggtgatttgacgcttattgagacaagtgccattac

SEQ ID NO: 159374 - DNA, 69 bp, Arabidopsis thaliana columbia
caacacaagcaaaaaagatggcccaaaagctagaagcaaagggtggtgagatgggagatgtatgggatg

SEQ ID NO: 159375 - DNA, 264 bp, Arabidopsis thaliana columbia
cgacctacgcgtctgttcacacttccgtccgacctacagacccctagaatgcgaaatctccaaagaacccgacaaagcgccatgtcgctcactatcccggcgaatctcgttctcaacccgagatctaacatatctctgcactcaatccgtacctaaatcctgcgcaagattcgtctgcttcgatgacaaatccttcacagttggtgttgcacacgatgcgttcaatactttctttagcgagactggtgctggcaagtattttct

SEQ ID NO: 159376 - DNA, 261 bp, Arabidopsis thaliana columbia
tttttcttgaataaaatcagaattacaaacaaaaatggttttgcaaaagcttcctctcattgggctgcttttgctcctgaccatcgtcgcctctccagcaaatgcagatggacctgtttgcccgccgtcgaacaaactaagccgggcaagtttccctgaaggttttttatttggcacggatacttgtgttataccatgtctgaggagctatttattattcttgttttatacctttcttatattttatttcattattaatta

SEQ ID NO: 159377 - DNA, 222 bp, Arabidopsis thaliana columbia
tctagattcagtttttttcatcaaaaaagagcgtcttcataaacgcccttcgtcttcttccctggaaatctagtttctttcttccacgaaaatgagagagtgcatttcgatccacattggtcaggctggtatccaggtcggaaatgcttgctgggagctgtactgtcttgaacatggcattcagcctgatggccagatgccgtgtgacatgactgttggtgg

SEQ ID NO: 159378 - DNA, 447 bp, Arabidopsis thaliana columbia
aggatctgtacactaagagtgttcagaggactgtcatttggatgggtaagaggcaagagacagtggaggatgtcccttgtggtaacactgttgctatggttgggctggatcagttcatcaccaagaatgctacattgactaatgagaaggaagttgatgctcaccccattcgtgctatgaagttttctgtgtctcctgttgttcgtgttgctgttcagtgtaaggttgcgtctgaccttcccaagttggttgagggtctcaagaggttggccaagtctgatcctatggttgtgtgtacaatggaggaatcaggtgagcacattgttgctggtgcaggagaactccatcttgagatttgtcttaaggatcttcaggatgatttcatgggtggtgctgaaattatcaagtcagaccctttggtctcctttcgtgagacaggttgtgata

SEQ ID NO: 159379 - DNA, 444 bp, Arabidopsis thaliana columbia
aaaagagaagcaatcggagtctgtggaggtaaagaagtacacgatcaaatttcaagtcagagtttcgggaaaaaaaaaaggaatgggggatcatctggtgagagctgaggaattcgagaagaaagctgagaaaaagctcaatggatggggaatattcggatctaagtacgaggatgctgctgatctgctcgaaaaagcaactaattcctataagctcgccaaatcatgggatcaagctggaaaagcttatctaaaacttgccgactgtcacttaaagtcagatagcaaacatgatgctgctaacgcctatgctgaggctgctaaatgctacaagaaagttgacactaatgaggctgcgtcttgcctagagcgagcggtgaatatattttgtgagataggaaggctcaacatggctgcaagatattacaaggaaattgctgagta

SEQ ID NO: 159380 - DNA, 443 bp, Arabidopsis thaliana columbia
  unsure (1)..(443): unsure at all n locations
ctcatatatggggaaacgtgaaattcattttactccggtgggtcgtcaggtgcagagagttctggaatatccattgcgcttggagaatcgttcgccgatgtcttactcaagaaggtcaagatactctccttcactatctccttatgacaagcgtcgtggaaggtctgtgtcaaggtcattgtctagaagcccgacgaggagtgtctcaagcgatgctgagaatcctggtaacagtttatatgtaactggattgtctcaccgggttactgaaagagatctggaggatcatttcgctaaagaaggaaaggtaactgatgttcaccttgtcctggacccatggactagagaatctcgcggatttggttttatctctatgaaaagtgttggtgatgctaaccgntgcatcagatctctagatcactctgttctgcatggccgcgtca

SEQ ID NO: 159381 - DNA, 149 bp, Arabidopsis thaliana columbia
cgtccgattagctctgtctcaaaaaatgaaattctcaaattaaccacaacgatctttagagccttcttcgctcaccgatctctgaaaccctggtttgctctcgtcctcttcgttttctatgagtatgtcgcaggatctaactttttaat

SEQ ID NO: 159382 - DNA, 113 bp, Arabidopsis thaliana columbia
ctctctctaacattcttcagagagggagactttatccttattctgccgttcggacgtggtccgatatcgccgttagtttagccgtgacacgtctttccgttgttgtgtttttt

SEQ ID NO: 159383 - DNA, 124 bp, Arabidopsis thaliana columbia
agttttccggcgataatctccgatctagatccgattgcgaaagaaccagttcgtgtgctcgttactggagctgcaagacaaatcggatgtgctcttgttcctatgattgctaggggaattatac

SEQ ID NO: 159384 - DNA, 446 bp, Arabidopsis thaliana columbia
gcccatggtcaccatgctcaagaggctcttcgtcgtgctaagttcaagttccctggtcgtcaaaagattattgtcagcaggaaatggggcttcacgaagtctaacagttcttacttcacctagataaggcatgatatacgatctgctcatgacatgcgtaacgctaagtctctgtcatgctcatttgtctttaagctctactaggtctgtcttaagcgttgctgtaattcctgttaacagtatatatttaacttggattgtctcaccgtgtctctgaaagagatttgtatgatcatttttcttatgaatgataggattcttttgtttcatcttgtactgtacccatttacttagttaatctcgtgctttatgttttatgcttttatttaaagttttagtaatgcttttcatttacttagttttttagttctctcttttttttttat

SEQ ID NO: 159385 - DNA, 313 bp, Arabidopsis thaliana columbia
gccatgggaagaagacctgcgaggtgtttccgtttgatcaagggtaagccatacccaaagtctcgctactgtcgtggtgtgccagttccttaatttttgttcttcgtatgctgtttttttactttattttatttgttatatttgttcatttcgcttatctttattaaattttttttttttttattatttttgttttttttacattttttttttttactaaaattattgttattttttattttttttaaatttttttattttatgagatttctttcaattcctttaaattcttttttatgtttttctatttttt

SEQ ID NO: 159386 - DNA, 249 bp, Arabidopsis thaliana columbia
ttttgatactgattcgcttgatctccaagtcctaaatggtcctgctttgttggttgatgttccgagagataagaacattactgctgaggtaatggaatcacttcatatacaaagaggagttcgtcgtgtgctctttagaacatccaacaccgacaagcggcttatgtttaagaaagagtttgattcaagctttgctgggttcattgaccgatggggcttaatggttggttgtgattcagtcttaatctt

SEQ ID NO: 159387 - DNA, 318 bp, Arabidopsis thaliana columbia
aaacactctaaaacaaaaccatgactttgttccatagactcgatctcatcgatccgtacacgtgtacaccactcatcgtccgtgaaacctccattgttgaaccttcatcattgttcctagggtttccttccttcatcgacgaagacattgaagatctcttcgagttttcatcacctaatcctctcgatctattcgaaaccgtgacggatctggttaagattaagaaatctccgtcgtcttgcaagtacaaggtgattcgtcggagattagagccggagtatccattgaagtatctttgtgaccgggtgtctgatttgg

SEQ ID NO: 159388 - DNA, 403 bp, Arabidopsis thaliana columbia
ctcttctatctgctgagttttttgttttctggtaaacaattttatctgtggagttttctggagttgctagtggaagaatctgtctcacagctaggcgattatctttcggatgaatttcatgggaacgatgatggtatagtgccagactcagcgtatgaggatggaggtcagtttccaattctagttagtaacaggaagaaacgaagaaatgatgatatgggtagtggaacaaaccatctaaagagtaatacttttatcaagagagaggcaaacatgttaggaaaaaatccatggcctgagaaagatagtggtggctcttcggtttctcgtgatacgggaacaggaaaagatgttcaggatatgacattggaggatacaaatacttcagatcatggtttcaatg

SEQ ID NO: 159389 - DNA, 443 bp, Arabidopsis thaliana columbia
ttttctttattctctcgcagttcaattagggtttcaatctctctgctctgcttgtcatcaccaccaccaccaccaccgtcgtcgtctctctgtatctctccggcgggttctctctctacttcccccggaggattaaaagatggaccagtcttttattttgatattccgttagcttgttcagttattgtagaagctgtaccgtcaagacttttaatatctcaaatggatgatggtgggcatcgtgagaatggtcggcataaagcagcagttcagggccagtggttgatgcagcatcagccgtcgatgaaacaagtgatgtcgataatagcagagcgcgatgcagcgattcaggagagaaatctggcgatatcagagaaaaaagcagcagtagctgaaagggacatggcgtttcttcagagggacaccgccattgctgagcgcaa

SEQ ID NO: 159390 - DNA, 439 bp, Arabidopsis thaliana columbia
ataaatctcacttccttcttcttcatcaatccttcctcagatctcttcttattcaaattcaattgagagatactctcttcttcttctttttctctatccagttccttctgtgcgaagttcttctgattaatttgagtttcttggaagcttttactcgatcttcatcggatcttagggttttgtttaaatccagatcttgggttttgttaaataatggcgactccttatcctggagcgacgcatgtgggttcgtactttgtggggcagtattatcaagtgttgcagcagcagccagatcttattcatcagttttattctgagcctagtagagctattcgtatcgatggtgattccaccgagactgctaattctttgctgcatattcataacataggtatgtcactgaatttcactgcgattgaagtgaagacgattaatt

SEQ ID NO: 159391 - DNA, 419 bp, Arabidopsis thaliana columbia
atggtttcatcacttaacatcatcgaagtggcacgagtcaccccttcaaactctgactcggccgagtcactcagtctcccactcacttatttcgaccttatctattataaacttcgcgccgtcgaacgagtcatcttctaccgaatcaccaacgtaactcgccctttctttgactcagtcatcgtcccaaatctcaaaacctctctatcctcatgcctctctcactatctcccactcgctggcaaacttatatgggaaccacttgatcacaaaccaaccattgtctactcccaaaacgacgacgtttcattcagcgtcgccgaaacaaacgctgatttctctagtttatccggcaatgaaccattcccctccaccgagttgtacccgttagtccccgcgttacaaagctccgacgactc

SEQ ID NO: 159392 - DNA, 251 bp, Arabidopsis thaliana columbia
  unsure (1)..(251): unsure at all n locations
tctcaacctctcaccatggtagctcaagctcctcatgatgatcatcaggatgatgagcaaattagcagcggcgagtacaaaaggagatggaggatcggtcgccgatgacttactcaagaagggcaagatactctccttcactatctccttatgacaagcgtcgtggaaggtctgtgtcaaggnctctgcctaaaatcccgacccggtgtgtcttaagccatgcttaaattcctggtaacacgctatatgca

SEQ ID NO: 159393 - DNA, 408 bp, Arabidopsis thaliana columbia
gcatcccacaaggcggtgaatgagtacaaggaggccaaggctcttggctgtgactccgcaacactgaactggggagacccatgtctcttatcttgttgtttctctatggcaggtcctgtgtgtgcgaagagtcttctgattaatttgagtttcttggaagcttttactcgatcttcatcggatcttagggttttggttaaatccagaacttgggttttgttaaataaaggcgactccttatcctggagcgacgcaggtggtttcgtactttgtggggcagtattatcaagagttgcagcatcagccagtccttattcatcagtttttattctgtgcctagtagagctattcgtatcgatggtgatttcaccgagtctgctaattctttgctgcttattctaatcatgg

SEQ ID NO: 159394 - DNA, 142 bp, Arabidopsis thaliana columbia
cgcgtccgtacagaggagatttcaaatgtcctggttgtgctttcttctgatgctagacggcttgtgactaagcttcttgatccgaatccgaatacgaggattactattgagatggttttggattcgccttgttttatttatc

SEQ ID NO: 159395 - DNA, 103 bp, Arabidopsis thaliana columbia
atcgacaaacacctttacgtctttgacctcgagtcccggactaggtccatttctccaggcacgggagacgcaacacaactggggtggtttaagcattattgtt

SEQ ID NO: 159396 - DNA, 194 bp, Arabidopsis thaliana columbia
ctcaaaggaaggaacatgtggcactgtgtttagtgggcgcgtggattaagtgaatagttttattctgatttgaccaaatcaaccttcctttttgtgcatatggttgtacagcggtgactcaaggagtcagcaccggtagggatggtccgatggagtgtgacaagcgggcgatgtaaatctggtgccctgatctt

SEQ ID NO: 159397 - DNA, 183 bp, Arabidopsis thaliana columbia
ccaaaaaccaatcccagatctgaatctcaacctaaacctcagattcatcatcatggcttcttcttctaactacgatggaatccttctcggtatgggtaacccactcctcgatatctctgccgtcgtcgacgacgaatttctcaccatatacgacatcatggtgaacatatgcgattcttgcgg

SEQ ID NO: 159398 - DNA, 63 bp, Arabidopsis thaliana columbia
cgactttagatgatgcagatttcccagctcaaacccattctccgactgaacacgaatactttg

SEQ ID NO: 159399 - DNA, 61 bp, Arabidopsis thaliana columbia
cactttttccagatatttctaatcaacaaaactgttgtttcaagaaaagaccatttcttgt

SEQ ID NO: 159400 - DNA, 127 bp, Arabidopsis thaliana columbia
  unsure (1)..(127): unsure at all n locations
cattgcttcatcattaccaaatcatcaacttaatcgtttctctcaaatttagggttttctcttttctcgaaagtcttgcggntttctgaatcatctctatctggtttgagggctacgtttaatttct

SEQ ID NO: 159401 - DNA, 290 bp, Arabidopsis thaliana columbia
gctagcttcaaagccagacaacgagtgtgtcaatctcctccgttggcccgttgtcgtcctaggcgttcttattcttggtgtgtagttctttattttatatttattaaatatttatattatttatttggttatttttttttgtatttttaatttttttttttttttttttttgttttttttttatttatttttttttttttttttgtttatttttttttttttttttttatattttttttttttttttttttgttttttttttattttttgttttttcttttttttttttt

SEQ ID NO: 159402 - DNA, 434 bp, Arabidopsis thaliana columbia
tcaaaaacgattttacaagaaaaaaatatctgaaaaatagtcagagaccaacaagaatgccttccaagccggtcaggccgctggcaaagctgaggagaagagcaatgttctgctggacaaggccaaggatgctgctgctgcagctggagcttccgcgcaacaggcgggaaagagtatatcggatgcggcagtgggaggtgttaacttcgtgaaggacaagaccggcctgaacaagtagcgatccgagtcaactttgggaagtataatttcccttttctaattaattgctgggattttcaaatataatttgggagtcatatttgattttggtactcatagtacttgttagtgcattaagtgttcattgtataatgggtaaacctctgtttaccacaatttaatattttagaattattttcttttttcattgtttg

SEQ ID NO: 159403 - DNA, 415 bp, Arabidopsis thaliana columbia
gttttcaggagagttaacttctggaatcaaatcttggaagaagctcaacgagttaaacttagccgataacgaattcaccggtaaaattccagatgaaatcgggagtttgtcagtattgaactatcttgatctttctggtaacatgttctctggcaagatcccggtttcattgcagagtttgaagcttaaccagctgaatctgtcttataaccggttatcgggtgacttaccgccttctttagcgaaagatatgtataagaatagcttcattgggaacccgggattgtgtggggatatcaagggattgtgtggctctgagaatgtagctttaatgattggtctttgtatggtttccttatttgtttttctatcttgtttatatgttctttttttatgcggtttatttttttatttt

SEQ ID NO: 159404 - DNA, 170 bp, Arabidopsis thaliana columbia
ggggtcctccgaatcaagaacccacaaataacattcgaggaatctgtgaacgacgacccaattgaacctaaagttgaagactttggacggatttagaaagaaagacccaaaaagatgctgtagagcgaggcatctctttcgatttactgcgactctggagatgggttcaa

SEQ ID NO: 159405 - DNA, 219 bp, Arabidopsis thaliana columbia
gagacagagaggtagagagagtaacgatggctgctgtagaagaagtagacgatgttggaagaacaatagaggaagagactgtgtgtgaaaaatgagaaagatgagaggaatctgatacattgattccttggttgcatcactccattattataagcatttgtctatttttctacaaagcttacttttctttgttttatcattttcattttggattttttg

SEQ ID NO: 159406 - DNA, 211 bp, Arabidopsis thaliana columbia
  unsure (1)..(211): unsure at all n locations
caggaaccatgttcttgattttcagttgtccgattcttgtcatctctgtcttagcttctctctatctcattatctccggggaagacaaggtcttcactaagaagaagatatcgaaattcccgaggtttaggctatggacattccctgttcttgtggatggaccatttggagttgtntctgcagctgagtttcttggatatatgggcttttt

SEQ ID NO: 159407 - DNA, 144 bp, Arabidopsis thaliana columbia
gacagatttgattccatttttattactgttactatcattcaaacccttggtatttgtagccatgagtcttgtttcagatctcatcaaccttaacctctcagactccactgacaaaatcattgctgaatacatatgggttggtgg

SEQ ID NO: 159408 - DNA, 222 bp, Arabidopsis thaliana columbia
cttcctcactcttaacgaaaatggactctttaacactcttcttcaccggtgcactcgtcgccgtcggtatctactggttcctctgcgttgtcggtccaacagagcgtataggcaaacgagccgtagatctctctgggggctcaatctccgccaagaaagttcatgacatctacaaacatgttctgttctttctgatttcgttccaatagaaattgaaaccgt

SEQ ID NO: 159409 - DNA, 350 bp, Arabidopsis thaliana columbia
agcaatcacactctctctttgttcgagtaccaacaatggcccttcaagctgcttctttggtctcctctgctttctctgttcgcaaagatgcaatagttaatgctttttcattatctctcaaggtctcgagtttttatgtttctcttagtacattccataatttaatcctatctttgatttattttatttttgttctattttttttcttttattttattaattctcttaatttattgttcttatttattattttattatttttcaattcattttttgtttatatattcgttcatctttctcaatattttatttattgtttttaactatgtttttatttttcattataattt

SEQ ID NO: 159410 - DNA, 351 bp, Arabidopsis thaliana columbia
aacttcctcggctcgcctcacttgctccttccagtctgactttaaggacttcaccggtaaatgctccgacgctgtcaaaatcgccggattcgctcttgccacctctgctctcgtcgtctcgggagcaagtgcggagggagctccaaagagattgacctatgatgagattcagagcaagacatacatggaagtgaaaggaactggaacggctaaccagtgccctactattgacggtggctctgagactttctcgttcatacccggatagtatgctggatagatgtattgttttgagcctatttttcattaccgtcttggcttattttcttttgatagatatatttctcttat

SEQ ID NO: 159411 - DNA, 141 bp, Arabidopsis thaliana columbia
ctctcacagaaaaaagtaaaaaaaaacctagatcgctcttcacatctcttcgaacgattctctctttcaagatgcaaattttcgtgaaaacactcactggtaagaccatcactctcgaggttgttagctctgtctccattt

SEQ ID NO: 159412 - DNA, 283 bp, Arabidopsis thaliana columbia
gcagctggttcttgttccaaggagaatcaaatgatctacaaggaatggttcgaattctccgattcagacggcgatggccgtattactggtaacgatgcgatcaagttcttcactatgtcgaatttgcctcgtccggaattgaagcagatctgggctattgcagattcaaagagacaagggtatcttggtttcaaagagtttattgttgccatgcagcttgtttcgttggctcatactggacatgaaatatcgcatgaagctcttatttgcgttgtttttttta

SEQ ID NO: 159413 - DNA, 250 bp, Arabidopsis thaliana columbia
ctttggacgaccatcggcgacagtgttaagtcttgagtcttcttcttcttcggcgtagttttgacccactcttataatatgagaggatctcacaaaaagatatttttcattactatttgcaaactaagttaagcccatattgatattatttcattatatattaaattaaaaaataataggattcattgattagttaattaaattaatttaatttttattataattaatttaattttattaaatgaatttt

SEQ ID NO: 159414 - DNA, 407 bp, Arabidopsis thaliana columbia
cttgaagacggcttcttcttctcacaaacctcatctctgctaatcaaaatgtctctggttgcaaatgaggagtttcaacacattcttcgtgtgttgaatactaatgttgatggtaagcagaagattatgtttgcccttacctctatcaaaggtattggtaggctattggctaacattgtctgcaagatggctgatttcgtcattgttcaaaatgtctgtttatttttattctatttatatttataacttcattacattttttatttatcatttttttgtttaagatatctttttaatatttttcaatataattattttttattatttattttttttatatttattttgattaattatttattatttacactcaatttttttaaatatgtattgtattgttatttttt

SEQ ID NO: 159415 - DNA, 107 bp, Arabidopsis thaliana columbia
cgaccatcggcgacagtgttaagtctagagtcttcttcttcttcggcgtagttttttccccggcttgaaaaatgggtctatccttcggaaagtcgtccatcatgctc

SEQ ID NO: 159416 - DNA, 149 bp, Arabidopsis thaliana columbia
cttgaagacggcttcttcttctcacaaacctcatctctgttaatcaaaatgtctctggttgcaaatgaggagtttcaacacattcttcgtgtgttgaatactaatgctgatggttagctgaagattatgtttgtccttacctctattaa

SEQ ID NO: 159417 - DNA, 327 bp, Arabidopsis thaliana columbia
cttcacccaaaaacccctaaaagccttatcccttcttctttccatggctgcttcagcttcgtctctcgctctctcttccttcaaccctaaatctcttcctttcggcgtctccagacctgcctccgtttccctcttatctccttccctctcctttaaactcaattccgactccgtgtccttgtccatcgccgccaaatggaactctcccgcttctcgcttctcccgtaacgttggcgttttccccaatagttcgttgtgtatagtagattgttttctcttcttcttttcttgtctatttgtactattcttattttggtttgttccttt

SEQ ID NO: 159418 - DNA, 359 bp, Arabidopsis thaliana columbia
agtaacaataaattccaattatgtctcgaagaagacaaccaatttaggaaatataagcagcagaaagtaacggctaaaacaagtctcgaccgaatacttggtggatttctaaattctaaactttcttttttaccatccttatgttcgtttaccgaaggtatgtatttatttctttatttgttgatttgttttattaattgaatcattctatagttgtatttttttttttattatttaattttttaatctattaattattcttttattttttttttttcattttatttttttattttatttatttaaatcaagtgtatttttattaattttaaatatattttgattatgttttatattta

SEQ ID NO: 159419 - DNA, 181 bp, Arabidopsis thaliana columbia
cagatttttccttaaatggaagaaaccaaacgtttctccgatcttctccgttctcgtgttttcctctctggcttttattgctgggattgggaatttctcaccgctcttcttgctttttagttgcttgattcctttccctccttccttccattcctaatctccgtctattcttttcattatt

SEQ ID NO: 159420 - DNA, 258 bp, Arabidopsis thaliana columbia
agctgaaagctccttttgctcaagcctctccacaatcagacccaacaaatactaaggaaaagagatcacatggtatagtttccttgtcccaggactcaagtggaacctatctcacagcatcatgcaaggacaatagaatctatctatacaacacgctgcggcttgacaaaggacctgtacaatctttctctggctgccggatagattctttcttcgtaaggacgatgattagtcctgatggtgaatatgttatgagcg

SEQ ID NO: 159421 - DNA, 189 bp, Arabidopsis thaliana columbia
cagaattacaaacaaaaatggttttgcaaaagcttcctctcattgggctgcttttgctcctgaccatcgtcgcctctccagcaaatgcagatggacctgtttgcccgccgtcgaacaaactaagccgggcaagtttccctgaaggttttttatttggcacgattactgtggtataccatgtcgaagttg

SEQ ID NO: 159422 - DNA, 323 bp, Arabidopsis thaliana columbia
gctgatattacagtccggtttgagccattggaagcagggtcaggatacgaattcaagagtgagatcaaaggaggagctgtgccaagagagtatattcctggtgtcatgaaaggacttgaggagtgtatgagcaccggtgtgcttgctggtttcccggttgttgatgtccgtgcttgtctagttgacggatcttaccatgacgtagactcaagcgtgctagctttccagcttgctgcaagaggagctttccgtgaagggatgaggaaagcggttccgagaatgcttgaacctatcatgagagttgaagttgttacaccatatta

SEQ ID NO: 159423 - DNA, 289 bp, Arabidopsis thaliana columbia
gttgttcttcccgagaaactgaatactggcagttggaacgtctacagatctgcaaaatctccgttcaagctcgttagcagattcccagatcatcctgacatcgctactctccatgacaattttgagcatgctgttcatgattttcgagattacaagtatttaggaactcgtgttcgtgtcgacggaactgttggagactacaaatggatgacatatggagaagctggtacagcaagaactgctttaggttctggtttggttcattacgggaatccccatgggtatcttc

SEQ ID NO: 159424 - DNA, 96 bp, Arabidopsis thaliana columbia
ggagctggtagtgaggcaggaactttatgggatgatggtgctttcacggtgttggaaagaggcggggacatcccagatggggggtcctattccttt

SEQ ID NO: 159425 - DNA, 329 bp, Arabidopsis thaliana columbia
caaaaacttcaattaaccagaaaaggtcagattctccgccgcctcacacgacgggcaacttcagttcctgccgtcgcgttagatcccgccgtcaatcggtcatggcgaccggtaaaacctcttccgccgcgaatcttttcactggctcgacgcgttttgatttatcatccgctgattcgcctccttcaaaactctctctctcctccgatcagctcaaccactgtcaccaagctctcggcgttttccggggaaatgattcaatttcctgactcgattgctcatgatgttatcggttatcttgttaattggatgttttcttcgttgctttc

SEQ ID NO: 159426 - DNA, 258 bp, Arabidopsis thaliana columbia
cgcgagcggcacagtccttcttattaggtcttatttttcgccgcctcacacgacgggcatctttagttcctgccgtcgtgttagagcgcgccgtcattcggttatggtgaccttaattacctttatcgcctgtaatattttttctgtctctacgcgttttgatttatctatctgataattttccttcatttatttaattttttttattcttttaattctttttcaatttattgtacatcctttgcatcttatttctgt

SEQ ID NO: 159427 - DNA, 439 bp, Arabidopsis thaliana columbia
ggttacacagaggatattactccgaattggtgcgtcttgtacgtgttgaaatccaaaaaagaatcgatctcatccagagcataatctatatgggatttcctaaattattaattgaagataaaccccgaagagtcgaagaattacagatgaatgttcaaaaagaactaaattgtgtcaatagaaaactcaacattgctattaccagaatttccaatccgtatggggatcctaatattcttgcagaatttatcgctggacaattaaaaaatcgcgtttcttttcgaaaagcaatgaaaaaagctattgaattaactgaacaggcgaatacaaaaggaattcaagtacaaattgcaggacgtatcgacggaaaagaaattgcacgtgttgaatggatcagagaaggcagagttcctttacaaacaattgaagctaaaattga

SEQ ID NO: 159428 - DNA, 212 bp, Arabidopsis thaliana columbia
gaaagaaaagaacttaaatcaaaatacttaatagcatggcgatacatttatacaaaacttctaccccgagcacacgcaatggagccgtagacagtcaagtgaaatccaatccacgaaataatttgatctgtgggcagcatcattgtggtaaaggtcgttatgccagaggaataattaccgtatggcttagatggtgtggtctttttattaat

SEQ ID NO: 159429 - DNA, 302 bp, Arabidopsis thaliana columbia
agcttcttagtagttgtgacgcatactcgtcgcagtcttgagatatggccgccgcagtttccaccgtcggtgccatctacagagctccgttgagcttgatcggttcaggatcaggagctgtttcttccctagcttcaatctttttgggattgaaatatttactttgtctttattttatcttttcttctagtattttttttgtttattaatttttttatttttttcatttattttattaatttatattaaataaatttatatttaattgattgctatttatttaatttatatttatttgattt

SEQ ID NO: 159430 - DNA, 103 bp, Arabidopsis thaliana columbia
attgtatcagtgccagtgggacgtgttgagactgttatgatcaagcctggtatggttgtgaccgttgctcccacaggatggaccggtgaggtctagttttgtt

SEQ ID NO: 159431 - DNA, 216 bp, Arabidopsis thaliana columbia
tcgattccgtcgcccacgcgtcgcttcggaattcctatcacaatttcaaggctctttaaccctgatcatcaccgattcaatcaattcggaatcacatttcaaatcgagagaattcaatttctttgtaaaccctaaattatgacagcaatttcaaggaacagcgatcgatactgagcaagcggtcagaaacatgctggaattacatagctttcctct

SEQ ID NO: 159432 - DNA, 112 bp, Arabidopsis thaliana columbia
caaaaaaagcttgtgaaagacaactaagacagatttactagtctcttggtgcgttgaagattgtaaccgagcgagggctacaggtgggagatttatattttttttattttat

SEQ ID NO: 159433 - DNA, 181 bp, Arabidopsis thaliana columbia
agcttctctaccggaagaggtgcttcagccgcttttacattcttcagatttatcatactctctagaagagtgcttgaaatttcttgtagagtcttccaagaccgattcaggtcgttccgatctcgcttccaagtctattctaccgttctttttttcgttttttcttaatttgttttatttt

SEQ ID NO: 159434 - DNA, 300 bp, Arabidopsis thaliana columbia
gaaagatagagaaaaaaaatgggaggcaaaggtgtgatgatggtggcgatactttgcctttgggcactctctgcaacatctgaagcagtaacagaggctgagccaggtttgatgatgaacttctacaaggacacgtgtcctcaggccgaagacattgtccgtgaacaagtcaaactcctctacaaacgcctcaagatcaccgctttctttttgttccgtaacatcttccatgactgttccattgttttatgtattgatatttttttaaatatatatattaattatatgtgtttttttaat

SEQ ID NO: 159435 - DNA, 290 bp, Arabidopsis thaliana columbia
ctcgaactctcttcttctttctctcttactttgtgtttgctctgttttgctctcttaacacaacacaaaaaatgtccatcgttgttggccaagcttaccaacatcttcccaagcaagtaagccaaaatcctgacgtgggtggatggagtttcttgcaatatttctctgagccaaaaggcattgtccagaacagagaagacgacacatagaaaacagcttatgtctacccgatcgagaatgcgttccgtagctaatctgagccttgagatgtgcacagagaagccttgtac

SEQ ID NO: 159436 - DNA, 113 bp, Arabidopsis thaliana columbia
caactccgttgactcctgccaagcagctaacggcatttggtagtgatgacggaactgtatgggatgatggtgcttacgttggggttaagaaggtgtacggttttacactgctg

SEQ ID NO: 159437 - DNA, 331 bp, Arabidopsis thaliana columbia
gagagaggacaagtagagcaatggttagacgttgaggctacaagttaccatccaccactattggctttaacgctcaacattgtctttgcaccacttatgggtttccctgctgatgagaaagttattaaggagagtgaagagaagcttgcagaagtgcttgatgtctatgaagctcagctttctaagaacgaatacttggctggtgattttgtgagtctagctgatttggctcacctttcttttaccgagtatcttgttggtcctattgggaaggctcattttgatctaagataggaagcctgtttgcgcttggtgggataatatttgtatc

SEQ ID NO: 159438 - DNA, 444 bp, Arabidopsis thaliana columbia
gcgaaattctctgatctctcttcattttattttccctctacatctctcccaacgatttccaaatctcacttcactttggctcctccacctgaatccatggatattgcttcgtcatctctctcacaagctcacaaagtcgttctcacgcgtcaaccttcttcccgggtcaacacctgctcccttggctcggtctccgctatcggattctctcttccgcagattagctctccagctttaggtaaatgtcgccggaaacaaagctcttctgggttcgtgaaagcttgtgttgctgttgaacagaaaacccgaactgctatcatcagaattggcacaaggggaagtcctctagcacttgctcaagcatacgagacgcgagaaaagctcaagaagaaacaccctgaactcgttgaagatggagctattcatatcgagatcattaaaacg

SEQ ID NO: 159439 - DNA, 217 bp, Arabidopsis thaliana columbia
aaacccccagaggcttttgttacccgcttgaaaacgactgttcagaaaacagaagacgaggactttgcggaaggaagcgaagcaggatactcatctagtaatccggttgatagtgcagcttctcctccaggtaatatcccacagccttccggatgactaccagcaccagcggtcccagctcctgtacctgatctgctaggtgacctgatgagattgg

SEQ ID NO: 159440 - DNA, 322 bp, Arabidopsis thaliana columbia
gtgagatcgggaatcaaacatcgcctccgtctctcatttcaaacgctatctccatctccttcctccgccgccgccatggaatctccgaagaattctctgatcccgagcttcctctattcatcatcttcatctccgagatctttcctcctcgaccaggtgctcaattccaactccaacgctgcattcgagaaatctccttctccggccccgcgttcctctcctacgtcgatgatttctcggaagaatttccttattgcatctcccaccgagccagggaaggggatcgagatgtattcacctgccttctacgctgcttgtacct

SEQ ID NO: 159441 - DNA, 165 bp, Arabidopsis thaliana columbia
caaatgcttaaacgttttactttgtgctgcactactcaactctcaatggccgcctcaacaatggctctctcctcccctgccttcgccggtaaggccgtcaagctttcccccgcggcatctgaagtccttggaagcggccgagtgacaatgaaaaagactgttgcc

SEQ ID NO: 159442 - DNA, 230 bp, Arabidopsis thaliana columbia
gagagaggacaagtagagcaatggttagacgttgttgctacaaggtaccatccaccactatgaggctttaacgctctacattgtcttggcaccacttatgggccgccctgctgatgagaaaggtattaaggcgagtgacgagaagcttgcagaagtgcttgatgtctatgaagctcagctttcgaagaacgaatacttggctggtgattaggtgagtctagctgcattgg

SEQ ID NO: 159443 - DNA, 366 bp, Arabidopsis thaliana columbia
aagcttttgaaatctgcttgttccttgaaaatggaactacaagatgctatgaatgatgagaatgagaaagcccctgaggctttcgggttcaaaatgataagttttcggaacaaggggtgtaggggtgagctagaaagatggattgggttgaattttgtttttaaaaattaggatattgtttgaatttttgtttaattgttttttttattttttttgtaaatttttattttttttatattttttttttttttttgggtttttttttattttttttattattgttttttttttttaatttttttaatatttttatttttttatataattattttatttattatattaatttatgtgtttttttttgtt

SEQ ID NO: 159444 - DNA, 231 bp, Arabidopsis thaliana columbia
caaaaattcttcatcgactcaaattcaaaaactcatctctctctatctctatttctctggttccatagctcaccgtcgcatcgcagatctactccttccgcaataaattttaccggcggaggtatcagatctcgccgatctgttgtagcagctactgtattttgggcttctcatttgatattggggaaacgaggagtataggacgatgggaaatctgatctctcttgttta

SEQ ID NO: 159445 - DNA, 145 bp, Arabidopsis thaliana columbia
ctcttgtccgtatcaccggtggaatgaaggtgtattgctgatagagatgagatcctcaccttacgcagctatgcttgcagcacaggatgtctattacttatgcaaggaactttatcgtactggcatgcatatgtagcccctctcc

SEQ ID NO: 159446 - DNA, 324 bp, Arabidopsis thaliana columbia
  unsure (1)..(324): unsure at all n locations
gtaaaaaagagaagaaagaaaaatggtgctaaaggtgtacggacctcactttgcttcaccaaagagagctttggtcacactgatcgagaagggcgttgccttcgagaccatccccgtcgatctcatgaaaggagaacacaagcagcctgcttatctcgctctacagccttttggtactgttcctgctgttgttgacggtgactacaaaatcttcgagtcccgtgcggtgatgaggtacgtagctgagaagtacaggtcacaaggacctgatctnttggggaaaaccgttgaaaacagtagtcaagttgtactatggcttgttgt

SEQ ID NO: 159447 - DNA, 173 bp, Arabidopsis thaliana columbia
  unsure (1)..(173): unsure at all n locations
cgtccgttgttcttcgaaaccctagctcgaagcgccttgttccattctcttcccagatctactctcgctgtggtgcttccgntacttcctcttactcgaactctcattctatgggggagaagactccttccttaccttggacctctctttggggtcatggccttttactgaaa

SEQ ID NO: 159448 - DNA, 345 bp, Arabidopsis thaliana columbia
cgcgtccgcaatacatcgcagtctcccactgattcagcagttcttttaactactcttcgacaatggccgaacgtggtggagaacgtggtgttgagcgtggtgtataactttgtgatttttgattatttttttttttttgttatttttttttttattattttttttttttatttttttttttttttattttttttttatttttatttattatttttttttttatttttttttattttttttttattatttatttttttttttatttattatattttattttatttttttgttttttatttttttaatttttttattattttatttttattttgtttttatttttaa

SEQ ID NO: 159449 - DNA, 258 bp, Arabidopsis thaliana columbia
cagaatcatcacaagttctgataaaggacaaaactcttttctgatgcaactcacgttttcacttcacaagctccaaaagagtttacttgggaaaacaaaagtttgacgaatgcaaaaccaattttgttagcataagaccaaacctacttcttcgtctgcctctttgcctgtatttgagttgttcttgctttgataagaaatttgtatatttttttttttttatttttttaatgttattatactaattttattttttta

SEQ ID NO: 159450 - DNA, 313 bp, Arabidopsis thaliana columbia
aaagaaactaacaaggattcccttagtatctgcgagcgaaccgggaagagcccagcttgaaaatcggacgtcttaggcgtggggatgtgttttattataaaatataatctattttttaattttattagtttgtaataatttatattatatttttttgaatttagtatctaaatttaatattatttatagtatttattatactttttattataattttatttttattttattttttaactttttttttttgtttttttttctttttttttttttttttattttttattttttttttatattatgtaattattta

SEQ ID NO: 159451 - DNA, 189 bp, Arabidopsis thaliana columbia
gaaagagagaaagagagacagagataatgtcgtacagtgcgtgtttcctacaccagagcgcattggcttcatcagccgcacgatcatcatcttcctcctcatcccagcgtcacgtgtcgctctccaaacctgttcagatcatctgtaaagctcaacagtctcatgaagacgataactccgccgtctccc

SEQ ID NO: 159452 - DNA, 51 bp, Arabidopsis thaliana columbia
tcgcagtttgacggatagcatcagcggtgtatttgtttagagttctgatgg

SEQ ID NO: 159453 - DNA, 261 bp, Arabidopsis thaliana columbia
gagagagcaaaaatggcgacgtcgggaacgtacgtgacggaagttccgctaaaaggatcggccgagaaatactacaagaggtggaagaactagaaccatgtcttccctgatgctatcggccaccacatccaaaatgttaccgttcacgaaggcgaacatgactctcacgggtctatcaggagttggaactacacatgggatggaaaggaggaggtgttcaaggagagaagagagatagacgatgagaccaaaacgttgacg

SEQ ID NO: 159454 - DNA, 259 bp, Arabidopsis thaliana columbia
aaagcacgctacagaagaagaggaagaagaagaagaagcagagacaacaagaagaagaagaaacagtctcatctcgccggagaagaagaaagatgtcgtggcaatcatacgtcgatgaccatctcatgtgcgaggtcgaaggcaaccacctcacacacgccgccatcttcggccaagacggcagtgtctgggctcagagctcagcttttcctcagttgaagcctgcagagattgcaggaattaacaaagactttgaaga

SEQ ID NO: 159455 - DNA, 244 bp, Arabidopsis thaliana columbia
actcctttcaactttctggaggccttctcgtagcctagcgtcatagatggatttgatggagaagaacttggagttagtggagattcagaaactagaaggccacaccgatcgtgtttggagcgtagcttggaaccccgtttcttctcacgccgacggtgtttcaccgattcttgcttcttgcagtggcgataacactgtttgaatctgtgaacaaaagcttttctcttgctcctggacttgcaag

SEQ ID NO: 159456 - DNA, 392 bp, Arabidopsis thaliana columbia
cacactccaactccacacactccatcacacacgctatacttcacacacccctccttgtaactgtggaagtccaccttcccacccttccacgccttcacacccttccactccttcgcacccaacgccatcacaccctccttctggtggatattactcatctcctccaccaagaactccggttgttgtgactccaccatcacccattgttgatccaggcacacccatcattggaggaagcccaccaactcctatcattgacccaggcactcctggaactcctttcattcctgctcctttcccaccaatcactggaacatgcgattactggagaaaccaccctacattgatatggggcttgcttggatgggggggaactgttggaggagcttttg

SEQ ID NO: 159457 - DNA, 165 bp, Arabidopsis thaliana columbia
aggagatttaagcctgcattggttgctgttagaaacgagtcactgattaatgagcttaaagaggctttagctgatttggactataaactcgagattattccaggagagcaaggagtgattgaggttgcccgacatcctgaagctgtaaccgttgttaccggaata

SEQ ID NO: 159458 - DNA, 268 bp, Arabidopsis thaliana columbia
  unsure (1)..(268): unsure at all n locations
gaaacccgaaaacctcaaaccatggccgagggactcgtattgaagggcattatgcgcgcccacaccgacattgtcacggccatcgctacgccgatcgacaattccgacatcatcgtcacagcgtcgcgtgacaaatccatcatcctctggaaactcacaaaggacgataagtcttacggtgttgctcagcgtaggctcacaggtcactctcacttcgtggaagatgttgttctctcatcggacggncagtttggactctccggaagct

SEQ ID NO: 159459 - DNA, 261 bp, Arabidopsis thaliana columbia
ctcgggctctgtcgatttccggttcatgactaggcattactgtggaaatgcaatcaagaagcttatgttcgggacgagaacgttctctaagaacactgcacctgacggtggacccaccgtagaagatgtagagcacatggaagcaatgtttgaagcattagggtttaccttcgctttttgcatctctgattatctgccgatgctcactggacttgatcttaacggtcacgagaagattatgagataatttagggcgattat

SEQ ID NO: 159460 - DNA, 261 bp, Arabidopsis thaliana columbia
ttctttttcaagcttcttcttctcatcagtctattccggaatctaatttatactcgcaaaactcagcgattcgtttcgtttctggcgagtttccaattctacagtaatggatctcaatctcgattcacctcactccatgttatcttccatctttggctctactttccattttaagtttgatatttttttttcatctttgtattttaatatttttaattttatgtttttattttcatctatttataattttattatttattt

SEQ ID NO: 159461 - DNA, 206 bp, Arabidopsis thaliana columbia
  unsure (1)..(206): unsure at all n locations
ctcttcttcttcttcttcctctcaagtatcgaaaccgaaacagagaaacatcaccaccaatgggatgttttatgggttgtttcggnctctcttccaacaaaaaacgcagaaattccattaggaagatccttcctcgagatcaaagaatctgtagctatgagccgctgctttcttcagatccgacagatttcagtactgttacagat

SEQ ID NO: 159462 - DNA, 81 bp, Arabidopsis thaliana columbia
ggtcgctaccgtgtgataacagagaggacggtttttgccatgccagaaaatggaattggctggggggttgaatggggtgtt

SEQ ID NO: 159463 - DNA, 364 bp, Arabidopsis thaliana columbia
gctgactaggggttaaaagctcgatgatacggattttttatttctcggagtagaaggagaatctgagagagagagagtcatggaagctctgaaaaccgcaacttttagccctatgtcggtgttatccgagaaaagatcagaaccacgaaagcctttctcgctccctaacctctttccaccaaaatcacagagaccaatctcccaagaaagcttcttgaagagattcaatggtggattggctcttctaacttctgttctaagcagtgcaacagctcctgctaaatccctgacgtacgaggaagctctgcaacaatctatgaccactttttcaatttttttgattcggatggtcctgattgaaggg

SEQ ID NO: 159464 - DNA, 218 bp, Arabidopsis thaliana columbia
gattatatcgccaacgagagagctatcaacgcagatatataatgtcgcacaaccatttgtttcgactttggcaaatgtgaactctgtgttgcttgttggaggccgagaggtgaaagctgacatgaagattattgaagaagaaggatgcaatgtcttgattggtacacctggaagactttctgatattatggaactaatggggattctgggtttttgaa

SEQ ID NO: 159465 - DNA, 260 bp, Arabidopsis thaliana columbia
aagaagaggtagagaagaagatgtctcaatcaatctccttcagcacaaaggcagaagaagttgttagtgtagatgtgagccaagccaagactctcctccagtctgggcatcaatatcttgacgttaggactcatgacgagtttaggagaggccattgtgaggcagctaagatcgtcaacattccctacatgctcaacacaccttaaggtagagtgaagattcaagagtttttggagccaagtatttttttctttttaaac

SEQ ID NO: 159466 - DNA, 348 bp, Arabidopsis thaliana columbia
aaaatcagaattacaaacaaaaatggttttgcaaaagcttcctctcattgggctgcttttgctcctgaccatcgtcgcctctccagcaaatgcagatggacctgtttgcccgccgtcgaacaaactaagccgggcaagtttccctgaaggttttttatttggcacggctactgcggcataccaggtcgaaggtgcgattaatgaaacttgtcgtggaccagccttatgggacatctactgtagaagatatccagagaggtgcaataacgataacggcgatggggcctgtgatttctttaactgtataaggaagatattctttttttgtagtattttattaattgtttc

SEQ ID NO: 159467 - DNA, 231 bp, Arabidopsis thaliana columbia
atcctcagaaatatacaaactcctcagaaaattctttcgtttggtttgcttcgttctacaattttgtattgatgagaatgttatattgagtcattaaccgtttgataaatcgtatttggctctgtaagtagtatttattggtattgaaacgatggatcatgtaatcggtggcaagttcaagttaggtaggaagattggtagtgtttcatttcggtgatccatatattgtta

SEQ ID NO: 159468 - DNA, 290 bp, Arabidopsis thaliana columbia
atcgtctttcgctccactagcgatccacgcgccttctcgttcgcttgatcttgaagttggaaactttgggaaccagacaggctttgtaggagaaatgtatggaacaggggacattttgaggtcagtttcgattccttctgagactgataagcctataatcgtggagctagcggttgcagctatggaggaactcgtgagaatggcttaaactggagatcctttatggtttttaaccgattattttaatttagactcttctacgtaattatagttatttttttattgttatt

SEQ ID NO: 159469 - DNA, 245 bp, Arabidopsis thaliana columbia
cgaccacgcgtccgaaaagttaggttcgaaacgaaagtaaactatttaggtgaaaagcgaaacaacacccacagagcaatggcccctgctctcgccgttacacgagatctcaccgccgtcggatcttcggagaatgctcctgcgaaaggacgtgctttgtttttatttttaattttttttatctatgttttaatatattctttattagttatctatttatttgtttataattatttttgttttta

SEQ ID NO: 159470 - DNA, 135 bp, Arabidopsis thaliana columbia
cctaaacggagagaggcggagaggagaagtgaagtctgcgtgaagcaatggtgtcgctgaagatccagaagcggttcgccgcattcgtaatgaaatgcgggaaaggaaatgttttgcttgatcctattgaatttg

SEQ ID NO: 159471 - DNA, 323 bp, Arabidopsis thaliana columbia
  unsure (1)..(323): unsure at all n locations
caaagagtaccctgaaacagatctttcgtataatcagtgacgtagagatcgaagacgatgatgggctttgttttcgncatgaaaggtgttaaattattttttattaatatatttttatatatttattattaattgtattttttttttattttttttatttttttttatttttattttttttttttatatttaattatttttattttattttaattttttttatatttttttttgttgtattatatttattttattttttattttatttttttttatgttttttttttattttatttattttatatatattttatttttttttt

SEQ ID NO: 159472 - DNA, 146 bp, Arabidopsis thaliana columbia
  unsure (1)..(146): unsure at all n locations
ggagcatgtgatcaagcctgttatccctgctaattaccttgacgataacaccatctttcacttgaacccatctggtcgttttgtattnttttttttattttgttttgtttttttttttttttttatttttattaaatttttttttt

SEQ ID NO: 159473 - DNA, 293 bp, Arabidopsis thaliana columbia
gccactggttctggaaaaaccctagctttcgtcgttcccctcgtagaaatcctccgtcgatccacctcattccctccgaagcctcaccaggtcatgggggtgattatatcgccaacgagagagctatcaacgcagatatataatgtcgcacaaccatttgtttcgactttggcaaatgtgaactctgtgttgcttgttggaggccgagaggtgaaagctgacatgaagattattgaagtaagaagatgcaatgttttgtatgggacaccttgaagactttttgatattatgga

SEQ ID NO: 159474 - DNA, 266 bp, Arabidopsis thaliana columbia
cgattattctccaaagagaaagagaaaaatcaataacctcatagtgtcgacatgggttgccaagacgaacaattggtgcaaacaatatgcgatctctacgaaaagatctcaaagcttgagagtctaaaaccatccgaagatgtcaacattctcttcaagcagctcgtttccacatgcataccaccaaaccctaacatcgatgtcaccaagatgtgtgacagagtccaagagattcgacttaatctcatcaaagattgtggtctagc

SEQ ID NO: 159475 - DNA, 455 bp, Arabidopsis thaliana columbia
accaaaccctaaaccatctttctcaacatggcgcttcttcacaagcaaaacatttcctttgtgatactcctcctcctcggtctccttgccgtctcttatgcttgtgattgtagtgaccctcctaaaccatcaccacaccctgttaaaccgccaaaacatcccgctaaaccacctaagccccctaccgttaaaccacctactcacaccccaaagcctcccactgtgaagcctccacctccatacattccatgccctcctccgccctatactccaaaacctccaaccgtgaagccaccaccacctccctacgtgaagccaccaccacctcccactgtgaagccaccaccaccttcttacgtgaagccaccaccaccccctaccgtgaagccaccaccaccacccacgccgtatacttcaccaccacccacgccgtatacttcttcacacccacggtg

SEQ ID NO: 159476 - DNA, 482 bp, Arabidopsis thaliana columbia
tcgcattgagaattttcaactttttctatctctcttcccaaatcacaaatggcgggtcgcggcaaaactctcggatctggcgttgctaagaaatcaacatcgagaagcagcaaagccggtctccaattccccgttggtcgtatcgctcgttttctaaagaacggcaagtacgcaacacgtgttggtgccggagctccggtttacttagccgccgttctcgaatacctcgccgctgaggtattggaattggctggaaacgcagctagggataacaagaagactaggattgtgccacgtcacattcagctcgcggtgagaaacgatgaggagctgagtaaactgcttggagatgtgacgattgctaatggaggtgtgatgcctaacattcacagtcttcttctttccaagaaagctggggcttcaaaacctttcgctgatgaagattagattagggatttgggttgggggtggtttagctaatt

SEQ ID NO: 159477 - DNA, 207 bp, Arabidopsis thaliana columbia
atttgggggatcatcaaccttctatcatcaccatggatccttacaagtatcgtccttcaagcgcgtacaacgccccattctacaccacaaacggtggtgctccagtctccaacaacatctcttccctcaccatcggagaaagaggtccggttcttcttgaggattatcatttgatcgagaaggttgctaatttcaccagagagagga

SEQ ID NO: 159478 - DNA, 114 bp, Arabidopsis thaliana columbia
gcggcgattagttcccggcgaagaagaataagagtagataagaaaatggcgactaatggatctgctagctcagcgcagctctctcagaaggaagctgatgtcaggatgatgtgt

SEQ ID NO: 159479 - DNA, 253 bp, Arabidopsis thaliana columbia
ctcccgtcgtctctgtccaggaagttgtcaaggagaagcaatccaccaataataccagcctgttgataaccaaagaggaaggattggagttgtatgaagatatgatactaggtagatctttcgaagacatgtgtgctcaaatgtattaccgaggcaagatgtttggttttgttcacttggacaatggccaagaggctggttttactggctttatcaaagctccttaccaaagttgactttgttgcttgttcct

SEQ ID NO: 159480 - DNA, 337 bp, Arabidopsis thaliana columbia
catctatccacgcctgaacccgaaaaactctgaaagctgagctctggtaatggcgggtttagcaatttcacctcctctcggtctttccttctcttctcgaactcgaaaccctaaacccacttcctttctatctcacaatcaaaggaatcctataagacgtatagtttctgctctacagagtccatatggagattctctgaaagctggactttctagtaatgtttctggatccccaataaagattgacaacatggctccaagatttggagtgatagaggcgaaaaatggaatcctcccaataatgccttcagtgatgacccctggaggacctttagac

SEQ ID NO: 159481 - DNA, 414 bp, Arabidopsis thaliana columbia
caaaaactccgttcgtggactacctaaagcccatcatcgccgacggagacaccggctttggcggcaccaccgccaccgtcaaactctgcaagcttttcgttgaaagaggcgccgctggggtccacatcgaggaccagtcctccgtcaccaagaagtgtggccacatggccggaaaggtcctcgtggcagtcagcgaacacatcaaccgccttgtcgcggctcggctccagttcgacgtgatgggtacagagaccgtccttgttgctagaacagatgcggtcgcagctactctgatccagtcgaacattgacgcgagggaccaccagttcatcctcggtgccactaacccgagccttataggcaagagtttgttctcgcttctggctgaaggaatgactggtggcaataatggtc

SEQ ID NO: 159482 - DNA, 245 bp, Arabidopsis thaliana columbia
tcgaccacgcgtccgtataaaaagctattgtttgaaagaagaagaagttaactatggcaaaggatgtggaagccgttcccggagaaggatttcagacaagagactatcaagatccgtcaccagcttcgtttattgatggagcgtatctatagaagtgtttctttttttttacttttattttattttttttttttctttcttattttttatttatattttttttttgattattttcaatattatta

SEQ ID NO: 159483 - DNA, 461 bp, Arabidopsis thaliana columbia
gaaaaaaaaagagagaagaaaaatggtgttgacaatctatgctcctttattcgcttcttcaaagagagctgttgtgacattggtggagaagggagtatcattcgaaactgtcaatgtcgatctcatgaaaggagaacagagacagcctgagtatctcgcgattcagcctttcggtaaaatcccagtcctcgtcgacggagactacaaaatcttcgagtcgcgtgcgatcatgaggtatatagcagagaagtatagatcacaaggacctgatcttttggggaagactattgaagagagaggacaagtagagcaatggttagacgttgaggctacaagttaccatccaccactattggctttaacgctcaacattgtctttgcaccacttatgggtttccctgctgatgagaaagttattaaggagagtgaagagaagcttgcagaagtgcttgatgtctatg

SEQ ID NO: 159484 - DNA, 127 bp, Arabidopsis thaliana columbia
tacatttccactctcacattcagacgcaccaatcctctgttttggattttgaagagaaaatggcaagcagcgacgtgaagctgatcggtgcatggtctagtccctttgtgatgaggccgggtttgtt

SEQ ID NO: 159485 - DNA, 262 bp, Arabidopsis thaliana columbia
gaaaaaaaaagagagaagaaaaatggtgttgacaatctatgctcctttattcgcttcttcaaagagagctgttgtgacattggtggagaagggagtatcattcgaaactgtcaatgtcgatctcatgaaaggagaacagagacagcctgagtatctcgcgattcattctttcgttaaatatcccagtcctttttgacggttactacataatttttgagatatgtgcgatcatgatgtatttatgagttaattatcttttatc

SEQ ID NO: 159486 - DNA, 168 bp, Arabidopsis thaliana columbia
ccgtcccgattcctgttcgactcacgcgtccgatttcaagatgttttagcagatgatgttcatattgtttcgtctttaccttctacacatgttatgactagacctgatgaagagaagaggactccacttcatgctatactctcaatggtttttctctcatttatttta

SEQ ID NO: 159487 - DNA, 218 bp, Arabidopsis thaliana columbia
aaaaaaagatgcagatcttcgtgaaaaccctaactgtgaagacgatcactctcgaggtcgagtcctctgacaccatcgacaatgtcaaggccaagatccaagacaaggaaggaatcccaccggaccagcagcgattgattttcgccggaaagcagctcgaagacggacgtaccttagccgattacaacatccataaggaatcatctgctcaccttgta

SEQ ID NO: 159488 - DNA, 327 bp, Arabidopsis thaliana columbia
gtcttcttcgttctctagttttttcctcagtctctgttcttagatcccttgtagtttccaaatcttccgataaaaatgtcgggtaaaggagaaggaccagctatcggtatcgatcttggtaccacttactcttgcgtcggagtatggcaacacgaccgtgttgagatcattgctaatgatcaaggaaacagaaccacgccatcttacgttgctttcaccgactccgagaggttgatcggtgacgcagctaagaatcaggtcgccatgaaccccgttaacaccgttttcgacgctaagaaggtgatcggtcgtcgtttctctgacagc

SEQ ID NO: 159489 - DNA, 393 bp, Arabidopsis thaliana columbia
ctctacgctctctcaaaagtcgaatatcccaaattcgatccggatcccgggtagaatccaaatgttacaatataaaatgtcgtttgggggagaaggaccagctatcggtatcgaacttgttaccacttactcttgcgtcggagtatggcaacacgaccgtgttgagatcattgctaatgatcaatgaaacaaatccactctctcttacgtttatttctccttttcttataggttgatctgttactcattttataattatttttcttttatccctttaactttcgttttcgtctcttttagttttatcgtttattaattctttttacttactcttaattatattgacactttaaatttttgctcttacatatcactattattgtacaatttttt

SEQ ID NO: 159490 - DNA, 460 bp, Arabidopsis thaliana columbia
aatcattccaaaaagttgaaacatgtttccgctttactgcggcgtgaccatgctgtggcagtccgctgtttctccaacagtacccacccctctctcgttggaagagaagatatcttcaaggcccgcctgaattattcctctgtagagagaatttcaaaatgtggtactggcaatgtaacaatgcttagtggtatttcaacaacgagcacaaaactaagcagcccaatggcaggaccaaaactatttaaagaatttataagctcccagatgcgatcagtgagaggattttcatccagttcagatcttcctcctcatcaagagattggaatgccttctctttcgccaacaatgactgagggtaacattgccaggtggctgaagaaagaaggtgataaagttgctcctggtgaagtgctttgtgaagttgaaactgacaaagcaacagtcgaaatggaatgca

SEQ ID NO: 159491 - DNA, 402 bp, Arabidopsis thaliana columbia
ctctacgctctctcaaaagtcgaatatcccaaattcgatccgttttccggcgataatctccgatctagatccgatggcgaaagaaccagttcgtgtgctcgttactggagctgcaggacaaatcggatatgctcttgtacctatgattgcaaggggtatcatgcttggtgctgaccaacctgttatcctccacatgttggatattcctccagctgctgaagctttgaacggtgttaagatggagttgatcgatgctgctttccctcttcttaaaggtgttgttgctacaactgatgccgttgagggatgtactggagtcaatgttgctgttatggttgggggtttcccgaggaaagaaggtatggagaggaaggatgggatgtccaagaatgttttcatcta

SEQ ID NO: 159492 - DNA, 239 bp, Arabidopsis thaliana columbia
tcgtgtcttaacagttagtccatactacgctcaagttctcatctctggagttgatagaggcgtggaattgcataaatatcttcgaatgaaaacagttttcggaattattaatggaatggatgattaagaaatgctctcgtatatttgcatgtacagggatttatgcttcgagcttaccaatcgtacatactctatatcattgatattactttagctacataatctttgaacgtttgtta

SEQ ID NO: 159493 - DNA, 178 bp, Arabidopsis thaliana columbia
aaatttcgaccgagctaggttttgttgtttaccgatcaatcctttaatcaatggcaatggctgttttccgtcgcgaagggaggcgtctcctcccttcaatcgccgctcgcccaatcgctgctatccgatctcctctcttttctgaccaggatgaaggatttcttgtatttcgatctat

SEQ ID NO: 159494 - DNA, 259 bp, Arabidopsis thaliana columbia
ctcgattttattttaattttcataagagaacaaccaagacaaaaagaacaatggcagcgagtgcatctccaatggcgagccagctaaggagcagcttctcctccgcttctctttctcagcgtctcgccgtcccgaagggcatctccggtgctcctttcggtgtttctccgaccaaaagagtctctttcttcactgtccgagctgttaaattcgacaagacaacattccaagttgtttaaccaatcaacggtgatccatt

SEQ ID NO: 159495 - DNA, 317 bp, Arabidopsis thaliana columbia
ttttcactgatctattcactcactcaaatcgccgccggagctaaatcaatcaacaatgacgtcgacctacacgagattcgataccgtatttctcttttctaggttcgccggcgctaagtattcgccgttattgccgtctccgtcgtttactttatctacttccggcattcatatcagaaccaaaccgaattctcgttttcactcgattatagcatcctcctcatcttcatctgtagtcgccggaactgatagcattgagattaaatcggtgccgacgaagcctattgaaggacaaaagactggaactagcggacttc

SEQ ID NO: 159496 - DNA, 369 bp, Arabidopsis thaliana columbia
aatcatcccaagtaatcctaactatacaaaacacataacaatatggctccttcaacaaaagttctctctttacttctcttatatgtcgtcgtgtcattagcctccggtatgagtccatcatcaacgaccatctccaacttccatcggacggcaagtggagaaccgatgaagaagtgaggtccatctacttacaatggtccgcagaacacgggaaaactaacaacaacaacaacggtatcatcaacgaccaagacaaaagattcaatattttcaaagacaacttaagattcatcgatctacacaacgaaaacaacaagaacgctacttacaagcttggtctcaccaaatttaccgatctcactaacgatg

SEQ ID NO: 159497 - DNA, 208 bp, Arabidopsis thaliana columbia
ctctgccaatctcatcttcaacctctctctaactctcgttttcgattctacaatggctgacaagaagattaggatcggaatcaacggattcggaagaattggtcgtttggttgctagagttgttcttcagagggacgatgttgagctcgtctcttgtcaacgaccccttcatcactactgagttcatgacctacatgttcaagttcga

SEQ ID NO: 159498 - DNA, 213 bp, Arabidopsis thaliana columbia
ttgtgaaatcgcagcaaggtgcgggtaaagagtacgtttgtgttgctcggcttcactcagctgtccctgatgttgctaaagtagctagagctcttgaatcgctcactggagctgtgtttcagaggcctcctttgatctctgctgttaaaagacagcttatgattaggacaatctatgaaagcaagctgcttgtgtatgatgctgataggcatt

SEQ ID NO: 159499 - DNA, 257 bp, Arabidopsis thaliana columbia
ctctcttctccccaaacccgacttctgatccgcatcgatttccatggcagccaacaccatttctctttccaacgtcgccgcctccaagaatctcaactcctttcaaagccgtgcctttattgctccaccaactatttttttccctgtggcttctgcaaagtctaaacctggggaactttctttatcttccacgactctttccaggtctcgtgtgcgcgccggtgctagccagcttaagaacgaaccgcttaacgatc

SEQ ID NO: 159500 - DNA, 364 bp, Arabidopsis thaliana columbia
gtgctcgagactgtagagtgaagtttgatttctctagacgtgtatggctccttcaacaaaagttcgctcggtacttctcttatatgtcgtcgagtcattagcctccggtatgagtccatcatcaacgaccatctccaactttcatcggacggctagtggagaaccgatgaagaagtgaggtccatctacttacaatggtccgcagtacacgggaaaacttacatcaactacttcggtattattaacgaccttgtctttagattcattatttttatagtcaacttaaagattcactgttctataccctgattacaccttgtacgtttcttatcaagcttgtctcaccatattttctgttttcact

SEQ ID NO: 159501 - DNA, 174 bp, Arabidopsis thaliana columbia
ctttactctaaacctccattaccttcgtctttcttcctcagtcgccctacaatggctttgcctttgtctggcacgcgccacctcacgcgcgctctcctctctaatgtcactcttatggctcctcctcggattccttcctctgttcactacggtggatctcggataggttgttcg

SEQ ID NO: 159502 - DNA, 228 bp, Arabidopsis thaliana columbia
  unsure (1)..(228): unsure at all n locations
aacacctcaaagaattattcattcaggcatcttctcaaatttttgtttgtgaaaaaaacccacatcaaaagatctctcatttattcgtttcgtttctgctgttttgagtgtcggtttcgttttatctgttattctntcttcctggcgttcgttttgttttagtttttttctagctttgtctttttctcttcttcttagttctttctctctggtttttgttcttttttt

SEQ ID NO: 159503 - DNA, 260 bp, Arabidopsis thaliana columbia
attccggtcgaccacgcgtccggttgaaagaaccttctgtgttgttgcgttgtcgttaagaggacttgggtttagtggaagctgtacttgatgacgcaaaggaggaatatgctgttaaagcaaaggttcatgccccagaggttgcttgtgacacaaaaatattctttctccttcctactaaatcttatgatccttatttatttcacttctcattcagtttctgttatagtcttttttatttaattttatatgatttttta

SEQ ID NO: 159504 - DNA, 334 bp, Arabidopsis thaliana columbia
gttttcaaacttaatacatgttatagatcatgtattaaaaatataaaaataagatttggccaaaagacatgtatagatcatgtatgttgccaaaaaaaactaagaatgtaagattctccactgatggatgtagaagttacagtgatatataatacaagattcttaatacaagaaaatgatcctcggcagcatcacaaaacaagattcttgtcgatcagtttttagaagaagattggaagatgaaaaccgcagctagaacaccaaccaatgctgtaacagctaaagcaaccgtaggcaatggacttgctactccaaaattctcaagaagtccttt

SEQ ID NO: 159505 - DNA, 456 bp, Arabidopsis thaliana columbia
tcgcgtccgagattgttcaacaatgtgcaaccacaccatgtgtctgcaacaacatctccatcttttggtttgtgcacacgtcacatgtcatggcgcatggcgctggtacaacactagctgcaaagctcaggctcgatggtcaccgtgtgacagctatcgaccttgttggctccggtgtcgacacgaggcagctccatgaggttcgtttggtgtcgccgtatctagagcctttgatgagtttcatggagtctctccctgaaaacgagaaagtggttcttgttggtcatagctatggtggcattggaacttctcttgctatggaaaggtttccgaccaaagtctctggcggaatctttctctctgcttacatgccgcaccatgactcttcttcggcgggtttgattcaagagtattttacgagactaccagagggtttcgctattgactgtgagttta

SEQ ID NO: 159506 - DNA, 97 bp, Arabidopsis thaliana columbia
gtactacttacgagcgcaagtgagagagtaacagtagaaacgtagagatatagcaaaatggctgcgacgcttactggatcagggattgctctagggt

SEQ ID NO: 159507 - DNA, 304 bp, Arabidopsis thaliana columbia
aaacggaacaagaacaagttcatcgaggactggtgatctgctagagagaatctcgagcacaatttccgcgggactcgtcgtaacttcgctctcatcggaatcttcggcatcgctctcccgatcattgtctacaagggaatcgtcaaagatttccatatgcaagatgaagatgcaggcagaccacacagaaagttcctctgaggttgtttgcagaacaactcttgcaataaagtctcagcaatgtgtaatttcaagacgaggatgttaatcctgtcatttgttttttaatttttgatcttcattt

SEQ ID NO: 159508 - DNA, 399 bp, Arabidopsis thaliana columbia
taacatagcccttgcaaaccataaccaaaccattttcatcatcatctcttggtgacagaagaaaagagttgaggaacagagaaaatggcagcacaagcacttgtgtcttcttcacttacctcctctgttcagacagctagacagatatttggctcataaccagttgcgtctgcctcacagatgaatagtttctttgttttaaagcttttttatttttttctgttatcttgtttcttattgtttttgttttttttctttattgtttaatttttattattttatcttaatttttttttttattgttttgtactatttttctatttcttttttttatttgtgttttattttatttctattttttattttatttttcattttattttatttataattttttta

SEQ ID NO: 159509 - DNA, 152 bp, Arabidopsis thaliana columbia
agattgttcaatgctatcgagaccattccttgtatatccaagaaggcaaaatggtgtttagattggattcaaagtcctatgtcgtttgctgtgaggctgatcgcttttgcatgtgtcgaaggaatcttcttctcaggaagcttctgtgccat

SEQ ID NO: 159510 - DNA, 243 bp, Arabidopsis thaliana columbia
ataacactcacacacacactttctcttctcttattttctcagttcttttaactcttttctctacatatattcaaatggccaccatcgaggttgaacaagtgactccagtagcagctgagaacatcgaggtgccaccaccaaaggctgtggagtcggaggaagtcaccaccgtctccgagtctctttcagctccggtaacagaatctcaagcgcctgtcgaagtaacaactaaagatttggtcg

SEQ ID NO: 159511 - DNA, 143 bp, Arabidopsis thaliana columbia
gcgtccgttgccacaactggtacggtattagctgcgtctttctcactcaccgagtcgccgacataaatctccgcggcgagtcagaagatccaatcttcgaacgagctcaccgtaccggttacatgatcggtcacattttcgtc

SEQ ID NO: 159512 - DNA, 211 bp, Arabidopsis thaliana columbia
agcaaatttgtttcagggagtaccaaaatgagtaagcttcagagtgaagccgtgagagaggcaataagctccattatcactcactgtaaggagacaaagccacgcaacttcactgagactattgaactccagattggtctcaagaactatgaccctcaaaaggacaagagatttagcggttctgtgaaattgcctcacgttcctaggccaa

SEQ ID NO: 159513 - DNA, 184 bp, Arabidopsis thaliana columbia
gaaacaatggttgaatcggagaaaacgaaacactcttgtctccgtctcgaaatctccggcgccgatccaattttcgtcaaaggcacttggcataattctcgtttcgatatctccgtcaccgatggttcctcctcttggatttgcaatgcgacggaggaggaagtggcttttagtgcatcacttt

SEQ ID NO: 159514 - DNA, 366 bp, Arabidopsis thaliana columbia
gcttctttctaccacaaacacaagagcgcgttttcttcacgccggcgaacaacgtcagagtcatggccaccggagatgggaaatcggtgatggtcgtcggagttgacgacagcgagcagagcacttacgccttggagtggacgctcgatcgtttcttcgctccttacgctcccaattatccttttaagctcttcatcgtccacgccaaacctaacgccgtctccgccgttggtctcgctggtcccggaactgcggaggttgtaccttatgttgatgctgatctgaagcataccgctgctaaggttgtcgagaaagccaaagcaatttgtcagagcagatcggttcatggcgcggggatcgaagttt

SEQ ID NO: 159515 - DNA, 75 bp, Arabidopsis thaliana columbia
ctcacattttcgtagccgcaagactcctttcagattcttacttgcagctatgggtaaagagaagggccaccttaa

SEQ ID NO: 159516 - DNA, 61 bp, Arabidopsis thaliana columbia
tgatcttcttgctccttaccaaagaggaggaaagtattggtctctttggcggtgctggtgt

SEQ ID NO: 159517 - DNA, 75 bp, Arabidopsis thaliana columbia
cacctctctcttcttcttctagagaccactcttcctgtctagttcactaggaggagaattggtgattgtttttgg

SEQ ID NO: 159518 - DNA, 124 bp, Arabidopsis thaliana columbia
aaaataaagaagagtttataacattaaacatatgtgtgtctcaagattcagacaaagaagagataatctataaatgaattctaaggcattgcaagctttgatctttcttggtttcttgtccact

SEQ ID NO: 159519 - DNA, 242 bp, Arabidopsis thaliana columbia
gaggtctacaactaaaagcctttgtgtgtgccagtattagctccctactaatccgccgccgcacctcctcgatctccgcccagctcccttcttttctatctatctattcagttgtttctccggtaacaaccagctgaggaagaagaagaagtagtagccgtgatgatgatgatgacgtcacttggtggtggtgctggtaggcgttggttgtggttttttgttttttttttgtttgggttatt

SEQ ID NO: 159520 - DNA, 252 bp, Arabidopsis thaliana columbia
ctgcgggaaattggtctggtgacgctaacgataaaggtatccagaccagtgaagactacagattctacgccatttcagctgagttccctgaattcagtaacaaggacaagaccttagtcttccaattctcagtcaagcacgagcaaaagcttgactgcggtggtggctacatgaagctactaagtggtgatgttgaccaaaagaaatttggtggagacacaccatacagtatcattgttgggtcttgatatc

SEQ ID NO: 159521 - DNA, 64 bp, Arabidopsis thaliana columbia
cggacgcgtgggatcgcaatgggtgcgtacaaattcgtgtcggagctatggaggaagaagcagt

SEQ ID NO: 159522 - DNA, 188 bp, Arabidopsis thaliana columbia
tcgatttctaaagtcttcgtcttcttcttcttctgatatctagctttttcaatcttctgaagctttaattttttcatacccatggctaatcgttatgatccaaatcctttcgctgaggaagaagaagtcaatcctttcgctaatgctagaggagttccacctgcttctaatttgtaacttttgccttt

SEQ ID NO: 159523 - DNA, 278 bp, Arabidopsis thaliana columbia
gctcaacactatcctcttctacattttccaacgttggcctcaaacgcactctcgtctttcaccgccgctaatcccgctctggctactaagccactactccctcacggctctgcttctccgaacatgaacattgacaacttctttgcagagaatgagctatttgctttctgtccttcatttattgtcccagggttacattactctgatgataagctgtttgtaacctgtgtcgttttctatgccggtgcatttagacaccgtgttggtccaaactatct

SEQ ID NO: 159524 - DNA, 415 bp, Arabidopsis thaliana columbia
ggaagctctttatccaaatcattgatcctgctgatgaagacaagttcgactttgacccgctcgatgtgaccaagacctggcctgaggatatcttgcctcttcaacctgttggacgtatggtgttgaacaagaacattgacaacttctttgcagagaatgagcaacttgctttctgtcctgcaattattgtcccagggatacattactcagatgataagctgcttcaaacccgtgtcttctcctatgccgatactcagagacaccgtcttggaccaaactaccttcagctggccagtcaatgctccaaaatgtgctcaccacaacaaccaccatgagggattcatgaatttcatgcacagggacgaggaggttaactactttccgtcgaggtatgaccaggttcgtcatgctgaga

SEQ ID NO: 159525 - DNA, 121 bp, Arabidopsis thaliana columbia
ctcgtgccagccactcgcatttctccagattttattatccttcctcgaaacaagagcttagctaagatgacgaagaactacccaaccgtgagcgaagattacaagaaggctgttgagaagt

SEQ ID NO: 159526 - DNA, 150 bp, Arabidopsis thaliana columbia
aaaccactcatttttctattactgaaatttttcttagagaagaagaagaagaagcaaaatggccacaagcgcatcagctttgctctcaccaaccacattctccactgctttcttctacataatccctaactccatctcattccatggtct

SEQ ID NO: 159527 - DNA, 153 bp, Arabidopsis thaliana columbia
gagagagaaaacaaaacataaaatggctacccgataagctctgatcaacggtcaccggatcattcgctccaccgccgtggttgtccggagctctatcattcctgccgtctctaaccgttcatatttatattattcgaaactgtttattttgtt

SEQ ID NO: 159528 - DNA, 511 bp, Arabidopsis thaliana columbia
aagtgacggtggttccatcagcagtttcattcgtcatcaaggcgttgaaagagccggagagagattggatgtaggtgaagtgcttttttcctttctgttacatctctttatttgttttatcttttatattttatatatttaatttcctatattgcttgataatatatatatttgctttatttattttgtttttataatatttctttaaattttttttatttattttcttttattttattatatttgtttatatttatttttttttcctttgattttttttccttttatttccttttcaattgtttatttttttattttatttttattttttattttatgctttcattacttttatttttccttttactttattttatttgttttttttttatttttttatattttcattcatttttaattatttgtatttattttatatttttattctataattttttcatttattttaatttcttttttgtttcatttatattattatttcttttcattt

SEQ ID NO: 159529 - DNA, 111 bp, Arabidopsis thaliana columbia
  unsure (1)..(111): unsure at all n locations
attctcactaaaaccctcgaacacatcgcctttatctctttctctaganctactcgctatggctactatcaccgttgttaaggctaggcagatcttcgtagtcgttgtttt

SEQ ID NO: 159530 - DNA, 287 bp, Arabidopsis thaliana columbia
cggacgcgtgggaaaagaagtagcgagcaagtgtcccttaagctcctttaggttcttaaagaccaaggaagtccctaccggtttcttcgaaatcaagactggctcgcaaaatatccgtacaccttggtgggattcgagcgtcatctatggaagcaactcgaaaacattggatagagtaagaacttacaaagacgggaaactaaagatatcggaggagacgggtctccttctccatgacgaagacggtttagctatcttcggcgacattcgtaacagttgggctgttg

SEQ ID NO: 159531 - DNA, 260 bp, Arabidopsis thaliana columbia
gtttccttcttcgctcgctgttcagattttgctttgaggctttaggctccccagatctctaatcgccgcagctttaagaaatggagactttcctattcacatctgagtctgtgaacgaaggacaccctgacaagctttgcgaccagatctctgatgcagtccttgatgcctgccttgagcatgaccctgatagcaaagtcgcttgtgagacatgcaccaagaccaacatggtcatggtttttcgttcgttctttctccat

SEQ ID NO: 159532 - DNA, 262 bp, Arabidopsis thaliana columbia
gtccaccttacgacccttctccttcaacttctttttacccttcacctccatcacatactccaactccttccactccatcacacactccaactccacacactccatcacacacgccaactccacacacccctccttgtaactgtggaagtccaccttcccacccttccacgccttcacacccttccactccttcgcacccaacgccatcacaccctccttctggtggatattactcatcttctccaccaagaactccggttgt

SEQ ID NO: 159533 - DNA, 98 bp, Arabidopsis thaliana columbia
aatgagtacggcacagagatgaagagattcatagtcatcttgtacgagacgcaagcacttgtggggcactctgtttttatcggagcggtgttattatt

SEQ ID NO: 159534 - DNA, 425 bp, Arabidopsis thaliana columbia
ggagtgtccttcctctccactgttccttccttcaccaacacaaccaatcatcaacatctcactacactctcttcttcttctcatcgctctgctgttatacgatgttccaagattgaacctcaagtttccggtgaaagtttagctttccaccgccgtgatgttctcaaactcgccggcactgcagtcggaatggaattaataggcaacggtttcattaacaatgtgggtgatgcaaaagctgctgacttgaatcaacgtagacaacgatccgagtttcaatcaaagatcaagattttgctttcaaccaccattaaggctaaaccggagcttgtaccttccttactcaaactagctctcaatgatgctatgacttatgataaggctactaaatcccggggagccaatggatccatacggttcagctc

SEQ ID NO: 159535 - DNA, 133 bp, Arabidopsis thaliana columbia
tggagatgcaaggcttaccggccgtaagatcatcatcgatacttatggtggttggggtgcacacggatgtttttctttttttatagagcactttatcttatttttttgttttttatgttttatttttttttta

SEQ ID NO: 159536 - DNA, 420 bp, Arabidopsis thaliana columbia
  unsure (1)..(420): unsure at all n locations
gaatcatcatgggaggaggaagagctatggcgttttcggcgaaggttgttggatntggagttggtatatttttgtttttgggtttgtgttttttattttttttttttttatattttttgtttttatttttttttatttttttttttttttttgtatattttttttttttattattttttatttttatattttattttttttttttttttttttttttttttttttttttttttttttttttattttttatttttttttaattttaattttttttttttattttatttttttattttttttttatattttttttattttattttttagttttttttttttatttttatttgtatttatgtttattttgttttttttttttatttgttttgttttgattttttgttttatttttttattttt

SEQ ID NO: 159537 - DNA, 170 bp, Arabidopsis thaliana columbia
aaattttctaagtgtctcataaaaaatgacgagatcctgattagctcttttgatgattcttgtgattcaaggtcttgtgacctttggagaggcacaattcgatgattgcgatatacgaccttatctttccttactcagttttgattttttctgcctttttgcttttttat

SEQ ID NO: 159538 - DNA, 110 bp, Arabidopsis thaliana columbia
cgagaatatccctattcataggtctgagatccacatctatgaattgaaaggtccgaacgatcaactctgctgtcagttgtttgaatcattttgggcttcatatctgtcat

SEQ ID NO: 159539 - DNA, 241 bp, Arabidopsis thaliana columbia
atttgcttcaatcttctctttatcgctccaccagatcctagttcgcgagatttcaagctctctaacaaagttcttcacttttactctcaaagctttcatctttcattcaactacttaagctccaagtatggcaggatccgcaccggaaggaacacaatttgatacgcgtcagtttgaccagaggctgaatgaagttctcgatggacaggatgagttcttcacctcatatgatgaggtccat

SEQ ID NO: 159540 - DNA, 409 bp, Arabidopsis thaliana columbia
gcgtccgaactccaaggaaagcatcaatggtgggagaagatgtttgtttgtgataatatattcagctacgtcgagtgaagaaccagtgaagcataagtagcatagacagagagagatacgttagtgtgtttttgtgattatattttttatcttaattttttctattgatgtttttttttttaattgattttatttgttattattaattaattttatttattttatttttttttttttaatttgatttgattttagtatatattatttatttttttttattattgttttatttttgttatatttattaaattttatatatttatgtttatattaatgtaatatttttgtttttttcttttatgtttattttatttttaatttttttttatttttatttatggtaatattt

SEQ ID NO: 159541 - DNA, 160 bp, Arabidopsis thaliana columbia
cttgctgaccaacaggcctgaggtgtctgacacatcgttttcatggactgatttgcaagcaaaactgaatggcgagttgctgagcaacctatgcaactttgttaatcgagttctgagttttatagcatagcctgataatgcaggttacgggtctgttatt

SEQ ID NO: 159542 - DNA, 432 bp, Arabidopsis thaliana columbia
ggtgtctgcagtgaagctttggctgcaactaggcctagagctgcttctagtgctcgtgatatggagatagagcgtgacttactaaccagtccgaaagacgacctcgagttctctatcgtacgagagaatataagagaaaagttaaacggtatatgtgacagagttgttgtcaagcctcaaaaaactgtgaggaagcttgcaagagtgcaacatctatattctcaattggcagggagacttacgaaggaagatgatgagtataaaatattggctgctctgcatccaactccagctgtttgtgggcttccagcagaagaagcaaggcttttgattaaggagatagaatcattcgatagaggaatgtatgcgggacctatttggattttttggtggcgaggagagtgaatttgcaggcgggatcagatcagctct

SEQ ID NO: 159543 - DNA, 139 bp, Arabidopsis thaliana columbia
aacatcaaataaaacagactgctacagggactctcatatgccaaaaagccaaattgtgtcaaaataccaacaaaatagacaagaagaaattgcttcttcaactactaccaatctgggatgattcgaacagacaagaaac

SEQ ID NO: 159544 - DNA, 199 bp, Arabidopsis thaliana columbia
ctcttccaaatctcccaaaagatgtcgaaccctagagttttcttcgacatgagtctcagcggtactcccatcggacggatcgagatggagcttttcgctgatacaaccccaaacacggcggagaatttccgtgctctctgtaccggctagaaaggaatgggaaagcttggtaagccacttcacttcaaaggatcgattt

SEQ ID NO: 159545 - DNA, 271 bp, Arabidopsis thaliana columbia
ctgagccattaactttggaccttcctaatgtaccacccaaattggctccaaaatctcagtatgtctgtggagatttgcgccagcatactgggggagaggctacacactctgcggttgctgtctaggcgccaggctggaataacgagaaagacgcaggcaccggcactgatctccagatactcatgggaggaggggggctattctgcgcgggaggcactgggaagggaatgcactcatggcttcatagacaggctctaatctaatatgaaca

SEQ ID NO: 159546 - DNA, 172 bp, Arabidopsis thaliana columbia
  unsure (1)..(172): unsure at all n locations
caaaatcagatccaacaaatcttcttcttcttcttcttcttcgatcatcatggccagtatcaaggttcacggagttcccatgttcaccgccacaatgcgcgtcctcgctactctttacgagaaagatctccagttcgagctcatccncgtcgatatgagagccggtgcccac

SEQ ID NO: 159547 - DNA, 153 bp, Arabidopsis thaliana columbia
cggcgcctgaatactcttggctggtagatttcacctactctcatttttttcatatatctcaaacgtggaatcgctgttactcagtttttatatataaaatataacactctctcttatttaaccaaactcattttcataattccacaaagtttt

SEQ ID NO: 159548 - DNA, 258 bp, Arabidopsis thaliana columbia
gaataatcaaaaatggagtataggtttcatatctctcgcttttctcttcatcacttcctcttcagctgagttcatcattcaacaggtcacaaagggcagaggaatagagtacaacagttcttacagtctcgaggagaatcttggagtgacaagagagttgagagaagagcgtccatctagtaagatagtgacaataacaagcttttcagtgttttaaggcgtatgagatccctttttattctattgttttgtagcttc

SEQ ID NO: 159549 - DNA, 275 bp, Arabidopsis thaliana columbia
aacaaaccagaaaaaggaatggcactgagaatgtgggcttcctctacagcaaatgctctcaagctctcttcttctgcctccaaatctcatctcttgccagctttctccatctccagatgcttctcctcagtgttggaaggacttaagtatgcaaattcacatgagtgggtgaaacatgaaggctcagttgctacaattggtatcactgaccatgcgcaggaccatttaggagaagttgtgttttgtggagctgcctgattcttacagttcattga

SEQ ID NO: 159550 - DNA, 452 bp, Arabidopsis thaliana columbia
gtagacaagatcattggtctgaagcagggaaagcaaagcatttcacttgaacctgggggtcagttcgagcttagtggtgcacctcttgagactttgcatcaaacttgtgctgtagtcattttacatttttattaagtaaataccgtttatgataaagttgattttatatgcttataaaaactttctgtatattttttatatatgtatcatctatatttttaattagtagttacatttactaatgtaaatattatttatatttttatttgttactcaactttttacttttattttttatttgtttctataattacattttttgttttttatttttcatattttatctatcctctattgatttgtttttatttactttatcttaatattttttttttaaattatatattttattttatataattatgttttatttcatttattttatttgaata

SEQ ID NO: 159551 - DNA, 305 bp, Arabidopsis thaliana columbia
gttcagcaactgttgaaggacttctttgaatgtttagagccaaacaagggtgtgaaccccgacgaggctgttgcctttggaggtgttttacttttatttttttattattatttttatttttttatttttttttttgtattttatttattttttttttttatattttttttttattttttttttttttttttttttttttttttttttttttttttttttttttttttatttttttcttttttttttttttttttattttttttttttttttttttatttttttatattattttttttattttttt

SEQ ID NO: 159552 - DNA, 313 bp, Arabidopsis thaliana columbia
tggaccaagcgtccggaggaggagttgtttccgattctgaatctaaggcctttggagaccaaatcagtaaaatagcgaggataacctctgagaaagacgccaccgctcatgatgagctataggtgaaaggtggagatttgaaacctagtttcttcttttattgttatgttttttttttttttattttattttttttgattttttttttttttttttttttttttttttttttatttttttttttatttattttttatgttttttttttttttttttttttttttttatttttttttttttttttttttttttt

SEQ ID NO: 159553 - DNA, 383 bp, Arabidopsis thaliana columbia
cccacttgggactcaagacggctcagatctttttccgacagattcttaatagtatcttacacgctcccatgtcattctttgacaccacgccatcgggaagaattctcagtcgggcatcgactgatcagaccaatgtcgatatccttattccgtttatgctcggacttgtggtctcaatgtacaccactctgctgagcattttcatagttacctgccagtacgcttggccaactgcattctttgtgattccccttggctggcttaacatctggtaccggaactattacctcgcttcttcccgtgaattaacacgcatggactcaatcactaaggcttccatcatccaccatttctttgaaagtttagctggagtgatgtcaatt

SEQ ID NO: 159554 - DNA, 456 bp, Arabidopsis thaliana columbia
ggggaagctccgatctgagttttttttagcaatggcgaaaatgattcctagcctcgtctctctaattcttatcggtcttgttgcgatcgcctccgccgcagttattttcgaggagcgctttgatgatggctgggagaacagatgggttaaatctgagtggaagaaggatgataacactgctggggagtggaagcacactgcgggaaattggtctggtgacgctaacgataaaggtatccagaccagtgaagactacagattctacgccatttcagctgagttccctgaattcagtaacaaggacaagaccttagtcttccaattctcagtcaagcacgagcaaaagcttgactgcggtggtggctacatgaagctactaagtggtgatgttgaccaaaagaaatttggtggagacacaccatacagtatcatgtttggtcctgatatctgtggcta

SEQ ID NO: 159555 - DNA, 300 bp, Arabidopsis thaliana columbia
aaatcattcaaatccactcttcgacatcttctcactgcttgctccaaacaggattttgttgatattttctcgaaattcagtggggctgagcaagaactgctttttcagttgtatactcgggttgttgtgaatttgcatcagacaatagaggaagagtttgatgaacaatgtcacgaaactcaggtcggaccaattcttgatacagtcgtaggagctggtcgaagaacagattttggatcccttgctttctgatactactgttgtattggctatttcctatgatccttcaacttttaaata

SEQ ID NO: 159556 - DNA, 302 bp, Arabidopsis thaliana columbia
agcagatcgcgtactctatgaagagggcgcaggatctgttactccagattgccacatagatcgaagcgctttctccgccggcagcgagaatctcgccgagaagaaacatttctccgctgtatcgaatctcctcgacggattcatcgaaaacagaccagatctcaaatcggaacgttttgctgctcacgccattgttttgtatgctcaagctaatatgcttgatcactctttaagaggttttcgtgatctctagaaatttgaaattctttcgtactgtgtatatttttaaatgcgcctttctt

SEQ ID NO: 159557 - DNA, 142 bp, Arabidopsis thaliana columbia
gtccgccgactccgagaggttgatcggtgacgcatcttataatttggtcgccatgaaccccgttaacaccgttttcgacgctaagaggttgatcggtccgcttttcttttcattcttttacatttatttatttgtttctttg

SEQ ID NO: 159558 - DNA, 132 bp, Arabidopsis thaliana columbia
gtattcaagttccaatatctgatgattgtgaggtttgttctccgcagtcaagtaatctggccttgaatattcaaggtagtagcaactcaagtccaaaggccactgcccctagagtatgtggatccgaagtta

SEQ ID NO: 159559 - DNA, 398 bp, Arabidopsis thaliana columbia
  unsure (1)..(398): unsure at all n locations
cttcggcaagctccagagaaacgagagttccgtattcattttctcttgttgntcctgatcgcgtagctcaagcgaaaaaaatggcgtcgggtgaccttcctccatttgttttactacattgtctgttgaatttattattttttttttattaattttttattttttatttttttattattttattaaaatttaatttttttattttatttttttgtttttttttattttcttttttttgttttttttaattttttttttttattttttttttgtttttccttttttttttttttattttttttcttttttatttttttcttggtttttttttttgtttttttatttttatatatatttatatttatttaatttgtattttattttattcttttattttt

SEQ ID NO: 159560 - DNA, 175 bp, Arabidopsis thaliana columbia
aattttcttcaaagaacaaatctcccaaatctaaaatctttctcttctctcttcgtttccataaccatgtctgcgaagaagattgtgttgaagagttccgatggtgaatctttcgaggttgtggagtgcggtgctctcgagtcactaaccatagcgcatatggatggtgacgact

SEQ ID NO: 159561 - DNA, 182 bp, Arabidopsis thaliana columbia
gctcttggtcagcgagtaaagccttatcttccccagatctgtggtaccatcaagtggcgattgaacaacaagagtgcaaaggtaagacagcaagctgctgatctgatttctcgaattgcagttgttatgaagcattgcggagaggaacagttgatgggacttctaggagttgtttttttatt

SEQ ID NO: 159562 - DNA, 292 bp, Arabidopsis thaliana columbia
atagatgcaaatcttcgtgaaaaccctaacggggaagaccataccccttgaggtggaatcatccgacaccatcgacaatgtgaaggcgaagatccaagacaaggaaggaatcccaccggaccagcagcgattgattttcgccgggaaacagcttgaagacggtcgtaccctcgccgactacaacatccagatggaatcgacgcttcatctcgttctccgtctccgtggtggtgctaagaagaggaagaagatgtcttacaccatgctctattaaatcaatcacatgcttaat

SEQ ID NO: 159563 - DNA, 177 bp, Arabidopsis thaliana columbia
ctcgatcgtcactttttccagaaatctctcactatcgccatcgattttagcagacattgaagaagatgggagtattcacattcgtatgcaagaatggaggcggcgcgtggagcgcgaagcaacacgaaggtgaacttgtatctttagcttcttttacctacgagcttcagcgtaagc

SEQ ID NO: 159564 - DNA, 62 bp, Arabidopsis thaliana columbia
tgccattacaacaggaacaatcttttctggcttttactagccaaggacaagtaggtcagagt

SEQ ID NO: 159565 - DNA, 484 bp, Arabidopsis thaliana columbia
ccgtccagacatctttgaacttaatccaaccaagtaagcatggatcagaaagtggggtcgaaaagaaaagattgtgttaacaatggaggaagaagagaaccacatctattgaaagaacatgttttggctgaacgaaaacgtctactaaagctcaacgagcgtttgattgctctctctgctcttcttcctggcctcaaaaagacggacatggctacagttcttgaatatgccatctaacattttaaacaacttctagagcggtttaagaagcttgaagttgatctaatgttttccaatatatattatcatttctattatattatttatttttttttcttttatttttttattttcttttttttattcaatttttttcttttctattattttactttatttacttattattttttgatatttatacattttattaagtttattttattttgatttattcatatattttttgttaactaattattat

SEQ ID NO: 159566 - DNA, 212 bp, Arabidopsis thaliana columbia
ctagatctcacaatggctgtcctcagcaccatcagtcctaccaatctccaatccccaaaccgatccatccgccgctccttcctccgacgaatctcaaccaccgatcgctactccagctttccgcaatttcatcaatcagatcaccgaaaccgttaaaaacggtctctctaagcgtcgtccttgggctgagctcgcggttcgttcctcattat

SEQ ID NO: 159567 - DNA, 303 bp, Arabidopsis thaliana columbia
  unsure (1)..(303): unsure at all n locations
cggacgcgtggggttggaacaaaccgaggagatgcacatgcgttcaagcttgatacacttctcaagctagtcgatgtcaaaggcgctgatgggaaaacaactctcttgcatttcgttgtacaagagataatccgagcagaaggcacacgtctttcaggnaacaatacacatacagatgacatttaatgccggaaactaggtctccaagtttgttcaagtctttgttctgagctttggaacgttaagaaagctgttttgatggacttcataattactttgcattttattacaacaatctttttt

SEQ ID NO: 159568 - DNA, 305 bp, Arabidopsis thaliana columbia
attgtgtcatgggttggcttaccgacctcctttaccatcttcaactttggaacacaaaaagttgtcaagaactggcagctattcctttgtgtttgtgttggtctttgggctggactcattattggtttcgtcactgagtactacactagtaacgcctacagccctgtgcaagatgttgcagattcatgcagaactggtgcagctaccaatgttatcttcggccttgctcttggttacaaatccgtcattatttcaatcttttgctattgctatcaagtttatttcgttagcttcaagttttgctt

SEQ ID NO: 159569 - DNA, 472 bp, Arabidopsis thaliana columbia
ctaggttgcagagttaaaggagaaggttttcaattagggttttgtagagagaaagatgagccgaagtttgggaataccggtgaagcttcttcacgaggcctcaggtcatatcgtgacggtggagctaaagagcggcgagctttacagaggaagtatgattgagtgtgaggataactggaactgtcagttcgaggatttacttataccgcctaggatggtaagggattacagctttggcattgttttatttcgaggcttgttaagttagtgttatttggtcattacctatactattttaatacttgctttcaatggtttaattcattttttattgtcttctaatgctaggttaagatgctttttttcttggttttctattttttatttatcttttttaatgtatgttttcttcttttgttgttgttattcatcttttttttttaattttttgttattacatttcattcttttg

SEQ ID NO: 159570 - DNA, 225 bp, Arabidopsis thaliana columbia
gaacgattctccttcgtttctcccaaagtcccatcacaatcaaaaaccttctctccgagaatctcactcactacaaagagtaagattcgattcaaaaacaaactccgatcgttgaagcaacgaagatatgcttacttcaccttcttcttcttctacatatgatccattctcttccaatttctctccgtcgctcactaatgccttctcttgatagttcaccattcc

SEQ ID NO: 159571 - DNA, 319 bp, Arabidopsis thaliana columbia
agaaaattcagcatttttgatagctcaagcacttgattctttccaaaggggtttcctgagatcacaaaggccaagtaacaatggcgaaaggagttgcagttttgaacagcagtgagggtgttacggggactatctttttcacccaggaaggcgatggtgtgaccactgtgagtggaacagtttctggccttaagcctggtcttcatggtttccatgtccatgctcttggtgacaccactaacggttgcatgtctactggtccacatttcatcccctgtggtaatacacacggtgcccctgtggatgctaatcgacatgc

SEQ ID NO: 159572 - DNA, 300 bp, Arabidopsis thaliana columbia
ccgaagttcgaccaggcgtccggaggaatcctgcttacaagggcaaatggagctcacctcttattgataacccggcttacaagggaatctggaaacccagagatatccctaaccctgactactttgagctagacagacccgattacgaacccattgcagccatcggtattgagatctggacaatgcaagatggtatcttgtttgacaacatcttgatagcgaaagacgagaaggtcgctgagacttacagacagaccacttggaagcccaaattcgatgttgagaaagagaaacataagg

SEQ ID NO: 159573 - DNA, 132 bp, Arabidopsis thaliana columbia
atcgcacttcctttaccagatcagacgtcaatttcaactcttcagtgaagagatttctttcaccgaattttctactccgatcgatcaattgaagattgaaatggaagctaattcaggcggaggaggaggagc

SEQ ID NO: 159574 - DNA, 338 bp, Arabidopsis thaliana columbia
ctctcgctcactcttctccaatccttattttattttttgaaagtttaaaattttatacaacatatcaatttggggtagaaaaattcgaaagaaatgaaagagatgggagtgatagtgcttcttctccttcactcgttcttctacgttgccttttgcttcaatgatggactactaccaaacggtgacttcgaactcggtccacgacattcggacatgaaaggaacacaagttatcaacataacagcaatcccaaactgggaactctcaggctttgtcgagtacattccctcaggacacaaacaaggtgacatgatccttgtcgtgcctaaaggcgcatt

SEQ ID NO: 159575 - DNA, 286 bp, Arabidopsis thaliana columbia
ctactctctttaaaagaaattcgtaagtactatcaagatgcagaagatggcccaaaaggtggaagcacaaggagggaaaggagccaacctatgggacgatggatcgacacatgacgccgtgaccaagattcagctcgcagcaggcatagacggaattcaatatgttcagtttgattatgtcaagaacggacaacccgaacaagctactttttgtggtaccaaaggccgtgttcttccagttgatccgttcgtgattcaccatccagactaacatatagttttccta

SEQ ID NO: 159576 - DNA, 383 bp, Arabidopsis thaliana columbia
atgaaatgctctcccgtggtttcaaggaccagatctattacatattccagcttcttccaccaaagatccaagttggtgtgttctccgtaacaatgccaccagaagctcttgagatcacaaggaagttcatgagcaagcctgtgagaattttggtgtatctgtatgtgtcttatcttgtatgtattaattatttattttttaccttttttttttaatttacttttatctttgtttatatttttaattgtcaatgttttattacttcatttatattatttatttttattttatgttatattatatattccttctttttttaaagtaagtattattaatgagtttctattatttactatatattattatgtatatttatatattat

SEQ ID NO: 159577 - DNA, 67 bp, Arabidopsis thaliana columbia
gatcactctctatcatcttaggcttactgattctgattcttcaagagccgcttaggcaggcggggaa

SEQ ID NO: 159578 - DNA, 400 bp, Arabidopsis thaliana columbia
gttctcttgcttgcttctcaagattataatcatcatgaatctctcagccttacttatcttatctgacttttttttcttctctttgattgactaagacaataaagcttcttgcattcttctgcagaatgtgattttgaggatcttgagaatttcaacttcattgtctgttagtctctcttgtgaatttctctggagatgaaaagattcgagaggccaagaacttcgattcactcgcagccaaggaccagtaccagttcaggtaagaaagatcagaagccgcgtagtagtagtagtaaaggatctggtgtgaaaccgttgaatgcggctcagctggtttctagagttttagatgcaacaacagcttttgagcctttttcagtcggtgaaactgattcaactt

SEQ ID NO: 159579 - DNA, 422 bp, Arabidopsis thaliana columbia
gcgctctctggtccaatcccaaacctctcgaacctctcagctttaaagcttctctttttatcaaacaaccaattctccggtaacttccccacttcaatcacttcactcactcgtctctaccgtcttgatctctctttcaacaacttctccggccagattccaccggatttaaccgatttaacccatcttctcactctccggttagaatcaaaccggttctccggtcaaataccgaacatcaacctctccgatttacaagacttcaacgtctccgtgaacaactttaacggtcagaaaccaaattcattgtctcaattccctgaatcaggtcttacactaaacccattcttttgtggcgcttcaatgctggaatgctctaaactttctattagtcccctcttaaccggtttgctcttttaagt

SEQ ID NO: 159580 - DNA, 417 bp, Arabidopsis thaliana columbia
caatcttcttcatcgatttctctcttccaaatctcccaaaagatgtcgaaccctagagttttcttcgacatgagtctcagcggtactcccatcggacggatcgagatggagcttttcgctgatacaaccccaaacacggcggagaatttccgtgctctctgtaccggcgagaaaggaatgggaaagctaggtaagccacttcacttcaaaggatcgatcttccaccgtgtgattcccggattcatgtgtcaaggaggtgatttcaccgccaagaacggaaccggtggtgaatcgatctacggtgctaagttcaaggacgagaactttatcaagaagcatacaggagctgggattctctcaatggctaactctggtcctaacacttacggatctcagttcttcatctgtaccgataag

SEQ ID NO: 159581 - DNA, 166 bp, Arabidopsis thaliana columbia
  unsure (1)..(166): unsure at all n locations
attntcttttcgcacactttctcgacacctcaatataactcagctgagagaaacgcgtctctcagatttcaatccttcactttcccttttctttttttctcgttatcggatcagaacaaaattttgggaaattcgaggtttccctggattgttggattcgattatt

SEQ ID NO: 159582 - DNA, 306 bp, Arabidopsis thaliana columbia
gtgcgtgtttcctacaccagagcgcattggctttatcagccgcacgatcatcatcttcctcctcatcccagcgtcacgtgtcgctctccaaacctgttcagatcatctgtaaagctcaacagtctcatgaagacgataactccgccgtctcccgccgtcttgctctcactctccttgtcggcgccgctgctgttggatccaaagtatcttctgctgatgccgcctacggtgaagctgcaaacgtgtttgggaagccaaagaccaacacagactttttgtcatacaatggagatggtgtcaacgtgc

SEQ ID NO: 159583 - DNA, 106 bp, Arabidopsis thaliana columbia
aaaaactgtaatttagtcagtgttctatgtgtatattttgtattgacccactttaacaaacccatcaccgtcgccgggctgaatattccggcccttttcattgtat

SEQ ID NO: 159584 - DNA, 162 bp, Arabidopsis thaliana columbia
caatcgtctcatcacaatcacatcatcatcgtctgcgttttcttcttcgtcggcacatactttggcttctcatctcctccattattttgatcttatcgcaacagatctctcatctccttcacttgttgactggttataccacaggacaattgctgacaaaga

SEQ ID NO: 159585 - DNA, 175 bp, Arabidopsis thaliana columbia
ctttctggtttgaatgttcttgtcgagacctacttcgctgatatccctgctgaggcatacaagaccctaacctcattgaagggtgtgactgcctttggatttgatttggttcgtggcaccaagacccttgattttgtcaaggttgtatttcctgagttaaagtacctttttattg

SEQ ID NO: 159586 - DNA, 80 bp, Arabidopsis thaliana columbia
  unsure (1)..(80): unsure at all n locations
cctagccgcatttcacaattcctcnntcacaatttttctttcgattttttagctttatcctgggttgcgttaacaatggc

SEQ ID NO: 159587 - DNA, 313 bp, Arabidopsis thaliana columbia
taatcttcaatgtataatgtattattctgataaacgagagacacaacaacacacaaggttcttttggtctttaaacagatactattataacatagcacagaagatccacatgatgaagattgtattatcgcaactttgatctcttcccattttcttttctctgctaattaacaaccacagaaaggccaatcaagaattctttcactcgttttagatgcttggtcttacgttcagacggcttgccagtttctgtcccaaagacttattagcctgagaccagtaagagatccagatactgcggatttcatgcgtg

SEQ ID NO: 159588 - DNA, 308 bp, Arabidopsis thaliana columbia
tgaagaattacaagcttgatggacagtttcgttgtatatactgctcagactaaccgagctcgaaatggtgagctttaccgctacatcgcggatacaagaggtgcttttgctcagcctgcgttctacgaggcttttggacttacggtagtggaagcgatgacttgcgggctcccgacttttgccacttgtcacggtggtccagcagagatcatcgagcacgggcttctcgggttttcacatcgatccataccaaacctgagcaagcggggtacataatggctgatttcttttgacgttgtaaggaagat

SEQ ID NO: 159589 - DNA, 294 bp, Arabidopsis thaliana columbia
caaagagtcgccaccaacttattttcgcacaaacaaatttacttctgcaatccaggaaattgttgatgcgtatggtgtggccaagtatcaggaagccaatccaggtgtattcaccattgttaccttccccttccttttcgctgttatgtttggtgattgggggcatggaatatgcattctgcttgcaactatgtacttgatattgaaagaaaagtaacttgccagccagaaacttggggatattatggtatatggttttggttgcgttatgtcattatgagatgttatctttta

SEQ ID NO: 159590 - DNA, 412 bp, Arabidopsis thaliana columbia
gaaaatcaaagcagcagttatggccgacgtagctacaaagcaccccatggaagatgaggtgaagaagacggaggcgtctagtttggtggggaagctagagacagacgtggagatcaaggcttcggctgataagtttcaccacatgttcgctgggaaaccacaccatgtcttcaaagcaagtccaggcaacattcatggatgtgatctgcacgaaggcgacttgggcacagtctgctctatcgtctattgtaattacgtacatgatgatgtatgctaaggtgttcattgaaataatctgtgtctttgtatctttttatacacttttatcctcttttactatttttttaatgttttcttctactatctattattcttattttacatattttttcccttattctttttacatatt

SEQ ID NO: 159591 - DNA, 421 bp, Arabidopsis thaliana columbia
  unsure (1)..(421): unsure at all n locations
ggacagtcttactctgttcttgtgacggctaaccaagctcctcaagactattacatcgtcatctcctcgaggttcacgcggaaagtccttacaacgacttcgattctccattacagtaactcgagaaaaggcgtatctggccctgttccaaatggtcctactttggacatcgcatcttcactctaccaagctcgaactatccggagaaatcttacagcgagtggtccgagaccgaatccgcaaggctcgtatcattacggtttgatcaaaccaggccgtacgatcatactcgccaactcagctccttggatcaacggcaagcaaaggtacgccgtgaacggtgccttcgttgttgcgcctgacacaccatngaagcttcgccgattacttcaagattcccgagtttttaacccttgaagct

SEQ ID NO: 159592 - DNA, 235 bp, Arabidopsis thaliana columbia
gcaagaggcagtgcgagcgaagctaggcaagtttgggctaccaagtcacaatcacttatctccaattgcgaaattgtctggaggacaaaaggctagggttgtgttcacctcgatctcaatgtcaaaaccacacattttgcttctggacgagcctacaaatcacttagacatgcagagtatagatgccttggcggatgcactagatgagttcacaggtggagttgtgttggtgagt

SEQ ID NO: 159593 - DNA, 148 bp, Arabidopsis thaliana columbia
tttagtcttaagaagtgtcattactgagaaaaagcataacaaaatgtagtgtacgctgttttaaaaccagaaacatctacaacgccagagagttaaatctgtgactacatgttggattcgatttatcaaaagacatttagtttcaaaa

SEQ ID NO: 159594 - DNA, 337 bp, Arabidopsis thaliana columbia
aacactcgcacacacacaccaaactcacctgaaaccctattttcatttaccattcacactaatggcacgaccacaacaacgctttcgaggcgttagacagaggcattggggctcttgggtcttcgaaattcgccaccctctctcgaaaacaagaatctggatcgggacgttagagacagtggcagatgcattacgggcctacgacgaggcggttaggctaatgacgtggcccgagagctcgcactaattataccatacaaccctaatgccaatactactttctacttgcaagcttctatgagcaactattaccgctaaactgcacaaatgctacatg

SEQ ID NO: 159595 - DNA, 474 bp, Arabidopsis thaliana columbia
caaagagtcgccaccaacttattttcgcacaaacaaatttacttctgcaatccaggaaattgttgatgcgtatggtgtggccaagtatcaggaagccaatccaggtgtattcaccattgttaccttccccttccttttcgctgttatgtttggtgattgggggcatggaatatgcattctgcttgcaactatgtacttgatattgaaagaaaagaaacttgccagccagaaacttggggatattatggaaatggcttttggtgggcgttatgtcattttgatgatgtcactcttctcaatatacactggattaatctacaacgagttcttctctataccattcccattgtttgctccttcagcgtatgattgccgtgatgtctcttgcagcgaagctacaacaattggtttgataaaggtcagagacacttattcatttggtcttgattctgtgtggcatggatcccgcagtga

SEQ ID NO: 159596 - DNA, 325 bp, Arabidopsis thaliana columbia
agaaaatggagagcgattcagagatggttccgttttctcaactaccgatgccaatagaaaacaactacagagcttgcacaattccttacagatttccttctgatgatcccaagaaagccactccaaatgaaatctcgtggatcaacgttttcgccaattccattccttctttcaagaaacgtgcagagagcgatatcactgttccagatgctcctgctagagctgtaaaatttgcagaaagatattgctgggattctttgaagacttgaagaaagatccagtgagtcttggtggaccaccagtttgcattcttctatgccgtttt

SEQ ID NO: 159597 - DNA, 411 bp, Arabidopsis thaliana columbia
atttgccgccgcttctctgctctccagctccgtgtcaatccgtacaggtaagtcaaaaagttgtgaaagatgggtcgtgttcgtaccaaaacggttaagaagtcttcacgtcaggtgattgagaagtactactcacggatgacactagactttcacaccaacaagaagatcttggaagaagttgcaatcattccatcgaaaaggctacgcaacaagattgctggattctccactcacttgatgaaacgtatccaaaagggtccagtccgtggaatttccctcaagctacaagaggaagagcgtgaaaggcgaatggactttgttcccgatgagtcagccattaaaatcgatgatgttaaggtggacaaagagacacttgagatgcttgtttctttgggaatgtctgatatt

SEQ ID NO: 159598 - DNA, 445 bp, Arabidopsis thaliana columbia
cttacaacaacaaatcttaaacgttttactttgtgctgcactactcaacctcaatggccgcctcaacaatggctctctcctcccctgccttcgccggtaaggccgtcaagctttcccccgcggcatctgaagtccttggaagcggccgtgtgacaatgaggaagactgttgccaagccaaagggcccatcaggcagcccatggtacggatctgaccgtgtcaagtacttgggtccattctctggcgaatcaccgagctaccttaccggagagttccccggagactacggatgggacaccgccggactttcagctgaccccgagacattcgcaaggaaccgtgaactaagagttattcacagcaggtgggccatgctcggagccctaggctgcgtcttccctgagctttttgctagaaacggagtcaagttcggagaggcggtttg

SEQ ID NO: 159599 - DNA, 174 bp, Arabidopsis thaliana columbia
ggaacagtggggactcatcagatggtgggcaatgcacagattcttagatgatgatgatttttaattttattattattatattaatgtcggagaaaaagagaaaaatgattctggagagggaagcccagctaccttatgtgagagtctttaacttatcctctatctttcttgttt

SEQ ID NO: 159600 - DNA, 338 bp, Arabidopsis thaliana columbia
ggctaaaccttgtttcaaatgctcaaggagaggttgtagagaatcttttggctgttttggataatttcgagagagctaaatcccaaattaaggtggagactgagggagaagagaaagtcactaatagctatcagagcatatacaaacagtttgtagaaattctgggatcacttggtgttatccatgtggagacagtcggcaagcagtttgatccaatgctacatgaggcaataatgagagaagactttgtggaatacgaagagggtatagtactagaagaatacaggataggtttcttgctagttgataggcttttactttctttaaaggttaaagtt

SEQ ID NO: 159601 - DNA, 250 bp, Arabidopsis thaliana columbia
ggaaaaaacagaagagtatcggttaccgttttcgtcgttgcaacaactgaacctctcaccgtcctcgttaccggtgccggtggaagaacaggacaaattgtgtataagaaattgaaggagaggtcggagcagttcgtggcaaggggtttagtgaggacataggagagtaaggtgatgatctatggttaggttgttgttttctatgtggtttttatagtttcttgttttattttttttctgtttgttttaa

SEQ ID NO: 159602 - DNA, 348 bp, Arabidopsis thaliana columbia
ggaggagaacacaaatccaattcacactggaaactgttgggtcggatcctgagtgatatttcgagaccgatgatgtggaagaacattgctgggttgtcgaaggcagcggcagcggcaagaacacacggatctcggcggtgcttttccacagcgattcctggtccttgcatcgtccacaagcgtggtgctgatattcttcacgatccatggttcaataaggacacaggttttcctttgactgagagagatagattagggatacgaggcttgctttctcctcgtgttatgacctgggtacagcaatgtgatcgtttcattgagtcgtttcgttcgctagagaacaacaca

SEQ ID NO: 159603 - DNA, 162 bp, Arabidopsis thaliana columbia
ctgaacttcgccgtcgagagcatccatggtgtcgtgtcatcagagctcaacgtaagggtgcggggtccgtcttcaaatcccacactgaccaccgcaaaggtccggctaagttccgtagcctcgatttcggcgagagaaatggttacctcaagggcgtcttga

SEQ ID NO: 159604 - DNA, 188 bp, Arabidopsis thaliana columbia
gatttactgagtgaaaaaagcttatcgcggcgatagttcccggcgaagaagaagaagagagataagaaaatggcgactaatggatctgctagctcagcgcagctctctcagaaggaagctgatgtcaggatgatgtgtgccgctgaggttcattttggaaccaagaattgcatttaccagatggagcg

SEQ ID NO: 159605 - DNA, 199 bp, Arabidopsis thaliana columbia
gtcaaggcagacagtgtaagcaagaacgctccttcagagttccagaacacaaagctcatgacccgtcttacctacacccttgacgagatcgaaggacccttcgaggttgcttcagacggaagcgtcaatttcaaggaagaagatggaatcgactatgctgcagtcacagtccaacttccaggaggtgaacgtgtgccat

SEQ ID NO: 159606 - DNA, 370 bp, Arabidopsis thaliana columbia
gaaagctctctctcaggttcttgttctcaaccagacattgatttcttcgatttgcatatttcccttcttcgtcttacgaattttacttcctttagcgatggatttgatactacgttgacttttatcttccttttggaaatggcagcgtcgtcttctcttcttcttcttcttcactgtcccacctgcaatttctactttgactcttcctcgtaccttaaaagatcgagactttcgagctatagttcgattatctctcgtgggtctcctttgtttgtctctagctttggatctatgaccgttaaaagattctctagcagagtcggaagcaggaacaatgacggtaacgaacaatttggagcgttggagcaag

SEQ ID NO: 159607 - DNA, 89 bp, Arabidopsis thaliana columbia
gcggacggagtgttctacgctgaatagaatgattttcttacaagagagctagcagaggatgggttctctggcgttgaggttaggggggc

SEQ ID NO: 159608 - DNA, 481 bp, Arabidopsis thaliana columbia
gtcagatctctgtgcgtgtaaactcaaaggacaatgcttagacatcaatacctccactgttgttatcattaagtggcgatcatggttacagaaataattccatatctggcgctggtggactctttgtgtttgatagcttattccctggaaatttctacttgcgtccccttcttaaggaatattctttcaaaccttcaacactggctatagaactgaattctggggaatccagtgaagctgtctttgaggctactcgtgttgcctacagtgcaatgggtagagtcgctcttctatcgggccagccacaagaaggtgttgcaattgaagctcgctctgactccaaaggatactatgaggagactacaagcgatattaatggaaattatcgactgagagggttacatccagattcagcatatgttattaaagtgtcgaagaaaatggtttaaccaacaattaaattgaacgtgcattttcagag

SEQ ID NO: 159609 - DNA, 326 bp, Arabidopsis thaliana columbia
ggccgttaccttttcagatctacacacagtaggatggtgtcaaatccgtggaggagcacctcgccggaaaaacctacatctccggagatcaattgtctgtggatgatgtcaaggtttacgctgccgttccagtgaaacccagcgatgccttccccaatgctagcaagtggtacgagtccgtggcttcccaacttgctaaaagtttccctggaaaggccgttggagtacaattcggtggctctgctgctgctgctccagctggtgaagcttgtgcacctgcagttgcatttgatgttgatctattgtccatgaatcctttttggttg

SEQ ID NO: 159610 - DNA, 299 bp, Arabidopsis thaliana columbia
cgacgaagacaggcctagattcgttttccaatctcgtccttcttcttctcacacggcggaggaagaagaagaagctagaatccctaacaagcttttcatttcaatctccgtctcaatctccctcatcatattatctctctccttcttctacttcgaatctgaacctgccaaatcgctactattatggctttccctctctttcctcgtcggtcctttcgctcctagctcgctcaccggaggtaagattcgcgtcggttatggtcagatcttggtgccagaacagattcacgatgagtcat

SEQ ID NO: 159611 - DNA, 431 bp, Arabidopsis thaliana columbia
gcggccagacagcattgatgcaagcttgtagatacggacattgggaagttgtgcaaactcttctgcttttccgatgcaatgttacaagagctgattatttagctggaagaacagcgcttcatttcgctgctgtgaatggtcacgccaggtgtattagacttgtcttggctgattttttacctagtgataaacttaactctcttcctgaaactggtgttgtcactgcaaagaacaaatctgagcaaagcgcattgtctaaatttgtgaataaggcggttgatggtggaataacagctctttacatggcttgcttgaatggattatttgattgtgtgcagcttttgtttgatcttgatgtcaatgtattctgttgtgacattttattttttgtacattatttggtttttttttgaggtctgttgttctccttt

SEQ ID NO: 159612 - DNA, 170 bp, Arabidopsis thaliana columbia
gaaagtctcgaatctggcgtagaaacaaagtttgtttataaggtccaatggctactccaattgggaaaggtcaccgttctttgaacctgactcttaggaaagagcttaatctatatgccaatggtagaccttgttacagtcttcctggctacataactctttacgatgat

SEQ ID NO: 159613 - DNA, 327 bp, Arabidopsis thaliana columbia
cttgtacagagaaatgattgagagtggtgtcattaagctaggcgaaaagcagtctgagagcaagtgtgctctagtgtacggacaaatgaatgagcccccgggtgcccgtgcccgtgttggactgactggtttgactgttgccgagtatttccgtgatgctgaaggccaagacgttttgcttttcattgacaacattttccgtttcactcaggccaactctgaagtgtctgctttactcggtcgtatcccgtctgctgtgggataccagccaactctggcttctgatcttggtgctcttcaagagcgaattactaccaccaagaaagg

SEQ ID NO: 159614 - DNA, 389 bp, Arabidopsis thaliana columbia
gttgtgtacaagtctccttcaccaccatatgtttacaattccccaccaccaccatactactcaccttcttcaaaagtttactacaagtcttctccaccaccatcttattattctccctctccaaaggttgaatacaaatctccacctccaccatcgtattcaccttctccaaaaactgagtactaaatttctcggctgcctctatatgagtgaaactaaaaaatgtaattcttaaataagttatcgaatattattcgattttatctttccttttgttctcgttttttaatttctcttatctaatcacattttaattttcttgggatttggctacaaaattttcttttatttgtgtaacgattgcttgcgatctatataaactcctttgc

SEQ ID NO: 159615 - DNA, 219 bp, Arabidopsis thaliana columbia
atccgtcggagagaacacagaatctccggtgacgttcctcgaatccttagttattggagagtgggaagatcgtttccaaagtggtctttttgctctgatgtctccggctgctaaaccaatgttttccgtcaagtacgtttttgtctgatatttattcattttttatatgacattatctatttctaatttatttttttttattattattatttttatatt

SEQ ID NO: 159616 - DNA, 450 bp, Arabidopsis thaliana columbia
cgggaaaccgccgctttctggtcttccttacaggaagagatgctttgaacatgaccactctgaaggcttttccggcaagatctctggctccggcaacggcaagtgccattgcaagaaaagccgaaaaaatcggatgaagagaaccgtgagagtaccggcggtaagtgcaaagatcgccgatataccaccagacgaatattcatggagaaagtatggacaaaaaccgatcaaaggctcaccacatccacggggttattacaagtgtagtacatttagaggatgtccagcgaggaaacacgtggaaagagctttggatgattcaacgatgttgattgtgacgtacgaaggagagcaccgtcatcaccagtccacgatgcaggagcatgtaactcctagcgtgagtggtttggtgtttggttcggcttgaagaataattagtttggtagtttg

SEQ ID NO: 159617 - DNA, 370 bp, Arabidopsis thaliana columbia
gttttgaagctctctctttcaaattctgttcgtctctcgcgatctctctctctctctcagatagctccgaaactttcacgcagagttaagtgaagcaggatgggattgtcattcgccaagctttttagcaggctttttgccaagaaggagatgagaattctgatggttggtcttgatgctgctggtaagaccaccattttgtacaagctcaagctcggagagattgtaaccaccattcccactattgggttcaatgtggagactgtggagtacaagaacatcagtttcacagtgtgggatgtcgggggtcaggataagatccgttccttgtggaggcattactttcagaacacctcaagtctttatcttt

SEQ ID NO: 159618 - DNA, 193 bp, Arabidopsis thaliana columbia
atcactttcgaaattacatttacgctttcttgcaatcaaattttccgatcttaagttcagaagacgatgtcagaggtggaaatagagaacgctgctacgatcgaaggaaacaccgctgcggatgcgccggtgacggatgcggccgttgagaagaagcctgcagcgaaaggactaatgacgaagtatgttatgg

SEQ ID NO: 159619 - DNA, 461 bp, Arabidopsis thaliana columbia
gtcaaggcagacagtgtaagcaagaacgctccttcagagttccagaacacaaagctcatgacccgtcttacctacacccttgacgagatcgaaggacccttcgaggttgcttcagacggaagcgtcaatttcaaggaagaagatggaatcgactatgctgcagtcacagtccaacttccaggaggtgaacgtgtgccattccttttcacagtcaaacagcttgacgcctcaggcaaaccagacagcttcaccggaaaattcttggttccatcgtaccgtggctcttccttcttggacccaaagggccgtggtggatccacaggatatgacaacgccgtggcattgccagctggaggcagaggagacgaggaggagcttgtaaaggagaacgtgaagaacactgtcggttcagtgggagagatcactcttgaagtgacatagagcaaagccgagacaggaga

SEQ ID NO: 159620 - DNA, 432 bp, Arabidopsis thaliana columbia
gcaaaatacggtaaccagagacaaggtagaaaccgaaatgattgcgcgtggtcgtcatgatccttgtgttgttccacgagctgtgccaatggtggaagcaatggtggctctagttcttgtggatcaattgatggcgcaatacgcacaatgccatttgtttccaataaatccagagttgcaggaacctctccagatagagcagccgcaaaatgctactgctttgtaagcaaatctcgagaagataaagagtcatagagagtgagagttcgcttttgttgtgtgattattatgctgaataaaaaaatgttaattttgtgcccaccagaaaaacaaagaacatgattttttataagaggatttgcttctatatcaatcatctaaatgtgattttaccacgaacataaactttttttattttgtatattttatttt

SEQ ID NO: 159621 - DNA, 148 bp, Arabidopsis thaliana columbia
  unsure (1)..(148): unsure at all n locations
gcaaaagacggcaaccagagacaaggnagaaatttaaattattgcgcgtggtcgtcatgatcctagtgttgctccacgagctgtgccataggtggaagcaatggatgctctagttcttgttgatcaattgatggcgcaatacgaacaa

SEQ ID NO: 159622 - DNA, 422 bp, Arabidopsis thaliana columbia
agcaaacgaaaaataaaaaagaagaaactatacaaaacaaaaaaaaaaatggaggccgggaaaacaccaccgacgacgacaacaacgacggagaagaaaacggagcaagtgaaagacaacgacttgccgaccgatagcccttacatggcgacgggtactttggaagattacaaattgaaagcttatggagccgaaggtcaccaagagcctactcctggtcttggaggtggctccaccgatgctcctactccttctggcgacgcacccgtcgccactaccaccgatgcgaaagctccgtgaaaaaaaagaaagactataataatgaacgggttttgtggatcgttcgaaaacaaacccataattgtagtatgttcaataactgatccaagcttgttttttacggttttatgggttaattaaaa

SEQ ID NO: 159623 - DNA, 177 bp, Arabidopsis thaliana columbia
cagaatcttcgacatcaagaagttggtcacaagattctcttacagagcgatgatctctaccagtatatactggagacaagtgtgtgttctagagaaccagaatcaatgaaggaacttagggaagggtcaggaaaacattcatgtaacataatgaccacatcagttgatgaatgacag

SEQ ID NO: 159624 - DNA, 355 bp, Arabidopsis thaliana columbia
gaaatctcataaaccctaaatccccaaaatggaataatcaaaatttcatcaggagatctctaaaatcgaaatctacttgatcccgcaacgaagaaatgttaagaagaagactcttgtcgatcatatcaacatcactcatcaattcttcgtttcatcaaaccgcgaaacccagattcatcatttcttcaccacttcttcaatgccgtccttctccgatctctactcaaattccgacctctacgagcagggctttgtcgtttcaaggaatcagggcttatagtttattgagcttgaacgatctgagagacaatgtgccgagaaaactcaagacgaggaaaggaagaggtattgggtc

SEQ ID NO: 159625 - DNA, 181 bp, Arabidopsis thaliana columbia
gtgctacggcacgactcaatacactagactcttacaacatcgttgataagaagtggtttcattgttcgactccaggagattcccttaccggaagaagaggagcaaggctcgaagtggtgcaagggaaggtttggttgttattgttttacatttattggttatctttttttatttttttctt

SEQ ID NO: 159626 - DNA, 214 bp, Arabidopsis thaliana columbia
aatgcatgggagggtcagtcaacccagcggtgaagaagtttgcacaagcgcagaattgtcttcttcctatgggtgttacgtcagaaaatgtatcacaacgctttggtgtctcaaggcaggagcaagatcaagctgctgttgactcgcacagaaaggcagctgctgctactgctgctggtaaaatcaaggatgtgatcattcctgtttaagacca

SEQ ID NO: 159627 - DNA, 374 bp, Arabidopsis thaliana columbia
ggggaagctccgatctgagttttttttagcaatggcgaaaatgattcctagcctcgtctctctaattcttatcggtcttgttgcgatcgcctccgccgcagttattttcgaggagcgctttgatgatggctgggagaacagatgggttaaatctgagtggaagaaggatgataacactgctggggagtggaagcacactgcgggaaattggtctggtgacgctaacgataaaggtatccagaccagtgaagactacagattctacgccatttcagctgagttccctgaattcagtaacaaggacaagaccttagtctttcaattctcaagtcagcacgagcaaaagcttgactgcggtggtggctacatgaagc

SEQ ID NO: 159628 - DNA, 293 bp, Arabidopsis thaliana columbia
ggtacgactcaatacactagactcttacaatatcgttgataagaagtggtttcattgttcgactccagtagattcccttaccgcaagaggaggagcagggctcgaagtgttgcatgggaaggtatgggttgtgtttttttttattatttattttattttttttttattatatttttaatttttattttattttttttttatattttttatttctttttttatttatttttttatttataatttttttttttttttttttattttttttttatttattttctatttttattttt

SEQ ID NO: 159629 - DNA, 174 bp, Arabidopsis thaliana columbia
cacacatccttgaccattttcttgttcattgctctctttcttcttcacaaatcctaaacgagtaggagctatggctgcaccgattgttgatgcggagtacttgaaagagatcactaaggctcgccgtgagctccgttctctcatcgtgaacaagaactgagctcctatcatgct

SEQ ID NO: 159630 - DNA, 323 bp, Arabidopsis thaliana columbia
gggaaattgtgagagacatcaaggagaagcttttctttgtcgctgtcgactacgagcaagagatggagacctcgaaaaccagctcctccatcgaaaagaactatgaattacccgacggacaagtgatcacgatcggtgctgagagattcaggtgcccagaagtccttttccagccatcatttgttggaatggaagctgcagggatccacgagacaacttacaactcgatcatgaagtgtgatgttgatatcaggaaggacctttacgggaacattgtgctcagaggtgggacaactattgctcttaggtattgcagatccgta

SEQ ID NO: 159631 - DNA, 401 bp, Arabidopsis thaliana columbia
agctcctcgtcctcgttctcgcaaaggaaaaacgagcaagaggacaatctttatcagaaacttgataaaggaagttgctggtcaagctccctatgagaagagaatcactgagcttttgaaggttggtaaagacaaacgtgctcttaaggttgctaagaggaagttgggaacccacaagagagccaagcgaaagagagaggagatgtccagtgttctccgcaagatgaggtctggcggtggtggtgcaactgagaagaagaagtgaacgtcatcttaagtttgtgaatcgcttcgtaagagttatggtttcttgttgcaaaatcgttattatgattcctaagcttctcgaattatgttttggttggaatatcggacttaaaggagagtttttgtttgatacc

SEQ ID NO: 159632 - DNA, 443 bp, Arabidopsis thaliana columbia
gaaagctctagagagaaagagagagagagatggtttgtaaagaagaagatgttagagtcggagctaacaagtttccggagaggcaaccgatcggaacttcggctcagagtgacaaggactacaaagagccaccacctgcgccgttgttcgagcccggcgagctagcttcatggtccttctggagagctgggattgctgagtttatagctacgtttttgttcctgtacatcactgttttgactgttatgggtgtgaagaggtcaccgaacatgtgtgcttccgtcggaatccaaggtatcgcttgggctttcggtggtatgatcttcgctctcgtctactgcaccgctggtatctccggtggacacatcaacccagcggttacgttcggtttgttcttagctaggaagctttcgctcacacgagctgtgtactacatagtgatg

SEQ ID NO: 159633 - DNA, 424 bp, Arabidopsis thaliana columbia
cagctgcctccttttcgtttgccactttttgattatagcgaaactccaaaacacagagccatgccgccgaagttggacccgagccagatcgtcgatgtgtacgtccgtgtaaccggaggagaagtgggagccgccagttctctagctccaaagatcggtcctctcggtctcgcaccaaagaagatcggagaagacatcgcgaaagagacggccaaagaatggaaaggacttcgtgtcaccgtgaagctgacggttcagaatcgtcaagctaaggtaaccgtggttccatctgctgcagctctcgtcatcaaggcgttgaaggagccagagagagaccgtaagaaggtgaagaacattaagcataacggtaacatctctttcgatgatgtgactgagattgctaggattatgaggcctagatcta

SEQ ID NO: 159634 - DNA, 438 bp, Arabidopsis thaliana columbia
tcaaaactctgaatttcgatttcaatggagtcattcgtgctgttacgcgccaccgcgaatgtcgttggaattccgaaattgagacgaccaatcggagcgatccaccgtcaattcagcactgcatcgtcttcctcgttctcggttaaaccaatcggaggaatcggagagggagcgaatctgatctccggtcgtcagcttcgtccaattcttcttctcgattcgtcggcgatcaacggaggagagaaaagagaaattctcaaaccggttaaagccgccgctgctgaaggtggagataccgctggggatgctaaagttggattcctcgccaagtatccatggctagtcactggattcttcttcttcatgtggtacttcttgaatgtgattttcaacatccttaacaagaagatctataattactttccttattcctatttt

SEQ ID NO: 159635 - DNA, 388 bp, Arabidopsis thaliana columbia
ttcacattctcttctctctcgatatcatctaaatttctttcgatctcaatttcgcaaaatggctgacaagaagatcagaatcggaatcaacggtttcggaagaatcggtcgtttggttgctagagttgttcttcagagggatgatgttgagctcgtcgctgttaacgatcctttcatcaccaaccgagtacatgacatacatgtttaagtatgacagtgttcacggtcagtggaagcaccatgagcttaaggtgaaggatgacaaaactcttctcttcggtgagaagccagtcactgttttcggcattaaggaaccctgaggacatcccatggggtgaggctggagctgactttgttgttgagtctactggtgtcttcactgacaaag

SEQ ID NO: 159636 - DNA, 379 bp, Arabidopsis thaliana columbia
gccgcgcgggctccgacttcgtcttcctcatttattattgtcgtcgtcaaccttatttatctcttaatttatcattaaaaccaaaaaaccaaaaaaaaagccttagctttcgtttcttcaatcccagcaaaaaaaatggctcaggttcaagctccttcttcacattctcctcctactcctgctgttggtaacgacggggctgcgacggcttctgctacccctggaatcggcgtcggcggcggtggagacggagtcactcacggtgctctttgttctctctatgtcggagatctggatttcaatgtcaccgattctcagctttatgactattttcaccgaggtgtgtcaggttgtatctgttcgtgtttgtcgtgatgct

SEQ ID NO: 159637 - DNA, 449 bp, Arabidopsis thaliana columbia
caaagaaagagtttttttaactagcttagctcaatttgtttgcttaagacaagaagaacatggcgtcttaccagaaccgtccaggaggtcaggccactgacgagtacggaaacccgatccagcagcagtatgacgagtacggaaatccgatgggaggaggaggatacggaactggtggtggtggaggagctacaggtggccaaggatacggaacaggtggccaagggtacggatcaggtggccaagggtacggaaccggtggccaaggatacggaaccgggaccgggactgaaggctttggaactggcggaggagctaggcaccacggccaagagcaactccacaaggaaagtggtggtggcttgggaggaatgcttcaccgctccggatctggatccagctctagctcggaggatgatggacaaggagggaggaggaagaagggaata

SEQ ID NO: 159638 - DNA, 443 bp, Arabidopsis thaliana columbia
ctcgtgtagatctatcactctccatttcccttcttctctgtaaaccctttataaatctcacttccttcttcttcatcaatccttcctcagatctcttcttattcaaattcaattgagagatactctcttcttcttctttttctctatccagttccttctgtgcgaagttcttctgattaatttgagtttcttggaagcttttactcgatcttcatcggatcttagggttttgtttaaatccagatcttgggttttgttaaataatggcgactccttatcctggagcgacgcaggtgggttcgtactttgtggggcagtattatcaagtgttgcagcagcagccagatcttattcatcagttttattctgagcctagtagagctattcgtatcgatggtgattccaccgagactgctaatttcttgctgcatattcataacatg

SEQ ID NO: 159639 - DNA, 381 bp, Arabidopsis thaliana columbia
  unsure (1)..(381): unsure at all n locations
actgaatccgtctcgtacgatacagccgacgccgnatacgacgtatgttggtcagaatctcatgactctgtgctcatcgccgcaattggtgacggctcagtgaagatttacgacacagctcttcctcctccttctaatccgattagatcattccaagagcacgcgcgtgaggttcaatctgtggattacaatcccacgcggcgcgattcgtttctcacttcttcgtgggatgatacggttaagctttgggctatggatcgtccggcgagtgtaaggacttttaaggaacatgcttattgcgtttatcaagcagattggaattctatacatggtgatgcgtgggcttcagctgatggatgattgtacattaaggacttgggg

SEQ ID NO: 159640 - DNA, 383 bp, Arabidopsis thaliana columbia
ttacaaacaaaaatggttttgcaaaagctttcttttattgggctgcttttgctcctgaccatcgtcgcctctccagcaaatgcagatggacctgtttgcccgccgtcgaacaaactaagccgggcaagtttccctgaaggttttttatttggcacggctactgcggcataccaggtcgaaggtgcgattaatgaaacttgtcgtggaccagccttatgggacatctactgtagaagatatccagagaggtgcaataacgataacggcgatgtggcccgtgatttcttccatcgttataaggaagatatccaactaatgaagaatctaaacacagacgcctttagaatgtctatcgcatggccaaagatatttcctcatgggag

SEQ ID NO: 159641 - DNA, 324 bp, Arabidopsis thaliana columbia
ctcctactctccttgacgctcactccgaattggtttagatcatgttcgacactctcgacaagcttttccacaagacaaaaggctcaatctctccttcagacattgatattctcgttgtcaacgtctcactcttcgctccatctccttccctaacctcacgagtcatcaacagatacaagatgagagaagacatcaaatcctacaatctctcgggactagggtgtagcgcgagcgttatatcgatagatatcgtgcaaaggatgttcgaaactcgtgaaaacgctctcgcactcgtggttagcacccgagacaatgggtcctcac

SEQ ID NO: 159642 - DNA, 366 bp, Arabidopsis thaliana columbia
cttcttctctccgatctaccaccggcggttctgttcttttacgctccgccctctgcatcaccacagccactctcactctctgcgactccttctacctctccttcggcagatctctcgtctcttctccacgtctctcttcttcttcatccctctctcagaagaaatatcgaattgcgtcggtgaatcggagtttcaactccaccaccgccgctactaaatcttcatcttcagatcctgatcagttgaagaacgctagagaagatatcaaagagcttctcagcaccaaattctgccatccgattttggttagattaggttggcatgatgctggtacgtataacaggaacattaagggatggcccccaa

SEQ ID NO: 159643 - DNA, 263 bp, Arabidopsis thaliana columbia
taaaaatatcaggtcttctctggttgacagtatagtcggtactggatgaggctactttcaatgtgaggagggccggctcttttcctgcatcagttacaaccatggccaagccttcagttagccttcaaaatggcgttgagaaactttctgtcgctcctcttgtggacttgctagacctagattctgacgatatcatggctgcacctagtccatcttggtcagatttcctttaggattctcttggtgtatacttatgttcattg

SEQ ID NO: 159644 - DNA, 241 bp, Arabidopsis thaliana columbia
gacccacgcgtgcgactaaacactaactaagagatcaatatggctggtttgtatgaagtggcatgcatggactgggctggcatgattggggccggtccaatcacaacgaacgcgcttatgagttgtggcaccgtcaacggcaacctggcagggtgcattgcctacttgacccgaggtgctccacttacccaagggtgctgcaacggcgttactaacactaaaaacatgggcaggacaaacc

SEQ ID NO: 159645 - DNA, 412 bp, Arabidopsis thaliana columbia
aatttctccgtcactatcataaccatggctgtgctttcatctgcagatcgagctagtaatgagaagaaggtgaagagttcatactttgatttgccacctatggaaatgtctgtagcatttcctcaagcaactccagcctctacatttccaccttgtacttcagactattatcatttcaatgatctactgactccggaagaacaagctatccggaagaaagtgagggaatgcatggagaaagaagttgctccaataatgacagagtactgggagaaagcagaatttccattccatatcactccaaagcttggggcctatgggtgttgctggtggctcgatcaagggttatggatgtcctggtctctccatcaccgccaatgcaattgccacagcagaaatagctagagttgat

SEQ ID NO: 159646 - DNA, 429 bp, Arabidopsis thaliana columbia
aaaaactttttagggaaaaactttttaggtccaatgatcgagagagaagagaagattttgaattttttttgttttataaagtttcgtcttaagcgatcgattttttgtgcgaaagattgaaactttttggtaagataattgtgttgtgtggttggatcgtggaggtgggtcttctttcgaatggcgcaacaagggcagggaagcatggaccctgccgctctcgatgatatcattcgtcgtttgttggattacagaaaccctaagcctggtaccaaacaggctatgctcaacgagtctgagatccgtcagctttgcatcgtctctagagagatttttcttcaacagcctaaccttcttgagctcgaagctcctatcaagatctgcggtgatattcatggacaatactcagatctattgaggctgtttgag

SEQ ID NO: 159647 - DNA, 429 bp, Arabidopsis thaliana columbia
ctctctcttatcatcatctcctggtattctctctctcttatctccgtgatggtgctctcccacgccgtatcggagtcggacgtctccgtccactccacattcgcatcacgttacgtccgtacttcacttcctaggttcaagatgccggaaaactcgattcctaaggaagcggcgtatcagatcatcaacgacgagctgatgcttgacgggaatccacggttgaacttagcctcctttgtgacgacatggatggagcctgagtgtgataaactcatcatgtcctccatcaacaagaactatgttgacatggacgagtaccccgtcaccaccgaacttcagaaccgatgtgtgaacatgattgcacatctattcaatgcaccgttagaagaggcggagaccgccgtcggagtaggaaccgttggatcatcg

SEQ ID NO: 159648 - DNA, 351 bp, Arabidopsis thaliana columbia
  unsure (1)..(351): unsure at all n locations
gtaaaacactaactaagagatcaatatggtttgttacgatgaagttggcatgcatggncagggcgagcatgattgaggcctttttcaatcacagcgaacgcgcttatgagtcgtggcaccggcaacggcaacctggcagggagcattgcctacctgacccgaggtgctccacttacccaagggtgctgcatcggcattaccaaccttaataacatggcctgcacaacccctgtccgacagtatgcttgtcgttgcctttaatctgccgattaagccgttggtcccggtctcaacactgtccgtgcagctggactttctagctgcatgctaagtcattataccctacaatat

SEQ ID NO: 159649 - DNA, 449 bp, Arabidopsis thaliana columbia
gttgtttgctatataaatcctccaatttctcaatattctaaacaaattatatattttcttacttacttgttctcttgtaatggatttctctccgatcaactgcctcattttcgatttggatgacacattataccctctaaaaactggaatagcgccagctgtcaagaagaatattgacgattttctagtggagaaatttggattctcagaaagtaaagcttcaagcttaagagttgaactcttcaagacttatggaagtactctcgctggtcttagggcgttaggtcatgatgttcattcctgaggaatatcacagtttcgtgcacggaaggttaccgtatgggtcgatcgaaccaaacaacatgctacgtaaccttctcaacaaatccaaccagagaaaattattatttacgaatccggacaggaatcatgcggtgaaggtcctcaag

SEQ ID NO: 159650 - DNA, 382 bp, Arabidopsis thaliana columbia
cggacgcgtgggcttcttcggctgttcgagtcattgattttaggtactttgcatcactacagtgtggtgttgacttggagactctatgcactgatgatttagctgaacagtctcaggcttatgagtcactgaaacagtgtggctatttgttatctggagttcgtggtaatgtagataaatgtttgtatgctgtggatgaagattgtagaaccactgtttggacttataaaaatggagaagctgatgggagattagattcgttccagcctgatgagaagctcaagaagaaaaagaaattgtccaacgtgagaaggcgaagagatgtgtataagactcttggacatggtacagaagctgagtctgcagctattctagcctttgg

SEQ ID NO: 159651 - DNA, 431 bp, Arabidopsis thaliana columbia
tgatgaatcaacaggcattgttgactacgatatgctcgagaaaactgctacacttttcagaccaaagcttattatcgcaggagctagtgcatacagccgagattttgactatcctcgcatgaggaagatcgcagactcagttggtgcttttctgatgatggatatggctcatatcagtgggcttgtggctgcttctgtggtagctgacccttttgagtattgtgatattgttacaacaacaactcacaagtctttgagaggtccgagaggtggcatgatcttcttcaggaaggatccaattaatggggttgatcttgaatctgccgtgaacaatgctgtcttccctggtttgcagggggggccctcataaccacacaattggaggattagcagtctgcttgaaacacgcacaatcaccggaattcaaggcg

SEQ ID NO: 159652 - DNA, 446 bp, Arabidopsis thaliana columbia
tttccatggacggaccttgacctctctgcttcctttcttgcattttctctctctcactatcctctctctttctagtgtttgtttgatcctctgcgtactctgttcttcttctctcttcagataaaacaagtcctgcatattgaagatctgatgtcttatcgattgctaagtgtggataaggatgaactggttacgtcaccttgtttgaaagaacgtaactacttgggtctctctgattgttcctctgttgatagctcaactattcccaatgttgttgggaagagcaatctcaatttcaaagctactgaactgaggctaggtcttcctgagtctcaatctcctgagagagagactgatttcggtttgctgagtccgagaacacccgatgagaagcttctcttcccgttgctaccttctaaagacaatggttctgctactacagggca

SEQ ID NO: 159653 - DNA, 426 bp, Arabidopsis thaliana columbia
ctcaaataagaaaatggttcatgtgtcatcatcttatggagccaaagatggctctgaagaagcctatgattacagaggaaacccaccagataagtctaaaaccggtggatggttaggcgccggtttaattttagggagcgagctatcagagagaatatgcgtgatgggcatatcaatgaatctagtgacgtaccttgttggagatttacacatctcatcagctaaatcagcgaccatagtcaccaacttcatgggaactcttaaccttctagggcttctcggtggttttttggctgacgctaaactcggtcgctacaagatggttgcaatctcagcttctgtcacagctctgggagtgttgcttttgacggtggctacaactatctcaagcatgagaccaccaatatgtgacgatttcaggagact

SEQ ID NO: 159654 - DNA, 416 bp, Arabidopsis thaliana columbia
ataaattttgtggagagcaaagttctcagtaaaatcaaagaagaaccgaacgagagagagaaacgaattcttctcaggtgttaaagaatgtctcggagatatgatagccgtaccacaatcttctcgccagaaggtcgtctttaccaggtagagtatgctatggaggccattggaaacgccggttctgcgattggaatcttatccaaagacggtgttgtgttgatcggtgagaagaaagtcacctcaaagcttcttcaaacctcaacctctgctgagaaaatgtacaagattgatgaccatgttgcctgtgctgttgctggtataatgtctgatgctaacatacttatcaacacggctcgagttcaagctcaacgttacaccttcatgtaccaagagcccatgccggttgagcagct

SEQ ID NO: 159655 - DNA, 447 bp, Arabidopsis thaliana columbia
gctaaagctggatgtcagtttataacagttctttttgttgatttcatgtccgaaaatgttcgtgccatcctagatcaagctgggtttgaaaaggttggtgtgtacaggatgtcagatgagaccattggttgttcacttgctgacgctgcttctgctcctgcttacttgaattatcttgaagctgcttctcgttctcctccttcactgcatgttgtttatataaatacatctttggagacaaaagcttttgctcatgagcttgtacctaccattacttgcacttcatctaatgttgtacagacgattctgcaggcgtttgctcaaatgccagagttaactggttggtatggtcctgattcttacatgggagcgaatattgtaaagttattccagcagatgacattgatgactaatgaagaaatcgccaatattcaccctaaacacagt

SEQ ID NO: 159656 - DNA, 452 bp, Arabidopsis thaliana columbia
gccttgagtgcggcgacgccaccgttaaccaccgtgttaccgccttaaccatattctccggccagatctccggtcagatcccggctgaagtcggtgacttgccgtatcttgagacccttgtcttccgcaaactctctaacctcaccggtacaatccaacccaccatcgccaaactcaagaacctccgaatgctcaggctcagctggacgaatctgacaggtccaattcctgactttataagtcagctcaagaatctcgagttcttagaactttccttcaatgatctctctggttccattccaagttctctctctacgttacctaaaatcttggctcttgaacttagcaggaacaaacttacaggttccataccagagtcatttgggtcgtttccaggaacagtccctgaccttcgcctatcacataaccagctctccggtccaatacccaaa

SEQ ID NO: 159657 - DNA, 446 bp, Arabidopsis thaliana columbia
gaacgtcaagacaaggggtagaagaattcaagaacgagatcaagctgattgcaaagcttcaacacagaaatcttgtgaagattcttggatattgtgtggacgaagaagaacgaatgcttatctacgagtatcagccgaataaaagcttggattctttcattttcgataaagaacgacgtagagaacttgattggcctaaacgagtggaaataatcaaagggattgctcgcggaatgctgtatctccatgaagattcaaggcttcgaatcatccaccgagatctcaaagcaagcaatgtgttgcttgattctgatatgaatgcgaaaatatcggattttggattggctagaaccttgggaggagatgaaactgaagcaaacacgaccagagtggttggaacatatggatatatgtcgccggagtatcaaatcgacgggtatttctca

SEQ ID NO: 159658 - DNA, 430 bp, Arabidopsis thaliana columbia
caactctctatctcgtctctagcataaccatgtattatattgacaggtgccacaccggtaaaccggacgggcccgtcgccaccaccggtgaaacatgtgccggagtcagttctgccggctaaaccaccaaagaggaacaattatgcattcgcgtgtgctatcttagcttccatgacttctatcctccttggttatgatataggagtgatgagtggagcaatgatttatataaagagagatttgaagattaatgatttacaaatcgggattctcgctggaagcctcaacatctattcacttataggatcttgcgccgccggaagaacctctgactggattggtcggcgttacactatcgtgttggctggagccatattcttcgccggagctatccttaatgggatgtcccctaactacgctttcctcatgt

SEQ ID NO: 159659 - DNA, 426 bp, Arabidopsis thaliana columbia
gatttatgctagattgtccctcctcgatcggtttcttcttcttatcgtgcatggagtggataagatggttccatggcataagcttccagtattcttggggttaacctatcttgaagtacgaagacatcttcaccaacaatacaatcttctcaacgtcggtcaaactccgactgggatccggtttgatcctgctaattatccgtaccggactgctgacggaaaattcaatgatccctttaatgaaggcgtcggcagtcaaaatagttttttcgggagaaattgtccccccgtcgatcagaaatcaaagttacggaggccagaccccatggtggtggcgacaaaactattaggaaggaaaaagtttatcgacacgggaaaacaattcaacatgattgcagcttcttggattcagttcatgatccatga

SEQ ID NO: 159660 - DNA, 445 bp, Arabidopsis thaliana columbia
cggacgcgtggggtttggagaagaagaagttcagttcaaatacgaggagagatctctaaagagatttatcgtttcaaatttgttcacgttgagaagtttaatttagattaaacaacaaaaagatgggttactggaattccaaggttgttccaaaattcaagaagttattcgagaaaaatagtgctaagaaggctgctgctgctgaagctaccaagacctttgatgaatctaaggaaacaatcaacaaggaaattgaggagaaaaagacagaactccaaccaaaggtcgtggaaacctatgaagccacgtctgcagaagtcaaggctttggtgagagaccctaaggtggctggtttgaagaaaaactcagcggctgtgcagaagtacctcgaggagctagtcaaaattgaattccccggatcaaaagcggtgagtggggcttcgtc

SEQ ID NO: 159661 - DNA, 440 bp, Arabidopsis thaliana columbia
  unsure (1)..(440): unsure at all n locations
gtaatagacgagctctggcaactgatgaatggcttcgcgtagaaggaactgataatatatatgcccttggtgattgcgcaaccattaaccagcgcaaagtcatggaagatgtttctgctatttttagcaaagcagacaaagacaagtctgggacactgactctcaaagagttccaagaagcaatggatgacatttgtgttagataccctcaagtggagctctacttgaagagtaaacgtatgcgtggcattgcagatcttcttaaagaagccgaaactgatgatgtatctaagaataacattgaactgaagatcgaagagttcaaatcggctctatctcaggttgactcacangtgaagtttcttccagctactgcacaggttgctgcgcagcaaggtgcttacctagctaaatgctttgaccgaatggaagagtgtgag

SEQ ID NO: 159662 - DNA, 409 bp, Arabidopsis thaliana columbia
agaaggacatgtatgagttcaaggaggactgcattacagagaagaagattgtagcaaagctgaagtcattggctgagaagtctttgttgctagaaaatgaggacaaagttcgacgtgatgtctttgacattttacggaatgttgttctgatcaaagatccagaggatgcaagaaaattctatcctcgctttaatattgaggatacttcaagcttccaggatttggatgatcacagcaaaaatgttctgaagaggctatactatgactactatttccaacgccaagaggatctatggagaaaaaatgctttgaaaaccttgcctgctctgttgaattcatctaatatgctggcatgtgggggggatctgggtctcattccatcttgtgtacatcctgttatgcaagaacc

SEQ ID NO: 159663 - DNA, 443 bp, Arabidopsis thaliana columbia
gatcttcgtgaaaaccctaacttggaagaccattacccttgaggttgaatcatccgacaccatcgacaatgtgaaggcgaagatccaagacaaggaaggaatcccaccggaccagcagcgattgattttcgccgggaaacagcttgaagacggccgtaccctcgccgactacaacatccagaaggaatcgacgcttcatctcgtcctccgtctccgtggtggtgctaagaagaggaagaagaagacttacaccaagccgaagaagatcaagcacaagcataagaaggttaagctcgctgttcttcagttttacaaaatcgatggatctggaaaggttcagcgtttgaggaaggagtgccctaacgcaacctgtggagctgggactttcatggcgagtcattttgatcgccattactgtggtaagtgtggactcacctacgttt

SEQ ID NO: 159664 - DNA, 444 bp, Arabidopsis thaliana columbia
gaagaagagaaacaacaagaagtagtaatggctttctctatgctctcctccgccgctgtggttacatccccggctcaggccaccatggtcgctccattcaccggcttgaagtcatccgctgcattcccggtcacccgcaagaccaacaaggacatcacttccatcgcaagcaacgggggaagagttagctgcatgaaggtgtggccaccaattggaaagaagaagtttgagactctatcttacctccctgaccttagtgacgtcgaattggctaaggaagttgactaccttctccgcaacaagtggattccttgtgttgaattcgagttagagcacggatttgtgtaccgtgagcacggaaacactcccggatactacgatggacggtactggacaatgtggaagcttccattgttcggatgcaccgactccgctcaagtgttg

SEQ ID NO: 159665 - DNA, 309 bp, Arabidopsis thaliana columbia
aaaagttctctctttacttctcttatatgtttgtttgtcattagcctccggtgatgagtgcatgatcaacgaccatcttcaattttcatcggacggcaagtggagaaccgatgaagaagtgaggtccatctacttacaatggtccgcagaacacgggaaaactaacaacaacaacaacggtatcatcaacgaccaagacaaaagattcaatattttcaaagacaacttaagattcatcgatctacacaacgaaaacaacaagaacgctacttacaagcttgggcttaccaaatttaccgatcttactaa

SEQ ID NO: 159666 - DNA, 451 bp, Arabidopsis thaliana columbia
gggaccccgacggcgacttcctctacaggcgccgtgatcgttgcacttccggctggatccgccgtccctgtctccgtgattcccgttgattccgatccgaagtggcaccgtatgacggagatcgtccatcagagaccaccgatcgatgattctagacgccttttccagaggctgtggacagacgaagacgagatcgagcttcttcgtggttttctcgattacatgacgatgcaccgcggaagcagctcgcatccgccggatacggcgccgttttatgagcagataaagtcgaaacttcagctggatttcaacaagaaccagctggtggagaagcttcggagattgaagaagaagtacaggaatgtgatgagcaagatcagctctggttaagaggtattcttccagagccctcatgatcagtctaattttcgagatttctagaaaaatctgg

SEQ ID NO: 159667 - DNA, 421 bp, Arabidopsis thaliana columbia
ggatctcggagacccgccaaagcacgaaagccattatttttcagaaaatgaattcctattcgaagagtgcataaccgcatggataagctcacactaacccgtcaatttgggatccaattcgggattttccttgagggatattggtaaggaattggaatgtaataatatcgattcataatggattcatatcgatacagaagaaaaggttctctatcgattcaacaagtgctgtacttatgggaaagcgatagagaaagagaaaaaaaaaaacgaagatttcacatagtgatttttttttttttttttgatcaaaaataaatctgattgaatttatttcgtaccccttcgctcaatgagaaaatgggtcagattctataggatcaaacttatgggacttaagaatgatggaagggaataaaat

SEQ ID NO: 159668 - DNA, 452 bp, Arabidopsis thaliana columbia
ggcatgtcgacatctgaggataaaccggaaatcatcagtagagtagttcatcaggagggtgacgtggaaatcgtcgatagaagtcagaaggataaggacgaggaaaaagaagaagggaaaggtggattcctcgataaggtgaaagatttcattcatgacattggtgagaaactcgagggaaccattggctttgggaagccaactgctgatgtctctgcgattcatatccctaagatcaatcttgagagggcagatattgttgtggatgtgcttgtcaagaacccgaatccagttcctatccctctcatcgatgtcaactacctggtcgagagcgatgggaggaaactggtttctggtttgatcccggatgctggaacactcaaggctcatggagaagaaactgtgaagataccattgacgttgatctatgatgacatcaagagcacttacaa

SEQ ID NO: 159669 - DNA, 441 bp, Arabidopsis thaliana columbia
atccttctctgagaaaaaacaacagatccgaattttatttttaatcagccggaaaaaatggagaaagcgatcgagagacaacgcgttcttcttgagcatctccgaccttcttcttcttcttcgcacaattacgaggcttctctatctgcttctgcttgcttggctggggacagtgctgcatatcagaggacctctctctatggagatgatgttgtcattgtcgcggcacataggactccactatgcaagtccaaacgtggcaatttcaaggatacatatcccgatgatttgctcgcacctgttttgagggcattgatagagaagacgaatctaaacccaagtgaagtaggtgacattgttgtgggtactgttttggcacctggatctcagagagccagtgaatgcaggatggctgcgttctatgctggtttccctgaaacc

SEQ ID NO: 159670 - DNA, 443 bp, Arabidopsis thaliana columbia
catcaaaaaagagcgtcttcataaactcccttcgtcttcttccctggaaatctagtttctttcttccacgaaaatgagagagtgcatttcgatccacattggtcaggctggtatccaggtcggaaatgcttgctgggagctgtactgtcttgaacatggcattcagcctgatggccagatgccgagtgacaagactgttggtggaggtgacgatgctttcaacaccttcttcagtgaaaccggtgcaggtaagcacgtcccacgtgctgtctttgttgatcttgagccaactgtgatcgacgaggtcaggactggtacttaccgtcagcttttccaccctgaacaactcatcagcggtaaagaagatgcagctaacaatttcgcccgtggtcattacaccattgggaaagagattgttgacctgtgcttagaccgtatcagaa

SEQ ID NO: 159671 - DNA, 354 bp, Arabidopsis thaliana columbia
cacatccaccgtttataccgcccattactcaggtgcggtctagcgtttggtgcgcatcgatggatggctgcattacaacgtcaatgcgaatgcctcacgattctcatgtcctccactgtttccacttccactaatccatcccctataaactgcaatgggagaaaaagcatgctaaagctagcgaagaggatgactgataatttctgtggaggggtttgtgcttcgtcgttacagaaatggagcaaactcaacgttggcaacgtcgacgaagacgttaggataatgactaggaagagtgtaaacaatcctggcgagccgcctgggataattctaaatgcggcgacgtcaggttgg

SEQ ID NO: 159672 - DNA, 439 bp, Arabidopsis thaliana columbia
  unsure (1)..(439): unsure at all n locations
gagagatcatcagctattctaatggttcataaagtccggaaaaacggaatgccgttttggaacagaagaggagtaaacgcatacgctgatcaagtagtagttgctttccaagcttttcaacagctaagcagagtcaatgtccgaccaatgacagcaatctcttcaatgtctgatattcatgaagatatctgcacaacagctgtaagaaaaaaagcagccattgtgattcttccgtttcacaagcatcaacagcttgatggttcgttagagactacacgtggcgattaccgttgggttaaccggagagttttgcttcaagctccttgttcggttggtatattcgttgaccgtggactcggaggttcaagtcaagtctcagctcaagatgtttcttactctgttgttgttctgntcttcggtggntctgatgatcgtgaag

SEQ ID NO: 159673 - DNA, 444 bp, Arabidopsis thaliana columbia
gttttgaaatcaccaaaatatgaatgatattgttaatgtatccatttaggtggaagcaagaactctgttttttgctctgtttctgctctgcatttctctgtttcactgatgatttgtttgctttatagtttgacaacttgtacggatgccgacactcgcttcccgatggtctcatgagggctactgatgttatgattgctggaaaggttgctgttatctgtggttatggtgatgtaggaaaaggttgtgctgcagcaatgaaaaccgcgggtgctcgtgtcatagtgactgagattgatccaatctgtgctcttcaggctcttatggaaggtcttcaagttctgacccttgaggatgttgtctcagaagctgatatcttctgtaccactactggtaacaaagatattattatggttgatcacatgaggaagatgaagaacaatg

SEQ ID NO: 159674 - DNA, 229 bp, Arabidopsis thaliana columbia
aatctactctctttaaaagaaattcgtatgtacttataagaagcagaagatggcccaaaaggtggaagcacaaggagggaaaggagccaacctatgggacgatggatcgacacatgacgccttgaccaagattcagctcgcagcaggcatagactgaattcaatatgttcagtttgattatgtcaagaacggacaacccgaacaagcttctttttgtggtaccaaaggc

SEQ ID NO: 159675 - DNA, 393 bp, Arabidopsis thaliana columbia
tctcaatcctctctctccaatggcttccttattcttcgtttcctcttctcaccttacgctacgcactccttctattgccctacgcagcactggctcttctcctcgaacctccgtttcattctccgtcaaggctcaatccgtcgcgctttcacaggacgatttgaagaagctcgcggcggagaaagctgtggaggcaattaaacctgggatggttctagggctcggaaccggatccaccgcagcttttgctgttgatcagatcgggaaactactctcttccggtgaactctacgatattgtcggtatcccaacgtcgaaacgaacggaggaacaagcacggtcgttagggattcctcttgttgggttagatacacatccgagaatcgatctcgc

SEQ ID NO: 159676 - DNA, 454 bp, Arabidopsis thaliana columbia
cggacgcgtgggcggacgcgtgggtggagaatcttctttccttaatctcaatcagctttggaagaagttcaggggagaagagaaggctcctgagcatttaggcgctagccgggattacaatgttgacatgatgcctaagtttatgatgggaaatggcaagcttgttcgtacccttattcatacagatgttacaaagtatttgtccttcaaagctgttgatggaagctatgttttcgtcaaaggaaaggttcaaaaggtgccagctactcctatggaggccctgaaatcttctctcatgggcatatttgagaaacgtcgagccggcaagtttttcagttttgttcaagaatacgatgagaaggacccaaaaacacacgatggaatggatttgaccagagttacaacaaaggaactgattgcgaaatatggtcttgatggcaacactattgacttt

SEQ ID NO: 159677 - DNA, 449 bp, Arabidopsis thaliana columbia
aggcaaggaaggtatgtaactttttcttgccctcgtagttccattttcattgaaacttcttctctttgaaccctctggattctaggctactacaatcagctgaaaaaaaccctaattcagtctctctttctcgtcgtgcaaaaaccctaaaccctgggaattgtgagatcgatctcatgtttcagtaacttgttaaatctgtacctctttctgttgatttagatttagatttctgttttcaattccgtttctgttccgaaattgttcaaggtgaaaaattcaacctcaaaggaaagtgtaaaattcaagtcttaaagaagagaaaaatggtggagggtggtgggtcactgataggagcagcagtgcctgcactaattgctggtcaagcttggaggataaagaagagacatggcgaagaagagaggatcaagagtgctcgaggaagagag

SEQ ID NO: 159678 - DNA, 455 bp, Arabidopsis thaliana columbia
ctaattttgatacattagctttagagaaccttttattttatccgtgtacaataaaaaagtttgcgttttttttttccttaaatcgattgaacgtgtttgaagatgcctccaaagcaacaaccaaaggctgatttggcgaagaagcagaaacaagtggaagacaaaactttcggattgaaaaacaagaacaagagcaagaatgttcagaagtatgttcagagtctcaagcaatctgttcagcctaaacccgatgcaactaaagctgcagctaagaaaaagaaagaggaagagaaagcgagagaacaggaattgaatgagttgttcaaggtagctattagtcagcccaaagttcctgtaggtgtggatccaaagtctatactctgtgagtttttcaaggccgggcagtgtcaaaagggtttcaagtgcaaattctctcatgatttgaacattcaaag

SEQ ID NO: 159679 - DNA, 411 bp, Arabidopsis thaliana columbia
tgattcaataacacgactggcattaaaaagagaacacgcgaatcatccatgcatacaaatttttgtgaactcaaaataaaatcttctcttgagtccacactttttccaaaaaaaaatcataagagagctcaaaatacactctttttttcttccagataatgaaacccaaacaagcacgaaaatcaatctcgcaatatgcaaaatgtcacctgtgacacttttgtgacactaaacatatagactctcaacacgactcaaaacatgtattcaatttgaaaataaaagccaagtcttccttcgatggatttaaaacacatcaggctattgattacctggccgtatgtgtgtgtaagcatgcatcttaagctgagggaacagactcctctgttttcttttcttcaacagcttcac

SEQ ID NO: 159680 - DNA, 412 bp, Arabidopsis thaliana columbia
gaagaagcaaaatggccacaagcgcatcagcttttcttttaccaaccacattctccactgcaatctcccacaaaaaccctaactccatctcattccatggccttcgtcccctccgtctaggtggctcctcctccgccctacccaaactatcaaccaccgggagaaaatcctcctccgctgtcgtgagagctgagctaagcccttccatcgtcataagtctcagcacaggtctctccctcttcctcggccgtttcgtcttcttcaacttccagagagagaacgtagcaaaacagggcttaccggagcagaacggaaaaacccatttcgaagctggagatgatcgtgctaaggagttcgacagactcttgaaatcgaacgatccaattggatttaacaattgttgatgaacttg

SEQ ID NO: 159681 - DNA, 442 bp, Arabidopsis thaliana columbia
tgaaaattgggtgaagataggcgcatcagctagtgtacaagatcaaggaggaacataaagacttgagctacgatgatcaatgcaacaagtgtgagaaggaagctgtgaacgtatcgcttggaaacttgctttcgtacccattcgtgagagctgaggtggtgaagaacacacttgcaataagaggaggtcactacaatttcgtcaaaggaacgtttgatctctgggagctcgatttcaagaccactcctgcttttgccttctcttaagaaagaaagctaccggaacatataaaactcttttgagataaaaaagacactttgactcatctttcttcattctctcatgttgatgattcctctccaacttctttgatttctttttgttaattcaaaacttcaactttgctgcttctatttcaaaagctcaaacaataaagctgtaa

SEQ ID NO: 159682 - DNA, 451 bp, Arabidopsis thaliana columbia
cggggtttagcctattctacaatgtctcaactctgttatatgatgttagctctaggtatggggtcttatcgatctgctttatttcatttgattactcatgcttattcgaaagctttgttgtttttaggatctggatccattattcattcaatggaagctatagttggatattctcccgataaaagtcagaatatgattcttatgggtggtttgacaaaacatgtcccgattacaaaaacggcctttttaataggaacactctctctttgtggtatccccccccttgcttgtttttggtcgaaagatgaaattcttaatgatagtttgttattttcgccaatttttgcaataatagcttgttcaacagcgggattaaccgcattttatatgtttcggatttatttacttacttttgaaggacatttaaacacttattttctaaattacagtg

SEQ ID NO: 159683 - DNA, 365 bp, Arabidopsis thaliana columbia
caaagcgtgagtgagatcgggaatcaaacatcgtctccgtctctcatttcaaacgctatctccatctccttcctccgccgccgccatggaatctccgaagaattctctgatcccgagcttcctctattcatcatcttcatctccgagatctttcctcctcgaccaggtgctcaattccaactccaacgctgcattcgagaaatctccttctccggccccgcgttcctctcctacgtcgatgatttctcggaagaatttccttattgcatctcccaccgagccagggaaggggatcgagatgtattcacctgccttctacgctgcttgtacctttggtggaattctcagcttgggtcttactcaca

SEQ ID NO: 159684 - DNA, 209 bp, Arabidopsis thaliana columbia
  unsure (1)..(209): unsure at all n locations
gcttcaaatagattactttcaaagaagagtggtgaaagaaagatggagaagaacatgaaggtggagtgtagacttgtccagctcaatggggaagagagagnaccaacatggctctaatcaatgaagcttgtgagattggtgctttttttatatagcgatccatggtttaccatatgacttatttgtttatatttcgtgatttattactt

SEQ ID NO: 159685 - DNA, 436 bp, Arabidopsis thaliana columbia
gaaaaaccaaaagaagaagagaaacaacatgattagtaatggcttcctctatgttctcctccaccgctgtggttacctccccggctcaagccaccatggtcgctccattcaccggcttgaagtcatccgcttctttcccggtcacccgcaaggccaacaacgacattacttccatcacaagcaacggaggaagagttagctgcatgaaggtgtggccaccaatcggaaagaagaagtttgagactctatcttacctccctgaccttagtgacgttgaattggctaaggaagttgactaccttctccgcaacaagtggattccttgtgttgaattcgagttggagcacggatttgtgtaccgtgagcacggaaacactcccggatactatgatggacgatactggacaatgtggaagcttccattggtcggatgcac

SEQ ID NO: 159686 - DNA, 451 bp, Arabidopsis thaliana columbia
ccaaaagtgagactgatgctttccgaccgggcacatattgcatagaagaggttatgggaactgtcagtggagttaaagttacctttattgatacccctggttttcacccactgtcatcttctagcacaagaaaaaaccgaaagattctcctatctattaagagatatgttaagaagcgtccacctgatgtagttctttacttggaccgccttgatatgatcgacatgcgatacagtgatttctccctcctgcagcttataactgaaatctttggtgcagctatatggttaaacacgatacttgtaatgacgcattccgcagctactacagaaggacgtaatggacaatctgtgaactatgagtcatatgtgggccagcgcaatggatgtggttcaacattatatacatcaggctgtgtctgatacaaaactagaaaacccttgtctgtagt

SEQ ID NO: 159687 - DNA, 332 bp, Arabidopsis thaliana columbia
cggacgcgtgggctaactatacaaaacacataactaatggctccttcaacaaaagttctctctttacttctcttatatgtcgtcgtgtcattagcctccggtgatgagtccatcatcaacgaccatctccaacttccatcggacggcaagtggagaaccgatgaagaagtgcggaccatctacttacaatggtccgcagaacacgggaaaactaacaacaacaacaacggtatcatcaacgaccaagacaaaggagtcaatatttttatggacaactccagattcatcgatctacacaactgaatacatcaagaacgcttcttacatgcttg

SEQ ID NO: 159688 - DNA, 453 bp, Arabidopsis thaliana columbia
gaaaaacgagaacaaggaagaagattctcaatcatttattcagaagctttctctggttttctacagagaatcatatgcatcggagagaagattccagtctcaccacctctggtcaaataatcagcagtcttaaacaacatcttatgaacatcaacagttcctttaggagcaaccccaatagcagaaagaatcacaaccacaacatggtttctccaataagcaatccttcccatctttaaccggttccaccacggtttagacggtggtttagccaaatctttctccttcactacctcaaacccaactttcttcgccgtcacggctatatcagcgtagcttcttagtccaggaagtgcgtctcctctctcgatcccttgaatcacgtccttgtgttcttcgtcatcgtctctgtatttttcagtggtgacccattcttaggacacgaacaaagat

SEQ ID NO: 159689 - DNA, 331 bp, Arabidopsis thaliana columbia
ccgccctttttccccatctctttcgacagatctcttctttctctcgtgtttcacgaaacaatggcgactcaattcagcgcttctgtctcattgcaaacttcttgtctggcaacaacaaggattagtttccaaaagccagctttgatttccaaccatggaaagactaatctatcctttaaccttcgccgttcaatcccatcttgccgcctttctgtttcttgcgcggcaaaacaagagacgattgagaaagtggttgctattagtaagaagcaacttttacttacaccggttaaaaaagtcgtagctataaccaaatttgttgaccttgtag

SEQ ID NO: 159690 - DNA, 436 bp, Arabidopsis thaliana columbia
ccgatccatctctttctttctctctccgtcgactttcgttcttaaagatgaaagctttctacgtattcgttgttgctcttcttctcaccttgaattataggggagaagcaagtggttctgttttcttcattgatggatccaacaatcaatatcttcgtccacgatcatccagtgaggcacttcccatgtcgcctgttgaaatatctgcagcagtgtctgccttgttgggttttgcaccttcagcaactttgacagctgatggctcatccaagttgaacaagattctaaaacctaatccatttgagaggcctcgcgctgcttttgtgctagaaatcgctggagctgatgatatgcttttggaaacctcccctagtcattctttcttgggcaatgccataaggagcagtattaagtctgattcgtacaaagctgatac

SEQ ID NO: 159691 - DNA, 445 bp, Arabidopsis thaliana columbia
gggaccccgacggcgacttcctctacaggcgccgtgaccgttgcacttccggctggatccgccgtccctgtctccgtgattcccgttgattccgatccgaagtggcaccgtatgacggagatcgtccatcagagaccaccgatcgatgattctagacgccttttccagaggctgtggacagacgaagacgagatcgagcttcttcgtggttttctcgattacatgacgatgcaccgcggaagcagctcgcatccgccggatacggcgccgttttatgagcagataaagtcgaaacttcagctggatttcaacaagaaccagctggtggagaagcttcggagattgaagaagaagtacaggaatgtgatgagcaagatcagctctggtaaagaggtattcttcaagagcccttatgaacagtctactttcgagatttctagaaaaa

SEQ ID NO: 159692 - DNA, 449 bp, Arabidopsis thaliana columbia
cggacgcgtgggggcgaatcttcttcttctctttcgatcaaatcttttcagattcaacccaaaattgaagacaaaaatgtctcgcagatcgctaactctcctcaagaatctagctagaaacgcgaatggatcaggtattcaaacccgatccgtgacttacatgcccagacccggtgacggagcaccacgcgcagtgacgctgatccccggagatggaatcggtcctctggtgacgaacgccgtggaacaggtgatggaagcgatgcacgctccgatcttcttcgagaagtacgatgttcacggagaaatgagccgtgtgccgccggaagtgatggagtcgataaggaagaataaggtttgtttgaaaggtgggcttaagactcctgttggggggggtgtagttctcttaacgtccagcttaggaaagagcttgacctctttgcttctct

SEQ ID NO: 159693 - DNA, 319 bp, Arabidopsis thaliana columbia
aacgacgccggagatggccgccacttcaaccgctgctgctgcttcttcaatcatgggtacccgggtggtttccgacattagctccaattcaagccggttcacagcccggttcggattcggaaccaagaaagcatctcccaaaaaggctaagacggttatctcagaccggcctctatggttcccaggcgcaaaatcacccgaatatctcgacggttcacttgtcggggactacgggttcgatccttttggtttaggcaaaccggcggagtatctccaattcgatttggattccttggaccagaacttaaccaagaactta

SEQ ID NO: 159694 - DNA, 292 bp, Arabidopsis thaliana columbia
acggaaagttgcagccactaaatcagatccgtctattccgaagcaaatccatgagatcaaggacttccttttgacggcgagaaggaaggatgcaaggtctgtgaagatcaagagaagcaaggacattgtgaagttcaaggtcaggtgctcaaggtacctctacacactatgtgtcttcgaccaagagaaggccgataagttgaagcagtctcttcctccaggtttgagtgtgcaagacctttgatgatcttatgaaatcaggatctatcatggttttatatacccttgtctt

SEQ ID NO: 159695 - DNA, 414 bp, Arabidopsis thaliana columbia
caaatgtctatagctatttttctaggtatcattatatattccaagaattactacacaacttttttttgaatcaacaaaaaaaattcttgataaatatatttacaagaatgaagaaaatggagaaaaaaaaaaaaaatactctttattttatttcgactataaaaaatttaatatccaataaaaaaaaaatgagttatgacctatgctctttatcacaagcatatgtattttacaaattatcacaaattaaagttagtaacttttgtaaattaaaggctgttcttgaatataacatatgcataacatccttttttgttaagaataaaataaaggttttttttcaagaacacggaatctttaatatgaattgaaaaataaaacctttttgaattccgaagtaaatcaatggaaaaa

SEQ ID NO: 159696 - DNA, 453 bp, Arabidopsis thaliana columbia
gcaaatccaaaccaaagttctccattttcgtagcttctttaagctttttcagtatcatagagacacttttttttttttgattagaaatggctttagctgttacttcttcttcaactgcaatctctggatcgagtttctctcgttctggagcttcttctgaatctaaagctcttcaaatatgttcgattaggttatctgatcgaacccatttgtctcagagacgttactctatgaaacctttaaacgctgagtcacattcacgaagcgaatcttgggttactcgtgcttcaactctaattgctcctgaagttgaagagaaaggaggagaagttgaagactttgagcaacttgctaaaaagcttgaagatgcttctccacttgaaatcatggataaagctcttgagagattcggagaccaaatcgcaattgcttttagtggagctgaagatgttg

SEQ ID NO: 159697 - DNA, 389 bp, Arabidopsis thaliana columbia
aatctctctcttctcttactctctacctctgtagctgatagggtcagcttcgtcggcgctatttctgccggatttcacggacgatttgagatctgttcttccttcttcttttttcctctcctgatctgattcaactctaatctgcttcagtctctgtgttacgaactgattccgttcagtgaaaaaaaatgttgagcgtttcaagcttctgcagtttaatgggagactgaggagtcatttgagtgaaacgtttggaactttggaaacagatggagtgtcgtttggagttgaagaaaggttcttgtgatagaccaccatttgtagctgctgagaagaaggtattaactaaggaaagctcaaaggcatttacaccgggataagtttagaga

SEQ ID NO: 159698 - DNA, 423 bp, Arabidopsis thaliana columbia
ctctctctgcctcctttcggattcaaatctcatttttatctcaaccatggcgttgctcgtcgagaagacctcaagtggccgcgaatacaaagtcaaagacatgtctcaagccgatttcggtcggatctaactcagagcttgacgaacttgagattctgggtcacaaactgattccgaccagagaaaaacaatgttaagcgtttcaagcttctggagttataatgggagactgaagagacatttgagcgaaacgtttggaactatgcaaacagagggagtgtcctttggagttaaagaaaggttcttgcgatagaccaccatttggagctgctgacaaaaacgttttaacttaggtaagctcaatggcatttactccggataagtttatagacgataaacgcgggttatcttatctcgattttc

SEQ ID NO: 159699 - DNA, 383 bp, Arabidopsis thaliana columbia
cgaaattccaaccgactcaacaatgtcttcatccaacgtctgcgcctctccgtcaccgttccccgccgtcacgaagcttcatgtagactccgtcacgtttgtaccgtccgtcaagtcaccggcctcctccaatccattattcctcggcggcgccggtgtccgaggccttgatatccaaggtaaattcgtgatcttcaccgtcattggagtatacctagagggtaacgccgttccttctctatctgtcaagtggaagggaaaaactacggaggagctaacagaatctatcccgttcttccgtgaaatagtcaccggtgcgtttgagaagtttatcaaggtgacaatgaaactgccgttaacgggacaacaatattcggagaaag

SEQ ID NO: 159700 - DNA, 441 bp, Arabidopsis thaliana columbia
acgcatagtgtttagcagaaagcttcctctgattgggctgtttttgctgctgaccatcgccgcctctccagcaaatgcagatggacctgtttgcccgccgtcgaacaaactaagccgggcaagtttccctgaaggttttttatttggcacggctactgcggcataccaggtcgaaggtgcgattaatgaaacttgtcgtggaccagccttatgggacatctactgtagaagatatccagagaggtgcaataacgataacggcgatgtggccgatgatttcttccatcgttataaggaagatatccaactaatgaagaatctaaacacagacgcctttagaatgtctatcgcatggccaagaatatttcctcatgggagaaaggagaaaggagtgagtcaagctggtgtgcaattctaccacgacctcatcgacgagcttat

SEQ ID NO: 159701 - DNA, 450 bp, Arabidopsis thaliana columbia
atcgtcgtcgtatctgtgactctcgtgattttcgtattgaaaaaaatttgagcatagagacactgtgttttttgtgggtggcaactggttatgtcacggaactgctgaggaactgcaatctctggatcgagtttctctcgttctggagcttcttctgaatctaaagctcttcaaatatgttcgattaggttatctgatcgaacccatttgtctcagagacgttactctatgaaacctttaaacgctgagtcacattcacgaagcgaatcttgggttactcgtgcttcaactctaattgctcctgaagttgaagagaaaggaggagaagttgaagactttgagcaacttgctaaaaagcttgaagatgcttctccacttgaaatcatggataaagctcttgagagattcggagaccaaatcgcaattgcttttagtggagctgaagatgtt

SEQ ID NO: 159702 - DNA, 61 bp, Arabidopsis thaliana columbia
cgaagaactaacacatgtcgggacctcagagctggaaaacccgccaactcttaacccgggg

SEQ ID NO: 159703 - DNA, 447 bp, Arabidopsis thaliana columbia
ctctctctctctctctctctctctctctctttcttgtattatttctatctcccccgccgtcgaaagagaaacgtcgatcggagaacctttgaaatgtcgactggattagatatgtctctcgacgacatgatcgccaagaaccgtaagtctcgtggtggagccggccccgctcgtggaaccggatccggatccggaccgggtccgactcgccgcaacaaccctaatcggaaatcaacccgatctgctccataccaatcagccaaggcgccggagtccacctggggtcacgacatgttctccgatagatctgaagatcaccgatcgggacgttcctccgccggaatcgaaactggaaccaagctctacatttccaatttggattacggtgtcatgaacgaagacatcaaggaactgtttgctgaagttggagaacttaaacgctacaca

SEQ ID NO: 159704 - DNA, 492 bp, Arabidopsis thaliana columbia
cggaccggaacggcagggccgactcgacccacgcgtgccgccaaattcctagtggctcatggcgtcattattttatcacacggcgaagataatcgacggcaaggcgattgctcataccatcagatcagagatcgccgaggaagttcgcggtctatctgagaaacacggcaaggtcccaggactagctgtagttattgttgggagccgaaaggattcacagacctatgtgaatacgaagaggaaagcgtgcgctgaggttgggattaagtcatttgacgtgggcctaccagaggaagtttctgaagctgatcttattagcaaagttcatgaactaaattcaaatccggatgtccatggcatattagttcaactcccattgccgaaacatattaatgaggagcatatattgggtgcaatcagcattgataaagatgtcgatggcttccatcctttgaatattggtaagctagccatgaaaggcagagaacccct

SEQ ID NO: 159705 - DNA, 476 bp, Arabidopsis thaliana columbia
accggaccggcaggtccgacccgacccacgcgttcgggaatggggagacgcaaaaatggtttctatgattctgcagaagcggctcgccgcatcagtgatgaagtgcgggaagggcaaagtttggctcgatcccaacgaaagctccgacatctccatggccaattcccgccaaaacatcaggaagcttgtgaaggatggtttcatcatcaggaagccaaccaagattcactctcgttccagagctcgcaaaatgaagattgccaagatgaagggtcgtcactctggatacggtaagaggaagggtacccgtgaagctaggttgccaacaaaggtactgtggatgcgtaagatgcgtgttcttaggcgtctgttgaagaaatacagagagacgaagaagattgacaagcacatgtaccatgacatgtacatgcgtgttaagggtaatgtgttcaagaacaagcgtgtcttgatggaga

SEQ ID NO: 159706 - DNA, 417 bp, Arabidopsis thaliana columbia
  unsure (1)..(417): unsure at all n locations
tttttcttggaattaaaagtcnnagaattacctaaacaannnaaatgtgttttgggctaaaagcccttcctnnctcattgggctnnngcttttgggctcctgagccanntcgtcgcctttctccctagcaaatggcanngatggacttnttgtttgcctctgtccgtcgaacccaaacctatagctctgggccaagggtttctctctggaagggtnntttttaattnttggcaccggcttacctgcgnnngcataccannggtcgaagggtgcccgattaatgggaaactnttgtcgtggacccagctcttnaatgggacatcnntactgtagaagatatctcagagagggtgcaataacgataaccgggcgatgtggccccgttgatttcttccccatcgttataaggaaagatat

SEQ ID NO: 159707 - DNA, 428 bp, Arabidopsis thaliana columbia
gtgtgttcgagagatgtttgcctttgaagacgattccttcgtcatactcaacgatgatgcgtctgagtctgttccagtctcaggctcttttgacgccactgattctttctcagctttcgacggctcactccaagtcgaggactccgtcgacgatgtttttgcagcgccgtcttctgactacggtgcttactccaacggtgacggcatcttcggatccaacggggatcacgacggtcctatcttgccaccaccgtcggagatggaatcagatgagggatttgctcttagagaatggagaagacaaaatgcaattcaacttgaggagaaggagaagagagaaaaggaattgttgaagcaaattattgaggaagctgatcaatacaaagaagagtttcataagaagattgaagtaacttgtgaaaacaaca

SEQ ID NO: 159708 - DNA, 421 bp, Arabidopsis thaliana columbia
gaaaaggaaaaaagacaaatcaaagagagacgattcgatcgcatcaatggcagaagaaaagagcttcaagtatgtgatcgtcggaggtggtgtcgccgccggatacgcggcgagagagttcttcaaccaaggtgtcaagcctggtgaacttgctatcatttccagggaacaagttcctccatatgagcgtcctgcacttagcaagggatatatccacctcgaaaataaagctacacttccgaatttctatgttgctgctggaattgggggagagagacagttccctcaatggtacaaagagaaaggtattgagctgattttgggcacagagattgtcaaagcagatcttgctgcgaagacacttgtcagtgggactggacaagtcttcaagtaccaaactttgctagctgcaactggttct

SEQ ID NO: 159709 - DNA, 435 bp, Arabidopsis thaliana columbia
cggacgcgtgggctaatccttatcctcttctctctcgtttttattctccttcttctacaatctgttgggctcctggactcctcccagcgcttcaatatctcccaagacccaaccatcggagggagggggcgagatgatgggattgagttccttggtctttaccgagtttcacagcctcggcttctctgaccttatagtttttgttgcgccactctggattgctgtggctgccggtgttttggttggttgggtttggaggcccaagtgggcttatctcgattctaaactcttgtccaattcacctaaattcctcaatcttcagcttcccacttccatcctcaaaacttcttctcaccacgttaaccccagcctttcttacaaagagaaaactgggtttgtaacggacgaagattttaggcatctatggaagttggt

SEQ ID NO: 159710 - DNA, 491 bp, Arabidopsis thaliana columbia
accggaccggaaggcccgacccgcgcgacgcgctcacggctggtgtgacactcccttcatatttaccattttgccactacactagacaatttcgtgcttctcatttccgatcatctgataaaaacccgaatctcgtttctatcatccgagcaaaacccagaatttctcattcgcttaggtgctttgtatcatcttcaatggcgactcctcctccgacgcagagcagcgaaaccaaaccttactctgttctttttgtctgtctcggaaacatttgtcgcagcccagcggctgaaggtgtctttagagatatcgtgaagaagagaggtctcgattccaaattcaacattgattccgctggaacaattgattatcacgaggggaatatggcggatccaagaatgagaagtgctgcgaaacgtcgcgggattgagataacatcactatccagaccgatcaaggcatctgatttcagagaatttgatctcattctt

SEQ ID NO: 159711 - DNA, 229 bp, Arabidopsis thaliana columbia
tgatatcatccttcgaaacaaacacctttggctcaactagtacaagttcctcctcaaagccatcgttagttccggtatcggatagcaaacttacgcaccaaggctcttctttgagggccgcgaacagcgtcctacgctacaggatgggctctcggagatggaagagttttacatagacaccatcgagaaagtccttaagagaaacacaattctaccttcggagattgtc

SEQ ID NO: 159712 - DNA, 449 bp, Arabidopsis thaliana columbia
  unsure (1)..(449): unsure at all n locations
aaaaaatgtctcccattccaaaaccactctttnatatcttcttcctcaactatgtgtctctctcagacctcactctctcttcacctcccactcacatctctccctatctccaccaccacaaactctcaccgcttcaccacctccctcctctcccggaaaaacccatctccgtcgtctccaccatacaacttccgatcaagattcaaatactcaatggctctaatcatctcactccccataggaacaccaccacaagctcaacaaatggttcttgacactggaagccaactttcttggatccaatgtcatcgtataaagctttctccaaaaccaaaaacatcatttgatccatctctttcttcttctttctcaactttgccttgctcacatcctctttgtaaaccgagaattcccgaatttaccctgcctacttcttgagactcccacag

SEQ ID NO: 159713 - DNA, 414 bp, Arabidopsis thaliana columbia
  unsure (1)..(414): unsure at all n locations
taaaaaatgtctcccattccaaatccactcttttatttcttctcccgcaacnangagacggggggggccacacttgggggttatttctcactcacacccctccctatctccaccaccacaaactctcaccgcttcaccaccttccttctctcccggaaaaacccatctccgtcgtctccaccatacaactttcgatcaagattcaaatactcaatggctctaatcatctcactccccataggaacaccaccacaagctcaacacatggttcttgacactggaagccaactttcttggatccaatgttagcgtaaatagctttcttcagaaccaaaatcatcttttgagccatcttttttttcttcattctcatctttgccttgtccacatcctctttgtcaaccgtgaattacc

SEQ ID NO: 159714 - DNA, 404 bp, Arabidopsis thaliana columbia
aacaaatcttaaacgttttactttgtgctgcacttctctttctcaatggccgcctcaacaatggctctctcctcccctgccttcgccggtaaggccgtcaagctttcccccgcggcatctgaagtccttggaagcggccgtgtgacaatgaggaagactgttgccaagccaaagggcccatcaggcagcccatggtacggatctgaccgtgtcaagtacttgggtccattctctggcgaatcaccgagctaccttaccggagagttccccggagactacggatgggacaccgccggactttcagctgaccccgagacattcgcaaggaaccgtgaactagaagttatccacagcaggtgggccatgctcggagccctaggctgcgtcttccctgagcttttggc

SEQ ID NO: 159715 - DNA, 443 bp, Arabidopsis thaliana columbia
gagcttatcatctttgtgcttcctgcaattagttttttgctgttgatctttctcctccatcaacaaacatgggtaagacacgtggtatgggagctgggcgtaagctgaagagactccgaattaaccagaggtgggctgacaagcagtacaagaagtctcacttgggaaatgagtggaagaagccttttgctggttcttctcacgctaaaggaattgttcttgagaaaattggtattgaggctaagcagcctaactctgctatccgtaagtgtgctagagttcagcttatcaagaatggaaagaagattgctgcctttgtccccaatgatggttgtttgaactacatcgaggaaaacgatgaggtcttgattgctggatttggtcgtaagggtcacgctgtgggagatattcccggagttaggttcaaggtcgggaaggttctg

SEQ ID NO: 159716 - DNA, 487 bp, Arabidopsis thaliana columbia
tctgcgtttctttctcggggaaaaataatatcctataagaagattcgagagagagagatctgaacggtttttcgcttagtctccaatgggaacgctacagtcatggcgaagagcttacggagccttaaaagacaccaccaaagtcggccttgtccgagtcaatagcgattacgccgaattagatgttgccatagtgaaggctactaaccatgtcgagtgtcctcccaaagatcgtcatctcaggaaaattttcctcgcaacgtcagcgattaggcctcgagcagatgttgcttactgcattcatgctctctcccgacgattacacaaaaccagaaattggacggttgcattaaaagcactgctagttatacaccggcttctgagggatggtgatccgacatttagagaggagctattgaatttttcgcaaaaaggacgcattatgcaaatttctaatttcaaggatgactctagcccagtcgcatgg

SEQ ID NO: 159717 - DNA, 479 bp, Arabidopsis thaliana columbia
aaagaattcatcaaaggagagagagatcgacaatttcaccttcgtcatcaagcggtttaaccttcaagctacatcctttggtaatcgtcaacatatcggatcactacactagggtcaaaactcagctcaatcctcctgcttcaatctgcgcaagcggccatggctcaaacaacggcgaagcaatgttccagcaaaaccctagggtttacggatgtgtgatcggtgtccagagaggtcgtactgttgagatattcaacagtttcgagcttttatatgatccttctactcaaacccttgatagatctttcctcgagaagaagcaagagctctataagaaggtgttccctgatttctatattctgggatggtactctacgggaagtgatgctgaggaatctgatatgcatatccataaagctttgatggatatcaatgaatctcctgtttatgtgcttttaaaccctgctatcaatcacaca

SEQ ID NO: 159718 - DNA, 375 bp, Arabidopsis thaliana columbia
ctaaagcccatcatcgccgacggagacaccggctttggttttaccaccgccaccgtcaaactctgcaagcttttcgttgaaagaggcgccgctggggtccacatcgaggaccagtcctccgtcaccaagaagtgtggccacatggccggaaaggtcctcgtggcagtcagcgaacacatcaaccgccttgtcgcggctcggctccagttcgacgtgatgggtacagagaccgtccttgttgctagaacagatgcggtcgcagctactctgatccagtcgaacattgacgcgagggaccaccagttcatcctcggtgccactaacccgagccttagaggcaagagtttgtcctcgcttctggctgagggaatgact

SEQ ID NO: 159719 - DNA, 462 bp, Arabidopsis thaliana columbia
gaccaaagaaggatcatcctctgatcatgaggaaggttatacgaacacagactcgaaagaggcaaaaggaggaatgagccaagaaataattcaaaactcactctctgcttttgaggatattcgtaatagagaaaagcagttgatgagacaggctctctttgccaatatggcttatgtagaattggagttggcgaatcctatcaaagccttgtcagctgctacttcactcttgcaacttgcagattgttcgaagatttatgttttcctaggccatatctatgcagcggaggccctctgcttgctcaatcgacccattgaagctggtgcacatttatccgcctatctactcggacaggatgattttaaactgccatatgcgcaagaagactttgaccagtggtggaagcacacaagttctgattgtgaagagacattggatcccttcacgggaaatactccgga

SEQ ID NO: 159720 - DNA, 443 bp, Arabidopsis thaliana columbia
ctcatcgacgagctcataaaaaatggtataactttattctttactgtttttcactgggacactccacaagatttagaagatgaatatggcggctttttaagcgaaaggattgtgaaggatttccgagagtatgcagattttgttttccaagaatacggtggaaaagtgaaacattggatcactttcaatgagccatgggttttctcgcacgctggctatgacgtaggcaaaaaggcacctggtcgttgctcttcttacgtcaatgctaaatgccaagacggacgatcaggatacgaggcttaccttgtcactcacaatctccttatctctcacgcagaagcagttgaagcttaccggaaatgcgaaaagtgtaaaggtgggaagatcggaattgcacatagtcctgcttggttcgaagcacatgaccttgctgattcacaaga

SEQ ID NO: 159721 - DNA, 177 bp, Arabidopsis thaliana columbia
  unsure (1)..(177): unsure at all n locations
natgnttaagctaaacctacaaattgtataagttgcaattgcacttggactctgaccagacaaaagctagaccaggcatgcttgggtcgcagaaagcaaatcgtcatgggctgcggagacaaaacgagagctacaacagccacatattcatatttcaataatcccagttaaatataa

SEQ ID NO: 159722 - DNA, 485 bp, Arabidopsis thaliana columbia
atttgaccacaaagacaaatgcaaaagaactaaatgagtctggtttctgttctgtcctaatttctctctggcgaaagctaagaggtttcggttacggtctccatctccgatcaaatcacgaagtttctatcggaaattttcagtgatacataccgtcagagattttctttacgagagaattgtcgccgacatactaaagcagagttttgggtgggaattagtaagatttcgactttggaattgggagatctttccattatgggttctgagcaaaacgacagcacaagcttctctccttcagagccaaagctctgcgtcaaaggatgtggcttcttcggatctccatcgaacatgaacctctgctctaaatgctacagagacatccgagccacggaggaacaaaccgcttccgctaaagccgccgtcgagaaatctctaaaccctaataaacccaaaactcaaccacaacagagccaagaaatcac

SEQ ID NO: 159723 - DNA, 444 bp, Arabidopsis thaliana columbia
cgaaaccctaaatctcgacctcaaaccctgaactatggttgaaggactcgtgttgaaaggcacaatgtgtgcccacactgatatggtcaccgccattgctacaccggtcgataactccgacgtgattgtaacttcgtcgcgtgacaaatcaatcatcctctggaaactcacaaaggaagacaagtcatacggtgttgctcagcggaggatgactggtcactctcacttcgttcaagacgttgttctctcctccgatggacaattcgctctctccggatcttgggacggtgagcttcgtctctgggatctcgctaccggagaatctactcgtcgtttcgttggtcacacgaaagatgttctctctgttgctttctctaccgataaccgtcagatcgtctctgcttctcgggatcgtacgattaaagcttggaacacgcttggtga

SEQ ID NO: 159724 - DNA, 275 bp, Arabidopsis thaliana columbia
caacaaatcttaaacgttttacttagtgctgctctacgctacctcaatggccgcctcaacaatggctctctcctcccctgccttcgccggtaaggccgacaagctttcccccgcggcatctgaagtccttggaagcggccgtgtgacaatgaggaagactggtgccaagccaaagggcccatcatgctgcccatgggacggatctgaccggatcaagtacttggattcattctcaggcgaatcactgagctaccttacacaatagtttctctgag

SEQ ID NO: 159725 - DNA, 399 bp, Arabidopsis thaliana columbia
cacaaccaaaaaaaagaaaacacaaaaacaaagattatttttgcttcctcaaccatggctttgtcctcccctgccttcgccggaaaggctgtgaagcctgccgcatcagatgtcctcggaagcggccgtgtgaccatgaggaagactgtcgccaagccaaagggtccatcaggcagcccatggtacggatctgaccgagtcaagtacttgggtccattctccggcgagcccccgagctaccttaccggtgagttccccggtgactacggatgggacaccgctggtctatccgccgacccagagaccttcgccaggaaccgtgagctagaagttatccacagcagatgggccatgctcggagccctaggctgcgttttccctgagctattggctaggaac

SEQ ID NO: 159726 - DNA, 481 bp, Arabidopsis thaliana columbia
gtcttacctccagaagtcgacgacaacaatggcttcgtttatagggagttaaagtggcttcaaagaagaagccggagaaagttaccaacccattgtttgagagacgcccaaagcaattcggtattggtggcgctttgcctcctaagaaggatctttctcgttacatcaaatggcctaagtcaatccgtcttcaaaggcagaagcgtatccttaagcagaggttgaaggttcctccagctcttaaccagttcaccaagacccttgataagaatctcgccaccagcctcttcaagattcttctgaagtataggccagaggacaaagccgcaaagaaggaacgccttttgaacaaggctcaagctgaggcagaaggaaagcctgctgaatccaagaagcccattgttgttaagtatggtctcaaccatgtgacttacctcatcgagcagaacaaggcacaagcggtggtcattgcacacgatgt

SEQ ID NO: 159727 - DNA, 436 bp, Arabidopsis thaliana columbia
gcgagtcacgcgccgagttttcctcacttgttctcaattaatctctctctctttcttctctatcgctttcatttttctcctccagatctcgattccaatctctctccctctctacttccttcaacagaaatggaaacgttcctatttacctctgaatccgtcaatgaaggacacccagacaagctttgtgaccagatttctgatgcgatccttgatgcttgcttagagcaagatcctgaaagcaaagtggcgtgtgagacatgcaccaagaccaacatggtgatggtgtttggggagatcactaccgctgcgaaagttgactatgagaagattgttagatccacttgcagggagattggttttatctctgctgatgttggtcttgacgctgacaaatgcaatggtttggttaacattgagcaacagagccctgaca

SEQ ID NO: 159728 - DNA, 448 bp, Arabidopsis thaliana columbia
cgacagttatcaaagcttaagccgttttagggttttatccttttgctgagatccaatcatggcggatgttgaaccagaggttgctgctgctggagttcccaagaagaggacgtttaagaagtttgccttcaaaggagttgatctcgatgctcttctcgatatgtctactgatgatcttgtcaagctcttctcttctcgtattcgtagaaggttctctagaggtttgacaaggaagccaatggctctgattaagaagctgaggaaagcgaaaagggaggcaccacaaggtgagaagccagaaccagtgagaacccacttgaggaacatgatcatcgtccctgaaatgattggaagcatcattggagtgtacaacggaaagactttcaaccaggttgagatcaagcctgagatgattggtcactacctggctgagttctctatctcatac

SEQ ID NO: 159729 - DNA, 504 bp, Arabidopsis thaliana columbia
attcaaactaactctgcaaaaaaaaaaattactctgagcagaggagatcgagagagacaaagagagagagagagagagagagagatcttaacaaaaaaatgtctatatccatggcgttattctctccgccgatctcttcctcacttcagaaccctaatctcatccccaagatctcaacctctcttctctccaccaagcgtttctctctaatctccgtccctagagcttcctccgacaatggtacgacttcccccgtcgtggagattccgaagcctgcttctgtggctgtagaggaagttccagttaaatctccagccgaaagctcctccgcttctgaaaacggcgccgttggaggtgaagcgactgattcgagtactgagacggtaatcaaatatcagaatgcgaagtgggttaatggaacttgggatctgaaacagttcgagaaagatggcaaaactgattgggattcttgctatcgttctgaggcacagaggagaaaatggc

SEQ ID NO: 159730 - DNA, 503 bp, Arabidopsis thaliana columbia; identical to SEQ ID NO: 131404

SEQ ID NO: 159731 - DNA, 503 bp, Arabidopsis thaliana columbia
gcagagcctgagatcgaagaaggagtagaggaagatgcttatatcaaggagaacgatgatgttaatgttgaccctttggaaacagaagataaggttgaaacagaacctgtgcaacgcccacgtaaaacctctaagtttatgactaagtatgaacgtgcacgtatcctcggcactcgtgctttgcagattagcatgaatgctcctgttatggttgagttggagggtgagactgatccacttgagattgcgatgaaagagcttaggcaaaggaagattccatttaccattagacgttatctacctgatatgagttacgaggaatggggagttgatgaactgatcgtcgaagactcgtggaaacgtcaagtcggtggtgattgataaaatctggcctatgtgttttgcaaagctttctgctcttgtatggattatgaacttacgatatagtcgcatgtagaacttcttcatttgtcctattcttcaacactacaagagtcagggac

SEQ ID NO: 159732 - DNA, 455 bp, Arabidopsis thaliana columbia
cagaaaaggggagaagcaaaaatggtttctctgtatctccagaagcggctcgccgcatcagtgatgaagtgcgggaagggcaaagtttggctcgatcccaacgaaagctccgacatctccatggccaattcccgccaaaacatcaggaagcttgtgaaggatggtttcatcatcaggaagccaaccaagattcactctcgttccagagctcgcaaaatgaagattgccaagatgaagggtcgtcactctggatacggtaagaggaagggtacccgtgaagctaggttgccaacaaaggtactgtggatgcgtaagatgcgtgttcttaggcgtctgttgaagaaatacagagagacgaagaagattgacaagcacatgtaccatgacatgtacatgcgtgttaaaggtaatgtgttcaaaaacaagcgtgtcttgatggagagtatccacaagtc

SEQ ID NO: 159733 - DNA, 479 bp, Arabidopsis thaliana columbia
  unsure (1)..(479): unsure at all n locations
aacagagagaaaaagcaaaagcaaaaatggctcgttctttcgctattgctgtgatctgtatcggcctcatcgccggcgttactggtcaagctccgacttcaccaccaaccgctacaccagctccaccaactccaacaactcctccaccagcagcaactcctcctcctgtctcagcaccaccaccagtcacaacatctcctcctccagtcaccactgctcctcctccagcaaatccaccaccaccagtctcttctcctcctcctgcttctcctccaccagctactcctcctccagtcgcttctcctcctcctcccgttgcttctcctccaccagcaactcctcctcccgtcgctactcctcccccagctcctctagcttcccctcctgctcaagttccagctccagcaccgaccacgaagccagattctccatctccatctncgtcatctagcccacctcttccatcaaggcgacgctct

SEQ ID NO: 159734 - DNA, 338 bp, Arabidopsis thaliana columbia
  unsure (1)..(338): unsure at all n locations
cggacgcgtgggtttaagggtagtagagttttagtangtttcttctgntngntatctttagatgatatgccattttgttcgttttggtttttgcgcaaaagttgttaaagacttgcaaagtagacagtaatttcaatttctgttttctacaacaaaaaacacttgcttttcttgagccaatcttatctatcgagacgtttcaatttcaatgcttgagccttgtttagtttgctatcaaaaaaaaaaaaataaaaaaaaaaaaaaaaaaaaaaaaaaaaaaaaataaataaaaaaaaaaaaaaaaataaaatataaattattatataaaataaataata

SEQ ID NO: 159735 - DNA, 455 bp, Arabidopsis thaliana columbia
ctctcacatatttcgaaatcgtcacactttgtttcgtgttgtcttctctctctcataattcttgagtttcacgtctcaagatttgatcacttctgccaattttccagattgatctctctaattatggcttccatgagtttcgccttgaatcgcttctctggactctcctctaaaaccaccttatcagctgacttcgatccatcctctcgccggagttttctaccgccgactagagttggacttaagatctcttccgccgccgaatcggagcctgatctcagtgtcactgtaaatggcctgaaaatgcccaatcctttcgtgatcgggtcgggtccaccgggtaccaactacaccgtcatgaagagagcctttgatgaaggttggggggccgtcatcgccaaaaccgtatctttagatgcatccaaagttatcaacgtgacacctagatatgctcg

SEQ ID NO: 159736 - DNA, 477 bp, Arabidopsis thaliana columbia
ctcacagacaaatctttttcacatctctttgcaatttcttgagaattcattcaagttacataaaaagctgagagcaatgaagaaaattgtgttaaagctggatttgcatgacgatagggcaaaacaaaaggcccttaaaacggtttctactctcccaggaatcgattccattgcaatggacatgaaggagaagaaattgacggttattggaaccgtggatccggtaaatgtagtaagtaagctaagaaagtattggccgatgacggatatcgtactagtgggacctgcgaaagagccggaaaaggagaagaaggaggagccgaagaaggaaggtggtggcgagccgccaaagaaagaaggagaagctccaaaagaagaagggaaaaaggaaggagaagcaccgaagaaggaagaagagaagaaagaaggtggcgataagaaggaaggagagaagaaagatcaaccacaagcgcagcc

SEQ ID NO: 159737 - DNA, 477 bp, Arabidopsis thaliana columbia
gagaaatctctagatcgcttgtggattcgaagtttctctcacggtcggttcttgacgacggatcaagctctattcctctagtatcatctaatccatcgagcaattctcattttgatcttccgttttcatcatcttctggaatcaattttgctcttgttaaatctgaaagttctgaggataaaatcatgaattccaacttcgggaagagatcatccggatcgaccaatagctttgatttcgatctggggcttggatcgagccaaggtagacctctgaatggtcagaagagccaaacatcttcttattcgagctcgaattcgcagccgagacctgcgtggcagcctggtaagccgtcgtggacgcatcaacctgcaccgaagcagagtacgatccgatctgagatcggaagtggaccgacttcaatggtgggtgatattcatggtaagaccgtggggtcagcttcgggatcgggttcgg

SEQ ID NO: 159738 - DNA, 506 bp, Arabidopsis thaliana columbia
  unsure (1)..(506): unsure at all n locations
cggtcgaccacgcgtccgcggaaagcggtagatcgctngtggattttttgaatgctctcacggacggagctaagacgacaggagcgaagctttatgcactgtagtatgcatctaatccatgcgagcaattgctcagttagatgcttccagacttcatcgatctgtctggacatcaatctttcgctcttcgggaaatcctgaaagttcgtgagtgatcaaaatcatgaatttccaacgttcgggaatgagatcatgtcggatccgaccaattagctttgagtttcgacatgggggcttggatccgagccacaggtagtacctctggaatggtcacgaagagccaaacatctatcttattcgagctcgaattcgcagccgagacctgcgtggcagcctggtaagccagcgtggacgcatcaacctgcaccgaagcagagtgcgatccgttctgagatcgggagtggaccgacttcaatggggggtgatattcatggtaagacgggggg

SEQ ID NO: 159739 - DNA, 506 bp, Arabidopsis thaliana columbia
cggacgcgtgggttttttttcccttctcccaatttcatcttctccgaaaacctttcttctctcaaatttctgtgaaaacatgtctgacgacgagcaccactttgaggccagcgaatccggagcttccaagacctatcctcaatcagccggtaacatccgtaaaggtggtcacatcgtcatcaaaaaccgtccctgcaaggttgttgaggtttcgacttccaaaactggcaagcacggtcacgccaaatgtcactttgttgctattgatatcttcactgctaagaagcttgaagatattgttccatcttcccacaattgtgatgttccacatgtgaaccgtgttgattaccagttgattgatatcactgaggatggcttcgtgagccttctcactgacagtggtggcaccaaggatgatctcaagcttcccaccgatgatggtctcaccgcccagatgaggcttggattcgatgagggaaaggatattgtggtgtctggcatgtctt

SEQ ID NO: 159740 - DNA, 432 bp, Arabidopsis thaliana columbia
cgacttttgcacatttctagggttccaatcaatttctatctgcaacaaaaatggctaatcgtttcagatcagggatctccttcttcaagaccatcgccgcaacagattctgtctcctccgttagatccaagtcgcttttcccagcgttgagaacttatgcaactgcttctgctcaaacaaccgctaatgttaaggtgcctattgctttagttggtgaaaatgggaactttgcttcatggctatacattgcagctgtgaaaatgaattccttggaaaagattgagacggatctttctgagatgattgaggcaatgaagacagctcctatttttgctcagtttacaaaggatccctctgttcctagagggacaagattggctgctattagggatgcttgtgatcaagcaaagtttgccgaacccactaagaact

SEQ ID NO: 159741 - DNA, 465 bp, Arabidopsis thaliana columbia
gtaaagaaactgcgacaagagaaagaagattgtctttggagaagagagagagtaacgatggaagatattcataatctcgatatagagaaaagtgatagatcgatttggttgatgaagtgtcctgtagttgtagacaaggcatggcacaagatagcagcttcgtcgtcttcttcttttgcttcctcggattctcctcccgacatggcaaagattgttcgcgaagttgatcctctacgggacgattctccccccgagttcaaaatgtatatggttggtgctgagtatgggaacatgccaaagtgctacgctttgaacatgttcacagactttgttccgatggggggcttttccgatgttaatcaaggttgtgcagctgctgaaggaaaggttgatcacaaattcgatatgaagccatatggtgaaaccattgaagaatatgctaggctttgtcgggagagaacgagc

SEQ ID NO: 159742 - DNA, 506 bp, Arabidopsis thaliana columbia
  unsure (1)..(506): unsure at all n locations
aaattttctaagtgtctcataaaaaatgacgagattcggtttagctcttttgatgattcttgtgattcaagggcttgtgaccttttcagaagcacaattgaagatgggattctacgaccaaacgtgcccttacgcagagaagatcgtacaagatgttgtcaaccaacatataaacaatgcaccctctttggctgctggcctaattaggatgcattttcatgactgcttcgttcggggttgtgatggttccatcttgatcaacgcgacatcgagcaaccaacaagtggagaagcttgctcctccgaatctaactgtgagaggtttcgattttatcgataaagtaaagtctgctctagaatcaaagtgccctggaatcgtctcttgcgctgatatcatcacacttgctactagagactctattgttgctattggtggaccgacatggaacgttccaacggngcgcagagacggacgtatctctaactttgccgaggctatgaacaata

SEQ ID NO: 159743 - DNA, 450 bp, Arabidopsis thaliana columbia
ctcgccggaagtactcgtaacaaatctcagcccgttaactcggttcctaaaccggacacatctcctttatcggatacagtaaaagaagagattcatctttctccgacgacaccgttgaaaggaaacgatgacgttcaagaaacgaatggagatgaagatatggttggtcaagaagtcaacatggaagaggaagaggaggaagaagaagtggaagaagatgatgaagaagaagaagatgatgatgacgtggatgatcttttgataccaaatttagcggtgagagatcgagatgatttgttcttcgctggaagttttccatcttggtccgccggatccgccggtgacggtggtggatgatgaaaacgaataaaatctcaatttacaatttacaaaaagaaaaaagtcagtttttaattattatttttttttgttcaagttttaacaaacaaa

SEQ ID NO: 159744 - DNA, 469 bp, Arabidopsis thaliana columbia
  unsure (1)..(469): unsure at all n locations
gccgtgaggaatctgtcatgaaacgtaccacacttgtttttaacacctctaacatgcctgtggctgctcgtgaagcctcaatttacacaggaatcacaatcgctgaatattttagagatatgggctacaatgttagtatgatggcagactcaacttcccgttgggcagaagcattaagagaaatttcaggacggctggctgaaatgcctgctgacagtggatatccagcctatctagcagcacgtttagcatctttctatgaacgtgctggtaaagtaaaatgtcttggtggaccagaacgtaacggaagtgttacaattgttggtgcagtttcgcctcctggaggagacttttcagatcctgtgacttcagcaacccttagtattgtgcaggtcttctggggtttggacaaaaagcttgcccagagaaaacattttccctctgttaatnggttgatttcttactcaaa

SEQ ID NO: 159745 - DNA, 495 bp, Arabidopsis thaliana columbia
aaaattttgcaatatattcattctgcttatagattattgtgtcgaccttttttctctcacttacccaataagagcttttttcgcgttttccaccgcaaccaccgtcaccttcaaccgccggagccgccgcaaggaaggctcatcatccgccgtggcaattttttgaggtgtacaaagcattgcctatttgacgaaccaggaaatggttaaaaggcatggagagttttgatttacaagatatatcatgtcgcagtgcatagacggtttcaagcatgtatgctcctcttttttccggtgttttgatatcgatatttacaaacaatctggaggccttggtgaccctgaacttcttgcgagagagacagtttttagcgtgagtgaaatagaggctctctatgagctgtttaagaaaatcagcagtgctgtgattgatgatgggctaataaacaaggaagaaattcagttagccttgttcaagacaaataaaaaagagag

SEQ ID NO: 159746 - DNA, 509 bp, Arabidopsis thaliana columbia
ggaacgagaagaagaagaagagtgaacaatgaatatcggtgcagggaacacgaacacaaaactaatccttcttcatccttacatccaaaaacaaacgagcacgactcgtttatggcttctcgctttcgtctctttcttcaccatagtttttctcctcactcttctctacactagagacacaatcccttccaaaaacacctccgtcgccgcagccgtagctgcagtcgtcaccggaggatccacaccttcagcatcatctcccatctccaactccaacttaccaactagtgcaatcaacgctttgcttcactacgcgtcaagatccaacgatagtttccacatgtcttacggagagatgaaatcaatctctgacgtcctccgccgctgcgctccaccgtgtaatcttctcgttttcggactcacacacgagactctcctttggaagtcgttaaaccacaacggtagaacagtgttcatcgaggagaatcgttactacgcggcttacttcg

SEQ ID NO: 159747 - DNA, 501 bp, Arabidopsis thaliana columbia
cggacgcgtgggctccgacttcgtcttcctcatttatcatcgtcgtcgtcaaccttatttatctcttaatttatcattaaaaccaaaaaaccaaaaaaaaagccttagctttcgtttcttcaatcccagcaaaaaaaatggctcaggttcaagctccttcttcacattctcctcctcctcctgctgttgttaacgacggggctgcgacggcttctgctacccctggaatcggcgtcggcggcggtggagacggagtcactcacggtgctctttgttctctctatgtcggagatctggatttcaatgtcaccgattctcagctttatgactatttcaccgaggtgtgtcaggttgtatctgttcgtgtttgtcgtgatgctgctaccaatacttctcttggttatggttatgtcaactacagcaacaccgacgatgcggagaaggcaatgcagaagttgaactacagttatctcaatgggaagatgattcggattacttact

SEQ ID NO: 159748 - DNA, 496 bp, Arabidopsis thaliana columbia
  unsure (1)..(496): unsure at all n locations
gaaaccctaatcggcgacaatgggtatttctcgttactctatccacaagaggcgtgccactggaggcaagcagaagcaatggaggaagaagcgaaagtatgagatgggaaggcagccagccaacaccaagctctcaagcaacaagacggtcagaagaataagagttcgtggtggaaatgttaagtggcgtgcgttgaggctcgatactggtaactactcgtggggaagtgaagcaactacccgcaagaccagagtccttgatgtggtctacaatgcctccaacaatgagcttgtacgtactaagacacttgtcaagagtgctattgttcaggttgatgctgctccgttcaagcagtggtacctctcgcactatggtgttgagcttgggcgcaagaagaagagtgcttcttccaccaagaaggacggagaggaaggtgaagaggcagctgttgcagctcctgaggaggtcaagaagagcaaccacctnctgagaaag

SEQ ID NO: 159749 - DNA, 494 bp, Arabidopsis thaliana columbia
cgagaagctgaatcatcaatggctctggatgcattcttcttcatcgtctctctatttcttctgtttccgtcaccatccgcgtcagaatccactactcagttttgtagtgcagggagagagaatggtgtgggatcttgtggggtttcatcgacgaggattttgattaaaggaggtactgttgtcaatgcacaccatcaagaacttgctgatgtttatgtggaaaatggtattattgtcgctgtgcagccaaacattaaggttggggatgaagtcactgtcctcgatgctactggaaagtttgtcatgccaggaggaattgacccccacacgcacctcgccatggaatttatgggtaccgagactattgatgatttcttcagtggtcaggcagcggcattagctggtggaacaactatgcatatagactttgttatacctgtcaatgggaatctggtggctggttttgaagcctatgaaaacaaatctagagaatc

SEQ ID NO: 159750 - DNA, 512 bp, Arabidopsis thaliana columbia
  unsure (1)..(512): unsure at all n locations
attcagcagctgaagaagatcccactaaaagaacaacgtgtgcctcaagagcgtttacacttgaaaaccttgaagtgtagggttgataatgaagagatatccttcctggagtccttcttgtcacctatacggagttgggccgataagcagctgggcgactaccatctgcattttgccgagggttcacttgtcatggaggatacagtcacagttgcaatgataacttggaggctcttgttggaggaatctgatcgagcgatgcattctaactcttcagatcgagagcaaattgaatcctacgttttatcttccatcaagaatacgttcacaaggatgtcacttgccattgatagatcagacagaaataatgagcaccatttggcattgcttgctgaggagactaagaaacttatgaaaaaagactctaccatctntatgccaattntatctcagaggcacccacaggcaattgcgttttctgcatcccttattcacaaagcttatgggaacaa

SEQ ID NO: 159751 - DNA, 439 bp, Arabidopsis thaliana columbia
  unsure (1)..(439): unsure at all n locations
aacagcagctgaagaagaacctacnaaaagattttcgttggcctcaagagccganacaccagggaacgttgaagtggagggttttttttgaacacatatacccccgggagnccttcagggcacctatacggagttgggccgataagcagctggacgactaccatctgcatatggccgagggttcacttgtcatggagagatacagtcacagctgcaatgataactcggaggctcttgttggaggaatctgatcgagcgatgcattctaactcttcagatcgagagcaaaatagaatcctacgttttatcttccatcaataatactgtcacaaggatgtcacttgccattgatagatctgacagaaataatggacaccatttggcatagcttgctgaggagaccaagaaactaatgaaaaaggactctaccatctttatg

SEQ ID NO: 159752 - DNA, 441 bp, Arabidopsis thaliana columbia
ccctgacagaattcccgtgattgtggtgaaggctggattatgtgatgttcctgacattgacaagaagaagtatcttgtaccagctgatctaacagtgggacaatttgtatacgtggttcgtaaaagaatcaagcttggagctgagaaagctatttttgtctttgttaagaacacattgcctccaactgctgcattgatgtctgcgatctatgaagaacacaaagatgaggatgggttcctctacatgacttacagtggagagaacacttttggatctcttaccgttgcttgaataaaaatcgatctttggatgactttgatgtacatacataaatcaggaagataaagatgtacattgcttccttcttttctctggcttttaactttgctttggatgtttggatatctttccctttgggtttattaatcgtcagaaacttc

SEQ ID NO: 159753 - DNA, 486 bp, Arabidopsis thaliana columbia
gaagtattctagcccctctcaagctcaaagctttatcgtagaaactgcagctctgcactctggtgatagaagctcccagatcgcatgtgcgagtctgttcaaaagcttctcatctacagctgctgatattatgagcagtcatcagtcggctattgttccagctatatttatttccagatttgaggatgaaaaacagatttcgagtctctttgaggaggtgtgggaagacatcacaagtggtgaaagggtcacactacagttgtttctgcaagaaattgtgaatcatatctgcgagagcatcacatcatcctcgtgggcaagcaagaagaagtctggtaaggcaatttgcaaactaactgaagtcttgggtgaatcattatcgccacaccacaagagattgctacaatgtcttgtcaatgaaattcctggacgtttattggagggaaaggatgctcttttggatgccctaggtgctctttcagtcgc

SEQ ID NO: 159754 - DNA, 507 bp, Arabidopsis thaliana columbia
  unsure (1)..(507): unsure at all n locations
gtggacccaagaattgcaatcaacatggaccctttcacttccaagacgtttgacaacacttacttcaagaatcttcaacaaggcaaaggtctcttcacctccgatcaagttctcttcacggatggtcgctctaggcccaccgttaatgcttgggcctcaaactctacggcctttaaccgcgcttttgtgatagccatgaccaaacttggccgtgttggagttaagaatagcagcaatggaaacatccgtcgtgattgtggtgcgtttaactagagctggtaatgggaaaatataagttgtcttatctcctattttcctttcgttttattaatgtttgaatgttcattttgacgatgagaagatattattggtttttcatttgttttgtttatgtcttcattttaagaaggcaattgtatctgatcctctctactttgtatctccaacatgtntattctcgctacaaatttaaataactatatactattcaatttttcctattataat

SEQ ID NO: 159755 - DNA, 439 bp, Arabidopsis thaliana columbia
cacagaaaaacctagaaagctctagagagaaagatagagagagatggaaggtaaagaagaagatgttagagtcggagctaacaagtttccggagaggcaaccgatcggaacttcggctcagagtgacaaggactacaaagagccaccacctgcgccgttgttcgagcccggcgagctagcttcatggtccttctggagagctgggattgctgagtttatagctacgtttttgttcctgtacatcactgttttgactgttatgggtgtgaagaggtcaccgaacatgtgtgcttccgtcggaatccaaggtatcgcttgggctttcggtggtatgatcttcgctctcgtctactgcaccggtggtatctccggtggacacatcaacccagcggttacgtacggtttggtcttagctaggaagcttccgctcacacgagct

SEQ ID NO: 159756 - DNA, 457 bp, Arabidopsis thaliana columbia
attttcgtagccgcaagactcctttcagattcttactttctgctatgggtaaagagaagtttcacattaacattgtggtcattggtcatgttgattctggaaaatcgaccacaactggtcacttgatctataagcttggtggtattgacaagcgtgtcatcgagaggttcgagaaggaggctgctgagatgaacaagaggtccttcaagtacgcatgggtgttggacaaacttaaggccgagcgtgagcgtggtattaccatcgatattgctctatggaagttcgagaccaccaagtactactgcacagtcattgatgccccaggacatcgtgatttcatcaagaacatgattactggtacctcccaggctgattgtgctgttcttatcattgactccaccactggaggttttgaggctggtatctctaaggatggtcagacccgtgagcacgctct

SEQ ID NO: 159757 - DNA, 249 bp, Arabidopsis thaliana columbia
  unsure (1)..(249): unsure at all n locations
gcgtccattccactcttgtaatccactgttangtcgaatcaaataacaaagatttgcaaaacgctggattgttacttgatacctcggatttccccgcccggcccggaaaagggattcagggctgagaccatgagaagaggattctgatgtgcaacgccctacgcaagagaggaggctgcgtagtcaggatcagcgattgggagtagatttggtactacttactcttgtgttgatgtatacaagattggc

SEQ ID NO: 159758 - DNA, 97 bp, Arabidopsis thaliana columbia
  unsure (1)..(97): unsure at all n locations
tctctctcgatatcatctaaatcacnctcgatctcaatnccgcaaaatggctgacaagaagagcagaatcggaatcaacggtttcggaagaatcggc

SEQ ID NO: 159759 - DNA, 504 bp, Arabidopsis thaliana columbia
cacaatcacaagataggaaaattgatccacaaataatcgtctgaatgaagacaacagttgtttatctggtgattctatgtctcattgtttcatgtaccaatggagaaaccaaacatgtaagaaaaattaactccgatggatccgaagcttggggatacgtcgaagttagaccaaaagcacacatgttttggtggcattataaaagtccatatagagttgaaaatccttccaagccatggcctatcatcctctggctccaaggtggacctggagcttcaggggttggtatagggaattttcaggaggttggaccattagacacatttctcaagcccagaaactcaacttggttgaagaaagccgatcttttgtttgtggatagtccagttggggcagggtacagtttcgtggagggcaatcaaaaggatttgtatgtgaaaagtgatgaagaagcagcacaagatttgaccaaactgttgcaacaactcttcaacaaaaaccaga

SEQ ID NO: 159760 - DNA, 449 bp, Arabidopsis thaliana columbia
gaagacgtggaggccgtgcctcggaagaaacgatatgggttccagtgaccaaactaggtcgtctagtggctgacaataaaataacgaagctagagcagatctatcttcattctctcccagtaaaggagtaccaaatcatagatcatcttgttggtcctacgttgaaagacgaggttatgaagatcatgcctgttcagaaacaaaccagagctggtcaaaggactagattcaaggcctttgttgttgttggtgatggaaatggtcatgttggtttgggtgtcaagtgttctaaggaagttgctactgccattagaggagctattattcttgctaagctatcagtggttccggtgaggagaggttattgggggaataagattgggaagccacacactgtgccttgtaaggttactggtaaatgtggttctgttactgtgagaatggttcct

SEQ ID NO: 159761 - DNA, 246 bp, Arabidopsis thaliana columbia
  unsure (1)..(246): unsure at all n locations
ccggacgaccccgcgccgaaacgggaggccgagcccgaagaaacgattgggtgccagcgaccaaacnaggncgcggggcgccgacattaaaagggcgaagcgcgagcccaacgatcggcattcactcccaggaaaggagcaccaaaccagagagcatcgacgcgggcccacgcggaaagacgaggaaaagaagaccaggcctggacagaaacaaaccagagccggccaaaggactagacacaaggc

SEQ ID NO: 159762 - DNA, 518 bp, Arabidopsis thaliana columbia
ctttagcacggtgcgacaagatggcgagctcagtgactttgcttctatggagtcttcttcttctcggtacactaagcgctattcaggccaaaaagtctaaggaaaacttaaaggagatcacacacaaggtttattttgatgttgaaattgatgggaaagcagctggtcgtattgtcatgggtctatttggcaagacagtccccaaaactgtagagaatttccgagctttatgcactggggagaaaggaataggtaagaatgggaaggcgctccattacaaggggagttcatttcataggatcataccaagctttatgctccaaggaggcgattttacacatggaaatggaatgggaggagaatctatctatggtgagaagtttgctgatgagaacttcaaactcaagcatactggtccagggttcttatcaatggcaaatgccggtcaagataccaacggatcacagtttttcatcacaactgtaacaaccaagctggtggatgggcgacatgtggta

SEQ ID NO: 159763 - DNA, 278 bp, Arabidopsis thaliana columbia
  unsure (1)..(278): unsure at all n locations
aagtctaaggaaaactnaaaggagatcacacacaaggtttattttgatgttgaaattgatgggaaagcagctggtcgtattgtcatgggtctatttggcaagacagtccccaaaactgtagagaatttcctagctttatgcactggggagaaaggaatatgtaagaatgggaaggcgctccattacaaggggagttcaatttataggatcataccaagctttatgctccaaggaggctattttacacatggaaatggaatgggaggagaatctatcta

SEQ ID NO: 159764 - DNA, 494 bp, Arabidopsis thaliana columbia
aatttttggtattaacttgttataagaaatcttatattaaatttggttaggtctacttcggatgttttgcattcggtataggagggctaccttgggtcattatgtctgaggtaaataacatattttaatttatataaatcatatagttagacgttatgaaagaaaaaaaaaagtttactgtgttttttgctgttgttgttgttgttgttgcagatctttccgataaatataaaagtttcagcaggaacaattgtagcattaacatcatggactagtgggtggttcgtgagttacgctttcaactttatgtttgaatggagcgcacaaggtctttattttctctattacttttttattaatttggataaaacaatttaccaaaaaaagttaagagttatctttataaaaatacacaaatcaaacataaagttatttaaaaatcgtgttcgaattttgacatttgtatcaaacaggtttagatgtgcaaaatgtgc

SEQ ID NO: 159765 - DNA, 498 bp, Arabidopsis thaliana columbia
  unsure (1)..(498): unsure at all n locations
ggaagctctctctgtgttcaaaacaagtttatgctanctatagagacgaaacaaaaagagagagcgtactttaaagtttccgatatggctctctcgtttggagctaacagtaccgttgtgttggcgatcatcttcttcggatgtttatttgcgttgtcctctgcaatagaagaggctacgaagttaggatcagtgatagggatagatcttggtactacttactcttgtgttggtgtttacaagaatggtcatgtcgaaattattgccaatgaccaaggaaaccgtattacaccttcatgggttggttttactgactctgaaagactcattggtgaggctgctaagaatcaagcagctgttaatccagagaggactgtcttcgacgttaagagattgatcgggcgaaaatttgaggataaggagggtcaaaaggataggaaacttgtaccttaccagattgtgaacaaggatggttagccatacattcaagtcaagatc

SEQ ID NO: 159766 - DNA, 458 bp, Arabidopsis thaliana columbia
  unsure (1)..(458): unsure at all n locations
ctcttttccagaactagctctctctctctctttctatcatctcctcaccgcttcctaaatctctatagcggtcttccttccctcctttgtttccgggctgttccttaatcactatctctttctctttcttctgccatcgccaaaccttatctgggttttgcttcttatttgaagatttatatgggctgaactaggaatttcatgggagttgtggaggatactgaacctcctttgaaacgtgctaagaggcttgctgacgaaccgaacggcttctccgcgaactcgtctgttagaggtagtagtgtgaacagcaactctttgggagacctgatggcaaggcctctgccctcccaaggggatgacgaaactatcggctccaaaggggtcattagaaaatctgaattcgntaggattatcactagggctctntattctcttggatatgataaaacccgggc

SEQ ID NO: 159767 - DNA, 468 bp, Arabidopsis thaliana columbia
gcgaatcttcgaaaatgggtgcgtacatgtatgtatctgagctatggaggaagaaacagtccgatgtgatgagattcctccagagggttaggtgctgggagtacagacagcaaccttcgattgttcgtctcgtcaggcctactcgtcctgataaggctcgtcgtttgggttacaaggccaagcagggctttgttgtgtaccgtgtacgtgtgagacgtggtggacgcaagaggccagtgcctaagggtattgtgtatggtaagccaacaaaccagggagtgacacaactcaagttccagcgtagcaagcgttctgttgctgaggagcgtgctggcaggaaattgggtggtctcagagttgtcaactcttactggctcaatgaggattcgacctacaagtactacgagatcatcttggttgacccagcacacaatgctgtgcgtaatgacccgagaatcaactggatct

SEQ ID NO: 159768 - DNA, 483 bp, Arabidopsis thaliana columbia
tccagacgaaaaatgggtgctttcaggtttcactagtaccaggttgtgggaagagctctcccgacagagaaggatgtgcagtctaagatttacaggatgaagctctgggctacgaacgaggttcgtgccaagtccaagttctggtatttcttgaggaagctcaagaaggtgaagaagagtaatggacagatgctcgccatcaacgagatctatgagaagaacccaacaacgatcaagaacttcggtatttggttgaggtaccagagtagaactgggtaccacaacatgtacaaggagtaccgtgacaccactcttaacggagctgttgagcagatgtacactgagatggcatcccgtcaccgtgtcagattcccttgcattcagatcatcaagacagccactgtcccagccaagctgtgcaagagagagagcactaaacagttccacaacagcaagatcaagttccccatggtgttccgcaag

SEQ ID NO: 159769 - DNA, 459 bp, Arabidopsis thaliana columbia
cggtattgttggacaggaggttgttaaagcttgctctgtttataatttcatcctctcttccagtttttctactttgattcagtggagtcactcccctctgaacctgtggactcgagtgactttgcaccaagaaacagccggtatgatgcccaaatatctgtatttggggccaagttccagaagaaacttgaagatgctaaagttttcacagtagggtctggtgctcttggctgtgagttcttgaaaaatttggctctgatgggggtttcttgtggaagccaagggaagctgacagtgacagatgatgatatcattgagaagagtaacctcagtcgtcaatttctgttccgcgactggaacattggacaggctaaatccacagttgctgcttcggctgctgctgttataaatcctcgcttcaacattgaggccctgcaaaaccgtgttggcgcggagact

SEQ ID NO: 159770 - DNA, 454 bp, Arabidopsis thaliana columbia
gcaacttggtgttattcctggttttggaggaacttagcgtcttccgcgtcttgttggtctcaccaaagcccttgaaatgattttgacatctaagccagttaaagctgaggaaggtcattctttgggtcttattgatgctgtggtgccacctgcggagttagtaaccactgctcgtcgctgggcccttgacatagtcgggaggagaaaaccatgggtatctagtgtttccaagactgataagttacctcctcttggagaggcaagggagatactgacgtttgccaaggcacagacactcaagcgtgcccccaatatgaaacaccctttaatgtgccttgacgctattgaagtaggtattgtttctggtccaagggctggtttagaaaaggaagctgaagtcgcctcacaagtggtaaaactggataccaccaaaggcttgaatcacgtcttcttt

SEQ ID NO: 159771 - DNA, 537 bp, Arabidopsis thaliana columbia
  unsure (1)..(537): unsure at all n locations
caaaatatggatagtcacaaatggagtctaggtttcacattacttgctttcctcttcatcacttcctgttccgctgagctcatcattaaacaggtcacacagggcagaggaatagagtacaacaactcttacagtctcacgtcgaatcttggagtgacgacaagagagttgagagacgagcgaccatcaagtaagatagtgacaatcacaagcttctctgtgattaaggacagaggagaaccctatgaatcatctatttttgaggctgccggttacaaatggagattagttttgtacgtgaagggtaatccgaaaggcggtataaataatcatatttcactttacgcgaggatagaagagacagaaactcttccaagaagggtggaagtgaatgttgatctcaaactctttgtccacaatcggaagttaaagaaatatttgtctgttacagatggaacagtgaagcgatacaacgatgcaaaaaaagagtggggattcacacaatngatttcttttctacattctacaacgcgaacg

SEQ ID NO: 159772 - DNA, 482 bp, Arabidopsis thaliana columbia
atctagggttcttcttcgtacttgcagatttcgtctccttattcactacgatctgtgaagatgttctgcgctcagaacaagatcaagaaggacaagaatgctgagccaacagaatgcgaggagcaagttgctcaggctttgtttgatttggagaacactaaccaggagttgaaaagcgagttgaaagatctctacatcaaccaagctgttcacatggatatctctggaaaccgcaaagctgttgtgatttacgttccattcagattgaggaaagctttccgcaagattcatccccgtctcgtcagagagcttgagaagaagttcagtggaaaggatcttatctttgttaccacaagaaggatcatgcgtccccccaagaagggtgctgctgttcagaggccacgtaacagaactcttacctcagttcatgaagctatgcttgaagatgttgctttccccgctgagattgttggaaagcgtac

SEQ ID NO: 159773 - DNA, 447 bp, Arabidopsis thaliana columbia
gaacgtagagaaggaaatcaagcttgtcctcagtgcaaaactcgatacaaaaggattaaaggtagtccacgggttgatggagatgatgaagaagaagaagacattgatgatcttgagtatgagtttgatcatgggatggaccctgaacatgccgctgaagccgcactctcttcacgccttaacaccggtcgtggtggattggattcagctccacctggctctcagattcctcttttgacttattgtgatgaagatgctgatatgtattctgatcgtcatgctcttatcgtgcctccttcaacgggatatgggaatcgcgtctatcctgcaccgtttacagattcttctgcacctccacaggcgagatcaatggttcctcagaaagatattgcggaatatggttatggaagtgttgcttggaaggaccgtatggaagtttggaagaga

SEQ ID NO: 159774 - DNA, 423 bp, Arabidopsis thaliana columbia
  unsure (1)..(423): unsure at all n locations
gaacgttgagaaggaaatcattctcgntttcagttcattttctccanacaaaaggangaagggtgagccacttttggatggtttttattaanaacaagaagacattgatgatcttgagtatgagtttgatcatgggatggaccctgaacatgccgctgaagccgcactctcttcacgccttaacaccggtcgtggtggattggattcagctccacctggctctcagattcctcttttgacttattgcgatgaagatgctgatatgtattctgatcgtcatgctcttatcgtgcctccttcaacgggatatgggaatcgcgtctatcctgcaccgtttacagattcttctgcaccttcacaggcgagatcaatgtgtccttataaagatattgccgaatattggttattcaagtgtttgcttgt

SEQ ID NO: 159775 - DNA, 454 bp, Arabidopsis thaliana columbia
cgaaaaatattcacagatattttcgatcttaaccgaaataatgaagaaatggctggaccatcgacaacttcaaacgcaccaaagcagaggaagagagtcgaagccgagactagcagcaacacttctactaccttacgtcgcgctaaagacggaagcgctttcgctctctgtgaaggatgtaacaagagtgtagctgtagcgcttataagcatgcacaattgcagtctcgatgctaagatcagagtgaatctcgaagcacaagttgtggagacacaagcagaggctaagaagaagcctgcagagaagaagaagacaacatctgatggacctaagccaaagagacttaagaaaaccaatgatgagaagaagagctcgtctacttcaaacaagcccaagcgacctcttaccgctttccttatcttcatgagtggactccgtaaaacgtttaagtcag

SEQ ID NO: 159776 - DNA, 392 bp, Arabidopsis thaliana columbia
tacgattttaccactgcttttgcaggtgtaacctccttgctcgttcactcaaaaagagattgagatatcttacagaccgcattcaaaacggtggcactgaagttgttgaggctaaagctggagcaggttctgcaacactatccatggcatatgcagcagtggagtttgcagatgcttgcctcaggggtctacgaggtgatgcaaacatcgttgagtgcgcatatgtggcatcccatgtgactgagcttcccttcttcgcatcgaaggtgcgtctgggacgatgtgggatcgatgaagtgtacggccttggaccattgtacgaatttgagacgatgggattagagaaggcagaggatgagctttcagcaagtattcataaaggtgttactttt

SEQ ID NO: 159777 - DNA, 340 bp, Arabidopsis thaliana columbia
  unsure (1)..(340): unsure at all n locations
gcacgnncagaccaatagcgagagggtataatacagattgcattgtaagtcnacaagcaggctttagaaatgagtgaaacctgaaactgtacgagccaaacttctaaataacatcccacgagattccggaaacatctagagaaaaagggaacacataccattccgcaacgagattccgcgcgtacgagatagagatagagaaaaacctgagatgttaatcttattgggctaagcttaatgctcttaaccctcaccagcctctcactgattcgaaaaactctcaaaataaagaggtattcccaatgcaaggaccgcaacatacacaaatgcatgaaaacgc

SEQ ID NO: 159778 - DNA, 411 bp, Arabidopsis thaliana columbia
cttccctcctaatgttgtcttggagcttcttaagcttgtttatcggttctgctgcgatgaattgaaatccgcttgtgattcgcatttggcacatcttgttaattctctggatgaggcaatgttgttgattgagtacggattagaagaggctgcgtatcttctggtggcagcttgtcttcaggtttttctcagggaattgcctagctctatgcataatccgaatgttataaagattttctgcagcgccgagggacgggaaagactggcgtctcttggccatgcttcttttacattgtacttcttcttgagccagattgcgatggaagatgatatgaaatctaacacaactgtgatgctcttagaacgtctggttgaatgtgcggcggatagttgggagaaacagctggcgta

SEQ ID NO: 159779 - DNA, 475 bp, Arabidopsis thaliana columbia
catcgtcttcctcaggcattgcatatgatacccagaaactctacgcaatcatcgaagaatttagggttttcttcgtttctatcgtgtgcaccatcgatggattctcgtatatcagtttctaggctttctctgaatcatcccggctcgaaatttgggttctcactcgatactagggtgagaaatgagtttatcgttagagcagaagaaggtaacacagaagctgaatctgaagaatttgttgctgaaatcgctgatacggaaggaaatgtagaggaagtggtcgaagctaaacctacaagaaaacctaggatcaagctcggagatgtcatggggatactgaaccagaaagcaattgaggtagcagagaaagtgagacctgttccagaaatcaggacaggagatattgtagaaatcaaattggaagttcctgagaacaaacgtaggctatctatctacaaaagcatagtgatgtcga

SEQ ID NO: 159780 - DNA, 443 bp, Arabidopsis thaliana columbia
  unsure (1)..(443): unsure at all n locations
agcaacctcgtttactctctacgccaatttcagtgcttatacatccctttttgcaatcatggctgatgaaatcaatgagataagggaagagcaagaacagctcgcaccctttgatccttccaagaagaaaaagaagaagaaggttgtgattcaggaacctgtcgaggacttagcagagtcttcacagactgagaaatctgattcattgcctgttaatgatggtcttgagagttcatttactggaatgaagaaaaagaagaagaagccaactgaatcaagcttattgaacaacgaaagtgttgatgctggggaagatttggatgagattgctaatgaccagcaagagggggaagaaggaatagttctacagcaacgttacccctgggagggaagtgagagggattacatatatgacgagcttcttggtagagtctntaacattc

SEQ ID NO: 159781 - DNA, 393 bp, Arabidopsis thaliana columbia
  unsure (1)..(393): unsure at all n locations
gcgacgcgtcgagcaaaggagaaggacttaccgtgctcatgcaagaatcaacccaaacatggccaacggaagccacaaggagtggattgagccagancaggaacaacccgnnaaaaacgagcacgaagacacagaagacgaccagggccaagcaagaaccagccgaggacctagcagaggcttcacagaccgagaaatctgatgcacagccaagcaatgatgcgcatgagagggcatccaccggactgaacaaaacgaagaagaagccaacggacagaagcggacagaacaacgcaagagatgatgccggcgaagaccaggcagagaatgctaaagacaagcaacagggggaagaaggaaaaggtctacaagcaacggcacccccgggaggga

SEQ ID NO: 159782 - DNA, 377 bp, Arabidopsis thaliana columbia
catacacaggtccggcggcgacggcggtgttcagtggtcttgtaaggaaatggaagaagaagtgggtacgtgtctcaacctcatccgtcggtgttttcagagcatctaaatccaacggtcgtaacaacagcaacaacagtaactcaccacaccatctacttctccataagtggactccacttacctcagcgacggttactgccttcgacgctaatggttccggtgagacagaggagtcgcctaagcgaagattcagatacgctccaattgcgatgcttgagcatagacaaaaagtgatctctaacgattctgaaattgaagagactgaagaatttgacactgaatctgcattacctaaagctggtgagctagacatg

SEQ ID NO: 159783 - DNA, 453 bp, Arabidopsis thaliana columbia
tctctctctctctcttgtattatttctatctccttcgccgtcgaaagagaaacgtcgatcggagaacctttgaaatgtcgactggattagatatgtctctcgacgacatgatcgccaagaaccgtaagtctcgtggtggagccggccccgctcgtggaaccggatccggatccggaccgggtccgactcgccgcaacaaccctaatcggaaatcaacccgatctgctccataccaatcagccaaggcgccggagtccacctggggtcacgacatgttctccgatagatctgaagatcaccgatcgggacgttcctccgccggaatcgaaactggaaccaagctctacatttccaatttggattacggtgtcatgaacgaagacatcaaggaactgtttgctgaagttggagaacttaaacgctacacagttcattttgatagaagtggaagat

SEQ ID NO: 159784 - DNA, 492 bp, Arabidopsis thaliana columbia
  unsure (1)..(492): unsure at all n locations
gatactgcgattgctggtgattttnccatttccgtcgacgacgaaagagaaacgcagagcggggaacctttgaaatgtcgtctggattagatatgtctctcgacgacatgatcgccaagaaccgtaagtctcgtggtggagccggccccgctcgtggaaccggatccggatccggaccgggtccgactcgccgcaacaaccctaatcggaaatcaacccgatctgctccataccaatcagccaaggcgccggagtccacctggggtcacgacatgttctccgatagatctgaagatcaccgatcgggacgttcctccgccggaatcgaaactggaaccaagctctacatttccaatttggattacggtgtcatgaacgaagacatcaaggaactgtttgctgaagttggagaacttaaacgctacacaggtcattttgatagaagtggaagatcaaagaggaactgctgaagtagtgttttcttcgcgtggc

SEQ ID NO: 159785 - DNA, 469 bp, Arabidopsis thaliana columbia
ggagaatctgagctgcagatctgcgtcattctttatctagatgttgttgctacttcttcctctatagaaccataatttcatcagatctcgctgattaatcatccccatttggatctgatcgaaactcttagggaagaacatggcaggagctgcctccgcgctgtttctgcttgatatcaagggacgcgttctcgtctggcgtgattatcgtggcgatgtctccgctgctcaagccgagcgattcttcactaagctcatcgagaaagagggtgattcacagtcaaatgatccagttgcttacgataatggggtgacttatatgtttgtacaacatagtaatgtatacttgatgatagcatccaggcagaattgtaatgctgccagtcttctcttctttcttcaccgcgttgtcgatgttttcaagcattacttcgaggagttagaagaggaatcattgagggataacttt

SEQ ID NO: 159786 - DNA, 372 bp, Arabidopsis thaliana columbia
gttgatctttctcctccatcaacaaacatgggtaagacacgtggtatgggagctgggcgtaagctgaagagactccgaattaaccagaggtgggctgacaagcagtacaagaagtctcacttgggaaatgagtggaagaagccttttgctggttcttctcacgctaaaggaattgttcttgagaaaattggtattgaggctaagcagcctaactctgctatccgtaagtgtgctagagttcagcttatcaagaatggaaagaagattgctgcctttgtccccaatgatggttgtttgaactacatcgaggaaaacgatgaggtcttgattgctggatttggtcgtaagggtcacgctgtgggagatattccc

SEQ ID NO: 159787 - DNA, 462 bp, Arabidopsis thaliana columbia
cgcgtttctcttaagcttctctcacatttctcttaatatttcttcgagtctctctcgctctctccgtttcttcgcggtctctctctctcagatctctccgaaacattcttcgtagtgaagcaaaatggggttgagtttcgccaagctgtttagcaggctttttgccaagaaggagatgcgaattctgatggttggtcttgatgctgctggtaagaccacaatcttgtacaagctcaagctcggagagattgtcaccaccatccctactattggtttcaatgtggaaactgtggaatacaagaacattagtttcaccgtgtgggatgtcgggggtcaggacaagatccgtcccttgtggagacactacttccagaacactcaaggtctaatctttgttggtgatagcaatgacagagacagagttgttgaggctcgagatgaactccacaggatgctgaatga

SEQ ID NO: 159788 - DNA, 457 bp, Arabidopsis thaliana columbia
  unsure (1)..(457): unsure at all n locations
cttgaataaaatcagaattacaaacaaatanggttttgcaaaagcttcctctcattgggctgcttttgctcctgaccatcgtcgcctctccagcaaatgcagatggacctgtttgcccgccgtcgaacaaactaagccgggcaagtttccctgaaggttttttatttggcacggctactgcggcataccaggtcgaaggtgcgattaatgaaacttgtcgtggaccagccttatgggacatctactgtagaagatatccagagaggtgcaataacgataacggcgatgtggcccgtgatttcttccatcgttataaggaagatatccaactaatgaagaatctaaacacagacgcctttagaatgtctatcgcatggccaagaatatttcctcatgggagaaaggagaaaggagtgagtcaagctggtgtgcaattctaccacgaccttatcgacga

SEQ ID NO: 159789 - DNA, 407 bp, Arabidopsis thaliana columbia
  unsure (1)..(407): unsure at all n locations
caaatctcagatctagctcaaccatggcgttgcactattagaagacctcaagtggccgtgaatacaaggtcaaagacatgtctcaagccgatttcggtcgtctcgaactcgagctcgccgaagttgagatgcctggactcatggcttgtcgtaccgaattcggaccttctcagccattcaaaggcgctagaatcaccggatctcttcacatgaccatccaaaccgccgtactcatcgaaaccctaactgctctcggtgctgaagtcagatggtgttcctgcaacatcttttccactcaagaccacgccgccgcagccatcgctcgtgactccggcgctgttntcgcctggaaaggtgagactcttcaggagtactggtggtgtaccgagcgtgctctagattggggt

SEQ ID NO: 159790 - DNA, 445 bp, Arabidopsis thaliana columbia
gagcataaccacttctgtctctgcgaatcttcatagtactctttgagaagctttcctctgtttctccgctggtaagctttcgttatctctctctctctcgcttctcagatctgctgcttaaacctttaatttctcaccgacgagtggatctgcatccacagttatgggtagctccggcgacgttaactggaaacttgcggaccaccccaagcttgccagaacgcaaactatctgcccgcttgaactcgatggatggggagaatctgctcccgaacaatacaattgcatccataaagctgcaaccacatccatggagtcccttaaaggctggctgcccgtcacatggaggatgttcaaagctcatggtaccgccgttggtcttcccagcgcaaacgacatgggaaacacttgaattggccacaatgctcttggagcttggccgatt

SEQ ID NO: 159791 - DNA, 474 bp, Arabidopsis thaliana columbia
  unsure (1)..(474): unsure at all n locations
ggggaagttactgccgccacagctgctgcnactaagttaccagggctgctcaaggtgtcgccgatattccgcagaagctgtttatactaactctgcgaaacaaatttacatagtgaagcaaccagcaggagagtaccaccacactgataaacacacttactggcaagagggagatgccaatacacatacttgggctaggtgctgccgttaagaccacaagagagtccaacctcaagctcggagagattgttaccaccatccctactattgggttcaaagagggaactgcggaatacgcgaaacattagtttcaccgcgagggatgtcttgcgtcacaacatgagccgaatctcgactagacactactatcagaacactcaaggtctaacctttgaagttgatagcaccgacagtgtctgaatagataggctcgagaagaactccacaagatgctgaatgaggacgagctgcgtg

SEQ ID NO: 159792 - DNA, 442 bp, Arabidopsis thaliana columbia
aaataagttcctcgagaaagaaaaaagctcgccgattattcaagatggaattctaatggatctgaccgaaacacacaacgaaaagaacaagaagggcgtggagaaccgccaagctgatgaacacgctttatgccaagaaggagatgcgaattctgatggtaggacctgatgctgctggtaagaccacaatcttgtacaagctcaagctcggagagattgtcaccaccatccctactattggtttcaatgtggaaactgtggaatacaagaacattagtttcaccgtgtgggatgtcgggggtcaggacaagatcacgcccttgtggagacactacttccagaacactcaaggtctaatctttggtgttgatagcaatgacagagacagagttgttgaaggtcgagatgaacatcacaagatgctgaatgaggacgagctgcg

SEQ ID NO: 159793 - DNA, 347 bp, Arabidopsis thaliana columbia
tcagatcgccgaattgcagtaaggagactaaaataagttgcacgttggctactaccgcacctatggaaggaccttaaggggcccacgtcgtcttaccagaaggagcgtcttgattctgaattgaagctggttggtgagtatggtctgcgtaacaagcgtgagctctggagagtgcagtactctcttagccgtatccgtaatgctgctagagatcttttgactcttgatgagaagagtccaagaaggatctttgaaggtgaggctttgcttcgtaggatgaaccgctaccggcttttttatgagagccagaacaagctctattaccctttggctttttactggtggaa

SEQ ID NO: 159794 - DNA, 167 bp, Arabidopsis thaliana columbia
gataatccaggagattcattctccgttttgaaacttcctcaatctcatcttcttccgctctttctttccaagctcataaaaaatggctgaggctgatgatattcaaccaatctcgtgtgacaatggtaccggtatggtgaaagctggatttgcaggagatgatgctc

SEQ ID NO: 159795 - DNA, 327 bp, Arabidopsis thaliana columbia
  unsure (1)..(327): unsure at all n locations
accggtcgaccacgcgtccggagngaccaagctattcaaccatactgaaagaaaaatacttaatctcancgncnnccgctcttgggggccatgctcataaaaaatgggtgacgctgatgatattcaaccaatcgtgtgtgacaatggtaccggtatggtgaaggctggatttgcaggagatgatgctcccagggctgtttatcccagtgttgatggaaggccaagacatcaaggtgccatggttgggatgaaccagaaggatgcatttgttggtgatgaagcacaatccaagagaggtatacttaccctagagcattctattgagca

SEQ ID NO: 159796 - DNA, 363 bp, Arabidopsis thaliana columbia
cgcaaccttcgattttcgtttattcgcatccaacgtaagagaaaacaatcaataagcgaccatgttggtgtaccaagatcttctcaccggtgatgagcttctgtctgactctttcccttacaaggagattgagaatggaatcctctgggaagtagaaggaaagtgggttactgtgggagctgtagatgttaacattggtgccaatccatctgctgaagaaggtggtgaggatgaaggtgtagatgactctactcaaaaggttgttgacattgtcgacaaccttagactttaagagccaccaacttatgacaagaagggattcatcgcttacattaagaaatacaattaagcttttgacaccca

SEQ ID NO: 159797 - DNA, 472 bp, Arabidopsis thaliana columbia
ttcgagactcattgcctcgccgagagagaaggagatgccttggaaaggcttcttcaaccatcttcttcttcttcctcaatttctccttccaaattcccttcacggacttctcctttccttccccgtctccgctcatcgggtctgagctttgtctcgactcaccggcccgagtcacgccgagtcagctcaatttcctgcaacagttcccagattccgtcactgtatacgcctataggatctaacacaactaacaattccttcaatgggtctcccaaatcggatgaatcgaaacctaatcccggatttctcacacggatcgcgacgtcggcttctgagcagcgaaagacgttatctactggaaccgttatactaatctctgcagtagctgtgcttttgcttaacccgcttcttgcaccacctgctttcgctagctttcaaactgcagctaaatccggttggctaacaagtgcgt

SEQ ID NO: 159798 - DNA, 107 bp, Arabidopsis thaliana columbia
ataaaaaatggctgaggctgatgatattcaaccaatcgtgtgtgacaatggtaccggtatggagaaggctggatttgcaggagatgatgctcccagggctgtttttc

SEQ ID NO: 159799 - DNA, 353 bp, Arabidopsis thaliana columbia
gcaacaagctttgaaaccaaataaaatctcaaatacccagaaagcgagtggagaagagagagctgatatgctacaatagaaatggcgagtggatgtgctctacatggtggttgtcccagcgattacgtcgccgtcgcaatttcagtcatctgcttcttcgtgctgttatcgcgctcagtgttaccgtgtttgattcataaggctcctcgtactaacagtagcagtttctggatccctgttattcaagttatctccagcttcaaccttctcttctcaattatgatgtcagttaatttgcttcgattcaggacgaaacattggtggcgatattgctatctttgggcagtgtggat

SEQ ID NO: 159800 - DNA, 174 bp, Arabidopsis thaliana columbia
  unsure (1)..(174): unsure at all n locations
gagagagaacacagacgataccaactctcaactanctcgttgccgcagtataattatctcattgctcggatatatatcttcttatgggggggcgaccagaagctaccagaataaaaaggctggtttcttttttttgaagaaaccacttacttccaaaatgggtcggtctatttt

SEQ ID NO: 159801 - DNA, 368 bp, Arabidopsis thaliana columbia
cggacgcgtggggctaaactttattggagaaactccaatcggcgacaatgggtatttctcgtgactctatccacaagaggcgtgccactggaggcaagcagaagcaatggaggaagaagcgaaagtatgagatgggaaggcagccagccaacaccaagctctcaagcaacaagacggtcagaagaataagagttcgtggtggaaatgttaagtggcgtgcgttgaggctcgatactggtaactactcgtggggaagtgaagcaactacccgcaagaccagagtccttgatgtggtctacaatgcctccaacaatgagcttgtacgtactaagacacttgtcaagagtgctattgttcaagttgatgct

SEQ ID NO: 159802 - DNA, 474 bp, Arabidopsis thaliana columbia
tgacaaggtccctcgccgtgtaattgagagtgtgttcatcatttctcttcctaaacccaaaacctatgagcgtcagtcccgcccgcctcatgctgcagagctcttaaaaagttactgtgcttctcgtggctatgttgcctcgagtggactaccggatgaaacgaaagctgcaaggctgattctgaaagattacattggaggtaagctgccacattatgcaatgccacctggaatgccccaagctgatgaaccggacatagaagacactcaagaactggaggatattctcgaaggttcagagtccgatgactctgcagtaggagatgagacagaaaacgagcaagttcctggtattgatgatgtgctagatgatctgagctcgtttgatcttgccaatgggcttaagtcttcaaagaaagtgacagcaaagaagcaaaccgcgtcacataaacagcacaaaaagccacagaggaa

SEQ ID NO: 159803 - DNA, 465 bp, Arabidopsis thaliana columbia
gtttccttcttcgctcgctgttcagattttgcttttttgctttaggctccccagatctctaatcgccgcagctttaagaaatggagactttcctattcacatctgagtctgtgaacgaaggacaccctgacaagctttgcgaccagatctctgatgcagtccttgatgcctgccttgagcaagaccctgatagcaaagttgcttgtgagacatgcaccaagaccaacatggtcatggttttcggtgagatcaccaccaaggctacgattgactacgagaagattgtccgtgacacttgccgttccattggattcatctctgacgatgttggtcttgatgctgacaaatgcaaagtccttgttaacattgaacaacagagcccagacattgctcaaggtgttcacggtcacttcaccaaacgtccagaagacattggagctggtgaccaaggacaccatgtttggt

SEQ ID NO: 159804 - DNA, 449 bp, Arabidopsis thaliana columbia
cgacgatcgatggatcctcggatgtggcacaatgatgccgctatttccggtatggctgctcttggtttgggaacttatggtgctcatgtctttaaaccagagaacccttcttacaaacaggtgtggcaaacggcttcactttaccatttggttcacactgctgctcttgtttctgctcctagcaccaaatatcccaacatttttggtggcttgttgactgctggaattgtagccttttccggcacgtgttatatggtagcgctgcgggaggacagaaagttttcgacattggcaccattcggaggctttgcgttcattgctgcatgggcaactttacttttctaaacaatctcataaccatctatattgtcaagtttgtggtcaagcttatcctacatatgaactcactggttttttttgtttacctaaaagattgcttaataacaatt

SEQ ID NO: 159805 - DNA, 478 bp, Arabidopsis thaliana columbia
aaccaataacactttttctctcttctcagtccttctacggcggactacgacgacgaaattgaccagaataaccaacctttcatccccaaagaaactgctctacaagcactaaactcaataatccagctccacttcgagaaaaccttagagaagaaacgagccattgaccaccagaagaagaagctccacaagctatttcagctcttcttcatcttcctcgccgtaatcttcttctccctctctcaaccctcaggtcgtcttcactgccgccattgctgggcacccatctgcctcctatccttctctcacctcttcttctacgtctccgtcgctcaaactctccgttgcatcaacggcttcaagtaccagcgtcgctgccataagctcactctcggtctcgccactcacaagctccgtttcatcaagtcaagaatcgctgccggagatttcctcggtggaggcgacggtgatgaggcct

SEQ ID NO: 159806 - DNA, 405 bp, Arabidopsis thaliana columbia
  unsure (1)..(405): unsure at all n locations
gccgagcattgggcaacaagaggaggattagagaatacagattggtcaaaagctccttttactgctttttatagaaactacaatgtcgatggatgtgtatgggctaatggaaaataatcttgttccgcgaattcccaagggtcaattaaaaaactcgattcgaccggccagccaggaatgaagggggggcaaggtaaatccatgaccaacacctatggcaccgataaaagaaggtttcctcgaggggttcctgccgagtgcactaaaantcttgatccttgatacatgaatatgtacctgggcttggctcttggacttaaacaagagtttatttatatttatcatatatattgggctcatatatacaggatgtggtgtttgtgtaagatgttttaagattgaagt

SEQ ID NO: 159807 - DNA, 354 bp, Arabidopsis thaliana columbia
atctctctcgatctcaatttcgcaaaatggtttttctgaagatcagaatcggaatcaacggtttcggaagaatcggtcgtttggttgctagagttgttcttcagagggatgatgttgagctcgtcgctgttaacgatcctttcatcaccaccgagtacatgacatacatgtttaagtatgacagtgttcacggtcagtggaagcaccatgagcttaaggtgaaggatgacaaaactcttctcttctgtgagaagccagacactgttttcggcatcaggaacccttgggacatcccatggggtgaggctggagctgactttgttgttgagtctactggtgtcttcactgacaaag

SEQ ID NO: 159808 - DNA, 329 bp, Arabidopsis thaliana columbia
gttcttctctcttttaaataacctcttcactttttccttctcactcacctatctcactctaaaatctctctctgccaatctcatcttcaacctctctctaactctcgttttcgattctacaatggctgacaagaagattaggatcggaatcaacggattccgaagaattggtcgtttggttgctagagttgttctccagagggacgatgttgagctcgtcgctgtcaacgaccccttcatcactactgagtacatgacctacatgttcaagtacgacagtgttcacggtcaatggaaacacaatgaactcaagatcaaggatgagaaga

SEQ ID NO: 159809 - DNA, 437 bp, Arabidopsis thaliana columbia
gctcttctcactctcttctcttctcctactttctactctcttcgttatctacatcttcaagtttgttttcaaaagaagaaaccagagaaactgctacatgcttcactacgagtgctacaagggcatggaagagagaaaactcgacaccgagacttgtgctaaggtcgttcaacgaaacaagaacttgggtcttgaagagtacaggtttcttcttcgtactatggctagttccgggataggagaggaaacgtacggcccaagaaatgtgcttgaaggtagagaagactcttctactctccttgacgctcactccgaaaaggacgagatcatggtcgacactttcgacaagcttttccacaagacaaaaggctcaatctcttcttcagacattgatattctcgttggtaaactattaatttttggttcatcttctttcc

SEQ ID NO: 159810 - DNA, 398 bp, Arabidopsis thaliana columbia
cgtgaagctgatcggtgcatgggcgagtccctttttgatgaggccgaggattgctctaaacctcaagtctgtcccctacgagttcctccaagagacgtttgggtctaagagcgagttgcttcttaaatcaaacccggttcacaagaagatcccggttctgcttcatgctgataaaccggtgagtgagtccaacatcatcgttgagtatatcgatgacacttggagctcatctggaccgtccattctcccttccgatccttacgatcgggccatggctcggttctgggctgcttacatcgacgaaaagtggtttgtcgctctaagaggtttcctaaaagccggaggagaagaagagaagaaagctgtgatagctcaactagaagaagggaatgcgtttc

SEQ ID NO: 159811 - DNA, 413 bp, Arabidopsis thaliana columbia
atggattttacagctccatgattaagcttcccgttttttatactgccggcgtcgtcgtcgccttttatacatcaaacggagacgtgttcgagaaaacacacgacgagttagacatagagtttctagggaacataaaaggaaagccgtggaggtttcagacaaatctatacggaaatggaagtacacatagaggtcgtgaagagagatatcgtctctggtttgatccttctaaggagtttcatcgttatagcattctctggactcctcacaagatcatattttgggtagatgatgtgccaataagagaagtgatcagaaacgatgcaatgggagcagattatccggcaaagccaatggctctttacgccaccatttgggacgcttctgattgggctactttcggcggcaaaata

SEQ ID NO: 159812 - DNA, 373 bp, Arabidopsis thaliana columbia
ctctgagataataaggacttgtgtatttttttatttttaaaaggcatttcaaagagacaatatgtcaggtgatgaggctgcccctgttgttgttcctccccccgttgctgagccagcggccatcccagaggacatggacttaatgactgcattggagttgactcttaggaaagctcgtgcttatggtggtgttgttcgtggtctccatgagtgtgctaagcttattgagaagcgtgtggctcaactcgttgtcttggctgaagactgcaaccagcctgattatgtcaagcttgtgaaggctctctgtgctgatcacgaagtcaggttgctaacagttccaagtgccaagacccttggcgaatgggctggtctc

SEQ ID NO: 159813 - DNA, 347 bp, Arabidopsis thaliana columbia
gttttgtccgctgaacctaaacttgtctttggttttctcaactcattagtggggtcagagagtgaggagctcgcggctgcgtccagactggaagacgatctcagtttttaccaaactgcaagccctgatattgcaaagctatttgaaattgaaacccaagtcaagcgtcctgccttagttttactgaaaaaggaggaagagaaacttgcccgttttgatggaaacttcactaaaacggctatagcagagtttgtgtcagccaacaaagtcccattggtgatcaacttcacaagggaaggtgcatcactgattttcgagagctcagtgaaaaaccaactcattctttt

SEQ ID NO: 159814 - DNA, 473 bp, Arabidopsis thaliana columbia
ccgcattgtctctctccagacgaaaaatgggtgcatgcaggtttcaccagtaccaggttgtgggaagagctcttccgacagagaaggatgtgcagcctaagatttacaggatgaagctctgggctacgaacgaggttcgtgccaagtccaagttctggtatttcttgaggaagctcaagaaggtgaagaagagtaatggacagatgctcgccatcaacgagatctatgagaagaacccaacaacgatcaagaacttcggtatttggttgaggtaccagagtagaactgggtaccacaacatgtacaaggagtaccgtgacaccactcttaacggagctgttgagcagatgtacactgagatggcatcccgtcaccgtgtcagattcccttgcattcagatcatcaagacagccactgtcccagccaagctgtgcaagagagagagcactaaacagttccacaacagcatgatc

SEQ ID NO: 159815 - DNA, 373 bp, Arabidopsis thaliana columbia
  unsure (1)..(373): unsure at all n locations
aacacttacaaaaaaaaatctctttgtgagctnnagcgatcgtaacaatggcgaacgaggtgattcttcttgatttctggccgagtatgttcgggatgaggacaaggatcgcattgagggagaaaggtgttgaatttgagtacagagaagaagatctaaggaacaagagtcctttgcttctccagatgaatccgattcacaagaagattcctgttctcatccacaatggtaaaccggttaacgaatctatcatccaggttcagtacattgacgaggtctggtctcacaagaaccctatccttccttctgatccttacctgagagctcaagctaggttctgggctgattttattgacaagacgctgtatgattg

SEQ ID NO: 159816 - DNA, 430 bp, Arabidopsis thaliana columbia
caacacagcaagcacgagcgaatctcctcaacttttttaacctaatagctcgccgtgtcgtgactactcaccgagtaggaacctaaccttatccaatggcttcgagtttcattacagtacctaaacccttcttgtccttccccatcaaaaccaatgctcctactctacctcagcagacccttctcggaattcgaagaaattcctttagaattaacgccgtttccaccaaatgggaaccggcaaaggttgtaccacaagcagacagggtccttgtccgccttgaagtgcttcctgagaaatcctcaggaggagtactgttgcctaaatcagctgtgaaattcgagaggtacctaacaagcgaggttgtctctgttgggtctgaggttgtgggagtggaacctggcaagaaggtttgttctctgatatgagc

SEQ ID NO: 159817 - DNA, 417 bp, Arabidopsis thaliana columbia
gcgaggaagaggaggaacctctggtaacaagtttattatgtcactgggtcttccagtggcagccactgtgaactgtgctgacaacaccggagctaagaacctttacatcatttcggttaaaggaatcaagggtcgtcttaaccgtttgccatcagcgtgtgttggtgatatggttatggctactgttaagaaaggtaagcctgatctccgtaagaaggtgcttcctgctgtcattgttaggcagaggaagccttggcgccgaaaggacggtgtcttcatgtatttcgaagataatgctggtgtcattgtcaatcccaagggtgaaatgaaaggatctgctatcactggaccaatcggaaaggagtgtgctgatctgtggccaagaaatcgaagtgctgcgaacgccatcgtttaagc

SEQ ID NO: 159818 - DNA, 388 bp, Arabidopsis thaliana columbia
ggcaaggccaagatggtgtgtcatctatcaactcgtgtatgccaaggactctcaagatgttgaaggtggtgaacacggatagaaaactttacttggatttgaaacgtttgaggttgatgcagacgactacatagtagcagtgcaagtgacctacgacaacttgtttggccaagacttttacatcatcacatttattacctttaatacattcaagggaaaaacatcttcacccttttgattggaaacgcaaaagaagtttgttcttaaggacaaaaactgttggaaatcttttgtggttcattggccccctttgtgaatttttatattattttgggcctattttttttttaacaccaattcttttattatttgtcaaataatatatttc

SEQ ID NO: 159819 - DNA, 411 bp, Arabidopsis thaliana columbia
accaaatccgccataactctctctctctcttttttttcccacagagagacacattcatgccagcaatgccaggtctcgtctcagtcaaaactccttccgatacaccgccgctacgtgtagccgtaccagacacgcaacctctctcaaacccgccgcgaactccgatgaagaaaaccccttcctctacaccatctcgatccaaaccatcaccaaatagatccaccggcaaaaaagattccccaaccgtatcctcctccaccgcagccgtaatcgacgtcgacgatccatctctagataatccagatctcggtcctttccttctaaaattagctcgtgacgctattgcttctggtgaaggtcctaacaaagcattagattacgcgatccgagcaactaagtcctttgagagat

SEQ ID NO: 159820 - DNA, 454 bp, Arabidopsis thaliana columbia
ctcacccaagaagacaaaaacacagagagagtatgagagagaaatggcgacgacaacaacagaagcaacgaagacatcatcgaccaatggagaagatcagaagcagtctcagaatcttcgacatcaagaagttggtcacaagagtctcttacagagcgatgatctctaccagtatatactggagacaagtgtgtatcctagagaaccagaatcaatgaaggaactcagggaagtgacagcaaaacatccatggaacataatgaccacatcagctgatgaaggacagttcttaaacatgcttatcaagctcgttaacgccaagaacacaatggagatcggagtttacactggctactctcttctcgccaccgctcttgctctccctgaagacggcaaaattctggctatggatgtcaacagagagaattacgaattgggtttaccgatcattgag

SEQ ID NO: 159821 - DNA, 255 bp, Arabidopsis thaliana columbia
aatctcaaacaacagatctcttacaagtaaaaaggaaacaacagtttaggttcaaagagcgtaagacactgagtgatagcatcatcatagtctcttcaagcttttctttctagcgtctaccttcttcttatctgcctgaaccttggccaaacctgcttcccttttttgcgtcgtagtgaccacacttgcagaggctgctacaacgacattagctacgtgttggtggtccttggcactcgttgttactctctttat

SEQ ID NO: 159822 - DNA, 318 bp, Arabidopsis thaliana columbia
gagcaacttgctttctgtcctgcaattattgtcttagggatacattactcagatgataagctgcttcaaacccgtgtcttctcctatgccgatactcagagacaccgtcttggaccaaactaccttcagctgccagtcaatgctccaaaatgtgctcaccacaacaaccaccatgagggattcatgaatttcatgcacagggacgaggaggttaactacttcccgtcgaggtatgaccaggttcgtcatgctgagaagtatccaactccgcctgctgtctgttctggaaaacgtgagaagtgcattattgagaaagag

SEQ ID NO: 159823 - DNA, 390 bp, Arabidopsis thaliana columbia
  unsure (1)..(390): unsure at all n locations
aaaaatcagcaaccgttgtttgtttttaagtnttaattacaaaagacgtacacgtctctctctctcactccctctttaagatcagaagctcatttcttcgatacgatcaaccattagagatgggttcggcgaacaacgagtacgagtttctgagtgagattgggctgacttctcacaacttgggatcttacgttgctggcaaatggcaagccaacggacctcttgtttcaactctcaatcctgctaacaatcagccaattgctcaagttgtggaagcttctctagaggattacgagcaaggtttgaaagcttgcgaggaagcagctaaaatatggatgcaggttaccgctcctaagagaggtgatatcgtcagacagaatggggatgcac

SEQ ID NO: 159824 - DNA, 416 bp, Arabidopsis thaliana columbia
  unsure (1)..(416): unsure at all n locations
ctctcgttctcatctttctctctaagagatttngtaggtgacaatcaaaagtttgacaaaatggtgaagtttacagctgatgagcttcgaaggattatggactacaaacacaacatccgtaatatgtctgttattgctcatgtcgaccacgggaaatccactcttactgattctttggttgctgctgctggtatcattgcccaagaggttgctggtgatgttcgtatgactgataccagagctgatgaggctgaacgtggtatcactatcaagtccactggtatttctctctactacgagatgactgatgaatccttgaagagttttactggagccagagacggaaactgagtctctcatcaatcttattgattcatctgggcacgttgtctttttttttgaggttactgctgttc

SEQ ID NO: 159825 - DNA, 440 bp, Arabidopsis thaliana columbia
cgaattgattcgcttcttaatgtcactctctacttttgcttctggtatcggcgttctcgagcttccttgtttgcgtctgttaccaatctcaagcacccaaatccagtttctcactgttgaagctagaaaacaatctagaagaataagacgcgagcgctccttcagcccttttccagtacttattcaatcgaaccgtcgtcttcgtcatggtttctcagagctcaattcgagttttgatcgttccaacagtggagaaactggttccgataccactcttaaagatggtgaagaagtgaggagtgaaagctcttcaggtgttggtgatagctatgtgggcttgtttgtgggaatgctcggtttggacaacgatcctcttgatagagagcaagccatagagacgctttggaagtactctttgggtggaaagaaatgtattgatg

SEQ ID NO: 159826 - DNA, 449 bp, Arabidopsis thaliana columbia
  unsure (1)..(449): unsure at all n locations
atattctcctcatcgtcttcttcgtcgtgacgtttctcctccatcatcgtcacttgcaaatccagctctccatttcaactccacatcttcttcttctttagatccctcatctttctctccttctcctccttcctctcattcttctacttcgtcttttcctttgttcatttctctctctctctctagcttccaccttcactttaacttctcattaccctaatttttcaagacatatcaattgaaattgaaaagttgctcagaactctaatcatccccttcgttctcagttcttccaatcttcaatttcataaaaaccctaattttaactggtttgttttttggaaattggatttgtctacgttttggaattggctggaaacgcagcgaaggataacangaagactaggcttgtgccacatcacatacatnttgcagtgagaaacgatgag

SEQ ID NO: 159827 - DNA, 313 bp, Arabidopsis thaliana columbia
aaaaaaacaaaaatgagctctcaaatctgcagattttcttccaaagcagccaaatctcttctctcttcagctaaaaatgctcgcttcttctctgaaggaccagccattggtgctgcggcagcggtttcggcgtcaggaaaaattcctttgtatgcatctaactttgcaagatcatcaggttctggtgtggcttctaagagagggatcactggactcttagctctttctgcggcagcttatatgagttaagagcccaaggggctctctctgctgataggacccacccttttttgctatcaagcctgatgggtgc

SEQ ID NO: 159828 - DNA, 415 bp, Arabidopsis thaliana columbia
cgccaatcttgtcaactatgggaccgccaagaaatagtaggttggggatggaggttatcgttaggtttggcgggaattcccgcgcttcttctaacggtcggagctttattggtgacagagacaccaaacagtttagtcgaaagaggtcgtctcgatgaaggtaaagctgttcttcgtcgtattcgagggaccgataatgttgaaccagagttcgctgatctccttgaagctagtcgacttgctaaagaagttaaacacccttttagaaaccttcttcaacgtagaaaccgtcctcagctcgtcatcgccgtcgctttacagattttccagcaatgtactggaatcaacgcgattatgttctacgcgcctgttctgttcaacacatttaaggtttggtagtgacgctttactttac

SEQ ID NO: 159829 - DNA, 316 bp, Arabidopsis thaliana columbia
caaactttggtcctttgttagctccaatctaatagttaactcctcaaaagaacatcgcttggggcaacccacgcgagaaaatcccgtgtaggctcacagagacaacttcaatatcttacgcctcaagaaggtggtcacatgagatctcttacagagcgattatctttaccagtatatactggagacacgcgtgtattctagagaaccagaatcaatgtatgaactcatggaagtgacagcataacattcatggaacataatgaccacatcatttgatgatggacagttctaatacattcattatatgctcgttaac

SEQ ID NO: 159830 - DNA, 439 bp, Arabidopsis thaliana columbia
ctcattcgctgcaaacatggcaagaggtttgtataagcatttgaagaggctcaatgctcctaagcattggatgcttgataaacttggtggtgcctttgcccccaagccgtcttctgggccacacaagtctagggagtgtttacccttggtccttatcatcaggaacaggttgaagtatgctctgacatacagagaagtgatttcgatcttgatgcaaaggcatattcaggttgatgggaaagtgaggactgacaagacttaccctgctggtttcatggatgttgtgtctatccccaaaacaaatgagaacttccgtcttttgtatgacaccaaaggaccgttccgtctccactccatcaaggatgaggaggctaagttcaagctttgcaaagtgagatcgatccaatttggtcagaagggtattccctacttgaacaca

SEQ ID NO: 159831 - DNA, 264 bp, Arabidopsis thaliana columbia
  unsure (1)..(264): unsure at all n locations
ggaaagattgggctttttggcggtgctggtgatgggaaaacagtgctcattatggaactgattaacaatgttgccaaagctcatggtggtttctccgngtttgctggtgtgggagaacggacccgtgaaggcaatgatttgtacagagaaatgattgagagtggtgtcatcaagctaggagagaaacagtctgagagcaaatgtgcccttttgtatggacaattgaatgagctccctggtgctcgtgcccgtgtcggactgact

SEQ ID NO: 159832 - DNA, 231 bp, Arabidopsis thaliana columbia
  unsure (1)..(231): unsure at all n locations
gtggagtttcgacatgttgcgattcagttgnagtggatttgatatctcaagttgttttattcatcttgctgaatggcatcctttggaataacgaagcttaccgggctttgaagcccctctttttgcagagtttcgttattggtagcttgtggtctacttgagaaattcataaattttggagtagataatgttttgggatagttttgcattttcccaagttattatttgctt

SEQ ID NO: 159833 - DNA, 415 bp, Arabidopsis thaliana columbia
cttttcgatcaaaagacatgatctttgtgaatgtgttcaacgattgtaagcagagggaaggcgaagaattatgataacctctcatcaacgataagacaaaatccataaactactctttcgatcatcaaatccaccggtggcgccgccgttacacgctccttccgcgccttctttggacacattccctccacatctgtctccgcacgtcgccttggcttctccgccgtcgttgactctcgtttctcggtccacgtggcgtccaaggtccactccgtgcgcggaaggggcgccaggggagtgattacgatggcgaagaagagtgttggagatctgaattctgtagatttgaaggggaagaagggtgttgttagagctgatcctcaatgtacctctcgatgacaaccagaatattact

SEQ ID NO: 159834 - DNA, 466 bp, Arabidopsis thaliana columbia
gctctgcgaggttccttccttctccatcgctcgttattttatctacgaagacgaagatatcctccgactcgcgctcgcttggttgctcttcgtcgcgtgtctttgctttctcttccgttcaccgttcttcttcgcgtcgcaatcggaatcagctgcaagttgtgtctatggctcctgaggaagaaaagctcactcgtcgtaatcctctcgatttcccaattgagtgggaaagacctaaacctgggaggaggcctgacattttccccaagtttagccctatgaagacaccattgccaccaccgatgccttatgatcctccggaagaggatgaagaagaggaagagaagaaagaagaggaagaagaaaacccagaccaagaagaagaggaacaacccgagaagcagcaatagatttttggttggagataagaacgaatgaaacatcgagagatatcgaagagcatttt

SEQ ID NO: 159835 - DNA, 407 bp, Arabidopsis thaliana columbia
attagaatttctaaacagatggaatacttcgaacagtaccagctacgagtgagtgcattgatcggaccagaagctacacaacagctagttaaccaagctcttgtcctaattacactcggtggtaatgatttcgtcaacaattattatctaattccgttttcagctcgttctcgccaatacgcgttaccagactacgttgtgtatctcatttccgaatacggaaagattctcagaaaactctacgaactgggtgcaagacgagttttggtaactggaactggtgcaatgggatgtgctcccgcggagctggctcagcatagccgcaatggcgagtgctatggcgccctccaaacagcagccgctttgttcaatccgcaattagttgaattgatcgcatcagtcaatgc

SEQ ID NO: 159836 - DNA, 345 bp, Arabidopsis thaliana columbia
  unsure (1)..(345): unsure at all n locations
gtccgagaggtttgaagaagcatttgtagaggctcaaagctccnaagcatcggatgcttgataaactcggtggagtctttgcacactttttgtctaactaaccacacaagctaaggacgctcggacgtaatgatctcatcaacaagaactatctagataccgttttcagcttgttcttgacaatactcgttaccagactacgttgtgtttcttattttcgaatactgtaagattttcagaaaactttacgaactgggtgcaagacgagttttggtaactggaactggtgcaaagggatgtgctcccgcgtagcttgctaaacttattctcaatggccaagatgct

SEQ ID NO: 159837 - DNA, 464 bp, Arabidopsis thaliana columbia
ctcttcaatacctaacctgcaccgtcgccgtttatcttctcggcaaatcagggttaatcaatcacgatccattcacatgggacactgctaagaaatttctccctgcagctatcgtcttctacctcgctatcttcacaaacacaaacctcctccgtcacgctaatgtcgatactttcatcgtcttccgatctctaacaccgctcttagtcgcgatcgctgatactgtgtttcgtagtcagcctttaccttcgagacttacgtttttgtctctcgtcgttatcctcgctggagctgttgggtatgttgcaactgactcgtcttttactctaacggcttattcatgggctttggcttatcttgttaccattactactgaaatggtttacattaagcatatggtctctaatattaaattgaacatttggggattggttctctacaataatctactgtctctgatgata

SEQ ID NO: 159838 - DNA, 251 bp, Arabidopsis thaliana columbia
  unsure (1)..(251): unsure at all n locations
agttcttgtagaagtcatttgttctttggnattggatcgtgatagtgccttttatcttcttccactgtagagcttttggcaatggcggtgtaacttcttaatccgccattacaactcttcggagttgtttttttgtgtgttatgtatctgccaaaagctctgttttttcccacttttttgtttaaggcactatcttgtacttatgaatcattgtaactttgtactctctattataaagctttcactgaaca

SEQ ID NO: 159839 - DNA, 470 bp, Arabidopsis thaliana columbia
aaaaaaaagaaaacacaaaaacaaagattataatggcttcctcaaccatggctttgtcctcccctgccttcgccggaaaggctgtgaagcctgccgcatcagatgtcctcggaagcggccgtgtgaccatgaggaagactgtcgccaagccaaagggtccatcaggcagcccatggtacggatctgaccgagtcaagtacttgggtccattctccggcgagcccccgagctaccttaccggtgagttccccggtgactacggatgggacaccgctggtctatccgccgacccagagaccttcgccaggaaccgtgagctagaagttatccacagcagatgggccatgctcggagccctaggctgcgttttccctgagctattggctaggaacggagtgaagttcggagaagcggtttggttcaaggccgtttcacagatcttcagcgacggaggattggactacttgggc

SEQ ID NO: 159840 - DNA, 350 bp, Arabidopsis thaliana columbia
cttagaaagaaaagaacttaaatcaaaatacttattagcatggcgatacatttatacaaaacttctaccccgagcacacgcaatggagccgtagacagtcaagtgaaatccaatccacgaaataatttgatctgtgggcagcatcattgtggtaaaggtcgtaatgccagaggaataattaccgcaaggcatagagggggaggtcataagcgtctataccgtaaaatagattttcgacgaaatgcaaaagacatatatggtagaatcgtaaccatagaatacgaccctaatcgaaatgcatacatttgtctcatacactatggggatggtgagaagagatatattttaca

SEQ ID NO: 159841 - DNA, 379 bp, Arabidopsis thaliana columbia
cgcttatatctccgcctcctcaccacgacattttttctattgaggatcttgctcagttgatctttgatctacatcagattaatccaaatgcaaaagtatcagtcaagctagttgcagaagctggaatcggaactgttgcttcaggagttgcaaagggtaacgctgatatcatccagatatcaggccatgatggtggaaccggggctagtccaataagctccataaaacatgctggtggaccatgggaacttggactaacagaaactcaccaaacacttatcgcaaatggactaagagaaagagtcattttaagagtcgatggaggcttaaagagtgggggtgatgttctaatggctgcagctatgggtgctgatgaata

SEQ ID NO: 159842 - DNA, 304 bp, Arabidopsis thaliana columbia
tgacgttctttcatttttcccgttatccagtcactcatgcgaaaatggcggctcactcttcttgcaactttgctttgactaattcgatcatctcacaaatcgattctttctctaagaagaaactatctgttccattatacttcttctctacaagaaaagcattgacgaatccttggttaggcgtcgttgattcatgcatctctcttacttctacaggctccgctctacaaactaatcgcccaagaagacttcttctaaccgtcatttacagcttacccaccgcgaattcacatttagtgggatt

SEQ ID NO: 159843 - DNA, 361 bp, Arabidopsis thaliana columbia
gcctccgcttcgtctctcttctctgtttcgccctctcaataactgtgagataaaggcggagtctctgtgcgggtattttgctcatccatcgattcttagagtccaaaatggttgatcaagttcagcaccccactattgcgcagaaagctgccgggcagttcatgcgttcaagtgtttccaaggacgttcaagtgggttaccagaggccttctatgtatcaaagacatgcaacctacggaaactactccaatgctgcatttcaatattcttcgacatcccggatgttggcaacaactgctttttccgagtttgtccaaaccccatgagagaagggggtcacctacctttgccccttgacttt

SEQ ID NO: 159844 - DNA, 350 bp, Arabidopsis thaliana columbia
gcgtcctcttccattttttaaaacgctaatccgactcttgtcatggcggaggtcggcatctcacacttgcagaagaagaagcaagacataacggagaacgatgccgacgacaccggcgactacatgatcaagccacagagtttcactccagccatcgacactattcagtggcccatcctcctcaagaactacgaccgcctcaacgtgcgtaccgggcactacactccaatcagcgccggtcactcttctcatgaacgttctctacaagagtatatcaggtacggggtgatcaatatcgataaacccgcgaacccttcttctcacgaggagcgtgcttggattaagcgtat

SEQ ID NO: 159845 - DNA, 464 bp, Arabidopsis thaliana columbia
gcatcttcttcaagctgcgccgctttctcactctattttatctctcaaatttgaccttctccgttgttctttcgcatcgctcaggagcagaagcttcaatctttgataatgtcgaggaacaagggtttggctgagcaagatcttaaaaaattggatgtaactgtgctacatcctctgtctcctgaggtcatttctcgccaggccactattaatataggaaccattggtcatgtcgctcatggaaagtccactgttgctaaagctatttctggtgtccagactgtccgttttaaaaatgaattggagcgtaacattaccattaagcttgggtatgcaaacgccaagatttacaaatgtgaggatgagaaatgccctaaaccaatgtgctacaaggcctacggaagtggaaaggaagacactcccaattgtgatgtccccggatttgaaactccaagatgaaacta

SEQ ID NO: 159846 - DNA, 412 bp, Arabidopsis thaliana columbia
gcaattggtgcattcctcttgtcactcttctgcttcttctacgtttacacactcttgaaatggaggaagaagctgaaacaacagtctacaacgggagagaagaaacgcagtcctggtagaacaagcgcaggaagtagagttcgtagcagcacaagcagatcaagcacagaaaacggagaaccaaagctagtgatgttcaataacaagatcactctagctgaaacaattgaagcaacacgacagttcgatgaagaaaacgttcttagcagaacccgatatggattgctatttaaagccaattacaatgacggaatggttctctctatccgccgcttacccaatggatcactcttaaatgagaacttgttcaaaaaggaagccgaagttcttggtaaagtcaagcaccgaaaca

SEQ ID NO: 159847 - DNA, 344 bp, Arabidopsis thaliana columbia
  unsure (1)..(344): unsure at all n locations
cacacncnngaaanggagggagtttttgaaacatttttttacaactggagagaagaaacgcagtcctggtagaacaagcgcaggaagtagagttcgtagcatcacaagcagatcaagcacagaaaactgagaaccaaagctagtgatgttcaataacaagatcactctagctgaaacaattgaagcaacacgacagttcgatgaagaaaacgttcttagcagaacccgatatggattgctatttaaagccaattacaatgacggaatggttctttctatccgccgctaacccaatggaatcacttttaaatgagaacttgttcaaaaaggtagcctgtattttt

SEQ ID NO: 159848 - DNA, 356 bp, Arabidopsis thaliana columbia
gtgcccaacgacgtccaaactaagccgagtttgttttcctaatgggtttgtgtttggcacagctactgctgcgtttcaggttgaaggtgcaattaatgaaacttgtcgtggacctgctctatgggatatcttctgtaagagaaatccagagagatgtagtggccacaacgccgatgtggccgttgatttcttccatcgttataaggaagatattcaactaatgaagaatctaaacacagacgcattcagactctcaatcgcatggtcaagaatatttcctcatgggagaaaggagaagggagtgagtcaagctggtgtgaaattctaccacgacctgatcgatgagctccttaaaa

SEQ ID NO: 159849 - DNA, 360 bp, Arabidopsis thaliana columbia
cttcgtctctcttctctgcttctccctctcattaactgtgagataaaggcggagtctctctcgaggtattttgctcattcattgattcttagagaccaaaatggttgatcaagttcagcaccccactattgcgcagaaagctgccgggcatgtcatgcgttcaagtgtttccaaggacgttcaagtgggttaccagaggccttctatgtatcaaagacatgcaacctacggaaactactccaatgctgcatttcaattttcttcgacattccggatgttggcaacaactgcttcttccgcgtttggtcaaaccccaggagagaagggggtcacttactttgcccttgactttctgatggg

SEQ ID NO: 159850 - DNA, 451 bp, Arabidopsis thaliana columbia
  unsure (1)..(451): unsure at all n locations
gcatcttctgtcaagctgcgccgctttctcacttccatcnatctctcaaatttgaccttctccgttggtctttctcatcgctcatgagcagaagcttcaatctttgataatgtcgaggaacaagggtttggctgagcaagatcttaaaaaattggatgtaactgtgctacatcctctgtctcctgaggtcatttctcgccaggccactattaatataggaaccattggtcatgtcgctcatggaaagtccactgttgttaaagctatttctggtgtccagactgtccgttttaaaaatgaattggagcgtaacattaccattaagcttggatatgcaaacgccaagatttacaaatgtgaggatgagaaatgccctagaccaatgtgctacaaggcctacggaagtggaaaggaagacacctccaattgtgatggccccggatttgaaaac

SEQ ID NO: 159851 - DNA, 301 bp, Arabidopsis thaliana columbia
  unsure (1)..(301): unsure at all n locations
cagtaaaagaaaatcaaaatggcttcacacanttttggatacccacgtatgggcccctaagagagagctcaagtttgcattggaatctttctgggatggtaagagcactgctgaggatcttcagaaggtgtctgctgatctcaggtcatccatctggaaacagatgtctgccgctgggactaagttcatccctagcaacacctttgctcactacgaccaggttcttgacaccaccgccatgtctcgggctgttccacctaggtatggatacactggtggtgagatcggccttgatgtttac

SEQ ID NO: 159852 - DNA, 470 bp, Arabidopsis thaliana columbia
  unsure (1)..(470): unsure at all n locations
ctttctcctttggtggcaaacacaacgacagtattatgtagaaacgatggcgtcgaactcgcttatgagctgtggcatagccgtcgtgtacccttcgcttctctcttcttccaagtctaaattcgtatccgccggagttccactcccaaacgccgggaatgttggtcgtatcagaatggctgctcactggatgcctggcgagccacgaccagcttaccttgacggttctgctcctggtgactttgggtttgacccacttggacttggagaagttccagcgaaccttgagagatacaaagagtcagagctcatccactgtagatgggctatgctcgctgttcctgggattttggtaccagaagcattaggatatggaaactgggttaaggctcangaatgggcagtacttaccagggggtcagccaattacttgggaaacccagtccccgggggtactttgcccacaatct

SEQ ID NO: 159853 - DNA, 301 bp, Arabidopsis thaliana columbia
cagaccacttattatgctaaggttttggattccattgtttaccaggctttggatgtcttggctgatatcctacagaattctatgttcgaggaacagagaattaaccgcgaacgagatgtcatcctcagggaaatgcaagaggtggagggacaaaccgatgaagtggttcttgaccatttacatgccactgcattccaatacacaccccttggaagaactattttgggacctgctcagaacgtcaaatcgatcaccagagaggatctacagaactacattaagactcactacactgcttcca

SEQ ID NO: 159854 - DNA, 400 bp, Arabidopsis thaliana columbia
ggagttcataattcgcgatcttgatctatcgattttcatttatatataaaagcgtgaatgagattatgatggagtcgaaaggtggtaaaaagaagtccagcagtagtagttccttattttacgaagctcccctcggttacagcattgaagacgttcgtccaaacggtggaatcaagaaattcaaatcttctgtctactcaaactgctccaagaggccatcctgagtaccagcgtgcaccgatcttcataatatagttatagctttctttactttccagtttataattttcttctttcaaagctccttttctgctggttcccggatccaatcgttctctcctcctactacaagtcctgtcgctcacacaacaaggcgagatggccttatctgcaatcggtt

SEQ ID NO: 159855 - DNA, 393 bp, Arabidopsis thaliana columbia
gccgtaccgaactgcgtgtcgacccgagcgtcccgacactgttaagagctaacaagttacttgtcaaattcttcctagatgaatctctagaatgggaactgtcaattcttcccagattttatttccccccctgcatgttttttaccctagttatgcaatacctaacattccttttgaatagttagactaatttaaggcagtatgtataatactcttaagaatctcacacatgtaccattcctcacttattttgctttcttttttggttggttctacagtgtgtaattagtcatggtgcacttcttagccttttgagccttctgactcacaatcataagaagagcatcaaaaaggaagcttgctggacaatctcaaatatcactgctggaaaca

SEQ ID NO: 159856 - DNA, 380 bp, Arabidopsis thaliana columbia
acccagcgcgtccgcgactctctcaaacttcactttttgccttctccttagatcaaatcttcttcttcttccttctctgttctcgacgaccttctcaaattcgatctcaactcaaaacatttgtctgatccattaatcggattcagatttttgtgaagattcaacaacagatctgtgagtccattggagtatattactattcatagtgatacaatgacaagggttacacgcgattttcgggattcattacagagagatggtgttcctgcagtatcagcagatgtgaaatttgcttcaagtagatttcctaattatagaattggagctaatgatcaaatatttgatgttaaagacgatcctaaagtgatgtccatgaaaga

SEQ ID NO: 159857 - DNA, 458 bp, Arabidopsis thaliana columbia
cggacgcgtgggcttggatttgaaacgtttgaggttgttgcagacgactacatagtagcagtgcaagtgacctacgacaacgtgtttggccaagactctgacatcatcacatctattaccttcaatacattcaagggaaaaacatctccaccctatggattggaaacgcaaaagaagtttgtactcaaggacaaaaacggtggtaaacttgttggcttccatggacgcgctggtgaagctttatatgctcttggagcatattttgctacaaccacaactcctgtgactcctgccaaaaaactatctgcaattggtggtgatgaaggaactgcatgggacgacggtgcgtacgatggtgtcaagaaggtgtacgtaggacaaggccaagatgggatatcagccgttaagtttgagtacaacaaaggcgcggagaatatcgtaggaggtgaacatggaaa

SEQ ID NO: 159858 - DNA, 471 bp, Arabidopsis thaliana columbia
  unsure (1)..(471): unsure at all n locations
agnnaagcttagagaaccannctctggtcactcggagctctcgtatttcttactccaatggggggatccgatcacgcctaattnaatccgaattcatctgtctcctataaccatggnnccgcggcgacgtcggaatnccggttcgaagagcgtctaagacgcgtctgtctcttccacaggcgacgcagacctagagatctcgccgagaggagatcgtcgcaaaatcntgattgcattggagctaccgaagcatcacattggaagaaatttgatgatggattccctaatttgttcatacaaaatgctcaaggcattcgtgggcagcatgttgctttcttggcttcattcagttcacctgctgtgatcttcgagcagctttcggttatttatgctctgcctaagctttttgttcttcgtttacacttgttcttccattctttcctactggaacttctgagagaatggaagacg

SEQ ID NO: 159859 - DNA, 255 bp, Arabidopsis thaliana columbia
acgcttagatctccgagggaaggcggctgtttctcattctgcattagcatacaagctataccagcagaaattctctggcctaagatgggaagctctggtaaagaaaggtgccaagaaacagagacttctctgggcatcaacaagtgtaaagaacccagcttactctgacaccttatatgtcgctcctctcatcggacctgacactgtatcaaccatgccggatcaagccctggaagcattcgcagatcatggaat

SEQ ID NO: 159860 - DNA, 320 bp, Arabidopsis thaliana columbia
cggacgcgtgggcaaaactcgcttcctgataatttaatcaaaagcttctctatcaagcttatcgaaaagtcacatcttttggaagaaacaatggctcgtaccaagcaaaccgctaggaaatccaccggaggtaaagctcccaggaagcagcttgccaccaaggcggcgaggaaatcagcaccaaccaccggaggagtcaagaagcctcaccgttaccgtccaggaaccgtcgctcttcgtgagaattcgaagtaccagaagagtactgaattgttgatccgcaagctttccttccagcgtctcgttcggaaatagctcag

SEQ ID NO: 159861 - DNA, 398 bp, Arabidopsis thaliana columbia
gaaaacaacgatctcactcaatcatcggcgtgtgggataaagacgatggcttttactctaacaatccctagattttctgcaatttctcgcaaacccatcacttgttcttcttcgaggacacagtgtcctgctccctttacccatggacgatcgatttctctcagacgaagacttaccttattgccccttaaagcttctactgatcaatcaggtcaggtgggtggggaagaagttgatagcaagattttaccttattgtagcatcaacaagaatgagaagagaactatcggtgaaatggaacaagagttcctccaagcgatgcaatcgttttattacgaaggcaaagcgattatgtctaatgaagagtttgataaccttaaaaaaaagttgatgtggga

SEQ ID NO: 159862 - DNA, 455 bp, Arabidopsis thaliana columbia
agaagatcaaggtgatcaatcccgttgttgaaatggatgtagacgaaatgactcgagttatctggaaattcatcaaagacaagcttattttccctttcctggagctggatatcaaatactttgatcttggactgcctaaccgcgatttcactgatgataaggttactatagagactgctgaagctactttaaagtataatgtggctattaagtgtgcgacgattactccggatgaagctcgtgttagggagttcggcttaaagaaaatgtggaggagtcctaatggaactataaggaacattttaaacggcacagttttcagggaacctatcatttgcagaaacatccctcgtcttgttccaggatggacgaagccaatctgtattggaaggcatgcttttggtgatcagtatagagccactgatctcattgtcaatgaaccagaaaactgaaac

SEQ ID NO: 159863 - DNA, 465 bp, Arabidopsis thaliana columbia
gtgaaaatgccggcgggacacggagtgagggcgttaacttgagatctgttcgcgagaccattcaggaagaagggttatattccactctccacttacctcagaaccttcaaggtcggcgattacgtcgatgtcaaggttaatggagctatccacaagggtatgcctcataagttctaccatggtcgtactggtcgcatctggaatgtcactaagcgtgccgttggtgttgaagtcaacaaacagattgggaacagaatcataaggaagaggatacatgtgcgtgtggagcatgtgcaacagtcaaggtgtgctgaggagtttaaactcagaaagaagcagaacgatgtgcttaaggctgatgctaaagccagaggagagactatcagcaccaagagacagtctaaaggttctaaaccgggtttcatggtcgaaggtatgacattggagactgtcactcccattcct

SEQ ID NO: 159864 - DNA, 449 bp, Arabidopsis thaliana columbia
gtcgtagcctctaaaaccctaatcctctctgaaaccctatacatcgcagctgaaaatgaccggagaagtcgtcaaccctaaagcgtatccgcttgcagattctcagttatcgataacaattcttgacctcgttcaacaagctactaactacaagcagctcaagaagggtgctaatgaagctacgaagactcttaatcgtggaatctccgagtttgttgtcatggctgcagatgctgagcctctagagattcttcttcatcttcccctacttgctgaggataagaatgttccttatgtctttgtgccttcaaagcaagccttgggaagagcctgtggtgtgactagacctgttatcgcttgttcagtcacatctaacgaagctagtcaattgaaatcacagattcaacatctcaaggatgctattgagaagcttctgatctaaggcattc

SEQ ID NO: 159865 - DNA, 409 bp, Arabidopsis thaliana columbia
cacgcgcctctcgggtaattttcgcaggtgggtgtctctgttgatgatatgaaccaagaaaatatcttcaaattattgaacacaaaagtaagaaaaaagtgagataataaggaaattaaaacaataaattatcctttcggtgggattttttttgtcgtcttctattgtttttgtgagtgtgtgtgtttatataatggtaagagatctctgatctctcaagcttgtttatagagagagtttcttctcatgctctttctaccaaggagaagattctctcgataataatgtttgacatgcctctggcaagcaacctgagtctgtggtctgaatcttttcaaggctagagaagatatcgtaacacgagaatggtgacaggttgtggtgatctgcatcaacatatcaaatatgc

SEQ ID NO: 159866 - DNA, 412 bp, Arabidopsis thaliana columbia
cgttcctagacaatgaagcaaaactacgagatttgtctagcgaaagctggcgtttgaggttgtgcatgcgggagaaatttggtaaacgacgagcaagttggctgtgtagcgacgaggagaggctgacgaaaccgaagaaagaacatggatcgggtttatctttcgatctgaaccaagccgctgatacggatgatggttctcataatacgagcgatctaacaacagataatgatcaagacgagcaaggttttagtggaaagctgtcactacaatgcgttccatttgcattccacgatatggttagccgtgtagatgatgcggtagcgtttcgagcagttgatttcgcagctgtgagacggagaatcacagaaacattatctgagagattcgaaacgatcataggcgaatcact

SEQ ID NO: 159867 - DNA, 466 bp, Arabidopsis thaliana columbia
gcttaagctctctcgagtctgcctcaagtgtttttgggggaaattgatttcgttgagaaaaaccctaaattccgaacttgaagcaatttttcaatttcgtttgcagaaaaatggcaaaggataatgaagcaatcgccattaacgatgcggttcacaagcttcagctctatatgctcgaaaataccactgatcagaaccagctcttcgcggcgaggaagttaatgtctcgatcagattacgaagatgtcgtcactgaacgagcaatcgctaagctctgtggttatactctttgccagagatttctcccttccgatgtttctagaagagggaagtatcggatttcgttgaaggaccataaggtttacgatttacaggagacgagcaagttttgctccgctggttgtttaattgatagcaaaacgttttcggggagtttgcaagaagctcgtacattggagtttgattc

SEQ ID NO: 159868 - DNA, 455 bp, Arabidopsis thaliana columbia
  unsure (1)..(455): unsure at all n locations
cctcaatccgcctttcttccttatggcgtttgcttcttccatcctccctccggtcgngcctctgatggccgtctcattattttcttcattgccgaatcctggggactaccatacgtaccgacttactttggatcccaaaacgctagcttggaacaagggatcaattttagaggcgttagaaacaccacggatctaaaccagcttttcttggctaggaaggtaaagtatttatggagacgctggcaccgtcgtgtcaatgtcaacatgaagaggcacgcgattgtttctgcaatcgctgctactgcttgtccagctcttgtgatggctcgtggtcacaagatcgagaatgttcctgagatgcctcttgttgttagcgactcagctgaagctgtggagaagacatcagctgcgatcaaggtattgaagcagatcggtgcttacgacgatgcggagaa

SEQ ID NO: 159869 - DNA, 457 bp, Arabidopsis thaliana columbia
ctccagttcgacctgacattgtcaacttcgtccacgcttaaatctccaacaacagccgtcagccttacgcagtctccaaaaaggccggtcaccaaacctccgccgagtcctggggaaccggaagagccgtgtcacgtatccctcgtgttcctggtggtggaactcaccgtgccggtcaagcagcgttcggaaacatgtgtcgtggtggtcgtatgtttgctccgactaagatctggagacgctggcaccgtcgtgtcaatgtcaacatgaagaggcacgcgattgtttctgcaatcgctgctactgctgttccagctcttgtgatggctcgtggtcacaagatcgagaatgttcctgagatgcctcttgttgttagcgactcagctgaagctgtggagaagacatcagctgcgatcaaggtattgaagcagatcggtgcttacgacgatgcggagaa

SEQ ID NO: 159870 - DNA, 440 bp, Arabidopsis thaliana columbia
tttttcttgaataaaatcagaattacaaacaaaattggttttgcaaaagcttcctctcattgggctgcttttgctcctgaccatcgtcgcctctccagcaaatgcagatggacctgtttgcccgccgtcgaacaaactaagccgggcaagtttccctgaaggttttttatttggcacggctactgcggcataccaggtcgaaggtgcgattaatgaaacttgtcgtggaccagccttatgggacatctactgtagaagatatccagagaggtgcaataacgataacggcgatgtggcccgtgatttcttccatcgttataaggaagatatccaactaatgaagaatctaaacactgacgcctttagaatgtctatcgcatggccaagaatatttcctcatgggagaaaggagaaaggagtgagtcaagcttgtgtgcaat

SEQ ID NO: 159871 - DNA, 429 bp, Arabidopsis thaliana columbia
aaaaagaagaagggaaaggtggattcctcgatattgtgaaagatttcattcatgacattggtgagaaactcgagggaaccattggctttgggaagccaactgctgatgtctctgcgattcatatccctaagatcaatcttgagagggcagatattgttgtggatgtgcttgtcaagaacccgaatccagttcctatccctctcatcgatgtcaactacctggtcgagagcgatgggaggaaactggtttctggtttgatcccggatgctggaacactcaaggctcatggagaagaaactgtgaagataccattgacgttgatctatgatgacatcaagagcacttacaacgatatcaacccccgggatgatcataccttacagaatcaaggttgatctgattgtggatgtgccagtattgggaagactg

SEQ ID NO: 159872 - DNA, 81 bp, Arabidopsis thaliana columbia
agctggaggaggatacggtggtggtgctggaggatgacttggaggcggaggtggaattggaggaggaggaggctttggcgg

SEQ ID NO: 159873 - DNA, 422 bp, Arabidopsis thaliana columbia
tgctggtatgggatctgatctctttggatcatattcttaagcatcatgcgctgctcttgttggtgcctcgatctcatctttcggaatcaaccacgacttcactgccatgtgctacccattgctcatcagttcaatgggaatcttggtttgtttgatcacaactctctttgccactgacttccttgagattaagcttgtcaaggagattgaaccagcattgaagaaccagctcattatctcaactgttattatgactgttggtattgctattgtgtcatgggttggcttaccgacctcctttaccatcttcaactttggaacacaaagttgtcaagaactggcagctattcctttgtgtttgtgttggtctttgggctggactcattatttggttcgtcactgagtactacactagtaacgcc

SEQ ID NO: 159874 - DNA, 455 bp, Arabidopsis thaliana columbia
caattctcgccgccggtcaccggaataaccaggagtctccgggatacaaaaccgtcactgtctaatctccgtgtatttccggtttacactgagataagaactatgacgacgagtaatctgaggaaatcggcgtgttttgtggctaaggctatagaacagagacgagatacagctggatctgaatcggaatcagaagcgactccgtcaccggcggaagagagtggaagcggagaagataaggaagtggagattagcgcgataggagcagagataaaagcagcgatggagcagaggaaaacggcggaggaagagaaagggaagaacgagtttcttagtggagttgcggaggaagtgaaggagattgagtggccggcgtttcagaaagttctcggaactaccggcgtcgtgctcggtgttatcgctggctctagcgtcgtcttgctcactgtcaattt

SEQ ID NO: 159875 - DNA, 403 bp, Arabidopsis thaliana columbia
agcagcttagtctctctgatctctctacctccctcacaccctaaaactcagcaacaatggccgttaccttttcagatctacacacagaggagggtgtcaaatccgtggaggagcacctcgccggaaaaacctacatctccggagatcaattgtctgtggatgatgtcaaggtttacgctgccgttccagtgaaacccagcgatgccttccccaatgctagcaagtggtacgagtccgtggcttcccaacttgctaaaagtttccctggaaaggccgttggagtacaattcggtggctctgctgctgctgctccagctgttgaagctgaggcacctgcagctgcagctgatgatgatgatgacatggatctctttggtgacgagaccgaagaagaaaagaaagc

SEQ ID NO: 159876 - DNA, 349 bp, Arabidopsis thaliana columbia
gaaaaaaaagcttcccagagagaagagaaaaaacttctctgaggcggccatgacgttgcagagaggtttacctcttctcttgcaacagtacacggcgttgttcaagaaaaaccttttgctttcatggcggagcaaacgagccacgtttcttcagctcttcgcttctttcttcttcatccttctcatcttctgtatccaagcagccatggagaagagtttcgcttcctccacggctctcaaaactgttacggatccgacggcgctgatatcgccgccgattccgccttgtgaagataaattcttcgtgaatcttccttgctatgactttgtttggagcggtaatcgtagc

SEQ ID NO: 159877 - DNA, 460 bp, Arabidopsis thaliana columbia
gattttatggatggagatgaaccaatttcttattaaaaagcaagaaagttctttgctcaggatccagcacaaaagtgggcagcatatgttgctgggacaatcttggtattgatgatagaacttggtgtgcgttttgaggatagcatcagcttgctggtttcttctgctgtacctgaaggtaaaggtgtatcttcatctgctgctgtggaggtggcgagcatgtccgcaatagctgctgcacatggactgagtatcgaccccagagatcttgctatactctgccaaaaggtggagaatcacattgttggagctccatgtggtgttatggatcagatgacttcttcctgtggggaagccaataaactgttggccatgatctgccaacctgcagaagtagttgggcttgttgagattcccaaccatgtcagattttggggaattgattccggaattcgacaca

SEQ ID NO: 159878 - DNA, 281 bp, Arabidopsis thaliana columbia
ctttgcttcttcgtcttcttctctctttaggtttaacaagttcgcaatcctggtttgggtttaggacaaatcagagaagattatgatgtttggtttagagaaaacgatgactttggagcatgaaattctgaaggagaatcatgagactctgttgaaagattatgagagtcttcaggagaggattaagcatgctgaggaagcttatgaggctattaagttgcatcatgagaacaaagctaaggagcttgtagtgagttactatcgcttgcttgaggaatgaa

SEQ ID NO: 159879 - DNA, 421 bp, Arabidopsis thaliana columbia
gaggatatgggtttgtgcagtttgacactgaggtttcagctaagaatgctattgagaagctgaatgggaaagtgttgaatgacaaacagatttttgttggaccttttcttcgtaaggaggaaagagagtctgctgctgataagatgaagtttactaatgtttatgtgaagaatctttcggaggcgactactgacgatgagttgaagactacttttggtcagtatggtagtatctcgagcgctgtagttatgagggatggagatgggaaatccaggtgttttggatttgtcaactttgagaatcctgaagatgcagctcgtgctgttgaagctctcaatggaaagaagtttgatgataaggagtggtatgtgggtaaagctcagaagaaatctgagagggaacttgagttgagccggagata

SEQ ID NO: 159880 - DNA, 210 bp, Arabidopsis thaliana columbia
  unsure (1)..(210): unsure at all n locations
gaggatatgggatcgtgcagtacgacacatttttttcacctaagaacgctanaganaaggcgaaggttaaaggggggtttgtctaacacaaaccccccggacctaaacatcgtaaggaggaaagagagtctgctgctgataagatgaagcatactaaagtttatgtgaagaatctaacggaggcgactactgacgaagagaagaagacta

SEQ ID NO: 159881 - DNA, 438 bp, Arabidopsis thaliana columbia
ctccgatctaaacaacaatggcgacaccaggagctttctcagcaagagatgaattcgtatacatggcgaaactcgccgaacaagcatagcgttacgaagaaatggttgaattcatggagaaagtcgcgaaagctgttgacaaagacgaactcaccgtcgaagaacgtaatctcctctccgtcgcttacaaaaacgtcatcggagctcgtcgtgcttcgtggagaatcatttcatcgatcgaacaaaaggaggagtctcgcggtaacgatgaccacgtttcgttgatccgtgactacagaagcaaaatcgaaacggaactttctgatatctgtgacggaatccttaagcttctcgatacgattctcgttcccgctgctgcttctggagattcgaaggtgttttatctgaagatgaaaggtgattatcataggtacttgg

SEQ ID NO: 159882 - DNA, 429 bp, Arabidopsis thaliana columbia
aaatatgataagccttaggtttcaaccaagcaccaccttcggtgttttatcggcgtcagtgagccgcgccggttttatcaagcggtgcggttcgactaaaccgggaagggttggccggtttgttacaatggcgacggcggcgagtcctcttgaaatctgcgttaaagcttctatcaccactcccaacaagctcggagactgccctttttgccaaaaggtgttactgacaatggaggagaagaatgttccttatgacatgaaaatggtggatttgagtaacaaaccagaatggttcttgaagattagtccagaaggtaaagtcccagttgtgaagtttgatgagaaatgggttccggattcagatgttataacacaggctttagaagagaagtatcctgagcctcctcttgctaccccacctgaaaaggc

SEQ ID NO: 159883 - DNA, 364 bp, Arabidopsis thaliana columbia
  unsure (1)..(364): unsure at all n locations
gacccaggcgtccgaaatatgataagccacaggnttcaaccaagcacctccttctttgacccaccggcnccagcaaggcgcgccgtttttagcaagcggtttcggtcctacaaaaccgcgaagggnngancggagggagacacaggccacggcgaagagcccacgcaaaatacccgatgaagcgtgaagcaccactcccaaccagctcctgaacagcacttgaagactacaggtgggcaggacggtagaaactcaagcgctgcagtaatgagggaaggagaagggaaatccaggtgttccggaattgtcaactatgaaaaacctgaaaatgcaactcgcgctgntgaagctctcaaaggaaaga

SEQ ID NO: 159884 - DNA, 384 bp, Arabidopsis thaliana columbia
ccccctttttcaccggtggaagtttccggagagttgttacccgaaaacgctaattggatttgtgacttgatcgatgctgattacggaagtttcacaatccaaggtcctggtttctcttggcctgttcagcaacctattggtgtttcttctaactccagtgctggagttgatggctcggctggaaactcagaagctagcaaagaacctggatccaaaaagagggggagatgtgaatcatcctctgccactagctcgaaagcatgtagagagaagcagcgacgggacaggttgaatgacaagtttatggaattgggtgcaattttggagcctggaaatccttccaaaacagacaaggctgctattttgtgtgatgctgtccgcatg

SEQ ID NO: 159885 - DNA, 461 bp, Arabidopsis thaliana columbia
  unsure (1)..(461): unsure at all n locations
gaaaagtgtaaaggtgggaagatcggaattgcacatagtcctgcttggttcgaagcacatgaccttgctgattcacaagacggtgcgtccatcgaccgtgcacttgactttattttgggatggcatctagacacaactacatttggagattatccacagatcatgaaagacattgttggacatagattgcctaaatttacaactgagcagaaagcaaaactgaaagcttctaccgatttcgttgggctcaactactatacttcagtgttttcaaaccatttggagaaacctgatccttcaaaaccaagatggatgcaagattctcttattacatgggagtctaagaatgcgcaaaattacgccattggtagcaagcctttgaccgctgcattgaacgtttactcgagaggttttagaagtctngtgaagtacattaaggacaaatacgcaaatccggaaat

SEQ ID NO: 159886 - DNA, 331 bp, Arabidopsis thaliana columbia
  unsure (1)..(331): unsure at all n locations
gaaaaatgtattcagaggaaaagaaaagcaaattatggttcaatctttgtctactgctgcgctgtttcgtactcattgtttaggccacaagacccccacaacccnatatcaaccgtcaaaacctaaacgcaactgcagcaggagtacaagcacggatcatgaaagacattgtcgcacataaattgcctaaagttacaactgagcataaagcaaaactgaaagcttctaccgatttcgttgggcttaactactatacttcaatgtattcaaaccatttggagaaaccctgaaccttcataaccaagatggtagcatgattttcatattacat

SEQ ID NO: 159887 - DNA, 414 bp, Arabidopsis thaliana columbia
ctgatggctaagaagatgaaagacactgactccgtggaagagctaaaagaagccttcagggttttcgacaaagaccagaacggtttcatctccgctgctgagctacgccatgtgatgaccaatcttggtgagaagctaactgatgaagaagtggaagagatgatccgtgaggctgatgttgatggagatggtcagattaactatgaagagtttgtcaagattatgatggctaagtgatttgataaaggtgatgatgatgatgatgatgacctttttatgcttctaggagtttaaccaaaaacatttgcatgattggtggagatatgcttttaaacagacataatttgtttttcgttcttttgattttctggtttgtgacttttgtgggtaatggaaaatcaagtaagttggatt

SEQ ID NO: 159888 - DNA, 452 bp, Arabidopsis thaliana columbia
caaaaagtttggttcttgagaaatgatggcggctcgttctcattgtatcaaccttatccccaaagtatgtcttccacaatccttcataactggagaatcagtgactaatctcagatttgattgcgtctctaagtcatcgaagctttctctcaagacatcatgtggaagatcaagaacgcatcaccggaggcaaaatctcagcatccggtccgtgtttactggaatcgtggaggaaatgggtgaagtcaaggacttgggaatggccgatcacggaggattcgacctcaaaatcggagcgagagtggtgttagaggacgtgaagctcggtgacagtatcgccgtgaacggtacttgtttaacggtgacggagtttaacgcagaggagttcacagtagggttagcaccggagacgctgagaaaaacatcgttggaggagttaaagaaaggatctc

SEQ ID NO: 159889 - DNA, 243 bp, Arabidopsis thaliana columbia
  unsure (1)..(243): unsure at all n locations
ctcatttactgttctgtttcactttctctctcncttanactctctaaatgatggcaaaaaactgtaatttagtcagtgttctatgtgtatttttggtattgaccctctttaacaaacccatcaccgtcgccgggcagaatattccggcggtgggcttgttcacctttggtgactccaacttcgacgcctgaaacaaacagactcttaccaaaaccttactccctcaaactttctggccgtatg

SEQ ID NO: 159890 - DNA, 430 bp, Arabidopsis thaliana columbia
gagagatcttaacacaaaacaaagcaaacaccaaaaaaaacagagatgggtttggttacagatgaagtgagagctagggcagagaaatacacaggagatgagatatgccgtgagaagacaaaggagtttctcaaggaagtttctatgcctaatggtttattgccattgaaggacattgaagaagttggttacgacagagagacaggtattgtctggctgaagcagaagaagagcatcacccacaagtttgaagccattggtaaacttgtctcttacgccaccgaggtcattgcacaggtggaggtcggaaagatcaagaagcttaccggtgttaaggccaaggagcttcttatttgggtcactctcaatgagcttgtcttggagcagccgacaagttcaaggaagatcaatttcaggacaccaactggtc

SEQ ID NO: 159891 - DNA, 435 bp, Arabidopsis thaliana columbia
atttgccgccgcttctctgctctccagcttctgtctatccgtacaggtaagtcaaaaagttgtgaaagatgggtcgtgttcttaccaaaacggttaagaagtcttcacgtcaggtgattgagaagtactactcacggatgacactagacttccacaccaacaagaagatcttggaagaagttgcaatcatcccatcgaaaaggctacgcaacaagattgctggattctccactcacttgatgaaacgtatccaaaagggtccagtccgtggaatctccctcaagctacaagaggaagagcgtgaaaggcgaatggactttgttcccgatgagtcagccattaaaatcgatgatgttaaggtggacaaagagacactagagatgcttgcttctttgggaatgtctgatattgctgggatttctcaagtggagacac

SEQ ID NO: 159892 - DNA, 405 bp, Arabidopsis thaliana columbia
aaccaacgtaaaacactaactaagagatcaatatgtctggagtgatgaagttggcatgcatggtcttggcttgcatgattgtggccggtccaatcacagcgaacgcgcttatgagttgtggcaccgtcaacggcaacctggcagggtgcattgcctacttgacccgaggtgctccacttacccaagggtgctgcaacggcgttactaaccttaaaaacatggccagtacaaccccagaccgtcagcaagcttgccgttgccttcaatctgccgctaaagccgttggtcccggtctcaacactgcccgtgcagctggacttcctagcgcatgcaaagtcaatattccttacaaaatcagcgccagcaccaactgcaacaccgtgaggtgatgagcgacggtcaaat

SEQ ID NO: 159893 - DNA, 439 bp, Arabidopsis thaliana columbia
  unsure (1)..(439): unsure at all n locations
aaactccttaaaattgctctcaaggcggagaagaagattaagaagaagaagaagaagaaacggcgccgtttatttattgtctatcttggttttccacgcaccgagctttaagaagagtgaaagatggtgatggactcatcaaaatggtggtggattggaaatcacaacactactaatttctctccttggcttcattctactctctctgaattggatgaaaagacaaaggaaatgctgagagtgattgatgaggatgctgattcttttgcggcacgagctgagatgtattacaagaaaaggcccgagcttatagctatggtggaagaattctaccgttcacatcgctccttggccgagaggtacgacttgttgagaccctcttctgtgcataaacatggctcaganctcgagagtcatgagaaatcatcaacttgtgatg

SEQ ID NO: 159894 - DNA, 397 bp, Arabidopsis thaliana columbia
catttagcgttgttttgaagctctctctttcaatttctgttcgtctctcgcgatctctctctctctctcagatagctccgaaactttcacgcagagttaagtgaagcaggatgggattgtcattcgccaagctttttagcaggctttttgccaagaaggagatgagaattctgatggttggtcttgatgctgctggtaagaccaccattttgtacaagctcaagctcggagagattgtaaccaccattcccactattgggttcaatgtggagactgtggagtacaagaacatcagtttcacagtgtgggatgtcggcggtcaggataagatccgtcccttgtggaggcattacttccagaacacccaaggtcttatcttttgggtggacagcaatga

SEQ ID NO: 159895 - DNA, 456 bp, Arabidopsis thaliana columbia
catttagcgttgttctgaagctctctctataatttctgtgcgtctctcgcgatctcgggctgtctctcagatagctctttttctttcacgcagagttaagtgaagcaggatgggattgtcattcgccaagctttttagcaggctttttgccaagaaggagatgagaattctgatggttggtcttgatgctgctggtaagaccaccattttgtacaagctcaagctcggagagattgtaaccaccattcccactattgggttcaatgtggagactgtggagtacaagaacatcagtttcacagtgtgggatgtctgcggtcaggataagatccgtcccttgtggaggcattacttccagaacacccaaggacttatctttgtggtggacagcaatgacagagaccgtgtttttgaggctagagatgaattgcacctaatgttgaatgaggacgagct

SEQ ID NO: 159896 - DNA, 466 bp, Arabidopsis thaliana columbia
aaaaaaaacaatacatctttccattgaactagaataaaacattttcactgtccttttgaatcagaagaagaaagagaaaaaaaagagatggagagaaacacgccggtgagaaaccctcacacttccaccgccgatctgctttcttggtcggaaactcctcctcctcctcaccactcaaccccttccgccgctcgttctcaccagccgtccgatggaatcagcaagattctaggcggtggtcagatcacagatgaagaagcccagtcgcttaataagctaaagaattgttcagggtacaagttaaaagagatgactggtagtggcatatttactgataagggaaaagttggatctgaatccgatgctactactgatccaaagactggactccgttactatcagcagactctgaatggaatgagtcagatatctttcagtgctgacggtaatgtttccccgaagaaac

SEQ ID NO: 159897 - DNA, 446 bp, Arabidopsis thaliana columbia
aattcgcaagcctccactgctcgccgtcgcactcattggaatattccattggcaccgcactaccctgaaatcatctcatcagatcaaaacgggagtttaactagaattgcgtggattaatggggaagaagcagagcgagatatctgcaatggagatcgacgatccgaaatctgaaagctcggatcagatccttccaaggttctcgatcaatgttctgcagctgatgaaatcttctcaggcgcaacatggtctgcgtcatggtgactatgctcgctatcggaggtattgctccgcacgtttgaggaggttatacaagtccttgaaattcactcatggccgtggaaaatacactcgacgagccattcttgaatcaactgtcactgatgttaggttccttcatgtggttttctatatggcggaaagagcatggagccatgcaatggaaa

SEQ ID NO: 159898 - DNA, 453 bp, Arabidopsis thaliana columbia
  unsure (1)..(453): unsure at all n locations
cggacgcgtgggaaaaaagaaaagaaaaaagaacttgttttcctcttcagcaagacacataaatcgtaatccattttctctcaactttaggaatctcaaatctccgatttggaaatccggcgacaatggtgagagatattgaagatgagattagagacgagaagaatcctcgtcctcttgatgaagatgatatcgctctcctcaagacttatgggttagggccttactctgcacctatcaagaaagtggagaaagaaattaaggatctcgccaagaagatcaacgatctatgtggtatcaaggagtctgatactggtttagctcctcccagtcaatgggatcttgtatctgataagcaaatgatgcaagaagagcaacctctgcaggttgcgagatgcacanagattataagtccaaacacttgagacgccaaatacgtcataaatgtcaaac

SEQ ID NO: 159899 - DNA, 452 bp, Arabidopsis thaliana columbia
gtttttatcttttcctccgaagaagaagataagatgtttaagaagaagaagatgccaggtccagttattgaggaagtgaatgaggaggctcttatggatgccattaaagagcagatgaagctccagaaggagaacgatgttgttgttgaggatgtgaaagatggagacgaagacgatgatgatgttgatgacgacgacgatgagattgctgatggagctggtgagaatgaggcttccaagcaaagtagaagcgagaagaaaagccgaaaggcgatgctgaaactcggaatgaaacctgttactgatgttagcagagtgactatcaagagatcaaagaatgtgttgtttgtcatctcgaagccggatgtgttcaagagtccgaactctgagacctatgtgatattcggtgaggctaagattgatgacatgagctctcagctacaagcacaagc

SEQ ID NO: 159900 - DNA, 428 bp, Arabidopsis thaliana columbia
cacacactctctcttatatctctccggcgaaatctttccgatcaccgacaaaaaaaaaaaatggttgcagacgcaaacggttcatcatcaagctcatttaacttcctaatctacggtaaaaccggatggatcggtggtttactcggtaaactctgcgaagctcaaggaatcacttacacttacggctccggtcgtcttcaagatcgtcaatcgatcgtcgccgacatcgaatccgtgaaacctagccacgtgttcaacgctgctggagtcaccggtcgtcctaatgttgattggtgcgaatctcacaaagttgagacgattcgtactaatgtcgccggaaccctaactctcgctgacatttgcagagagaaaggacttgttctgatcaattacgctacggggtgtatatttgagtatgattcgggtca

SEQ ID NO: 159901 - DNA, 448 bp, Arabidopsis thaliana columbia
tccatttgcttaatctcattttcgtttcaccgtcttctctctctatatcaaaatgggtcgccggagctcatgaggaagatctttccctcgccctcgtcctgctgctgcacgcagcccagctcctcaacctgtacaccgtgcacctcctccagctccagctcaggccagcggtggtggtggtggcatgttctcaggcattggttcaaccattgctcagggtatggcttttggtactggaagtgcagttgcacacagggctgttgattctgtgatgggtccacgaaccattcagcatgaggctgttgaggctgcttctgcatctgcagcccctgctggaagcgccatgctttctagcacctgtgacattcatgctaaggctttccaagattgcatcggcagctatggaagcgaggatagcaaatgtcagttctacatggacatgttgtcc

SEQ ID NO: 159902 - DNA, 439 bp, Arabidopsis thaliana columbia
  unsure (1)..(439): unsure at all n locations
gcgagattcaagggtaaagaagaagatgagtggtgaagttgttttagctgctagagtttatcgtgaccttctcaaagcagtggtgaaacatgttggtaaagaagatcacaagtctcatttcttagactttgttaagcaagaatttcgaaagaatgcaaactcagagaaaataaaccttgctcgaaattacacatatcttctcaatagcattcactctcacaaggatctgctgttctcatacaacattgcggttgatagaactgaagaaatgaaacgagtgcttaataaatctgcagccagtgtagggcttcgtcttcctgaagtttacgagccttgatcatgcattcattcctctttgtctnttccggnggatgagtcgntatgatttcttcatttctgtggacaggtctttgggtaatttttgattatatgagatagt

SEQ ID NO: 159903 - DNA, 463 bp, Arabidopsis thaliana columbia
gaagaacaatggcttcctctatgctctcttccgttactatggttgcctctccggctcaggccactatggtcgctcctttcaacggacttaagtcctccgctgccttcccagccacccgcaaggctaacaacgacattacttccatcacaagcaacggcggaagagttaactgcatgcaggtgtggcctccgattggaaagaagaagtttgagactctctcttaccttcctgaccttaccgattccgaattggctaaggaagttgactaccttatccgcaacaagtggattccttgtgttgaattcgagttggagcacggatttgtgtaccgtgagcacggtaactcacccggatactatgatggacggtactggacaatgtggaagcttcccttggtcggttgcaccgactccgctcaagtgttgaaggaagtggaagagtgcaagaaggagtaccccaatgc

SEQ ID NO: 159904 - DNA, 242 bp, Arabidopsis thaliana columbia
gaagaacaatggctccctctatgcgcttatgtttttctatggacgcctctccggctcggggcggttttgacagggctttttacggtcttaagtcctccgctgccttcccagccacccgtaaggctaacaacgacataactttcatcacaagcaacggcggaagagttaactgcatgcaggagtggcctccgactggaaagaagaagtttgagactctgtcaatacccacctgaccttaccga

SEQ ID NO: 159905 - DNA, 422 bp, Arabidopsis thaliana columbia
gttttccagtaaacatgagtcgtcatcctgaagtgaagtgggctgagactaccgagaagattttgctcactgtagtattagctgatactaaggataccaaggttaacctagacccagaaggagtctttgatttctctgcgaaagttggtccagaaaaccacgtttatgagctcaaactggaacttgccgataaagtcaatgttgaggaaagcaaaatcaacattggagagagaagcatattctgcataattgagaaagcagagccggaaaggtggaataagctactccgtgtgaagaagcccccacactatgtcaaggttgattgggacaagtgggttgatgaggacgatgaaggcagtgctggtgccgcagatatggatatggcaggaatggaaggaatgggaggaatgggaggcatgggc

SEQ ID NO: 159906 - DNA, 443 bp, Arabidopsis thaliana columbia
gattcccgccgcttcttggttttccggcggaaccatttctccgacgaaggtgagagtttctccgccgcatcatctccggcgacctcccaacaggaattcccatcgcttggccgccattaatgccgcttctcgctctgtgagtgagctagtggaggaggatgtgttgcaaatgttcatgaaagacagagaagaaaatggagatttcatatctaaagtttctgataggctctggttaaaggagattctcgaatctattgatgttaattccaatggagcttcttcttcagctgttgaactagatgatactcgggaaagcttgatagatggcgctgatgatgatgaaagtggtttcttgaaacttaaaccgacacaagaatggattggttgggagagtgattctgcccccatgaataagaaagctctagctaaagcactacgagatg

SEQ ID NO: 159907 - DNA, 430 bp, Arabidopsis thaliana columbia
  unsure (1)..(430): unsure at all n locations
gcaaccagacacagttgctgcaagaagcaaagtttgnctgtctgatgcacagagttttgtcctgtctgggtctcacagcaatactgtttcagtccttcccaagtcagaacacgtcttaagttataagctagtgcctctgacttgcggtgaacagcaactcccaaagataactttgacatcagcgcgatatgctgctgagtttcagccatctgcggttgcttcaagtgtctttgtgtttccctcagccccacaagccgagaaagccatctctaccagcaagtagtgtaacttcgcatgacttgggttttcagatgtctatgcagtttcagccatatgtggttaagacagacatattgaatcagtttggtaaattttgatcctgaagtgtcgtctatgttgtattttcatttttccttctgatgttgataat

SEQ ID NO: 159908 - DNA, 449 bp, Arabidopsis thaliana columbia
ctcacccaagaagacaaaaacacagagagagaattagagagaaatggcgacgacaacaacagaagcaacgaagacatcatcgaccaatggagaagatcagaagcagtctcagaatcttcgacatcaagaagttggtcacaagagtctcttacagagcgatgatctctaccagtatatactggagacaagtgtgtatcctagagaaccagaatcaatgaaggaactcagggaagtgacagcaaaacatccatggaacataatgaccacatcagctgatgaaggacagttcttaaacatgcttatcaagctcgttaacgccaagaacacaatggagatcggagtttacactggctactctcttctcgccaccgctcttgctctccctgaagacggcaaaattctggctatggatgtcaacagagagaattacgaatggggtttaccgatca

SEQ ID NO: 159909 - DNA, 425 bp, Arabidopsis thaliana columbia
tctctctattgattctctacgaagaggaaagtgttttttataccatcttgatcggaaacggcgtttcgaaactggaggtcgaagacgaaaaaaactcttatctcatcgctccggtgtaccgaattcgagaggtttttgttaggtttcgtagtgattgattgattttgatggaagatagtgtggtggatgatgttataaagaggttactaggagcgaaaaacgggaagacgacgaagcaggttcagttgacggaggctgagattaaacatctttgttctaccgctaagcagatctttctcactcaacctaatcttcttgaactcgaggctcctattaagatttgtggagatactcatggtcagttctcagatcttttgagattggtcgagtatggtggctacccaccagctgcaaactatttgttt

SEQ ID NO: 159910 - DNA, 349 bp, Arabidopsis thaliana columbia
cccggggaagaatacggatctgttatgaaatattctaatatgtcaaagggtgtggtggagaatgatccgacgtggaagactgatgtaatgacgctgcaagggttgggtttggttagccccaagaaagtgtataagttttacaatgagcttcatagttacttggctgatgctggcgtggacggtgtgaaagtggatgtgcagtgtgtattggagactttgggtggtggtttaggcggtcgggttgagctgactcgtcagtttcatcaagctcttgactcctctgttgctaaaaactttccggataatggctgcattgcttgtatgagccataatacggatgctctttact

SEQ ID NO: 159911 - DNA, 371 bp, Arabidopsis thaliana columbia
gactgccgttctggcacttggatttgtcttgtactctgatccagagcagactccccgtattgtatcactgctttctgagtcatacaatccacatgttcgctatggtgcggctcttgcagtgggtatttcttgtgcaggcactggcctcagcgaagcgatatccttgttggagccacttacatcagatgttgttgactttgttcgtcaaggtgctttgattgcaatggccatggtgatggttcaaattagcgaagctagcgattctcgtgttggagtatttaggcgccaacttgagaagattatacttgacaagcacgaagatacaatgagcaaggatgggagcgattctggcctctggtatcctttgatgc

SEQ ID NO: 159912 - DNA, 427 bp, Arabidopsis thaliana columbia
gaacaaggaagatcccggaaaatggcaactgcgattgtacgttcagctctttcccgagcagtgactcgcgcagctccgaagacatccgtcgctcctaagcgaaacttttcctcttccgccggccatgacgatgcttatgaagctgcgaagtgggagaagataacttatctgggtattgctagttgcactgctctagctgtctatgttttatccaagggccatcatcacggcgaagaccctcctgcctatccgcatatgcacatccgcaacaaggagtttccttggggtccggatggtctgtttgaggtgaagcacaacaaagagcactgagtcttgcgtggtcataataacgtcttcttggtttatttgaaaggctaaaatgttttaccgtatttgttctcaccgtttgtcaacgatttgctacttc

SEQ ID NO: 159913 - DNA, 463 bp, Arabidopsis thaliana columbia
agcttcaccggagatcagagactcgaaaatggttaacattccaaagacaaagaacacttactgtaagaacaaggaatgcaaaatgcatactttgcacaaggttacccaatacaagaagggtaaagacagtcttgctgctcaaggaaagcgtcgttatgaccgtaaacaatctggttatggtggtcagactaagcctgtcttccacaaaaaggctaagaccacgaagaagattgttttgaggcttcagtgtcaaagctgcaagcacttttcgcagcgtcctatcaagaggtgcaagcatttcgagatcggtggtgacaagaagggaaagggaacatctctgttttaagttggtttcatcttattttctgcgatttttgtacttgctggatttggaatccatttgttttagctctctcgtataagattgtctcatctttgcttgttaactctatattttgaatca

SEQ ID NO: 159914 - DNA, 392 bp, Arabidopsis thaliana columbia
  unsure (1)..(392): unsure at all n locations
agcttcaccggagatctgagacgcgaaattggnttatcattccaaagacaaagaacactgactggaagaacaaggaatgttattagcatactttgcacaaggttacccaatacaagaagggtaaagacagtcttgctgctcaaggaaagcgtcgttatgaccgtaaacaatctggttatggtggtcagactaagcctgtcttccacaaaaaggctaagaccacgaagaagattgttttgaggcttcagtgtcaaagctgcaagcacttttcgcagcgtcctatcaagaggtgcaagcatttcgagatcggtggtgacaagaagggaaagggaacatctctgttttaagttgggttaatcttattttctgcgaattttgtacttgctggattt

SEQ ID NO: 159915 - DNA, 434 bp, Arabidopsis thaliana columbia
gtatcggatacgcttcctcgactctgtatgggacgctttgtctcattcaacaatctacaaagaagatggaaccagtctcttcatggggtaacacctctctcgtctccgtagatccagagatccacgacctaatcgagaaggagaaacgtcggcaatgtcgaggaatcgaacttatcgcttccgagaatttcacttccttcgccgtcatcgaagctctcggaagtgccttaaccaacaaatactccgaaggtattcctggtaatcgttattacggaggtaacgaattcatcgatgagatcgagaatctttgccgttcaagagctctcgaagctttccattgtgatccagcagcgtggggcgttaatgttcagccgtattctggatctccggcaaatttcgctgcttacacggctttgcttcagcctcacgatcgt

SEQ ID NO: 159916 - DNA, 398 bp, Arabidopsis thaliana columbia
aacaaaatgggtctctagatttcagatttctgggatctgggtgttagattaatctctttctcttccattattagtagagaaagctcactcctttcactcaaagtttctacctttttgttttcctgaaaatgggttgtgtttgaaatctcacactttgagatttgggtgtttattttgggatccttcttaccacatttagaaatttcagctagggttttcgatttctctacttctcagaggagattttagaggcaaaagatggctccaaggttggatttttcagattggtgggcgaaagacacgaggaaaggaacaccagttgtggtgaaaatggagaatcctaattactctgttgaaatcgacggtccagattcggcttttagaccaatggagaagag

SEQ ID NO: 159917 - DNA, 430 bp, Arabidopsis thaliana columbia
cgatcaggatacgaggcttaccttgtcactcacaatcttcttatctctcacgcagaagcagttgaagcttaccggaaatgcgaaaagtgtaaaggtgggaagatcggaattgcacatagtcctgcttggttcgaagcacatgaccttgctgattcacaagacggtgcgtccatcgaccgtgcacttgactttattttgggatggcatctagacacaactacatttggagattatccacagatcatgaaagacattgttggacatagattgcctaaatttacaactgagcagaaagcaaaactgaaagcttctaccgatttcgttgggctcaactactatacttcagtgttttcaaaccatttggagaaacctgatccttcaaaaccaagatggatgcaagattctcttattacatgggagtctaagaatg

SEQ ID NO: 159918 - DNA, 459 bp, Arabidopsis thaliana columbia
cttccttctcaagcctttgaatacatcaaatccaacggtttcctcgacacagagaaagcttatccttataccggtaaagatgaaacctgcaaattttcagctgaaaacgttggtgtacaagtcctcaactcagtcaacattactctgggtgctgaagatgaactgaagcatgcggttggattggtacggccagtaagcatagcatttgaggttatacactcgttccggctttacaagagtggagtttacactgatagtcacttgtgaagtactccaatggatgtgaaccacgcggttttggcccgtggttatggagttgaagacggtgtaccatattggcttattaagaactcatggggagcggattggggcgacaaaggttacttcaagatggagatggggaagaacatgtgtggtattgctacatgtgcatcataccccgttgtggcttgagatgat

SEQ ID NO: 159919 - DNA, 465 bp, Arabidopsis thaliana columbia
cagtttttgtctcattcccgatcagatctcaacgtcgactagccatggcttcaactttcagcggcgatgaaactgctcctttcttcggattccttggcgctgccgccgctctcgttttctcctgtatgggagcagcgtacgggacagcgaagagcggggttggtgtagcgtcgatgggtgtgatgagaccagagcttgtgatgaaatcgattgttcctgttgttatggctggagttttaggtatttatggtttgatcattgctggtatcatcagtaccggaatcaaccctaaggccaagtcttactatctattcgatggctatgctcatctctcttccggtcttgcttgtggtctcgctggtctctccgccggtatggctattggaattgtcggcgatgccggtgttagagcgaatgcacaacaacctaagttgtttggggggatgattctgattctcatctttt

SEQ ID NO: 159920 - DNA, 445 bp, Arabidopsis thaliana columbia
gcgtccgcgattcgaaagtattccgacccggatgggtcggtttgtttcgattgatatctcaaaattcagaatcccggaagaagatcaaccaacctgaaccggagtgaacagtcaaattaacccgcccggtttaactcgagctccgtctatcttagaacgggtcaaatccattaagctatcctccttctacagatccgacccggatttggatcaaaaacaaaatccggatccggttcttcacgaggagcacaagcatgtacgaagcaaatcggaatcgaaaaaaccggtgaagaagaagaagaaagctttaacgaagatgacaaaatcggctagcgagaaatcaggttttggtttcgcaggaagccatgcggaagcgccggagacggtggaatccctcgaacggagaagaccagatacaacgagagtcgaaagatcgacgtctttc

SEQ ID NO: 159921 - DNA, 393 bp, Arabidopsis thaliana columbia
gcgaggtcgaaggcaaccacctcacacacgccgttatcttcggccaagacggcagtgtctgggctcagagctcagctttccctcagttgaagcctgcagagatagcaggaatcaacaaagactttgaagaagccggacatcttgccccaaccgggctattccttggcggtgagaagtacatggttgtccaaggtgaggctggagccgtcatccgagggaaaaagggacctggtggagtcactatcaagaagactactcaagctctagtctttggtatctatgatgaaccgatgaccggagggcaatgcaacttggtcgtggagaggctcggcgattaccttatcgagtctggtctctaagttcactcaaagggcttcaaacaaatttcatttt

SEQ ID NO: 159922 - DNA, 382 bp, Arabidopsis thaliana columbia
caacaacaacaacaacactctcttacctctcactttcacctctcctccaccgtaacccccaccgtcgatgactcctccatcgaagtggtccgacgtccacgtggcagaccaccaggttccaaaaacaaacctaaaccacccgtcttcgtcacacgtgacaccgaccctcctatgagtccttacatcctcgaagttccttcaggaaacgacgtcgtcgaagccatcaaccgtttctgccgccgtaaatccatcggagtctgcgtccttagtggctctggctctgtagctaacgtcactttacgtcagccatcaccggcagctcttggctctaccataactttccatggaaagtttgatctcctctccgtctccgcaacgtttc

SEQ ID NO: 159923 - DNA, 388 bp, Arabidopsis thaliana columbia
ttgagagcttactgaagatggcaccgacaaaagttgaagagcgcaagttgaaagcgtacaatgatgattcgcctgttaagcttggacatgctgagaaattccttaaggcaatgttggacatccctttcgcctttaaaagagttgatgcaatgctctatgtagccaactttgagtccgaggttgaatacttgaagaaatcttttgagactcttgaggctgcttgtgaagaactgaggaacagtaggatgttcttaaagcttcttgaagcggttcttaaagacaggaaaccgtatgaacgttggaacaaaccgaggagatgcacatgcgttcaagcttgatacacttctcaagctagtcgatgtcaaaggcgctgatgggaaaacaactc

SEQ ID NO: 159924 - DNA, 254 bp, Arabidopsis thaliana columbia
cttcagtctctcttctctgcttcgccctctcatttcctgtagagataaaggcggagtctctctccagttattttgctcatccatcgattcttagagttcaaaatggttgatcaagttcagcaccccactattgcgcagaaagctgccgggcagttcatgcgttcaagtgtttccaaggacgttcaagagggttaccagaggccttctatgtatcaaagacatgcaacctactgaaactactcctatgctgcatt

SEQ ID NO: 159925 - DNA, 436 bp, Arabidopsis thaliana columbia
agcagccatggagatagccgccgttagcactgtctccgtcgcgccacaatcgcgcagagtgtcgaatgcgttctccaggaatctaggatccgtatcttctctttcgtttggtttctttgagaaagaatattgctttaagagccctagccttcgtgtgtctgcagcagcttccatggacgccgtcacagctgagaaattttctccggcgagttttctagacaaaaaagaaaccggagttcttcactttgtgaaataccatggcctcggcaatgacttcattttggtcgataacagagactcatcggaacctaagattactcaagaacaggcggcgaagctgtgtgatcgaaacttcggtgttggtgccgatggagtgatttttgcaatgccaggagtcaatggtactgattacgcaatgcggattttcaattcagat

SEQ ID NO: 159926 - DNA, 427 bp, Arabidopsis thaliana columbia
ccagagcgaccggtcgtggcttactcgtgccagccactcgcatttttccagattttattatccttcctcgaaacaagagcttagctaagatgacgaagaactacccaaccgtgagcgaagattacaagaaggctgttgagaagtgcaagaggaagctcagaggtttgatcgctgagaagaactgtgcacccatcatggtccgactcgcatggcactctgctggaactttcgattgtcaatcaaggactggaggtccattcggaacaatgaggtttgacgctgagcaagctcatggagccaacagtggtatccacattgctcttaggttgttggaccccatcagggagcaattccctaccatctcttttgctgatttccatcagcttgctggagctgtggcccgtgaaagtactggtggccctgacat

SEQ ID NO: 159927 - DNA, 373 bp, Arabidopsis thaliana columbia
caagtctttgacaatggctgaagatgaaatagttttcttagaagagcaatcacagccacaggagattactccagttccaccatcttcttcgtcttcgccttcgttagtggtggaagacgacgatgagatgaagctcaagcacttggaattcattcaagtcgcggcggtttacttcgccgcctgtttctcgaccctctacgagttggctaaagacaacgctggtccactcaaactcggcgtcgagaacattgaagattgcgttcgaaccgtgcttgctccattatacgaaaaattccacgacgttcctttcaagcttctccttttcgtcgatcgtaaggtggacgatgtgttcttcgatggtgagacatatgtt

SEQ ID NO: 159928 - DNA, 425 bp, Arabidopsis thaliana columbia
gcgtcgagagcattttatatcttcaatcatcttacgcaggctgttgtagcagcagtgtctatcggagacgatgaagttcaacgtcgccaatccgaccaccgggtgtcaaaagaaactcgagatcgatgacgatcaaaaactccgcgcctttttcgacaagaggctctctcaggaagttagcggagatgctctaggcgaggaattcaagggatacgtattcaagatcatgggaggatgtgacaagcaaggtttcccaatgaaacaaggagttctcactccagggcgtgtccgtcttttgcttcaccgaggtacttcttgttttagaggacacggaaggaggactggagagaggagacgaaagtctgtccgtggttgcattgtgagccctgacctgtctgtttttaacttggtcattggggaagaag

SEQ ID NO: 159929 - DNA, 460 bp, Arabidopsis thaliana columbia
ccaaagatgcaaatttcctaggttatacattcaatattttggagataggtgatgaacaccatatccgtggcatggcggaactgaagcggatgagtaagacagcaaataaaccatctctcaaaacactcttcgaaacaccatatcctccttctgagaatcaagccttaaaggatttgcttgattcacctatttactctgaaggctctagagggacttccggatcaccattttcacgaccgaatcaatcacaggcccggagatgatcaaaagggaaaatctaaaagtgattaagaacaaacaaagtaaaagtaaaaaaaaaggtagtcattgttcttcagttgcaaatattcatcttttcatacatatatactctgtaatgtaaaaaaaaaaacagtgaacatccggaagagaatcaaaaccaaaatgcatataggaaactttataggtatacaaacatatt

SEQ ID NO: 159930 - DNA, 177 bp, Arabidopsis thaliana columbia
taagctaaaatttgctactattagcaactaggtatattcacaaagatacaacaagcattagtcattcctttgttcaataaatgtggaagttacagggagtatacaaacaatacatgtcaaacaacctcgttagtctaggcactgcgttccacggttgaagatgatgatgcttattgt

SEQ ID NO: 159931 - DNA, 364 bp, Arabidopsis thaliana columbia
agaaagggagggaggagagtgtagcagatctgcttaaatgacaaccagattcaagaagaacaggaagaagagaggtcacgtcagcgccggacatggacgtatcggtaagcaccgtaagcatcccggaggtcgtggtaacgctggaggtatgcatcaccacaggatcctcttcgacaagtaccatccaggttacttcggtaaagttggtatgaggtatttccacaagctgaggaacaagttcttctggccaaatcgttaaccttgacaagctttggtcactcgtccctgtagatgtgaaggcgaaatcaaccaaggacattgttccgttgatcgatgtgactcaacatggttttttcaaggtttt

SEQ ID NO: 159932 - DNA, 288 bp, Arabidopsis thaliana columbia
agatctagaagaagaagaagaagaagaagaagggggaataatggcattgcaatggctgattctgtcgtatgtggttgccgccgaggtagcgatcgccgtcatcttgactctcccttacccaatgctcctgaagaaacgcatcgtatcacttatctcgctcatactcaatcctgccgcttccatcgtcgccttcgctggatttcaactcctcgatatttactggaagaatgagcataggctattgtgctcatctgaagtttgcactactacagagcgggatcgtcacga

SEQ ID NO: 159933 - DNA, 376 bp, Arabidopsis thaliana columbia
gtcacttttctttctccacactttccgcaagattgttctgttcttcaaacgattctaagatgaatggagaagaagcgaaaacgagtcaacctcagaagaagcttcagaaccctactccacgtttaaacgagaggattctctcatctttgtctaagagatcggttgctgcacatccatggcatgatcttgaaatcggacctggagctccagtgattttcaatgtggttattgcgatctcaaaggggagcaaagtcaaatatgaactcgacaaaaaaacaggtcttatcaaggtcgatcggattctttattcttcggttgagtatcctcacaactacgggtttgtcccacgcacactatgtgaagacaacgaccctat

SEQ ID NO: 159934 - DNA, 359 bp, Arabidopsis thaliana columbia
cgttgtcctcctcactttcatcagccgttttgaatctccggcgacttgacagagaagaacaaggaagaagactaagagagaaagtaagagataatccaggagattcattctccgttttgaatcttcctcaatctcatcttcttccgctctttctttccaagctcataaaaaatggctgaggctgatgatattcaaccaatcgtgtgtgacaatggtaccggtatggtgaaggctggatttgcaggagatgatgcttcccagggctgtttttcccagtgttgttggtaggccaagacatcatggggtcatggttgggatgaaccaaaaggttgcatatgttggtgatgaatcacattcca

SEQ ID NO: 159935 - DNA, 462 bp, Arabidopsis thaliana columbia
atctcgttaaacctagaaacctcgagaaaaaccgtatcaatggcgccgaaagcagagaagaagcccgctgagaagaaaccagcttccgagaagccggtggaggagaaatcaaaagccgagaaagctccggcggagaagaaaccaaaggccggaaagaagctcccgaaggaagctggtgccggaggcgacaagaagaaaaagatgaagaagaagagtgtcgagacttacaagatctacatcttcaaggtgcttaagcaagttcatcccgatatcggaatctccagcaaagcgatggggatcatgaacagtttcattaacgatatcttcgagaagcttgctcaagaggcgtcgaagcttgcgaggtacaataagaaacctacgatcacttctcgggagattcagactgctgtgagattggtgcttcctggagagttggcgaagcatgccgtttctgaggggact

SEQ ID NO: 159936 - DNA, 433 bp, Arabidopsis thaliana columbia
attctcactaaaaccctcgaacacatcgcctttatctctttctctagatctactcgctatggctactatcaccgttgttaaggctagacagatcttcgacagtcgtggtaatcccaccgttgaggttgatatccacacgtcaaatggtattaaggttacagcagctgttccaagtggagcttccactggtatctatgaggctcttgagctgagggatggaggatctgactaccttggaaagggtgtatctaaggctgttggcaatgtgaacaacatcatcgggccagcacttattggaaaggacccaactcagcagactgctattgacaacttcatggtccatgaacttgacggaacccataacgagtggtggtggtgcaagcaaaagcttggagccaatgcgattcttgctgtgtctcttgctgtctgcaaa

SEQ ID NO: 159937 - DNA, 450 bp, Arabidopsis thaliana columbia
ccgccatagctacaatgcttagtctctcaatcgctactccggggacggcggcgatttttcgtagaggaactgcttcggcgacttcaacttcgtcttcattccatggtgtcagaatccagcaccaggtttctgctcgcgtccccgcggcggcgacgatatcgtcgtcgtctcctaaaccgtcggtggtgatgatgtcgaaaagagaggcggaattgaaagagataagatcgaagacgacggagcagttacaagaggaggttgttgaccttaaaggtgagctctttatgcttcgtctccagaaatcggcaaggaatgagttcaaatctagcgactttcgtcgtatgaagaaacaagttgctcggatgttgacggttaaaagagagagggagatcaaagaagggataaagaaaaggttgtcgaggaaacttgacagacaatggaagaaaagca

SEQ ID NO: 159938 - DNA, 421 bp, Arabidopsis thaliana columbia
ctctaataaacccaagtaggagtatactataatgttgttggctggagcttcttctttggatgagatcagacaggctcagagagctgatggacctgcatgcatcttggctattggcactgctaaccctgagaaccatgtgcttcaagcggagtatcctgactactacttccgcatcaccaacagtgaacacatgaccgacctcaaggagaagttcaagcgcatgtgcgacaagtcgacaattcggaaacgtcacatgcatctgacggaggaattcctcaaggaaaacccacacatgtgtgcttacatggctccttctctggacaccagacaggacatcgtggtggtcgaagtccctaagctaggccaagaagcggcagtgaaggccatcatggagtggtgccagcccaagtcaaagatcact

SEQ ID NO: 159939 - DNA, 463 bp, Arabidopsis thaliana columbia
attttcctttcaattgactcagtgagtcgccgatcgagttagaaatgggaatgggaagtaacggagaattgaagtatgagatctcccagaacgcgtacatcaaactcgttcttcactcgctgcgacacaagacggcggcggtcaacggagtcctcgtcgtagaatcagccctaaggacgacggagttgtagagatctcagattctgtgccgctctttcactctaacctcgctctccttcctcctctcgagatctccctcatcatgatagaggagcattatgtggctcaaggtttaagtattgttggatactttcatgcaaacgagaggtttgatgacgttgagctctgtggtgtggctaaaaacattggtgatcacatttctcgctatttccctcaggcaccaattctcttggtgaacaacaaaaagcttgaagccttatcaaagggtaaagagcgaagccct

SEQ ID NO: 159940 - DNA, 422 bp, Arabidopsis thaliana columbia
actactcccttggcctataaatatttctctgcttttaatttccaatttgctctgattcattcacaaataacaatcctctcttcgtttttgtttttcttttggatccaaagctctcttaaatctgtaaatcaacaatggccgccaccactgagaatctccctcaactcaaatccgccgtcgatggccttactgagatgagtgagagtgagaagagcggattcatcagcctggtttcacgttacctgagcggtgaggcacaacacattgagtggagtaagatccagactcctaccgatgaaatcgttgttccctacgagaaaatgacccctgtctcccaagatgttgccgagaccaagaatctgttggacaaacttgttgtgttgaagcttaatggaggtcttggaacaacaatgggatgcact

SEQ ID NO: 159941 - DNA, 431 bp, Arabidopsis thaliana columbia
caagaagcagaagatggcccaaaaggtggaagctcaaggagggaaaggagccaacctatgggacgatggatcgacacatgacgccgtgaccaagattcagctcgcagcaggcatagacggaattcaatatgttcagtttgattatgtcaagaacggacaacccgaacaagctcctcttcgtggtaccaaaggccgtgttctcccagctgatccgtttgtgattaaccatccagacgaacatctagtttctgtagaaggttggtatagccctgaaggtatcattcaaggaattaagttcatctccaacaagaagacttctgatgtcattggatccgatgagggtactcacttcactctacaagtttaagacaagaagatcattgggtttcatgggtctgcgggggcaatcttaattctcttggggcttactt

SEQ ID NO: 159942 - DNA, 219 bp, Arabidopsis thaliana columbia
gaaggtccctccagctcttaaccaattcactatttctcttgacaagaatcttgctaccagcctcttcaaggtccttctgaagtacaggccagaagacaaagctgccatgaaggagcgtcttgtaaagaaggcccaagctgaagctgagggaaagccttctgagtctaagaagctcattttagtcaaatactgtcttaactttgtgacctaccttattga

SEQ ID NO: 159943 - DNA, 367 bp, Arabidopsis thaliana columbia
ctctgactaacattcttcttcacttatctcccatctttctctcttcaataataataaacatggatctcaccgacgtaatcatattcttgctcgctctctatttcatcaacctatggcggcgccggtacttttccgccggaagcagccagtgtagcttgaacattccaccgggaccaaaaggatggccactagtcggaaacctactccaagtcatattccaacgtcgccatttcgtcttcttaatgcgtgacctacgtaaaaagtatggtccaatattcaccatgcagatgggacaacgtacgatgattatcatcacggacgaaaaactcatccacgaggcactagttcaacgcggccctacattcgc

SEQ ID NO: 159944 - DNA, 451 bp, Arabidopsis thaliana columbia
gcgttactgtgtgaaaaattcttcttcttcttcttctcagcgattgaatcgaaccaagagcgaaaatgagaaatttcagtgtcttcgagagattctctaaagcttttaaagatcatccttctctcaccaggattctcgtcgtctccacgatcagtggtggtggacttatagcgtattctgaggcaaacgcatcttatggagcaaatggtggtgctgttgttgaaactggaaccaagaagaagaaggtggtgctgctcggaactggatgggctggaactagtttcttgaagaatttgaacaattctcaatatgaggttcagattatatcgcctcggaactactttgctttcactcctttactacctagtgttacttgtggaactggtgaagctcgtagtgttgttgagccttttcgaaacattggatgtaagaatgttgataccttttactt

SEQ ID NO: 159945 - DNA, 457 bp, Arabidopsis thaliana columbia
gaactttagaagaatcgaagatctctattgtcttcttgttgcttcttctcttctcaatcttcatcagttccagtcaccaggcaaatgaggtattaccagctgaaggagataatgagatgatgatggtgccattgggggaggagaagtttatggtaatgaatgaaacaagaaggaaacttggaagttttcagatatgttcagtttgtacttgttgtggtggtgctaaaggtctttgcttgccttctccttgttgctatgctattaactgcaatatccctaatagaccctttggttactgttctttcactcccaaaacttgcaattgctttggttgccatatctgagatcttctacttcattgtaatttgggagagaaacaagtgaatctaaatcttgattcatcttcaagtgtgaaagggaggaaaaaaagaagaatatctgttcttggtttgagtct

SEQ ID NO: 159946 - DNA, 470 bp, Arabidopsis thaliana columbia
tgaaattctggtaagcaaatctttttctggtccacaacatgtttgcctttttttacttaattcttgcctaaactctgtcttgtgcagtcaagatgggtatttcaaaggtttcttattcagtcgagttgtaaagcattttgtgattcaagccggtgactctgcggagttcgatgctgtcaaagattgggcactcgacagaaagaacattgataccaggttggtacacacatgaattgataggaaggaaatgtgtaaaaaagaagctcggattaagctgattatggaaactctttctgtatctgtcttgatcagtttgaaacatgaagaattcatggtgggaactcctaaagctaaaaacgagcaaggaggattcgagttcttcattgtgtctgctcagatcaaagatctgaacgagaaattgactgtctttggtcgagtttctaaaggacaagacgttgttcaagagatcg

SEQ ID NO: 159947 - DNA, 219 bp, Arabidopsis thaliana columbia
gcttgggcgtttcaagctgagagtgatgttgctgaagttgtgattcataatcctggtgttgaggaagatccagcttgtggtccacttattgatggtgttgctatgagatctctttaccctcctagaccaactaataagaacattttgaaaaacggaggatttgaagaaggtccattagtattacccggctcgacaactggagttttgatcccaccggtt

SEQ ID NO: 159948 - DNA, 467 bp, Arabidopsis thaliana columbia
ctggaatctaggtttaaagtttagacctttgagatcacactatatcaaaaatggagctcaatttctcttcaatggctataacacaccccaaaatcccttctttcggttttacacccaccggaatattcctaaacccatcaaaatcagtgtgtttggcttcacatcatcggcttccgagagtttcatgctctgtttctactactactgattctcccaagctagtgacttcaacaaaggtgacggcaatggatggagtgagctctagagacttggagatgtcgaatttaacggcgttatcgcctttggatggacgttattggagtaaagttaaggacttggcttcttctttgagcgagtttggattgatctatttccgagtttttgtcgagatcaaatggcttcttaagctttcgaatattcctgaagtcactgaagttccaagctttagcaaagaagctcagagtttc

SEQ ID NO: 159949 - DNA, 464 bp, Arabidopsis thaliana columbia
ggaaaaaaaaaaaaaagaggcagaaccaaaaaactttagggttcgatttcgctccttggtaatcaccatgtccggagaagaagaagagaacgccgccgaactcaagatcggagatgagtttttgaaggcaaagtgcttaatgaactgtgaagtctctttgattcttgagcacaagtttgaacagcttcagcaaatctcagaggatcctatgaatcaagtttctcaagtgtttgagaagtccttgcaatatgtgaagcgattcagccgctacaagaatccagatgctgttagacaagttcgagaaatactaagcagacatcaactcactgagtttgagctatgtgttcttggcaatctctgtcctgaaactgttgaagaagcagtggcaatggttccttctcttaagacaaaaggaagagctcatgatgatgaagctattgagaagatgctcaatgatctctcac

SEQ ID NO: 159950 - DNA, 363 bp, Arabidopsis thaliana columbia
agcaacaggtaaagaggtcctctgggagaatcctctgttttgggagaagaggaacaaaggcttttgattagccatagcagcggatagggtccttgcagctctttgcaggtgattgagcgtttccatgcatcccacctttgacaaggtactgctgatggtattcttcagctttgtagaatttctttgccggtaagatctcagtcacaatcttatcctccagttttttctgctctttctctagagactcgcgtgctagtttctcttgctccggtgagtacaaatattttacctgatcggttttgtgctcccaaaaagttctcctttcaattcaaggtggttggattttgatttcaccatatcaaa

SEQ ID NO: 159951 - DNA, 462 bp, Arabidopsis thaliana columbia
cgccgaaaccctaaatctcgacctcaaaccctgtaccatggctgaaggactcgtgttgaaaggcacaatgtgtgcccacactgatatggtcaccgccattgctacaccggtcgataactccgacgtgattgtaacttcgtcgagtgacaaatcaatcatgctctggaaactcacaaaggaagacaagtcatacggcgttgctcagcggtggatgactggccactctgactttgttcaagtcgttgttctctcctccgatggacaattcgctctcttcggatcttgggacggtgagcttcgtctctgggatctcgctaccggagaatctactcgtcgtttcgttggtcacacgtaagatgccctcatgatatatgggatggaaaaaaacttgaaggagttcaagaagatgaagaaatttgaccgtcgttcaataggttatcatatggaattattattcatttt

SEQ ID NO: 159952 - DNA, 453 bp, Arabidopsis thaliana columbia
ctctttctctctctctttttctccgcggaaggattctcttcttctggttgcgtttgagtccgtacgaaaacaaaagaaaagagagagatggcggaagagaagaaagctccaatcagtgtctggactaccgtgaagcccttcgtcaatggcggtgcctctggtatgctcgctacttgcgttatccagccgatcgacatgattaaggtgaggattcaacttggtcagggatctgcagccagtataaccaccaacatgcttaagaatgagggcgttggtgccttctacaagggattatctgctgggttgctgaggcaagcaacttacacgacagcccgtcttggatcattcaagttgctgactgcaaaggcaattgagtctaatgatggaaagcctctaccgctgtatcagaaggcactatgtggtctgacagctggtgctattggtgcttgcgtc

SEQ ID NO: 159953 - DNA, 458 bp, Arabidopsis thaliana columbia
gtttctatctccgatgacacaaaacgaggaagattatttgacattttaagtaagaacagctagctttgccatctccctaaaggcaataaatctcggatccactttcacgatattttgatattttttctatttataatctttctgggttttgagtcttttgaaggctgaattgctctgaaatctcaattgtataatcatctcctgggtcgtcgttatcgtgatcatctagaagaaagcatgactacactagatttgaccagagccgagcttgctcttattgttctctatttgaacaaagctgaggctagagataagatatgcagagctatccaatatggttccaaatttttgagcggtggccaacctggtactgctcaaactgtcgacaaaaacaccagcttggcgagaaaagttttccgtcttttcaagtttgtcaatgattttcacggtcttatcag

SEQ ID NO: 159954 - DNA, 451 bp, Arabidopsis thaliana columbia
  unsure (1)..(451): unsure at all n locations
ggattattcttaatttttgattctttagtcaattttactctttaattttaattaattttttaagaaattctagaaatagaagtctataagtcaagtatatataatagaaagaagtatctaactaatatctgtttaatattaaatcttaaagcattcagaatttctttcttattctatttatttcttatcttttttcgaaatagatattatatataatatatagaaatggaaataatagataaatatcaatatagatatatttatattgcgtccaataggatttgaacctataccaaaggtttagaagacctatgtcctatccattagacaatggacgcttttcgcttttttttactttcctattgttaaaaaaaaagaatgtgcaaaatctttttaagcaatgtgtntttgagtgaattcaatacacaattgctattagacaattctaata

SEQ ID NO: 159955 - DNA, 447 bp, Arabidopsis thaliana columbia
aagttaaagccatggctgcatctttctctgtcccctctatgataatggaagaagaagggagattcgaagcggaggttgcggaagtgcagacttggtggagctcagagaggttcaagctaacaaggcgcccttacactgcccgtgacgtggtggctctacgtggccatctcaagcaaggctatgcttcgaacgagatggctaagaagctgtggagaacgctcaaaagccatcaagccaacggtacggcctctcgcaccttcggagcgttggaccctgttcaggtgaccatgatggctaaacatttggacaccatctatgtctctggttggcagtgctcgtccactcacacatccactaatgagcctggtcctgatcttggtgattatccgtacgacaccgttcctaacaaggttgaacatcctttttttgctcagtagtaccatgaca

SEQ ID NO: 159956 - DNA, 461 bp, Arabidopsis thaliana columbia
gcttctctaatttcatagctcctaacaaagcaatatcatttccaatttataaaagttaaagccatggctgcatctttctctgtcccctctatgataatggaagaagaagggagattcgaagcggaggttgcggaagtgcagacttggtggagctcagagaggttcaagctaacaaggcgcccttacactgcccgtgacgtggtggctctacgtggccatctcaagcaaggctatgcttcgaacgagatggctaagaagctgtggagaacgctcaaaagccatcaagccaacggtacggcctctcgcaccttcggagcgttggaccctgttcaggtgaccatgatggctaaacatttggacaccatctatgtctctggttggcagtgctcgtccactcacacatccactaaagagcctggtcttgatcttgccgactatccgtacgacaccgttcctaacaa

SEQ ID NO: 159957 - DNA, 122 bp, Arabidopsis thaliana columbia
attcttttctctctatatctctcgagtacgcagttttttatcgaccaattgaatccacgaggaaaggggagttaatactatggcgaccaacgaacctgagcacgagcacagagactaggtga

SEQ ID NO: 159958 - DNA, 420 bp, Arabidopsis thaliana columbia
ctctctggtggtgacgatcgaagagagttcacggattcgtacaaggattaaattaattattctggtaaattaatcgaagcgtaaggaattggggagagtgatttttctgggttcgaatttggtggttgattcaaaaaaaaaaaagggttttgagatttgggttattttgatttcgaattttggttatgggtttaggcaataagggtaacaaattcaatttcggcgataatgatctcgccgacgaagctagtggtgccgatggcgacgaaggtgatggttttggttcggttgcgtgttcgatttgtctcgagacggttgttaaaaacggcgatcgagcatgggctaatcttcaatgtgaccatcagttccatctagattgtattggttcggctttcaatgcaatgggagtgatgcaatttc

SEQ ID NO: 159959 - DNA, 427 bp, Arabidopsis thaliana columbia
  unsure (1)..(427): unsure at all n locations
catacgctttgtgcccaggcggtaataccctttttcatagaccaaccaaaaaggcatgcccatatcctcacccttttcccaaggcaagcttccttaacctgcaatatttgtggtgtacttgatgaacttcatttcacctacgtttgtcctatatgcgattttgtcacccatgctgattgtatatatatcccacaaaccataagaatatctcgccaccaccactgtatctctttcacttcttctcttctaaaaggaaaatggtcttgtggagtttgccgtcaagaagttgacaggaagtatggtgcatacacttgcaatgcgtgtaatggctacactgttcacacaagatgtgcattgcgtaatgatatatgggatggaaaaagactngagggagtacaagaagatgaagaagtgagcccgccgtcaa

SEQ ID NO: 159960 - DNA, 405 bp, Arabidopsis thaliana columbia
atctttttccgataactatggctgaggaaatcaagaatgttcctgaacaggaggtgccaaaggtagcaacagaggaatcatcggcagaggttacagatcgtggattgttcgatttcttgggaaagaagaaagacgaaacaaaaccagaggagactccgatcgcttcagagtttgagcagaaggttcatatttcagagccggagccagaggttaaacacgaaagtcttcttgaaaagcttcaccgaagcgacagttcttctagctcctcaagtgaggaagaaggttcagatggtgagaagaggaagaagacgaaggagatgaagaagccaactactgtagttgaagtaaaggaggatgagaagaaagggtttatggagaagttggaacataagcttgctcgacaca

SEQ ID NO: 159961 - DNA, 279 bp, Arabidopsis thaliana columbia
gaaagaatctacacttcatcttagtgttgaggctttttggaggtattattgagccttccttgatgatgcttgctcgtaagtacaatcaggataagatgatttgccgcaagtgctatgctcgtcttcacccaagagctgtcaactgcaggaagaagaagtgtggtcacagcaaccagttgaggcctaagaagaagatcaagtagagagactcttatcaagaatcccatctcttgcttgcttttttttgttgtcttccctttgatagggtttgtttttctt

SEQ ID NO: 159962 - DNA, 437 bp, Arabidopsis thaliana columbia
agataacactgaacagtggcttcaagatgccgatcgtcggcttaggagtatggagaatggagaaggaagggattcgagaccttatcctcaatgccatcaagatcggctatcgccatctcgactgtgctgctgattataggaatgagaccgaagttggtgatgctcttacagaagcattcaagactggtctggttaagagggaggatctcttcattacaaccaagctatggaattcagaccatggccatgtcattgaggcctgcaaagacagtctcaagaaacttcaacttgattacctcgatctcttcctcgttcattttcccgtagcaacgaaacacaccggagtagggacaaccgatagtgctttgggcgatgacggtgtattggacatagacacgaccatctctctggaaactacatggcacgacatggaaaag

SEQ ID NO: 159963 - DNA, 431 bp, Arabidopsis thaliana columbia
ccgctacacacttttctgcgatatctctgagatttgttgacagtctctaaccatgggtaaagagaagtttcacatcaacattgtggtcattggccacgtcgattctggaaagtcgaccaccactgggcacttgatctacaagttgggtggtattgacaagcgtgtcattgagaggttcgagaaggaggctgctgagatgaacaagaggtccttcaagtacgcatgggttttggacaaacttaaggctgagcgtgagcgtggtatcaccattgacattgctctctggaagttcgagaccaccaagtactactgcactgtcattgatgctcctggccatcgtgatttcatcaagaacatgatcactggtacctcccaggctgattgtgctgtccttatcattgactccaccactggtggttttgaggctggta

SEQ ID NO: 159964 - DNA, 189 bp, Arabidopsis thaliana columbia
cggacatcggaagaagtttccgcagttcaaaaactctcaccaggagtctcgagtagtaggttgcttgtctgtggagccaacaataagctctgtggtgtgacttcaacatccatactatggattttcagcctggagagtttctgaatgttaaggaagttcattataaccagcatggtttgttgcttctgg

SEQ ID NO: 159965 - DNA, 442 bp, Arabidopsis thaliana columbia
aagcaatttgctcattagagaacagagaaaaaaaattcaatggcaactcaagccgccgggatcttcaactccgccataacaaccgccgcaacctccggcgtcaagaaactccactttttctcaacaacccaccgtcccaaatccctctccttcaccaaaaccgcaatccgcgccgagaaaacagattcctccgccgccgctgctgcagcccccgccacgaaagaagctcccgtgggattcacgccaccgcagctagacccaaacacaccgtctccgatcttcgctggaagcaccggtggtcttctacgtaaagcgcaagtggaagagttctacgttatcacgtggaactcaccgaaagaacagatctttgagatgccgacaggaggagcagcgatcatgagagaaggtccgaatcttctgaagctagcgaggaaagagcagt

SEQ ID NO: 159966 - DNA, 233 bp, Arabidopsis thaliana columbia
ctctgcagcgttttggattcagaaagcctaagctagctctggtttttggcgatttgttagctgatccagaacaggtgttaatggtgtctctctccaaggcactgcaagaggttggctatgcaattgaggtttactcgcttgaagatggtccagagaatagtatttggcagaaaatgggagttccagtcacaatactcaagcctaatcaagaatcgagttgtgtatcgactggc

SEQ ID NO: 159967 - DNA, 316 bp, Arabidopsis thaliana columbia
ctctctctctatctatcttcttcatctttgttttagcttctcctttgaaactagattatctccgttaatggcgcctcagatctaaccttgggagttatatatatatacttgttcaactcttcttcgaacgctgtccaacttcttcctctggttcgatcatcgagatctcgaggctatttggccgcattgcagaagcgaatagccttgtcgtttccagaagaggttctagagcatgtgttctcgtttgttcagctggttcaggataggaactaagtgtccctggagttcttgcgttgatgcctgccatgatcccctt

SEQ ID NO: 159968 - DNA, 413 bp, Arabidopsis thaliana columbia
ctctctcagtcatggctcttcttcgtcttcctggcatttccctccaaattctaggtcacaaatcaaaccagaagaaccctaatcccaatgttgccttcaccaatcactctctctctttatctactccttcactatgtcgtctccatcgtcacgcgacgtttccagactcaattccagcaaaatccagaaacctcacttcgtacttctccaccacaacacaagagccagtcctcgaatcttcttcttcttcttcttcagctcctgaggtagtagaagaagagatttctaaaaccagattgattgctcagaatgttccatggacatctacacctgaagatattagatcgttgttcgagaagtacgggagtgttatcgacattgagatgtctatgcataagaaggaaagaaattga

SEQ ID NO: 159969 - DNA, 208 bp, Arabidopsis thaliana columbia
gtagaacccgttgattcaggaaaaagtaaggcttatgacgagtttgttgaaagtctgttggataccaatcaggatttggctaccttcaaaataccggtagaggaaaatgattcggaaaatgtgactgttgtagatccttcttttcctgcctctgttgatgcattttcttctggaatgaaaaagccttatggtttactattcgtattct

SEQ ID NO: 159970 - DNA, 450 bp, Arabidopsis thaliana columbia
cggacgcgtggggcttggggctcgctcttgggaatgcagctagcagaaagagatatcattgtagcatgccttgactacaggaactttcctcagggaacaattagtgatatggtgactgatgcttctcaaggaatctcatttgtctgcaataacatctctgcatttggaggtgaccccaacaggatctacctgatggggcaatcagctggtgcccatatagccgcttgtgctctattggaacaagctactaaagaattaaaaggagagagcatctcctggacagtgtcccagataaaagcttattttggattatctggagggtatcttctaagcttttggattcccgttggcttctatgtgctttttggtctacagcaattgatctgcttatcattttgaactttaataggtacaatctatacaaggtggttgatcacttccataatcggg

SEQ ID NO: 159971 - DNA, 462 bp, Arabidopsis thaliana columbia; identical to SEQ ID NO: 123223

SEQ ID NO: 159972 - DNA, 459 bp, Arabidopsis thaliana columbia
  unsure (1)..(459): unsure at all n locations
cttgcgtctagcgtggaggtatgcagatcttcgtaaagactttgaccggaaagaccatcactcttgaagttgagagctccgacaccattgataacgtgaaggctaagatccaggacaaggaaggcattcctccggaccagcagcgtctcatcttcgctggaaagcagcttgaggatggacgtactttggccgactacaacatccagaaggagtctactcttcacttggtcctccgtctccgaggtggtttctaaaccttgtctctctctcttatggttactgaaccaagttcatgtatcgcttcatctagtactttggtggnttatgttttggggccatgtacagcctctgataaataattgatcgactatgtttccgtttctttcatctttcttttctttcaaacaacaaatcgaacttattctctattgcaattatctctttcgattcacttttgtc

SEQ ID NO: 159973 - DNA, 424 bp, Arabidopsis thaliana columbia
atctcactcgttaccggtggatcctcttctctcgggagaagagtcaccgggactctgtacggacacaaaagaggccacgtcacgttttcggtccagtacaaccaaagatccgacccggtcttgctcctcgacctggccatgtcaacggcaactctcgtcaaagagatgtcgtcggggctcgtcaggatcgcgttggagtgcgagaagcgtcatcgatcaggtacgaagcttttccaagagcccaaatggacgatgtactgcaacgggaggaagtgcggctacgctgtgtcacgtggcggcgcgtgtactgatacagattggcgcgtgttgaacacggtatctagggttactgttggagccggagttattccgcccccgaaaactattgatgacgtgtccggtgttggtagtggaacggagcttg

SEQ ID NO: 159974 - DNA, 140 bp, Arabidopsis thaliana columbia
gaaaaatggtgtctggatcaggaatttgcgcgaagcgcgtggtggttgatgctcgtcaccacatgctaggtagcttggcttcggttgtagcaaaggatctgctcaatggccagaatattgtggctgctcgacgcgagcat

SEQ ID NO: 159975 - DNA, 296 bp, Arabidopsis thaliana columbia
acgaaacacacaaaaaaaaaaaaaaaaaagaaggtttcatggacgccattgattccgtcgtggatcctcttagagactttgccaaggacagcattcgcctcgttaagcgttgtcataagccagatcgcaaagaattcacgaaagttgcagtccgtacagcaatcgggttcgtagtaatgggattcgtgggattctttgtgaagctcatctttatttcaatcaacaacatcatcgtcggagcttcttatataacattgggtagataatatgatggagttcgtttttttcaagttttt

SEQ ID NO: 159976 - DNA, 433 bp, Arabidopsis thaliana columbia
gtttccatcacaggcccttcttcatgcctgcattgcatgttcattgaagccacatatcgaatggatcgcagcttcagatcttgaagacgaaagtgagaaatcgactccggaggcgcatgctgctgcttggaagatcttgaaggtgagaatttcagtcttagaattctctgatttgatttagttcataaactctccacttgcagagcgcagaatgcattctggttcctggaggttttggagatcgtggtgtgagtggaatggttttagctgccaaatacgtttgagagaacataattccttatcttgagatctgcttgtggatgcaatattgcagttcttgatttcactagatccgtttaatgtttggtttgatctattctttgttattccgaatctcagacattttgaccctttttttgtaattatgtccatt

SEQ ID NO: 159977 - DNA, 372 bp, Arabidopsis thaliana columbia
attctactacttcataaagtctgagaggaacccaaaagaagaccctcttcttctctggctaagtggaggacctggctgctcttccatctctggccttctttttgagaatgggcctctggctatgaagcttgatgtttacaatggaactcttccttctttggtctctactacatattcatggacaaaggcctcgagcatgatattcttggatcagcccgttggagctggcttctcctactcaagaactcaacttttaaataaacctagtgattcaggagaagccaaacggattcatgagtttctgcaaaagtggctaggcaagcatcaagaagtttcctccaatcctttctatgttggaggagattcttactc

SEQ ID NO: 159978 - DNA, 392 bp, Arabidopsis thaliana columbia
atcaaaatcaagacaacgacatggttactacgtttgcttcgagatctcattctctctctgttccatttcttctataaagacagtcctcatcttcatcttatctgcaaatgcaaattcgtctgaaacctgattattccttcttcatcgcctcttcctcaacgatggcttcgacttcttctttgggaccttctacactactctcttacggttctccttctcgtcagtttcctgattttgggttcagattgatttcgggtcacgaaagtgttcgaattccatcattccggcgatttcgggttcactgcgagtcaaaggaaaaagaagtgaagccgtcttctccatttcttgaaagcctcctcgtttcgggagatgcttgtttggcgctctagtga

SEQ ID NO: 159979 - DNA, 372 bp, Arabidopsis thaliana columbia
gtgatggaggaaacatacttcaagggttgccaatgcctttagagttcgaccagcttcagacaaacaacaacaaaagtagaaacatgaacagtaacaagagcattgctgggacctccatggcttttcctagcttctctacgcaacaaaactcgctcatcagtgctcctaataacaatgtcgtggttctagaaggtcacccacaagcaactcctccaggcttcccaggacaccagatcaataaacgtttggagcattggtcaaatgctgtatcctcttcgactcaccctcctcccccggcacataacagtaatagtatcaatcatcagttcgatgtctcttcattaccgcattctagacccgaccccttggaat

SEQ ID NO: 159980 - DNA, 275 bp, Arabidopsis thaliana columbia
ggcgtatgcagttgtctagttttattctcattagacacatgccattcgagaggagccaatcgacaatgcttgggggttcttatggaacatgcgtctcttaggctacaacaaatttcccatgcctgatccaaagacttttacaaccgtaggggctgtctccgtcctcggtgcgatcagaagggcagctaagaaagtctttgtatcattttcttaggacaaccgaagttgatgcccacagaatgtagatgcgttcctggaggagagcagcactcacg

SEQ ID NO: 159981 - DNA, 401 bp, Arabidopsis thaliana columbia
aagtaatcctaactatacaaaacacataacaatatggctccttcaacaaaagttctctctttacttctcttatatgtcgtcgtgtcattagcctccggtgatgagtccatcatcaacgaccatctccaacttccatcggacggcaagtggagaaccgatgaagaagtgaggtccatctacttacaatggtccgcagaacacgggaaaactaacaacaacaacaacggtatcatcaacgaccaagacaaaagattcaatattttcaaagacaacttaagattcatcgatctacacaacgaaaacaacaagaacgctacttacaagcttggtctcaccaaatttaccgatctcactaacgatgagtaccgcaagttgtacctcggggcaagaactgagcccgc

SEQ ID NO: 159982 - DNA, 412 bp, Arabidopsis thaliana columbia
tctaactttctctctcttgcttctacgcttcttcttgtggcgtagattgttatagagagggaaaccaaaaaagggaatctcaaaagctcgagttcacagatttgacccgagtctttaatccaatctgctggttcgttttccacattcaaactcgactcttgaatatcaaatcagaagtctttgctatggctgctaccgctgctgcttctgttgtccgttacgcacctgaggatcatactcttcccaagccctggaaaggccttatcgatgatagaactggttacttgtacttttggaatcctgagaccaatgttactcagtacgagaaaccaaccccctctctaccttctaagttttctcccgccgtttctgttagctcttccgttcaagttcaacaaactgatgcctatgc

SEQ ID NO: 159983 - DNA, 360 bp, Arabidopsis thaliana columbia
tgatttcaagaaaattaagagaaagctcgggagaaaattaccaccaccaaagaatgcaaccaacactgagattaaatccaaagcaattatacttcctgagcaaagtgtggctgctgaaaagagtggcttagctacaagtaagaaaggcttgactttgaaggaacttctgccacagacttctcatcacaatgccaaagttcgcaaagatgcattgtatggtatcaaagaccttttcaagaatcatccagaagagctacagtcacataaatatgctatcatacagaaactcagggaacgcattagtgatgatgataagctagtgagagatgttttttatcaactatttgatattgacatctt

SEQ ID NO: 159984 - DNA, 192 bp, Arabidopsis thaliana columbia
aaaaaaggttttgcaaaagcttactctcattgtgttgcttttgctcctgaccatcgtcgcctctgcagcaaatgcagatggacctgtttgcccgccgtcgaacaaactaagccgggcaagtttccctgaaggttttttatttggcacggctactgcgtgttacccattccaaggtgcgattaatgaaacttg

SEQ ID NO: 159985 - DNA, 322 bp, Arabidopsis thaliana columbia
tcttcatcattttctcttcttcttctccaagaattctcttatgaagaaatggggttccttaagccaaccatggcgattctttttctagcgatggtcgccgtttcatcagccgtggacatgtcaatcatctcctacgacgagaaacatggcgtctccaccaccggtggccgtagcgaagccgaggttatgagtatctacgaggcatggttggtgaaacacggcaaggctcttagccagatactctcttgttgagaaagatcgactgttcgagatcttttaagacattcttggtttcgtctatgtacatatcgagtagattctt

SEQ ID NO: 159986 - DNA, 465 bp, Arabidopsis thaliana columbia
ctagattcgctcctccactgtcttaaatttcactatcttcttcttcattttccttccttctcacttcaaatccataatcgctctacttctctctctctctctagattcgaaaaaatggcgaaactggtgatgttgttggttctctgtatcttaccggcgatagccatggcggcaaggaggggaaatattggaaagaatacaatggtggttcaaggtagcacctactgtgacatttgcaaattcggcttcgagactcctgaatcctcctacttcatccccggtatatctctatctctctaaatccttagtttctgcattctaagatctaagaagttcccaatgttaacgttctctttagtgtttgattctcgattctaatgaagtagtttgttagatctgagttccgaatctcgactttgtatggataagttaggtagatctgagaattttacttatagtttgatt

SEQ ID NO: 159987 - DNA, 466 bp, Arabidopsis thaliana columbia
gtcaaaacctagctctgcctctgttcgtgctcatgatgaacagaagctctcgcaagcagtaacaacagatacgagaactcgtcctccaaattcgtactgcgtgaagttccagtcttttgtcactatggcaaagcaggtcaaagaaaacggtggcaagtatgagtcacgtcctttctccgtcggtggatacaattggacgctcctaatctacccagtcatatacattccaacggactcgggtgggtacgtttcgatttacgtaagagtcgataactcaagcctcatcaccaatccaaaagatgtgtatgcagagatcacattcctcgcttataaaagcagtacagacaagtaccaaataagccaggagactgaggcccagcgatttcatttggttaaacaacagtggggacttttacaatttctaccaatttactattttgaaaatccggcatatggatactttttc

SEQ ID NO: 159988 - DNA, 337 bp, Arabidopsis thaliana columbia
ggacatctgacataatattcacttctttcctataaccatgtctatagacacatgccaatgaggagcaaaaccccaacgcctctccgcttctcaaatggaaagcatcagagagatgattctgagtatagttggactgatgtaggtactggggagaaggccaggaatgtctccgtcctcggtgcgatcagaagggcagctaagaaagtctttgttattattttcttaggacaacggaagttaaagccaacagaatgtagatctgatcctggagagagcagcacgcacgacagagaatctacattatcaggctggactggttattcataaccaagctcct

SEQ ID NO: 159989 - DNA, 337 bp, Arabidopsis thaliana columbia
ctgagttgggccctgaggttaacttctcttactcatcccacaaggcggtgaatgagtacaaggaggccaaggctcttggtgttgacaccgtccctgtacttgttggcccagtctcttacttgctgctttccaaggctgccaagggtgttgacaagtcattcgaacttctttctcttctccctaagattctcccgatctacaaggaagtgattaccgagcttaaagctgctggtgccacctggattcagcttgacgagcctgtccttgttatggatcttgagggtcagaaactccaggcctttactggtgcctatgctgaacttgaatcaactctttc

SEQ ID NO: 159990 - DNA, 391 bp, Arabidopsis thaliana columbia
gagtttggcaagtctgtcaaactaggtatcattgtggatgctgctaacaggaaccgcttggcaaaacttcttcgttttgagacaacaaagtccgatggaaaattgacttccctggatcagtacattaagagaatgaaaaagagccaaaaggacatattttacatcacaggaagcagcaaggaacagctagagaaatctccattcctggagaggctcatcaagaagggctatgaggtcatcttcttcacagacccagttgatgaatacttgatgcaatacctgatggattacgaagacaaaaagttccagaatgtgtccaaggaaggactgaaagttgggaaagattcaaaagacatggagctgaatgtagcattcaaggagctaacaaagt

SEQ ID NO: 159991 - DNA, 326 bp, Arabidopsis thaliana columbia
gtagaagaatcatttcaagccatgtctccggctaaagttgatactaccaagaaggctgatcctaaggccaaggccttgaaggcggcaaaggctgtgaagtctggtcaagccttcaagaagaaggacaaaaagattaggaccaaggtcaccttccacaggccaaagactcttaccaagcctagaactggtaagtacccaaaaatcagcgctactccaaggaacaagttggatcactaccaaatccttaagtacccactcaccactgaatttgcgatgaagaagattgaagacaacatcacttttggtttcattgttgacattcgtgc

SEQ ID NO: 159992 - DNA, 236 bp, Arabidopsis thaliana columbia
ctgttgattacttgaattccttggaaaaggtctttgtcaatgaccaatacttaaactgggatccagagaacagaatcaaagtcaggattgtctcagctagagcttaccattcattgtttatgcacaacatgtgtatccgaccaactcatgaggagcttgagagctttggtactccggattttactatatacaacgctgggcagttcccatgtaatcgtttcactcattacatgact

SEQ ID NO: 159993 - DNA, 370 bp, Arabidopsis thaliana columbia
caacaaggtaacacatctctctctctctctctctctttctctctttttatatttttgtgtcccaatctcttcttcatttctgtttggttgccgagaaaacgcaggaaacttttctgcaaaaaaactcggtgaccatattcaaaactttcccacgttaattctctcttctttgttttgtttcagattcattacttttctccaaaaaactttcttcaagatctgttcttttaaataattatggcggaagaacatcgatgcgagacgcctgaaggtcacccgtctctgcgttaacaactgcggtttcttcggaagctcagcgacaatgaatctatgttcaaactggtacggcgatctctgtctcaaacaacaa

SEQ ID NO: 159994 - DNA, 359 bp, Arabidopsis thaliana columbia
aaaatctctctctgccaatctcatcttcaacctctctctaactctcgttttcgattctacaatggctgacaagaagattaggatcggaatcaacggattcggaagaattggtcgtttggttgctagagttgttctccagagggacgatgttgagctcgtcgctgtcaacgaccctttcatcactactgagttcatgacctacatgttcaagttcgtcagtttttacgttctctgtaatcttaatcaactcatgatcttggttcgtgatgtcctcttttttttgtgagtattcctttactgttgtatggcaatttgtatgtatatggtttttcttttgcttcttttcattttttttcaat

SEQ ID NO: 159995 - DNA, 439 bp, Arabidopsis thaliana columbia
cgatgagtaccgcaagttgtacctcggggcaagaactgagcccgcccgccgcatcgctaaggccaagaatgtcaaccagaaatactcagccgctgtaaacggcaaggaggttccagagacggttgattggagacagaaaggagccgttaaccccatcaaagaccaaggaacttgcggaagttgttgggcgttttcgactactgcagcagtagaaggtataaacaagatcgtaacaggagaactcatatctctatcagaacaagaacttgttgactgcgacaaatcctacaatcaaggttgcaacggcggtttaatggactacgcttttcaattcatcatgaaaaatggtggcttaaacactgagaaagattatccttaccgtggattcggcggaaaatgcaattctttcttgaagaattctaggagtgtgagtattgat

SEQ ID NO: 159996 - DNA, 408 bp, Arabidopsis thaliana columbia
ctccacctaaaaatgagcttatcttcggcgagctttctttttattggctctcattttccagctccatgggtgtctatctgtctcaaatgcgcataacataacccgaatcttggccaaagaccctgatttctccactttcaaccactatctctcagcgactcatctggcctacgagatcaaccgtcggctaacaatcaccgccgtggccgtcgataactcatcaatgtccttcatgctctctaacgtatactcactctaccaaatcctgatcattttgatgtctgcacgtcctggacgtattgcttcggcaccatgaaactctaccagttcaccgacagctccaccttacacagcttccaagtttcatttcaccggttccgtcaccggatcttgtggattcattaacat

SEQ ID NO: 159997 - DNA, 431 bp, Arabidopsis thaliana columbia
agttgagatgcctggactcatggcttgtcgtaccgaattcggaccttctcagccattcaaaggcgctagaatcaccggatctcttcacatgaccatccaaaccgccgtactcatcgaaaccctaactgctctcggtgctgaagtcagatggtgttcctgcaacatcttttccactcaagaccacgccgccgcagccatcgctcgtgactccgccgctgttttcgcctggaaaggtgagactcttcaggagtactggtggtgtaccgagcgtgctctagattggggtccaggtggtggtcctgatctgattgttgatgatgggggtgacgcttctcttttgattcatgagggtgttaaagctgaggagatctttgagaagactggtcaagttcctgatcctacttctactgataaccctgagtttcaaatcg

SEQ ID NO: 159998 - DNA, 369 bp, Arabidopsis thaliana columbia
ctcttctctctatctctctcgcgtacgccgcaccgtagcgaccaattgaatccacgaggaaatctcagtaaatactatggcgaccaacgaacccgagcacgagcacagagacgaggaagaggccggagctaacgaggatgaggacaccggagctcaggtcgctccgatcgttaggcttgaggaggttgccgtcactaccggcgaggaagacgaagatgccgtccttgatctgaaatcgaagctttatcgattcgataaggatgcgaatcagtggaaggagagaggagctggtactgtgaagttcttaaagcataagaacactgggaagattcgtctcgttatgaggcaatctaaaactttggaagatct

SEQ ID NO: 159999 - DNA, 430 bp, Arabidopsis thaliana columbia
caaacttgaagaagaaaaaaaatctttttaaagagctttgaagatccatggcgatgtctcatgtccagcctatgctactcctcctcgtatcactcttcttcttaccggctttgcgtggcgccatagatttcgaatactgcgccaaaaatggaaacgattacggaaccgtcactagcattgtggtctctccatctgttgggcctcacgaaaacccaaccatcactataaatttattcggttctgcaagcaaaaacatccccgcgggaacccttgtgtacgtagcctttagagatggggaatttaccggccttttaaaaacttacaacctctgtgatgtgagggcttgtaacaatggatgctggattgaagctggcaccaactttgggttaactctttccgacgatctttatgttggttttgatgaggttat

SEQ ID NO: 160000 - DNA, 456 bp, Arabidopsis thaliana columbia
gccttattcgtcttcttcgttctctagttttttcctcagtctctgttcttagatcccttgtagtttccaaatcttccgataaaaatgtcgggtaaaggagaaggaccagctatcggtatcgatcttggtaccacttactcttgcgtcggagtatggcaacacgaccgtgttgagatcattgctaatgatcaaggaaacagaaccacgccatcttacgttgctttcaccgactccgagaggttgatcggtgacgcagctaagaatcaggtcgccatgaaccccgttaacaccgttttcgacgctaagaggttgatcggtcgtcgtttctctgacagctctgttcagagtgacatgaaattgtggccattcaagattcaagccggacctgccgattagccaatgatctacgttgaatacaagggtgaaagagaaagagttcgcagctgaggagatttc

SEQ ID NO: 160001 - DNA, 445 bp, Arabidopsis thaliana columbia
catttttcgtttcttcacattcacaaaacatctctctctttcttctcccattcactcactatcttgctcctagaaaaagatggcgagaatgagtttgatgatcatgatgattatggttgctgtgaccatgattaacattgctaagagtgatcccattgcaccatgttacttcatatttggtgactctttggttgataatggcaacaataatcagcttcagtcattagctagagctaattactttccttacggtattgactttgctgccggtccaaccggtcggtttagcaacggcttaaccactgtcgatgttatcgctcagcttttgggtttcgaggactacattacaccttacgcttctgcaagaggacatgacattctccgaggagttaactatgctttcgctgctgccggaatccgagacgaaaccggtagacaatttgga

SEQ ID NO: 160002 - DNA, 446 bp, Arabidopsis thaliana columbia
gaagacgaagcaaatcctcccacaaagaatcatccatgggtcgtgttatcagagcacaacgtaagggagctggttccgtcttcaaatcccacactcaccaccgtaaaggtccggccaaattcaggagtctcgatttcggggagagaaatggttatctgaaaggtgttgtgacggagatcattcacgatccaggacgtggtgctccattggctcgtgtagctttccgtcatcctttccgattcaagaagcagaaggagcttttcgttgctgctgaaggtatgtataccggtcagtttctttactgtgggaagaaagctactctcgtcgtcggaaatgttcttcctctcagatctattcctgaaggagctgttatttgtaacgttgaacatcatggtggtgatcgtggtgttttcgctagagcttctggtgattacgccattgttatc

SEQ ID NO: 160003 - DNA, 416 bp, Arabidopsis thaliana columbia
tccgagcgcttaatatctctcaagacccaaccatttatggaggggtcagcagacacacgaggggtgctttttacgttttgaaagccacactcaccaccgttaaggttcggccaaattcatgagtttcgatttttgcgagagaaatttttatctttaaggtgttgagacttttatcattcactatccattacttggttctttattggctcgtgtagttttacttaatttctttctattcatgaaatctatagagctttatattttctttgaaatgttttataccttttagttttattactttttttaagaaagctactttttttttttttatgctattcctttatttctttttcttatgttctttttttttaattttttttattatttttttatctttttttttttttatatttttt

SEQ ID NO: 160004 - DNA, 228 bp, Arabidopsis thaliana columbia
attttcctcagccatggccgtcgggaaaaacaagtagaatctctaagggtaggaagggaggaaagaagaaggctgttgatcctttctccaagaaagattggtatgatgataagggttcaccaattttcactcacaggaatgttggtgtgacatttgtttccagaacttatgttaccaaaaatgtcccaaatggcttttttcacagatgtttttgaagtttctcttttt

SEQ ID NO: 160005 - DNA, 451 bp, Arabidopsis thaliana columbia
cttccccaacaaacccatcttcatcccccgctctttttctcaaccactccgtcactcttctgctctgtcgtactcctccttgaaaatgaccgatacccatatcccaggaaaccctaattcgtcccctatccaatctcccaccaaacccgagtcgcttcgttccctcgaatttcaattgggttcttctttcaccgccgatccaatcatcccgccgccgaatcagatcgtcatcgttattagcggtccaagcggagttggtaaagacgcagtgatcaacaagcttcgtgaggttcgtgaaggtcttcattttgttgttaccgccactagtcgtccgatgcgacctggggaagttgatggtaaagactatttctttgtctcgagagatcagttcttgtcaatggtggagaacgaagagcttcttgaatacgcacttgtttatggagaatacaaa

SEQ ID NO: 160006 - DNA, 431 bp, Arabidopsis thaliana columbia
aaaaagttggaagaggagagagagagagagcgactacgcaccaactgttgcggctcaaagagatctcgatcgggatccacaagacggagatagatagagagagagtgagagctaacggaaatgggatctcagctacttgagtgttgcttccgtttcgttttctactgtcacttccacagtttcaacttgttttcttgatttgatatatcttttctctaaattttattttttatgcttttacatcattttttattttttttatatatttttaattttttttattattttggatattattacattttctatatatgtttatattttttatattttttaattgttttttctttaatttctaatatttttttttattctttctatattttttattaattttattataattttctttaatattttaactccttttt

SEQ ID NO: 160007 - DNA, 290 bp, Arabidopsis thaliana columbia
atctaactgaccggtttgtgttgaattcattgtagtatgtttagttaataacatttttcttaaatcataactgcagacattgttgaacaaaggtgtgaaatatatgttggtgcaaggacatccagcaactggatgcttaacgttagcaatgtcgttggccgcagaagatgatcgggacagtctaggatgtgtgcagagtgccaataaccaaagttacactcacaatcttgccctttaatccaaacttaaacaacttaggtcagttgtgtcaagattcctaaaaatttgat

SEQ ID NO: 160008 - DNA, 449 bp, Arabidopsis thaliana columbia
gaggaaaccacgaagccatgggcgacgaatggcttaaaacaggaaactgcccaatagcaaaatcatatcgagctgtaagtggtgtggcaccacttgtggcaaagatcctgcaaccccctccaggcatgaaatttaaatgccctcaagcaatagtcacagctcgagcagcgatatcaaaaacacctttcgccaagaacctccgtccacaacctttaccagctaagtactagtgatcgggatgctgggcatggcgttaaatgtgcctttaggggtctggagagagcacactgaaaagttttcggcatcttggtttatagctcttcacgcagcggttccattcataggaatactgagaaagtcagtgttgatgcctaaaacagctatggtattcaccatagcagcatcagttttgggacaggtgattgggtcaagagcagagaggcggatac

SEQ ID NO: 160009 - DNA, 440 bp, Arabidopsis thaliana columbia
aaccggggcactgtctctgacagagatcccaaagaaactcattgtcattggtgctggctatattgggctagagatgggttctgtatggggacggctaggatcagaggtcacagttgttgagtttgcagcggatatcgtaccagcaatggatggtgaaatccgcaagcagtttcaacgctcactagagaagcagaagatgaaatttatgctcaaaactaaagtcgttggggtagattcatctggagatggtgttaaactcatagtggaacctgctgaaggtggagaacagaccactctagaagctgatgtggtcctcgtctcagctggtagaactccgttcacatctggacttgatctagagaaaaatcgggttgagacagacaaaagcgggagaattctggtgaacgagagattctcgacaaatgtttcaggcgtttatg

SEQ ID NO: 160010 - DNA, 404 bp, Arabidopsis thaliana columbia
acaaaaatgagcggagtttcgacggcggcgtactttgcgcggcgagcggctcagaaggagagaggtcgaatcctttaccgtcgtgcccttaaggatactctcaattgggctgttcatcgccatatcttctaccgtgacgcttctgatctgcgtgagaagttcaatgtcaaccaagatgtggaggatgtcgacagaatcgacaaactgattgctcatggtgaagcagaatacaacaaatggcggcaccctgatccttatatcgttccatgggctcctggtggctcaaagttctgtagaaacccgactccgcctgctgggattgagattgtgtacaactatggtctagaagacaacccataataaacctagcttccatattgtcacacccatcaataaaattgaag

SEQ ID NO: 160011 - DNA, 371 bp, Arabidopsis thaliana columbia
ctctttccctaaacacactgattattttctctccgactccgccatgtctctgctctcagatctcgggacctcaacctcaccgatgccaccgggaaaatcatcgccgaatacatatggatcggtggatctggaatggatatcagaagcaaagccaggacactaccaggaccagtgactgatccatcaaagcttcccaagtggaactacgacggatccagcaccggtcaggctgctggagaagacagtgaagtcattctataccctcaggcaatattcaaggatcccttcaggaaaggcaacaacatcctggtgatgtgtgatgcttacacaccatctggtgatcctattccaaccaacaagaggcacaacgc

SEQ ID NO: 160012 - DNA, 440 bp, Arabidopsis thaliana columbia
gccaatcgcaacaaccccgtcggagacaactccacactctcattcggccgaaacggaaaccttgtgctcgctgagttaaacggccaagtcaagtggcagactaacacagccaacaaaggcgtcaccggattccaaatcttgcccaatggaaacatggtgctacacgacaaacatggaaaattcgtttggcagagtttcgatcatcccaccgatacactcctcgtcggccaatccctaaaagttaacggagttaacaaactcgttagccgtacatctgatatgaacggctccgatggtccgtacagcatggtgttggacaacaaaggcttaaccatgtacgttaacaaaaccggtacgccgttagtttacgggggatggacggatcacgactttcgcggtaccgtcacgttcgccgttacaagagagttcgattatttaac

SEQ ID NO: 160013 - DNA, 223 bp, Arabidopsis thaliana columbia
  unsure (1)..(223): unsure at all n locations
caatctccagaaaaggggagaatcaaaaatggtnttcctgaagctccagaagcggctcgccgcagcagtgattaaaaacgggaagggcaaacttagactcgatcccaacgaaagctccgacatctccatggccaattcccgccaaaacatcatgaagcttgtcatggatgactttatcattatgaatccaaccaaaaatcactttctatccattccttgctaa

SEQ ID NO: 160014 - DNA, 403 bp, Arabidopsis thaliana columbia
aaaacaaaagaagagagagagagagagagacgaagaaacagagagattctctcgaaaatggccaccattagagtaccaaacgaagttccttctccagctcaggattctgaaactctcaaacaagctattcgcggatggggaacagatgagaaggcgattatacgagttttagggcaaagagaccagagccagagaaggaagattagagaaagttttagagagatttatggcaaagatcttaacgatgttctatcctccgaactgtctggtgatttcatgaaagctgtggtttcgtggacgtatgatccagcagagagagacgcatggcttgtgaacaagattttgaacaaggagaagaagaagaaaagcttagagaatttgaaggttatagtagagatctctt

SEQ ID NO: 160015 - DNA, 440 bp, Arabidopsis thaliana columbia
catgggcagccagctacgccaacaactttggggaaagaaatggcgaattttgctgtgaggttaagcgaagaaaggagatatctttcagaaactaagattaaggggaaatttgcaggtgctgttgggaactacaacgcccatatttccgcatattcgaatattgactggcctcatgtttccgaggagtttgttacttctcttggattaacattcaacccatacgtgactcagattgaacctcatgactatatggctagactttttaataatatcagccagttcaacactattttaattgattttgacagagatatatggagctacatatctctagggtactttaagcagacaactaaagcgggtgaaattggatcgtcgacaatgcctcacaaagtgaatcctattgactttgagaacagcgaagggaatctagggaaagc

SEQ ID NO: 160016 - DNA, 267 bp, Arabidopsis thaliana columbia
gaagagagaaacatttcgagacaaatggccgccttcgctgctcgtcctctcgtcaccatccaaaccttggatggtgacatgtccaccgatcaatcctccaccgtcgtacttgccgacgttatgacggccccagttcgaccagacatcgttaacttcgatcacgcccaaatttataacaacagccggtaggcatacgccgtatcgaagaaggccggtcactagacctctgtcgagtgctgtggaacactgtcgtgccttgtctttgta

SEQ ID NO: 160017 - DNA, 290 bp, Arabidopsis thaliana columbia
agaaaaagagttgaatcaaatatggctgggagagttacgatccctgctcgcaactctgccctgatcgcaatgatcgccgatgaggacactgttgttggatttttgatggctggagttggtaatgttgacataaggaggaagacaaattacctcatcgtggattcaaagacaactgtgagacaaattgaggatgctttcaaggaattctcagcaagggatgatatcgttatcatatttttaagccaatatatcgtcaatattgatcggtttttgatggatatattcaacat

SEQ ID NO: 160018 - DNA, 450 bp, Arabidopsis thaliana columbia
  unsure (1)..(450): unsure at all n locations
gccatggcgaccacttcatcgacaaaacaagtcattgtcttcacaatttcccttctcttggttgctttccaagcagtccatgcagactattaccgtcagaggccaccggttacccctaccccttacgttcctaagccacggtacccacttccgagcccgagccccaagcctgtttatcgaccacctactacccctagtctacccgctggctcaatcgctagactattccttgatccacataacgctcttcggtccggactaggtttgcctccattgatttgggacggtaaactagcgagctacgcaacatggtgggctaaccagaggcgttacgactgctccttaacccattccaccggcccatacggtgagaacttgttctggggaagcggctcgagctgggcaccaggntttcgcggtgcaatcatggaatcgtgaaggaaggtcata

SEQ ID NO: 160019 - DNA, 338 bp, Arabidopsis thaliana columbia
tacaaaggatgtcttggtggtgacggcgaaaggatgttctgctgagattatacctttcttgaagacttgggtgaatcttcctatggccattgggtttatgctcctctacactaaactctccaatgttctctccaagaaggctctgttttacactgttattgtccctttcatcatctactttggggcctttggtttcgtcatgtaccctctcagcaactatattcacccggaagctctcgcagataagctccttacaaccctcggcccaagattcatgggtcctattgcaatattgcggatttggagtttcttgttgtttcatgttatggctgagcttt

SEQ ID NO: 160020 - DNA, 383 bp, Arabidopsis thaliana columbia
taacaaactcaaacgatcattgataaatagttgcagaaccagtttcacaactcttttatttaaaacaaaccatgcagtaagagaaaggaggaactcgaaagttgaaacagtttcaagcatcgccatgtccgagaagagcaacaagcatgtcctcatagtcaccagaagtgtctttggcgatagcacggtccaaaggaatgctgtttcttcgctgatattcctctttgatgcgttccatgtcaacttcagttcgtgtagtcacgactcgggttagtccccattcgtctgttcccattttgttgattgatagacgaagaaccttctcaaaatgcttctcagggtatgtcaaacatgtgattacagctcttagtagtttcatgtag

SEQ ID NO: 160021 - DNA, 342 bp, Arabidopsis thaliana columbia
ctggtccgagtccagagtcctctactttgacagtctttctccatgtcgtcgttgtgtgcatctaattgctatccttcatcttcttctatcaatctcttctccaacaacaacccaactaaaccctttcttctctccctcagattcgcctcctccaattctcttccatttgttgctcctctcaaattctctactaccaatcacgtccttagtaactctcgtttctcttcgaaccgaatccaaagacgcctttttttgctccgatgcgtttcagaagaatctcagccgtctctttttatcgtgaacggcggctttgaagaggagagggaatgtttttgaaattgg

SEQ ID NO: 160022 - DNA, 385 bp, Arabidopsis thaliana columbia
ctctgcctcctttcggattcaaatctcagatctagctcaaccatggcgttgctcgtcgagaagacctcaagtggccgtgaatacaaggtcaaagacatgtctcaagccgatttcggtcgtctcgaactcgagctcgccgaagttgagatgcctggactcatggcttgtcgtaccgaattcggaccttctcagccattcaaaggcgctagaatcaccggatctcttcacatgaccatccaaaccgccgtactcatcgaaaccctaactgctctcggtgctgaagtcagatggtgttcctgcaacatcttttccactcaagaccactccgtcgtatccattgctcgtgacttcgtcgctgttttcacctggaaaggtgagacttctt

SEQ ID NO: 160023 - DNA, 402 bp, Arabidopsis thaliana columbia
agaaaaagagttgaatcaaatatggctgggagagctacgatccctgctcgcaactctgccctcatcgcaatgatcgccgatgaggacactgttgttggatttttgatggctggagttggtaatgttgacataaggaggaagacaaattacctcatcgtggattcaaagacaactgtgagacaaattgaggatgctttcaaggaattctcagcatgggatgatatcgctatcattcttttaagccaatatatcgccaatatgatccggttcttggtggatagctacaacaagccagtttcctgaaattttggagatacttaataaggaccattcctatgatactttttcatgattctatttttaatttgtgtcaagttattttattttttttagaattttttt

SEQ ID NO: 160024 - DNA, 454 bp, Arabidopsis thaliana columbia
ctcaattgcatcaacaaggtacggagatttctttgacggtaaaacagcgagtttgtgtgtacgtagagctgtttattacgaccctgagactggaaaagaagatccttcaaagaacggagtctgcagcaacttcctatgtgattcaaagcccggtgacaagattcaaatcaccggtccatctgggaaggtaatgctattacccgagagtgatccaaacgcgacacacataatgatagccacgggaacaggagtggctccatacagaggctacttacgtcgaatgttcatggaaaacgtcccaaacaagacatttagcggcttagcttggctcttcttaggcgtggccaacaccgatagccttctctatgacgaagagtttaccaagtacctaaaagaccatccagacaactttaggttcgacaaggcattgagcagagaggagaagaacaagaat

SEQ ID NO: 160025 - DNA, 192 bp, Arabidopsis thaliana columbia
gtactacttacgagcgcaagtgagagagtaacatataaacgtagagatatagcaaaatggctgcgacgcttactggatcagggattgctctagggttttcgtgctccgcaaagttctctaagagagcttcttcgtcgtccaaccgtcgctgcatcaagatgtcggtttcggtagaggtgatttctaataaat

SEQ ID NO: 160026 - DNA, 456 bp, Arabidopsis thaliana columbia
gaaacactacgtgtacaaatctccaccaccaccggtgaagcactactctccccctccagtttaccattccccaccaccaccaaagaaacattacgtatacaagtcccctcctcctccggttaagcactactctccccctccagtctaccattccccaccaccaccaaagaaacattacgtatacaagtcccctcctcctccggttaagcactactctcctcctccggtttaccactctccaccaccaccaaaggaaaagtacgtgtacaaatcacctcctcctcctccagtacaccactactctccaccacaccatccttacctctacaaatctcctcctcctccataccactattagatatctctatcacggagaacacgatgtacacaagaagacaaagacaagacgaaaccagtactggtgattgtaataagagaaacaaaagatgaaagagg

SEQ ID NO: 160027 - DNA, 346 bp, Arabidopsis thaliana columbia
tatcgatctaatcttttcagctctctccatcgttgtcgtatctgtgactctcgtgatcatcgcctgaaaaaaatttgagataatggccagaaagttcttcgtcggaggcaactggaaatgtaacggaactgctgaggaggtgaagaagattgtgaacactcttaatgaagctcaggttccttcacaggatgttgtagaggttgtggttagccctccatatgtttttcttcccctggttaagagcacattgaggtctgacctttttgtagcggcacaaaactgttgggttaagaaagtgtgtgcttttaatgttgaatttcgttccatatattctaattaatctcat

SEQ ID NO: 160028 - DNA, 424 bp, Arabidopsis thaliana columbia
cgaaaaagatggatgctaatttcgagatgcctccagtcggtggaatgaacgacgacgacgacatggatttcggtgacggcgcctcgtttcttaaagtcggtgaagagaaagagatccaacaaggtttgaagaagaagcttcttaaagaaggtgaaggatatgaaactcctgagaatggcgatgaagttgaagtgcattacactggaactttgcttgatgggacgaagtttgattcgagtcgtgatagagcaacgcctttcaaattcactcttggacaaggtcaagttattaaaggatgggatattggtattaagacgatgtagaaaggtgaaatcgctgtttttactatacctgcggagcttggatattggtgaatctggtttcctgtctactatttctgcttatgcttttctttagttttttt

SEQ ID NO: 160029 - DNA, 403 bp, Arabidopsis thaliana columbia
gagaaagaagagcctgtgaagaaagagccggagacagttggcagcaaagtcaaagaaaggagcctcatcttaagctataacatagacagtctatttgtgctcacttgtgttacccttaatactttttgttagcttctctctataagaccaatactcaatttttaagtatgatgattatcggtttttggattgctgaaagaatctctctttatccaaaaaaaaaaaaaaaaaaaaaaaaaaaaaaaaaaaaaaaaaaaaaaaaaaaaaaaaaaaaaaaaaaaaaaaaaaaaaaaaaaaaaaaaaaaaaaaaaaaaagggggggccgttttaaaggatccaagtttacttccccgggcttgcaaggaaaaagtttttttttggggccccctaaattaaattaatg

SEQ ID NO: 160030 - DNA, 348 bp, Arabidopsis thaliana columbia
aaaccactatctctctctctctcttcatatcgcaacattggagtccgtcgctctatctcgcataggtctcgccggtctcgcagtcatgggacaaaacctcgccttaaacatcgccgataaaggattcccaatctccgtctacaatcgaaccacttccaaagtcgacgaaaccttagatcgtgcctccaacgaaggaaaactcccagtcgctggtcaatactcgcctcgcgatttcgttctctcgatccaacggcctagatccgttatcatccttgtcaaagccggtgctcccgttgaccaaaccatctctgctctctctgaatacatggagcctggtgattgtatcat

SEQ ID NO: 160031 - DNA, 436 bp, Arabidopsis thaliana columbia
caatggcttcctctatgctctcttccgctactattgttgcctctccggctcaggccactatggtcgctcctttcaacggacttaagtcctccgctgccttcccagccacccgcaaggctaacaacgacattacttccatcacaagcaacggcggaagagttaactgcatgcaggtgtggcctccgattggaaagaagaagtttgagactctctcttaccttcctgaccttaccgattccgaattggctaaggaagttgactaccttatccgcaacaagtggattccttgtgttgaattcgagttggagcacggatttgtgtaccgtgagcactgtaactcacccggatactatgatggacggttctggacaatgtggaagcttcttttgttcggtttcacctatcttctcttaagtgttgaaagaagttatattat

SEQ ID NO: 160032 - DNA, 307 bp, Arabidopsis thaliana columbia
accggagccaaggttaccaaggctgcagttaagaagggtgcaaagtgaactcgaatcctcaaaactctatccgcagatgaatcaaaaaacaatattagtttctttactttagtttggtatttggtcgcgtgttatagcttcgtttcttctccatcggaactctgttcccggaactgggttcttgatcggaggtggcggagctactttgcacctattttgcttttgaattgttatcaattttgaacctatttggagattcggttatatgatgtgattttccgaggtttaataaattaattttataatt

SEQ ID NO: 160033 - DNA, 450 bp, Arabidopsis thaliana columbia
caattatcggacacaaagatcaaacttgctgacaagcaagcagcccttgagaagactcaatgggaagcaaagacaacaggaacaagagcaatcaagcttcaagaacagctagatgctgttgaaggagacatctctacattcacacgggtgttcgaaactttggcaaaaactgattccaagaaacccgatagggattatgatgcagtcccatatgaatttgatcatcttccatatttagacgatgtagatgaaactgacctgaggaaaatggaagaagcaagattagcttatgtagcagcagtgaataccgcaaaggaacgagaagatgaagaatctctggtcatggctgctcaagctcgagcttacctgcaatcactagcctttacatattaatcatcttcaggtacttacttctttataggatatttctctccttgggttgttttagga

SEQ ID NO: 160034 - DNA, 242 bp, Arabidopsis thaliana columbia
acgtagttatctcacacaaagatcaaaggagatttctgtttgtaaacccccacggaaacaactggggaccaaagccggcaggaactaaacttcttccacctcaggaataaataaaccccacagatttcgtcctggttccgttgtcctaagagaaatcatgttgttttaaaagtgcactcaatttttgattcttaagctattgttccatcttttgttttttgagatctctctcgaatttaaaa

SEQ ID NO: 160035 - DNA, 370 bp, Arabidopsis thaliana columbia
caaatggctcgtaccaagcaaaccgcaaggaaatccaccggaggaaaagccccaaggaaacaactcgcaacaaaggcggcgaggaaatcagctccggcgaccggaggagtaaagaagccacacagattccgtcctggaactgttgccctaagagaaatcaggaagtatcagaagagcactgagcttctgatccgcaagcttccgttccagcgtttggttcgtgagatcgctcaggatttcaaaacagatctgcgtttccagagcagcgccgtcgcagcacttcaggaagcggctgaagcatacctcgttggattgtttgaagacaccaatctttgcgcgattcatgctaagagagtcactatcatgccta

SEQ ID NO: 160036 - DNA, 348 bp, Arabidopsis thaliana columbia
aatatttctaatctattacaagtaacatgatctgtcaacttatgaacctcaaggccacggagctctgtctcggcctccccggcggcgctgaagcagttgagagtcctgccaaatcggcggtgggaagcaagagaggcttctccgaaaccgttgatctcatgctcaatcttcaatctaacaaagaaggctccgttgatctcaaaaacgtttctgctgttcccaaggagaagactacccttaaagatccttctaagccttctgctaaagcacaagtggtgggatggccacctgtgaggaactacaggaagaacatgatgactcagcagaagaccagtagtgttgcggagg

SEQ ID NO: 160037 - DNA, 353 bp, Arabidopsis thaliana columbia
aaacaagtagaaactttaaaacgagagagagagaaagaaatggcgacatcgggaacgtacgtgacggaggttccgttgaaaggatcggcggagaaacactacaagagctggaagagcgagaaccatgtcttcgctgacgccattggccaccacatccaaaatgtcgttgttcacgaaggcgaacatgactctcacgggtctatcaggagttgggactacacatatgatggaaagaaggagatgttcaaagagaagagagagatagatgatgagaataaaacattgacgaaaagaggactggatggtcacgtgatggagcattttaaagtatttgatattatttacgaaattat

SEQ ID NO: 160038 - DNA, 194 bp, Arabidopsis thaliana columbia
cttatctgcaaaactaaagactgctgtctaaagtttttcaacaaaaaggcttcatctttactcagtgtgaatgacatgttgcggcggggatgcgctccggttcacccgtggcatttacatggcccacagagttctctctggaaccgatgccctaatagaaatttggatgttatattagagcactgagctttttt

SEQ ID NO: 160039 - DNA, 83 bp, Arabidopsis thaliana columbia
  unsure (1)..(83): unsure at all n locations
ngaattttgattagttctgtgttgtgtttggtgattgcttgaattaagtctgattgaattttagggttatttgagttttgtgt

SEQ ID NO: 160040 - DNA, 197 bp, Arabidopsis thaliana columbia
gtcctttcgcagaaaccatttggagttggagctttggacgacgacaatggccccgaagaaaggagtgaaggtagctgctaagaagaagaccgcggagaaagtttcaaaccctctattcgagaggaggcctaagcaattcggtattggtggagctttacctcctaagaaggatctctctcgctacatcaaatggccca

SEQ ID NO: 160041 - DNA, 280 bp, Arabidopsis thaliana columbia
gaaggaatcaagagagtagaaaggaaatgaatctatacgcgcacgatctttctcttctcgatttcaattacaacgtctccggtcccttcggcgagccactatctcaccgcttcctctctcctggccctttcttccaaggcgaagaagacgattaccgccgtaatacgagctacagtcacgacggagctaatggacgagaaccggacacagattcaagagcatcttcgccgcatcgccacgacgggaggtctccgtaacctctgggaatggattggagctt

SEQ ID NO: 160042 - DNA, 99 bp, Arabidopsis thaliana columbia
taaattcgaaggtaaatatccagaagcttgattctcctagttgtacgaaagcttgagtaatggggtctagattaaacttcaagagcttcgttgatggac

SEQ ID NO: 160043 - DNA, 422 bp, Arabidopsis thaliana columbia
aaaaaacaacagatccgaattttatctttaatcagccggaaaaaatggagaaagcgatcgagagacaacgcgttcttcttgagcatctccgaccttcttcttcttcttcgcacaattacgaggcttctctatctgcttctgcttgcttggctggggacagtgctgcatatcagaggacctctctctatggagatgatgttgtcattgtcgcggcacataggactccactatgcaagtccaaacgtggcaatttcaaggatacatatcccgatgatttgctcgcacctgttttgagggcattgatagagaagacgaatctaaacccaagtgaagtaggtgacaatgttgtgggtactgttttggcacctggatctcagagagccagtgaatgcaagatggctgcgttctatgctggtttccct

SEQ ID NO: 160044 - DNA, 302 bp, Arabidopsis thaliana columbia
ttattcaaatttcttattcttcttcttttgaaactgaaaacgtggggaaaaaaaaggagatttacaagtagaaaacacaaatctaccaaatggtataatttgtttttggtcttgaaggaagaatgcaagcaaaactggacagaatatattttaactaagaatgggggaagacacaccgattccaccaacccaattattgtggaccccttttggaatttgggttaattaaataactttttcacttttggggttattccaaggagggaatgctttgagaaaggtattaagcctttgaacttggc

SEQ ID NO: 160045 - DNA, 443 bp, Arabidopsis thaliana columbia
aacagtttcaaatatgtgcagggaacttcggatgaggtagtggattgttctcatgggaaacaactatgggaactctgcaaagacaagtacgagccgctctgggtgaaaggagggaaccactgtgatcttgaacactaccctgaatacattagacacctcaagaagttcatagcaacagtagagagattaccatgtccgaggatgagcagcgaccaatcagagagagtgagagatgcgcccccgaggagaagtatggacaggagagtgaagccgaggcagagcacagagcgtagagagaaagagaagccaccaaagagtcagtcgaagatgagtagcagcagcagcaagctcaagatctcgtttgatcaacttgatcgctcgcggaggagcgttgactgccatgaaaagactcggaagagcgttgaccagattgagagggggta

SEQ ID NO: 160046 - DNA, 256 bp, Arabidopsis thaliana columbia
ggaaaaagaagaggattaatatacagttattagatacattaaagtttcttctgtgttttgtagaacaaggagatgatgcggtacaaagaggagaaagaggtgaagaaggaagctttcaggaagtatttggagtcaagtggagttcttgattctcttactaaagatctggtttctttgtatgagcagaatgacaagccttactctgctctagaattcattcaacaaaagctaggtggtccatctgtctctttctttt

SEQ ID NO: 160047 - DNA, 351 bp, Arabidopsis thaliana columbia
ctcactgactcatacaaccttgatttcggtcgcggaacattccggaaagaagcggatttcaccactgacgacatgattctgagcaagaaacttgttcttcaataatcgaaatcctaagagttgctcattcttggcttgtatgattctgatcacccggttctcttaaagttctggactttattggcatctcacgtatgttatggtccggattttgttcgacttttctcttaagaaggcaagcttgggaccattaaaaaaaaaaaaaaaagggcgggcggttttgagggtccaaggttacctacccgtgcctggcacgttataacttttttattggggcaactaaatttaaat

SEQ ID NO: 160048 - DNA, 442 bp, Arabidopsis thaliana columbia
gtgaaagaagatgaagtcttgtcacggatagagaaactctctgaagtgaatccaatgcttggtttccgcggttgcaggctcggaatatcgtatccagagctaacggagatgcaagcgcgtgcaatttttgaagctgcagcgtcaatgcaggaccaaggtgttactgtcattcctgagattatggttccacttgtaggaactcctcaggaattgggtcaccaagttgatgtaattcgtaaagttgcaaagaaagtatttgctgagaagggtcataccgtgagctacaaggttgggacaatgattgagatccctcgagccgcgctcattgcagatgagattgcgaaagagggcgagtttttctcgttcgggacaaacgacttgacgcagatgacgtttggatacagtagagacgatgtcggcaagtttctaccgatttacctcg

SEQ ID NO: 160049 - DNA, 258 bp, Arabidopsis thaliana columbia
ccgatctacgtctctgtctctctccaatctctctgcgccacagaattgtgcgatttacgaaaatctctgaaacctccgatcgttaacggcgaccgccgattttcccggtaaaaatgaacgacggagatgtatcgaggcagatccagcagatggtgagatttatccgccaagaagcggaagagaaagcaaacgagatctaggtttctggtgtagaagaattcaacattgagaaactccagcttgttgaggcgggtatta

SEQ ID NO: 160050 - DNA, 408 bp, Arabidopsis thaliana columbia
cttagaaagaaaagaacttaaatcaaaatacttaatagcatggcgatacatttatacaaaacttctaccccgagcacacgcaatggagccgtagacagtcaagtgaaatccaatccacgaaataatttgatctgtgggcagcatcattgtggtaaaggtcgtaatgccagaggaataattaccgcaaggcatagagggggaggtcataagcgtctataccgtaaaatagattttcgacgaaatgcaaaagacatatatggtagaatcgtaaccatagaatacgaccctaatcgaaatgcatacatttgtctcatacactatggggatggtgagaagagatatattttacatcccaaaggggctttaattggagataccaatgtttctggtacaagaagttctattaaa

SEQ ID NO: 160051 - DNA, 434 bp, Arabidopsis thaliana columbia
cacttcttctaagctggagatgagtacaggttctactagtttccgtttcaaatgtagcgaacgagctgagaagagaaaagagttctatatgaaactggaggagaaaatacatgctaagaaaacagaaacaaaccaagttcaggccaaaacacagcaaaaggcagaagctgagattaaacagttcaggaaaagcctcaattttaaggcaacaccaatgccttcattctacaacatcggtactagaccggtgtctcataacaagaccgagccatctaaagtagcacaatcaagatcacgaccagcgacctcagcctcaattacaaacagggcggtcaccagagtttcttataaacacggttttgaagaagctgaaatggtaaaggtaatggtcagtaatagaaaacagagtgcggctaaagattcagatttgcaaa

SEQ ID NO: 160052 - DNA, 345 bp, Arabidopsis thaliana columbia
aaagattcgatttttgactgcaaaaaagagaatttctaaaagcaaatcggagagcttcggcgatggcgttatcacgactttcttcacgatccaacactttcctaaagccggcgattaccgccttgccctcctccatccgccgtcatgtttccacagactcatcaccgatcacaatcgaaaccgccgtccctttcacatcgcatctatgtgaatcaccgtcacgctccgtcgagacttcatcggaggagatcttagcctttttccgtgacatggctcggatgaggaggatggagatcgcagcagattctctttacaaggcgaagctgatccgtgggttctgtcatt

SEQ ID NO: 160053 - DNA, 386 bp, Arabidopsis thaliana columbia
caaccatgtcgaagcgaggaagaggaggaacctctggtaacaagttcaggatgtcactgggtcttccagtggcagccactgtgaactgtgctgacaacaccggagctaagaacctttacatcatttcggttaaaggaatcaagggtcgtcttaaccgtttgccatcagcgtgtgttggtgatatggttatggctactgttaagaaaggtaagcctgatctccgtaagaaggtgcttcctgctgtcattgttaggcagaggaagccttggcgccgaaaggacggtgtcttcatgtatttcgaagataatgctggtgtcattgtcaatcccaagggtgaaatgaaagggtctgctatcactggaccaattggaaaggatggtgctgtt

SEQ ID NO: 160054 - DNA, 198 bp, Arabidopsis thaliana columbia
cggacgcgtgggctgaccgaatcaatttgactccagttgctttgatggagggaggtgcattggctaaaactttgtttcaaaatgagccaacaaagcctgattatagagctgttccctgcgccgttttctcccagccacctattggaacagttggtctaactgaagagcaggccatagaacaatatggtgatgtggatg

SEQ ID NO: 160055 - DNA, 454 bp, Arabidopsis thaliana columbia
gtctaaaagctcgtcgtcgtcttcaatggtgaatctcaaaccaattggataaataaaacaaaacaaaaaaaacttcacaaaaaaaaaaaaaagatccaaattacaaccatgccttcggagttaacaccagaagaacgatcggaactaaaaaactcaatcgccgagttccacacataccaactcgatccaggaagctgttcatcactccacgcgcaacgaatccacgcgcctccggaactcgtctggtcaatcgtacgacgattcgacaaaccacaaacatacaaacacttcatcaaatcctgctccgtcgaacaaaacttcgagatgcgcgtcggatgcacgcgcgacgtgatcgtcatcagtggattaccggcgaacacatcaacggaaagactcgatatactcgacgacgaacgggagagtaccggattcagtatcaatcggggcgaacata

SEQ ID NO: 160056 - DNA, 359 bp, Arabidopsis thaliana columbia
gttggtgagctaactacccaacctgtgaagctacccccattctctctcaacgttttcgttttgaaatggcgaggaagaagatcagagagtatgactcaaagaggttggtgaaggaacatttcaaaaggctttctggcaaagagcttcctatcagatccgttcagattaatgaaacaactgatctaaatgagctagttgaaaaggaaccttggctcttgtctgagaagctggtggtgaaacctgacatgttgtttggaaagcgtggcaagagtggtttggatgccttgtaattagattttgctgatgttgccacttttgttaaagaacgtttggtaaaagaggtacagattagtggttgc

SEQ ID NO: 160057 - DNA, 399 bp, Arabidopsis thaliana columbia
gaagaacaatggcttcctctatgctctcttccgctactatggttgcctctccggctcaggccactatggtcgctcctttcaacggacttaagtcctccgctgccttcccagccacccgcaaggctaacaacgacattacttccatcacaagcaacggcggaagagttaactgcatgcaggtgtggcctccgattggaaagaagaagtttgagactctctcttaccttcctgaccttaccgattccgaattggctaaggaagttgactaccttatccgcaacaagtggattccttgtgttgaattcgagttggagcacggatttgtgtaccgtgagcacggtaactcacccggatactatgatggacggtactggacaatgtggaaagctccctttgttc

SEQ ID NO: 160058 - DNA, 449 bp, Arabidopsis thaliana columbia
gcagcagccgtaagaaagaaaccgaggaagaacgatctcagtgagaggacgatcacttcgccgtcgcagtcatgggtcgaatgcatagtagaggtaagggtatctcggcatctgctttgccgtacaagcgttcatctccgagctggctcaagacaacccctcaagatgttgatgagtccatctgcaaatttgcgaagaagggtttgaccccatcgcagattggtgtcattcttcgtgactctcacggaattccacaggtgaaaagtgttactggaagcaagattctcagaattttgaaagctcatggtcttgcacctgagatccctgaggatctgtatcacttgatcaagaaagctgttgctatccgcaagcatcttgagaggaacaggaaagataaggattccaaattcaagctgattcttgtagagagcagaattccatcgtcttgc

SEQ ID NO: 160059 - DNA, 401 bp, Arabidopsis thaliana columbia
cgaatctctctctataatccgatctgagaaatttcgccggagctaggttttgttgtttaccgatcaatcctttaatcaatggcaatggctgttttccgtcgcgaagggaggcgtttcctcccttcaatcgccgctcgcccaatcgctgctatccgatctcctctctcttctgaccaggaggaaggacttcttggagttcgatctatctcaactcaagtggggcgtaaccgcatgaagagtgttaagaacatccaaaagatcacaaaggcattgaagatggttgctgcttccaagcttagagcagttcatggcccagctgagaacttccgtggtctttggctggcatttactgcacttctaggagataatccccgcattgatgtatagaatagtgtggtggt

SEQ ID NO: 160060 - DNA, 438 bp, Arabidopsis thaliana columbia
atcaccagaatccattcagttggtacgtgaacatgctgctgcaaacaacaaggtgttcacgatgaacctttctgctccattcatctgtgaattcttcaaagatgttcaggagaagtgcctgccgtacatggactatatttttggcaatgagaccgaggcaagaaccttctccagggttcacggctgggagactgatgatgttgagcaaatagccatcaagatgtcccagttacccaaagcctctggaacatacaagaggactactgtgattacacaaggcgcagatcctgtggttgtcgctgaggatggaaaagtgaagaagtacccagtcattcctctccccaaagagaagcttgttgacaccaacggtgcatgtgatgcattttgtgggagggtttctgttccagctggtgcactggaaggggattgaagagtgtt

SEQ ID NO: 160061 - DNA, 430 bp, Arabidopsis thaliana columbia
gggagagcaaaacaaagatcggagaagatgaagactattctttcttccgaaacgatggacatccccgacagtgttaccatcaaggttcacgctaaagtgatcgaagtcgaaggacctcgcgggaagcttgttcgcgatttcaagcatctcaacctcgatttccagctgatcaaggatccagagactggaaagaagaagcttaagatcgattcgtggtttggaacacgcaaaaccagcgcctccatcagaaccgctcttagccacgtcgataacttgatctccggtgttaccagaggtttccgttacaagatgaggttcgtgtacgcccattttcccataaacgccttcatctgctgttacggatagtttttcgagatccgtatctttcttgtcgagaagtaagtaggtttgacagattttttcttatttt

SEQ ID NO: 160062 - DNA, 357 bp, Arabidopsis thaliana columbia
tttttccttctgggtttcttttgtttgcctggaaacatttgtctcagattttgattttgaccggagtactcatattctccggcgatttctccggcgacatcgtttgtgaaatggagggaattactcatccaatacctcgtactgttgaagaggtctttagcgacttcagaggtcgacgagctggtcttattaaagctctcactaatgatatggtgaagttttaccaaacgtgtgatcctgagaaggagaatttgtgtctctatggacttccaaatgagacatgggaggttaatctacccgttgaggaagatccctcttgagcttcctgaaccagctctaggcatccaatttcttttt

SEQ ID NO: 160063 - DNA, 309 bp, Arabidopsis thaliana columbia
aagatctcaaaatatggatagtcacaaatggagtctaggtttcacattacttgctttcctcttcatcacttcctcttccgctgagctcatcattaaacaggtcacacagggcagaggaatagagtacaacaactcttacagtctcacgtcgaatcttggagtgacgacaagagagttgagagacgagcgaccatcaagtaagatagtgacaatcacaagcttctctgtgattaaggacagaggagaaccctatgaatcatctatttttgaggctgccggttacaaatggagatttagtttgtacgtgaa

SEQ ID NO: 160064 - DNA, 186 bp, Arabidopsis thaliana columbia
ttaaaccaaaaactaatttaagtttcatgaaaaatggagaaaacaagcacaaccttcaaaagccaataacccttattaatactgatatttggtcaacttcatcagaagaccaatatctcaaactgttccactctcccatcacaacccaacaaaaaaccacaagtagattcgaacctgaaccgcttt

SEQ ID NO: 160065 - DNA, 371 bp, Arabidopsis thaliana columbia
aaaatccgttctaaaactttcttcttcttctctctttcccttcgtatcttcttcttcttcttcaacctctcgatctcactgatttttctcttcaacaactcgatcttcccttcctatttttcaattggggtcttgcaaacgaatatctgctttgaaattgaacgaaattatttagttttggtggtttttcttcgacttcaccaatctgttgaactcaaggagaatatatgagataacatcagtcttcatatttgtgagtttctataatggatcagctcgtttacttcatcattcgtccctcatgagctgagtatgacccggaacttgttctcttggaaaagaagttattggtgaaaggtttaaggtaattt

SEQ ID NO: 160066 - DNA, 411 bp, Arabidopsis thaliana columbia
cataaatccaaaaccactcatttttctattactgaaatttttcttagagaagaagaagaagaagcaaaatggccacaagcgcatcagctttgctctcaccaaccacattctccactgcaatctcccacaaaaaccctaactccatctcattccatggccttcgtcccctccgtctaggtggctcctcctccgccctacccaaactatcaaccaccgggagaaaatcctcctccgctgtcgtgagagctgagctaagcccttccatcgtcataagtctcagcacaggtctctccctcttcctcggccgtttcgtcttcttcaacttccagagagagaacgtagcaaaacagggcttaccggagcagaacggaaaaacccatttcgaagctggagatgatcgtgctaaggagt

SEQ ID NO: 160067 - DNA, 404 bp, Arabidopsis thaliana columbia
gctgtttctaagaaaacaacaggtagttcggatcggagctacgcttgcaaaactcaaaacatggcgaggggtttgaagaagcatctgaagaggcttaatgcgcctaagcattggatgcttgacaaacttggtggtgcatttgccccaaagccgtcttctggaccacataagtcaagggagtgccttcccctcgtccttatcatcaggaacaggttgaagtatgctcttacctaccgtgaagtgatttcaatcttgatgcaaaggcatatccaagttgatgggaaagtcaggacggacaagacctaccctgctggtttcatggatgttgtgtctatccccaagaccaatgagaacttccgtcttctctatgataccaaaggacgtttccggctccacttccatca

SEQ ID NO: 160068 - DNA, 449 bp, Arabidopsis thaliana columbia
ctctatcttccttatctctctccgccactctccttctctttctccgaactcttcgatggccggtctactcaaaacgccgtctttacatctcacaccaactcttcttcatgctccttctgtaccctttaagcccttttgcgtatctttcgccggaggaagaaacgttagcgtctcactctctcgccgagcttctctccggtctgtctctagcggctatcctctccgcttactaaacctcgtaccctttgcttcgggagaagctgagacgacggagacggaggtggaatcgaacgaacccgaagttcaggagacggatggtgctgttgatgtcgagaatgaaaatgccagtgctgaggtgggtgaagctgctgtagtagtagcaactgttttcactttgtttgtgaattctaatttgtagtttagtttttaactatttggggttgattttt

SEQ ID NO: 160069 - DNA, 321 bp, Arabidopsis thaliana columbia
tccattgctacttctgcttctacttctctccaagctcgtcctcgtcaactggtgattggggctaaacaagttaaaagctttagctatggaagcagaagcaatctttcttttaatcttcgccagcttcctacccgcttgactgtttactgcgctgcaaaacctgagacagtggacaaggtgtgtgcagttgtcagaaagcaactctcactcaaagaggctgacgaaattaccgctgccaccaaatttgctgcacttggtgctgattcccttgatacggtggagatagttatgggattagaggaagagtttgggattgaaatg

SEQ ID NO: 160070 - DNA, 406 bp, Arabidopsis thaliana columbia
taagtttaacctacaaattttataagttgtaattccttttggactctgaccagacaaatgctagaccaggcatgcttggttcgcagttcgcaaatcgttattgtctgtggttacaaaagagaactaagaagcaacaatttttattcaatatcttaggttctttaaatagtatatccgatgatctttaagctcttccttacttggcaatttattagacttgcaataaagcggggagaaagttgctggtttttttgattttatgatttatttcaagatcttttcggtatctcatctaattcatgtctttatcttttcattgtccttcttctttttaatattaatttcatatactattttataatttgttttcttatgattgtctatatttttttatatttcgtacatt

SEQ ID NO: 160071 - DNA, 467 bp, Arabidopsis thaliana columbia
agaaaaacagatctgaaatcccgcttgatactccaccgactttaaactactggtttttgtttgatttaagtatagtgttaatgactcctctctccaccttcctttgattctacctatcacttcccttgccgttgctccatcttcatcactagtcactatacaccaatcttagatccgggaagctaatttctcttctccgatcggtgaatgcagttacattgacctcggatctaaccaagctcttctggtttccagctctctggaattcaaaaaaatggaggagaaatccaagtcaagaggttggtgcggttggttcatcgccattattgtgctagcttctgttatcctcgccgtcgtttacactgttaaattgagaacgaagaaatccggtgacgatgacggtggcggtcccgttcctggacctcccggcgccattgataagaaatacgccgacgctcttaagctcg

SEQ ID NO: 160072 - DNA, 269 bp, Arabidopsis thaliana columbia
cgcccatctctgctctcttttattttcccagaaagtttttttttttttttttttttccgaattccgttaatctcattggggtttccattgatagcaatggcgacggctttcgctcccactaagctcactgccacggtttctctgcatggatcccatgagaatcgtctcttgctcccgatccgaatggctcctccttcttctttcctcggatccacccgttccctctcctttcgcagactgaatcactccaactccacccgtcgatctcc

SEQ ID NO: 160073 - DNA, 173 bp, Arabidopsis thaliana columbia
aatggcttactctatgctctcttccgctactattgttgtctctccggctcaggccactatggtcgctgctttcaacggacttaagtcctccgctgtctttccagccacccgtaaggttaacaacgacattacttacatcacaagcaacggcggtagagtatactgcatgcatt

SEQ ID NO: 160074 - DNA, 395 bp, Arabidopsis thaliana columbia
ccgatttctacggttcatcatcgccgtcggcggcgaggttacaccgtcaagctggccggtcgatgagaacagtgagatctaacttctatcaaagcggagatcaatcttgctcattcgtcggctcaatcggcgataaatcagagtatgcgtcggagtttctctcggattccgtcatcgacatgagactcggcgagcttgctttgaaaaacagtaattctctcaattcaaacgcttcctcaatgaaagaggaagcgtttctcgacatttctcaggcgtttagtgatttttccgcttgtagtagtgatatctccggcgagttacagcgtcttgcttgcttgccgtcgccggaggctgatagaaatgagagcggcggagataacgaagcggagcatgat

SEQ ID NO: 160075 - DNA, 475 bp, Arabidopsis thaliana columbia
gaattctcatctgattcagtccatggctgccacggctcttttccgatcgattcgccgacgcgacgtcgtctccgcgcctctttccgtttacaaatcccttgctggtaatgctcaaccttcctggggtagttcatacattggtcagaactatgcaagtttctccagagctttcgggtcaaaacctgttgtgaatgacattcttggtactggtttgggcactaacaatgccattagagaggagagagagaagtcaaaatctactgaagctgcaattgttggtgctcaattgactcgatctttccgggctcttgatgtgggaacatttaaacgattgttttttacaatctcacgggatataaagacaacacaggtggaaccaaaaatcaaaagctttcgccctttatcttctcacctttttggttaccagtctcagatgaacttcatgcctttgaattttaacagtaattcaggggtt

SEQ ID NO: 160076 - DNA, 477 bp, Arabidopsis thaliana columbia
attaagatctctctttactgttttcccacttttcctttgagaaaactcaaaacaaagtaaacaaacaaaccagaaaaaggaatggcactgagaatgtgggcttcctctacagcaaatgctctcaagctctcttcttctgcctccaaatctcatctcttgccagctttctccatctccagatgcttctcctcagtgttggaaggacttaagtatgcaaattcacatgagtgggtgaaacatgaaggctcagttgctacaattggtatcactgaccatgcgcaggaccatttaggagaagttgtgtttgtggagctgcctgaagcaaacagttcagtgagcaaagaaaaaagctttggagctgttgagagtgttaaggccacaagtgagattctatctccaatctctggtgaagtcattgaggttaacacaaagctcaccgagtcacctggtttgatcaactcaagcccttatgaagat

SEQ ID NO: 160077 - DNA, 344 bp, Arabidopsis thaliana columbia
atttcacaaaccaaaccaaaaccaaaaaaatagcttatctctctcttatcaccggttcaatcactaaaccatggcgacctccgtcgataaccgccattatcccaccatgaacggcgtcgctcacgccttcaaacctcctctcgttccttctcctcgctcattcgaccgccaccgtcaccaaaaccaaactctcgacgtcatcctcaccgaaactaaaatcgtcaaagaaaccgaagtcatcaccaccgtcgtagacagttacgacgactcctcaagcgacgacgaagacgagagccataaccgtaacgttccttactacaaagagctggttaaaaaatcaaaca

SEQ ID NO: 160078 - DNA, 313 bp, Arabidopsis thaliana columbia
gaagaagagaaacaacaagaagtagtaatggcttcctctatgctctcctccgccgctgtggttacatccccggctcaggccaccatggtcgctccattcaccggcttgaagtcatccgctgcattcccggtcacccgcaagaccaacaaggacatcacttccatcgcaagcaacgggggaagagttagctgcatgaaggtgtggccaccaattggaaagaagaagtttgagactctatcttacctccctgaccttagtgacgtcgaattggctaaggaagttgactaccttctccggaacaagtggattcctt

SEQ ID NO: 160079 - DNA, 361 bp, Arabidopsis thaliana columbia
  unsure (1)..(361): unsure at all n locations
cgattcccgaggctcgagagaaaaccgtaaatctcttctccgttcactcaatcaaccaaagatgcgtgagattcttcacatccagggtggtcaatgcggtaaccagatcggagccaagttctgggaagtggtttgcgccgagcacggcatcgatccaaccggaaggtacaccggagactcagatctgcaacttgagcgcatcaacgtttactacaatgaagcgagttgcggtagattcgttcctcgtgcagtgctcatggatttggagcctgggactatggatagtctcagatctggaccgtacggtcagacctttcgacctgataacntcgtccttggtcaatccggtgcgggtaacaac

SEQ ID NO: 160080 - DNA, 326 bp, Arabidopsis thaliana columbia
gatcccttgtagtttccaaatcttccgataaaaatgtcgggtaaaggagaaggaccagctatcggtatcgatcttggtaccacttactcttgcgtcggagtatggcaacacgaccgtgttgagatcattgctaatgatcaaggaaacagaaccacgccatcttacgttgctttcaccgactccgagaggttgatcggtgacgcagctaagaatcaggtcgccatgaaccccgttaacaccgttttcgacgctaagaggttgatcggtcgtcgtttctttgacagctttgttaagagtgacatgaaattgtggtcattcaagaatta

SEQ ID NO: 160081 - DNA, 290 bp, Arabidopsis thaliana columbia
gaagatggctctgatgatcaatctagtgagcttggttctgaagctgatgagaaggaattagatttgggtttgaaggaagagaaaaaaggagtttcggattataaatctcttttatctgagtttgatgattatgttgcaagtgagaaaatgggttctggagtttcgagggcattgagttatgggtttgaagttggagatttggtttgggtaatggtaaaaatatatattttgtattttttttttatttttattgtatattatgtattttttttttttatttgtttttttta

SEQ ID NO: 160082 - DNA, 409 bp, Arabidopsis thaliana columbia
ctcacattttcgtagccccaagacttctttcagattcttacttgcagctatgggtaaagagaagtttcacattaacattgtggtcattggtcatgttgattctggaaaatcgaccacaactggtcacttgatctataagcttggtggtattgacaagcgtgtcatcgagaggttcgagaaggaggctgctgagatgaacaagaggtccttcaagtacgcatgggtgttggacaaacttaaggccgagcgtgagcgtggtattaccatcgatattgctctatggaagttcgagaccaccaagtactactgcacagtcattgatgccccaagacatcgtgatttcatcaagaacatgattactggtacctcccaagctgattgtgcttgtcttatcattgactccaccact

SEQ ID NO: 160083 - DNA, 454 bp, Arabidopsis thaliana columbia
accttccttgatcctatcaatggcggatctgaaatcaaccttcctcgacgtttactctgttctcaagtctgatctgcttcaagatccttcctttgaattcacccacgaatctcgtcaatggcttgaacggatgcttgactacaatgtacgcggagggaagctaaatcgtggtctctctgtggttgatagctacaagctgttgaagcaaggtcaagacttgacggagaaagagactttcctctcatgtgctcttggttggtgcattgaatggcttcaagcttatttccttgtgcttgatgacatcatggacaactctgtcacacgccgtggccagccttgttggtttagaaagccaaaggttggtatgattgccattaacgatgggattctacttcgcaatcatatccacaggattctcaaaaagcacttcagggaaatgccttactatgttgac

SEQ ID NO: 160084 - DNA, 448 bp, Arabidopsis thaliana columbia
aaaatcagaattacaaacaaaaatggttttgcatatagcttcctctcattgggctgcttttgctcctgaccatcgtcgcctctccagcaaatgcagatggacctgtttgcccgccgtcgaacaaactaagccgggcaagtttccctgaaggttttttatttgtcacgggtactgtgtcataccatgatagatgcgcgcttaatgaacctggtcaagacccgaccgttagagacacttaccgctcaagagctctcgggtggtgcattgaatggctccaagcttatttccttgggcttgatgacatcatggacaactctgtcacacgccgtggccagccttgttggtttagaaagccaaaggttggtatgattgccattaacgatgggattctacttcgcaatcatatccacaggattctcaaaaggccctcatggaaatgccttactat

SEQ ID NO: 160085 - DNA, 316 bp, Arabidopsis thaliana columbia
ccgtcatcatcatttttcccaccgacaacaatctctcggagtttgggtattattacttctctcatcaaccaattgtaccactagatctcccagattccttcattatctctatcaataatggcgttgaagtctagttctgctgatggtaaaaccagaagctctgttcagatcttcattgtgtttagtttatgttgcttcttttacattttgggagcatggcaacgaagtggttttggttaaggagacagtattgctcttgagatgaccaacagtggagctgtttgcacattgtacctagcctgaattacgagactca

SEQ ID NO: 160086 - DNA, 187 bp, Arabidopsis thaliana columbia
gccgcttaagagcttatcatctttgtgctttctgtaaatagctctttgctgttgatctttctcctccatcaacaaacatgggtaagacacgtggtatgggagctgggcgtaagctgaagagactccgaattaaccagaggtggtctgacaagcagtacaagatgtcttactcgtgaaatgagtggaa

SEQ ID NO: 160087 - DNA, 444 bp, Arabidopsis thaliana columbia
  unsure (1)..(444): unsure at all n locations
caaccacttcttcttcttcttcttcttctacataaaacctaacgccatggattcagatttcggaatccccagagaactctcccctcttcagcaacttcgatctcagtacaaacctgagcttcctccttgtctccaggggactactgtccgcgtggagcttggtgatggaaccactgtggctgaagctgctgattcacataccatggctcgtgctttcccgcataccttaagccagcctttggctcacttcctcagggaaactgctcaagttcctgatgcgcacatcattaccgagcttccttcagttagagttggaattgtgttttgtggaaagcaagctccaggtggacataatgtgatctggggtcttttcgaggctctcaaggtgcacaacgcanaaagcactttgctaggatttttgggtgggtccgagggtctatttgc

SEQ ID NO: 160088 - DNA, 199 bp, Arabidopsis thaliana columbia
caggatttgcctcctgcatttggaaatggacgcttcattgattaccaattccaaatccattacttctccaccctctttagccttagggaagtcaggaggaggaggagttatcagaagttcactatgtaacttaatgatgccaagcaaagttaactttcctagacaaagaactcaaactctaaaggttagccagaagaaa

SEQ ID NO: 160089 - DNA, 214 bp, Arabidopsis thaliana columbia
caaaggtacagaagattgtagtgaattgtggtattggagatgcggcgcagaacgacaagggtttggaggctgcgatgaaggatatcgcgcttatcacagggcagaaacctattaagacacgagctagagctttcattgctactttcaagatcagggtagatctacctcttgggattgctgttactttcagatgagatgttatgttatatttttt

SEQ ID NO: 160090 - DNA, 366 bp, Arabidopsis thaliana columbia
gagaaaacttcgtctctcttctctgcttcgcccatacatttcctgtgagataaaggcggagtctctctccagttattttgctcatccatcgattcttagagttcaaaatggttgatcaagttcagcaccccactattgcgcagaaagctgccgggcagttcatgcgttcaagtgtttccaaggacgttcaagtgggttaccagaggccttctatgtatcaaagacatgcaacctacggaaactactccaatgctgcatttcaatttcctccgacatcccggatgttggcaacaactgcttctcccgtgtttgtccaaaccccaggagagaaggggttcacctaactttggcccttgactttctgat

SEQ ID NO: 160091 - DNA, 298 bp, Arabidopsis thaliana columbia
ttcagatcacaaaaccctaatttcgaatctttattcttcagaatggctttctgtaacaaactcggtggtctattgagacagaacatttcttctaacggaaatgttccggttacgtctatgctcggatctctccggttgatgtctaccaagcttttcatcggaggtctctcatggggaaccgatgacgcatccttaagggatgcttttgctcacttcggtgacgttgttgatgctaaagttatcgttgatagagagacaggaagatcaagggggtttggatttgttaattttaatgatg

SEQ ID NO: 160092 - DNA, 128 bp, Arabidopsis thaliana columbia
gatgagaagagtgatcactgtgctcagatttattagagcactgttcatgatgttatgcttgttgtcacgcctatcttacgagctattcttcaggaaaacaaaagactcacgagctggctgttgctttt

SEQ ID NO: 160093 - DNA, 82 bp, Arabidopsis thaliana columbia
atcagatcacaaaaccctaatttcgaatctttattcttcagaatggcctccagtaacaagacgcggtggttcaattgagaca

SEQ ID NO: 160094 - DNA, 169 bp, Arabidopsis thaliana columbia
cttgaataaaatcagaattacaaacaaaaatggatttgcaaaagcttcctctcattgggctgcttttgctcctgaccatcgtcgcctctccagcaaatgcagatggacctgtttgcccgccgtcgaacaaactaagccgggcaagtttccctgaaggttttttattttt

SEQ ID NO: 160095 - DNA, 149 bp, Arabidopsis thaliana columbia
ctcatttactgttctgtttcactttctctcgctcagtatactctctaaatgatggcaaaaaactgtaatttagtcagtgttctatgtgtatttttggttttgaccccttttaatataaccctttattgtctccttttcgatcttttttt

SEQ ID NO: 160096 - DNA, 221 bp, Arabidopsis thaliana columbia
tgactctgtgaagcctgttctcctcactggtgataaacaggacagtttcttcgctagtttcgctcttgtatggattattaccaagggtgcatatatatataatataattctaatttaatatatataaattatataattaaatttatatttaataaacataataataatattttattataatatataattaaattattatatattttatatatataatatat

SEQ ID NO: 160097 - DNA, 362 bp, Arabidopsis thaliana columbia
ctaaagctcactacgatatttttcgagaatatgacgactttttctgttccgattgataacggagattctatgaagatcgcagaagaagaatcacaaagaacactgtacccatatgttactggaacttcaattgttgcaatcaagtacaaagatggggttttgatggcttctgatatgggaggttcatatggatcaaccttaagatacaagaacatcgagagagtgaaggctattggttagcattctcttcttggtgccagcggagaaatcagcgatcttcaggagattctccggtatcttgatgagctcaccctgaatgataacatgtgggatgatggtaactttttgtgaccaaaagagat

SEQ ID NO: 160098 - DNA, 463 bp, Arabidopsis thaliana columbia
ggtgaatggtgagtgtgacttggagggaccccatcaccgcaacaatacagcttcttagatctcgataaccacaactaacctgtcacagtttcgattagatcttctcaaaaacttcacctttttttgtttttccagtttctcagaggagatcttccttcaaagctcaaatccttttgtctgaattgtgatactgctgtccccatttttctgcaagttgggaaatttctgtcaaagttttgtgggtctgttaaaaagatctgagctttgaacatggggagctcaatggaggagaaagtggtggctgtgatcatggtcggtggtccaaccaaaggcactcgatttcggccattgtcgctgaatattccaaagcctttgtttcctattgcgggacaaccaatggtgcatcaatcaatttcagcttgtaaaagaattccaaatttagcttaaatatatcttgttggct

SEQ ID NO: 160099 - DNA, 359 bp, Arabidopsis thaliana columbia
ccaaaccctaaaccatctttctcaacatggcgcttcttcacaagcaaaacatttcctttgtgatactcctcctcctcggtctccttgccgtctcttatgcttgtgattgtagtgaccctcctaaaccatcaccacaccctgttaaaccgccaaaacatcccgctaaaccacctaagccccctaccgttaaaccacctactcacaccccaaagcctcccactgtgaagcctccacctccatacattccatgccctcctccgccctatactccaaaacctccaaccgtgaagccaccaccacctccctacgtgaagccaccaccacctcccactgtgaagccaccaccacctccttacgtg

SEQ ID NO: 160100 - DNA, 261 bp, Arabidopsis thaliana columbia
ccccatggctgctctacaatacttggaatctctgttttatacgcatccagagctcggcgaatggtacaattcccttgcagatctgtatcagaaaaagctctggcatcaactcacccttaagctcgaacagttcatcgctctcgctgtctttcaggctggtgatgctttgattcagttctatcacaatttcattacctgtcttttagacgtagatcaattttctgtatcctgtttcttttgctatatttgtattttttatct

SEQ ID NO: 160101 - DNA, 147 bp, Arabidopsis thaliana columbia
aaagaaaaagtctgtttatcatcttcttcttcttcatatcgagatcgaagaagaaccaacaaaaaaccaaaaatggagacgaagccaaaccctatacgttctttaaacacagttctaccatatctaacaccacgtttaagagatcat

SEQ ID NO: 160102 - DNA, 257 bp, Arabidopsis thaliana columbia
ggcaaagcgtgagtgagatcgggaatcaaacaatgcctccgtctctcatttcaaacgctatctccatctccttcctccgccgccgccatggaatctccgaagaattctctgatcccgagcttcctctattcatcatcttcatctccgagatctttcctcctcgaccaggtgctcaattccaactccaacgctgcattcgagaaatctccttctccggccccgcgttcctcttctacgttgttgatttctcggaagaa

SEQ ID NO: 160103 - DNA, 217 bp, Arabidopsis thaliana columbia
  unsure (1)..(217): unsure at all n locations
aaccaacgtaaaacactaactaagagatcaatattgctggagtgatgaagttggcatgcatggtcttggcttgcatgattgtggccggtccaatcacagcgaacgcgcttatgagttgnggcaccgtcaacggcaacctggcagggtgcattgcctacttgacccgtggtgctttattcactcatggtagctgcaactgtgcatctaactcttaaaa

SEQ ID NO: 160104 - DNA, 392 bp, Arabidopsis thaliana columbia
aaaatgtcgaaagaagaaaaaaaaaagaaaaaaatcgtaaaccctataatttttgctcagaaccctaattccgcaaacgtaacctgtgttcattgcgccgtcttctcaccggagaatgagtactactactactacggctgcacttccgcagcgacaccagtcgaaggttgacccgcagaacgttaacagagccgtgaagtctctgctaaaatggtgggactccaaatccaagaccgagaactctgaatcactcgagaacgacggtttcgtctatctaatcgtgacactgaagagaatccctcagttggatcgtactaaccccttgatgatccctcttcctcatcctcttatcgatctggtcgccgaagatccggcggagcttttgttgatca

SEQ ID NO: 160105 - DNA, 395 bp, Arabidopsis thaliana columbia
atctgagtcttgtcatcatggcaacttctctccaagccgccgcaacttttcttcaaccggcgaagattgccgcttctccttctcgtaatgtccatctccgatcaaaccaaaccgtgggcaagtcctttgggttagactcttcacaagctaggctcacgtgctctctccactctgacctcaaagacttcgctggaaaatgctccgacgccgccaagatcgccggttttgctctagccacctctgctctcgttgtctcgggggccggtgcggagggagcaccaaagaggctaacgtacgacgagatacagagcaagacttacatggaggtaaagggtaccggtacggcaaaccagtgtccaactatcgatggtggctctgagacattctcgttcaaa

SEQ ID NO: 160106 - DNA, 464 bp, Arabidopsis thaliana columbia
atcaccaccaccaccaaatcgccgccatgtttaaacaagcttctcgtctcctctcccgatctgtcgccgccgcatcttccaaatcggtgacgactcgtgccttttcaacggaacttccatcgacgctcgattccactttcgtcgaggcatggaagaaagtcgcaccgaatatggacccaccgcagactccttctgctttcatgaaacctcgtccttccactccttcttctatcccgacgaagctcaccgtcaattttgtcctcccttacacatctgagcttaccgggaaagaggtcgacatggtcatcattcccgcatcaacaggacaaatgggtgtcttgcccggacacgttccaacaattgctgagctaaaacctggcatcatgtccgtccatgaaggcactgacgtgaagaaatacttcttgagcagtggttttgcattccttcacgcaaattccgtcgtt

SEQ ID NO: 160107 - DNA, 300 bp, Arabidopsis thaliana columbia
aaacaagtagaaactttaaaacgagagagagtagaaagaaatggcgacatcgggaacgtacgtgacggaggttccgttgaaaggatcggcggagaaacactacaagagctggaagagcgagaaccatgtcttcgctgacgccattggccaccacatccaaaatgtcgttgttcacgaaggcgaacatgactctcacgggtctatcaggagttgggactacacatatgatggaaagaaggtgatgttcaaagagaatattgagatatattgagagatataaacattgactaaatgaggact

SEQ ID NO: 160108 - DNA, 371 bp, Arabidopsis thaliana columbia
atttgtctctcttaaatgtgtttatttccccttttgtagtaaccactcaaaaggttttacttcactcaaaaatggctttgtctcttatctttctagctctcttagtgttgtgccctagtagtggtcacagccaacgttctccttcaccgggatactacccgagttcccgagtaccgacttcaccttttgatcgtgaattccgtactttatggggctctcaacaccaacgtagagagcacgacgttgtcactctttggctcgacaaattcacttgtagtgggtttaagtttttttcttccttacctgtcttattttcttttgttgttttaactctgtttctaattatttttttactgatgatgctcttttat

SEQ ID NO: 160109 - DNA, 376 bp, Arabidopsis thaliana columbia
tctccctcctttttggatatctctgagactttttattttggttttcaattatgcagtttccggataaaaaaaaaaaaaaagggagagagaaagtcacagaaataaagagaaaaaagaaaaaggctcaaacgccatcaaagttttaagaaccaaagaaaaccataagagagtcgatcataacgaaagtctcatcatttggcacccttcttcactgcagccttggtgaccttggctccagatgggttcttcttgtccacgctcttaataacaccaacagcaacggtctgcctcatgttcctaacagcgaaacgtcccaaaggtgggtactcggtgaaagtctcaacaaccatgggcttggttggggtcattttaacca

SEQ ID NO: 160110 - DNA, 364 bp, Arabidopsis thaliana columbia
caaaacccaattagccggagatggccgcaacaatcgtcgctgctgcagctgcttcttccatcatgggtactcgggtggctcccggtatccatcccggattatggatgtattcattctaatatataatatatattatttacttcttaattttataatttaattaatttataaatatttttatctattttcaatatactattatttatttatatttttattaaatatattatcattcttatatttacataaattttttatttaatatatttattaatattatcttttatatttatctatataattatattttttcatttattcttaatattatattataatattatattatctactaatattatat

SEQ ID NO: 160111 - DNA, 358 bp, Arabidopsis thaliana columbia
gtagccaccgcttgacgaatcattcatcaacacactcagagagctctgaatctcgaggaagaagatggtgaggatcattcctatggctgcttcctccattcgaccttccctcgcctgcttctctgattctcctcgcttccccatctccctcctctccagaaatctctctcgcactctccatgttcctcaatcacagctttttggtttaacttctcataagcttttgagaagaagtgtaaactgtttaggagttgctgaatctggtaaagcagctcaagctactacacatgatgatcttctcacctgtgttaagaaatgattagagaaagaatgctttcatcgtcgtttattcgtggtt

SEQ ID NO: 160112 - DNA, 311 bp, Arabidopsis thaliana columbia
ctcaaatcgcaaaattagggttagggttttcaaatccccaaccttgcgaatttctcatttctcggagccgccgcagcaatcaacgatgacaggcaaagcaaagccaaagaagcacacagcgaaggagctccaagctaaagccgatgcagcgttgaccaatcgcggtggaggaaaggcagggctcgccgatagaaccggtaaggagaaaggtggttacgcaaagtacgagtgtcctcactgcaagatcactgtaccggatctaaagacgatgcagatccatcatgaatcgaagcattcaaagcttacttatg

SEQ ID NO: 160113 - DNA, 445 bp, Arabidopsis thaliana columbia
tgctatatggaaaaaagaagggatcttaggcttctttaaaggcttgcaggctcagatcttaaagacagttctgagctcagcattactactaatgatcaaggagaaaatcactgcaaccacatggattctcattctagcaataagaactctgtttgtcacaaaggctagattgaaaagtccataaaagattaccattccgcaagagtcccaaggccaagtaagagcaaagtcatttgtttggcgatcagaatcgaaagatcaagtattgtagtctttctcatttcaagaactattgattttttttagtaaagatctgattgtactaggtccacataaagcttcttgttgttgccagattgagtttctgtgcttagagaatattctatggttattatgtagtttatgtttggtttcttctactgttataaaattgttgttttttcta

SEQ ID NO: 160114 - DNA, 361 bp, Arabidopsis thaliana columbia
ctcagaccatcatcactaagcagtaagtaagcactataatcgcagaagatagataaaatggaagtagggtttctgggtttgggaatcatgggaaaagccatgtcaatgaatctattgaagaatggattcaaagtcactgtatggaacagaacactctccaagtgtgatgagcttgtggagcatggtgcatcagtatgtgagagtccagctgaagtaatcaagaaatgcaaatacactattgctatgctctctgatccttgtgctgctctttcggttgttttcgataaaggcggtgttttggagcagatatgtgaaggaaaaggttatatcgatattttgacttttgttgcaaagacttttt

SEQ ID NO: 160115 - DNA, 425 bp, Arabidopsis thaliana columbia
gcttgtctctgcaaccaaggaaggtctgaaactggatgagactgaagacgagaagaagaagaaagaagagctcaaggagaagtttgagggactctgcaaagtgatcaaggacgttttgggagacaaggttgagaaggttatcgtctctgaccgtgttgtggactcaccctgctgtcttgtaacaggcgagtatggctggactgcaaacatggagaggatcatgaaagctcaagccttgagagacagcagcatgggtggctacatgtcgagcaagaagacaatggagattaacccagagaactccatcatggatgagctgagaaagagagctgatgcagacaagaacgacaagtctgtgaaggaccttgtacttcttctctttgagaccgctcttcttacttttggtttcagcctcgatgagccca

SEQ ID NO: 160116 - DNA, 201 bp, Arabidopsis thaliana columbia
gaaaaacaagagattctttttctagaaatatggacaaatggaagtttaactcctaaagaagcacttcatcaagcctcccggaatttgattaatttatttattccttttctacatgtagaagaagaaacgttctatttagagaacaatcaacatcaagttactttacccttttttccttttcataatcgattagttaaccta

SEQ ID NO: 160117 - DNA, 462 bp, Arabidopsis thaliana columbia
ggcttcttttagcttctaagcttcagagcagcatttatttaacaatggagaagcgccggagatagatctgctttcttccattctccggaccttctctagttcacgaaccaacttcttccactttattctcattcgttggagaaatggactctctcgcaaccgatccagctttcattgattcggatgtatacctcaggttaggacttattattgagggcaaacgattgaaaaagccaccgactgttctctcacgcctctcttcttctctggagagatctctgttactcaatcatgatgacaagattctgcttggatcgccagactctgttaccgtgtttgacgggagatctccccctgagatcagtattgcacactacttggatcgcattttcaagtactcttgctgcagtccctcctgcttcgtcattgcgcatatttacattgatcactttctccataaga

SEQ ID NO: 160118 - DNA, 444 bp, Arabidopsis thaliana columbia
gtttttcttcggcattgactttaccaatcacaactttctccgggatcgccgatttatcttcgtttcaaccatgactcgtggaagtcagagagagcgtgaccgtgaaagagctgccgctcgtgctggtggaaagggtaagaatggtgacgatggtttgacgccggagcaacgccgtgaaagagatgggaaagcattgcaagagaaagcggctaagaaagctgctcaagctgcaggtgcgagttctggtggtgcagctggaggaaaaggagctgctgctaagaagtgatgatgatcatttggtttgtcttttgagcatattgtagactttatgtttgaaattgggttgtttagacctgatgctttgacttttgtctgaaattccattattaagtctttttgttgaatttgttatttgatgtctatgtgtaaatcctcattggtttt

SEQ ID NO: 160119 - DNA, 341 bp, Arabidopsis thaliana columbia
ccaaaatcagcggagcaaaagttacttccgattctttaaaaaaaacacgatgatgctcaagcaagctgcgaagaaggccctagggcttacgtcacgtcaatcaacaccgtggtctgttggtatcctccgaacctaccatgagaacgtcattgaccactacgataatccttgcaacgttgggtcttattattagattgatcctaacgttggttcgttacttgttattgctttcttttttttctatctttttattctatttttcaactatttttttaatatttatattttttttatttatatgttctaatttttttaatttcttttataaattgttgttttat

SEQ ID NO: 160120 - DNA, 282 bp, Arabidopsis thaliana columbia
  unsure (1)..(282): unsure at all n locations
gagagaacaagatccccgtgccaaaactgcctgatggatgctggagtcacaattaaggaagttgatgaggttcttcttgntggtggaatgacccgtgttcccaaagtgcaagagatagtttctggatctttgggatgaatttgttatttttagattatttattatttttttattttatttttttttattttattattttttaattttttatattttttatttatttttaattattttattatttttttttttacttctagtttctaaattatgtttttattt

SEQ ID NO: 160121 - DNA, 75 bp, Arabidopsis thaliana columbia
ctggcctgcaatgcctgtcagcgatggtgtggtttatgggagagttttcacatattttcgctactgttgattaaa

SEQ ID NO: 160122 - DNA, 177 bp, Arabidopsis thaliana columbia
gtagcttatctagggatagtgcgattaaagaatggcctcacttcttaggttccatgtagtgatgggtatgctgttgaaatcgcactccaggttatagggaccgtagcaagtgtatgcctttggagtctattgggtaagtttttcattatcatattcttttctttttatcattattta

SEQ ID NO: 160123 - DNA, 187 bp, Arabidopsis thaliana columbia
gttgatcggtcgtcgtttctctgacagctctgtttagagtgacatgaaattgtggccattcaagattcaagccggacctgccgataagccaatgatctacgtcgaatacaagggtgaagagaaagagttcgcagctgaggagatttctttcatggttcttattaagatgcgtgagattgctgaggct

SEQ ID NO: 160124 - DNA, 465 bp, Arabidopsis thaliana columbia
tttcaatttttctccactccaaaaccagaaagaaagaaaaaaacatcaatcatgacaacaacaacaacgaagaagccgcacgttctggtgataccgtttccacaatccggtcacatggttccacatcttgacctcacgcatcagattcttctccgtggagccaccgtcactgtcctcgtcacacccaaaaactcttcctatctcgatgctctccgttctcttcactccccggaacacttcaaaaccctaatccttccttttccttctcacccttgtataccttccggtgtcgaatctctccagcaacttcctctcgaagctatagttcacatgtttgatgctctctctcgtctccacgaccctctcgttgactttctcagccgtcaaccaccgtcggatctccccgacgccatcctaggaagctcatttctcagcccttggattaacaaagtagctgatgctttc

SEQ ID NO: 160125 - DNA, 422 bp, Arabidopsis thaliana columbia
cgatgatgcctcgccgtgacgtcctcttcctctcactcctcctcgtcatcgccaccgtctccgctgtcgcattagccgacgatgaagcagattgtgtctacacattcttccttagaaccggatcaaccttcaaagccggtacagattcgatcataagcgctagagtctacgacaaatacggagactacatcgggatccgaaacctagaagcatggggtggtttaatgggaccaggttacaactactacgagaggggtaatctcgacattttcagtgggaaagcaccatgtcttccgagcccagtctgttcattaaatctgacctctgacggctccggtgaccaccacggttggtatgttaactacgtgggagtcacgacagccggagttcatgccaagtgcttgtaccaaagctttgatgtt

SEQ ID NO: 160126 - DNA, 436 bp, Arabidopsis thaliana columbia
tgacaatgaggaagactgttgccaagccaaagggcccatcaggcagcccatggtacggatctgaccgtgtcaagtacttgggtccattctctggcgaatcaccgagctaccttaccggagagttccccggagactacggatgggacaccgccggactttcagctgaccccgagacattcgcaaggaaccgtgaactagaagttatccacagcaggtgggccatgctcggagccctaggctgcgtcttccctgagcttttggctagaaacggagtcaagttcggagaggcggtttggttcaaggccggttcacagatcttcagcgatggagggctcgattacttgggaaaccctagcttggttcacgctcagagcatttttggccattttgggccacacaagttattttgatgggagccgttgaaggctacagagtc

SEQ ID NO: 160127 - DNA, 396 bp, Arabidopsis thaliana columbia
atcatttccaatttataaaagttaaagccatggttgcatctttctctgtcccctctatgataatggaagaagaagggagattcgaagcggaggttgcggaagtgcagacttggtggagctcagagaggttcaagctaacaaggcgcccttacactgcccgtgacgtggtggctctacgtggccatctcaagcaaggctatgcttcgaacgagatggctaagaagctgtggagaacgctcaaaagccatcaagccaacggtacggcctctcgcaccttcggagcgttggaccctgttcaggtgaccatgatggctaaacatttggacaccatctatgtctctggttggcagtgcttgttcactcacacatccactaatgagcctggtccttatcttg

SEQ ID NO: 160128 - DNA, 201 bp, Arabidopsis thaliana columbia
ctcttcctaagtttcctctctctttagaactgtttagagagaaaagcctccatttttctcaaggcaatctctctctctctgcctcatctcataaacccattacaccaaaacctcatcgtagagagagaaacacaccaaccattgttacactctaagagaagagaagagagaaggaaaaatggacggtgtatcaccaaagtt

SEQ ID NO: 160129 - DNA, 309 bp, Arabidopsis thaliana columbia
gccgccatggtgaagtactcgcaagaacccgacatttataccaagtcttgcaaggctagaggatccgatcttagggttcacttcaagaatactagggaaacagcgcacgcaatcaggaagctaccattgatcaaggcgaagaggtaccttgaggatgtgatagctcacaagcaagcaattcccttcacacgtttctgcagaggtgttgggagaactgctcaagctaagaacaggcactctaatggtcaaggacgttggccagccaagtctgctcagtttgttcttgatttgctcaagaacgctgagagc

SEQ ID NO: 160130 - DNA, 239 bp, Arabidopsis thaliana columbia
  unsure (1)..(239): unsure at all n locations
ctgaaaaatgggagcaattcatttatgncttcccttngtcctttctccccctgctataaaacaccataccttcctttattcttcttcatccaattccaatttcaaaatcagatccaacaaatcttcttcttcttctttttcttcgatcatcatggccagtattaatggttacggagttttcatgatcaccgccactatgttctgtcttgcttctttttacgtgatagatcttttttttg

SEQ ID NO: 160131 - DNA, 190 bp, Arabidopsis thaliana columbia
gcagacttggtctgcagtgaacaccacgaagctttactgtcatggaaaattgatgcaaagctacaaaaaagtgcctgagtggtggttttatatattgctgccaggaagtgtagccatgtctttcctaatgtcattggtgtgggtggcgttagggctgcgtatcatttgacatgcaatgtatttttgtttt

SEQ ID NO: 160132 - DNA, 375 bp, Arabidopsis thaliana columbia
tcacaatcttttctctccaaattctcttctctctgaatcaatccaatcatggttgagccggcgaacaccgttggaattccggtgaaccacatcccattgttgaaggatgagctcgatatcgtgatccccacgatccgtaacctcgatttcctggagatgtggaggccttttcttcagccttaccatctgattatcgtccaagatggagatccatcgaagaccattgctgtccctgaagggttcgattacgaactctacaacaggaacgacatcaaccgtatccttggtcctaaagcttcctgcatttccttcaaggactctgcttgtcgttgctttggctacatggtcttcaagaagaagtacatcttcactatt

SEQ ID NO: 160133 - DNA, 209 bp, Arabidopsis thaliana columbia
  unsure (1)..(209): unsure at all n locations
caacaagcnaggaagagaccncccacagaagagcgaagacaacgcggaggagttcagcaagaagcaagaggcaaaggcaggcacaggagcgatggagaagaatgacacaaactgggcagaaaaaccaggaggaccagccacacagagcgggctggagacaaagcagaagcagaagccggaaaagcaggaacgcagcagaagggcgcgga

SEQ ID NO: 160134 - DNA, 334 bp, Arabidopsis thaliana columbia
caaatactttgacgaaaaaagcttttaaaacttatttattttcgtttgatacacatttgaagaaagaaatggcatccaaccaacagagctacaaagctggtgagaccagaggcaaggcccaggagaagactggacaagctatgggaacgatgagggacaaggctgaggagggccgggacaagacttctcaaacggtccaaacagcctaacagaaggcccatgagacagcccagtcagctaaagataagacatttcaaactgcccaagcggctcagtagaaggcctatgaaacggcccagtcagtaaaagtgaagactttttatactgcccaaac

SEQ ID NO: 160135 - DNA, 446 bp, Arabidopsis thaliana columbia
aacctcaacaatctctctcctctctctctctgtatatagaagaatctccattgtctttaatttctctccatttctctttctctcttccttcaaagttttctcttttcttgatgggtttaagagagtaaagatcatcaagtactatgcattaaattgagaagttattaaaaatttcgaaagtaattaaagattgttgatgatgaagagattaagtagttcagattcagtgggtggtctcatctctttatgtcctacaacttccacagatgagcagagtccgaggagatacggtgggagagagtttcagtcgatgcttgaaggatacgaggaagaagaagaagctatagtagaagaaagaggacacgtgggcttgtcggagaagaagagaaggttaagcattaaccaagttaaagctttggagaaagaatttgagttagagaataagc

SEQ ID NO: 160136 - DNA, 242 bp, Arabidopsis thaliana columbia
  unsure (1)..(242): unsure at all n locations
ctccttcactcttcatcttcaaagactgcgccnataagctcagtgaaaaaggttcgagcttcggaaactatggcagcattccctaaccttaactctgatgctggattgaagaagctcgacgagcatcttctcactcgcagttacattactggataccaggcttcaaaggatgatatcaccgtctttgcagctcttgcaaagtctccaacttcacagtatgtgaacgcttcttgatggttcaa

SEQ ID NO: 160137 - DNA, 238 bp, Arabidopsis thaliana columbia
actaactacaacacctttaaagtctgcctcctttttaatcttatttcttctgttcgatctctaatctcagaatttgtgtcggtaaggtaaaggtgataatgagtgatgactgatgagggagttttgggacaaattttaagagtaacgcatagaaactgacagtagagagtgagcacacaaaggcactttgtatgttcgatgcatttgcttctcttgcgtgctaactgctctatctgtc

SEQ ID NO: 160138 - DNA, 273 bp, Arabidopsis thaliana columbia
gatcgatcaccagattcgtgtttgagtacaagggttttctcaagctctcgtctttctgaatcaaactggtctaactcttacatgtatccagaggatgatgataagctcctcggtaatggtaaaagagctttggaggttgttggttcgtttagatttttatattttttttttttactcttttgttatattgttattttcatatgtattttttattctttttcttttctattagtttaatatttgatttttttttttatcttttttatcttatta

SEQ ID NO: 160139 - DNA, 345 bp, Arabidopsis thaliana columbia
gtctcttcttcttgattttgagtatcgattctaattttggatccagagggttcatttatgtgaaagattaggttttaacatactatgtcagctagaacgttgtaggccacaaacactatgttacagggcaatcttttattaactccatccaaaatcattgttggaggtctctcaccatctactgatgtggagctcttgtaagaagctcttggcagtattggaaaaattgttgattgcggtagttggttctgaccgtgaaagtatgtttattaaggtgctttggtttcgtaacatattgaatcgatcgaagttgtgaattacgctatttcttgctatgttaaatat

SEQ ID NO: 160140 - DNA, 283 bp, Arabidopsis thaliana columbia
cttgaagcaatcaaaggtgaagaagaagttcacataatcgatttcgatataaaccaagggaaccaatacatacactgatacgaagcattgctgagttgcctggtaaacgacctcgcctgaggttaacaggaattgatgaccctgaatcagtccaacgctccattggagggctaagaaatattggtctaagacttgagcaactcgcagaggataatggagtattcttcaaattcaaagcaatgccttcaaagacttagaattgtctctccatcaacacttcggt

SEQ ID NO: 160141 - DNA, 307 bp, Arabidopsis thaliana columbia
  unsure (1)..(307): unsure at all n locations
atttgatcaccacctttgatggagaaaaagatttgtctaagtactccttgcaaatccatcggcgtattgctagtacaaaacagcttattactcattttatcttcctgttgcttgcgcattgctcatggcgggagaaaatttggaaaaccatactgatgtgaagactgttcttgttgacatgggaatttactttcaagtacaggatgnntatctggactgttttgctgatcctgagacacttggcaagatagggacagacatagaagatttcaaatgctcctggttggtagttaaggcattggaacgc

SEQ ID NO: 160142 - DNA, 423 bp, Arabidopsis thaliana columbia
aaaaaaaatcgacatcgcttttgctcacttctctctcttaggttttttttcccttctcccaatctcatcttctccgagaacctttcttctctcaaatttctgtgaaaacatgtctgacgacgagcaccactttgaggccagcgaatccggagcttccaagacctatcctcaatcagccggtaacatccgtaaaggtggtcacatcgtcatcaaaaaccgtccctgcaaggttgttgaggtttcgacttccaaaactggcaagcacggtcacgccaaatgtcactttgttgctattgatatcttcactgctaagaagcttgaagatattgttccatcttcccacaattgtgatgttccacatgtgaaccgtgttgattaccagttgattgatattactgaggatggcttcgtgagcctttttac

SEQ ID NO: 160143 - DNA, 365 bp, Arabidopsis thaliana columbia
cttttcaggctcaccaaagctaagcttgaatctgctcaagacaggaacccttctccacctgtagatgaagttgtggcctggtgtgggaaaatggtcagatatcaactcaaagtcagtcaagtagatcgaggaacattccttcaccacaagcaaactcttctagagctagagagattggaaatggctcaaagacgactatggtggacgagatccctatgtcagtgccatcactaatgacgggtttgagtcaagacgatgactttgttccatggttgaatcatcatccctcccttgatggatattgctctgatttcttgcgtgatgtgtcgtcttctgttactgtcaacgagcaagagagtgatatg

SEQ ID NO: 160144 - DNA, 396 bp, Arabidopsis thaliana columbia
atcatccacagagaaacccaaaagagattgaagaagatgcattacatgggtttgtttagtagagctggaaacatattaggcagcctagagcgttgcaggcctcaaacgctatgttacagggcaatctttcattaactccatccaaaatctttgttggaggtctctcaccatctactgatgtggagctcttgaaagaagcttttggcagttttggaaaaattgttgatgcggtagtggttttggaccgtgaaagtggtttatcaaggggctttggtttcgtaacatatgattcgatcgaagttgctaataacgcaatgcaagctatgcaaaataaggagcttgatgggcgaataattggagtgcatccagctgattcaggaggtggtgggggtggtg

SEQ ID NO: 160145 - DNA, 237 bp, Arabidopsis thaliana columbia
gaagctgtcatcgattatgctctgaaaaacagggtatgttaaactcgttccatgtggacttgattttggccgaccaggatttacagttttagagaacaccggttccacccttctttagagaagactagacgtttctatcctcacgtgcacaacatggatggattctttggtgcaaagctgcagaagatgtgcattgcaatgcaatcttcatgaaatgttgtgccagcttgtacaatg

SEQ ID NO: 160146 - DNA, 370 bp, Arabidopsis thaliana columbia
ttttcagagttcaatcacacaacacctgtcttcaatagcaataaccatggctcacactctcggtctcactgacccaactccactgagcctcacaagatctcgttcactgcgaaggagatcgatgtaattgaatggaaaggagacatactcgtagttggtgtgacagagaaggacttagccaaagacggtaactcaaagtttgagaatccgatcttgagcaaggtcgatgctcacttaagtggacttttagctcaagtctcttccgaggaagatttcactgtgaaacctggtcaatcgactgttctcaggctttcgggtttaggatcaaagagaatcgcttttatcggtcttggacagttctgtttcgtct

SEQ ID NO: 160147 - DNA, 442 bp, Arabidopsis thaliana columbia
gttcttgtactcagatgtgaaaacgcagaagcttggtaaaggagagttagagtgtgcgatatgtttgaacgagttcgaagacacgaaacgctgcgtttgcttcccaagtgtgatcacgtgtttcatccgcactgcatcgatgcttggctcgaggctcacgtgacttgtcccgtttgcagagcgaatcttgctgaacaggtagctgaaggtgagtcagttgaaccgggaggaactgaaccggatcttgaattgcagcaggttgtggtgaatcctgaaccggtggttactgcaccggtaccggaacaattggtgactagtgaagtcgattcgaggagattacctggtgtaccggtggatcttaaaagagttaaattctcgagatcgcatacgacgggacattcggtggttcaaccgggagaatgtaccgaacggtttactcttc

SEQ ID NO: 160148 - DNA, 419 bp, Arabidopsis thaliana columbia
  unsure (1)..(419): unsure at all n locations
aagcaatatcatttccaatttataaaagttaaagccatggcttcatctttctctgtcccctctatgataatggaagaagaaggagattcgaagcggaggttgcggaagtgcaaacttggtggagctcagagaggttcaagctaacaaggcgcccttacactgcccgtgacgtggtggctctacgtggccatctcaagcaaggctatgcttcgaacgagatggctaagaagctgtggagaacgctcaaaagccatcaagccaacggtacggcctctcgcaccttcggagcgttggaccctgttcaggtgaccatgatggctaaacatttggacaccatctatgtctctggttggcagtgctcgtncactcacacatccactaatgagcctggtcctgatcttgctgattattcgtacgac

SEQ ID NO: 160149 - DNA, 383 bp, Arabidopsis thaliana columbia
ctcttttgagaaaagatagatcttcttcaccttcttcattgatctcagatcccgatcccgtctccttatcttccgccggcgacttgttcatttttctcttctacctaccacctcttaatcattctctctccccccgcagatctagcgaatcgaattcgaatccttaagtagtagtggaatcatggcgctaagcatgcgaaaagcgatcggagttgttaaggatcagactagtatcggcatagcgaaggtagctagcaacatggctccagatctggaagttgcgatcgtgaaagctacaagccacgacgatgatcaatctagtgacaagtatatccgcgagatccttagcttaacttcactctcccgtggctacgttcacgcct

SEQ ID NO: 160150 - DNA, 137 bp, Arabidopsis thaliana columbia
aaaaaaagctattgtttgaaagaagaagaagttaactatggcaaaggatgtggaagccgttcccggagaaggattcagacaagagactattacgatccgccaccagctccacttattgatggagcggcactaaagaa

SEQ ID NO: 160151 - DNA, 406 bp, Arabidopsis thaliana columbia
cagagagagtggatggatgtcttatagaatgaacaaaacattctctgtttctcttgtccttgtccctttttccagatcttaggttttccacattttatcatctgggtcctctccttaatgatttgaagacactcaattcctatttgatcggggactagaatttggattctgtttcagacaaaagtagatttccctgtctctttcccgtttgattttcaataagatgaatccggaggagcaaaagatggaatctgcatcggatctgggcaagctcttcattggcgggatttcatgggacacagatgaagaacgactgcaagagtattttggcaagtatggagatttggttgaagctgtgatcatgagagaccgtactaccggacgtgcccgtggctttgggtttatc

SEQ ID NO: 160152 - DNA, 448 bp, Arabidopsis thaliana columbia
cttctctcatcctcagaaagaatggctcaaaccatgctgcttacttcaggcgtcaccgccggccatttttgaggaacaagagccctttggctcagcccaaagttcaccatctcttcctctctggaaactctccggttgcactaccatctaggagacaatcattcgttcctctcgctctcttcaaacccaaaaccaaagctgctcctaaaaaggttgagaagccgaagagcaaggttgaggatggcatctttggaacgtctggtgggattggtttcacaaaggcgaatgagctattcgttggtcgtgttgctatgatcggtttcgctgcatcgttgcttggtgaggcgttgacgggaaaagggatattagctcagctgaatctggagacagggataccgatttacgaagcagagccattgcttctcttcttcatcttggtcacctctgt

SEQ ID NO: 160153 - DNA, 424 bp, Arabidopsis thaliana columbia
caactctttataccagcctctgtaacgttcgatcatcttgtatttcatttcaaccactcattgtttttagttgttttacgaagaatcaactatggcgacgaagagaagcgttggaactttgaaggaagcggatctgaagggaaagagtgtgttcgtgagggttgatctcaacgttcctttggatgataactctaacatcaccgatgacaccaggattcgtgccgctgttcccaccatcaagtacttgatgggtaatggatctagggttgttctctgcagtcacttgggccgcccaaaaggtgttactcctaagtacagcttaaagcctcttgtgcccagattgtctgaacttcttggtgttgaggttgtaatggcaaatgactctattggtgaggaagtccagaagttggttgcaggactacct

SEQ ID NO: 160154 - DNA, 446 bp, Arabidopsis thaliana columbia
atcgactttcatattttctctgcataagagagaaagaaaatgggatctcatgtcgcacaaaaacaacaccagtttgcgttccttatccggctcaaggccacatcaacccaatgatgaaagtggctaaactcctttacgccaaaggcttccatattaccttcgtcaacaccgtctacaaccacaaccgtctcctccggtcccgtgggcctaacgccgttgacgggcttccttctttccggtttgagtccatccctgacggtctacccgagactgacgtggacgtcactcaggacatccctactctttgcgagtccacaatgaagcactgtctcgctccattcaaggagcttctccggcagatcaacgcaagggatgatgttcctcctgtgagctgtatcgtatccgacggttgtatgagcttcacacttgatgctgcggaggagctc

SEQ ID NO: 160155 - DNA, 347 bp, Arabidopsis thaliana columbia
caggaagatcattagcagagaattctcatctgattcagtccatggctgccacggctcttttccgatcgattcgtcgacgcccgtcgtctccgcgcctttttccgtttacaaatcccttgctggtaatgctcaaccttcctggggtagttcatacattggtcagaactatgcaagtttctccagagctttcgggtcaaaacctgttgtgaatgacattcttggtactggtttgggcactaacaatgccattagagaggagagagagaagccaaaatctactgaagctgcaattgttggggctcaattgactcgatctttccgtgctcttggtgtgggaacatctaaac

SEQ ID NO: 160156 - DNA, 351 bp, Arabidopsis thaliana columbia
cagagatcggctgattttcacatccacaagtatggcgactctaatcagcaagaagagaaagcttgtagcggatggtgtatctacgctgcatcgaatgaggttctcacacagtagctgaggagaggatggcccacaaagtgcatatgattaacctctctgacaaaccccagtggttcttggacattagtcctcaagggaaagtaccagtgcttaagatcgacgactagtgggtgactgattccgacgtcatgttatggtatacttctaggagaagtatacttgatccacctctttaatacttctgcttgaatttacactcggtcggtaccatcattttttaggtactttatg

SEQ ID NO: 160157 - DNA, 458 bp, Arabidopsis thaliana columbia
aaacaaagcaagcaaaaaaaaaaaatggctttctcacgcctctcatttgcagcttctctcatcgtcttctcatctctatcatatcttcagttgcttattacggcaatgaagctgacccggagaccggaaaattgattcccatcgccgttgaagggatcatcaagtgcaagtccggtggcaaaacttacccaattcaaggtgcaacggcaagaattgcgtgtgtgaaggtcgatgcatatgggaatgagttagttccaatatcgatattgagcagcaaaactgatgctaaaggttacttcatcgccacgatattcccttcgcagcttcgtgcaggaaggacagtgaccaaatgcaaaacttacctttacaaatctccactcgctgattgcgattttccgaccgatgtgaacaaaggtgttagaggacagccattgagcacgtaccgtattcttcaagac

SEQ ID NO: 160158 - DNA, 412 bp, Arabidopsis thaliana columbia
gaaggagacatgtgaggctgttaccatcattgagacacctgctatggtggttgttggagttgttgcctatgtgaacgtcctagaggtttgaggtctttgaacactgtctgggcacagcatttgagtgaggaggtcaggagaaggttctacaagaactgggctaagtctaagaagaaggctttcactgggtacgctaagcagtatgacagtgaggatggcaagaagggtattcaggctcagcttgagaagatgaagaagtacgctactgtcattcgtgttttggctcacactcagatcaggaagatgaatggattgaagcagaagaaggctcacatgatggagatccagatcaatggtggtaccattgcccaaagggtgactttgctacagttctttgagaagcaatcccatt

SEQ ID NO: 160159 - DNA, 433 bp, Arabidopsis thaliana columbia
gctaaaactaaatacaaagaaacagagatgggtttggttacagaggaggtgagagctaaggcagagatgtacaccgcgatgagatatgtagagagaagacaaagtgtttcctcaaggaaatatctatgcccaatggtttattaccattgaaggatatagaagaggttgggtatgacagagagtcaggtgttgtatggctgaagcagaagaagagcatcactcacaagttcacagagatagataagcttgtctcctatggaaccgaagtcacagccattgttgagaccgggaaaatcaagaagctcactggagtcaaagccaaggaacttcttatttgggtcactatcaatgagatctataccgaggaaccccctaccaagatcacgttcaagacaccgaccacactgtccaagacttttccggtcacagcttt

SEQ ID NO: 160160 - DNA, 69 bp, Arabidopsis thaliana columbia
acgataaacctcaagccgtcgtcaccaaagttacctctcagagacgaaaaaatgaataccattttgttc

SEQ ID NO: 160161 - DNA, 412 bp, Arabidopsis thaliana columbia
gaaattcgtaagtactatcaagaagcagaagatggcccaaaaggtggaagcacaaggagggaaaggagccaacctatgggagatggatcgacacatgacgccgtgaccaagattcagctcgcagcaggcatagacggaattcaatatgttcagtttgattatgtcaagaacggacaacccgaacaagctcctcttcgtggtaccaaaggccgtgttctcccagctgatccgtttgtgattaaccatccagacgaacatctagtttctgtagaaggttggtatagccctgaaggtatcattcaaggaattaagttcatctccaacaagaagacttctgatgtcattggatccgatgagggtactcacttcactctacaagttaaagacaagaagatcattggctttcatgggt

SEQ ID NO: 160162 - DNA, 209 bp, Arabidopsis thaliana columbia
gtctctgttcttagatcccttgtagtttccaaatcttccgataaaaatgtcgggtaaaggagaaggacccgctatcggtatcgatcttggtaccacttactcttgcgtcggagtatggcaacacgaccgtgttgagatcattgctaatgatcaaggaaacagaaccacgcccatcttacgttgctttcaccgactccgagagggtgatc

SEQ ID NO: 160163 - DNA, 52 bp, Arabidopsis thaliana columbia
gtttaccaaaaacacaggtctgcgcatagtcgtttgaccatgtatgggggct

SEQ ID NO: 160164 - DNA, 434 bp, Arabidopsis thaliana columbia
gtgatttactgagtgaaaaaagcttatcgcggcgattagttcccggcgaagaagaagaagagagataagaaatggcgactaatggatctgctagctcagcgcagctctctcagaaggaagctgatgtcaggatgatgtgtgccgctgaggttcatcttggaaccaagaattgcaattaccagatggagcgttacgtcttcaagagacgcaacgatggtatttacatcttcaaccttggcaaaacatgggaaaagctccagatggctgctagagttattgttgccattgagaacccacaggacatcatcgtccagtcagctaggccctatggacagagagctgtgttgaagtttgctcagtacactggagccaatgccattgctggaagacacactcctggtaccttcaccaatcagatgcagacatccttcagt

SEQ ID NO: 160165 - DNA, 328 bp, Arabidopsis thaliana columbia
tcgcaaaagccgacaccggagagatccttaccgtctcactttctccgcttctcttgtttgtcacttttcgttaaaccccaattacggcagaatcttgataattggagaaaacgaaagcgtttatggtgttgtgggagaacaattcatagttgtgaagttagttggattcaaggtgaagaaatctaagtatgtcgagcagaactatggatgttctagaaggtctggttaaagatagttcacttaaatggttgcttgggaagcaaagttcttttgatgaagaaatcgaagagattgagaattctccatctgctggtgccaattggatacc

SEQ ID NO: 160166 - DNA, 453 bp, Arabidopsis thaliana columbia
gacgaaggaaaaagaagaagagtgaaagttgcagagcgagaaaaaatggcaaccatgtctgctcttcagagctctttccttctctttctctatctcccagctcttccttcctcggccagcgtttaattcccccgctttccctgtccgtcacttctccggtcaagcccgctgagaacccatgtcttgttcttgcaaagctcaagcgttgggaacgaaaagaatgcaaaccaaacagtcttccgattctccacaaaatgcatgtcaagtttggagatacagtcaaagtaatatctggacgcgacaagggtaaaatcggagaggttactaagattttcactcacaacagtaccattgtgatcaaagatgtgaacctcaaaacaaaacacatgaagagccgagaagagggagagcctggtcaaattgtcaagatagaagcacctatccacagcttca

SEQ ID NO: 160167 - DNA, 433 bp, Arabidopsis thaliana columbia
aattttcttctttcaaagctccttttctgctggttcccggatccaatcgttctctcctcctactacaagtcctgtcgtcacacaacaaggcgagatggccttatctgcaatcggtttcgaaggttacgagaaacggctcgaggtgactttctttgagccaagcatctttcaagactccaagggactgggactccgtgctctgaccaagtcccagcttgatgaaattcttacacctgctgcatgcacgatcgtttcatctctctccaacgatcaattggactcttacgtactctctgagtccagcttctttgtctacccctacaaagtcatcatcaagacttgcggtaccactaagctcctcctctctatcccaccacttctaaagctggctggtgagctctctctgagtgtcaagtctgtgaagtacactcgc

SEQ ID NO: 160168 - DNA, 460 bp, Arabidopsis thaliana columbia
gcagcggaggcggtggtggatactcaggaggcgtgttgcggttgttactcctcctgtgaaatcttctacttcttcatttattaccactccccacctccttcggtgaaatccccaccaccaccatgacccttacatgctctccaccatcaccggtataatctcccccacctactgtctacatctacgcttttcccccacctcccacacattactaggctcatcaaattcaacaaaatttccccattattcaagttttcttttaaaaaatgaaataaaggaagggtcaaagtcaaagagaagaagaagtgaaccaaattaggatcgtggcgtggttatcagttacaatacatttctaactacgatccacattacttccttttttttaattgcgcttatctttcacttgtgcatcattttttattgcgtctttttcaagtctaattgttttcaagcacccttt

SEQ ID NO: 160169 - DNA, 187 bp, Arabidopsis thaliana columbia
aaattattccggttgaggattcaaagttacagtttgttgtagtagagaaagatgatggggtcatccctactgctttggagtctgctcctacagatctctattccaatctgtttacctgtttacttccttcaacaggtttggtttgtccgatccatcgtcactctcttagttagaacaggtcattttt

SEQ ID NO: 160170 - DNA, 380 bp, Arabidopsis thaliana columbia
atttcaaggactatctctacccagggaatgttggctgtgtacaactccttgtctgaagaaggtaaaaaagatttgagactgcatacagcgcatccttctatccttgtatggagattctctatgaatgttacgaggatgtacaaagtggcagcgaaatccgaagtgttgtcttagccggtcgtcgcttctatgaaaaggaaggcttgccagcattccctatgggaaatattgaccagacaagaatgtggaaggtgggtgaacgcgtcaggaagtccagacctgctggtgacttgggtccattgtatcccttcaccgctggagtttatgtagcacttatgatggctcagattgagatcttgaggaagaaaggtcactcttac

SEQ ID NO: 160171 - DNA, 404 bp, Arabidopsis thaliana columbia
ggcatttacgcgtcagtgagagtggagtatataacaatctgaagctgaagaagaagaattgagagataacgagagatagtttcttcttcatccaaaaagaaatccaatctttttcctcaaaaagaatagttctgggatccgaccgacaatggaaattttctactacttggggttgggggtttggggtctcgtcgtcgcgcgttggagcttaacaagaacaacaaggatcgaatcaacacttcttcagctttcaattctttcaagaacaattatcttcttgtctattcgctcatgatggcgggtgattggttgcagggtccatatgtgtactatctttatagtacttatggatttggtaaaggggacattggacagcttttcattgctgggtttggttcctctat

SEQ ID NO: 160172 - DNA, 347 bp, Arabidopsis thaliana columbia
gctcattctaatggatctggtcctgtagattggattaacaaacacgccgatttcggtaaagttttcctcggcggagatagcgcaggcggtaacatatcgcatcacatggcgatgaaagctggtaaagagaagaagctagatctcaaaatcaaaggtattgctgttgttcatccagctttctggggaacagatccggttgatgaatacgatgtgcaagataaagaaacgagaagcggaatcgcggaaatttgggagaagattgcgagtccgaatagtgttaatgggacggatgatccgttgtttaatgtaaacggatccgggtcggatttttctgggttgggatggga

SEQ ID NO: 160173 - DNA, 357 bp, Arabidopsis thaliana columbia
gtcttacacaacaatccttcttacatttctaccaacaaaacacaaaacacaaacatagcattcaaaactttgaaaacggcaccagctcctagtccaatcaattctcaacacgtggcggtgatcggagccggagcagccggtttagtagcagccagagagcttcgtcgtgaaggtcacaccgtcgttgtccttgaccgagagaaacaagtaggtggtctttgggtttacacacctgaaaccgtgttcgtcgagcttggtcttgacccgacccgacccatagttcactcgagcgtttacaagtcttttcgaaccaatctccctagagaatgtttgggttacaaggattttcctttcgtg

SEQ ID NO: 160174 - DNA, 109 bp, Arabidopsis thaliana columbia
aaataaagaagcccttgattttgcccattgcagtcatctctttcgaatctctccctataatccgatctgagaaacccgccggagctaggttctgaagcaacctaaccat

SEQ ID NO: 160175 - DNA, 266 bp, Arabidopsis thaliana columbia
gcaagagaaaacagaggatttaggttactctgtttttcacggcgaggataaagtaaaaacagaggattactctgtttatcctttaagaagaaaaaaatcagatttttaacagaggaagattttttggagtcggactctgattttgttgattcaagtcagacattcacaagcaacgacgaagatgggtttttatcagattcagatttcgcagaaacattactgatgaaaggacatatccgttttagcgtcatttttggttctggttc

SEQ ID NO: 160176 - DNA, 255 bp, Arabidopsis thaliana columbia
gttggtagctggaaacgctttgaattgcttattcattgattccagtggcttccagagatatttgggttttgtgtcacaaatctcaatggtgccactgttaaaagctataagcaagaggggtttgtcatagatgaacgtgggaaattaaaaagatttaacaggaagaaactcttcaggaaacgatgtggctctttgagagggcgaggatggaaatatggatccgggtttgtctattggttattttctgttctatgt

SEQ ID NO: 160177 - DNA, 58 bp, Arabidopsis thaliana columbia
agggaatggagagttgctgtcggagcgttatatttttaaggacgtttcatctgcggtc

SEQ ID NO: 160178 - DNA, 198 bp, Arabidopsis thaliana columbia
aaactctcaacacattagacctcgtgactcttgttgtcggacacacaataggaactgctggctgcggtctataaggggaaggttcgttaacttcaacggcacaggacaacctgacccatcaatcgacccgagttttgtgccgctgattctggctcagtgccctcaaaatggaggcacccgagtggagttagactaggt

SEQ ID NO: 160179 - DNA, 429 bp, Arabidopsis thaliana columbia
ccaccattgaaattgggggaagaagagaagagaggctaacacacaaaaaaaaaaaaacccttctttttcgcggcttactcgtgcccttgtcggcttacttcgccggaaatctgaattatccttttgccggagactacttacccttctctttcttcatcttcgaaacggggttttaaagctcagctcttggtgacgccgtcgtgagagagagagagactgaagtcgaagaagaagaaattgaggttgagagatgtatgtagtgcctccgcctcagcgatctgattctggatccaatggtgatttaagggtttaccaaacttggaaaggcagcaatatattctttcttcagggaaggtttgtatttgggccagatgttagatcactggcgctgaccatttgtctcattgctgtccctggacaattttctgc

SEQ ID NO: 160180 - DNA, 434 bp, Arabidopsis thaliana columbia
gagaaacaacaagaagtagtaatggcttcctctatgctctcctccgccgctgtggttacatccccggctcagccaccatggtcgctccattcaccggcttgaagtcatccgctgcattcccggtcacccgcaagaccaacaaggacatcacttccatcgcaagcaacgggggaagagttagctgcatgaaggtgtggccaccaattggaaagaagaagtttgagactctatcttacctccctgaccttagtgacgtcgaattggctaaggaagttgactaccttctccgcaacaagtggattccttgtgttgaattcgagttagagcacggatttgtgtaccgtgagcacggaaacactcccggatactacgatggacggtactggacaatgtggaagcttccattgttcggatgcaccgactccgctcaagtg

SEQ ID NO: 160181 - DNA, 293 bp, Arabidopsis thaliana columbia
cggacgcgtgggcaaaaaatggcttgcaaaacgattttgcgttccgttttcgtatcggaatcacgacggacttccggctacgtagatgcttctttctccctccttctccagcatcagttccagtccatggtttgttcccggcgccaaagagtctatgtttcaatggttttgcatctgttcccgagcgggctactcggcttaattgcagccataacgatcaattcgatcaaggtccgcctcaagaagctgttcttaaggcaatcttagaagtgtcaaagactgttggtagggtt

SEQ ID NO: 160182 - DNA, 159 bp, Arabidopsis thaliana columbia
cttagaagccgtcggcacaagaagaagaagaagtataatgtctcacaggaagtttgagcacccaagacatggttctcctgtttccttccaaggaagagagctaaccgtcacagaggaaaggggaaggcgttccctaaggatgaccaaaccaagcctggc

SEQ ID NO: 160183 - DNA, 234 bp, Arabidopsis thaliana columbia
gcaatttttagggttttatcctccgaaaggctcattctttttcttatcctcaacaaggagaaatggcggcgactcacttacagcgtcaccagtgactatgtcagcaaggagcttagcctcgctggatggtctcagagcttcgagtgtcaaggtttcatatttttaaccagtgaccctttatcagagcccgttccgtttgttctttgaaataactgttttttttctttccctctc

SEQ ID NO: 160184 - DNA, 460 bp, Arabidopsis thaliana columbia
gagaaaaatatcccaaaaccaaaaacagaggaagaaagaagaagaaaagatgccttcaagcacattctccgggactgtagcacgccgaagctgtcggtggcagtggacatgggaaacccttttctcaatctcaccgttgatgccttcctcaagatcggagctgttggagtcactaaatctcttgcagaagacacttacaaggccatcgacaaagggagtctctccaagagcactttggagcatgcgcttaagaagttgtgtaaagaaggtgtttactggggagctgctggtggagtgtacattggaacagaatacggaatcgaacgtatccgtggcagcagagattggaaaaacgcaatgttagcaggcgcggcgacaggagcagtgctctcagcggttggtaagaaaggcaaagacactattgtgatcgatgccattcttggtggcgcgcttgcaaccg

SEQ ID NO: 160185 - DNA, 140 bp, Arabidopsis thaliana columbia
acaaggttgaacacttgaagaagcctgagaactggtctctggttgagaaggccaagttttattacattgctggatttttctcacggtatcaccagaatccattcagttggtacgtgaacatgctgctgtaacaacaaggt

SEQ ID NO: 160186 - DNA, 394 bp, Arabidopsis thaliana columbia
caaaaatgagcggagtttcgacggcgtcgtactttgcgcggcgagcggctcagaaggagagagttcgaatctttaccgtcgtgcccttaaggatactctcaattgggctgttcatcgccatatcttctaccgtgacgcttctgatctgcgtgagaagttcaatgtcaaccaagatgtggaggatgtcgacagattcgtcaaactgattgctcatggtgtagcagaatacatcaaatggcggcaccctgatccttatatagtatcatgggctcctggttgctcaaagttctgtataaccctactccatcatgcttgatttggtttgtttacattcttggtctagattacaacccttattttatcttagttttcttttctttaattaccccattat

SEQ ID NO: 160187 - DNA, 281 bp, Arabidopsis thaliana columbia
cacaaacgtcaataaaagcaattaagatctctctttactgttttcccacttttcctttgagaaaactcaaacaaagtaaacaaacaaaccagaaaaaggaatggcactgagaatgtgggcttcctctacagcaaatgctctcaagctctcttcttctgcctccaaatctcatctcttgccagctttctccatctccagatgcttctcctcagtgttggaaggacttaagtttgcaaattcacatgagtgggtgaaacatgaaggcttatgtgcttcaaatg

SEQ ID NO: 160188 - DNA, 112 bp, Arabidopsis thaliana columbia
ccggagctggtgaaaaaaatcgtcttttctatcttctttgaagatggcgagcaatattatcatgttcgagctatcttcgtggtcgatacactagaccctgatggcaaaaagt

SEQ ID NO: 160189 - DNA, 391 bp, Arabidopsis thaliana columbia
gccgccaccgaagcaaagagtagagagataatggctgaggaagaagctaagggtttggattacataccggcatagtactgaagaagaggaagaacagagatgagcttgcctttatcaggaagaagcaacttgagttgggtaattccggcaagaagaagaagaaagtctctgatatcaaacgtcctgaagattttgttcatgagttcagggctaaggaagtagatatgatccggatgaagcaaagagtaaagaggccaaagtcatcttctccaccagttaaatctgacctggttttcatcatacgcattcaaggcaagaatgatatgcacccatagaccaagaggattcttaacaatttgcaacttaagagcgtttttactggtgtatttgc

SEQ ID NO: 160190 - DNA, 393 bp, Arabidopsis thaliana columbia
cgtttatccaggtgaattcttgcaaagccttgagtcagctttcagatgataaagactttggtctctccttcgagtggatttggatctcagaagatgaagtttgacagatcttttgagaaagtgaagacccgagcagtatgaatttattttacaatttctcaatctgattattggtttcttcatttgcgtgacgtgtatcaaatttattgctgattatacattattttcattgttattattcacaatttctttttcaatcattataatattccttctgattcatactaactcttttttatttttttccctattatcattattttattatttcttctcataatttcgtattttttattctttatctcttctttttctcttttctttcctttattc

SEQ ID NO: 160191 - DNA, 294 bp, Arabidopsis thaliana columbia
gcaaaacccagaagaacaaactttcgaagaagacttctaatcaattcatctgattatggagagactacagagaatcttggagctggtggcggtttaggtcacgcatcgcctgattctccgactctcgatacatcggagcaggtttacatctcttctctcgctctcctcaagatgcttaagcacggaagagctggtgttcctatggaagtcatgggattgatgcttggagagtttgtggatgaatacactgttagggttgtggatgtttttgcgatgcctcatagtggtactggt

SEQ ID NO: 160192 - DNA, 289 bp, Arabidopsis thaliana columbia
gatatttcgaaatgcgcaatctcagattcagggattcaagcattggcctcctctgataagctcaaactgcagatccttcagttgcaggttgctctatggttacagacaagagcttgccagccatcgtcgggttgggttccactctattgggattaaacctccaacagtgtcgatccatttccaattccactgtcgacttcttagtcgagcgtctttacaaatgtgacatcctctcctgatcaacaattccactgtcgacctctccacttataatgtaaggtattttagt

SEQ ID NO: 160193 - DNA, 320 bp, Arabidopsis thaliana columbia
cttcaatcaaatctcttcttcaatcaaatcttcatatcccttcaaagatgccttcaatgccagaagagccgctcctataccaaccccagacagattctgtatgttcccaattcactacccacagatctgggaaatgtacaaaaaagccgaagcatcattctggaccgccgaagaagtagatctatcacaagacaaccgcgactgggaaaacagtctcaacgacggtgaacgtcacttcatcaaacacgtcctcgctttcttcgctgcatctgacggaatcggacttgtgaatctcgcttcttgcttcatgtcctatgttc

SEQ ID NO: 160194 - DNA, 400 bp, Arabidopsis thaliana columbia
cgctctctcaaaagtcgaatatcccaaattcgatccgttttccggcgataatctccgatctagatccgatggcgaacgaccagttcgtgtgctcgttactggagctgcaggacaaatcggatatgctcttgtacctatgattgcaaggggtatcatgcttggtgctgaccaacctgttatcctccacatgttggatattcctccagctgctgaagctttgaacggtgttaagatggagttgatcgatgctgctttccctcttcttaaaggtgttgttgctacaactgatgccgttgagggatgtactggagtcaatggtgcttgtatggttgggggttcctcaagaaagatggtttggaaaggaaggattttttatccattaatttattttttacaattt

SEQ ID NO: 160195 - DNA, 441 bp, Arabidopsis thaliana columbia
gcaaaagaagaagagaaacaacaagatgtagtaatggcttcctctatgctctcctccgccgctgtggttaccccccggctcaggccaccatggtcgctccattcaccggcttgaagtcatccgctgcattcccggtcacccgcaagaccaacaaggacatcacttccatcgcaagcaacgggggaagagttagctgcatgaaggtgtggccaccaattggaaagaagaagtttgagactctatcttacctccctgaccttagtgacgtcgaattggctaaggaagttgactaccttctccgcaacaagtggattccttgtgttgaattcgagttagagcacggatttgtgtaccgtgagcacggaaacactcccggatactacgatggacggtactggacaatgtggaagcttccattgttcggatgcaccgactccgctc

SEQ ID NO: 160196 - DNA, 176 bp, Arabidopsis thaliana columbia
aagagattaagtagttcagattcagtgtgtggtctcatctctttatgtcctacaacttccacagatgagctagtccgaggagatacggtgggagagagtttcagtcgttgcttgaaggattcgaggtagaataagaagctattgtagaataaagatggacacgtgggcttgtttgt

SEQ ID NO: 160197 - DNA, 334 bp, Arabidopsis thaliana columbia
gctgaagagagagcagcttctgtcaaggcatctacaaagaagaaggaatctggaaagtcctcagttttgattgatatcaaccgtgggatgatgagactgacatgaagaagcttgaggaagctgtgaagtccattcagatggaaggtttgttttggggagcatcaaagcttgtcccagttggttatggtatcaagaagttgcagattttgtgcaccattgttgacgaccttgtctctattgacaccatgatcgaagagcaactcactgttgaaccgatcaatgaatatgtccagagctgtgacattgtttcctttaacaagatatgatgatggag

SEQ ID NO: 160198 - DNA, 178 bp, Arabidopsis thaliana columbia
ttgatttattgcacatccgagaactctgtgaccaggttctttctcttgccgagtacagagctcagctttcgactacttgaagagcagaatgaacacaattgcaccaaatctaactgcccttgtcggggagctagtcggtgctcgcttaatatctcacggtggtagtttgttgaacctc

SEQ ID NO: 160199 - DNA, 225 bp, Arabidopsis thaliana columbia
cttcctcgaaacaagagcttagctatttatgacgattaactacccaaccgtgagcgaagattacaagaaggtgttgagaagtgcaggaggaagctcagaggtttgatcgctgagaagaactgtgcacccatcatggtccgactcgcatggcactctgctggaactttcgattgtcaatcaaggactggaggtccattcgtgacaattaggtttgacgctttgcaa

SEQ ID NO: 160200 - DNA, 311 bp, Arabidopsis thaliana columbia
ggctgcaatcaccatttcttcctcctttcacgccttagcctctccgcgtgttgttcgtccacatgtttccgaaatacccctgtgatcaccctctattcacgcttcacaccatccttcttcttcccatctctctcctttacactccgtgacacagctccgtctcgtcgtcgttccttctttatcgcctccgccgtcaaatctcttaccgggaccgggctgctttcaattacagaggctgtttcaattccgctcgcttccggtgtatacgccgtatacgattagaagcgctagcttcagttcgtctgtatttt

SEQ ID NO: 160201 - DNA, 434 bp, Arabidopsis thaliana columbia
cttaactatttgacttcgcctcatgtggttatattgagcgcagtgactgcttcttgtgcttttcctggtctctttgagctcaagagctaatggctaaagatcgaagtggagagatcgtaccgtatcatccacctttcaatttggatccagaagtaggcactaaatcatcatctggacgccggtggagagatggtagtttggaggttgatttaccaatgatgcagcttaaagaactgttcaatgtcaatcattttattgtgagccaagccaatccttacattgcttcattactgcgtctaaaggatttagttcgagcttttggtggttgtttcgtagataaactagcgcatctagtggagtttgatggcaaacattgatgcacccaggtttttattgcttggttattctctatggtttaatctaaaatccttttt

SEQ ID NO: 160202 - DNA, 289 bp, Arabidopsis thaliana columbia
  unsure (1)..(289): unsure at all n locations
ggaggaaggaggagaaggagaaacaagtctagagttagcagttagaatcgttgacgaggttcttcgccggaaacattctttgcaaagatcaccagacgaaaccttactcttgatgatttcaattattacctcttttctactgatcttaatcctcctatcgcctatcaggtccattaaaacatgtatgctccattgtcacattactttattttcacaggccacaattttctattttactggtaatcagctaanntgtatctgctgtgtatcttctattgcatattcattt

SEQ ID NO: 160203 - DNA, 270 bp, Arabidopsis thaliana columbia
aagagaaaacaacgatctcactcaatcatcggcgtgtaggatataagacgatggcttttactctaacaatccctagatttctgcaatttctcgcaaacccatcacttgttcttcttcgaggacacagtgtcctgctccctttacccatggacgatcgatttctctcagacgaagacttaccttattgccccttaaagcttctactgatcaatcaggtcaggtgggtggggaagaagttgtttgttagattttatccttttggttcttcat

SEQ ID NO: 160204 - DNA, 189 bp, Arabidopsis thaliana columbia
tcgcccgataaccaaacaggtctctcacgtgtaattttgtgtttttaagactttagggaataagattagaacggttcttcccaaacacaacgaagaagtcttttgttccgatatagatcgggaacttgattatagacataacaccatttagattcgttagtagattatttgcttatttttttttaatta

SEQ ID NO: 160205 - DNA, 351 bp, Arabidopsis thaliana columbia
ttggattaatgtcccaagcaacattatctcagcccttgaagaggttggtcaaaagcaacacatgtacgagttcctgtcttcttggatggtggagttcttcgtgtctctttttttttctatgttcttgtactttaatcctatatattttttattttttaccattattttttttcttatttttttatttgtattaattcttttttttaattactaatttcattttattttcatttttttttattataatttaactttttttttcattctttttattattttttatttaactttatctttttttttttttattttttctattttttattttttttattattttttttttttttt

SEQ ID NO: 160206 - DNA, 307 bp, Arabidopsis thaliana columbia
  unsure (1)..(307): unsure at all n locations
ccaaccttggttgaatgtgagacttatagattcataggacactccttggctgatcccgatgagctccgtgatgctgctgagaaagccaaatacgcggctagagacccaatcgcagcattgaagaagtatttgatngagaacatgcttgcaaaggtagctagagctaaagtcaatgtgttaaagtattgacgtgttggtaataggaagagtttgtcacttttttcacttttttttattatttttatcatttttaaattttaatatcttatttcattatttttatcttttttttaataattttttaatt

SEQ ID NO: 160207 - DNA, 223 bp, Arabidopsis thaliana columbia
cgccatcggagctgccaagaagaaactcgacgtagatgaaccatcacaaagcttcgagagcgtcgctctcatcatccgcgttactggaatcgtcggaaacagcttggcggagattctccctctttccgacacacccggtggtccatggaaagtctacggcgtcgctcgtcgatctgggactacctggaacgccgatcatgcgatcgcatacatgcagtgcgat

SEQ ID NO: 160208 - DNA, 433 bp, Arabidopsis thaliana columbia
gagaaatttctcagttacgcttcatcctcctctatagagatcttttttctatcttgggtagtagagagaaatggcgggtcggggaaaacaacttggatctggtgcagcgaagaagtctacttctcgtagtagcaaggctgggcttcaattccctgttggtcgtatcgctcgatttttgaaagccggtaagtacgccgagcgtgttggtgccggagctccggtctatctcgccgccggtcttgaataccttgccgctgaggtacttgagcttgctgggaacgcaacgggggacatcaagaagacccgtatagtttcacgacacattcagcttgctgtgaggaatgatgaggagcttagctagttgcttggagatgtgtcaattgctattggaggagtggtgcataacattcacaattttcttttttctctagga

SEQ ID NO: 160209 - DNA, 119 bp, Arabidopsis thaliana columbia
attctcctaccaatctcaacttccgacgtctattcatcattggtttgaaggaggaatttgaggagcacgctgagaaagtgaatacgctcacggagttgccatcccacgagggttgctca

SEQ ID NO: 160210 - DNA, 100 bp, Arabidopsis thaliana columbia
ctaatttcatagctcctaacaaagcaatatcattttcaatttataaaagttaaagccatggctgcatctttctctgtcccctctatgataatggaagaag

SEQ ID NO: 160211 - DNA, 190 bp, Arabidopsis thaliana columbia
  unsure (1)..(190): unsure at all n locations
caaaaacatnccacaaaccccaaacncnacaaggataattgttgaaaaaaaaacancccaataaccagaagttagagagagagaaaaaaaccagaaagaaactcaaatttctcaagttacaccaagtaagagaacgacagaaggaataagatctatctcttttcctctgagagagagcaaaaattgttga

SEQ ID NO: 160212 - DNA, 180 bp, Arabidopsis thaliana columbia
  unsure (1)..(180): unsure at all n locations
aaacaatcatcttaaaaaacggaacaaacacatgggtgaatgattcnacggaccaaacaagcgtgtgtgacatttgcacaacaaaaagttaaagctaaaggaaagcttaaaaattctttcttgtcggtcccaaaatagcttttttcttcctatatgagatctgtgtaaaattttatattt

SEQ ID NO: 160213 - DNA, 214 bp, Arabidopsis thaliana columbia
gatttctcgatctctccgtccaactatgtctgccttacatgcaaattcgccgatgagttgatcggcaacgctgtctacatcggcacacctggaaaaggtattttggctgctgatgagtccactggtaccattggaaagcgtcttgcgagcatcaacgtcgagaacgttgagaccaacagaccggaccttcgggagcttctctttaccggccctg

SEQ ID NO: 160214 - DNA, 171 bp, Arabidopsis thaliana columbia
gaaggagctggtagtgaggcaggaactttatgggatgatggtgctttcgacggtgtaaggaaagtgtctgtaggacaagcccaagatggtattggagcggtctcgtttgtgtacgacaaagcaagtcaggttgtagaaagaaaagaacatggaaaacccacattgcttgga

SEQ ID NO: 160215 - DNA, 345 bp, Arabidopsis thaliana columbia
tttcacttcatcacactctctgcaaaaaaacaaatatgatctctcaaatctgcagatctgcttccaaagcagccaaatctcttctctcttcagctaaaaatgctcgcttcttctctgaaggacgagccattggtgctgcggcagcggtttcggcgtcaggaaaaattcctttgtatgcatctaactttgcaagatcatcaggttctggtgttgcttctaagagttggatcactggactcttagctcttcctgctgcagcttatatgattcaagatcaagaggttcttgctgcttagatggaacgaacttttattgctatcaagcctgatggtgtgcaaagaggac

SEQ ID NO: 160216 - DNA, 282 bp, Arabidopsis thaliana columbia
ggagaatcttgatttgatcagatccaccaacatgtttaggcttatcttacaaactcggtgttaatcaatttgctgatttgacatggcaagagtttcaaaggaccaagcttggtgctgctcagaactgctctgccactttaaagggcagccacaaggtcacagaagcagctcttcctgaaacaaaagactggagagaagatggtatcgttagtccggtcaaagatcagggaggttgtggttcttgttttttatatatcatatctttagtttttgtgtaatttt

SEQ ID NO: 160217 - DNA, 185 bp, Arabidopsis thaliana columbia
cggacgcgtgggtctggaccaagtctgcctttgagaagcttgagtctatctatggttcgtttgagaagccatcagagaagaagaaggggtatgtgcttcctcgtgcaaagatggtgaatgctgatcttgccaggattatcaattcagatgagattcagagtgttgtgaatccgatcaagaaggat

SEQ ID NO: 160218 - DNA, 210 bp, Arabidopsis thaliana columbia
gtctgcacaaaaccctaatctcacaatctcctacgagatttatcagtctccacgaagatgaaggttgttgccgcatacttgctcgctgttttgagcggaaaagcttcaccaaccagtgccgatatcaagactatccttggaacagttggtgctgagacagaagattctcaaattgagcttttgttgaaggaagggaaaggaaaagaattg

SEQ ID NO: 160219 - DNA, 392 bp, Arabidopsis thaliana columbia
gtacgaagagatggtagagtttatggagaaagtctccgtcgccgttgatggcgatgaactcaccgtagaagagcgaaatcttctctccgtcgcttataagaatgtgattggtgctcgccgtgcctcgtggcgtatcatttcatcgatcgagcagaaggaagagagccgtggtaacgatgaccacgtcacggcgatccgtgaatataggtctaagatcgagacggaactctccggaatctgcgacggaatccttaagttgcttgactctagactcatccctgccgctgcttctggtgattccaaggtcttttaccttaagatgaagggagattatcacaggtacttggctgagtttaagactggtcaagagaggaaagacgccgtctaacatt

SEQ ID NO: 160220 - DNA, 429 bp, Arabidopsis thaliana columbia
tgaagaaggtcggatacaaccctgacaaaatcccatttgtgccaatctctggattcgagggagacaacatgattgagaggtcaaccaaccttgactggtacaagggaccaactcttcttgaggctcttgaccagatcaacgagcccaagaagccatcagacaagccccttcgtctttcaatttaaggattctacaaaaatggtggtattggaaccgtgccagtgggacgtgttgagactggtatgatcaagcctggtatggttgttacctttgctcccacagggttgaccactgaggttaagtctgttgagatgcaccacgagtctcttcttgaggcactttccggtgacaatgttggattcaatgtcaagaatgttgctgtcaaggatcttaagagaggatacgttgcctctaactccaaggatgatc

SEQ ID NO: 160221 - DNA, 399 bp, Arabidopsis thaliana columbia
ctacaacaggtgaagaacagttctcaaactttttttgaaaagcaaaaccctaaacaagaagcttcactttcaccaatatcatccacttgttcttctccttctcatgacttctctttcactatctctctccagcctctctcttcttcctcaaaacacatcagtcctactcttagaagcccatccaaaacgacatcgtcttatcaacaaaccgatcctttcgccgtcgacttatcccccgccgatgaaatcttcttccacggccaccttcttcctctccatctcctctctcacctccctgtctctccccgaacttccacaggctcgtataatgacggatttacccttcccgtcaaagatatattacccgaccagcccacaaacaacaacaacaacacttaa

SEQ ID NO: 160222 - DNA, 301 bp, Arabidopsis thaliana columbia
ctataatccgatctgagaaatttcgccggagctaggttttgttgtttaccgatcaatcctttaatcaatggcaatggctgttttccgtcgcgaagggaggcgtctcctcccttcaatcgccgctcgcccaatcgctgctatccgatctcctctctcttctgaccaggaggaaggacttcttggagttcgatctatctcaactcaagtggtgcgtaaccgcatgaagagtgttaagaacattcaaaagatcacaaaggcaatgaagatggttgctgctctcaagcttagagcagttcaaggc

SEQ ID NO: 160223 - DNA, 440 bp, Arabidopsis thaliana columbia
ctaatcttcttctccaatcaatctcagagaaaaaaagaaatggcaacaaaccctaaagtctacttcgacatgaccgtcggtggcaaatccgccggtcgtatcgtgatggagctttacgccgacacaacaccagaaaccgccgagaatttcagagcactctgtaccggagagagaggaatcggtaaacaaggtaagccattacactacaaaggatcaagctttcaccgagtgattccgaaattcatgtgtcaaggaggtgatttcacagccgggaatggtaccggaggtgaatctatctatggatcgaagttcaaagacgagaactttatcaagaaacatacaggaccaggtattttgtctatggctaacgctggtgcgaacacgaatggatctcagttttttatttgtactgagaagacttcgtggctcgatgggaaaca

SEQ ID NO: 160224 - DNA, 132 bp, Arabidopsis thaliana columbia
aaaagatgcagatcttcgtgaaaaccttgaccggtaagaccatcactctcgaggtcgagagcagcgacaccatcgacaatgtcaaggccaagatccaagacaaagaaggaatccctccggatcagcagagat

SEQ ID NO: 160225 - DNA, 364 bp, Arabidopsis thaliana columbia
agagatcctttccgtggaggcaataacatcttggttatctgtgatacttggacaccagctggtgagccaattccaacaaacaaacgtgctaaagctgctgagatcttcagtaacaagaaggtctctggcgaggttccatggttcggcattgaacaagagtacactttacttcagcaaaacgtcaaatggcctttaggttggcctgttggagcgttccctggtcctcagggtccttactactgtggagttggagctgacaagatttgggggcgtgacatttcagatgctcattacaaagcttgtttatatgctggaattaacattagtggtactaatggtgaagttattcctggacagtgggagt

SEQ ID NO: 160226 - DNA, 431 bp, Arabidopsis thaliana columbia
gatccacacactctctcttatatctctccggcgaaaactttccgatcaccgacaaaaaaaaaaaatggttgcagacgcaaacggttcatcatcaagctcatttaacttcctaatctacggtaaaaccggatggatcggtggtttactcggtaaactctgcgaagctcaaggaatcacttacacttacggctccggtcgtctttaagatcgtcaatcgatcggcgccggcatccaattcgcgagacctagccacgtgttcaacgctgctggagtcaccggtcgtcctaatgttgattggggcgaatctcacaaagttgagacgattcgtactaatgtcgccggaaccctatcttttgtttgccttacgctggagcgagcacttattgtgatcaattacgctacgggttgtatatttgagtatgattcgggtc

SEQ ID NO: 160227 - DNA, 418 bp, Arabidopsis thaliana columbia
cttaaatcaaaatacttaatagcatggtttcatttatacaaaacttctaccccgagcacacgcaatggagccgtgacagtaagtgaaatccaatccacgaaataatttgatctgtgggcagcatcattgtggtaaaggtcgtaatgccagaggaataattaccgcaaggcatagagggggaggtcataagcgtctataccgaaaatagattttcgacgaaatgcaaaagacatatatggtagaatcgtaccatagaatacgaccctaatcgaaatgcatacatttgtctatacactatggggatggtgagaagagatttttttacatcccagatgggctatatttggagataccattgtttttggtacagatgttcctataaaaatgggaaatgccctacctttgagtgcggtttgaa

SEQ ID NO: 160228 - DNA, 425 bp, Arabidopsis thaliana columbia
cggacgcgtgggtttcgtagccgcaagacttctttcagattcttacttgcagctatgggtaaagagaagtttcacattaacattgtggtcattggtcatgttgattctggaaaatcgaccacaactggtcacttgatctataagcttggtggtattgacaagcgtgtcatcgagaggttcgagaaggaggctgctgagatgaacaagaggtccttcaagtacgcatgggtgttggacaaacttaaggccgagcgtgagcgtggtattaccatcgatattgctctatggaagttcgagaccaccaagtactactgcacagtcattgatgccccaggacatcgtgatttcatcaagaacatgattactggtacctcccaggctgattgtgctgttcttatcattgacttcaccactggaggttttga

SEQ ID NO: 160229 - DNA, 427 bp, Arabidopsis thaliana columbia
gctatactaacctccattcagtcattgctatgtgatcctaatccgaattctcctgcaaattcggaagctgcacgaatgttcagtgaaagcaagcgcgagtacaacagaagagtccgcgaggttgtcgaacaaagctggactgccgactagtaattatatcattgtagcatttgtcttcaaataacattaaacctcctctcttgtatctgatttcgaccatcacatctctgagagaagtttactctccctaccactctcttttatgtctttctgtgtttttcaaactctgtgatttgttgctcttcatgttttttttctttgtattttcgtaaccacattcatcttcataattatcatatgtatttcagtcgtagattttataattttgttttatatttggtaaatcagtttacaaatttagttaata

SEQ ID NO: 160230 - DNA, 332 bp, Arabidopsis thaliana columbia
ctccctgtcaatactcttgcttgtggcgactctgtgaatgatgctgagctgtttagtattcccgatgtttatggtgttatggtaagcaatgctcaagaagagctgttgaagtggcatgctgaaaatgcaaaagacaaccctaaggtaatccatgcaaaggagaggtgtgcaggtgggattatacaagccattggtcacttcaagcttggtccgaacctttctccaagagatgtctctgatttcttagagatcaaggtggagaatgtgaaccctgttcacgaggttgtgaagttatctttgttctacgagagatggatactgtgcgagtttat

SEQ ID NO: 160231 - DNA, 443 bp, Arabidopsis thaliana columbia
attcaaacgcagcgtattgtctttgcaaagaggggaacgagcaagtgcttcagaaggcaatagactacgcttgtggaaatggagctgactgtacccagatccaacccaccggagcttgttaccaacctaacaccgtcaaaaaccactgtgacgtcgccgtcaacagttactaccagaaaaaagcttcttccggtgccacctgtgactttaacggcgccgcctccccctctactacccctccgtcaactgcttcaaactgtttaactggttcaagctctagtggcactcctaccacaggaacaccaactactgggacaccaaccagtgggaccccgactaccggaactccgaccaccggaacccccaccactggaactccaaccagtgggactccaactagtggcttcccaaataccgggactccaaacacagggactaacact

SEQ ID NO: 160232 - DNA, 443 bp, Arabidopsis thaliana columbia
ggagagagtgacagcgtcagcgtcttgttcatcgactcaccttatccacaatcttctccgacatcccaaaccaccgtctccggtctgtctcttcctcagacccttttgcttctccgcttcagtctctcaatccaatcaccgtaacaagcctcgatttcaatcattctcctcaaagccgcttccttgtcattctgcttcactcgtagtgaaatccttctcttccatcgatgaaccagatctcgaagaagacgaagagagcgaggatgaagatttcagcgcagaagaatacgaatacgaagacgaagaagaagaagatgagcaggacagtggagtggtggtttccgagagaggaattgaagattcggaagcatctgaggaggtttcggaaataggagataaagaggagaaaacagagaatacgaagaagaagaagagtcgaggct

SEQ ID NO: 160233 - DNA, 330 bp, Arabidopsis thaliana columbia
cagagttaaattgagtttgtgtctcgtaacttattctgtgagcgaaaatggtgaaagcaactaaggcagagaagaagatcgcctacgataccaagctatgtcagcttatcgatgagtacacccagatcttggtcgttgcggccgataacgtcggatcaactcagcttcagaacatcagaaagggtcttcgtggagactccgtcgtgcttatggggaagaacactatgatgaagcgttccgttaggattcactctgagaacaccggaaacactgcaattctgaatctgcttccttctccttagggaaacgttggtttgatctttactcaaa

SEQ ID NO: 160234 - DNA, 100 bp, Arabidopsis thaliana columbia
gcttcgtcttgtctcttcaatgcctctgtatcgttcttaaaccctaaacaagaccccattcgccgccaccggtcaacctttttttcttcgccaccggccc

SEQ ID NO: 160235 - DNA, 437 bp, Arabidopsis thaliana columbia
gtttcgtgctggtcttgctttacaacctatagcaacggctctatttgcgaattccccttttacagaaggaaagccaaacggatttctcagcatgagaagccacatatggacagacactgacaaggaccgcacaggaatgctaccatttgttttcgatgactcttttgggtttgagcagtatgttgactacgcactcgatgtccctatgtactttgcctacagaaagaacaaatacatcgactgtactggaatgacatttcggcaattcttggctggaaaacttccctgtctccctggtgaactgccttcatataatgattgggaaaaccatctgacaacaatattcccagaggttcggttgaagagatacttggagatgagaggtgctgatggaggtccctggaggaggctgtgtgccctgccagctttctgggtgg

SEQ ID NO: 160236 - DNA, 403 bp, Arabidopsis thaliana columbia
gacgaagacctgcgagatgttaccgtcagattaagggaaagccatacccgaaatcacgatactgtcgtggtgtgccagatcccaaaatcaggatctacgatgttggtatgaagaggaaaggtgttgatgagttttcattctgtgttcatttggtttcatgggagaaagagaatgtgtcaagtgaagcacttgaagcagcatcgtattgcttgtaacaagtttatggtgaaatctgttgggaaagatgcttattatttgaggattagggtttatcctattcatgttcttaggtttatcaagatgcttttgtgtgctgtagctgtttggcttaatactgtaattataggagctttttatagatttttgtttttttgttttagtttcaattgttctggattttttg

SEQ ID NO: 160237 - DNA, 205 bp, Arabidopsis thaliana columbia
cccttctcccaatctcatcttcttctaattcctttcttctctcaaatttctgtgaaaacatgtctgacgacgagcaccactttgaggccagcgaattcggagcttccaagacctatccttaatcagccggtaacatccgtaaagggggtcacatcggcatcaaaaaccggccctggaaggttggtgggggttcgactttcaaaac

SEQ ID NO: 160238 - DNA, 442 bp, Arabidopsis thaliana columbia
cataaacctctctctatctggtggagcgacaccaaaaacaacaaagccttctcattttcacactttgggtaatcggagaatcacaaaaaaatgggaaccctaggacgagcaatttacactgtgggtaactggattcgtggaactggtcaagctcttgatcgcgttggttctcttcttcaaggaagtcaccgtatcgaggaacatctgtcgaggcatcggacgttgatgaatgtgtttgataaatcaccattggtggataaagatgtgtttgtggctccgagtgcttctgttattggtgatgttcaaatcggaaaaggctcgtcgatttggtatggctgtgttcttagaggtgatgcgtataacatcggtgttggatttgctacgaatatacaagcttatacgcttgtacatgttgcaaagaccaacataagttttatggttt

SEQ ID NO: 160239 - DNA, 432 bp, Arabidopsis thaliana columbia
cttgatgttgaagctatggaaattgcaggttctcatggtcacaatctcaaggatttgtcacttttgactacacttggaatagcgtttcagacgttaggtgttgtgtatggtgatatgggaacaagtcctttgtatgtgttcagtgatgtgtttagtaaagttcctataagatcagaagttgatgttcttggagctttgtctctcgttatctacactattgctgtgattcctttggcaaagtatgtatttgtagtccttaaagctaacgacaatggcgaaggagggacatttgcgttgtattcacttatttgtaggtatgcaaaggtgaataagctgtcaaatcaacaacctgcggttgagcatatctcgagttttaggcttaaactcccaacttctgtgctggaaagagcttttttaattatataagctttt

SEQ ID NO: 160240 - DNA, 219 bp, Arabidopsis thaliana columbia
acgactcctgggtctggaactctgtctggtcacttgttcgaactcgaacctgatagctcactcatggggtgagcggcttaaggagctatgggagatagtcagtactcgatttctctcaccacttttagcccattttgtaagctggtgcagatagaacatgcccttacagctgttggatctggccaaacatctttagggattattgtaatttatttttaa

SEQ ID NO: 160241 - DNA, 436 bp, Arabidopsis thaliana columbia
aaaaaatggcaatgaatggtttgtccaagatggctgtagccgccgcaactgctcttctcctagttctgaccattgtcccgggcgcagtagctgtgacttacactattgaatggaccactggtgtggactactcaggttgggctaccggaaagactttcagggttggtgacattctagagttcaagtatggttcttcccacacggtggatgtggttgacaaagccggatatgatggctgcgacgcctcctcctcgactgagaaccattccgatggagacaccaaaatcgatcttaagactgtaggaataaactatttcatctgttctacacctggtcactgcagaaccaatggcggcatgaagctagccgttaatgttttagccggttctgccgtaccttctgccacttccacgccacctttttcaatctccggaac

SEQ ID NO: 160242 - DNA, 431 bp, Arabidopsis thaliana columbia
atttatttcacctctctctctctctctctgcaactaatcacttgttcgatctcgaagctgaagctaaagctttcgctaatttgcttaaggagctatgggagatagtcagtactcgttttctctcaccactttcagcccatctggtaagctggtgcagatagaacatgcccttacagctgttggatctggccaaacatctttagggattaaagcttctaatggagttgtcattgcaactgaaaagaagttgccttctattctggttgatgaagcatctgttcaaaaaattcagcatttgactcctaatattggagttgtttacagtggcatgggtcctgattttcgagttcttgttaggaagagtaggaaacaggctgagcaatatcttcgtctgtacaaagaacccatccctgttacccaacttgtaaggg

SEQ ID NO: 160243 - DNA, 371 bp, Arabidopsis thaliana columbia
aatcacaagaacgatctcgaagcggaagcgaaagctaacataaagggggaaggagcaatgggagatagtcagtactcgatttctctaaccacaatcagcccatctggtaagctggtgcagatagaacatgcccttacagctgttggatctggccaaacatctttagggattaaagcttctaatggagttgtcattgcaactgaaaagaagttgccttctattctggttgatgaagcatcatgtcaaaaaattcagcatttgactcctaatattggagttgtttacagtggcatgggtcctgattttcgagttcttgttaggaagagtaggaaacaggctgagcaataacttcgtctggacaaagacccatc

SEQ ID NO: 160244 - DNA, 442 bp, Arabidopsis thaliana columbia
gaacacatcgagagagcttcttccaaaaacctcaaacgctcctcacacaacgggtttaggagtgatggggtctctcgttcgtgaatgggttgggtttcagcaatttccagcagctacccaggaaaagctgattgaattcttcggaaaattgaagcaaaaggatatgaactcaatgacagttcttgttctgggtaaaagcggtgtcggaaaatcattcactgtcaattctcttatcggcgaacaagtcgtccgtgtcagacctttccaagctgaaggattgagaccagtgatggtttcaagaacaatgggagggttcactatcaacattattgacacccctggacttgtggaagctggatatttcaatcaccaagctctcgagtttattcaaagggtttcttgtgaacagaacaatagatgtcttgctctatgttgatcgttt

SEQ ID NO: 160245 - DNA, 395 bp, Arabidopsis thaliana columbia
agaccaataacaagagactataaaatttattgcattgagtcttacaagcaggctttagaatttagtgtaacctgaaactgtacgagccaaacttctaaataacatcccacgagattccgaaaacatttagagaaaaagtgaacacataccatttcgcagcgagattccgtgtgtacgagatagagatagagaaaaacctgagatgttaatctcattgtcctaagcttaatgctcttaaccctcaccagcctctcactgattctaaaaactctcaaaataaagagttattcccaattcaattaccccaacatacacaaatacatgaaaacgccttctctaccaaacgctagctcctttatttttacgatactggcgccatgtctttacctttggtt

SEQ ID NO: 160246 - DNA, 280 bp, Arabidopsis thaliana columbia
  unsure (1)..(280): unsure at all n locations
cacaaaccctaaatancgncaactccacagtttcttgattcgatcaaggaaatggcgtacgcttctcgttttctctccagatctaagcagctacaggggggtctggtcattttgcagcatcaacatgctattccagtccgagcttttgctaaggaagctgctcgtccaacctttaaaggagatgagatgttgaagggtgttctttttgatatcaagaacaaattctaggctgatgttgatatactccgaaaggaaaagatcatccttgatccataggacc

SEQ ID NO: 160247 - DNA, 348 bp, Arabidopsis thaliana columbia
ttccacttttcaatttttctccactccaaaaccataaagaaagaaaaaaacatcaatcatgacaacaacaacaacgaagaagccgcacgttctggtgataccgtttccacaatccggtcacatggttccacatcttgacctcacgcatcagattcttctccgtggagccaccgtcactgtcctcgtcacacccaaaaactcttcctatctcgatgctctccgttctcttcactccccggaacacttcaaaaccctaatccttccttttccttctcacccttgtataccttccggtgtcgaatctctccagcaacttcctctcgaagctatagttcacatgtttgatgc

SEQ ID NO: 160248 - DNA, 443 bp, Arabidopsis thaliana columbia
gctggtgctaacttttacattgtgggtcgtgatcctgctgggatgggtcatccagtagagaaacgtgatctttacgatgctgatcatggaaagaaagtactaagcatggcaccaggactcgaacgactcaacatccttcctttcagggttgctgcatatgacaagacgcaaggcaagatggctttcttcgatccctcgaggcctcaagatttcttgttcatctccggcactaagatgcgcacattggcaaagaacaacgaaaacccgccagacggttttatgtgcccaggtggatggaaagttctggtggattactatgagagcttgactccggcgggtaatggtagactaccagaagtggttccggtgtaagacaaaactgttcgtttcaaattgtaacgtttgtgttgtgaagccttgtagcaacaatcattgttgtattg

SEQ ID NO: 160249 - DNA, 278 bp, Arabidopsis thaliana columbia
ggaagaggaggaacctctggtaacaagttcaggatgtcactgggtcttccagtggcagccactgtgaactgtgctgacaacaccggagctaagaacctttacatcatttcggttaaaggaatcaagggtcgtcttaaccgtttgccatcagcgtgtgttggtgatatggttatggctactgttaagaaaggtaagcctgatctccgtaagaaggtgcttcctgctgtcattgttaggcagaggaagccttggcgccgaaaggacggtgtttttatgta

SEQ ID NO: 160250 - DNA, 237 bp, Arabidopsis thaliana columbia
gaaagcttttgacaatgggccacagacacagcatgtccaaatcctccgatccgccaccgtcctcctcctcctcttcctccggcaacgtagtccaccatgttaaacctgccggagaacgccgcggatcatccggttccggaaccgtcggatcgtcaggctccggaacaggcggatctcgttccaccacatctactcagcagaatggtcggatcttaggtcggccgatggaggaagttc

SEQ ID NO: 160251 - DNA, 396 bp, Arabidopsis thaliana columbia
cgacccacacccacccgtttgcttctcttcgattcttcctccgtcagtatttgatatatcaaaatggcttcacacattgttggatacccacgtatgggccctaagagagagctcaagtttgcatttcaatttctttaggactgctactaccctgggagaagtcttcataacttctatgaaatctgcatctattgaaagacaattgccttgtaccttgtaagatttctataaaggtgacttccagaagatgaagatctctcgtgatggtctcgactactttcggagaggctcaacaccggtttgaggagatctttgacgatagaaattaaacccggttggaaaaaaggaacaaagataaccttcctggaaaaggtaatgagcatcgtggagtcatac

SEQ ID NO: 160252 - DNA, 279 bp, Arabidopsis thaliana columbia
gtacagcccaaacccggttcgtggaaatactatcagcagtgtttgaaatcaagacgctcgataaacatttgggattcttataactgaatttaatctcgtattgttattattgtttgtatgtatagtatttcaacaacaatttcaaaaattagttgattcatcataaggatataaaatttataaatccttatgtcgatcaatttcttttttattcaaagaaagattgtttgcttgttttatgtattaagagaaatataataaaatgatatatttcttaag

SEQ ID NO: 160253 - DNA, 443 bp, Arabidopsis thaliana columbia
gccttattcgtcttcttcgttctctagttttttcctcagtctctgttcttagatcccttgtagattccaaatcttccgataaaaatgtcgggtaaaggagaaggaccagctatcggtatcgatcttggtaccacttactcttgcgtcggagtatggcaacacgaccgtgttgagatcattgctaatgatcaaggaaacagaaccacgccatcttacgttgctttcaccgactccgagaggttgatcggtgacgcagctaagaatcaggtcgccatgaaccccgttaacaccgttttcgacgctaagaggttgatcggtcgtcgtttctctgacagctctgttcagagtgacatgaaattgtggccattcaagattcaagccggacctgccgataagccaatgatctacgtcgaatacaagggtgaagagaaagagttcgcagc

SEQ ID NO: 160254 - DNA, 247 bp, Arabidopsis thaliana columbia
cactgggactacgataaatcatggagctgtcttatctcacttgtgccagaacagacttggggatgcccctgattggagaggatccagatgaacttaagaggtgcttttaccgatattgcatcacattaacctgagccaagcaaatgcttacgacgaatggaaatgttatcgaaaacaagtggagaaaagctatggggaggaagcttatcttgcagaaacgcaaggctaaccttaacgactttgatag

SEQ ID NO: 160255 - DNA, 430 bp, Arabidopsis thaliana columbia
catcaaaaaagagcgtcttcataaacgcccttcgtcttcttccctggaaatctagtttctttcttccacgaaaatgagagagtgcatttcgatccacattggtcaggctggtatccaggtcggaaatgcttgctgggagctgtactgtcttgaacatggcattcagcctgatggccagatgccgagtgacaagactgttggtggaggtgacgatgctttcaacaccttcttcagtgaaaccggtgcaggtaagcacgtcccacgtgctgtctttgttgatcttgagccaactgtgatcgacgaggtcaggactggtacttaccgtcagcttttccaccctgaacaactcatcagcggtaaagaagatgcagctaacaatttcgcccgtggtcattacaccattgggaaagagattgttgacctgtgctta

SEQ ID NO: 160256 - DNA, 443 bp, Arabidopsis thaliana columbia
gatgatatcttctccgagttctttggtttcacgaggccttcttttggtacgggaagcgactcacgcgcaggaccttctggctttaggtatggcgatgatatcttcgcttccttcagggctgctactaccggaggagaagcctccattccttctaggaaatctgctcctattgagagacaattgccttgtagcttggaggatttgtataaaggtgtctccaagaagatgaagatctctcgtgatgttcttgactcttccgggaggccaacaccggttgaggagatcttgacgatagaaattaaacccggttggaaaaaaggaacaaagataaccttcctggaaaaaggtaatgagcatcgtggagtcataccatccgatctcgttttcatcgtagacgagaaaccgcatcccgttttcaaacgagacgggaatgatcttgtggt

SEQ ID NO: 160257 - DNA, 412 bp, Arabidopsis thaliana columbia
attggttttatctctgctgatgttggtcttgacgctgacaaatgcaatgttttggttaacattgagcaacagagccctgacattgctcagggtgttcatggtcatttgaccaagaagcctgaagatattggtgctggtgatcagggacatatgtttgggtatgctactgatgagactcctgagctcatgccgttgactcatgtcctagccaccaagcttggtgctaagcttactgaagtgaggaagaacaagacttgcccatggttgaggcctgatggtaagacacatgtcacagtggagtacaagaacgatggtggagctatgattccgattagagtccacactgttcttatttcaactcaacatgacgaaactgtcaccaatgatgagattgctgctgacctgaaggagc

SEQ ID NO: 160258 - DNA, 416 bp, Arabidopsis thaliana columbia
ggctgagatacacaatttttttcctgagattgctatggaatttggaaatggtcagaaactgattctttctcccgagaactacttattcaggcacactaaagttagaggcgcatactgccttggaatctttcctgatagggattcaacaacactcctaggaggaattgttgttcgcaatactcttgtcacctatgatcgtgagaatgataagctcgggtttctgaagaccaactgttctgatatatggaggaggctggcggcaccagaatcttctgcacctacttcaccaatatcccaaaataaaagttctaacatttctccaagccctgctacaagcgagtctcctacctctcatcttccaggtgttttccgggttggagttattaccttcgaagtatcaattaatgtgaacaatt

SEQ ID NO: 160259 - DNA, 436 bp, Arabidopsis thaliana columbia
gatttgattccatttttattactgttactatcattcaaacccttggtatttgtagccatgagtcttgtttcagatctcatcaaccttaacctctcagactccactgacaaaatcattgctgaatacatatgggttggtggttctggaatggacatgagaagcaaagccaggactctacctggaccagtgactgacccttcgcagctaccaaagtggaactatgatggttcaagcacaggccaagctcctggtgaagacagtgaagtcatcttataccctcaagccatattcaaggatcctttccgtagaggaaacaacattcttgtcatgtgcgatgcgtacactcccgcgggtgaaccaatcccgactaacaaaagacacgctgcggctaaggtctttagcaaccctgatgttgcagctgaagtgccatggtatg

SEQ ID NO: 160260 - DNA, 370 bp, Arabidopsis thaliana columbia
ctcggagcttagaccttccaatctaccgtgcgttattaatgggtttcaagaggtacgttgagatcggttgagtagcacttgtgaactacggataagatcatggaaagctcgtcgttatcgtcgacgttgttgaccagaacagagctttggtggatgcccctgatatggagaggatccagatgaacttcaagaggttgtctcttaccgatattgtcattgacatcaaccgagtgccaaagaagaaggctttgatcgaggcaatggaaaaggctgatgtgaagaacaagttggagaaaagctcatggtgtaggtagcttatttttcataaacgtacggctaaccttaacgtcttttgttggttcaagatcat

SEQ ID NO: 160261 - DNA, 206 bp, Arabidopsis thaliana columbia
ggcctaggcgtacgccgacaatgagcttagctatggcggttgttctttttaggtctctgctcaacaaaaacaccatatgctcttaactcttgactcccactttcctaccggacaaaatctggttacttgtccgcaagagacttcccaataccagattcgggggtgcataaaccatggaagctggaatcggggtaatggggtcaaaa

SEQ ID NO: 160262 - DNA, 274 bp, Arabidopsis thaliana columbia
ggagtttgcagatgcttgcctcaggggtctacgaggtgatgcaaacatcgttgagtgcgcatatgtggcatcccatgtgactgagcttcccttcttcgcatcgaaggtgcgtctgggacgatgtgggatcgatgaagtgtacggccttggaccattgaacgaatataagaggctggcattagcgaacgcaattctcgtgcggcttactttgctccgttgactactacaactccgttgactcctgccaagcagctaacggcattaacacacttaa

SEQ ID NO: 160263 - DNA, 445 bp, Arabidopsis thaliana columbia
  unsure (1)..(445): unsure at all n locations
ngcgcatcaccagatattggtctctttatacaaatctgcttagcggatacaggagtggcgtatactcagattggctacacattatcggttgcagctgcctttggaggaggcttgcctccgggtataaccggcacaaatgataggtgtacagtccttgtctctaacctgaatgcagatagtattgatgaagataagctattcaatctattttctctttacgggaacattgtaaggattaagcttcttcggaacaaacctgaccatgcccttgtccaaatgggcgatggtttccaagctgaacttgcagtacatttcctcaagggagcaatgctgtttggtaagcggttagaagtaaacttctcaaagcatccaaatataacaccaggcacagactctcatgattatgtaaactctaacctgaaccgcttcaaccgcaatgctgcaa

SEQ ID NO: 160264 - DNA, 303 bp, Arabidopsis thaliana columbia
gctgaggaggataaaaaccctagggtgagtgagacagatagaagcgaaaatggtgcagcgccttgtttaccgatcacgacacagttacgccaccaaatccaaccagcacaggatcgtcaaaactccaggaggtaaattgacgtaccagaccactaagaagagagctagtggacctaaatgtcccgttaccggcaagcgtattcagggtattcctcacttgaggccaactgagtacaagaggtcacgtttatcaagaaacaagaggacccggaaccgtgcttatggtggggttttgtctggttc

SEQ ID NO: 160265 - DNA, 443 bp, Arabidopsis thaliana columbia
acaagctgtacttgtcgggttgttcttcggaggactaaacgcagctttcacattatctgttattacggttgttagttatggagcatacttaacaatatatggttccatgaccgttggagcactcacttccttcattctttatagcctcacagttggttcatcggtatcttctttatcgagtttgtacacaactgcaatgaaagctgcaggcgctagtagacgagtttttcagatcttggaccgtgtttctagcatgtcaagttcaggggataagtgtccagtcggtaatcctgatggagatgtggaattaaatgatgtctggtttgcttatccttctcgtcctagtcacatgatactcaagggaatatcgttgaggttgacaccaggctcaaaagttgcactagtaggaccaagcggtggaggaaaaacgaccatagctaatt

SEQ ID NO: 160266 - DNA, 437 bp, Arabidopsis thaliana columbia
atccagacgaacatctagtttctgtagaaggttggtatagccctgaaggtatcattcaaggaattaagttcatctccaacaagaagacttctgatgtcattggatccgatgagggtactcacttcactctacaagttaaagacaagaagatcattggctttcatgggtctgccgggggcaatcttaattctcttggggcttactttgctccgttgactactacaactccgttgactcctgccaagcagctaacggcatttggtagtgatgacggaactgtatgggatgatggtgcttacgttggggttaagaaggtgtacgttggacaagcccaagatggaatctcagctgttaagtttgtgtacgacaaaagccctgaggaggtcacaggagaagaacatggaaagagtactctactcggattcgaagagttcgta

SEQ ID NO: 160267 - DNA, 406 bp, Arabidopsis thaliana columbia
ttaacggcccttcatcaatggtcagcagacttagctttcgaatataggctgcgaacgagcatgtatgatggtcttcttcctcagttcacgggcccacctgattctttctgtattcacttccgaacctctttctgtgcccctaaacacaacaagggttcagtcttcttccaaccgcaatgtgcagtatccacttcaccggcgttattaacttctatgcttgatgtcgcaaagcttagactaccctctttcgatactgattcggattcccttatatcagacaggcagtggacttatacaaggcccgatggtccttccactgaggcgaagtatttagaagctttagcctctgagacacttctcacaagcgatgaagcagtagttgtagcagcagcagctgaagcagtcg

SEQ ID NO: 160268 - DNA, 272 bp, Arabidopsis thaliana columbia
  unsure (1)..(272): unsure at all n locations
cgcgcaaaaccagncaaaacacacgcgcatttttttttatgaacggcctcacatcaatggggaggagacttagctatggaggggaggctaaaaacgagcatgtattatagaattctacctcagttcaagagcccaccagattctatatctattcacttccgaaccacttactgtgccactaaacataacaagggttcagtattattgcaacagtaacgtgctataaccatttaaacaacaatataaaaactcaaagcattgatgacaataat

SEQ ID NO: 160269 - DNA, 421 bp, Arabidopsis thaliana columbia
aagaaactacaatagttaatcaatcaaagttttttagagaaatggcagattctaactgtggatgtggctcctcctgcaaatgtggtgactcttgcagttgcgagaagaactacaacaaggagtgcgacaactgtagctgtggatcaaactgcagctgtgggtcaaactgtaactgttgatgaaattattatggtctaaaatcatatatatggcagaaaaattggggaaaatatgtgttttatgctaagagatgtgtgtgtgttgttggaataaagacgtgaccgttgtgttgcgtatcaactctcttaagctttgacttttcccagctttgtattttcctatgtatggtaatggtgtgattgtgtaatgttttcatatgtaacgtaaaaaaaatatttatgtgacattgacttttgtgact

SEQ ID NO: 160270 - DNA, 336 bp, Arabidopsis thaliana columbia
gtttcgctatctcttaaacacaaacatctctgtctcgaataatctctcttcaagtacctcttttttctgattctgtatatcgccatgaattactgatttccctctctatcgcccatcaaagtaaaccaatttctcctgtgacttgtacctaactcgatcttaccagactggtgatggcgtctttgaaccctttcgatcttctaggagatgatgctgaggatccaagccagctcgctgtggctttgtctcataaagtcgagaaagctgctgctgctgttcagcctcctaaggccgctaatgtgtccaaccaagccggctccttcttttcaagcattg

SEQ ID NO: 160271 - DNA, 320 bp, Arabidopsis thaliana columbia
tcgaacccactaattgacataacagctactcttggttcgccagtcatctcatttggtgctgaagctggatatgacacaacctccaaaactttcaccaagtacaatgccgggacagtgtgacaaaaccagatgcttgcctctccataatattgggagacaaaggagactcactcaaagcatcataccttcatcactttgatgaatttaagagaaccgcagcagttggtgaggtttacaggaagttctcgacaaatgaaaacacgtttacggtgggtggaatgtattcaattgtttaccctactaccttgaaaggtaagatt

SEQ ID NO: 160272 - DNA, 428 bp, Arabidopsis thaliana columbia
  unsure (1)..(428): unsure at all n locations
agcagcctaactctgctatccgtaagtgtgctatagttcagcttatcaagaatggaaagaagattgctgcctttgtccccaatgatggttgtttgaactacatcgaggaaaacgatgaggcttgattgctggatttggtcgtaagggtcacgctgtgggagatattcccggagttaggttcaaggtcgtgaaggtttctggtgtttcactcttggccctcttcaaggaaaagaaggagaagccaagatcttaagcaacccgtacaaaaagcttcaagcttttgatatggtttttgatagttcagtttaagtcttgttctgttctactttatgtttcaagaacttgattttgtgttacattntatgagtttttgaattaagacatgatcgtttaatgttattggtgtttaatcaattactcttttactt

SEQ ID NO: 160273 - DNA, 381 bp, Arabidopsis thaliana columbia
caaaaacacatctgtctctctctctctctttgcggatctgaaatggcgattcctgttatcgatttctccaaactcaatggtgaagaaagagagaagacactgtctgaaatcgctagagttgcgaagagtggggattttttcagctggtgaaccatggtattccattggagcttctaaataaggtgaagaagctgagctcagattgctacaaaacagagagagaagaagcattcaagacttctaatcccgtgaagttgctcaacgaattggttcaaaagaactctggcgagaagctagaaaacgtggactgggaagatgtcttcactctcttggaccataaccaaaacgaatggccatccaacattaaagagactatgggag

SEQ ID NO: 160274 - DNA, 350 bp, Arabidopsis thaliana columbia
aaaagacgccgctcgtctcttcagagaatttcaccttctagggtttgttcaagagaagtcttgggaaaatgagtcgtggaggtgcagctgttgccaagggaaagaagaagggagtttcttcaccattgattgttcaaagcctgtcgatgacaagatcatggagattgcttcccttgagaagtttcttcaggagaggatcaaggtcggtggcaaagctggtgcacttggtgattctgtcacaatcacacgtgagaagagcaagatcactgtcactgcagatggccaattctccaagaggtatttgaagtacttgacaaagaagtacctgatgaagcacaatgtaagggatt

SEQ ID NO: 160275 - DNA, 363 bp, Arabidopsis thaliana columbia
ttatttgatagcccggcgattaaaaagattcctatcatcatcactcgccggctaatggccacaacgatgacacgtgtctccgtcggcgtcgtcctctttgttctcttagtctcgctcgtgccgtctccgccgcgagaagcggtcctgatgatgttatcaaactcccttcgcaggcttctcgcttcttccgtcctgctgaaaacgacgacgattctaactccggtactaggtgggctgttctagtcgccggatctagcggatattggaattacaggcatcaggctgatatatgccatgcctatcaacttctgaggaaaggtggattgaaagaggagaatatttgggtattcatgtatgatgata

SEQ ID NO: 160276 - DNA, 383 bp, Arabidopsis thaliana columbia
agaatggaaagaagattggtttctttgtccccaatgatggttgtttgaactacatcgaggaaaacgatgaggcttgattgctggatttggtcgtaagggtcacgctgtgggagatattcccggagataggttcaagggcgtgaaggtttctggtgtttcactcttggccctcttcaaggaaaagaaggagaagccaagatcttaagcaacccgtacaaaaagcttcaagcttttgatatgggttttgaaaggtcacactatagaattggtccgtgctaccttatggttcaagaacctgattttgtgttacattttatgagtttttgaatttagacatcgacgcttaatggtattggggtttaatcaaattactcttttaactt

SEQ ID NO: 160277 - DNA, 398 bp, Arabidopsis thaliana columbia
ctcatttactgttctgtttcacttgctctctctttttatactctctaaaagatggcaaaaaactgtaatttagtcagtgttctatgtgtatttttggtattgaccctctttaacaaaccgtcaccgtcgccgggcagaatattccggcggtgggcttgttcacctttggtgactccaactttgacgccggaaacaaacagactctcaccaaaaccttactccctcaaactttctggccgtatggaaaatcccgagatgatcccaacggcaaattctccgacggccttatcgctccagacttcctcgctaaattcatgaggattccgatcgtgatcccgccggccctttaaccgaacgttaatgtctcacgtggagctaggttcggcgtcgcttatgcc

SEQ ID NO: 160278 - DNA, 264 bp, Arabidopsis thaliana columbia
gctatcgtttctctttgcacttagaaatcgagggtattatttttcccagctctaatctaatgactgaacaatgacgttttatatctcgagctcgttaactccaacccattttcgaaacccttaaacccttctaataccctcttccccagtcaatatcgaggttctctgtctagtttcgtccgccgaagaaaaccaacggaagcttaatttatctttcaattttaattttttacttttacatactattttttttgcatattttta

SEQ ID NO: 160279 - DNA, 187 bp, Arabidopsis thaliana columbia
gagagaaattaacatggcgtcttttgcaaccatctccgccgtacaaccttctgccgccgtgaaaggacttggaggtagctctcttgccggagctaagctcttcatcaaccttctcgccaaagcttcaaaaccaaatccaccagagctggtgctgtggtggctaagtatggagacaaaagtgtttact

SEQ ID NO: 160280 - DNA, 225 bp, Arabidopsis thaliana columbia
gtgcgattgaacatcaaggaggagactaggaagttctattgtgtaatctcgatgtcgactctatcagctgccagggcagataacttttactatcctccagaatggactccggatcaacttccttgaacaagtttcaaggacagcatcctctcagagagagggcaaagaaaattggcgagggaattttggtcataaggttcgagatgccctataatatatggtgtg

SEQ ID NO: 160281 - DNA, 383 bp, Arabidopsis thaliana columbia
cttgtttctctcccaaagtttcttcatcatcctttctataaagaaaacaacaatcggctgtttcgtttcgatccaaagatgagtgaagaaactaaagataaccagaggctgcagcgaccgctcctcgtcttaacgagaggattctctcatccttgtcaagaagatccgtagctgctcatccatggcatgatcttgagattggacctggagctccacagattttcaatgtggttgttgagatcactaaaggaagcaaggtcaaatacgagcttgacaaaaagacaggactcatcaaggttgatcgtattctctactcatcagttgtgtaccctcacaactatggttttgttcctcgcacattgtgtgaagacaatgaccccatt

SEQ ID NO: 160282 - DNA, 136 bp, Arabidopsis thaliana columbia
cactttctctctctctgtatactcttctaatgatttcaaaaaacggtaatttagtcggtgttctatgggtatctttggcattgaccctatctaacaaacacatcaccggcgcttgcagaatattgcggcggggggc

SEQ ID NO: 160283 - DNA, 238 bp, Arabidopsis thaliana columbia
ctgacttcgcaaagaagaacactttcttcctgaaatctcaaattcatctcttctcttccgatttcgctgaatcatgtcagacgacgagcatcacttcgaatccagcgacgcccgagcttctaagacttatcctcaacaagccggtaacattcgtaaaggtggtcacatcgtcatcaagggacgtccctgcaagggggttggggtctccactttgaagacatggaagcatggtcacccc

SEQ ID NO: 160284 - DNA, 422 bp, Arabidopsis thaliana columbia
cagcctttttccttcgttgatcgattgttaagctcgatccaatggcggataacaccgataatcggagatccttatggggagttccggagaagcttcagcttcacatagcttgctgacgttgcaattcggttacgccggattccacgtggtgtctcgagctgctcttaacatgggaatcagcaaactcgtcttccctgtttatcgtatcatcatcgccttgctttttctcctttcctttgcttacttccttgaaaagaaggagagaccagcgattactctcaacttttttattcatgttctttttttggcactcataggaattacagcgaacccaggtattttcttgttgggactggacaaacacttcaccaacattttgttttcttcattgcaaaactatgtgtcacgtcattaactttttt

SEQ ID NO: 160285 - DNA, 151 bp, Arabidopsis thaliana columbia
cgtcttccttcttccacacccttttttacaccttttttcccctcccaccttctccgtcccgttccgtttctccatcagatcctcgattccgatccaacagttcgaattcctttccgattctgatctgatcgaaccaatactcactgagatt

SEQ ID NO: 160286 - DNA, 357 bp, Arabidopsis thaliana columbia
gtgagtctctcaaagaaaccaaaggcagagaaattagataacacacacaaaaaaaaatggcatcaacctcactcctcaaggcttctccggtgttggacaaatccgaatggccaagggacaaagcgttctcttccgtcagccttcttccgcttctgtcgtcctccgcaaccgtgccaccttcctcaccgtccgtgccgcttcctcctacgccgatgagcttgttaagacagcgaaaactattgcgtctcccggacgtggaatcttggcgatggacgagtcaaacgcgacttgcgggaaaccgttggattcgatagggctagagaacactgaggcaaatcgtttagctttttcggacat

SEQ ID NO: 160287 - DNA, 257 bp, Arabidopsis thaliana columbia
gttgaatactatttcagtgacttgaacttggcttctacagatcatctcatgagattcatttgcaaggatcctgaaggatatgtgcctattcatgttgttgcgtcgttcaagaaaattcggctgtcattaacaataattctcagcttgccgcagtgctacagaactcagctaagctttttgttagtgaagatggaaagaaagtgagacgcataagtccgattactgagtcggctatagaagagcttcttactcccatt

SEQ ID NO: 160288 - DNA, 353 bp, Arabidopsis thaliana columbia
agaaacacaaacagaggcagagatcttaagagtttaagactaatcccaacaatggcgtctctcaaagtcccaagcaatgttcctcttcccgaagatgacgccgagcaactccacaaggcttttcaggatggggtaccaacgagaagctgatcatatcaatactagctcacaggaacgcagcacaacgcagcttgatccgcagcgtttatgcagctacctacaatgaggatcttctcaaagcattagacaaagagctttctagcgactttgagagagctgtgatgttgtggactcttgatccaccagagagagatgcttatttggcttaagaatccaccaagatgttcaccaag

SEQ ID NO: 160289 - DNA, 453 bp, Arabidopsis thaliana columbia
ccttaagctgagagagtcacagtctcgtctctatctctcctctttgcctttttccactcactacacgccaaacccgacgacatggcagctacctctctcactgcccctccttctttcgcggtctccgccgcatttctcccaagctcgacgctgccgccgtctcctcccaccaatccttcttccaccgcgtcaattcctctacccgtctcgtttcttcctcttcttcttctcatcgctcccccagaggtgttgttgccatggctggatccggaaagtttttcgttggaggaaattggaagtgtaacgggactaaggactccatcgccaagcttatctccgatctcaacagtgcaaccttggaagcagatgtagatgttgttggggtacctccatttggctacatcgaccaggtcaaatcctcgttgacagaccggattgacatattatgtcaga

SEQ ID NO: 160290 - DNA, 222 bp, Arabidopsis thaliana columbia
gtggggctgaggaaaaaagatctgatgggcggttttgatcctttcgtgaaaatcaagctctctgaagatatgattccttctaagaggacatcagttaaactcatgattttgaatcctttttgaatgaggagttttatttcttggtttgttgtttttattatctttttttattttatctttgtttttttttttgatgtttaaattatttacttatatttgttg

SEQ ID NO: 160291 - DNA, 413 bp, Arabidopsis thaliana columbia
tattaatcaatcctcttattccttttcaagatactttagaaaaaagacattccatcagagaaatatattggagacaaaaagaaaatcacaacattgcatcaaatccaaaggatgctatagcctttctctctctcaacaagaaagaaaccatatgcatcaaatctaccttcgactaaaaatatttttaagaaagttattaaaccaaataaaacacaaccattttagagaaaaaaaaacgtttccttgttcaaatcaagcttttcttcacttggcactggcgagctgggagcggatgagcttagccgcatcaaccatgttcttgagtgcaggcttgacctcggtgtacttacgggtcttgagaccacagtcagggttaacccaaaggatggtctgctctaagacaggaagcattt

SEQ ID NO: 160292 - DNA, 458 bp, Arabidopsis thaliana columbia
gccgcgcaagaagacgattctctctcttgagttgtagaaatgaagcacaacaatgttatccccaatggtcacttcaaaaagcactggcagaattatgtcaagacatggttcaccagcctgccaggaaaaccagaagaagaattgcgaggcaaaagaaggctgtgaagatcttccctcgtccaacttctggacctctccgccctgttgtgcatggtcagactcttaagtacaacatgaaggtcagaaccggtaaaggattcactcttgaagagctcaaggctgctggtatcccaaagaagttggcgcctacaattggtattgctgttgaccatcgtcgcaagaaccgatctttggagggtcttcaaacaaatgtccagaggctgaaaacctacaagaccaagttagtcattttcccgcgttgtgcccgcaaggtcaaggctggtgactctacaccagaa

SEQ ID NO: 160293 - DNA, 434 bp, Arabidopsis thaliana columbia
atccattcatccacagcctattactctagttctttctttcaccattaacaccaaattcagaaaactcagaagaagcaaaataaagagcttttactgatccaccaaacacagatttcataaactcccaaaaaagttaaattccaaacaagccccacaacaacaacaacaacaaaaaagattttaatctttctcatttacccatatcctcaaaattcccacaaaaatcttttctccaataacataacaaaacaactcttcttctacaacaaactatgttctgattttctagtttcttcttccacacaatacataagaaatggggttttatttacttgaagcagcttttgttactttacataatcatcatggctctgttctcagatctcaagcatgctaaattttcttcaccagagtccacgaaccttatttacaaa

SEQ ID NO: 160294 - DNA, 85 bp, Arabidopsis thaliana columbia
accaaatcatcaacttaatcgtttttctcaaatttaggggtttctcttttctcgaaaggcttgcggtttttttaatcatctctat

SEQ ID NO: 160295 - DNA, 329 bp, Arabidopsis thaliana columbia
ctttcgatgccagaaagttccccattttctccaaccagctattcactactagtggccagaagtatgacacaaccaagatcttgacaccgcagtttgatctggatattggtcttataacaactacgggaaactttacctcagccctcttttcgcactctctatcggatccgggtttgcgagattcactgcaacactaactcatgtggcattgttcaacggcagggacatatggaagcagacttggtctgcagtgaacaccacgaagctggacatccatggaaaattgatgcaatgctacaaaaaagtgcctgagtggtggttttatttat

SEQ ID NO: 160296 - DNA, 238 bp, Arabidopsis thaliana columbia
  unsure (1)..(238): unsure at all n locations
ggaggaagcatccgatgctttcgaatcaaatgatacacgctcttcccggacttggaatcggcgtcgccgccttctgcgtttatctcgtcggcgagcagatctactacatccntttggctccttccaaatcatctcaccaccaccaggtacagactgctccttctcacttgaagagcatctatctttttcgatgagacgcttgaatcagtgtcactttgcttaactcattgttctcttc

SEQ ID NO: 160297 - DNA, 156 bp, Arabidopsis thaliana columbia
gatctccggcgccgaggactcagctgtctgttttctctttttcagccgtcaccatgaccgattctaacgatgctggaatggatgctgttcagagacgactcatgtttgaagacgaatcattctcgttgttgaaaatgatcgtgtggttgggtcatg

SEQ ID NO: 160298 - DNA, 403 bp, Arabidopsis thaliana columbia
gcttcttcgtcttcttcttctcggtctcgcacctttagataccgcgtcttcacgaacttccatggacctgacgtccgtaaaacattcctcagccatttacgtaaacagtttagctacccgggatttcgatgtttaatgatcaaagtatcgaaagaagccaacccatggcacgtgtttttacaggagtatttaaggaattttggatatccagcgtcgcggttctgtataaatacacacgcatgttgtgagctttcttggtatctcttccctatccaaaccgtcgtccttcgccgtaattctttagtcatttccgtaatacctgatcaagcgcgtgtgatccacacatctatcacgcctggctttcttgggtttttcaaaactctgtactttggggcactcatat

SEQ ID NO: 160299 - DNA, 283 bp, Arabidopsis thaliana columbia
attttcgtagccgcaagactcctttcagattcttacttgcagctatgggtaaagagaagtttcacattaacattgtggtcattggtcatgttgattctggaaaatcgaccacaactcgtcacttgatctataagcttggtggtattgacaagcgtgtcatcgagaggttcgagaaggaggctgctgagatgaacaagaggtccttcaagtacgcatgggtgttggacaaacttaaggccgagcgtgagcgttgtatttccatcgatattgctctatggaagtt

SEQ ID NO: 160300 - DNA, 147 bp, Arabidopsis thaliana columbia
caactaagcaaattccttgatagaaacaaaatggtatgacaattataagaaaagtattagatgaagaagcgaaagcttctctagacatatggaagtatgtctttgggtctgcagattttgtctcttttatagtcgtgccattgattt

SEQ ID NO: 160301 - DNA, 151 bp, Arabidopsis thaliana columbia
gaagaagcgaatcgctcgaaatagtgttttctactgtagagaaagagcgagaaatcataagcatgcacatcagtcaagctgtgatccagggcggaaaatcgtgttgggagcccactgattcgaaaatggaattcagccggacggaaagaag

SEQ ID NO: 160302 - DNA, 343 bp, Arabidopsis thaliana columbia
gatttactgagtgaaaaaagcttatctcggcgattagttcccggcgaagaagaagaagagagataagaaaatggcgactaatggatctgctagctcagcgcagctctctcacgggaagctgatgtcaggatgatgtgtgccgctgaggttcatcttggaaccaagaattgcaattaccagatggagcgttacgtcttcaagagacgcaacgatggtatttacatcttcaaccttggcaaaacatgggaaaagcttcagatggctgctagagttattgatgccattgagaacccacacgacatcatcgtccagtcagctaggccctatggtcagagagctgttt

SEQ ID NO: 160303 - DNA, 396 bp, Arabidopsis thaliana columbia
attgccatggctaagctctctctttcctccatcttcttcgtcttccctctcctcctctgtttcttttccccttcttcttcttcatcggatggcttagaatcctacatcgtcgtgtgcagagatctcataagccttccctcttctcctcccacaacaactggcacgtctctctccttcgctctctcccttcttctccccaaccagcaacgctgctctactcttattcacgcgccgttcatggcttctccgctcgtctctcccctatccaaaccgccgccctccgccgtcatccttcagtcatctccgttatacctgatcaagcgcgtgagatccacacaacttacacgcctggcttcttgggtttttccaaaactttggactctggagcaactcaaa

SEQ ID NO: 160304 - DNA, 296 bp, Arabidopsis thaliana columbia
cacagatcggagaatctcctctgagagctctaatctctcatctttcttcaccggcgtctccggatctaataatcctgtaaggcctctactgcagaaaaaagattgaatttttacaatttgggtgactcaattttgttgactagagtgtttggagatatttctaactaaatgggaacaatgcaccgcagtggtgctcctcgaagaacgaatgaaaatgcaaaggttattattactactattttggggatagtgtttgggacttttattggtattacatttccttcacttttgtttaa

SEQ ID NO: 160305 - DNA, 350 bp, Arabidopsis thaliana columbia
caactattgctcctaatgagaacctttcgggagatgttcagatggcagatgaaactccagctcagacaattgtgcatgagacggatccagttgatgctacatatgctgtaggttaacaaagattaagggaattttatctggagagacatctattcagctgacactgcagtttctttacagccacaacaaatcggacctgctgatactgaagacaatcaaacagtctgtagagatgcggaacagtgtatgccacagtgctacaatatatgctaatgccattatgcatgctggaactacagtggacactttccttagagagaatttggattggctaagcagggcaaccaatt

SEQ ID NO: 160306 - DNA, 457 bp, Arabidopsis thaliana columbia
gccaaaaccatggcctcctcaagtctccatttcttcttcttcttgacacttctcttgccattcactttcaccaccgccacacgtgacacatgtgcgaccgccgctccccgggttccgacgacctctcaatcatccccattaacgccaaatgctcacctttcgcacccactcacgtctctgcctccgtgatagacacggtccttcacatggcctcctcagactcccatcgactcacctacctctcaagcctcgtcgccggcaaaccaaaacccacctccgtccccgtcgcctccggtaatcagctccacatcggaaactacgtggtccgagccaaactcggcactcctccacagctaatgttcatggtcctagacacaagtaacgacgccgtttggctcccttgctccggctgctccggttgttccaacgcctcaacttctttcaatacaaactcctc

SEQ ID NO: 160307 - DNA, 278 bp, Arabidopsis thaliana columbia
  unsure (1)..(278): unsure at all n locations
ctcagaagctcataggggatgaaccagttctcgttcgagatttcatacacactgcattatatgatccaatacaaggctacttctctcaacggtcaaaatctgtcggggttttggagagcgcattaagttcaaccagcttgaagggaggaaagcatacatgaaacttggaaaagtatacagcgaggcatttttggttactcagggacttntaagctggatgctatgggattgcaaacatctggtccaaaattctagtccattaagatatacaaatgggg

SEQ ID NO: 160308 - DNA, 470 bp, Arabidopsis thaliana columbia
cacttttctacagccgcatcatccttctcccttgttcgatatcgtttgcgtgagatttgtctgaaaagtagctaaccatgggtaaagagaagtttcacatcaacattgtggtcattcccacgtcgattctggaaagtcgacaaccactggacacttgatctacaagttgggtggtattgacaagcgtgtgatcgagaggttcgagaaggaggctgctgagatgaacaagaggtccttcaagtacgcatgggtgttggacaaacttaaggctgagcgtgagcgtggtatcaccattgacattgctctctggaagttcgagaccaccaagtactactgcactgtcattgatgctcctggtcatcgtgatttcatcaagaacatgatcactgttaccttccaggctgtttgtgctgtccttatcattgactccaccactggtgggtttgaggctggtatcttcaaagatggtt

SEQ ID NO: 160309 - DNA, 239 bp, Arabidopsis thaliana columbia
cggacgcgtgggcaaaaaaaaaaggaaccatctttctcctaaatctctacaatggctcgatctttatctccttcactttctctcttcgataccgctcgccgcagctttcttcttctcctcattaaacattttatcgactaatcctcaatgcggctaactctaaccattgggtatcacggattgaatcgtgggtccttgtaatagtggagagcgtcccggatatggacgccgaccgacct

SEQ ID NO: 160310 - DNA, 322 bp, Arabidopsis thaliana columbia
gcagacaacattgaagagaagctctatatagattctttgtctctttctctgtcgcattgatttgtaaaaaagtgtggcagagagaaaccatggctatggcggaaatggcaacgcgtcttcactatctgcaaaactcactcttccttcttcttctactaagaagacactgagtctgagacaagtctctgtttcacttccaacatcaacttcaatctctctgttatctctctttgcatctcctcctcatgaagctaaagctgctgtttccattcccaaggaccaaatcgttctctctcttactgaagtggagaaaacaatcaac

SEQ ID NO: 160311 - DNA, 239 bp, Arabidopsis thaliana columbia
atgcgatggcatggatgcttggatctttgacatttatgacactcttctctcaaccattccttaccacaagagcaacggttgtttcggtggtgagcaactgaacacgaccaattcgaggaatggcaaaattcgggcaaggcaccagcggttccacacatggtgaagttgttccatgagatcagagagagaggtttcaagatctttttgatctctttttattaagagtatctcatttttgt

SEQ ID NO: 160312 - DNA, 257 bp, Arabidopsis thaliana columbia
ctaaaactaaatacaaagaaacagagatgggtttttttacagaggaggtgagagctaaggcagagatgtacaccggagatgagatatgtagagagaagacaaagtgtttcctcaaggaatatctatgcccaatggtttattaccattgaaggatatagaagaggttgggtatgacagagagtcaggtgttgtattgctgaagcagaagaagagcatcactcacaagtttacagagatcaatatgcttgtgttctatg

SEQ ID NO: 160313 - DNA, 367 bp, Arabidopsis thaliana columbia
ttctccttccatcacagcttcacgcaaatctttctgcagttacatcttcttaagattctgagttccgacttatttcgtggaaggattttgatatttcaacagtgatttttttttatactggaacttaagcatcacttaatcttccggctaaaatgatgtcgccgaagcaaatctccgacgatcgaggatcttcacatttcaggcatacaccattccagataatccaccttattgggaacttttttaggatatggtcagtatattcgatgtaccgatacttgaatcagacgggagcgcctgttgttctctttctcttctgctgtctggtgccttcatcaatcatcttcttgataattcaaaagccatg

SEQ ID NO: 160314 - DNA, 427 bp, Arabidopsis thaliana columbia
cttggctggcttaacatctggtaccggaactattacctcgcttcttcccgtgaattaacacgcatggactcaatcactaaggctcccatcatccaccatttctctgaaagatagctggagtgatgacaatccgatcattcaggaagcaggagttgtttagacaagagaatgtaaaacgtgtaaatgataatctcaggatggacttccacaacaatggctccaacgaatggctcgggtttcggctggagctggttgggagctgggtgctctgcatctcggctttgtttatggtattgttacccagcaacgttatcagaccagagaatgtagggttgtccctgtcgtacggactgtccctgaactctgttctgttctttgccatttacattgaccgctttgttgataacaagatggttttagtggaaag

SEQ ID NO: 160315 - DNA, 416 bp, Arabidopsis thaliana columbia
agaaaattcaagctgcgattgcgaggaagagaagagacttcagatctagcttgatccggtgataatggcgctcgagtgggtggttttaggttacgcggcggcggctgaagcgattacctggtgctattgacgatgccaggactcgacggactccgcaagggattagtcgccgtcacgcgtaatctcctcaaaccgtttctctccatagttcctttctgtctcttcctcttaatggacatctactggaaatacgaaactatgccttcgtgcgatggcgattcctgcacaccgtcagagcattttcctcaccagaagtccatgtattaattcctgcgaaacgcgcttttcattgcggcttgacttgtaatatactggatccttgtacgaatctcctatttggtcgataagatccctct

SEQ ID NO: 160316 - DNA, 278 bp, Arabidopsis thaliana columbia
gagagatagagttatggctttggcgatgatgatccgaaacgcatcttcgaagcgaggaatgactccgatctccggtcatttcggtggtttgagatctatgtcttcatggtggaagacggttgagcctgctcctaaagatccgatcctcggagttaccgaagcttttctcgctgatcctagtcctgaaaaagttaatgttggtgtgggagcatatcgtgatgataatgggaagcctgttttcttggaatgtgtcagagaagctgagtaaaggcttgctg

SEQ ID NO: 160317 - DNA, 361 bp, Arabidopsis thaliana columbia
gcaagccctaattacaaaaaatggggtctcgccctctaaaacctttccttaatcgagctcctacttcttggctgcgttgccgtctcctatgcgggcgactgtaccccttctaataccactccagcacctgacattccaccaaaacatccatatttaccgcctaaacctcctgccgtcaaaccacctaatccatcggtagtaataccacctacttcaaaacctctcaccgttaaaccccattctaaaccaccaacctgtaaacaccatcctaaaccaccaaccgtcaaaccccatcctaagccactcatcgttaaatcatcccactctaaactacccaccaaatctcacccctactcaaaac

SEQ ID NO: 160318 - DNA, 440 bp, Arabidopsis thaliana columbia
agaaaaccgaaatctttggatttgaaatcccaactgagatcgaagggataccttcagagatcttggaccccgtcaactcctggtctgataagaaggcacacaaagatactctgtgaaactgggaggtctgttcaagaagaacttcgaggtttttgctaaccataagattggtgtggatggtaagcttacggaggagattctcgctgctggtcctatcttttagaaaaaccaaactctgaatgatgttgtcgaaaagaaagaaagatctactattattaagaagaataaaatgagactttgtgtttttctttgctgtgataatctctttgaataatagagagaatttaatgttccaaatgtggtgcgatttggataatgatgacgactatttttaatttttactatccatctcttttatttttttaggtcttttcactttt

SEQ ID NO: 160319 - DNA, 439 bp, Arabidopsis thaliana columbia
aataaaacaaacaaaaaatctagtgttctgctctaacacgctcgacgaccatggcggtctcgtttaatacaacgcttcaccagccttctctgagtccgagctgtagcatcacctttattctgggttaaagcctcaatctgcaagctttttggcaagtgggtatcagaatttgaacaaggagttctatggaagagtttataagagtctgcaatctgggactgggaaagcgagcaggtcacgggtaaagatgatgccaataggaacaccgagagtaccctacagaaaccgagaagaagggacttggcaatgggttgatatatggaatgccctttatcgagagcgggtaatcttcattggacaaaacattgatgaagaggttagcacccagattttagcaaccctgttgtaccttgatacttttgatgactcgaggaggatt

SEQ ID NO: 160320 - DNA, 385 bp, Arabidopsis thaliana columbia
atcagatctagatctaaaagaagagcgtcttcatataacgcccttcttcttcttcgtcttcttccctgcaaatctagtttctagatcttttctttcttccgcgaaacgaaaatgagagaggcatttcgatccacattggtcaggccggtatccaggtcggaaatgcttgctggggagcttactgtcttgaacatggcattcagcctgatggccagatgccgagtgacaagactgttggcggaggtgacgatgctttcaacacctttttcagtgagaccgttgcagggaagcacgttcaacgtgctggctttgttgatcctgagccaactgtgatcgatgaggttaggactggtacttaccgttaggtttttcaccctgagcaact

SEQ ID NO: 160321 - DNA, 202 bp, Arabidopsis thaliana columbia
ggcgcgtgggcgaatatcccaaattcgatccgttttcggcgataatctccgatctagatccgatggcgatgaaccagttctgtgctcgttctgggctgtagcaatatctatttctcttgtcctatgattgcaaggggtatcatgcttgctgctgccaacctttattctccatatggattaccttagcttttgatgctatgta

SEQ ID NO: 160322 - DNA, 450 bp, Arabidopsis thaliana columbia
gacattacttatctccggtaacggacaaccactcgtttcccgaaacagcaactcacagactcacaccactccagtctccggcttaactaccaccagagacgattctctctccgtcggttctatgacttcgattctcaacactgtctccaccatccactcttccagagttacctccgtcgatcgagtcggagtcctctctcttcggaattcggattccgttgagttcactcgccggcgttctggtttctcgacgttgatctacgaatcacccgggcggagatttgttgtgcgtgcggcggagactgatactgataaagttaaatctcagacacctgacaaggcaccagccggtggttcaagcattaaccagcttctcggttcaaaggagcatcttaagaaactaataaatgggagattcggcttcagcttacaaaaccagtcacttggcct

SEQ ID NO: 160323 - DNA, 276 bp, Arabidopsis thaliana columbia
ttcttcgataaggattttactctccagagaaagtataaaaaaaacctcctctgcttttgtgatcctttaaggaaaaagacgaaatggcaacggaatcgtacgaagccgccattaaaggaccaatgatcttctcagtacgaaagcggatctcggaaacgtcgccgccgcgaagatcaaagcgttgacggcggagctaaaggagcttgactcaagcaattcagacgcaattgaacgaatcaagaccggttttactcaattcaaaaccgagaaatattt

SEQ ID NO: 160324 - DNA, 388 bp, Arabidopsis thaliana columbia
ctcgagtttgatctcctcgaacagaacctaaacggttttgttccaaggactgtagctttcattggctctggtcctctccctcttacttccgtcgttcttgcctcttcccatctcaacgactcgatctttcataactttgacatcgacccatcagcgaatatggtagcagctcgtttggtttcgtctgatcctgatctttctcaacgtatgtttttccatactgttgatataatggatgtaaccgagagcttgaagggcttcgacgttgtgttcttggctgctcttgtagggatggataaaaaggagaaggttaaggtggtcgagcatcttgagaaacacatgtcttctggtgctttgctcatgctgagaagcgctcatggacctagag

SEQ ID NO: 160325 - DNA, 208 bp, Arabidopsis thaliana columbia
atttatctttccatttccgagccgttgagaattttttctgagagataatttaacaaatttcttcttcttcttctgtttctgaaccaccaaatctgcctttctcaattagctatgggctcgctgttctaaatccccaggattgcttgaaagatccattctctcacatgaaacaacatcttaattctagcgcatgtcccaacaggctgaa

SEQ ID NO: 160326 - DNA, 111 bp, Arabidopsis thaliana columbia
gtggggctgaggaaaaaagatctgatgggcgggtcatatccattcgtgaaaatcaagctctctgaagataagattccttttaagaagacaaacaggtaatcacaagaattt

SEQ ID NO: 160327 - DNA, 349 bp, Arabidopsis thaliana columbia
gttaaatctgacctggttttcatcattctcattcataggcaagaatgatatgcacccaaagaccaagaggattcttaacaatttgcaactaaagagcgtctttactggtgtactgctaaagcaactgacagtttgttccaaaagcttctcaaagtgcagccttatgtcacttatggatacccgaatgataagagtgttaaggaccttatatacaaaaagggatgcacaatcattgagggaaatcctgttcctcttaccgacaacaatattatcgaacaggctctatgagaacacaaaatcttgggcatagaagaccttgtgaatgagatagcaagagtcggcgatcatt

SEQ ID NO: 160328 - DNA, 297 bp, Arabidopsis thaliana columbia
atcgatcctaggcttacctcaaacctcagtctcctttgactactgagactcgtcgacctctgatccgcttcttcgactatacggatctacttccgatcttgatgatggccggaggtaagtacggtttctggttttgatactcgccgtagcaatttgcggtgctgcttctgttttccagccgatctcagactctcaccgatctgcggctctggatgtcttcgtaccagtcgatggatcatacaaaagcttggaggaggcatatgaagcattaaagaacttggagattcttggaattgg

SEQ ID NO: 160329 - DNA, 344 bp, Arabidopsis thaliana columbia
ggggagtggagctagcttaccagagagttcctggtgtgaccaataccgaggttgggtatagccatggcatcgtgcacaatccgagttacgaggatgtctgtactggcactcgggacataacgaggttgttagagttcagtatgatcccaaagagtgtagctttgagagcttgcttgatgttttctggaatcgtcatgatccaaccaccttgaatcgtcagggtggggatgtgggaacgcagtatcgatcaggtttatactacttcacagacgagcaagagcgcatagctcgtgaagctgttgagaaacagcattagatattgtacattatgattgtcacagata

SEQ ID NO: 160330 - DNA, 349 bp, Arabidopsis thaliana columbia
tcgctcatttactgttctgtttcactttctctctctctgtatactctctaaatgatggcaaaaaactgtaatttagtcagtgttctatgtgtatttttggtattgaccctttaacaaacccatcaccgtcgcggcagaatattccggcggtggcttgttacctttggtgactcacttcacgccgaacaaacaacttaccaacctactcctaaacttttgccgttggaaatccggatgatccacggctattctcgacgcctcatcgtcagacttctcgtaaattcatgaggattcgatcgtgatccgccggcccttaaccgaacggtaatgtctcacgtggagctagttt

SEQ ID NO: 160331 - DNA, 409 bp, Arabidopsis thaliana columbia
cacgatctagcttaaagttctgtaacctaagcgtttatcacttagctactccaagtttcttcttaatttctctcacactagtagttctaagctttagaaatggcaacagcatcgttcacatgcaatcagtcttcgccggtggattaaccactcgcaagatcaacaccaacaagcttttctccgccggtagcttccctaacctcaagaggaattatccggtgggagtgagatgcatggctgagggaggacccacgaatgaagactcttcaccagcaccatctacctcggccgctcagccgttgccgaagtcaccatctcctcctcctcctatgaaacctaaagtgggcccaaaggttagcgacttgctagcgtttagcggtccagcaccagagaggattaacggacgttt

SEQ ID NO: 160332 - DNA, 404 bp, Arabidopsis thaliana columbia
cgattgtaaataccggtaccgtacttcaagtgggcgatggcatcgctcgtatttatggtcttgatgaagtaatggcaggtgaattagtagaatttgaggagggtactataggtattcgcttaatttagaatccaataatgttggtgttgtattaatgggtgacggtttgatgatccaagaaggaagttcagtcaaagctacgggaaaaattgctcagataccggtgagtgaggcttatttggggcgtgttataaacgccttggctaaccctattgatggtcgaggtaagatttccgcttctgaatctcggttaattgaatcttctgccccaggtattatttcgagacgttctgtatatgagcctcttcaaacaggacttattgctattgaattcttgatccctt

SEQ ID NO: 160333 - DNA, 260 bp, Arabidopsis thaliana columbia
gtccccttctgtaagggtcttgacgtgactcaacatgctcagtctggtactgggaaaacagcaactctctgctctggtgtcttgcagcagctggacttctcccttatccagtgtcacgtttggttctagctccaactagagagcttgctcatcaaattgagaaggtcatgagggcccttggtgattaccttggtgtcaaggttcacgcctgtgttggtggacccagtgttcgtgaggatttactcattcttcaagctgga

SEQ ID NO: 160334 - DNA, 327 bp, Arabidopsis thaliana columbia
  unsure (1)..(327): unsure at all n locations
tcgccctaaaccactatctctctctctctcttcatagtgtaacaatggagtccggcgctctatctcgcataggtctcgccggtctcgcagtcatgggacaaaacctcgccttaaacatccgcgataaaggattcccaatctccgtctacaatcgaaccacttccaaagtcgacgaaaccttagatcgtgcctccaacgaaggaaaactcccagtcgctggtcaatactcgcctcgcgatttcgttctctcgatccaacggcctagatccgntatcatccttgtcaaagccggtgctcccgttgaccaaaccaactctgctctctctg

SEQ ID NO: 160335 - DNA, 182 bp, Arabidopsis thaliana columbia
  unsure (1)..(182): unsure at all n locations
gtgcaggtaagcacgtcccacgcgcngtcattgttgatcttgagccaactgcgatcgacgaggtcaggactggtacttaccgtcagcttttccacccagaacaactgatgacggtaaagaagacgctgctaacaatttcccccgaggtgatgacaccattgttaaagagattgctgatctct

SEQ ID NO: 160336 - DNA, 297 bp, Arabidopsis thaliana columbia
caacgttgcgaatccaactactggatgccagaagaagctggagatcgacgatgaccagaaactacgtgcgttttacgacaagagaatctctcaagaagtcagtggagatgctttgggcgaggagttcaaaggatacgttttcaagatcaagggtggttgcgataagcaaggtttcccaatgaagcaaggagttttgactccaggccgtgttcgccttttgcttcaccgaggaactccttgcttcagaggacatggaaggagaactggtgagaggagaagaaagtctgttcgtggttg

SEQ ID NO: 160337 - DNA, 296 bp, Arabidopsis thaliana columbia
gataagtcgtctcttgaatcgccaaatatatattcttttgttttcgatttttcgatagattagaaatcgacaaatccaaaagaaaaagtaagtggacctaacccatcgaatcatgactatatccactattctgatattcaaattcgatagagattaaattgaaacagtagattttttttatttcatatttttgtattaggaaatccgtcgatatctcttattgaatcttcttgtttctatatatttcataggaaatatattgcgttcctgcctagagaaagagagtatttttgcaa

SEQ ID NO: 160338 - DNA, 299 bp, Arabidopsis thaliana columbia
ggaaaagctccgataatggcgtggatgcgactgatacagagcgcgagatctgttcttacgacagcaccagcgtcttcgactcttaacttccatagattctactccaaatccgccgctccttatcacgtgaaagttggaattcctgagtttttgagtgggattggtggaggagttgagactcatattgctaagcttgaaaccgagttaggcgatcttccgaaattgctcgtgactcgtacgcttagactcaagaagtttggtattccttgcaaacataggaaattgatactgaaatatag

SEQ ID NO: 160339 - DNA, 298 bp, Arabidopsis thaliana columbia
ctcgttgctagaggaatcaaacaatggtgtttgtgaagtccaccaagtcgaatgcttacttcaagaggtaccaagtgaagttcaggagaagaagagatggaaagactgactacagggcaaggatccgtcttatcaaccaagacaagaacaagtacaatactcctaagtatcgttttgttgtccggtttaccaacaaagacatagtggcacagattgtatctgcaagcattgctggtgacattgttaaagcttctgcttacgcacatgaactgcctcagtatggtctcactgttggtct

SEQ ID NO: 160340 - DNA, 301 bp, Arabidopsis thaliana columbia
atcaacaaccagagacgacgccttgctatcgccgctcggtctgaccgactatcacgccggaagattcggaagagacctcctgatagagatatgtcctgcatagtttcaatcccggagcttcctcgccggcgggattcttaggaaagcctgcttttaaattctcgaattagtgtaacggaaggggatccatcgaatacagatgtagaaggagacagagatactacttctagtattagaacacagtctgctcctcgtagaggaagagatcttaggagcagcagaatcaaattctacggtgttg

SEQ ID NO: 160341 - DNA, 298 bp, Arabidopsis thaliana columbia
atcaaaatcagaagaagaaaaagatgaccagctctgatgctcaatctcacaacgtcttcgtctacggtagcattctagaacccgccgtcgccgccgtgatcctggatcgcacagccgatacagtccccgccgttctccatggctatcacagatataaactcaaaggacttccatatccatgtattgtttcttctgattctggaaaagtcaacggaaaggttataactggagtgtctgatgctgagttaaataatttcgatgtgattgaaggtaatgattatgagagagtaactgttga

SEQ ID NO: 160342 - DNA, 295 bp, Arabidopsis thaliana columbia
agaacagcaaatcccggaggtagagccaattacttgggagactttctgcaagtcaaaactgtcggctcttagcgcacaagccgtgcttcgtgtcaccaatgttgtcactgttactgctcgggagggtttggttactacaggttcatcatcttcatcccagttataaacattttctactacaaattttttaaaaaccgtttgctacgagtcatacggtttacatggtattctccggcatggcggcatgatctaccaaattggcaaattatggaccgataaaaagagtgaacgttcg

SEQ ID NO: 160343 - DNA, 280 bp, Arabidopsis thaliana columbia
aagaagaaaagctttgagaagccatggatacggaaactgagttcgataggatactattgttcgaacaaattcgtcaagacgccgaaaatacctacaagtcaaatcctttagatgccgataatctgactagatggggaggagttttactcgagttatctcagtttcatagcatctcagatgccaagcaaatgattcaagagggcattacaaagtttggagaaggattggttgtttgacccaaagaaagatgaagcggtttggtgtattgggaatgcataca

SEQ ID NO: 160344 - DNA, 299 bp, Arabidopsis thaliana columbia
aaaaaacaagtggtagctttaaaacgagagggagagagcgaaaatggcgacgtcgggaacgtacgtgacggaagttccgctaaaaggatcggccgagaaatactacaagaggtggaagaacgagaaccatgtcttccctgatgctatcggccaccacatccaaaatgttaccgttcacgaaggcgaacatgactctcacgggtctatcaggagttggaactacacatgggatggaaaggaggaggtgttcaaggagagaagagagatagacgatgagaccaaaacgttgacgttaagag

SEQ ID NO: 160345 - DNA, 298 bp, Arabidopsis thaliana columbia
gagagagagagagattctgcggaggagcttcttcttcgtggggtgttcatcgttattaacgttatcgcccctacgtcagctccatctccagaaacatgggtgcaggtggaagaatgccggttcctacttcttccaagaaatcggaaaccgacaccacaaagcgtgtgccgtgcgagaaaccgcctttctcggtgggagatctgaagaaagcaatcccgccgcattgtttcaaacgctcaatccctcgctctttctcctaccttatcagtgacatcattatagcctcatgcttctacta

SEQ ID NO: 160346 - DNA, 296 bp, Arabidopsis thaliana columbia
gtctctctcccgcaaccttcgattttcgtttattcgcatgcatcggagagagaaaacaatcaataagcgaccatgttggtgtaccaagatcttctcaccggtgatgagcttctgtctgactctttcccttacaaggagattgagaatggaatcctctgggaagtagaaggaaagtgggttactgtgggagctgtagatgttaacattggtgccaatccatctgctgaagaaggtggtgaggatgaaggtgttgatgactctactcaaaaggttgttgacattgtcgacaccttcag

SEQ ID NO: 160347 - DNA, 299 bp, Arabidopsis thaliana columbia
  unsure (1)..(299): unsure at all n locations
tttgcaccaaacttttttctgaatctcagtgaattctcataaaatgagagggatggtgagttttgccgtttgggctctctttgctgctttactctcacagcagctctttgcttctgttgcttccgtaaggtttgaggatgccaaaacatactacttatctcctccctctggctcacatggaactccttcatcacacacgcctncttcttctaactgtggaagtccaccttacgacccttctncttcaactccttctcacccttcacctccatcacatactccaactccttccactccat

SEQ ID NO: 160348 - DNA, 298 bp, Arabidopsis thaliana columbia
atcatggcggctacgacgaactctttccttgtcggaagcaacaacactcagattcctgctttgaaacccaaatcatcatctcaatcctttcttcacctcagcaaaccaaacaccgtcaacttcgtcagcaaaaccaagcccgtcgctgttagatgcgtcgcttcaacgactcaagttcaagatggagttagatccggctccgtcggatcccaagaacgtgtcttcaacttcgcggcgggtccagccactttgcctgagaacgttctcctaaaagctcaggcggatctatacaactggc

SEQ ID NO: 160349 - DNA, 300 bp, Arabidopsis thaliana columbia
acgatcttctcaactttaaagagtttctttagggctttgtttgtgttccctcaaaaatcaatggctcttaaagactctcttgcgctcctccttctcttcaacatccttttcttcactctcactactgccactcgcagtaccaattgtcctcctccaccaggaaaacacaacaaacaaaaacctagcccaacacccactaccgggacttgtcctaaagatgccttaaaggtcggtgtttgtgttaacgcactcaacttgttaaacggtttgacccccggaactcctcctgtgactccatgt

SEQ ID NO: 160350 - DNA, 301 bp, Arabidopsis thaliana columbia
caaatagtactttttttttgtttggccttcttatagaaagaagaactcaaagcacagagagaagatgagcgaagaacaaccacacgccaatctagcggttcccgcgtttaaaactgagaaagagcccataacgcaaacacgaaatggtcaaagtagcgtttggcgtttcggtggaagtgataaggcagcgaaagcatccaccgtaacgcttagaggtgtcatctacatgctcttcgacaactgcggcaaagacgtcaataagaccattttacccctcggccacggtgacccttccgtctac

SEQ ID NO: 160351 - DNA, 283 bp, Arabidopsis thaliana columbia
gctttggctcggattcgtccgtcttctttcttcttagccgagtacttcggtagattagttggaacgattgatgattttgagttaattgaacgttcggcgtatgagtggtgatcggatagctagtgttcgtaggctccatgctcgcgcatcgaactacctaccacctatccttctcagttaattcacgggcgatgttacgctcgatgatgagttccggggcctgtgtttcgtacctaatttgaaggaattgttgagttccggttacacccatgctcgttgtttt

SEQ ID NO: 160352 - DNA, 298 bp, Arabidopsis thaliana columbia
ggtgacgctactcttttgattcatgagggtgttaaagctgaggagatctttgagaagactggtcaagttcctgatcctacttctactgataaccctgagtttcagatcgtgttgtctattatcaaggaaggtcttcaagttgatcctaagaagtaccacaagatgaaggagagacttgttggtgtctctgaggaaactaccactggtgttaagaggctttaccagatgcagcaaaatggaactcttttgttccctgccattaacgttaacgactctgtcaccaagagcaagttcgaca

SEQ ID NO: 160353 - DNA, 296 bp, Arabidopsis thaliana columbia
ctttccaaaggggtttcctgagatcacaaaggccaagtaacaatggcgaaaggagttgcagttttgaacagcagtgagggtgttacggggactatctttttcacccaggaaggcgatggtgtgaccactgtgagtggaacagtttctggccttaagcctggtcttcatggtttccatgtccatgctcttggtgacaccactaacggttgcatgtctactggtccacatttcaaccccgatggtaaaacacacggtgcccctgaggatgctaatcgacatgctggtgatctaggaaa

SEQ ID NO: 160354 - DNA, 269 bp, Arabidopsis thaliana columbia
ttctctaaagcctgtagtttatcgacatcattaaggccgcgagaggtgaagaaaagtgcctaatgagctcattaagcaatttaaaagtcctttgcttttccagtcgcaactctgaaaaaatgaataagttggtattatgatatgatacattttgcttcagttgtatttggcaaaagtttctctcttactatattgttttgagaacgcaacaatcattttcttcgccatttatttagctgtggacttgcaatttgcaaatcccttccttt

SEQ ID NO: 160355 - DNA, 298 bp, Arabidopsis thaliana columbia; identical to SEQ ID NO: 131452

SEQ ID NO: 160356 - DNA, 299 bp, Arabidopsis thaliana columbia
ctcggaacaatcgcaccaatcgccataggtttcatcgttggagctaacatcctcgccggtggagctttcagcggagcttccatgaacccagccgttgctttcggaccagccgtcgtaagctggacgtggaccaaccactgggtttactgggctggtcctcttattggtggtggactcgccggaattatctacgactttgtcttcatcgatgaaaatgcccacgagcaattgcctaccaccgattactgaagacgtcaaattcaacgttgttaatctgatgaatttttcgtgatttgctt

SEQ ID NO: 160357 - DNA, 299 bp, Arabidopsis thaliana columbia
gttccaaatttcactcttttcctctaaaacgcatttatcgctttccctcattaaacacaaaaactcattcatcgtcctctctcgcttgacctacaacacccgattctctaatcgaaaccgtttctctctttttgatcagatctcagatctttccctctttgattcttcttccttagatcgattctctctagaaacaacaatggcgtctgggcgtgaagagttcgtatacatggctaagctcgcggagcaggcggagaggtacgaagagatggtagagtttatggagaaagtctccgccg

SEQ ID NO: 160358 - DNA, 299 bp, Arabidopsis thaliana columbia
atcggactctctcttctcttcgccgtcacggctgaagatccggacagattctttgaatggaacataacttacggcgatatatacccactcggtgttcgccaacagggtattttgatcaacggggcgtttccgggaccggacattcattcggttactaatgacaatctcatcatcaacgtctacaatagcctcgacgaacctttccttctttcatggaatggaattcaacagaagaggaactctttcgttgatggagtgtatggaacgacatgcccaatcccgccggggaagaactacac

SEQ ID NO: 160359 - DNA, 293 bp, Arabidopsis thaliana columbia
caaaaatggttttgcaaaagcttcctctcattgggctgcttgtgctcctgaccatcgtcgcctctccagcaaatgcagatggacctgtttgcccgccgtcgaacaaactaagccgggcaaggttccctgaagggtttttatttggcacggctactgcggcataccaagtcgaaggggccattaatgaaacttggcgtggaccagccttatgggacatctactggagaaaatatccagagaggtgcaataacgataacggcgatgtggccgttgatttcttccatcgttataag

SEQ ID NO: 160360 - DNA, 299 bp, Arabidopsis thaliana columbia
gtactatccaggcctattaagtcattccgaacatgaactggcggagcgacaaatgactggtctttgaagcatatgcagatggacctgtttgcccgccgtcgaacaaactaagccgggcaagtttccctgaaggttttttatttggcacggctactgcggcataccaggtcgaaggtgcgattaatgaaacttgtcgtggaccagccttatgggacatctactgtagaagatatccagagaggtgcaataacgataacggcgatgtggccgttgatttcttccatcgttataaggaagat

SEQ ID NO: 160361 - DNA, 298 bp, Arabidopsis thaliana columbia
atgaggaagactgtcgccaagccaaagggtccatcaggcagcccatggtacggatctgaccgagtcaagtacttgggtccattctccggcgagcccccgagctaccttaccggtgagttccccggtgactacggatgggacaccgctggtctatccgccgacccagagaccttcgccaggaaccgtgagctagaagttatccacagcagatgggccatgctcggagccctaggctgcgttttccctgagctattggctaggaacggagtgaagttcggagaagcggtttggttcaagg

SEQ ID NO: 160362 - DNA, 296 bp, Arabidopsis thaliana columbia
ctctatcatggtatcagagcattttttgcgtttttccagttgatttcatcttcaatcttcaattcttgctcagtttcttcgattattcactcctcttggtgtcgattgttcttccgcgcattcgattttggtgaaaatggtgaagaaaggtgggaaaatgaagaatctcaatgttactcctgacgatggtggttctgttgctagatctactcgaaactcgatgatcgctgaagatcttgaagttgcgagagctcaacaacaactcaatcgaagattcgaagcttctgaggtccgtg

SEQ ID NO: 160363 - DNA, 299 bp, Arabidopsis thaliana columbia
gtcaatctagggttcttcttcgtacttgcagatttcgcctccgttttcactacgatctgtgaagatgttctccgctcagaacaagatcaagaaggacaagaatgctgagccaacagaatgcgaggagcaagttgctcaggctttgtttgatttggagaacactaaccaggagttgaaaagcgagttgaaagatctctacatcaaccaagctgttcacatggatatctctggaaaccgcaaagcttgtggtgatttacgtccattcagattgaggaaagctttccgcaagattcatcccc

SEQ ID NO: 160364 - DNA, 196 bp, Arabidopsis thaliana columbia
cttggttctgggaatcatcctttatttctgggaatgtgtgcacttttcgagagggaaaaaaggcccaaaaccaaaagaaaaagaaaaggttgtggcttggaactgaatcaataccatcttcatatattcaatacaccttcactattcccccttttggatttttaatatatttttcccatcaaaggtctggtttttt

SEQ ID NO: 160365 - DNA, 294 bp, Arabidopsis thaliana columbia
gctctaatttcatagcctcctaacaaagcaatatcatttccaatgtataaaagttaaagccatggctgcatctttctctgtcccctctatgataatggaagaagaagggagattcgaagcggaggttgcggaagtgcaaacttggtggagctcagagaggttcaagctaacaaggcgcccttacactgcccgtgacgtggtggctctacgtggccatctcaagcaaggctatgcttcgaacgagatggctaagaagctgtggagaacgctcaaaagccatcaagccaacggtac

SEQ ID NO: 160366 - DNA, 296 bp, Arabidopsis thaliana columbia
gaattgttgagggtcttatgactacagtccactcaatcactgctactcagaagactgttgatgggccttcaatgaaggactggagaggtggaagagctgcttcattcaacattattcccagcagcactggagctgccaaggctgtcggaaaggtgcttccagctcttaacggaaagttgactggaatgtctttccgtgtcccaaccgttgatgtctcagttgttgaccttactgtcagactcgagaaagctgctacctacgatgaaatcaaaaaggctatcaaggaggaatccgaa

SEQ ID NO: 160367 - DNA, 301 bp, Arabidopsis thaliana columbia
gtactatcaagaagcagaagatggcccaaaaggtggaagcacaaggagggaaaggagccaacctatgggacgatggatcgacacatgacgccgtgaccaagattcagctcgcagcaggcatagacggaattcaatatgttcagtttgattatgtcaagaacggacaacccgaacaagctcctcttcgtggtaccaaaggccgtgttctcccagctgatccgtttgtgattaaccatccagacgaacatctagtttctgtagaaggttggtatagccctgaaggtatcattcaaggaattaa

SEQ ID NO: 160368 - DNA, 296 bp, Arabidopsis thaliana columbia
ggaaaaaagacaaatcaaagagagacgattcgatcgcatcaatggcagaagaaaagagcttcaagtatgtgatcgtcggaggtggtgtcgccgccggatacgcggcgagagagttcttcaaccaaggtgtcaagcctggtgaacttgctatcatttccagggaacaagttcctccatatgagcgtcctgcacttagcaagggatatatccacctcgaaaataaagctacacttccgaatttctatgttgctgctggaattgggggagagagacagttccctcaatggtacaaagag

SEQ ID NO: 160369 - DNA, 297 bp, Arabidopsis thaliana columbia
ctttcttccccgaagatgcgtcctttagacgagaccgagacaaccgtcgtcttcgagaagctcttcaaattcgtcggcaacaacctcaagaagatcgtcgagaacccatcagacgaaggacccgaatctacacccggcagctactgcttccgcctccagaaaaacagagtctactacgtcagcgaagccctcgtgaagcgagccacaaacatctccaggaaaaacctagtctccttcggaacctgcatcgggaaatacactcacgccggtagtttccatctgacgattatgtcactc

SEQ ID NO: 160370 - DNA, 298 bp, Arabidopsis thaliana columbia
ggcaaggttctacctactctgattggggacaatgtaacagtaggtcacagtgctgtcattcatgggtgtactgttgaggatgatgcttttgttggtatgggagcaacactacttgatggtgtggtggttgagaaacatgccatggttgctgctggttctcttgtgaaacagaacacgcgaatcccttctggagaggtgtggggaggaaatccagcaaagttcatgagaaagttaacagatgaagagatagtatacatctcacagtcagcaaagaattacatcaatctcgcacagattc

SEQ ID NO: 160371 - DNA, 297 bp, Arabidopsis thaliana columbia
  unsure (1)..(297): unsure at all n locations
gctgatattacagtccggtttgagccattggaagcagggtcaggatacgaattcaagagtgagatcaaaggaggagctgtgccaagagagtatattcctggtgtcatgaaaggacttgaggagtgtatgagcaccggtgtgcttgctggtttcccggttgttgatgtccgtgcttgtctagttgacggatcttaccatgacgtagactcaagcgtgctagctttccagcttgctgcaagaggagctntccgtgaagggatgaggaaagcgggtccgagaatgcttgaacctatcatg

SEQ ID NO: 160372 - DNA, 227 bp, Arabidopsis thaliana columbia
gtttgttgaactataagctaccaaggaggttgaggagagtcagtcaacaaatgctatcactgagcctgcaaatgaaagtgtagaggcggttattgtccctactgaagctaaaactacggtgacgaagccagcaagtgccataccaaacggacatgcgaaagtccctgaggagaaagttgtgaatgaaaacagtagcttacctaaagctgctgaagcaaaactttaag

SEQ ID NO: 160373 - DNA, 296 bp, Arabidopsis thaliana columbia
  unsure (1)..(296): unsure at all n locations
cttaagctttatttcttcgttttcgttttgtctttctttatcgtctcggtttcgtcgtctgatgtcaacgacggcgatgatctcgtgatccgtcaggtggttggtggagccgagcctcaagttttgacctcagaggatcacttttctctcttcaagcggaagttcgggaaggtctacgcttccaacgaggagcatgactatagattctcggttttcaaagcgaatctcaggcgagcgaggcgtcaccagaagttggatccgtcggcgactcatggtngtacgcagttctcagatct

SEQ ID NO: 160374 - DNA, 298 bp, Arabidopsis thaliana columbia
  unsure (1)..(298): unsure at all n locations
ataaactgtgagtaaaaaagagaagaaagaaaaatggtgctaaaggtgtacggacctcactttgcttcaccaaaaagagctttggtcacactgatcgaaaagggcgttgccttcgagaccatccccgtcgatctcatgaaaggggaacacaagcagcctgcttatctcgctctacagccttttggtactggtcctgctgttgttgacggtgactancaaaatcttcgagtcccgtgcggtgatgaggtacgtagctgagaagtacaggtcacaaggacctgatcttttggggaaaacc

SEQ ID NO: 160375 - DNA, 300 bp, Arabidopsis thaliana columbia
aagaagaagaagaggaacgatggggtacgtgtttagagtacgattggcttctttcttcgccggagctgcgactgcgtcttttatcggactctccgttctctacaaggattacaaagtcgctcacgaatcgatttctcagcaggcgaagtcttttcatgactctctggatagaaggatctctactcttgaaagcttgagacaaagtgaagctcctcagcttgctgagacaactgaatagtaatctgtctcgacattgaacactctctgcttggcaatgatgttttgagttgagatgctctt

SEQ ID NO: 160376 - DNA, 126 bp, Arabidopsis thaliana columbia
aacggacgagagagtaagtagtctgtgtcaccggcgccagtggctgcatcggctcgtggctggtccatcagctcctcctccgcggctactccgtccacgccaccgtgaaaaaacctccaggatgag

SEQ ID NO: 160377 - DNA, 297 bp, Arabidopsis thaliana columbia
gaagatcattggctttcatgggtctgccgggggcaatctgaattctcttggggcttactttgctccgttgactactacaactccgttgactcctgccaagcagctaacggcatttggtagtgatgacggaactgtatgggatgatggtgcttacgttggggttaagaaggtgtacgttggacaagcccaagatggaatctcagctgttaagtttgtgtacgacaaaagccctgaggaggtcacaggagaagaacatggaaagagtactctactcggattcgaagagttcgtacttga

SEQ ID NO: 160378 - DNA, 294 bp, Arabidopsis thaliana columbia
  unsure (1)..(294): unsure at all n locations
caaaaaaataaatattgagctcgagacctcagtttatcgaccaaacgtcgccgtttatgattctccggatggtgtggaggttcgaggacggtacgaccaaatcttcgccaagattttgacgagagaagctcttagctttggggctgagttacagaaagagtttcggggccatgtgaagtatgccatggagtgcccgagagaggcaagacngcgttataactccggtgccgttcctgggtttgatccttccactaagttcatcagagacggtgattggagctgtgcctccgtccc

SEQ ID NO: 160379 - DNA, 289 bp, Arabidopsis thaliana columbia
  unsure (1)..(289): unsure at all n locations
actttctacagcttaggaagagttctcgacaagctgattcttcgagttctcgacaagtttcagtgtttttgtttccgggtcacagagaacaaaggcaatttacaataatggcagagactaaacaaccactgatcggtcttaaatgggaaccaaagcttccaggcttatccttagacttgaaaactggttcaaccagaagcaaaacagctgagagttctaagtcagagctttgtgatggtctttgtctccacctaatgatcncaggaagattaacaggattattagaaaa

SEQ ID NO: 160380 - DNA, 295 bp, Arabidopsis thaliana columbia
aacaaaaccaacaaggaacttgtctctctctctggctctctttctcttaacgtgatcataacgtgattcgaaaattggatatagataggtttcttgttggatcttgatccctctggaaaaggaggggagaatagcagttcatgatgggattttgtatctgcccgttggagtcacctgcgagattactatggagtacaagcttcttccgccataagatcatgatcttctaatccttcctacttcttcccatcttttttaatcatcttctcgctatctctgcttcctctttctctct

SEQ ID NO: 160381 - DNA, 299 bp, Arabidopsis thaliana columbia
ggagaattaagatttttaactttaaacgagagtttcgtttatttactcaaaaatttacttctgaaatctctatttgaatttcggggaaaaaaatcctaagtaagggaatgcagagagatggtcggagtatcgccggtgaagactaagctgtgtgatcggtttaaccgatccgtcggcggcaggaattgccaccggaaacacgtcgaggacgggtgatccagttttctaaactctcgtctctcgaattcttcgaagatatcgaaaaactgtaaatcttttttttcttctacttttttaca

SEQ ID NO: 160382 - DNA, 298 bp, Arabidopsis thaliana columbia
gtttgatctagggttttagacagagctctctctccttccaaggtcaaaactgtgtgaagaagaaaaaatgtcgagggttttcggagcttgcaaggtactgatggcgaaggccgcttcttccaccggcgctaaaactggtagacaaggtactggcattcttaagggggttcccgtttcgaagccgctcgctaattttattggggaaaacgaagtctctcgcacaactgccgtcaagaaaatctgggaatatatcaagcttaacaatcttcagaatccggtgaacaaaagggagatacta

SEQ ID NO: 160383 - DNA, 297 bp, Arabidopsis thaliana columbia
gtttgaaatattgcattgttgctggtaaaaaagctcttgaaagtgccaatcttggtggtgataagcttaacacgattgataagaggaaagctggagtactagttgggactggaatgggaggtttaactgtgttttcagaaggtgttcagaatttgattgagaagggtcataggaggattagtccatttttttataccttatgctataacaaatatgggttctgctttgttggcgattgatcttggtcttatgggtcctaactattcgatttcaactgcttgtgctacttcgaattac

SEQ ID NO: 160384 - DNA, 301 bp, Arabidopsis thaliana columbia
  unsure (1)..(301): unsure at all n locations
ccaaaacaaaaagaaagaacaatggccaaagctcttagccttgcaatctttctctttctcttgatagcttccaatgtccaatccgctcgacttctcgatgaggttcaaactcagccacaattagtcccccaggtaccggaagaggaagatgatagtccacaagccgtaacaaccactccaacaccaattcctcttccaagacccgccacgggaggacccgagccaatcctagagttctttatgcatgacgtgctangcgggtcacacccatcagcacgtgtggttacagggatagtagcac

SEQ ID NO: 160385 - DNA, 302 bp, Arabidopsis thaliana columbia
gagaaaacgaaaactctagtttcagaggcatctccagacaccgaaaatggcggaaggactcgttttgaagggcaccatgcgtgcacacactgacatggtgacggcaatcgccaccccaatcgataacgcagacatcatcgtctcagcttcccgcgacaaatccatcattttgtggaaactcaccaaggacgacaaagcctacggtgtagctcagaggcgtctcactggtcactctcacttcgttgaggatgttgttctctcctccgatggacaattcgcgctttccggcagctgggacggcg

SEQ ID NO: 160386 - DNA, 297 bp, Arabidopsis thaliana columbia
aagaaccatctctgtacgagctggcttaatcgagccagatggtgggaaacttgtggatcttgttgtaccggaaccgagacggcgagagaagaaacacgaagcggcggatttgccgagagtgagattgacggcgattgatttgcaatggatgcatgtgttgagtgaaggttgggctagttctcttcgggggtttatgagggaatctgagttcctacaaactcttcatttcaatttgatgaatctcgatgatgggtctgttgttaatatgtctgtgcctatcgttcttgcgattgatga

SEQ ID NO: 160387 - DNA, 297 bp, Arabidopsis thaliana columbia
gaagaaactaaaaacaaaaatggcattgcaaaagtttcctctcatggggctgcttttgctcctaaccatcctcgtctctgtgacaacagcggttgatgatcctgtttgcccggcgacttccaagctaagccgagcaagtttccctaatgggtttttgtttggcacggctactgctgcgtttcaggtcgaaggtgcaattaatgaaacttgtcgtggaccggctctatgggatatctactgtagaagaaatccagagagatgtagtggcgaccacgccgatgtggccgttgatttctt

SEQ ID NO: 160388 - DNA, 297 bp, Arabidopsis thaliana columbia
attttctcaaactctaaaatcaatctctcaaatctctcagccgtgatcaagatgcagatcttcgttaagactctcaccggaaagactatcaccctcgaggtggaaagctctgacaccatcgacaacgttaaggccaagatccaggataaggaaggtattcctccggatcagcagaggcttatcttcgccggaaagcagttggaggatggccgcacgttggcggattacaatatccagaaggaatccaccctccacttggttctcaggctccgtggtggtatgcagattttcgttaaa

SEQ ID NO: 160389 - DNA, 300 bp, Arabidopsis thaliana columbia
cacaaactcatcaaacctctttctcatctcatcttcaagccatctccgatcatcatcagacaatggcagcagctatggcaacagcaaccaagtgcatgtctctaaacccatctcctcctaaactccaaaaccaaaccaaatccaaaccattcatctccctaccaaccccaccaaaaccaaacgtctctctcgccgtcacaagcaccgccctagccggagccgtcttctcttccctcagctactctgagccagctttagccatccaacagatcgctcagctcgctgcagcaaacgccagta

SEQ ID NO: 160390 - DNA, 298 bp, Arabidopsis thaliana columbia
gtggaatttccgcctgagaaccgccgtggacagctcttgggcaaataccagggcggaaaattggtgggatgccgcgccttcccgaaagggtaccacgggaggggcacaacgaccggtcaaagcgttgcgatcaaagtggtgagcaagcaacggctgcagaaaggaggactcaatggcaacattcagagagagatcgctatcatgcaccgtctgcgccacccttctatcgtgcgcctgttcgaggtcctcgccaccaaatccaagatcttcttcgtcatggaattcgccaagggcggtg

SEQ ID NO: 160391 - DNA, 298 bp, Arabidopsis thaliana columbia
aataaactcttcttctgcctcctctgcccatttctcccgatctctctctattttctcagtctctctctcagataatggcaatgttgggcttggttttatctgttcttactacaattcttgcattgtctgaagcaagaatcccaggagtttacaatggtggtggttgggaaactgctcacgccactttctacggtggctctgatgcttctggaacaatgggaggagcttgtggttatggtaacttatacagccaaggctatggtgtgaacacggcggctttaagcacggctctgttcaa

SEQ ID NO: 160392 - DNA, 301 bp, Arabidopsis thaliana columbia
  unsure (1)..(301): unsure at all n locations
ggtgttttgatcagtgtagagaatgcggcatacctgagagaggagcaagggctcgacgttgtcaaagcggttcttgatacactcacacagactggctacagcaatagtacagccacaaaggtcatgattcaatcaacaaacaactcggttctaggtgacttcaagaagcaaaaccagtacgagactgtctacaaaagtgaagaaaacatccgtgatattctcgactctgctattgaagacatanagaaattcgctgatgctgttgtgatccaaaaattatcagtctttcctgtcgctcagt

SEQ ID NO: 160393 - DNA, 299 bp, Arabidopsis thaliana columbia
ggaactgcgagatatgctagtatgaacactcacttgggaattgaacaaagtcgaagggatgatcttgagtctcttggttacatccttatgtatttcctcaaaggaagtcttccatggcaaggactgaaagctggaaccaaaaagcaaaagtatgaaaggattagtgaaaagaaagtttctacatccattgaggctttatgtcgtggttacccatccgaatttgcatcctatttccactactgtcggtcgcttcggtttgatgataaaccagattacgcttatctgaaaagaatatttcg

SEQ ID NO: 160394 - DNA, 299 bp, Arabidopsis thaliana columbia
ctttgagattctccgattgcatctcaaaaaatctcagctatggctacctcctccgcttggaagctcgatgaccaccccaagctccccaagggtaagaccatcgccgtaatcgtcttagatggttggggtgaatctgcccctgatcagtacaactgtatccacaacgctccaactccagccatggattctcttaaacatggagctcctgatacttggactttgatcaaagctcacggtactgctgtaggacttcctagtgaagatgatatgggaaacagtgaggttggtcataatgctct

SEQ ID NO: 160395 - DNA, 302 bp, Arabidopsis thaliana columbia
caggaagcaaatttgtttcagggagtaccaaaatgagtaagcttcagagtgaagccgtgagagaggcaataagctccattatcactcactgtaaggagacaaagccacgcaacttcactgagactattgaactccagattggtctcaagaactatgaccctcaaaaggacaagagatttagcggttctgtgaaattgcctcacgttcctaggccaaagatgaagatttgcatgcttggtgatgcccagcacgtcgaagaggctgagaagattggattggaatctatggatgttgaagctctt

SEQ ID NO: 160396 - DNA, 300 bp, Arabidopsis thaliana columbia
cagcaacatcattttttaatagacccaccaaggtgtgtgggattatgagggtggctggggcttatgcattggatgacatcataaatgattagaaagctacagaacccgcaggcatcactgactactgtcaccgctaaaccggacaaccaaactcttaacgcgaaaaggacaagctactaattgcttatgaccaacagcgaacacatgatcgacctaaaaggaaaatttacacgcatgtgcatgacgaccacatttaagaaacttaaaatacatcttagggatgaatggatgaaggaaaac

SEQ ID NO: 160397 - DNA, 296 bp, Arabidopsis thaliana columbia
gcgacgcttgcatcactcccatcagttctgatccattcttcaaatgtgtgcaatgcgagttcttccttcataaagtatgtgctagtcttccacggaggaaacgaaatatcatgcacaccgagaagcttgatctacaagttacgaaggctggcgagtataataagtgtatatcttgtagaaaaatatttgatggcttccggtactgttcaaggtttgaaaagtttgatgtgcggtgcggctccatttccgagccttttcaccatgaactgcatccccatcccttataccacattttg

SEQ ID NO: 160398 - DNA, 296 bp, Arabidopsis thaliana columbia
ccgtgcgataccctaaatttcaacgttgattccactttggcaagtttgtatctttcccactttgattccgatttgttaaagatttgcagattaaaagttttctttttgaagaaatccatgagtgcccaaatggaagaaccagagactctcggcaaaagaaaagaatctgaaagttcaaaacttcgttctgatgaaactccgacgccagaaccaagaacgaagcgtagaagtcttaaacgtgcttgtgtacatgaagttgctgttcctaatgattacacaccaacgaaagaagagac

SEQ ID NO: 160399 - DNA, 299 bp, Arabidopsis thaliana columbia
cggacgcgtgggatctggtcaagagaggaaagatgctgctgaacatactcttactgcttacaaagctgctcaggatattgctaattctgaattggctccaacgcatccgattcgtcttggtcttgcgttgaacttctctgtgttttactatgagattctcaattctccagatcgtgcttgtaatctcgctaagcaggcgtttgatgaagcaattgctgaattggatactcttggtgaagagtcatacaaggacagtactttgattatgcagcttcttcgtgataacctcactctctgga

SEQ ID NO: 160400 - DNA, 297 bp, Arabidopsis thaliana columbia
agccactcactctttcttctctctctctgaagcgatgtcatcgacgtttcgagctccggcgggagccgctactgtgtttacggcggatcagaagatcagacttgggaggctcgacgctctgagatcctctcattctgttttcttaagaagatattgacgcggcggcgtcccggttcctccttccgcttcttcgtcgagttcttcgcctattcaagccgtctccactcctgcgaagcctgagactgcgaccaagcggagcaaagtcggaattatcaaggagaagagtaatttcataag

SEQ ID NO: 160401 - DNA, 302 bp, Arabidopsis thaliana columbia
cactgagaagggaaaagatgggtgcaactgctccattttggcgattttcagcagcatcctatccagatctcaaggagcaagcgcctgttagtgttcttcgaagtagcaaaaaaggagccattgtccctcaaaaggaaacatcagcagggggagatgtttatcccgttgagccattttttgaccccaaggtacatcgtattctcgacgctcactggggacttctcactgacgaagatacgagtggactacggtcgcatactctatcattgcttgtaaatgatattccaggagttcttaatatt

SEQ ID NO: 160402 - DNA, 297 bp, Arabidopsis thaliana columbia
gtcaaaatgcacagagactaggaggtgcagcatcaggtgtttgtgatcaaaatgtatctgaaacagacaagatgtgtatgcagttgttccttgatattcaggagtatggccgaaacgtttctgctttggggctgaaaccggcggatattccggagtactgttccttctggcaatgcgttgcacctgcggataggcaaaactcaattagtgtttgaggacgctcgcttccatacatacatcattgtggtatcatatatctgataataagaaatcgctgcttcttcttttctatagctt

SEQ ID NO: 160403 - DNA, 303 bp, Arabidopsis thaliana columbia
ctccagaaaaggggtgaagcaaaaatggtttctctgaagctcgagaagcggctcgccgcatcagtgatgaagtgcgggaagggcaaagtttggctcgatcccaacgaaagctccgacatctccatggccaattcccgccaaaacatcaggaagcttgtgaaggatggtttcatcatcaggaagccaaccaagattcactctcgttccagagctcgcaaaatgaagattgccaagatgaagggtcgtcactctggatacggtaagaggaagggtacccgtgaagctaggttgccaacaaaggta

SEQ ID NO: 160404 - DNA, 335 bp, Arabidopsis thaliana columbia
caggttcccggaaggaccgggggggcccaccccttccgttaaattcggatttccaaccaaaaatggttttgcaaaacctgcccttattggggcggttttggttccggaccatgggggcttttccagcaaatgcaaatggccctgtttgcccccctccaaacaaactaagccgggcaagtttccctgaaggttttttatttggcacggttactgcggcataccaggtcgaaggtgcgattaatgaaacttgtcgtggaccagccttatgggacatctactgtagaagatatccagagaggttgcataacgataacggcgatgtggccgttgatttc

SEQ ID NO: 160405 - DNA, 301 bp, Arabidopsis thaliana columbia
acacgccaaaacatatttctagacaatagtcgaaaatggctgaaatctcggcgacttcgtttccttcttcttcttcctctgctctcgtcatccgtagctcccacaatggtagcttaaaatgtcagaatgtagctgttccaaaaactacttcccagttccaagagttatctctgaaacgaagccagcttgttggcaatgccgttgttaccggtcatgttaccggatcccgcagctgcaagaatcaagctattcgagctgttctatccggtgatggaaccgccttgactactgattcaaagga

SEQ ID NO: 160406 - DNA, 299 bp, Arabidopsis thaliana columbia
ctggcttacctcattacagctccagcaagtttctctgacgtggcagctcacccgttccatgcactgttctacatcgtcttcatgctcactgcttgtgctcttttctcaaagacatggattgaagtctctggatcttctgctagggatgtagctaagcagctaaaggaacaacaaatggtgatgccaggacacagagaatcaaacttacagaaggaactgaacagatacatcccaacagcagcagcttttggaggagtttgtatcggtgcacttaccgctttggctgatttcatgggagc

SEQ ID NO: 160407 - DNA, 296 bp, Arabidopsis thaliana columbia
aaaaaaagaggaatgtcaaatccacgattaagaagagtagctttgcacgcggcttcgtgatgagttcgtggagcaagagctttaccaggctcgtcaatggtgtttcgcttgtagcgaaagagatctataatcagtcaccggagttacaaagagcgagaaatggagatctcgaaggtttaataacgtcttcagggaaaaaagctttggttgccgccaccgacttagtcggacttacctccgggaagcttcgcgaactctcgattcgtcgatctaaggaaccttccgttgtttatttc

SEQ ID NO: 160408 - DNA, 298 bp, Arabidopsis thaliana columbia
cttcgattaggttaatcgtatctgggttccaccggactcaacccctaaaatcgccggtaaattctccgagcgtcttcatctccgtacctaaattcttcaactctgagtcaaaatcgacgggaactggttcaagatccgtagcaatgagcagcgttgagaaaaccgggtcggattctggagcaatagagaatcgagcgagcaggatgagagagaagcttcaaaaagagctcgaaccagtggagttagtgatcgaagatgtttcgtatcagcacgctggtcacgccggaatgaaaggtag

SEQ ID NO: 160409 - DNA, 363 bp, Arabidopsis thaliana columbia
atccggggccgcccacccgtccgccaaatcttttgttatattttcaagaaaatgtttcgttgggggatcattgcctcgaaggggggccgctttttccaaaaccaggggaggagtgcttaaaaagattggttaaggggttagttccagtaaaaaaaataatggaagtgcctaatgggaaagaagaaccagtgaaatggatggtttactggagaacctttttaatcgcggttgctgagcttttcggatccaacaatggaaaaaaggggatggttgcccacttccttttaagaaagaaaggaggaggattctttttatttttttccaatttttcaattaaaaattcaacaaatcccattttacttt

SEQ ID NO: 160410 - DNA, 392 bp, Arabidopsis thaliana columbia
gggccgaccacaggcgtccgttgagaataattccttcttcttcttcctaacttggttaataatcttcttctccgacctaaacaccgagggcaacaccaggggcttggtaagaaagagatgaattcgtttccatggcgaacctcgccgaccaggcaaggcgttccaaaaaaatggtggaattaatggagaaggtcccgaaagctgttgccaaaaacaaactaaccgccgaagaacgtaatttcctttccgtggtttccaaaaacgtaatcggagctcgtcgggcttcggggggaataatttaatcgatcgaccaaaagggggagtttggcggtaccgatgaccacgtttcgttgttccgggactccagaagcaaaatcgaaccggaccttttt

SEQ ID NO: 160411 - DNA, 391 bp, Arabidopsis thaliana columbia
ttttaaatccatcctaaatatctttcctcttttcgttttttctactaccagggaactttttggaagggcccaccgtattgggaggatggcaaaaaatgggtaacaaaacctaaccagaaccacttccaggtaaaatcctaattttcctaatcctaatacccccacccccttttttttttttccacataatagtttttccatttaccacggcccacaggttcgtcccgtcaaagagtccatattattttccaccaaggcttttttttgggtctatcaatccacctggttggttaaatccatttaaaccagccggccattttggtcaatccctttaaaaggaaataaaaattggaaggcattaggcttcaccgttccagttttgctgtttttc

SEQ ID NO: 160412 - DNA, 244 bp, Arabidopsis thaliana columbia
ggaaaggaaaaaatggcaagggggggaggaccaaataacctggattggagaagagaaccgggggccaggggattctttttcctctaccattcaaggtggcttaaaccctatgcttaagttggcaaagatcctttactcaagaggtttttggatcaccataatcaaaacccgcttaaacgcgcccaaattttaagaccatccttttttaactttttaacaaatccgggacggttggtttgaattt

SEQ ID NO: 160413 - DNA, 315 bp, Arabidopsis thaliana columbia
aaataccggggcggccccagccgtccgttcttttttaaatcctttcctttcatggtatttaaccaaagattccgattttggccacggggggtttccaacattcttccggggccggccaaacggttttaaagccttccagcgccctattccaaaaggggggctttttgggcggtggccggttgcccttccgttgtcccgccaggtttactcccaaaagcatttggtttggaccagaccgtcctaggtacttgggaccattttgggggaacacaccgtttaacttaactggggattccctcggagcctccggttggt

SEQ ID NO: 160414 - DNA, 311 bp, Arabidopsis thaliana columbia
aaacataaaaacacagggggaggctttaaacctggggggggggggcaaaattggcaccttcgggaccgtccttaccggaggtgtgcgttaaaaggttcgcccgtgaattcctccaggggggggaggaccgggacccttgttttccctgttgttttcggccaccacatccaaattgttcccgttcacgaaggcgaccatgactttaacgggtctatcaggggttggacctccccatgggttggaagggggggggtgttcagggtgggaatggggtttttctttttgcctaaaatttttccttattaggcctt

SEQ ID NO: 160415 - DNA, 199 bp, Arabidopsis thaliana columbia
gaaggtggggacctgaacagaaaggttctttttcttgcggaacctaatgtaaagaaggagtttcgttttgtacaagaaacggttgccaccattgcggtttttttttctcctaaatcagggttctataataatttgggggtggttggaaagcagttaatgcttgttgaacttccatgggtgggtaaggctcgaattgttt

SEQ ID NO: 160416 - DNA, 450 bp, Arabidopsis thaliana columbia
taaaaacattgttgttttttttttgcctaaattaacaactaatcggaggggttaattaaaagtttgggccggtttcttatatttaaacacctatacttaagtgttttaaacccatttgaagaaacctgatccttaaaaaccaaaatggttcctattttctttatttccatggaatctttaaattgctcaaatttcccccattggtagaatgctttttacccttcatttgaacgttacctcttaaggttttaaaattttgtggattttctttaatgccaaatccccaaatctctaattattattcatctaaatctgttttggatattaataagtttcccataattctttctttgatggttccctttttttattacatttatattttcttaatatcctttttttatatttcattaatttttttcatctttcaatttattttcctttttcttt

SEQ ID NO: 160417 - DNA, 437 bp, Arabidopsis thaliana columbia
gggaataccggggcggaccaacccgtccgaactaacaacgccggaaatggccgctatttataaccgccgttgttgttttttaaataatgggtccccggtgggtttccgcctttacttcaatttaaagccggttaacagcccggttcggttttgaacccaaaaaagcatttccaaaaagggttaaaacggttttttaaaaccggcttttatggttccaaggcccaaaataacccgattttttcgacggttaattggtgggggcctacggtttcgttcttttgggtttaggcaaaccggcggagtttttccaatccgattggaatcccttggtccagaacttatccaggaacttatccggggaattgttcggaatttgatctaaggcggtggtcccaaatttgccccctttttatccatataaggaattttcggggttt

SEQ ID NO: 160418 - DNA, 249 bp, Arabidopsis thaliana columbia
atttatccaggaaaatcgggtccgggggtttcatttcattttacagccacttaagggaaagcccggggttcaaatgttcccggagattttaaagtactttgggacctgtggtaaggacaggacccgtattggggattctttttttgtttggatgaaagttaacccttagttcttaaatgactggcaggccaagctctggtttggtttcttttgccttcgggtttatgggcacattgtacctaattgact

SEQ ID NO: 160419 - DNA, 361 bp, Arabidopsis thaliana columbia
cggacccttggggcttatttcgaccgtgtctatttttccttaaagggtttcgccaagttttgaagggattcaattgtggaagaccgggagcaccttaagttgttgttggagtttaaaaccaaacgtggggggggggtaaggttccagcccatggggtggcctaagcttgggttggatcatcctgggaagggagatgctttttatgctttggagtgggtcttttattggtggaaacttgtcattgaaagtgttctaaactttcccagtgtggttttaaataactttattgtcaaattgtcagatttttttgaaggtgtgttttttaatcaatcttgttgtttcttttttatattattcttat

SEQ ID NO: 160420 - DNA, 328 bp, Arabidopsis thaliana columbia
ccgccgtccaaaaagttaactttgtaataattctccctttatttttctccctctggcctaccaaatcttccgctccttttaaaaagcagggcgcctatttccttccttttcaatttaactttttccaaatcttgggccaccacctcttaataaaaccgccggttaaccgttttttccaccgcttttccaatttccatgccccaattttttacctccacttggtttccccccggcccgtcgtatttttttcttcctccttgccaaaaaaatccttaacagttaaaaacaatgtctattgttaaaaccgccctctttttttaacctccaa

SEQ ID NO: 160421 - DNA, 359 bp, Arabidopsis thaliana columbia
agaccaccaaccaaccactaatttttccacatttggggggaaaaaaccagagcaggttttttggggatttaatggcaatggcggcttccgaagctttcctaagggggctgggtttttcgttcctaaccggaggcaagagaggtgccaccgaattggcaagcggggtaggcactggagctcaaagggttggcaggaaaactcttatggtcgctgttgcggctgttaagcctaagaaatctgggacccctgccctaaaagggggtggaaaattctttgtccttaaatggttcgatggttctgttccagaggatatggggtttgcccccagcgtatagtgttaaaatctcttttttttctaa

SEQ ID NO: 160422 - DNA, 420 bp, Arabidopsis thaliana columbia
cggggcggccccacccttccgttaacacatgtcggaccctaaggcctgttataaacccgccaactttaaacccggttgggggggctgttaattttgggaggcgggttgtccttaatccttacttttccggttttgccaattcaaacttttgcttcctcctaatttctaatattttgggttttaaacttccaaactaaaggccccttgcggccaagtttgaagtttctgaatctaatgtgggggttcctgattactttgggggaaacccttataatcctttaaaccagaacagacccatccttttttgaatcaaaaaccatggttgtaataaggctctttaaaccactaatccagtctttgaaaccataaagaccaaaggcttacctgcctttgtaccccaaggttatttttgggttccaa

SEQ ID NO: 160423 - DNA, 434 bp, Arabidopsis thaliana columbia
gaagaaaagagttggggaacaaagaaaagggtagatcaggcactggggtttttttaattggcctcctttgttaaaacagttggccggatttttggttaaaaaccagttgcgtttgcttaacaaaaaaagagttctttggtggttaaagttgttgcaactccacctgtaaggcagggggccaccagaccatgggggttggtttaatcgaaaagtttttttaatttggatggcagttaacctggggactatggattcgaccctttgggtttttaaaacccagaaggtcctgggggtttaatggagccaagatggttggcttacggggggatcataaacggccggttcgccttgttgggggcagttgaggcttttgttcttgagattttaggaaaggttggtttgtttccagcaaaaactgcttttctttggttcca

SEQ ID NO: 160424 - DNA, 76 bp, Arabidopsis thaliana columbia
aaaaaacattagtcctatttctttcgaagcttgtccggcgaatccaccaggtcgtttcagcggggtcctaaggaaa

SEQ ID NO: 160425 - DNA, 130 bp, Arabidopsis thaliana columbia
gcagatcttctgctatagtttcaagaaaatttatctattgtggatcattggctcgtaagctgggggggattatgcaaaaacaggtgaagagtgtctaaaaagaatggataaggagatagtagcagtaaaa

SEQ ID NO: 160426 - DNA, 162 bp, Arabidopsis thaliana columbia
  unsure (1)..(162): unsure at all n locations
ccacgcggccgctgagaatcatttcttcttcttcttcctcactttttttatcancttcttcttcgatctaaacaagggtgtttacaccaggagcgtggttagcaagagatgaattcgtttacatgttgaaacttgccgtacaagcagagcgtttctaataaa

SEQ ID NO: 160427 - DNA, 206 bp, Arabidopsis thaliana columbia
cgggccggccggcgcgttctatcgtaccatgtctccactctaatatcagcttttttgttcggccttcccccactacaccaagaggtttatttacctgcgccaggtgtttttcacacatatttccctcattattgtctatcttattctccatgttatacgtaagatgattttttatccagattacctaatattttatatggttctat

SEQ ID NO: 160428 - DNA, 455 bp, Arabidopsis thaliana columbia
ctctcaatacattcttaatatctctcctccactcgctctttctactaccatggaactttctggaaaggaccaccgtcatgtgatgattgcagaagatgggtcacaaaacctcaacagaaacacttccaagtcaaatcctaatcttccttatccttataaccccaacccctcttctctctatacacataatagtttctacatctaccacggtccacaagttcgtaccgtcaaagagtccataatatcttccaccaatgcttcttttttggtctatcaatccaactagttagttcaatccatttaaaacagccggtcattttggtcaatcactctaaaaagaaataaaaaatagaaagcaataagcatcaacgttccagttatgctgattttcgtagctaagggatgaagtatggtgtgtctcttttgcagctttttatttatttagatatgtgtga

SEQ ID NO: 160429 - DNA, 245 bp, Arabidopsis thaliana columbia
cgacccacgcgtcgaaaaaaaaggagagagagagagagagagagttttttataccaataaaaaaacgaagcgggaacatttcggttctcgggagtaactcaaatatggcaccaacctcattcttggatgaagccttgggtagaaaaaaagtccagatcaagcgaatcgtgaacaaaattagtctttcaagttactttttacaatcgacgcaatggtctcatcgagaaagcccgtcaactatcaaa

SEQ ID NO: 160430 - DNA, 271 bp, Arabidopsis thaliana columbia
tagaaaagaaaaaattgcaaattagaggaagatcttttttatacttgaatgtgagaacaaaaacggcggacattttattctttgtgcgtgtaccatcacaaggtagcataaaccctatgcttcatctagcaaagattctttactcaagatttttttttttcaccattattctcactcttctttaacgtcttccatatttttataccatctctctttatactattattacaaatttctttactttcttttcattatatttcatatctaaatt

SEQ ID NO: 160431 - DNA, 305 bp, Arabidopsis thaliana columbia
  unsure (1)..(305): unsure at all n locations
actctctcttcaatcctttcctttcattgtatttatattcaaagattacgantattttccacagcgccggtctaacaatcctgctgggccgaccaaacaactctcaatccctccagctaccttattcataatgttgtcttctttttcttttatctcttctatctatactttatcttcttttaatttttattcctatatcatttttttttttctctctattctctctatttcctttttttcatttttatacatttctctctttaatttcctcatttttacattattatctttttctctttttttct

SEQ ID NO: 160432 - DNA, 426 bp, Arabidopsis thaliana columbia
  unsure (1)..(426): unsure at all n locations
gggccgaccacgcgtccgcaatttactctctttaaatgtaaattcgnaagttcnattaagaagcagaagatggcccaaaaggtggatgcacaaggagggaaaggagccaacctatgggacgatggatcgacacatgacgccgtgaccaagattcagctcgcagcaggcatagacggaattcaatatgttcagtttgattatgtcaagaacggacaacccgaacaagctcctcttcgtggtaccaaaggccgtgttctcccagctgatccgtttgtgattaaccatccagacgaacatctagtttctgtagaaggttggtatagccctgaaggtatcattcaaggaattaagttcatctccaacaagaagacttctgatgtcattggatccgatgagggtactcactttactttacaagtttaagac

SEQ ID NO: 160433 - DNA, 367 bp, Arabidopsis thaliana columbia
tcattcgcacatatcattaaatacatttttggtctattgtattctctaaatatacaacttatcagggtgcgatactttaatcttttgcgcgatttcttttatctcaactactatactttattgttatcaaaccatatttagaaaccttatcctataaaaccaatattgattcaatattctcttattacatgttattttaataattcgcataattactccattttttataatcttctttctctctcttttaacttttatcttcaattttttattttacttttcatcttttcttttattttattttatttatagttggggggtgtgttttttattttttactaattatttacttatctctatttatttt

SEQ ID NO: 160434 - DNA, 456 bp, Arabidopsis thaliana columbia
caaaatgtttaactatgtgattattcttcctttagctctcttcctcttggcttacaaatggggctttacatctaaaaagcagcgttactatctccctccctctccatcttactctctcccaatcctcggccaccacctcctcatcaaaccgccggttcaccgtttcttccaccgcctttccaatatccatggcccaatcttctacctccgacttggttcccgccgtgccgtcgtcatatcttcctcctcgctggcaagagaatgcttcacaggtcaaaacgatgtcattgtatcaaaccgccctcggtgtgtaacctccaaatacattgcttacaactacacaaccatcgcaacaacatcttacggtgaccactggcgtaaccctcgccgcatttgcttccttgaaatcgtctcctcaaaacgtttcgccaactttcttcacatccgcaaagaggg

SEQ ID NO: 160435 - DNA, 452 bp, Arabidopsis thaliana columbia
gaagaaaagagttgaggaacagagaaaatgtcttcacaagcacttgtgtcttcttcacttagctgctctgttcagacagctggacagatatttggctcaaaaccagttgcgtctgcctcacagaagaagagttcctttgttgttaaagctgctgcaactccacctgtcaagcaaggagccaacagaccattgtggtttgcttcatcgcagagtctctcttacttggatggcagcttacctggtgactatggattcgaccctcttggtctttcagacccagaaggtactggaggattcattgagccaagagggctagcatactgagagatcatcaacggacggttcgccatgttgggtgcagctggagctattgctcctgagattttaggaaaggctggtctgattccagcagagactgctttttcttgggttcaaaccggtgtgatttcacc

SEQ ID NO: 160436 - DNA, 350 bp, Arabidopsis thaliana columbia
tcgcaacgtaaaacactaactaatagatcattatttctggagtgatgaagttggcatgcgggggggtttcttgcatgattggggccggtccaatcacatataactctcttatgagttgtgtcaccttcaacttcaactctttattgttcattgtctattttacctcgatgtgctttactttcccaagtttgctgtattttatctactttctttataattcatttcttttcatccttatattttattaattctttatttttttttttttattttctctctattcttcttattattttttatttttttatctgtgggggggatgtttttatttttatttatttttttatatt

SEQ ID NO: 160437 - DNA, 362 bp, Arabidopsis thaliana columbia
attggatgtgatatactcaaatataaaaagattgacttcattccttacctcaataaatcgggggcagatttatgtagaacatgtctagttaaagcaaagttgtacaaaagaggatacaaaccaagcttggaagaatatatgcaaaatgcttggatttcaatttctgccccaacaatattgatccacttttactgcgttttctctgaccaaatctcagttcaaaacttagagactttgtctcaacaccgacaacacatctttcgatgctcagccaccgttcttcgtttagctaacgacctttgaacttcgccaactgaattgaccagaggagactttctcaaatcggtccaattttacattca

SEQ ID NO: 160438 - DNA, 400 bp, Arabidopsis thaliana columbia
  unsure (1)..(400): unsure at all n locations
ggagagagaagagtataataagactctcttttagcaaaacagaggatnttcattgtgtgtgcttttttaattattacggacccatcacctcgnntgcctctacttcgacaatgttctgaaacaaagaagaagaggatcctcgtattcatggaatcaaaactaagatccgtgtctctccatattttcccaagaaaggaattttgtttcaagacattacaacagtgttgtttgatcctaatgccctcaaagacacaattgatctttttgttgagaggttcagagacaataacatctcagtggttgcagggaaagaatcttctttgattcctattctgtccacccatcttcctatccatttgagccaaaattttttcctcttcgcaaacccaaaaaacttcct

SEQ ID NO: 160439 - DNA, 280 bp, Arabidopsis thaliana columbia
  unsure (1)..(280): unsure at all n locations
cacgcgtccgaaaagatggcctcggcgatggttacatcgcttatttttatgccaaacttctccncaaccacggcacgctactactattcttccgccgggaatgtcaaataccgacccgccgtaattctcccgggtttagggaataatacaggagactacaagaagctggaggtaacattgggtgaatacgangttcctgctgtggttgcagctgtatcaaggcttgattggtttagaaatgcaccccggttggttgatccaacctactggcgtggcacgc

SEQ ID NO: 160440 - DNA, 219 bp, Arabidopsis thaliana columbia
  unsure (1)..(219): unsure at all n locations
tcaaccaanacaanaacaantacaatactcctaantatcnttttcttttcctttttaccaacaaatacatattttcacatattctatcttcaaacattccttntcacattnttaaaacttcttcttacccacatnaactaccttactataatctcactttttntcttacaaactattcttcaacttactttacttcccttcttttttcttcccctcttt

SEQ ID NO: 160441 - DNA, 410 bp, Arabidopsis thaliana columbia
  unsure (1)..(410): unsure at all n locations
cccgcgtacaatcgatctaaaacactgaatcaaacatttcttttattaaaaaaaaaaanaaaaaaacccgccggaaaattacaaatcttcgtttcgcctcctataatcantanttttnttttttctcctctccccatcatcatccactaatatcttattctatgactcaaacccaatcctaattgtctccgatggtcttcccaacctaaaaaaatctcttacccacatcttatctcaatctcgccaccccctctctttcgctctctttactcacctttatttttaaaacaaccataacttctttttttttaaccttcccttctccacnntcaaccacaatctttatttcatcacatccaccaacactaaattcttatcttacctactctttcttaatcaattttcttatt

SEQ ID NO: 160442 - DNA, 353 bp, Arabidopsis thaliana columbia
  unsure (1)..(353): unsure at all n locations
gcgtacgatcactactctaaaagaatcttcatcatggtctcagttacctcagccaccgntgcaatcccgtcttttaccaaacttaaacccgccgccgtcaaancatccnccaccntcagaatccaaactgctgctgttgcatcaccgaagcttacagtgaagtcatctctaaagaacttcggagtcgcggccgtagcggctgcagcttcaattgctttggccggaaacgccatggcaatagaagttctcttgggaggaggggatgggtcgttagcttacattcccaacgacttctctatatctaaaggagatgggttggtgtgcaagaacaactcttgatacccacacaatgt

SEQ ID NO: 160443 - DNA, 385 bp, Arabidopsis thaliana columbia
  unsure (1)..(385): unsure at all n locations
tcccaancggcccacgcgtccggtaaagaagaacaatggcttcctctatgctctttttctctactatggntgcctctcccgctgtggccactataaacgctcctgtcaacccacttaaatcctccccttcctttccacccaccctcaaatctaacaaccacattacttccatcacaagcaacggcggaagagttaactgcatgcangtgtggcctccgattggaaagaagaagtttgagactctctcttaccttcctgaccttaccgattccgaattggctaaggaagttgactaccttatccgcaacaagtggattccttgtgttgaattcgagtttgagcacggatttgtgtaccgtgagcacggtaacttcacccgatacta

SEQ ID NO: 160444 - DNA, 99 bp, Arabidopsis thaliana columbia
tgatattataattttcatagataaaagcgatcttttatgtagctgaaaggaattttgaaaaatttaaccgattctttcgtttacttgggtcactggcca

SEQ ID NO: 160445 - DNA, 424 bp, Arabidopsis thaliana columbia
agttgctaaacctggtgctatcattgttctttatacgtggcactaagttccatgctgggagggatatttttattggtcgggctgctaccatcttctctttaatcgatggattagtcaagttcgagaagtttggtcctgacaggaagaagataagtgtgtatccaagataaattgtaccagagaatcccaatagctacagagcaagaaagagagaaaacttcatattgcaaagggagaagaagaaggcgagacgcgagaattactcttacacacttcctacaccagaacttgttcttgcatctgtctcagtcgatgatgcttaagccaatcccgaatgctagaagaatgaatgttgagtttcctttgctttttttgtttaatcttttttattaaaaattattcctttcaagtattaaaatttgtt

SEQ ID NO: 160446 - DNA, 405 bp, Arabidopsis thaliana columbia
  unsure (1)..(405): unsure at all n locations
aaaaaccggccggcccacgcgtcccaaaagagaagagaaacaacaagaatttttttttcttcctctatactctcctccgccgcggtaaatacaaacaccgggtccggccaccannnncnctccattcaccnncttgaantcatccccttcattccctntcacccncaagaccaacaaggacatcacttccatctcaagcaacgggggaagagttagctgcatgaaagtgtggccaccaatttgaaagaagaagtttgagactctatcttacctccctgaccttagtgacgtcgaatttgctaaagaagtttactaccttctccgcaacaagtggattccttttgtttaattccaattaaagcaccgatttttgtaccgtgagcacggaaacacttccggatacta

SEQ ID NO: 160447 - DNA, 287 bp, Arabidopsis thaliana columbia
  unsure (1)..(287): unsure at all n locations
agtcgaatatcccaaattcgatccgttttctttcgataatctccgatctagatnccatgtgtaaagaaccaaatcgtgtgctgtttactgaagctgcaggacaaatcggatatgctcttgtacctatgattgcaaggggtatcatgcttggtgctgaccaacctgttatcctccacatgttggatattcctccagctgctgaagctttgaacggtgttaagatggagttgatcgatgctgctttccctcttcttaaaggtgttgttgctacaactgatgcctttgag

SEQ ID NO: 160448 - DNA, 282 bp, Arabidopsis thaliana columbia
  unsure (1)..(282): unsure at all n locations
aaacccgggccggcccacgcgtccgctttggtggcaaacacaacnacagaatgatattaacgatggcgtcnaactcncttgtgagcgttacataaacgacttgttcgctgcgcttntntcttcttccaagtctaaattcgtatccgcctgagttccactcccaaactccgggaatgttggtcctatcacaatttctgctcactcgatgccttgcgatccacaaccagcttaccttgactgttctgctcctcctgactctctcttttacccactttaacttta

SEQ ID NO: 160449 - DNA, 299 bp, Arabidopsis thaliana columbia
  unsure (1)..(299): unsure at all n locations
tcaacaaaccctatattcctttacttcttctcctactcaatccnatcatctatctcactcccactctacttcctctactacttcaacttcttcttcctcanatccatcactcttcaactctctctccttaatttttctcaactcccnaactcctaatttctttcctttttcaactactccctctcttcctcaacctttcttttattattattccccctccttctctctacctttttccttattttttttatctccaacctccttttaatactctcattttttttcctttttcatttttt

SEQ ID NO: 160450 - DNA, 344 bp, Arabidopsis thaliana columbia
acttggtgcaatgggggcaacaacacaaatttatatttataaattctcagcagcaatagcttgtcagcgcaacaaagcaaagctgttgcgtctatcaatcttcagccttttcttcttcgatttcacaagtttcatcatctcgcttatgcagaaaattgtatcatgtgcacaagaggacaggttacaaatcatatgtaagttgcggaacaatgttctaggatcaccaaaagctaatcccagatggatatgaggtctggagatagagaattcccaaatggtgatttctattcttgggaagtgaaaggaataattcctaatgggaagggaaagtatgcatggtcaga

SEQ ID NO: 160451 - DNA, 437 bp, Arabidopsis thaliana columbia
tgaaggtgtggccaccaattggaaagaagatttttgttactctatcttacctccctgacctgagtggcgtcaaattggctagggggggggactaccttctccgcaacaagtggattccttgtgttgaattcgagttagagcacggatttgtgtaccgtgagcacggaaacactcccggatactacgatggacggtactggacaatgtggaaacttccattgttcggatgcaccgactccgctcaagtgttgaaaggagttgaaaaattcaagaaagaatacccgggcgccttcattaggatcatcggattcgacaacaccccgtaagtccattgcatcagtttcattgcctacaagcccccaagcttcaccgaagcttaatttcttttctaaaacattcttatgaattatctctgctcatttcatttcctattgtct

SEQ ID NO: 160452 - DNA, 364 bp, Arabidopsis thaliana columbia
  unsure (1)..(364): unsure at all n locations
gcggccggagagagagtgactccattgntgttgtgtgttcacttaactcctcctcaaacaacaatggggacggcggttacactcaggtggtcgccgnacttcgtcaatcatcaacggagcaaacaaacttcgtctctcatgtaccgtcatcactttctctccctcaacgacggacctctctccgagtaaccgcagccagagccactcccaaactctccaaccgtaaactccgtgtcgccgtcatcggtggtggaccaacaagccgggcaacttcaaaaactttatcacaaggaggaatctagacgattcttattgagcgtaaaattgacaatttcaagccttgcggtggcgcgattcctttttt

SEQ ID NO: 160453 - DNA, 320 bp, Arabidopsis thaliana columbia
  unsure (1)..(320): unsure at all n locations
gtcccgcccacgcgtccggctctaatcaccaggagtaaaaatggcggtttcttttcttacgaagaaggtggtgaanaaggggggtgccaaattcatcagggcccggggtgatcgcanaatcaccgtcaaggaaagctggaggaggcctaaaggtattgactccccggtgagaaaaaagttcaagggtgtcaccttgattcccaatgttggttacggatctgataagaagaccccgcccttccttcccaattgatttaaaaaagttatttgttacaacaacttttaacttcaacttcttattaatcacaacaagacttact

SEQ ID NO: 160454 - DNA, 401 bp, Arabidopsis thaliana columbia
  unsure (1)..(401): unsure at all n locations
cacaactccaccacgagagtaaaaaaaaaacttttttttacaaatctaaatggcnanaattgcgcgcaacacaaacactcgcgcgccctntcctactccaatctcaacccnccntcaccccttcctcnntctctcacctccacacatcccttcccactctctctccctccacatcacctacttcctacaccaaacctcttcctcctttcaccctcccttcttcttcttntctttttaaaaccacccaattttttatcttcaacctccattatcttattaactttactcatacccnatctatctttcctattaccttttatctctctttcttccccatcaaaattattcatactccttcttctccctactatctctatctattcccaataatctttaaacct

SEQ ID NO: 160455 - DNA, 432 bp, Arabidopsis thaliana columbia
  unsure (1)..(432): unsure at all n locations
cgcagttccgttcatttcgcgacgagtcttttctcatttcactccatttctgnncttcgcggtgggttacctataaagatttgggcgggtgcttcccccaattctcaaaagcttcattcttttaccgttttcgctcataagggctacaagatgaagacccacaaggcctcatcgaagcggttcagagtgacgggtagagggaagattgtgaggaggagatctggaaagcagcatttgttagctaagaagaacaacaagaggaaattacgtctatcgaaaatgacggaagtgaaccggagcgactatgacaacgtgatcggagctctgccctacttgaaagtcaatcgaaaggcgacttaagcagaacaagcttgatccttttcttacctgcaattctcattttgtaatctaaaattgtggtaatatcctttt

SEQ ID NO: 160456 - DNA, 440 bp, Arabidopsis thaliana columbia
  unsure (1)..(440): unsure at all n locations
ggcagaganacagagctcatgttaacgcgtgtttctttatgaggatcttaacacgacntgcggcggggttacaaaaagatggcgtcggggcatcnnnnaacctaacaataaccgccgtggagcacaattacttcaccgtgaagaagctgatcaagaagaggaaaggactgactcctcgcgagaagacggcgcttcatgactgtttggagactattgatgagacgctggacgagctccatgaaaccgtggaagatctccatttgtatccaaccaaaaaaactctccgggaacacgccggagatctcaaaacactaattagctccgccattaccaaccaggagacttgtctcgacggcttctctcatgacgacgccgataagcaagttcgtaaagccttgttgaaggggcagatacacgtagagcacatgtgcagcaacgct

SEQ ID NO: 160457 - DNA, 292 bp, Arabidopsis thaliana columbia
  unsure (1)..(292): unsure at all n locations
gtgaaacaaaaatggcgtctacgactctcttaatttcaacaacaatccgnccncaactcgtncgactataaatacgtctgtctcggcccttcccnaaccaccaccatcgaattcccctctcgcttcggtggtggttcatcatccacattgacccaccgtgcaacccattttcttccaatcgccgccgtcgaagctccggagaaaatcgagaagatcggatccgaaatctcatccctaaccctcgaagaagctcgtatcctcgtctactatctccaagacaaattcggtgtct

SEQ ID NO: 160458 - DNA, 297 bp, Arabidopsis thaliana columbia
  unsure (1)..(297): unsure at all n locations
aaacaaaaatggcgtctacgactctcttaatctcaacaacaatccgttcctcaactcgtcctactataaataacatcccgcacggccctncccnaaccaccaccatcgaattcccctctcgcttcggtggtggttcatcatccacattgacccaccgtgcaacccatcttcttccaatcgccgccgtcgaagctccggagaaaatcgagaagatcggatccgaaatctcatccctaaccctcgaagaagctcttatcctcgtctactatctccaatacaaattctttgtctccccac

SEQ ID NO: 160459 - DNA, 434 bp, Arabidopsis thaliana columbia
caacaaatcttaaacgttttactttgtgctgcactactcaacctcaatggccgcctcaacaggggcgtctctcctcccctgcctgcgcgggtaaggccgtcaagctttcccccgcggcatctgaagtccttggaagcggccgtgtgacaatgaggaagactgttgccaagccaaagggcccatcaggcagcccatggtacggatctgaccgtgtcaagtacttgggtccattctctggcgaatcaccgagctaccttaccggagagttccccggagactacggatgggacaccgccggactttcagctgaccccgagacattcgcaaggaaccgtgaactagaagttatccacagcaggtgggccatgctcggagccctaggctgcgtcttccctgagcttttggctagaaacggagtcaagttcggagaggcg

SEQ ID NO: 160460 - DNA, 448 bp, Arabidopsis thaliana columbia
cccacgccgccggattctttccgaggctttgaagcctcaatatgctatgtgcttctactttcacgtctcttcctcgttcagccatcatacgattcacgggctcgctccttctcgactagcctccgcctccgcctcttctccgtcgtgcatttcacttcccacacttccgattcagtctcatacccgtgccgctaaagccactgcttactgtcggaagattgtgaggaacgttgtgacgagagctactactgaagttggtgaagctcctgccactactaccgaagctgagactactgagttacctgaaatcgtcaagactgctcaagaagcttgggagaaagtggatgacaagtacgctattggttctcttgcctttgctggtgtagtggctctttggggttctgctggaatgatttcggcaatcgataggcttccattggttcctggt

SEQ ID NO: 160461 - DNA, 422 bp, Arabidopsis thaliana columbia
gcagcagccaccacccggaggtatccttccacatcacgctcctcctccttctgcgcaacaggagtacggttaccaacaggctggcgggattgctggagctgctccaccaccaccacagatgtggaatcctcaagcggcggcgccgccatcagttcagcctacgaccgctgacgagatccggactctttggatcggggacttacagtattggatggatgagaatttcctctacggttgctttgctcataccggagagatggtttctgctaaagtgattcgtaacaagcaaaccggtcaagttgaaggatacggtttcattgaattcgcatctcatgctgctgctgaaagagttctacaaacattcaacaacgctcctatcccgagctttcctgatcagctctttagactgaactgggcattat

SEQ ID NO: 160462 - DNA, 438 bp, Arabidopsis thaliana columbia
gctacgtgaaagtgagtatggacggagctccttaccttcgcaagatcgatctcaagacatacaaaggctaccccgagcttctggaagggttagagaatatgttcaaagtcatgattggtgaatattgtgagagagaaggatacaaaggatctggatttgtaccaacatacgaagataaagatggtgactggatgttggttggtgatgttccatgggacatgttctcttcttcttgtaagagactcagaatcatgaagggatccgacgctcctgctctagactcttccttatgatccagagaagctgagaatcttttgtctaaaaaggagatgatgactatgatcgatgaatgaaaaaccctttttggtttgattcggatcggagtttgactaaagttgaccgtgaaagacgaaacttcggggttttgtccgacgagag

SEQ ID NO: 160463 - DNA, 413 bp, Arabidopsis thaliana columbia
  unsure (1)..(413): unsure at all n locations
ccataaccaaaccatcatcattattttttctngacgacagaaaaaaancgtggcggaacaattaaaatggcggcacgggcacttaaatcttcttcacttacctcctctgttcagacagctagacagatatttggctcaaaaccagttgcgtctgcctcacataagaagagttcctttgttgttaaagctgctgcaactccacctgtcaagcaaggagccaacagaccattgtggtttgcttcatcgcagagtctctcttacttggatggcagcttacctggtgactatggattcgaccctcttggtctttcagacccagaaggtactggaggattcattgagccaagatggctagcatactgagagatcatcaacggacttttcgccatgttgaatgcaccttgagctatttc

SEQ ID NO: 160464 - DNA, 337 bp, Arabidopsis thaliana columbia
  unsure (1)..(337): unsure at all n locations
catacaactaagttaatttaaagaaatcttttatgaaattctttataaaaaaagaacgaatgggttatgttgtattgtggtcgggttttccattccctaanaatgaagtatcggtgttgagattgcattattaggttaatgcaactctcataactttgaaaaaggttaagaaggatgaactttttcttttatcagagaaaaaggttgttctcttgttcttcggatatactctttctaaacaaaaaaaaaattgtgggaggtttgaaattttaacttctttcttgattttttaatgcatgtatatgttgtgtggggggaaaaaaattccatttgttct

SEQ ID NO: 160465 - DNA, 447 bp, Arabidopsis thaliana columbia
  unsure (1)..(447): unsure at all n locations
aaaaaccgggccggcccacgcgaaacaaaactaaactcactctctttctctctctatttacaaagctcaacaataataanccggtccggaagattttataagctggtcggctccnnaaatttacttacttaacaatcatggcgtcntcngagggattagcaagcgttgatccttggtcattccgtcaaaacttcaacatcgattcgtggctactctctgattccttctcacacgacagtgatatactcgctaaagctcttcacagatccatctccacttccaccgaatcatctcctctttctccttcatctttcttcgactcttcaaccgccgccgtcgatttttctcctcctcaaactctctccaacgtctctttcggctcagatccagaaatccccgccgctagtgctcttggtctcgggaaacgaaaacgtggtcctggtgttt

SEQ ID NO: 160466 - DNA, 169 bp, Arabidopsis thaliana columbia
  unsure (1)..(169): unsure at all n locations
ttatcnattgctaantgtggataacgatgaactggttacctcaccttgtttgaaagaacgtaactacttgggtctctctgattggtcctctgatgatagctcaactattcccaatgttgttgcgaagagcaatctcaatttcaaagctactgaactgaagctaggtctt

SEQ ID NO: 160467 - DNA, 434 bp, Arabidopsis thaliana columbia
  unsure (1)..(434): unsure at all n locations
gcgtccggntgcacaacaacacaaacatttatcgaaaattatttttatcatgactcatcttncgntttggctggacaaatttctctgtgaggtgggttacagtagagggaagagaactcttgtgtattgccataactcttccaaaactcttttttctttttgttattgttagtcattgttcttaaaactcctactcgatatgagctttgcaaatttgcctttgaagaaacaaggccctttgcctttgaagagacaaaaaaaaaaaaaaatattatataaaaaaaaaaaaaaaaaataaaaaaaaattaagttttttgttttgtggttaaaaaaaaaaaaaaaaaaaaaataaaaaaaaaatgtaattatatattattaatatataatttaattatattatttattttataataaaaaagggggtctttttttaa

SEQ ID NO: 160468 - DNA, 164 bp, Arabidopsis thaliana columbia
  unsure (1)..(164): unsure at all n locations
aaatgtttatcatatcacanctnctcttcaaacacgtacttcatcccacaagaaatctttttaccccntccaaaccattaaacancgcttcatcaaattcaagaaggataaatactaaaccaacccttctttttaccttcagcttccaaaacttcaaaatccta

SEQ ID NO: 160469 - DNA, 141 bp, Arabidopsis thaliana columbia
  unsure (1)..(141): unsure at all n locations
aagacnnnngcaacnncaaangnggagcagancacaacggcncnncagacagggacggcaaccgacaagaaagcnnncgacccccacgaaaccaaaaagcagggcnncaacaaaagcaagaaggagaaacacgaaaccaac

SEQ ID NO: 160470 - DNA, 365 bp, Arabidopsis thaliana columbia
attcttttgtttttaatttccaattggttttgtttaattaacaaataacaatcctcttttggttttggtttttctttgggacccaaggtttttttaaatttgtaaataaacaagggccgccaccattgagaatttccttaaactaaaatccgccgccgatggccttactgggataagtgaaagtgaaaaaagcggattaataagccgggtttaacgttacctgagcgggggggcccaccacattggggggggtaggatccaaactcctaccgttgaaatcgtggttccttacaggaaaatgacccctgtttccaaggaggtggccgggcccaaaattttgtgggccaaacttgtggggttgaagc

SEQ ID NO: 160471 - DNA, 329 bp, Arabidopsis thaliana columbia
ttcgatggtaaaaaccttagatcgaaattttatttttttaatcggtggtaccagtccgaggggtaatggggttggcataaaccacgtggccgccaaagtccggatatttttttgggggtccgttttttccgtttttggttggccgatttccggttggtttttttccgatcggttttggaatcgtttccagaagcctggtaattgtttggttggttaacaagaatcgcaggtttgtgattgttggggggggaaaggctgttggttttgctgttagaactttgggggaaaatggaagggctgatggtcggttttgcatggggaccaagggg

SEQ ID NO: 160472 - DNA, 369 bp, Arabidopsis thaliana columbia
ggggaggcttttgagtggaaattaataataattggtgaataacctgttggttgggagagggttttacttacatccacaccagagtttccaggggatgccaccagaaacctgtaacagaatggttttaacgcctttgttaaagtggttcccggtttcctggggggaggggttgacctggcataatccaacatgacattgttgaaggccttgggggatttccaaagggccaaacttgaggaaggaaattttaggttgggggttggggggcacggaaggggagccatttgcaatggaatggcctttaaaagccccggtttaatccttaactgggcgacgttttttgttttaaccgattacttgggaggggcc

SEQ ID NO: 160473 - DNA, 458 bp, Arabidopsis thaliana columbia
cccggcccgaattccggttggaccaaggcgtccgccccgcgtccggtggcaggtgggggggcgtccttatggagcaaaaaggtgcgtccatggtttttggaaccaagagattaacacaaggttaaggtccagttggttttcaaaggaggggttcccgctgtaatgggggttttgggtcccataaagttgccatacccaacacgtgctttcgacatggttaatggttttcggggttggattccatggggagcaaatgatgggatgtccttgatggaagttgacgcgttgcttaaacctggggggtactggattttgcttggtcctccaatcaactggaaggtcaactccagggcttggcaccgtcccagggaggaccttcaggaggaccaaagaaggattgaggaagctgttaaactttttttggggaagaaaaagtttgaccacggggggattgcaat

SEQ ID NO: 160474 - DNA, 409 bp, Arabidopsis thaliana columbia
ccccacccgtccgacctaatttccggtccggtttaatttttttttttttggattcctctttaaaggagggcaaaaaactgtaattaaggcggggttctatgggatttttgggattggccctttttaaccaaacccataaccgtggccgggcagatttttccggcggggggttggttaacctttggggactccaacttgaacgccggaaccaaacagattttaaccaaaaccttactccttaaaactttttggccgtttggaaaatcccgggaggaccccaacggcaaattttccgccggcctaatggttccagacttcctggttaaattcatgaggattccgttcgggatcccgccggcctcttaaccgaacgtaaaggtttaacgtggggctagtttcgccgcccttg

SEQ ID NO: 160475 - DNA, 375 bp, Arabidopsis thaliana columbia
ccggcccggaattcccggtcggaccacacccgtccgttcacactcgtggacccaaattttggacccttttaaattggggttttttaaatcgttgcccctcgccggcgtttggcgattaaccgtggggttaatattcccctggattaatgctcggtcctatatcggttgggataagaaatctggattggaagctgctctaatgggttcctttggctgggtgggttccagttttttggctgttcgactgggatctttttttgcctaaaaggtggggttagcatctaacttgtattgttgacccggccagttcgttggccatggagtttttcggaaccggcccccggccctgttagccaattacctccaagttttttt

SEQ ID NO: 160476 - DNA, 411 bp, Arabidopsis thaliana columbia
ttggggaatccttttttaaaagccagggggttggaattatggcaaactttaaaggaagcaatccatgctaccacaggtttttttccggtggcctttttaactgttttagctttggccttcgccatttaccaagtaatttaaggctggttggcctggccgttcgatgatgttaaccgccttaagagagttagatccttggttaaggagggggggccaccgtttcttaagcctgttcaggtcggggggatcacgggggaggagcttaaccagtccgagggttctgatcctaaaaggcccttttttatggttttcaaccataagatttttgatgttccacaaggcaggatgttttacggaccaggaggaccttttgctttgtttgcagggaaagaccctagccgggcttttgca

SEQ ID NO: 160477 - DNA, 304 bp, Arabidopsis thaliana columbia
gattcttttttggcgaggaggagcaccgccttggcctgctggaccatgtccgacctttcaaccgttttaaacagggaggatggggccggcctggtaaatgctttaaaaaccaggtggcaaatttgggttggccaccactttgatgtcctggaaaactggattccaccagtcaggaagcgtgtcaggtttttaagagggattcagacccattttgaggggatggatgcaaaattttttggggagagggctagtttggaggttatgtattaaaggttattttagccttattttcccaagcgatttg

SEQ ID NO: 160478 - DNA, 329 bp, Arabidopsis thaliana columbia
ggccacagttataactcggctcggtaattttgcctttacctcagggaatcagagccggagggggaaagagggagggggagggcgggggaaagggaaatggaaaaggctttaacgaaggggccgggctttaaggggggaggtcaagggatctttaaaaaggctaaggaagagctttaaaacataaccaaggccctaactccattttccagtccggtggaggggaaggcaaaagggattttcaccaggcttaagggaaaaccactgaaaggcttcccagacctcctaaaggaatccactttaccaccaggacttttcccacaaacaataat

SEQ ID NO: 160479 - DNA, 402 bp, Arabidopsis thaliana columbia
ggaaaaaatccgcttactttttccgaccgttttttaatggatcggaaaaccaacaccgccccattattcctttccggtttttggcccaacccttggtggcaggtttggattttggggagaaaattttttagggttttgaaaagaaggaccacgatgttgccaggtttggaagggttgggggaaaagggagttttggttgattttttaagaggatggttggagggtaaagggggcaaccgggttcagttttccgggggcgggattcgtaaactttgttttaacgcttggaaaattttcttttttaaacctaatttcctggatctccatgccccaattcgaatttgcggggattttaatggccaatataaagatcttttggggttgtttgaatccgggggtttt

SEQ ID NO: 160480 - DNA, 357 bp, Arabidopsis thaliana columbia
gcccacagacctggttttttaagttgatgaaggatgccctaatggcttaaaagcaaaagggtttcgatgggttcaacgcgtgggttgtgatgcccaatgggggtttttggaaggaactgaagttggggccaggagatggccaccttaattcctatttttccaattcccgttggaaaggggccttgaagccagcggacctcgggcttgttttttattaagctcaacaccttgttttgatggtttcaacaaacttgaaattggcctttcttttttttttttaagcttgaactacttctcccatggtttactgaaactgattttaattatttgggcatggcaatttgggattttgttttt

SEQ ID NO: 160481 - DNA, 404 bp, Arabidopsis thaliana columbia
ggtcctttaataatgcagtggttaagggccattttaacctttgggacctccgttttgcagggccagttggttgaggcctgagggtttaatggaagaaaagccggttttgtaaggtccttgcacccgaacccgaaaatttgggttcaacctctttggttgtaaaactggtcgaaaggaaaggttggtttttttttgccagattttgggcccagtttgggggtaatctgctgttttgattaaactttgttttggttgggtaattaatcctaatcttggtttttttctttttcaaaaaaaaaaataaaaaaataatataaattatttatattatatattttttaatttaatataattttatttaatattattaatattaatattaaaattattggggggggcctttt

SEQ ID NO: 160482 - DNA, 340 bp, Arabidopsis thaliana columbia
accacaaccaaaatcaattaattggtttttgttttattgggtaactccacagggcctaagttttatcagggccccaggaggagggccaagaaggggggtaaggtaaagccgttaaccacccagacggttttacaggcggttttgcttaagggatcggttgttttaaggttggatctaaagactcaggttagattcaggatggtttttgggaaaactaaaaggtttggggttgaagttggggtcttttttgaagtcaacggtgatggagttaaggctcagaagaagggatttaagatgaagaaattggtttcttcttttccattaaaaggcttttttccga

SEQ ID NO: 160483 - DNA, 389 bp, Arabidopsis thaliana columbia
attgtttgaaccaggttaaaagttgaattccccatttttgccaggggggttgtgaccggaaggaccacggacccatattccaggtccttgaaggcagagaaggggggttggttcattgaggctataaaagggaccttaaccaaattttgggtttttcctgatggcagggttttccagagatattttccaagaacttttccttttaaatttgggagggccattaaaactgcgtggggccaggcctttttttaataaccagaggaggaagtttcaggacctttcgttgggtccaattattgttctatagattaataaccatggcaacctattttttttggaattctatcattttggttttaaaaaattgaggaattcgaggtcttttaatg

SEQ ID NO: 160484 - DNA, 330 bp, Arabidopsis thaliana columbia
cgggcccggaattccggggccgcccacacccgtccggcctggtcttttgaggcctaaaatttttgttggggccaaaatggcacctctgttggcccgatcgaatttgttggttccaggggatattgaatgggcaaatttggttttgggtttggaccaggaaaatcgttttatggtagaagaggttggttttccgggggcaccgggggggtttatccgggaccaaagcattttactggccgcggagttgtttggtccccgggccccattggtggcttccataactgttgcttggggaaatgggcttttccgggttcggcgacctttttgggg

SEQ ID NO: 160485 - DNA, 289 bp, Arabidopsis thaliana columbia
  unsure (1)..(289): unsure at all n locations
cgggnccggaatcccggggcggacccacccgtccgattgtggattatgtttatacccctttttttttttgaaaagaatccttttaccatgggtaagtccaaacctttggaggggaccgatgcttatcggcttttcttgggtccatttggtttcatcattcctgaaccttaaaccaaatatggctctacctgtggccctgaagttgtctgtttaaaaacgggggctttgttcttggatggaaccacattaaccacctttggcaggaccatcctaatataacttagttttc

SEQ ID NO: 160486 - DNA, 249 bp, Arabidopsis thaliana columbia
gaattcccttaaggcccttaagttaccagttcttttgtggaccgtccttaagttaccagttcttcgggggaccgtccttaagttaccagtccttccggggaccgtccttaagttacccgttcttcctgggaccatccttaagttacccgttccaccagggacggaacttaagctacccgttcttccggtgaccgtcccaaagctacccgttcttccagggaccgtcccaaagttacccgttcttccagg

SEQ ID NO: 160487 - DNA, 285 bp, Arabidopsis thaliana columbia
ttgggaggaggttccaggggcaaagcctcaccatttaagatggggggggggggtttatggcagttggggcaataaatacccggcgggttggttaaatttgccaggagggtggggtaacgtcgttcctttgcctttgaggctgccctgaaaaagactgttttttacgacttccatgttgcccatgggggaaggagggttcctttggttggtgggggtttgccaattcagtccaaagattcgattttggcctcaacggttaactgcagggaaattgggagttggttg

SEQ ID NO: 160488 - DNA, 406 bp, Arabidopsis thaliana columbia
gttttggataacagcggtttttaaaacaggtttttattccgccaggaaagttttcgacccggtcgaacccattaagcgggggttaatcaaattaaagagggggaaatccgaacccaaccttgttttgtccggggggctggcaaggggtaaaagtcctaagtccatggggttggttggttaagactaacgtgtgggtccataaaacgttttggactttaagccaggaaaggccttcggggtccgtaccatacccaacatggttcttcctttcgccagggtcaaatccgggggcgtgggagcagccattgattacccggccttccaccttagggtggagaccattgtggggttaggccacagtgcttgtgtggggaccaaggggtttttgtttttcccctaagatgga

SEQ ID NO: 160489 - DNA, 416 bp, Arabidopsis thaliana columbia
cgggcccggaattccggggcggaccacaggcgtccgttttagctggaagccttaagccagggccgttttttccttttttaccattttttccaatccttccatttcctttaccatttttgcctccagaattggaagttccagggtttccttccttaccggccgcataaaccggcccttttttttttttggggtttttttatttttaaaaaccaaaaccaaccttaaaaaatcccccttggtctccttggtggccaaaacttcggatggggctgaagaaggtggagaaggaagcgtcttttttggggggaccgggaccagttaaaagtaacaggatgtgagcaaaggatatgagagcaatggtaattcaagcgaaggaattttgagcaaaggaaatgagagcaaaggaaatgtatgct

SEQ ID NO: 160490 - DNA, 366 bp, Arabidopsis thaliana columbia
ccaaggaatcgttggggctttcggtggatttttcttggttttcgtttactgaacggttgggttttccggtggccacataaacccaccggttcctttcggttggttctaagttgggaggttttcgttaacacaagcggggtcttacttagtgatgcagtgctaaggacttatcgttgaagctgtggtggtaaagggtttctagccaaagaaatttcagcttttggggggtgtggccaacaccttacttaatggtttttcaaaaggaggtgatttgggggtctataatatgggaacttagggcatttattacttgattctttatttttatatctattatattcctttgtattttttatatttctattt

SEQ ID NO: 160491 - DNA, 336 bp, Arabidopsis thaliana columbia
gggggtggtccgacctttggttttaagtatttttttttttaactaaagttaggttaattaagcttgtcaggggtaatattctccgccaggcaatccatttattttcaaaccgccccatttccaaccaataattggatggacaaacccttcttattgaaatgtggaaagagtcaaatggttgggcacttcctcagggccagatgattcaagaggattttgacccaaagtcttagagttttgttaatccttaccggcaataatttcccggggtttgcagggttaactggttttataacctatccgcccattaactaaaatttgcccatgattaactaa

SEQ ID NO: 160492 - DNA, 330 bp, Arabidopsis thaliana columbia
aatacatcggtttaaattttggtttggggaaagaaaaccaaaagggtttcaagggggggattccacggggcatttccggcggttctggagggaggcttaaagatcaatggttccagccgtttgaatggttttggaggaggggcgggggttcaaaggttaagactggccgccggagctcaccaaaggggggggcctttttgccgtcccgggtttgggctttcctgggccggttacttcagcccaagcaggaaacttggtttggctatttaaggacagttttatcttactgccatttcttccaacataagtcttagctggggccaaagattt

SEQ ID NO: 160493 - DNA, 454 bp, Arabidopsis thaliana columbia
gggcaaaaggggggagggggggggggggagtaggattgttccaccttccacaaagaaccatggaggttgggaaggaaccagaccaggagggaacctggccggtattgaaccttccggggttcccaattaaacccaccattaacagccattttatgtaataaccaattaacagttccatttaagtttaagttccttttagttgggaggaagagcttggcaggcccaagcaccactttacttttttttcctccttttccttttcctaaccattaacttttaatttttaatctcctttggaaattaacaggtctttaaggttcccaccagggtttaatttacttgaaaaggatggaggatcagtacccaaacttaattcgcttttaccagtcttggtgggcctttttggctggccgccttcaaaagggttggattaaccttcctttaggttgatggt

SEQ ID NO: 160494 - DNA, 329 bp, Arabidopsis thaliana columbia
gcaattggttcattggggaccagggaaaaataaaaccatgggcacctaaggccgcggggattttaaattccgccttagcaccggccgaaccctccggggtaaggaaactccattttttttaaacaaccaaccgtccaaattccttttctttaaccaaaaccgaaatccgggccgggaaaccagatttctccgccgccgttgttgaagcccccgctacgaaggaagttcccgtgggatctacgccaccgtagttggcccaaaccacaccgttttcgattttggttggaggaaccggggtgtttttacgtaaggcgcagggggaggagttt

SEQ ID NO: 160495 - DNA, 347 bp, Arabidopsis thaliana columbia
cccggcccggaattccggggtggccccagccgtccgggttgggataatttggagacagaagtcgaggatgtcgttggggaaagcattttttacgttggtaacttccttaaatccaatttaaaggccatttaaaatgtgtttgttgaatccaggccggccttgaaggactttggtaggagactggagaattttgttggggattggtgggatctactgggtgggaatttagggttggggaaggggtttttgaagaaggggtttaatggaccaaagggcccaacctttgggccaaaggtgggcaatattccaccatgtcctaaaccagagatgatcaagggttttagggc

SEQ ID NO: 160496 - DNA, 381 bp, Arabidopsis thaliana columbia
ccccagcagattcaacagcaccagcacctgtggcagcaccaccaccaccaccagcggcggcaggaccaccatgggtttcgccgggttcagtttcttggggatccaggttccatagatgaggtcgaaaaaccggttcaatttgaagtttttagcgattttaataatgaagactggaaggcacccttaaggttgccaccacgggataatcgttcccagccagaggatgtgactgccattaagggaaatgattttgaggattcctttttgaggagggatctgtttaggggattttatgagaggggttttgaaaaaccatttctttattaggaggaaggcattcccatggttttgactgggagggatatccttgctggagccaaa

SEQ ID NO: 160497 - DNA, 408 bp, Arabidopsis thaliana columbia
aatttcctggcttagaagagggaccagatattgttcaaggattaaaggtttttgttaacttaaagggggagatattggaggggccaactaactgttttactttaaaccaagctgagcatgcagctgctgaagtttcccttaaggccctttcgtttagggccctttaaaggtttttaactgttaaaattttggtggggccagggatttccaggaccctgcttaaggagacagcacataaagcgggtttggatctaccaaggtccacaagggtgagaccaggatctggtcacttccaaggtttttttgtgcctgttgaactggttgggatgacgtttccaggtgattcagcatagccaaagaaccaggttgggaaaaacccaccctttggagctgggcctttttgaaaaa

SEQ ID NO: 160498 - DNA, 424 bp, Arabidopsis thaliana columbia
aaaatttggaggaagggaggagggggccattgatcaaggttccataaccggggaaggtggccattttgaaccagacgttaacataaccgccattggtccttaaacttaatggccagaggatccaaccttttcatcagttattgacctaggggttgccgggttagcagatgggggggatgcctttgcagttgggggggcctccttaattaaaggcccgtttagtaaaaggaaactgaagatggtcctggttagggccgatggggttgattgaggttaccaggactaatttgatattatccatatcttggtattataaatgcagggtatttaacattattaaaaaattccagaaattcaactttctgtgtccattaagtatattactgaaattaattggaaaatagttggggtttaagcttttgtt

SEQ ID NO: 160499 - DNA, 396 bp, Arabidopsis thaliana columbia
cggaattccggggcggccccaggcgtccgaaatcaccatgaaggttttaggaccttaatgcccggtgttggggggatcaattcctccccttaaaggttggatcttgtccgttgggttgggaaggttcccacccttccaaattcttacattggatttggaccaaggggcgtcttcaagaaggagaccaccttcaaccaggttggagccgggtccagttcatgggccccagccaggcaggacaggttggttaggagatgggtggggattttatgggggccacgtttaacccacgggatccggggattttggatcttttactggtctaaggcggttcgaccctggggccagaacctggcaggccgtttgaacgtggggccaagcttttaagggccaatt

SEQ ID NO: 160500 - DNA, 286 bp, Arabidopsis thaliana columbia
gtggggatgggtcaggtcagggaccaccattggttttttttgcaccagccccaaattcgttatcttccttctaatcttctttcttttaatcctcctttaaccaaatccttaaaacctccatttccgtttaaaaactcggttccggcggagtttcgaagccgttttttgttttttcccagttggcgactttcccgattttttatttcaaaggagagaaggtcggaaggccttttttagacctcaaagcggggccggaggataccggccgtgccgttgggcaccgggc

SEQ ID NO: 160501 - DNA, 394 bp, Arabidopsis thaliana columbia
cccggactggaataccggggcggccccacccgtccgttttttttttaagaagaaaaataacctcttttttttttacccaaaacctaaggaatctggggccctttcaaggtaaacctttggaaaaccccatggaaccagaaatggctaaaagctaatccttttggagcgcggttggccaaccacctggcctgaggaaatcctggaattactggccggatttttccatggtattagggaggatttccacctaaggaagaatttaaccccaaccccctttagaaggccattcgcagggccaagaatttttcctaatggaagaaaggaaaagggagtgagccaggctggggggcaattttaccacgacctaatggccgggctctaaaaaaagggttta

SEQ ID NO: 160502 - DNA, 285 bp, Arabidopsis thaliana columbia
attaaaatcgccgaattggcagtagggggacgaaattttggggcacgttggttactaccgaacctatggaaggaccttaaggggaccacttcgtctttacaagagggagcgtttggattttgaatggaagctggtgggggggattggtttgcgtaccaggcgtgagctttggaaagtgcagtcctttttaagccgattccgtatggttgttagagatttttggattcttgttaagaagagtccaagagggatttttgaaggtggggttttgttcctaaggatgaa

SEQ ID NO: 160503 - DNA, 426 bp, Arabidopsis thaliana columbia
gccagggccccgaaccttttaactggtgttttggtcgggggccctgatgctaacaacattttcgttgccaggagagataattatgaccaaactgagcctgttactaacaacaatgcaccattcttgggggttttggctggtttaagcaggggtaattccggtattggccggttttttccaggggttccggttccggtggtccgaagaccaaggcttattcgtggaccgaaggggattactccagcccgggctttgggtccaggggctttagttaagaggataactagttaatgggtttaaaggggaaggatttactacagtatcttatcaccttgaattaacaatttttttagacttttaaaaagtttaaactttttgttcaagaatttttatgtacaaatttggggtctttggagatcaggcaat

SEQ ID NO: 160504 - DNA, 409 bp, Arabidopsis thaliana columbia
  unsure (1)..(409): unsure at all n locations
atttctctgcttttaatttccaatttgctctgattcattcacaaataacaatcctctcttcgtttttgtttttcttttggagccaaagctctcttaaatctgtaaatcaacaatggccgccaccactgagaatctccctcaactcaaatccgccgtcgatggccttactgagatgagtgagagtgagaagagcggattcatcagcctggtttcacgttacctgagcggtgaggcacaacacattgagtggagtaagatccagactcctaccgatgaaatcgttgttccctacgagaaaatgacccctgtctcccaagatgttgccgagaccaagaatctgttggacaaactngttgtgttgaagcttaatggaggtcttggaacaacaatgggatgcactggcccgaag

SEQ ID NO: 160505 - DNA, 427 bp, Arabidopsis thaliana columbia
ctcgattgtcaaaaccctagatcgaaatcttatctctttaatctgttgttacagttcgtagagtcatggcgttagcatcaaccacgttgccgacgaagtccggattatctctttggtgtccgtcttctccgtctctcgctcgccgatttcccgctcgtttttctccgatcggttctagaatcgcttccagaagcctcgtcactgcttcgttcgctaacgagaatcgcgagtttgtgattgttggtggaggaaatgctgctggttatgctgctagaacttttgtggaaaatggaatggctgatggtcggctatgcattgtgaccaaagaggcttacgcaccttatgagagaccggctttgacaaaagcttacttgttcccaccagagaagaagccagctcgtttaccaggatttcatacttgcgttgg

SEQ ID NO: 160506 - DNA, 432 bp, Arabidopsis thaliana columbia
gaggaagcttctgagttgaaatctattatctctggtgaattacctgctggctgggagaaggctctacctacatacacaccagagtctccaggtgatgccaccagaaacctgtcacagcaatgtcttaacgcccttgctaaagttgttcccggtttccttggtggaagtgctgaccttgcatcatccaacatgacattgctgaaagcctttggcgacttccaaaaggccacacctgaagaaagaaatcttaggtttggtgttagggagcacggaatgggagccatctgcaatggcattgcccttcacagccccggtcttatcccttactgtgcgacgttctttgtcttcaccgactacatgagaggtgccatgagaatctcagctttgtctgaagcttgtggtatctatgttatgacccatgatttcattggt

SEQ ID NO: 160507 - DNA, 440 bp, Arabidopsis thaliana columbia
cccacgcgtccggttgcaagttggggagcgtacttatggagcagaaatgtgcgtgcaatgtcttttgcaccaagagattcacacgaggctcaggtccagtttgctctcgagagaggtgttcccgctgttattggtgttcttggtaccataaagttgccatacccaacacgtgctttcgacatggctcattgctctcggtgtttgattccatggggagcaaatgatgggatgtacttgatggaagttgaccgtgtgcttagacctggtgggtactggattctgtctggtcctccaatcaactggaaagtcaactacaaggcatggcaacgtcccaaggaggaccttcaagaggaacaaagaaagattgaggaagctgctaaacttctttgttgggagaaaaagtatgaacacggtgagattgcaatttggcagaagagagt

SEQ ID NO: 160508 - DNA, 399 bp, Arabidopsis thaliana columbia
ggacgacccacgcgtacgtacttatttactgatctgttacactttctctctctctggatactctctaaatgggggcaggtaactgtaatttagggagtggtctatatgtatttttggtattgaccctctttaacaaacccatcaccgttgacgggcagaatattccggcggtgggcttgttcacctttggtgactccaacttcgacgccggaaacaaacagactcttaccaaaaccttactccctcaaactttctggccgtatggaaaatcccgagatgatcccaacggcaaattctccgacggcctgatcgctccagacttgctcgctaaattcatgaggattccgatcgtgatcccgcccgcccttcaaccgaacgtcaatgtctcacgtggagcta

SEQ ID NO: 160509 - DNA, 288 bp, Arabidopsis thaliana columbia
ctgaccctcttgagccaggtactcaggctttagttttggtggctgatatcaggaagaggaagggattgaaggaagcgatgactccgctatctgagttcgaagacaagctttaagcttcaccaagactcgtactagcctttttcccaatggttgctactctctctatcttaattttgtcttgttttattaatactcttatggtatgacggattgtgaagatttttctctcgccatcccctgaatgttttttacttttttcctagttgagaactttgttattgtgttcgc

SEQ ID NO: 160510 - DNA, 357 bp, Arabidopsis thaliana columbia
  unsure (1)..(357): unsure at all n locations
ctccactcgtcgaccccaattttcgacccctttcaattagggttttctcaatcgttgaccgtcgacggcgttttgcgattgagcgtggggtttatattcnccttgatttatgctctgttctatatcggtttggataagaaatctggatttgtagctgctcttatgtgtttctcttgctgggttggttccagttttcttgctgttcgactaggatcttctcttgccttaaaggttgggttagcatctcagctgttatgttggaccgggcagtttgttggccatggagtattagagaaacgggcacctgcgctgttagacaatttactacaagctattcttatggttcctctcttcgtg

SEQ ID NO: 160511 - DNA, 434 bp, Arabidopsis thaliana columbia
cttgagaatcctctcttcaaagccatggcgttagaactatggcaaactctcaaagaagcaatccatgcttacacaggtctttctcctgttgtcttcttcactgctctagctctcgccttcgccatttaccaagtcatctcaggctggtttgcctcgccgttcgatgatgttaaccgacatcagagagctagatccttggctcaagaggaggagccaccgattcctcagcctgttcaagtcggtgagatcacggaggaggagcttaaacagtacgatggctctgatcctcaaaagccccttcttatggctatcaaacatcagatctatgatgttacacaaagcaggatgttctacggaccaggaggaccatatgctttgtttgcagggaaagacgctagccgagctcttgcaaagatgtcatttgaggagaaaga

SEQ ID NO: 160512 - DNA, 428 bp, Arabidopsis thaliana columbia
  unsure (1)..(428): unsure at all n locations
tggaaaagtcaaaatcaagggtttcgtcgtttctttgactggcttggactcgcttgctgggggagaagcgaaaaatgcttgagtcaggaatttgcaagtatgcgtgaacaaaggagcaagaaacaatgatctaaagaagatgaaggtgagcctatcactctctctctctatctctagacattcactcatcaatcatgcggtgtattataactcaagtagtaatcatgttgtacataattccctgtgattcaagttccacttactgntagagagacgtttcctaagatggtgatggaagaaagatcttgtcatactgctaacagagttggggatgtccaaatgggtaatggtcataagcgtggaagaagcgaatattcatccagcaacaatgttagtataggtgtggatactgtataacaggatatgtt

SEQ ID NO: 160513 - DNA, 438 bp, Arabidopsis thaliana columbia
gattcttttcttgcgaagatgagcaacgacttggactgcatgaacatgtccgatctctcgagcgggcttaacgaggaggatggtgccgggcttgttaatgctcttaagaacaagttgcagaatttggctggacaacactctgatgtccttgaaaacttgactccaccagtcaggaagcgtgtcgagtttctaagagagattcagaaccaatatgatgagatggaagcaaaattctttgaggagagagcagctcttgaagctaagtatcaaaagttatatcagcctttatataccaagcgatatgagattgtgaatggtgtggtcgaagttgaaggtgcagctgaagaagtaaaatccgaacaaggagaagataaatcagctgaagagaaaggagtaccagatttctggcttattgcattgaagaacaatgaaattact

SEQ ID NO: 160514 - DNA, 434 bp, Arabidopsis thaliana columbia
acgcgccacagctatcactctgctctgtcactttgtcttttactcagagaatcagagacagagagagaaagagagagagagagagcgaggggaagggaaatggaaaatgcattaacgaaagtgaccagctttaaagtgggaagttcatggatctctaagaaagctaaagaagagctctcaaacatcaccaatgacctcactacattctgcagtaccgttgaagagaaagcaaaatggattttgaacacacttaaaggaaaaccactgaaaagcttaccagacctcctcaaagaatacaacttatcaccaggactcttcccacataacataatgtgctacgaattcgatgagacgaagaataaactcaccgtcttcttctcttcaccatgtgaagtcacattcaaagatggatcagcgattagatatgcaacgcg

SEQ ID NO: 160515 - DNA, 390 bp, Arabidopsis thaliana columbia
ccacattttctctggaaaaaattcgtctactttctccgatcgtctcttcattgatcggagggccaacaacgacccattatggctctgctgtttctggcgcaaacccttgtagcaagttttgattttggtgagaaaatattttagggatctgaagagaaagaacacgatgatgacgagtatggaagggatggtggagaaaggagtattggatgatattataagaagattgttagaaggtaaaggaggcaaacaggttcagcttttcgagagcgagattcgtcaactctgctttaacgctcgtcaaatggggctgtctcaacctaatcttcttgatctccatgccccaattcgcatctgcggtgatattcatggtcaatatcaagatctttt

SEQ ID NO: 160516 - DNA, 424 bp, Arabidopsis thaliana columbia
gaagaaactgtggtcaagaactaagaacacatcatcagaccagttattaaccaagagagttggtacgaagtcagcatacggagaatagggtttatcgtgtcgatgacctacatctaacttaggtggaatggttcttacaagccgaccgaatagttttttgagcgtcctgcgacaaggccacctcaagacactcaatcgcatagagacaccagggccaaatggagcatttgtagagcaaagacgtgactgtactaccaatataaacaaattggataatgggaaccctaacgaccctgaagttgttcgcggagagattcggacttgcgccatcagtcaatcggaaggggagagcgggacttatgttgtaagcaccagactcatgtctacaaacgggtgatcctgacgggtttacgcttgcggacac

SEQ ID NO: 160517 - DNA, 435 bp, Arabidopsis thaliana columbia
gccacacagacctcgtttcttcagctgatgtatgatgcgctaattgtctcaaagcaaaagggtttcgatgtgttcaacgcgtgggatgtgatgcacaatgagagtttcttgaaagaactgaagtttgggccaggagatggacaacttcattactatctctacaattaccgtttgaaaagtgccttgaagccagcggaactcgggcttgttctcttataagctcaacaacttgatttgatggtatcaacaaacttgaaatttgtctctctttttttttcttcagtctgaactacttctcccatggtttactgaaactgagtttaattattttggcaatgcaattttggattttgctttttaaaaaaaaaaaaaaataataaaaaaaataataatataaaataattaaaagggcggccgttctagaggatccaagct

SEQ ID NO: 160518 - DNA, 269 bp, Arabidopsis thaliana columbia
atacacaattagattttctttaaaaaactgaactttggcccacgacattgacaacttcattactatctctacaattaccctttgcaaagtgccttgaatccatcctaactcttgcttgttctcttataaactcaacaactccatttgattttatcaacaaacttcaaatctgtctctctttttttttctttaaactgaactacttcttccatgatttactgcgactgagtttaatttatttcgcattgcaattttttatttctctttta

SEQ ID NO: 160519 - DNA, 400 bp, Arabidopsis thaliana columbia
agtactctcatcatgcagttgctaagggacaatctaaccctttggacctcctatatgcaggggcagatggatgaggcctgggggtctaatggaaaaaaagacggttatgtaatgtacctgcaaccgtaaccgaaaatctgagttcaacctcctttgctgtaaaacttgtcgaaaagaaaagtttgtttttttatgacagattatgtgcacagctttggtgttatctgctgctctgtatcaactctgtttttgtttggtaatttatcctcatctttgcttcttttcttctcaaaaaaaaaaaagaggggggggggatattattaaaaaaaaaaaaaaaaaaataattgaatgataataaataaatgtataaaattaaaaataattaaaaaaggggcggccg

SEQ ID NO: 160520 - DNA, 188 bp, Arabidopsis thaliana columbia
  unsure (1)..(188): unsure at all n locations
cgggacatttactcgaagctaaatgatttcatttttgaaggnatacaagaactagaagctcgtccatttagatggttggtcggagtaatactgctacggtgccaatattggcggttgattctgatggactggataatggttggaacacgaaaattgctgagctgacttctcttacggttgatgaaaaa

SEQ ID NO: 160521 - DNA, 267 bp, Arabidopsis thaliana columbia
cacgcgggcgaacacgaccaagatcaattcatctgctcttgtcttagtttgtaactacacagtgcctaaggtctatgaaggatacaagaagagggcgaagaagtgaagtcaagtaaagccgctaaacaaccagacggttttacgagcggttttgcctaatggatcggctgttttcaggttggatctcaagactcaagttagattcaagattgttttttggaaaactaaaaggtatggggttgaagttggagctgatgttgaagtcaa

SEQ ID NO: 160522 - DNA, 426 bp, Arabidopsis thaliana columbia
gggttttccattctctgtggccgtcaccgtttccgttaaatagctctcctctctctatctgcgaggatataactgcaagctcaaaggaattgtttgttgttaaaatgtttcttacgcgatttgtcgggaggagattcttggcggctgcatcggcgcgatcggagtccactacagcagcagcagctgcctcgacgattcggacgccaacaaatccactcgaagagttctttgagttcgacagaagccaagacgaagataaacctgttgtctatggtcgaggttggaaagcttcagagctgcgtctcaagtcatgggatgatcttcagaagctgtggtacgttcttctcaaagagaaaaacatgttgatgactcagcgtcagatgcttcaggctcagaacatgcagtttcctaaccctgaacgcattc

SEQ ID NO: 160523 - DNA, 434 bp, Arabidopsis thaliana columbia
actgtctgcaccaggttcaaagctgaatttttcatttttgacaaggtggatgtgaacggcgagagcgcggcaccattatacgggtgcttgaaagcagataaaggaggtttgctcattgatgctatcaaatggaacttcaccaaattcttggtttctcctgatggcaaggtcttacagagatattctcccagaacctctcctcttcaattcgagaaggacattcaaactgcgttgggacaggcctcttcttaatcaccagaagaagaagtttcaagaactttcgtttggtccaaattatgatcttagaatcatcaacattgcaaacttattttctttgaattctatcattcttgttttaaataattgatgtattcgatgtcttttcatgggatgatatatcatatattatcatgtgactctcgttcaaacaaacc

SEQ ID NO: 160524 - DNA, 429 bp, Arabidopsis thaliana columbia
gtctggtcttctgaagcctaaaacttctgtttaggccaaaattgcaactctgcgggcacggtcgaatttgctggggagcaagggatattgaatgggcaaatctggttcttggttttgaacaggaaaatcgctatattgtagtagatgtttgctatcctgaggcacctgtggggtctatccgagaacaaagcaatttactggcgcggcagctgcttcgtacccggcgcccatttgttgcttccataactgatgctttgggtaatgagcttttccgggttcgtcgacctttctggtggctcacaagttcaatatatgctgaaattgatggagaggaaattggtgttgttcatcgacgatggcatctatggagaagaatttatgatttatacctggggaacaaccagtttgcagtggtagaaaatcctgggt

SEQ ID NO: 160525 - DNA, 433 bp, Arabidopsis thaliana columbia
ctctaatccataaaaatggaagcagtaacggcgattaagccacttatcagagtcgctgctgtctctggttctctccggaaaacctccttccatactggtctcctccgcgctgcgattgatttgacgaaagaatcggttccgggattgcaaattgagtatatagatatatcaccgttaccgttaattaacacggatcttgaagtcaacggtacttatcctccagttgttgaagctttccgacagaagattcttgaagctgatagtatcttgtttgcttctcctgagtataacttctctgtttcagctccacttaagaatgctcttgactgggcttcaagaccacctaatgtttgggcggacaaaccagctgctattataagcaccggtggaggttttggtggaggaagatcgcagtaccatcttcgacaaatcg

SEQ ID NO: 160526 - DNA, 410 bp, Arabidopsis thaliana columbia
  unsure (1)..(410): unsure at all n locations
ccggaattctgagaacgactccacgcgtccggcactncccctaaagcccctaagctaccagttcctccggtgaccgtccctaagctaccagttcctggggtgaccgtccctaagctacgagtccctccggtgaccgnccctaagctacccgttcctcctgtgaccatccctaagctacccgntccaccagngactgtacctaagctacccgttcctcctgtgaccgtccccaagctacccgttcctccagtgaccgtccccaagctacccgttcctccagtgacagtccctaagctacccgttcccccggtaactgtacctaagctacccgttcctgcagtgaccgggcctaagctaccccttccttcgatttcagggctacccataccttcagtggtaggttccaatct

SEQ ID NO: 160527 - DNA, 399 bp, Arabidopsis thaliana columbia
ctgggaagaagctccagtggcaaagactcaacatttaagatgagaggtgggagtctatggcggctggggcaatcaataaccggtcggcttgctcaatctgacaagaaggttgtgtcacgtcgctactttgcctctgaagctgacctgaaaaagactgctctttacgacttccatgttgcccatggaggaaagatggttccttttgctggttggagtatgccaattcagtacaaagattcgattatggactcaacggttaactgcagggaaaatgggagtttgtttgatgttgcacatatgtgtggttggagccttaagggtaaagattgtgttccttttcttgagacacttgtggttgctgatgtggctggttttgcttcttggaactgggagcttaac

SEQ ID NO: 160528 - DNA, 441 bp, Arabidopsis thaliana columbia
gttctagatcacagcggctcttcagacaggttctttatccgacaagaaagctttcgacccgcgcgaaaccattaagcaggggttcatcaaattcaagaaggagaaatacgaaaccaaccctgctttgtacggtgagctcgcaaagggtcaaagtcctaagtacatggtgtttgcttgttcagactcacgtgtgtgtccatcacacgttctggactttcagccaggagatgccttcgtggtccgtaacatagccaacatggttcctcctttcgacaaggtcaaatactgtggcgttggagcaggggggagggacgcgttttacaccttaaggtggagaacattgtggtgataggacacagtgcatgtggtgggatcaaagggcttatgttttttcctttaaatgggaacaacttcactttctttatatatgacctgtttaaa

SEQ ID NO: 160529 - DNA, 430 bp, Arabidopsis thaliana columbia
  unsure (1)..(430): unsure at all n locations
ctctagcttgaagcctttagccatggccgattcttcctcttctaccattttctccgatcggtccatctcctctaccagctggtcctccanaattcgcagctccagtgtttccctccttaccggacgcattaacctgcccctctctttctctcgcgtctctctatctcttaaaaccaaaacccaccttaaaaaatccccctttgtctccttcgttgcccagacttcggattgggctgaagaaggtggagaaggaagcgtcgctgttgaggagaccgagaacagtttaaagtcacaagatgtgagcgaaggagatgagagcgaangagatgcgagcgaacgagatgtgagcgaaggagatgagagcgaatgagatgtgagcgaaggagctgtgagcgaaagagctgatttcccggagccatcggaagaagcc

SEQ ID NO: 160530 - DNA, 389 bp, Arabidopsis thaliana columbia
aatcttgttcctttttgctctctctacttgattcacccactctgtttctcgattagtacggtgaaaactcactttggtttggtttgattcctctttagtctgtttttcgatttcgttttctctgattggtttggtggtgagatctctatcgtagtttgtcctttgggttaagatatttcatttgattggtgggtttgttttattgaagcttattgttgtgaaagttggagtctttctcagtttttaggttgaattattaagagaaagggaagatttttggtgtgaagttaggttatttggggtttgagaagtttgcaagtgaaaaaggttgtgaattgtgagtgatgaagagagggaaagatgaggagaagatattggaacctatgttt

SEQ ID NO: 160531 - DNA, 437 bp, Arabidopsis thaliana columbia
ggatttcatcagcattcagcagccagacgaaacttttaacgatctaccatcgaaccaggtgtctgagatcttccgatcatcgtctgggattacgattctttccttctcgtttttagattagctcagaaatttttctaaccttttcttctctgtcgatctaacacctgacctcgattttcgttaccgataccaccattttcgaggatacttcttcattaccatggcaacaagaaatgctttgagaattgtgtctcgtaggttctctagtggcaaagttcttagcgaagaggagagagccgctgagaatgttttcattaagaaaatggagcaggagaagcttcagaagttagctcgacagggtcctggagaacaagcagcagggtcagcaagcgaagcaaaggttgctggtgcaacagcatctgcatcagctgagtcgg

SEQ ID NO: 160532 - DNA, 435 bp, Arabidopsis thaliana columbia
  unsure (1)..(435): unsure at all n locations
ccaaggtatcgcttgggctttcggtggtattatcttcgctctcgtctactgcacggctgggatcttcggtggacagagtcgggccagcggttacnttcggtttgttcttagctaggaagctttcgctcacacgagctgtgtactacatagtgatgcagtgcttaggagctatctgtggagctggtgtggtcaaggggttccagccaaagcaataccaggctttgggaggtggagccaacaccatagctcatggctacaccaaaggaagtggtcttggagctgagattattggaacctttgggcttgtacaccgtcttctctgccactgatgccaagagaaacgctcgtgactctcatgttcctattctagcaccgctccctatcggattcgctgtgttcttgggtcacttagcaaccattcccattactggaact

SEQ ID NO: 160533 - DNA, 174 bp, Arabidopsis thaliana columbia
cacagtgttcgattatgggaaaggaagagttggattcgccaaagctgcttaaacaatatcgcttcgttaataccctcgttttttatatgatgtttgtgaatgtgtttgtaataacttaaaacatattgctatcctagaatggtatcatcttaatacagatttttatttggtttc

SEQ ID NO: 160534 - DNA, 400 bp, Arabidopsis thaliana columbia
gggagttgtccgaactcttgtttttagtaatttttttttttacttaagttaggtttattaagtctgtctagagtaatattcggcgacaagcaattcatttattttcaaaccgacgcatttcctatctattattcgattgactaacccttcatattggaatgtgtgaagagtcagatggtttggcaattcctcaggggcagatgaatcaagaagattttgaaccaaagttctagagttttgttcatccttcactgtaataatatctcggggtttgcagcgataactcggtatatcaactatacgaccgtgaactaaaatatgtccatgattaactaattggcgcgcttgaggaatagtcaaagccatacccaatcgaaaaaggatgttatccaaacgcatt

SEQ ID NO: 160535 - DNA, 447 bp, Arabidopsis thaliana columbia
aatcatcggcttcaattttcgtcttgagaaagaaaaacaaaatggcttcgatgggtggatgacacggtgcatctccggcggggcttgaaggaagcttaaagatcaatggctccagccgtctgaatggctctggaagagtggcggtggctcaaaggtctagacttgtcgtcagagctcagcagagtgaggagacttctcgccggtccgtgattgggccttcctgggacagataactcagaccaagcaagagactttgcattggcattgaaagacaggttttacttacagccattgccaccaacagaagctgcagctagagccaaagaatctgcaaaggatatcataaatgtgaagccattgatcgacaggaaagcttggccatatgttcaaaacgatcttcgtccaaggcttcttatcttcggtatgatcttaacacaatcattttct

SEQ ID NO: 160536 - DNA, 353 bp, Arabidopsis thaliana columbia
  unsure (1)..(353): unsure at all n locations
ccatgacctcatnanacgcccggtttcattaatcaacgggccgcgccattcaacacttaaccactacaacaaccattattgaaactccattaacaacaacttcaacgaagagtcctgactacaattactactttaaactactaacatctctaatcacatttttgacataccctccaaagcatttttacaaagttctttctctatcaatcaacaaaaactcaacaaaccaatttctacttaccctatttttaacttcacgaactgagggggacatggaacttattaaatttctaatatcatcttaataaacaccatttcctttattacccctctttattcttccaaacacatct

SEQ ID NO: 160537 - DNA, 411 bp, Arabidopsis thaliana columbia
  unsure (1)..(411): unsure at all n locations
gggacgaccccgcggncggacagagagagagagagagagagttagatttagatttatccaacttccacaaagaaccatggaacgtgagattgaaacagaacaggggggaaacttgacagtaatgaaacttccggtgttaccaactaaacccaacactcacagccactctatgtcatcaccaattcacagttccatatcagcttcagttccctttagctgggaagaagagcctggcaagcccaagcaacactctacttcttcttcctcctcttcctcttcctcaccattaacttcttattcttcatcttcttttgaaactcacaagtgcttagagctaccaccaaagcttcacttacttgaaaaagatggaggatcagtaaccaaactttactcgcctataacagtctttga

SEQ ID NO: 160538 - DNA, 402 bp, Arabidopsis thaliana columbia
  unsure (1)..(402): unsure at all n locations
gcaatttgctcattagagaacagattaaaattaaaacaatggcaactcaagccgggggggtgtttaatttcgtcatgggaacggcctcaacctccggcgtcaagaaactccacttnnnctcaacaacccaccgtcccaaatccctctccttcaccaaaaccgcaatccgcgccgagaaaacagattcctccgccgccgctgctgcagcccccgccacgaaagaagctcccgtgggattcacgccaccgcagctagacccaaacacaccgtctccgatcttcgctggaagcaccggtggtcttctacgtaaagcgcaagtggaagagttctacgttatcacgtggaactcaccgaaagaacagatctttgagatgccgacaggaggagcagcgatcatgagag

SEQ ID NO: 160539 - DNA, 409 bp, Arabidopsis thaliana columbia
  unsure (1)..(409): unsure at all n locations
ggaggatttggcggtggaggcttcttatgttttggcggaggtggaggcggaggaggggggggtatttttcaccagtgaacgaaacacatnaataattttcattgagtgcatgtctcactttacgnacaacatggtttacaagtttgatagtgttgataccaaatatagnacnnagaaaaactanatatggaccccgacccaaaaagaatcactagctatgagtctcgtaagacttattcactctaataatattcattttatcatctaaaactcttatactttattttattttaagtcaatggggggggaaaaatttttatattatcaatctttataatttatatttttattatgatacattatattttttttaagtttttttttatttatttcttttttattttatatt

SEQ ID NO: 160540 - DNA, 443 bp, Arabidopsis thaliana columbia
acgcaagagcatgaggctatgttatctaaaagagctagatcatctgggaaagtggttgaaaagggtgggtctgaaacttccaaggaggaaactcctactgaaaacggtgacgataatggaaaaaccaatggagaacacgaagtaacaactcaggatggaccaaaggaagctgctaagaccgcatatgaatctgcacgaagggaactcaaaccaccaagagtgcttgaggccctgtcagcttcagggctacgggctttgaggtatgctcgtgaagttgaaggaattggtcaagttgtggctttagataatgacccagcatcggttgaagcctgccagagaaacattaagttcaatggtttgatgtctacttcaaaggtggagtcacatcttactgatgctcgtgttcacatgctcagccacccaaaagattttgatgtggttga

SEQ ID NO: 160541 - DNA, 318 bp, Arabidopsis thaliana columbia
ggtttggataatcttgagacagaagtcgaagtatgtctattgggaaagcactttctacgtgcgtcagcttcctcaatccaatgtcaaggacatttcaaatgtgtctgatgaatacaggacggccatgaaagactttggtaagagactggagaatcttgctgaggatttgttggatctactgtgtgagaatctagggttagagaaagggtatttgaagaaagtgtttcatggaacaaaaggcccaacctttgggacaaaggtgagcaattatccaccatgttctaaaccacaaatgatcaaaggtcttagggcccacac

SEQ ID NO: 160542 - DNA, 441 bp, Arabidopsis thaliana columbia
  unsure (1)..(441): unsure at all n locations
ccccagcagattcaacagcaacagcaactgctgcagcaacaacaacaacaacagcagcagcgggaacaacaatggtctcgacgggctcagcttcctggtgatccaagttacatagatgaggtcgaaaaaacggntcaatctgaagctattagcgattctaataatgaagactggaaagcaaccttaaagctgccaccacgagataatcgttaccagacagaggatgtgactgccactaaaggaaatgaatttgaagattactttttgaagagggatctgcttaggggaatatatgagaagggttttgaaaaaccatctcctattcaggaagaaagcattcccattgctttgactggtagtgatattcttgctagagccaaaaatggtactgggaagactggtgccttctgcattcctacccttgagaaaatngatccagag

SEQ ID NO: 160543 - DNA, 370 bp, Arabidopsis thaliana columbia
caaatatagaagaatggaagaagaggacaatgatcaaagctacatcaccagggaaggtaggcaatctgaaacagacggtcacatcagcgacaatggtccttcaacttcattgccagaagatccaaacctttcatcagataatgaactagaggatgacgagttagcagattggggtgatgactctgcagctggtggtgcctccctcactcaaagcccgcttagtagaaggaaactgaagatggtacttgataaggacgatgaggatgattgaagataacaagacttatatgattatatccatatctgggttatataaatgcaaggtatctcacaataataaaaaaatccagaaattcaactttcatgttac

SEQ ID NO: 160544 - DNA, 173 bp, Arabidopsis thaliana columbia
gcttaccatattgagctttttttcttaagtattttgtctaatatctttcatgtgaggcccgtctcttaggcgttgctgcgctcttttggctattttgtttttctgcaggcgttcataatctcaacatgtatcctttcatagtctttttttaataaaagtcagttgacgaagaa

SEQ ID NO: 160545 - DNA, 293 bp, Arabidopsis thaliana columbia
  unsure (1)..(293): unsure at all n locations
ccagaaggnnatgaacttatttcagtttgtatgagatcaatnactacccggcaaaggtggattttgtacgcggcgcggagaaatttaccacccctacaaactcctacactggaattcgaacaaagtgcgttatcaagaaagagaacaacttcaaacaggctggatacaggtacagatcatgggcaccagacaggcaagacaggtttgttaagagatgggtggagattctatcgtagccacttcttacccactagatccccggcatctggatctcttactgctcttaatcttat

SEQ ID NO: 160546 - DNA, 432 bp, Arabidopsis thaliana columbia
gttgtgataggtcaggtcagggaacaacaatggcttcttctgcaacagcaccaaattcgctatcggtcttctcatctgctcgtgtgggatcctcctctcaccaaatccctaaaacctacatttccgtttcaaaactcggctccggcagagtctcgaagccgctttctgtctcttcccagctagcgactctaccgattctatcattcgaaggagagaaggtcggagagacgtatctagacctcaaagcggcgccggaggataccgcgcgtgccgttgtgcaccgagccatcgtgacggacctgaataacaagcggcgaggtactgcttccacactgactcgcggtgaagttcgtggtggtggaattaaaccttactcacagaagaaaactggccacgcgaggcgtggatctcagagaacaccgttacgtcccg

SEQ ID NO: 160547 - DNA, 392 bp, Arabidopsis thaliana columbia
  unsure (1)..(392): unsure at all n locations
agaagaaaaataaactctttttattagaaccaagacctcatgaatcttggtcacgcacaaagtaaaacagaggagagacacattgaaacagaaatagcttaaagctcatccttcttgagcgcggatggacgaacaccttgactgaggaaatccttgtaatacttgccggattcttccatcgttataaggaagatatccaactaatgaagaatctaaacacagacgcctttagaatgtctatcgcatggccaagaatatttcctcatgggagaaaggagaaaggagtgagtcaagctggtgtgcaattctaccacgacctcatcgacgagctcataaaaaatggtataacttcattcngtactgtttttcactgggacactccacaagattta

SEQ ID NO: 160548 - DNA, 302 bp, Arabidopsis thaliana columbia
  unsure (1)..(302): unsure at all n locations
gacccacgcggccgaaaaaacaaaatggcttcgatgggtggatttcacttgcatctccggcggntcttgaaggaagcgtaaagatcaatggctgcggccgtctgaatggctctggaagagtggcggtggctcaaaggtctagacttgtcgtcagagctcatcagagtgaggagacttttcgcctttccgtgattgggcttgttgctgctggtttagctgttggctctgttgttcaggctttctctaccgattctattttcattaaagttgttctcttcttcatcttcttttctgttgctctt

SEQ ID NO: 160549 - DNA, 350 bp, Arabidopsis thaliana columbia
  unsure (1)..(350): unsure at all n locations
gcgnccgcaatcaccatgaaggttttatgaacttcattcacagttatgaggagatcaattactacccgtcaaagtttgatcctgtccgcggcggtgagaaagttcccacccctacaaactcctacactggaattcgaacaaagtgcgtcatcaagaaagagaacaacttcaaacaggctggagacaggtacagatcatgggcaccagacaggcaagacaggtttgttaagagatgggtggagattctatcggagccacgtttcacccacgagatccgcggcatctggatcttttactggtctcaagctgatcgatccttgggacaaaaacttgcaagccgtctgaacgtg

SEQ ID NO: 160550 - DNA, 434 bp, Arabidopsis thaliana columbia
attcagatcgccgaatttgcagtaaggagacgaaaatatggtgcacgtttgctactaccggaactatggaaagaccttcaagggaccacgtcgtccttacgagaaggagcgtcttgattctgaattgaagctggttggtgagtatggtctgcgtaacaagcgtgagctctggagagtgcagtactctcttagccgtatccgtaatgctgctagagatcttttgactcttgatgagaagagtccaagaaggatctttgaaggtgaggctttgctccgtaggatgaaccgttacgggcttcttgatgagagccagaacaagctcgattacgtcttggctttgactgttgagaactttcttgagcgtcgtcttcagactattgtgttcaagtctggtatggctaagtctatccatcactctcgtgtcctcatcaggc

SEQ ID NO: 160551 - DNA, 433 bp, Arabidopsis thaliana columbia
  unsure (1)..(433): unsure at all n locations
ggcagtgacccgaaccttctcactggtgctattgtcggtggccctgatgcttacgacaaggtcgctgacaggagagataacgtatgagcagactgagcctgctacttacaacaatgcaccactccttggngnncttgctcgtctcagcagtggtcattccggttatagccagtttcttccagtggttcctgctcctgttgtccgaagaccaatgcctattcgtagaccgaaagtgactactccagtccgagcttctggtccagtggctatagttcagaagataactagttcatgggtctcaaagggaaggacttactacagatactcaacaactgtgattaacaaatcttctagacctctgaaaagtctcaacctttcgatcaagaatctctatggaccaatcttgggactctcgagatcagggcactcgttc

SEQ ID NO: 160552 - DNA, 283 bp, Arabidopsis thaliana columbia
gaggaccatgggctccctctaggctttcttctgttcctagggtggcttttccggttaaggccattatggccgctcctttaaacggcctaaagtcctccgttgccttcccagccacccgcagggttaccaccgacattacttccataacaggcaacgggggaggagttaactgcatgcaggtggggcctccgatgggaaggaaaaagttggggacttttttttaccttcctgaccttaccgattccgaatgggttaaggaggttgcctcccttatccgcaccag

SEQ ID NO: 160553 - DNA, 316 bp, Arabidopsis thaliana columbia
aattgcatccatggcggaaaaggcttgttttatcaggcaccagtatatctttttgaccaacaggttttttgccggaaggcatttctctatggatgttcttaatcctggaggagccaaggttttaaaggctgactttaaggggaaatgggctgggaggattgaggttatggccccaaaggctatttttggtttaaggttcaaaccccacttgggggggggaaaactttctggatatggttggacctaggaacctgccaggacccctaagaggtttgggcctaagtccaaatttttcaggaatggactggcccccaag

SEQ ID NO: 160554 - DNA, 422 bp, Arabidopsis thaliana columbia
agccttcgaaatttttttttaattaattcgtttaaacattggcgattaaaactaagtttccttgcaacggaaacggtgtttgtatgcggggccaggtgaatcctccgccagaggagactttaacggggggaacctgggtaactccatggaacgggtggggtttccttcctgaataactcgttttttccactggagactggaagggtcccgattgctccggcgttgttgttccttccgccgttccgggtaccggaatttccggacctgaattttccggttcagttctggttactgcgatccgggcgattaaggctgttgggactttgaccgaagttggaaaagccaaaagaaggcaaaacctgataagtgtgtggggggacaatggggtcattgtttaaaaaaaaaagaagtttgaaaatttt

SEQ ID NO: 160555 - DNA, 403 bp, Arabidopsis thaliana columbia
cgtccgtttaaggggccgggttttggggtgggatcttttaagtttagctggggttaagggttacgggaactactaaggcctgggcctggattttccgacctggtccttaaaagccaagattcctaaccggtttttccggtgggtggaaccgggactggtggtttacatggatgggttaatgggccaaaacgtggtggttcaaggttgaagctaaaaaaggagaagggtggcccggtttggcatcgccggatttctaaccggcggttttgccggggacaatgggttggacccgtggggtttagcaaaggttccagagaacttgaaatggttggtccaggcatagttggtcaacggccgatgggctttgctcggggttgctgggaggttttttgccggaggtttt

SEQ ID NO: 160556 - DNA, 391 bp, Arabidopsis thaliana columbia
  unsure (1)..(391): unsure at all n locations
ccggccgncccggnccgaaatccccgggcggccccaacctttggaaggtggcccaactttttctttcttggccttttcccaaaccacagaattttaaaaaggtctggtggtaaagaagaataatagggggccaccaaagtcctcttttacctggattccggatatggttggttacaacgctggagtcattaggaccattgttggcatgtaacccagaggccatgctgttaaacttattggttggggaactagcactgaaggaaaaaattattggttgttggcaatataatggaccaaaggctggggggataatggtattttcatgttaggggggggacctattgattgtggaattgaagttaaaccagtatttgttttggctttcaagcaa

SEQ ID NO: 160557 - DNA, 229 bp, Arabidopsis thaliana columbia
ccggaaaccccggaccgacccacccgtccgaaagggggtttctctaagaccaagaaagagtttatggccagccgtttcttttttacctcaaaggatgttgacttaataaaaaattaaccaccagaagctaggcctaccgttcaagttggtgccacggttgtggtttcctatggacctaggggtgccaggagtattcgccgaaaatagtccattagggagggccaatttt

SEQ ID NO: 160558 - DNA, 411 bp, Arabidopsis thaliana columbia
ggccccgggggggagattccaggggaaggagacacctccaattaaaggctctgattttttccaccaatcccaattttttccttttaccaatttttaagctggtttaatcctttcctccttccttccattggggttaaaagaagccatggttcccgggtttttccgacccctaaatcgccagatcctttggggggtcttcgtggctttcgtcgccgttggtgctggggctgcttatttttttccatcctccaagaaccgcaaagggtgtttggatccaaagaatttaaaggggttcaggcttgttaagagacataagcttagtaccaatggggccaagttcgtttttgaactcccaacttttacttttgggttggggcttcccatgggccaacacattatttgcaggggaaa

SEQ ID NO: 160559 - DNA, 462 bp, Arabidopsis thaliana columbia
gtccgccggcggacccggcccggaatcccggggcggccccacgcgtccgaaggtttccccccttttggttccaaccccccttccccaaaccccagttttttaaaaaggtttggttttaataaagcactatggatcggcaccaaagccgccgttatcctggaattcctttaatgttgggttaactcgtcagagtaacttcgaccactgttggcatgtgatccagcaaacgggttaacccggcccctccggttttgtcgggccaatgtcccgacccatgtgggagttcaggatttgttcggaaggctaacgttgcaggagaagatccgcaacctggtaaccattgctgccgccgtaccacgtttgggttttgggggctatgagtgggggtcccgggttttccacggcatttccgacgttggtccaggccctaagttcgggggggcttttcccggggccaccagt

SEQ ID NO: 160560 - DNA, 379 bp, Arabidopsis thaliana columbia
  unsure (1)..(379): unsure at all n locations
gaccaggcgnccgaacggggggggttccagccaagggggggggtattgggttaacctattggttagcaggtggccggaagcgaaagttgttggaggtggaaatccttggggggatttttgcaggacaaacccggttgttggggaatgcaaagtttatgactgaccaacttggaccatttttttttttatttttaaccaaaccaatactttgattaaggggttacttattcgaaatcgacctatgcttactggtttttttaaaaataaaaaaaaaataattatattttaaattaaatattaaatatttttttttttaatcattaattatattttaataaatttttttaatttacttattttaatataaatatgggggggg

SEQ ID NO: 160561 - DNA, 392 bp, Arabidopsis thaliana columbia
aacgtttaacttggggcggcatttctaaacctaaatggccgcctaaacaagggttttttcttcccttgccttggccggaaaggcgcgaaagttttcccccgcggaatttgaagtctttggaagcggccgtgtgccaatgaggaaaactgttgccaagccaaagggcccatcaggcagcccatggtacggatctgaccgtgtcagagccttgggcccattctttggcgaataaccgggctactttaccggaaagttccccgaagactccggatggaacaccgccggactttaagttgaccccaagacattcgcaaggaaccgtgaactaaaagttttccccagtaggggggccatgctcggagccctaggttgggttttccttgggcttttgg

SEQ ID NO: 160562 - DNA, 425 bp, Arabidopsis thaliana columbia
  unsure (1)..(425): unsure at all n locations
cggncgggaatacggggcggaccaacgcgtccgaacaaggattccaaagttccttaatcccagttttagggggaattgaaacaccttccaaaaactccatgtaccaaggccaccaaacggatcaccaaaaacttaaaaccttatttgggaaacaaaaaccgcccaaccatagcttccgggggttttttgggtttaatcctggtcccttaactttaaggttaactcattttaaacagattaaaagcttatttttaattccagaggatcctaattttaatccaaatttacctttggatctacttttaaaaccaaggcctttaatgggtggtcaccggaatggaaccactaaggttttttttcgcaacaataggcttaaaataccgtggttgggggaacccggaaaccctagggaacggttttttacc

SEQ ID NO: 160563 - DNA, 388 bp, Arabidopsis thaliana columbia
gtgatcttaacaaaggcaactggggtcaagtcggttttatcgctttttggaactccgttaatgataaaaaggcaaaggtggttaaggaaaggattgaggcagtggacccaaataaaaacttgatcacgtttagggtaatcgccggggatctgataaaagagtccaaaagctttttgttaacaatccaggtgaccccgaaccttgaaggccctgaaagaattgtgcactggcaccttgagtttgaaaaaataagcagggaggtagctaatccggaaactttcttccaattttgggtcaaggcctcgaaagagatcgacaaacatcttttggccgaggaataaaggagtcctactacttttcgggtttgaatttaaaggcattaaataag

SEQ ID NO: 160564 - DNA, 360 bp, Arabidopsis thaliana columbia
ccggggcggccccacgcgtccggaaaccgaccataaaacattccctaggagatcaatatggttggggtgttgaagttggcttgctggttctgggccggcttgatgggggccggcccaataacatcgaccgctgggctaagctggggttaagttaacagcaactgggcagcgggcttgggttacgggctccaagggggggtcattcccccagcgggtggttccggcgttaaaaacctaaccagcttagccaagacgaccccagacgcgaagaaagcttgcaatggcattcaaggtgccgttggagccttaggctttggtttaaacgctggccgggcagttggaattcctaaggcatgtggg

SEQ ID NO: 160565 - DNA, 184 bp, Arabidopsis thaliana columbia
aaaagggcggacccacccttccggcctttggcagtaactgttctctaaataatttttattttcctttggggaacctttgaaacccccacagaaggttcaccaactcctcttaaaccccaaaaaaccctgtaatcgcttaagagggtttcggccgggaaacccacttgtcctaccgacccactta

SEQ ID NO: 160566 - DNA, 360 bp, Arabidopsis thaliana columbia
acctacaattttttggtcgacccaaagggtggtttagggggggggttattaggtttttcctttggatgggctccagctttgggttttttttttaatcttggttccggcttcgattcccaaaatttaccctttcgatttggggtttacctagccgggtggcctcagtaaagtcgaaggcttttgggtttccgaagggccatttcttatttgaaccaaaacctttcttttccatggggctgagaaaaaagcaggagcctttgattatttttgggggcggggttttttttaaaggggaggtcaatgctctagcctgggttgtggcgggaccacttatcacaagacagttgtttttgaagttcc

SEQ ID NO: 160567 - DNA, 354 bp, Arabidopsis thaliana columbia
aatggtggtttaccaaagattccgattttggccacataagttttccaccaatcctccttggccggccaaacggttttaaagccttccagcgacctaatccaaaaggggggcgtttggggcgggtggccgtgggaccatgctttgacccgtaaggtttattccccaaggcatttgttttggcccagaccgtcccaggtcctggggaccattttgggagaccacaccgcctaatttaactggagattccccgggggcctccggttgggccaccgttggacttttggttgacccggaaccattcgttaagaaccgtgggttggaagtaatccacagcagatgggctatgtggggggc

SEQ ID NO: 160568 - DNA, 415 bp, Arabidopsis thaliana columbia
  unsure (1)..(415): unsure at all n locations
cgtccntgatccttaaaacaagagggatgcaggtttttttaataccatggttagtctaagaaggggcaaaattcccccatgggaggaaggcctttgcccgttgatttgaacgttaactcatagggttttaaaagttggttgatgtccataaaggccaaatccccaattccggaaatattaaccatggaaaccggttttggtgaagaactaggggcctaaaattcggtggcggaggtgcccgttgaccataacaggaaatttttttttcggaggcaccttttgggaatccacgaagttgttggcattgccaaagggaatgttccaggatcctttgtatggacatgtgtgggaataactttaatgggtataagggttccaaaacaaaatttggacctttcttccgtgtatttaaaaa

SEQ ID NO: 160569 - DNA, 365 bp, Arabidopsis thaliana columbia
agagaggaaggagaatttgaagtgttttaaaaggctatcttgttcctcccgcttcgccacaaggatcacataattgctttcgttgaaggaaactataaaaggttgaccgtaaggcacaaaacacttatgtttgaccagttctaatggggcggggttaaccggggatgttttatttttttggaacgtgacacctaggcgaaaggaaaaggttccttaaaaaattgccgcccagcttttaacatgttccaatcctttgtgacctaattttttggcagagaccacactcttgtgggagccaacttttgaggctgaagcccttgcagttaaaaaattttctttgaatgtttaaaatttagcgaaacttt

SEQ ID NO: 160570 - DNA, 274 bp, Arabidopsis thaliana columbia
agcggtggttcgggggttttctccaggctttagccactcgattaatcctccaatctataaaaatccaaattttcaatctccctttcttaagattaaagggggcaaagtggagattttgttcgcctttttcctctggaaatttcaatcgaacctatttcttcagggatgcaaattctgtgaattggtggaaccgaatttcacattttttttggaggaatggccgccccaattttttcatttgccgttaaggacctgggctttgggtttttccttc

SEQ ID NO: 160571 - DNA, 338 bp, Arabidopsis thaliana columbia
  unsure (1)..(338): unsure at all n locations
tggaatnccggggccgccccacccgtccggacctggcctatccattttattccacaacctttttcgagggccctaatgataaatttttggggggggttggttcagcaataactatgctcaggttcaagactaataagcaaccgtttcctcctttgggactggaagctggcccagtttttgacctcaaagaggagggccccaggaccgtgggtttccatggaagagccttttttttgctccacaaatttggagctccaggtctgtccttaatccacctgttgatggacctttttttcttggattccatgcttttaataagttatcaaaccttccttcta

SEQ ID NO: 160572 - DNA, 440 bp, Arabidopsis thaliana columbia
ccaatttggaacccagggtggagccggcgattcctgtgggctttccggggaacccgactccgtggttgaaggaggagctcgatttcgggattccgcctataaaaaacctcgatttcttggggagggggaggcctttttttaagccttaccatttgatcatggtccaggacggggatccatcgaagaagatccatgtccttgaaggttacaactccaagctttacaacaggaacgccattaaccgaatcctcggacctaaggctcttggtatctggtttaaggattctgctggtcgatgcttggggtccatggggtttaagaggagagttattttaaccattgatgacaatggtttcgttgccaaggatccatcaggcaaagcagggaacgctcttgagcaacacataaggaaccttttttgcccatggtttccctttttt

SEQ ID NO: 160573 - DNA, 356 bp, Arabidopsis thaliana columbia
cggaactactttaagattaacttcactgttccttggtgggggatggtttcttgaggacctgttaatcataaggaagttgttgggcacgggaaaaagctttttaccaagttgcggtctgatccaacaactattttcaaacgggtggccatggaacctgttagttttacgggaccgggggtccgaaggattgatgatgccctaccctttggtccaaatgggggaggctttggggggagatttttggcctgacccaaattccgtggcttttatggttatgcaaacaatgttgggttcggggaacaaaaatgggggggggggtaaacacgggggttttgtcctggcccatggggttgcct

SEQ ID NO: 160574 - DNA, 415 bp, Arabidopsis thaliana columbia
ggccgtcaattctttaaaaataacaaactgtggagtcaaagacagaaccaaaatccaaattaacatgggttattccaacttaaaggacataatacactcaataatggacagggatgctgatgtaataacaatggaaaactccaggtttgatgagaagtttttttccgggttccgggaaggagtgaagtacggggctggaatcggtccaggagtttacaacatcaattttcaaagattacaattttttggggaaatggaaaacagggtaaacaggaggctggttgtcctagagcaaaacatctttggggttaaccctgactggggcttaaagacccgaaggtccaccggggtaaagcctgaactaaagaacatggtggatgcggttaagttaatccgttccaagttggccagggcc

SEQ ID NO: 160575 - DNA, 247 bp, Arabidopsis thaliana columbia
aaaaaaggaaaccccaaaaccaaggttttttttggctccctaaattatggtttggccctcccctgccttcccgggaaaggttgttaaccctgcggaataaaatttcctcgaaagcggccttttaaccataaggaaaactgtcgccaacccaaagggtccataaggcagcccatggaacggttctgcccaagtaaagtccttgggtccattttccgggaagcccccaagctaccttaccgggaagttc

SEQ ID NO: 160576 - DNA, 401 bp, Arabidopsis thaliana columbia
  unsure (1)..(401): unsure at all n locations
gaccaaggcgnccgaaatgggccttttccgtcctcttggagcccattttcttggcctccccttccaaggcaataataaagattggcggtcccactaagctcctcctttttatccaaccacttttaaggctggttggggggctttttttgggggtaaagtttgggaagaccactcggggttctttcctttgcccggggggccagcctatttctaaccgaagtttttttgaggagagttctgtttttgaggggcacnttactaagttgggtttgaccagggtagccttcttgttgggcaatgttgatgagcctaaaaaagtggatgttattgctgcctttgccaaggactttcagtacttgcaccaccattgtctacacttttaagatgggcttgactggttt

SEQ ID NO: 160577 - DNA, 309 bp, Arabidopsis thaliana columbia
gcttggttcaacccagaaggccgccaggggggtcaaaccaaagatcgttgaaaatgaagacgattcttttttccgaaacgttggacatccccgccggggtacccatcaaggtcaaccctaaagggatcgaatttgaaggacctcccggaaggctggttcgcaatttaaagcatttaacccccgttttccagctgatcaaggacccaaaaactggaaggaaaaagcttaaaatcgatttgtggtttggaacacccaaaaccagggcctccataagaaccgtttttagccccgtggtaaacttgacctccg

SEQ ID NO: 160578 - DNA, 374 bp, Arabidopsis thaliana columbia
tttttcctccggtttgtcctccctttttttttagacctccgacgaccggatattgaaatccttccgattaattttgtcaatcacacaaaacccgaaacccaaaaaaaatccttggcgttggtgaggaccaggggggcaaatcccatcgccgggatggttggggatgaaatgaccagggttattgggaggtttataaaggttaagttaattactccttttggggggtgggttttaaggtccttggacctgggtcttcctaaccgggatgctccggttgacaaagttcctttggaaggtgttgaagcaactaagaggtccaaggtggcgatcaagtgggccaccttctttccagatgaaggccttttcacggaatt

SEQ ID NO: 160579 - DNA, 322 bp, Arabidopsis thaliana columbia
ctcatcaccagctttgcatcttcttttttctgtttgatcttctctcgtttctagatctggcgacgatcggaatatcaaatgcgatcgattaattctgtcaatcacacaaaaaccgaaaaccaaaaaaaaaccatggcgtttgagaagatcaaggtggcaaatcccatcgtcgagatggatggtgatgaaatgaccagggttatttggaagtctatcaaggataagcttattactccttttgtggagttggatattaagtacttcgaccttggtcttcctcaccgtgatgctacggatgacaaagttactattgaaagtgctg

SEQ ID NO: 160580 - DNA, 240 bp, Arabidopsis thaliana columbia
  unsure (1)..(240): unsure at all n locations
tggagtcccggtccgacccacgcgttcgaggatattggggtgaatgtggacagttttgttgttactttgagatgaccaacctcggtncgaggttgttgaggagagggacggcgttgcatcaattgccctcagccctaatgtctctgcgcaaatctttctaagtcaaaggttttaaagtaatgtggttttacttttttagaaatcatctccttgttctgcgagtgattattacctgctcat

SEQ ID NO: 160581 - DNA, 429 bp, Arabidopsis thaliana columbia
gaaacaaaggccccacagaatttggattcgtgtttaaaattgcagtagatggtcctgaagaaggtaatgctcaggatgctgagagcgagaataagcatgtggctacagaaacggaagcggaaaacactgattgcaatgaacaaggaagagttgttgttggtggatcggagttgactagttctccaaaggaaatcaagaatgtggaggtcgaaaaggcagctgaaaaagcatttccaatagaaacagccgtatcaaatgcaagaccaggaaaatctaagagtgcacaaatggctgaggattcagatacatgtctcttgaataagtcaccaacagcaaatgattcaaatggcagtgaatcagttattggagtgaagcttcaaaaggatttatgtgatgctgaactgaaaacagtatatggtgaaaccgaaa

SEQ ID NO: 160582 - DNA, 316 bp, Arabidopsis thaliana columbia
caaaaccttccaagctcaccctgaccttttcttaccagaccgtgtcctagttggcatggggcattttttcatgagaaggtactctgatcttctcatccgtacttgtcataagcgcggtgtccacgccatgggtggcatggcggctcagattccgataagagatgacccaaaagcgaatgagatggcattggatctagtgaggaaagacaagctgagagaggtaagagcaggtcatgatggaacatgggcggctcatccaggacttatcccaatctgcatggaagcattcactggtcacatgggaaaaagtccaaac

SEQ ID NO: 160583 - DNA, 277 bp, Arabidopsis thaliana columbia
  unsure (1)..(277): unsure at all n locations
gaccgacccacgcgtcctagacatttgacaatccgatttaaattgnctttctattttcttaacaagaatacaaacaacaggaaggttttatttcttcctatgtggtctcctcctccacttttttatacattcccagctcattccaccatgttcgctccattcaccgtctttaagtcatccgttttattcccggtcaccctcaataccaacaagtacattattttcatctcatgcatacttttaagatttatctgtatcaacttgtttccaccaatta

SEQ ID NO: 160584 - DNA, 245 bp, Arabidopsis thaliana columbia
ggcgtcttcttcagcgactctctctcttttttctactttctctgctcattgcaatggcaggggtcgccgttctagcagtaggctctgttctctctctaaaccttcgcttaatttggctaaacctctgactggatttctttctccttccactgcgtcgacgtctcgaaccgcattcaccgtcgctccgaaattcgcggaatcagtcgtctaagctgaaccggagactacctatatcgaagctgtgg

SEQ ID NO: 160585 - DNA, 272 bp, Arabidopsis thaliana columbia
  unsure (1)..(272): unsure at all n locations
cttttatcaaaccagagagccgtcatttttatctaaacaaagatcggagaanattaagacgggtcttttttccgaaacggtgggcatcccctacagtgtttccatcaaggttcacgcttaagttatcgaagtctaatgaccttttgggaagcttgttcgcgatttcaagcatttcaaccttgatttccaactgttcaaggatccataaactggtaagtaaaagcttaagatctttttttggtttggtacacgcaaaaccaacgccttcatta

SEQ ID NO: 160586 - DNA, 294 bp, Arabidopsis thaliana columbia
caattggactcttacgtactctctgtgtcctttttctttgtctacccctacaaagtcgtcgggaatacttgcggtaccgctgggctcctcctctctatcccaccacttctaaagctggctggtgagctctctctgagtgtcaagtctgtgaagtacactcgcggctcctttctctgccccggatgccagccttttccttaccgcagcttctttgaagaagtctctgttcttgatgggcactttactcagctgggcttgaacagcgtttcctacttgatgggcaatgatgattag

SEQ ID NO: 160587 - DNA, 404 bp, Arabidopsis thaliana columbia
aaacccgggccggcccacgcgtccgaaaaaaaagtaaacacaaaatcaaagattatatttgcttcctcaaccatggctttgtcctccggtgccttcgccggaaaggcggggaagcctgccgcatcagatgtcctcggaagcggccgtgtgaccatgaggaagactgtcgccaagccaaagggtccatcaggcagtccatggtacggatctgaccgagtcaagtacttgggtccattctccggcgagcccccgagctaccttaccggtgagttccccggttgactacggatgggacaccgttggtctatccgccgacccatagaccttcgccaggaaccgtgagctagatattatccacagcagatgggccatgcttggagccctatgctgcgttttccctgagc

SEQ ID NO: 160588 - DNA, 413 bp, Arabidopsis thaliana columbia
gaactacattaagactcactacactgttttcttgatggtgattgctgctgcaggaggtggtgtgcatgaggaagttggggagcaagtgaagaatctatttaccaagtcgtcgtctgatccaacaactacttctcaactggttgccaatgaacctgctagttttactggttctgaggtccgaatgattgatgacgacctaccccttgcacaatttgctgttgcctttgagggagcatcttggactgatccagattccgttgctcttatggttatgcatactatgttggtttcttggtacaaatatggtggtgttggaaaacactttggttttgacctgacccagtagggttgcctttatgaaatagcataaagcattatggcattaacacttactactaggattctgtactgtt

SEQ ID NO: 160589 - DNA, 415 bp, Arabidopsis thaliana columbia
ctcatttcgaaaccatggttgagccggcgaatactgttggtcttccggtgaacccgactcggttgctgaaagatgagctcgatatcgtgattccgactatcagaaacctcgatttcctcgagatgtggaggccttttcttcagccttaccatctgatcatcgtccaggacggagatccatcgaagaagatccatgtccctgaaggttacgactacgagctctacaacaggaacgacattaaccgaatcctcggacctaaggcttcttgtatctcgtttaaggattctgcttgtcgatgctttgggtacatggtgtctaaaaagaagtatatcttcaccattgatgacgattgcttcgttgccaaggatccatcaggcaaagcagtgaacgctcttgagcaacacatcaagaacct

SEQ ID NO: 160590 - DNA, 337 bp, Arabidopsis thaliana columbia
gtacttgactatccaagtgaatacatcacctctttttatggcacttatgataaaatctttgggagggatggctcagtcataactatgctcacgttcaagactaataagcaaacgtctcctccctttggacttgaagctggcacagtcttcgaactcaaagaggaaggccacaagatcgttggtttccatggaagagccgatgttctgctccacaaaattggagtccatgttcgtcctttatccaactgatgatggagctctttattccttgattccatgcatctaataagttatcaaatctatcttgtaaagggctcatatgaggtcttttcatgcc

SEQ ID NO: 160591 - DNA, 355 bp, Arabidopsis thaliana columbia
tttcgttttgttcttgctgtaagcatcccttttttttttctctcttatccacacgaattcgtgcgaggcctttaccagcttggaggggataaatacttcggtctctccttatagtggatttggatcctcagaagctgaagtttgacacatcttctcagaaagtgaatacgagagcattcagaatggatctcacattcactcaacctgatgattggcatctacatctccgtgtctttgatcttcttcatgctgctgttccccacattgccgagtaattttaagagagctactgttattcctaatgtgtagccggctgatacctccactgcatctgccatttttttccggaaattta

SEQ ID NO: 160592 - DNA, 407 bp, Arabidopsis thaliana columbia
ccgtccgcgcgtccgagcagtcctacaaaggcttactccactccaaatattctctcatatgatgcgccaatctataaaaaggggaaattttcaatctgccgttggtaagattaaaagtggcaaagttgagattttgatcgacttcttcctctggaaatttcaatcgaaactatatcttcagagatgcagaatctgtgaaattgtagaaacgaatttcacatttttttttgaagaaacagacgacgcacatatctcagttgccggtaaagtactgtgcttcgagtatttcttccaccgcccaacggaattacgatgcttggtcttcgccgtctcctattgtaatttgtgagagtaatggaatttccgatggtctttgggtgaagcggaggaagaacaatcggagattt

SEQ ID NO: 160593 - DNA, 422 bp, Arabidopsis thaliana columbia
gcatgagagaggaaggaggatttgattttatttataaggctatcttgaacctctcgcttcggcacatggagcacatcaggggggacggttaatgaaacgagagaaggttgaccggaaagcacgagacagctagtattgaccagttctcatggggcgtggctaaccgtggatgctctattcgtgtgggacgttacaccgaggcgaaaggaaaaggttacttagaagatcgccgttcagcatctaacatggacccatacattgtgaccttacttttggcagataccacacttcctgttggagccagactgttgaggcttaagcccttgcagctcaaaagctttctttgaatgtttaaaattagtcgaaacttttatgaatctgttgaacacacgtgtctatgtggtctctcaagttgtttaaac

SEQ ID NO: 160594 - DNA, 420 bp, Arabidopsis thaliana columbia
ctgatccttaaaaccaagatggatgcttgattctcttattacatgggagtctaagaatgcgcaaaattactccattggtggcaagcctttgaccgctgcattgaacgtttactcgagaggttttagaagtctgttgaagtacattaaggacaaatacgcaaatccggaaattatgatcatggaaaacggatatggagaagaactaggggcctcagattctgttgctgttggtaccgctgatcataacaggaaatattatcttcagaggcatcttttgagtatgcaagaagctgtttgcatcgacaaagtgaatgttacaggatactttgtatggtcatttgtggataacttcgagtggcaagatggttacaaaaacaagattggactttactacgttgttttcaaaaataacctcacacg

SEQ ID NO: 160595 - DNA, 411 bp, Arabidopsis thaliana columbia
  unsure (1)..(411): unsure at all n locations
acctacaatttcttcgtcgatccaaatggtatcttagtggtggtgataataggtttctcctgttgattggctccagctttaggtttttttttttatctttgtttctgcttcgattcccaaaatttaccctttcgattttgagtctaactagtcgagttgactcagtagagtcgaaagcttctgggtttacgaagagacatctcctaattgaaacaaaacctttcctttccattgggctgagaaaaaagcaagagtctttgaatattttttggagcgtggttttatttanatgggaggtcaatgctctagcctgagttgttgcaggaacacttcacacaagacagctgttcttgaagctcctgatgttgataatggagagagtagtgagaacacttgtgttcctaatttccg

SEQ ID NO: 160596 - DNA, 413 bp, Arabidopsis thaliana columbia
ccagaaccctagaattcgaatatctccaaagttctcctcaaagcgccatgtcgctcactatcccggcgaatctcgttctcaacccgagatctaacaaatctctcactcaatccgtacctaaatcctccgcaagattcgtctgctccgatgacaaatcctcctcctccacacctcaatccatgaaagctttctccgccgccgtcgccctctcttccatcctcctctctgctcctatgccagctgtcgctgatatctcaggtttgactccttgcaaggactcaaaacagttcgctaaaagagagaagcaacagatcaagaagcttgaatcttcttttaagctctacgctcctgaatctgcccctgctcttgctctcaatgctcagatcgagaaaaccaaacgcaggttcgacaac

SEQ ID NO: 160597 - DNA, 422 bp, Arabidopsis thaliana columbia
ctctcttcaatcctttcctttcattgtagtttaacatagattacgattatggccacatcagctatgcaacaatcctccttcgccggccaaacggctctcaagccctccagcgacctcatccaaaaggtgggcgtcttgggcggtggccgtgtgaccatgcgtcgtaccgtcaagtctactccccaaagcatctggtatggaccagaccgtcccaagtacttgggaccattctcggagaacacaccgtcttacttaactggagaataccccggagactacggctgggacaccgctggactctcggctgacccggagacattcgctaagaaccgtgagcttgaagtaatccacagcagatgggctatgttgggtgctctcggatgcacattccctgaaaatctctccaagaacgggggtaaatt

SEQ ID NO: 160598 - DNA, 350 bp, Arabidopsis thaliana columbia
gatagcaaaaggcatagctcgcgggcttactttcttacacgacaagaagtacttgcgggggggaccttaagcctagcaagtgtgcttttgggcttatatatggagcctaaagttgcggatttcggtcttgagaagcttttgattggggacatgagttatagaaccgttggatcggttccaatattcggaagcaagagatccacaacgtctcttgatgtttgggccgagtccaagcccaagtccaagttcagtcagtgtaccctacaatgctccagaatctctactgagtattaaaccgtattcgaaatggggtgtgtacttttttcgagttattctgcttgagctactaa

SEQ ID NO: 160599 - DNA, 414 bp, Arabidopsis thaliana columbia
aaataaaagtatagtactatcttcctctttttctattctttcaaaaagtttcatactagcgggggtttatttcttctgtggggtgtatccacaacctcttttcaagatttctgtgtctcaaaccttaaacgcgctgtaaccccttctggttacccttgcattcttcccattcatgtcaaagctacagactttgtcttctctggcttaagcactcctggaaacactacaaacatcatcaacgcctctgtcacacccgctttcgcagctcaattccctgttctgaactgtctatgcctctggtcaggtagacttgacttatctcctaaatgtgtgatcccaatgcacactcaccctggtgcctctgaggttctctttattcttactgtcttcattaccgctattttatcttctcta

SEQ ID NO: 160600 - DNA, 418 bp, Arabidopsis thaliana columbia
gcaaacgaacataaaacactacctaagtgatttatatggctggagtgatgaagttgggatggttgctcttggcctgcatgagggtggccggtccaatcacatcgaacgctgcgctaagctgtggctcagttaacagcaacttggcagcgtgcattggctacgtgctccaaggtggtgtcattcccccagcgtgttgctccggcgttaaaaacctcaacagcatagccaagacgaccccagaccgtcagcaagcttgcaattgcattcaaggtgccgctagagccttatgctctggtctgaacggtggccgtgcagctggaattcctaaggcatgtggagtcaatattccttacaaaatcagcaccagcaccaactgcaaaaccgtgaggtgatgagctagcaacggtgagattatgct

SEQ ID NO: 160601 - DNA, 432 bp, Arabidopsis thaliana columbia
gtgatcttcacgaaggcgactggggtcaagttttctctatcgtcttctggaactacgttcgtgatagagaggcaaaggtggctaaggagaggattgaggcagtggagccgaataagaacttgatcacgtttagggttatcgacggtgatctgatgaaagagtacaagagcttcttgctcacgatccaggtgaccccgaagcttggaggccctggaagtattgtgcactggcaccttgagtatgagaaaataagcgaggaggtagctcatccggaaactctcctccaattctgtgtcgaggggtcgggggagatcgacgaacatcttttggccgaggaatagaggagtactactactctttgtgtttgaatttaaatgcaataaataaggactaagagccatgtttttgtgagatatatgaatgtgagtgtgc

SEQ ID NO: 160602 - DNA, 354 bp, Arabidopsis thaliana columbia
agattcaaaatccctaatcattttattccaatctaaaacatacaaatggtagagtacatagccacaagagggtcccaaaaacttaaaccctattttgtatcatatctcaccaaccatagcttccgtagactctttcgtcttcatcctcgtccctctactcttagtctcactcattttcaacagattcaaagcttatttctcactccagaagatcctaatcttcatccaaatctacctttcgatctacttctcaatcctatgcctttcatcgttcagtaccggaatggaaccacttaagtttctctacgcaacatcgagctcaacatacgtttgcttgcagatcctgcaaaccct

SEQ ID NO: 160603 - DNA, 414 bp, Arabidopsis thaliana columbia
  unsure (1)..(414): unsure at all n locations
cccgcccacgcgtncgaaatcttaaacgttttactttgcgctgcactacttaaccccaanggccgcctcaacaagggctctcttctaccctggcttcgccggtaaggccgtcaagctttcccccgcggcatctgaagtccttggaagcggccgtgtgacaatgaggaagactgttgccaagccaaagggcccatcaggcagcccatggtacggatctgaccgtgtcaagtacttgggtccattctctggcgaatcaccgagctaccttaccggagagttccccggagactacggatgggacaccgccggactttcagctgaccccgagacattcgcaaggaaccgtgaactagaagttatccacagcaggtgggccatgctcggagccctaggctgcgtcttccctgagctttt

SEQ ID NO: 160604 - DNA, 289 bp, Arabidopsis thaliana columbia
taacgagtggggttacagccaaagagttgttgatttggctcacctagtggctagcaagtgggcgggagcggaagctgttggaagtggagatcctttggaggatttctgcaagacaaacccggctgatgaggaatgcaaagtctatgactgaacaactttgatcatttctttctttattttttaccaaaacaatactttgtatcatgagttacttattcgaaatcgtactatgcatacttgtttttctcaaaataaatttatttttttaaataatttataaatatattta

SEQ ID NO: 160605 - DNA, 402 bp, Arabidopsis thaliana columbia
cggacgcgtgggggatattacaagggaatgttttcaactccaattcaaagctctgattgggggcaccaatccccattttgtccgttttacaattcttaagctagttttatacttttcttcttcctttcatttgggttaagagaagccatggataccgagtttctccgaaccctagatcgtcagattcttttgggtgtcttcgttgctttcgtcgccgttggtgctggtgctgcttattttcttacatcctccaagaaacgcagagtgtgtttggatccagagaatttcaaggagttcaagcttgttaagagacatcagcttagtcacaatgtggccaagttcgtttttgaactcccaacttctacttctgtgttgtgtcttcccattggacaacacatcatt

SEQ ID NO: 160606 - DNA, 359 bp, Arabidopsis thaliana columbia
catgtatacacacatatagttacaaacacacatacacaaaacacagatatataaaaatgtcttgttataataaagcactattgatcggcaacaaagtcgtcgttatacttgtattcctcttatgtttggttcactcgtcagagtcacttcgaccactgtttgcatgtgatccagcaaacgggttaacccggacgctccggttctgtcgggccaatgtaccgatccatgtgagagttcaagatttgctcggaaggctcacgttgcaggagaagatccgcaacctcgtcaacaatgctgccgccgtaccacgtctcggtattggaggctatgagtggtggtccgaggctctccacggcatt

SEQ ID NO: 160607 - DNA, 295 bp, Arabidopsis thaliana columbia
ccggatggaagttcgcgccggcgtccgcgttctgttcactttctctctctctgtatattctttttatgatggcaaaaaactgtaattgagtgagtgttctatgtgtatgggggggattgaccctctttaacaaacccatcaccgtcgccgggcagaatatttcgtcggtgggcttgttcacctttggtgactccaacttcgactccggtaacaaacagactctcaccaaaaccttactccctcaaactttctggccgtatggaaaatcccgagatgatcccaacggcaaattctt

SEQ ID NO: 160608 - DNA, 287 bp, Arabidopsis thaliana columbia
caaggtggtctcccgagatcaagaatgtgtttattggcagccggatccgtgtcaccgggaggggtttttacttaatcagggagttcaccatcagaagctaggcctaccgttctagttagcgccacggctgttggttactatggtactagtgagacaggagtattcgactaaaatagtccatcagggaaggactatcttgcagaggtttgcagagaatgggaaggaacttgcattgaaagcaaataatgatgttagagtggcacttatccgtattgttgttgtttttt

SEQ ID NO: 160609 - DNA, 337 bp, Arabidopsis thaliana columbia
gcgacaacaaactatggagcgagtctttttatttcagtgttagtacatacactgtggaatgtaatccacaagatatgatgggggaggtttataagaatggacctgttgaagtctcttttaccgtttatgaggattttgctcattacaaatctggagtctataagcacataacaggttctaacattggaggtcatgctgttaaacttattggttggtgaactagcagtgaaggagaagattattggttgttggcaaatcaatggaacataggctggggtgatgatggttatttcatgatgaggagaggaactaattaatgtggaattggagatgaacc

SEQ ID NO: 160610 - DNA, 396 bp, Arabidopsis thaliana columbia
cttcaagtgccgggttctcgggtcggatcttctaagtctagctagggataatggctactgtcactactcatgcctcggcctcgattttccgaccttgtacttcaaagccaagattcctcaccggttcttccggtaggttgaaccgcgacttgtcgtttacatcgatcggttcatcggccaaaacgtcgtcgttcaaggttgaagctaagaaaggagaatggttgcccggtttggcatcgcctgattatctcaccggcagtcttgccggtgacaatgggtttgacccgttgggtctagcagaggatccagagaacttgaaatggttcgtccaggcagagctggtcaacggacgatgggctatgctcggtgtcgctgggatgcttttgcccggaagtt

SEQ ID NO: 160611 - DNA, 414 bp, Arabidopsis thaliana columbia
aatctctctctcactcactcgtttcaacaatggcgattcaaactcagcttccttgcgacggagacggtgtatgtatgcggtgccaggtgaatcctccgtcagaagagactctcacgtgtggcacctgtgtcactccatggcacgtgtcgtgtctccttcctgaatcactcgcttcttccactggagactgggagtgtcccgattgctccggcgttgttgttccctccgccgctccgggtaccggaatctccggacctgaatcttccggttcagttctcgttactgcgatccgtgcgattcaggctgatgtgactttgaccgaagctgagaaagccaaaaagaggcagagactgatgagtggtggtggtgacgatggtgtcgttgttgaagaaaagaagaagttggaaatctttt

SEQ ID NO: 160612 - DNA, 286 bp, Arabidopsis thaliana columbia
ctcggaagtacacaaattctatctctttttttttttgatttcacggcctgttctcgatggtgagattgttactatcaaatcctggaaagggattaatgatcagataatgtccattgactacaaaagctcaaggatcgagattttaactgctgattctcaattaactctaaagaaatggtgttgtacctctagtaacggttttagtgatcggaaacattgatgaaggatgaaattctcttaaaatttctttcttggtgtcgctgtatggtaacttcctttttgcctt

SEQ ID NO: 160613 - DNA, 422 bp, Arabidopsis thaliana columbia
ctatggttgcctctccggctcaagccactattttctttcctttcaacggacttaagtcctgcggtgcctttccagccacccgcaagggtaacaacgacattacttccatcacaagcaacggcggaagagttaactgcatgcaggtgtggcctccgattggaaagaagaagtttgagactctctcttaccttcctgaccttaccgattccgaattggctaaggaagttgactaccttatccgcaacaagtggattccttgtgttgaattcgagttggagcacggatttgtgtaccatgagcacggtaactcacccggatactatgatggacggtactggacaatgtggaagcttccctttgtcggttgcaccgactccgctcaagtgttgaaggaagtggtagagtgcaagaaggagtccccc

SEQ ID NO: 160614 - DNA, 288 bp, Arabidopsis thaliana columbia
cttatcatctttgtgcttcctgcaaatagttcttttttgttgatctttctcctccatcaacaaagatgggtaagacacgtggtatgggagctgggcgtaagctgaagagactccgaattaaccagaggtgggctgacaagcagtacaagaagtctcacttgggaaatgagtggaagaagccttttgctggttcttcttacgctaaaggaattgttcttgagaaaattggtattgtggctaagcagactaactctgctattccgtaagttgtgctagtgttcataatat

SEQ ID NO: 160615 - DNA, 198 bp, Arabidopsis thaliana columbia
gtaaatcgcagccatggcggaaaaagctttttttatcaggaccagaaacttcatgacgcgaacaggcttctcgccagaaagcaattcgttattgatgttcttcatcctggaagagccaatgtttcaaaggctgagcttaaggagaaattggcgaggatgtatgaggttaaggacccaaatgctatcttctgtttcaag

SEQ ID NO: 160616 - DNA, 399 bp, Arabidopsis thaliana columbia
gaagaacaatggcttcctctatgctctcttccgctactatggttgcctctccggctcaggccactatggtcgctcctttcaacggacttaagtcctccgctgccttcccagccacccgcaaggctaacaacgacattacttccatcacaagcaacggcggaagagttaactgcatgcaggtgtggcctccgattggaaagaagaagtttgagactctctcttaccttcctgaccttaccgattccgaattggctaaggaagttgactaccttatccgcaacaagtggattccttgtgttgaattcgagttggagcacggatttgtgtaccgtgagcacggtaactcacccggatactatgatggacggtactggacaatgtggaagcttcccttgttcg

SEQ ID NO: 160617 - DNA, 366 bp, Arabidopsis thaliana columbia
gtccccattgaataccgtcaggaccaacagcttgtgtctcatgatgtgaaaagcagtttggacaactataagtacacttactgtgttaagatctgtcctgtttgccgtgaggatcttgtttgcttgccttctaaagttgctagcggcttggggaaccttggtccacttgtggtttgcacaaaagtctctgataatatcactctacttgatccgagaactctaaggtgtgccttcttggatgcgagacagtactggaggtctgggttccgatctgcgctcaccagtagacaacttgtcaagtactttgtgtttgatgttgagccacctgttggtgaagcgactgttggtgggcaaaagtacgctctt

SEQ ID NO: 160618 - DNA, 270 bp, Arabidopsis thaliana columbia
acaatctccagataaggggagaagcatatcttttttctatgaagctacggaagcggctcgagggattatggacggagtgcggggagctcaatcttcgactcgaggccaacaactgctgcgagatgtacatggccaatgcgcgacaaaacatcaggaagcttgtgaaggatggtttcactatcaggaagccaaccaagattcactctcgttccagagctcgcaaaatgaagattgccaagatgaagggtcgtcactccggatactggatag

SEQ ID NO: 160619 - DNA, 317 bp, Arabidopsis thaliana columbia
atcatctttgagcatagagaaaaaaatttttttttctagagagagagagaaatataaatccggggatgtttgaaaagcatgaggggaggagaaggatcgtgtttattccctctccagctcaaggacacatatcttcgatgatgcaacttgcaagagccctttacttaaagggcttttccattacagttgctcaaaccaagttcaattacttgaagccttcaaaagacttagctgatttttagtttatcaccatcccataaagcttaccagtcttggatctttagaattttataccaatttggttttttcttaaactc

SEQ ID NO: 160620 - DNA, 385 bp, Arabidopsis thaliana columbia
cccaaaaaaaggaaaccccaaaaccaaggtttttattggtttcctaaaccatggctttgtcggcccttgctttcgccggaagggttgggaaccctgccgaataaaatgtcctcggaggcggccggttgcccatgaggaagactgtcgccaagccaaagggtccataaggcagccaatggtccggatctgaccgagtaaagtactggggtccattttccggcgggcccccaagttaccttaccggggggttccccggggactacggatgggccaccgttggtttatccgccgacccaaaaaccttggccgggaaccgtgggctagaagtattccacagcaaatgggccatgcttggagccctaggctgggttttccctgagctatt

SEQ ID NO: 160621 - DNA, 444 bp, Arabidopsis thaliana columbia
aaaaaccgggccggcacacccttccaaccacattttttttaaagtcccggtttttcggttcgtttcttttaagtttacttaggaatatgggttattgtaattactaagcgttgggcctaaattttccaaccttgtccttaaaacccaaaattcttaaccggtttttccggtaggttgaaccgcaacttgtcttttccatcaatcggttaatcggccaaaacttcgtctttaaaggttgaacttaaaaaaggaaaatggttgcccggtttgcaatcgcctgataatctaaccggcagttttgccggtaccaatggttttaaccctttgggtttagcaaaggatccaaaaaacttgaaatgtttcttccagccaaagttgttaaacgaacaatggcctttccttgtgttccttggaatcctttttccggaagttttaaccaaaatc

SEQ ID NO: 160622 - DNA, 442 bp, Arabidopsis thaliana columbia
aaataccggggccgccccacccgtccggaataaaatcagaattccaaccaaaaatgtgttgttaaaacctacctttaattggcctgttgtggtgtcttaacaatagaggcgtttcgcaccaaatccaaatggccctgtttgcccgccgtcaaccaaattaagccggccaagtttccttgaaggttttttttttggaccgcttcctgcggattaccaggccaaaggtccgattaatgaaattggtcttggcccagcctattgggacatttattgttaaaaatttccaaaggggtgcaataccaataccggcgattggcccgttaattttttccatcgttttagggaaaatatccacctaatgaaaaatttaaacccaacccccttaagaatgtttatgccttggccaaaattttttctcttatggaaaaaggaaaaaggattg

SEQ ID NO: 160623 - DNA, 426 bp, Arabidopsis thaliana columbia
gaataccgggtcgaccacccgtccggccaaacattgggtttcggcaactaatcttcttaattggaatcctggaggccgggttcaaccccaggattcgggggatttttgacgggccacaaccgattcttcctggttgtcctataatcggaaactggcttaaactcggggaattcccacataaatctttatggaacctttccaaaaagtttggccctgggatgctttaaaggttgggaagagtcccaccagccttggttttttcttttgaaccagcaaaccaggcttggaaaatccatgacctccattgtggaagtcgtccaggttttgcaggggcaagagagcttttttccaactatttagacattgttttttttcctaatgatgataattggaaagaagtaaggaagctcgttgttcaagaccttt

SEQ ID NO: 160624 - DNA, 431 bp, Arabidopsis thaliana columbia
aacgggaccgaaattcccgggccgcccacacccttccgcttaataaaaggttaagttctttgaacctttttccagttctgcgaccaaccaataatgggggctaacttaaaacctttgaaggggccaaaaaaattaaaaagacttgattttttcccaaaaccaataaggatccattgaacaggatgtccaaccacttgcggccaattccaattaccaaatttcgaattaatggaatccttaacacaagccaaggaaggaaagccagtcaaggttcctaccttttccttcggggaacaaatagaaagtaacttgattatcgaaaagatcaataaaaaaggtgttcgggtaacgaagtttttccaattggtgcttgaaatactgattaaagaatttttttttttcccttttgaaagttatgataattaaatttt

SEQ ID NO: 160625 - DNA, 435 bp, Arabidopsis thaliana columbia
  unsure (1)..(435): unsure at all n locations
gcccacccgtccgccaaaaaaaggaaaccccaaaaccaaagtttttttttttttcttaaaccatgcttttnccctgccgtgctttaaaaaaaaaagggtggggaccctaccaaataaaatttcctcgaaaccgcccttttaaccataagaaaaactttccccaacccaaaggttccataagccatcccttgttccgaatctaaccaattaaagtacttggttccattttccgccaaccccccaacttactttaccgttaatttccccggtaactacggttggaacaccgttgttttatccgccaaccaaaaaactttcgccagaaaccttaacttaaaattattccacacaaaatggcccatcttcgaacccttagcctgctttttccctgaccttttgcttagaaacgaattgaatttcgaaaaaccgttttgt

SEQ ID NO: 160626 - DNA, 477 bp, Arabidopsis thaliana columbia
ggggccggcccacccgtccgaaccgccaaaacacagcgggtttaaaataaaatttttcggcaaccttaccagaatcggaaccggtgtgggggttttcgggttggggggggaatctcaaaaaaagtttttttttaaccactttttaaccgatcctgaataaaaatttttgtttccgtcgccaagaaaaaaaaaattttaagttttaaaaaatttgaggaagctttaaatgctgttaaaaatttaatgcctggaggggtgaattcccttgttcaaccattaaaatccgtggtgggccaacctgttttgattgattttgttaaaggttaaaaaatgtgggccattgttggaaataagattattgactactttggtttttggggacctgtttttattggccatcctgataacaaggtttttgcggttttagctgaaacaataaaaaaaggaccaagcttgggggctccttgctttttggaa

SEQ ID NO: 160627 - DNA, 439 bp, Arabidopsis thaliana columbia
ccggggccggccacacccgtccgaaaaaccaagggcttcctttatcctctcttcctttcttatggtggcctttccggttaaggcggcgatgttcattcctttaagggggcgtaaaaacctccgttgctttccaagccacccgaagggttaacaccgccattacttcaataacaggcaacggcggaggagttaattgcttccaggtgtggcctccaatggaaaagaaaaagtttgggactttttttaaccttcctgccctaaccgattccgaattggttaaggaagttgactacttaatccgaaccaggtggattccttgggttgaattcaagttggaccacggttttgtgtaccgggggcacggaaactaacccggttactatgatggacggtccttgccaatgtggaaccttcctttgttcggttgaaccgactccgt

SEQ ID NO: 160628 - DNA, 347 bp, Arabidopsis thaliana columbia
ttaacttaatccgattggtggttttggaattttttttaactgggtttcgtttttaaacgggtgttgaccatgaatttttggtttggttaaacattttttgggtattaatatccaagggggaatgttttgggattttttgtggcaggtgggttgttttttcttaaatggaagaaaagtttaattggttaacctggtggtagtaaaactccagggaaggtttgggcgtaaagccgttatgtgccagggaaatgggaagatttgtcggtggttaagaagggtttaccgggaagggaaccggtggggaagctgggttttggggggactttgttgatggataattttgatgg

SEQ ID NO: 160629 - DNA, 387 bp, Arabidopsis thaliana columbia
ttaattaatactggaaaaattaagggattcgtttggtttttgccaggtttccaattttacagaatgggatttaaatttggaggcacctaattcaatgggaccgaccataatgggggtaatttacaatggaggggtggtcctgggggccgattaacgtaccagaaccggtttgtccgtagcgaatcgggcttttgttaagattccacaactgccagataatgtttacgtttgccgttttggatcggttgttgattttaaagtggtttttgattatgtccgttatttctttaaccagcatacaattaagaatggccaacccgaaactgttaaggtttttgccaacctaataaggatgttggaatttaataccaggaacatgttcaaaac

SEQ ID NO: 160630 - DNA, 323 bp, Arabidopsis thaliana columbia
atcacatttaattaactaaggagcctttaatttgcgcaacactttaaccgaaagggccgcttggccattggttttttcttttctggtttggaccggaagggccgttaagttatccccgggggcctccgaagattttggaaccggccgaataaccatgcgcaaggcctccaagccaaccggtccatccggaagccaatggaacggatccgcccgggtaaagaactggggtccattttccggggggcctccgggttacctaactggggagttcccgggggtttacgggggggacattgccggtttatccgccgatcccgagacct

SEQ ID NO: 160631 - DNA, 340 bp, Arabidopsis thaliana columbia
cggaccggaaaacccgggccgaccacacccgtccgatctaatccttcctcttcctccgccagttttttttttggcgaaaataaccaacaccaggggcggcttgaacatgtccggttggtccaccgttctaaacagggaggatcggcccggccttgttaatgctctaaaaaccaagttgcaaaattgggttggccaccactcttttgtccttgaaaacttgcctccaccagccaggaagcgtgccgggtttttaaaagggattcaaacccaatttgattggatggaagcaaaattctttgaggagagagcagtttttgaagctaatttttaaaagttttat

SEQ ID NO: 160632 - DNA, 311 bp, Arabidopsis thaliana columbia
gaagaatccgaatccaattaaatgggtttttttcgttttttcctcgtggtggtggttcttggtttttttgcgggggccgggggggaccccatcgtttccagattccaggagtccttccgaataaacacggttaagcccaacccggattactccaaagccgtggcctttttaatatttaaggcgaaaccactgtccttggaatttaaaacaatcgatttggtaaaaggaaagccgtttttcttcttaaaatgggtgggttccgaccaaaccttacctgcttttttcttaaactccaacaccgatgtcgttcc

SEQ ID NO: 160633 - DNA, 383 bp, Arabidopsis thaliana columbia
aaagggaccggaaaacccgggcggcccacacccttccgttttggtggcaaacacaacaccagattttgtttaaacgatggcttcaaactccttaatgggcggtgtattagccgccgggtgcgttcagttaattttttcttccaagtttaaattcgaatccgccggagttcaactccaaaaccccggaattgtgggtcgtataaaaatggttgttaattgaatgcctggcaagccataaccagttaacttggacggttttgttcctggtaactttggttttgaccaatttgtacttgaaaaagttccagctaactttgtaagatccaaaaatgaaaacttaatccactgtaaatgggttatcgctttttgttccctgaattttt

SEQ ID NO: 160634 - DNA, 417 bp, Arabidopsis thaliana columbia
gaactttggactgtttttttgcggcgaaaaaaaaagcgaagttggaaatttccgattaagccatgattgttcccgaccgatttgggcgattcgtcgtccttgaaggaaccaaaaaggttttttttgatggggttccaaaaataataaaggttgtttctttaacggtggaaagagaagaccttccgatgggaaacattgtccgattgcaacttaatggggacaggaatgtttggttggttggataccaacttcttaatccttttaagtccaaaatattaggggggtttaacacaacaggccagttttccccaatgcaggcttccaaccgggccataattgacttggccaaggagttggactacttgaaaaaccagtttggggacaaggtggccaatttttcaaataagtttaaggaac

SEQ ID NO: 160635 - DNA, 385 bp, Arabidopsis thaliana columbia
ccggcccggaataccggggtggaccacacccgtccggccacattattttgaagccgaagttgaaaacatttaatggattagggccagaccttccgggttatggggtcaaatttaattttggaggggtttttttccggcgtagcgccggggtcgggtgggccattaccggagctttttccggggctggattggggaagggtccagttgattcgttggatccagggaaagtctgggtttggaggggaaatgagattccgttttttgatttatggaaggataggaaggccgtggtggcatttgctgcgaatttgggaggggggctctgccggaaacaagcagttaattttgcagaaaaaaaggatgggatggatgcatctggggtggt

SEQ ID NO: 160636 - DNA, 394 bp, Arabidopsis thaliana columbia
atggctttagccaggaccgaaagggaaggcatatagttgagggttccggggttaaaagtcctgctttgggttcctggttttttgggcaaatccaaaggagctgtggttcctgcactaataatgttgggcgactccattgtggccgttggcaccaccattaacttactcagaatggtcaaatccaacttttttctttccggtggagacttaatggaccaaagacccaccggaggattttgcaccggaaaactcgttgtaaatttttaagccgagtcccttggttttttttattaccaacctgctttcttaagccgggaggcaggcaccgggaatatcctgatcggggccaactttgcatcagctttttcaggatactttgatgccccatttgttc

SEQ ID NO: 160637 - DNA, 364 bp, Arabidopsis thaliana columbia
ttagaaagttttagagggaaagagggggggggttggagggtaaagaaaaagatgttggagtgggggttaacaagtttccgggggggcaaccaaccggaacttcggttaaaagggccagggactccaaagggccaccacctgccccgttgttcaagcccggcaggctagtttaatggtccttttgaagggctgggatggttgagttaatagctccgttttggttcctgaccataactgtttggactgtaatgggtgtgaaggggtaaccgaacttgtttgcttccgccggaatcaaaggtatcgtttgggctttcggtggattgattttggttctcgtttactgaaccgttggaatttctggtgg

SEQ ID NO: 160638 - DNA, 429 bp, Arabidopsis thaliana columbia
  unsure (1)..(429): unsure at all n locations
aacgggnccggaaaaccggggcggacccacgcgtccggaccaccaccattaagcaaaaggaaaggtttatgccgggggggccaagggcataaacattgaggggttaaagcagggtggtgaccccaccaccattcttgggccagactaaagcctaaagcttaaacccctttcgggaggtggcttttttgggatttcccaagtccactatgggaaaggatcttggtgttggacctgccagagggaagtcctaaggacccttttccgttaaaactccgttttacttaaccggaaaattcccgggcgattatggtggggacaccgccggtttatccgaagaccttgaagcttttgccaaaaacagagttttggaggtgatccatgggggatgggcaaggttgggggctttgggtggcataaccctggaaggtt

SEQ ID NO: 160639 - DNA, 381 bp, Arabidopsis thaliana columbia
ccggggccgaccacacgcgtccgttgaagggaagggggttgaaactaccaagatgtttttcttaattgaagaataagttgatcgtagggttcccaaggttaacttggccccaaaaggagtttttgatttttttgcaaaggtgggtccaaaaaacaacttttttgagttaaaactggaacttgccgttaaagtaattgttggggaaggcaaaataaacatgggggggggaggctttttttgattaattgaaaaagcaaagccggaaggggggaataggttactccgggtgaagaagccccaacattttttaagggttgattggaccaagtgggttgttggggacaataaaggcagggctgttgctcaagatttggttttggc

SEQ ID NO: 160640 - DNA, 365 bp, Arabidopsis thaliana columbia
aaagaaaaacccgggccgacccacccttccggaaggaaggaaaaggaaacccagaattgtcttttccaccagcatctacggaatttgtggtgccggccaatgtaacttggggggcgggcccttaaccacccagaacctccgttttttttttgccattaaaaaaccccggttttagcttcgtagtcaggccacccaaaaatcctgttccgctttcctttttttaaaaaaattttccgccagttgccgttgttccgattggacctcctgccaccaaacccaaccaaccaccgattgttcttaaaaaagggtttaaggtcaaaattttaaggagagaatcctattgtttcaaaacctttgaatcagtt

SEQ ID NO: 160641 - DNA, 377 bp, Arabidopsis thaliana columbia
aaataccggggccgcccacacccttccaactttttttgttaattgcaatgtcaattttctcctttttaccactatcctttgtcttttgtgtaaaccttcgttaaattggggtaaccctctaactgaatttttttttccttccactgcgtcaacttttcaaaccgatttaaccgtcgttccaaaattcgcggaatcattcttcaaacttgacccggaaactcccgatttcaaacctgggttggtttccaatgtttcgaaggttcctgtggaaaaagctaaacaagaagagattttcgctgttattatggttggtggaccccaatccatagggtttccagggagatattttttcattaaaaggttaaaaaatccaaatg

SEQ ID NO: 160642 - DNA, 337 bp, Arabidopsis thaliana columbia
aaaaacccgggccgaccacacccttccggcacatgaataccaagtttttccaaaccctaattcttaaaatttttttgggggttttcatgggttgaataacaaaagatgctggggctgctaattttctaacatcctcaaaaaaacgcaaagtgtgtttggatccaaaaaatttaaaggagttaaagcttgttaaaaaacataactttattaacaatgtgcccaagttcgtttttgaactccaaacttttacttttgggtggggtcttccaatggaacaccacataatttgcagggaaaaggatgttaaaggaaaggattttataaacccatacacccc

SEQ ID NO: 160643 - DNA, 414 bp, Arabidopsis thaliana columbia
acgggaccgaaaaacccggtccggccacacccgtccggagttaataagtgaaattaaaccattactttatgttactaatttaagtttggttaaatccgtgggattttttgttaataggggggggaaaattttcgttggggatattgtacccaatggaacttttaaaaataatttgaattgtaaggaaggaaagattttcaccatggcaactcggttggatatcgaacccaatgaacttaatgccataacctattttaacatgtttccacagccacttttattccacagaattttaaaattttaaaacattttcttaattgaaaattacaaagccaaggttgttgatttcggttttgcaagattagctccagatctctgttcaggagccacccattttttaacacaagtaaaagg

SEQ ID NO: 160644 - DNA, 347 bp, Arabidopsis thaliana columbia
aaaaaagaaccgcgcccacccgaccaaaaagaaacaccaagaagtattattgctttttttttttttttcttccacccttaaattaccggccgggtttaatgcaacctgtgtggttcaattaaccggtttaaaataatccgttgctttcccgttaacccgcaaaaccaacaaggccataatttccatctaaagcaacgtggaaaaagttacttccataaagttttggccaccaattgtaaaaaaaaattttgaaacttttttttacttccttgactcttataacttctaattgtctaagaaagttaactaccttttccgaaccaagtgatttcttttttttaaattca

SEQ ID NO: 160645 - DNA, 254 bp, Arabidopsis thaliana columbia
ggggaagtacttctgttcaaaatgcaagtttttcgacgatgatctttccaagaagcaatatcactgtgatgagtgtgggatttgcaggaccggaggagaagaaaactttttccattgcaaaagatgccgatgttgctactccaaaattatggaggacaaacaccaatgtgttgaaggcgctttgcatcacaattgcccggtttgttttgagtatctgttagattcaacaagatatattactgttctacgatgta

SEQ ID NO: 160646 - DNA, 435 bp, Arabidopsis thaliana columbia
gatttttgtgattcaggcggtaacagatatttacgacatgtaccgtatgtctctcacagccaatcacatgttgatgctcttcgacgctatgcacggcattggatccaacgctcacaaaatcaacgctgatctactcttacgttccaagctccaggagctcgggtcgtcccttgaatcccaagaagctcctctgctgcgcctggagaacgaatctttccaaacatgtatgaccttcttagacaacctcatctcagatcagcctgtgggttacaacgaggctgaaatagaatcccacctcataagcctctgcagagaggtgttagagttctacataaatatttcatgttcaaaggagcagtcttcaaggtgggcggttcccttggggtcaggaaaaaagaaagagctaacagcgcgggcttcgttagtggtggcttg

SEQ ID NO: 160647 - DNA, 429 bp, Arabidopsis thaliana columbia
  unsure (1)..(429): unsure at all n locations
atccattcttcttcaagtgccgggttctcgggtcggatcttctaagtctagctagggataatggctactgtcactactcatgcctcggcctcgattttccgaccttgtacttcaaagccaagattcctcaccggttcttccggtaggttgaaccgcgacttgtcgtttacatcgatcggttcatcggccaaaacgtcgtcgttcaaggttgaagctaagaaaggagaatggttgcccggtttggcatcgcctgattatctcaccggcagtcttgccggtgacaatgggtttgacccgttgggtctagcagaggatccagagaacttgaaatggttcgtccaggcagagctggtcaacggacgatgggctatgctcggtgtcgctgggatgcttttgcccggagttntcaccaagatcggaattataaat

SEQ ID NO: 160648 - DNA, 413 bp, Arabidopsis thaliana columbia
gaataaaatcagaattacaaacaaaaatggttttgcaaaagcttcctctcattgggctgcttttgctcctgaccatcgtcgcctctccagcaaatgcagatggacctgtttgcccgccgtcgaacaaactaagccgggcaagtttccctgaaggttttttatttggcacggctactgcggcataccaggtcgaaggtgcgattaatgaaacttgtcgtggaccagccttatgggacatctactgtagaagatatccagagaggtgcaataacgataacggcgatgtggccgttgatttcttccatcgttataaggaagatatccaactaatgaagaatctaaacacagacgcctttagaatgtctatcgcatgggcaagaatatttcctcatgggagaaaggagaaaggagtg

SEQ ID NO: 160649 - DNA, 429 bp, Arabidopsis thaliana columbia
ggatttttgattgagtaagttcaacaaagtctttttagactatctttctttattttttccttatataaaaaatatattaaaaactcaatcaaaattaaattatccacaagaacaccaatttttgttatgcttaatatatttaatttgatctgtattttttttaattctacccttttttcaagcacttttttagtcgccaaattgccagaggcctacgcctttttgaatccaatcgtagatgttatgcccgtaatacctcttttctttcttctcttagcctttgtttggcaagccgctgtaagttttcgataaaattcttaatactgtcttaaacaaattcacgattttgatttttccaacaattcaaaagatccaaaaaatcttgacgtatgaacgaactttcaattcaaacatttaatttttttggta

SEQ ID NO: 160650 - DNA, 354 bp, Arabidopsis thaliana columbia
ggatttttgattgagtaagttcaacaaagtttttttttactatctctctctatttttaccttatatgaaaaatatattaaaaactcagtgcaaaattaaatgatccacaagaacaccaatttttgttatgcttaatatatttaatttgatctgtattttttttaattctaccctgttttcaagcacttttttagtcgccaaattgccagaggcctacgtctttatgaatccaatcgtagatgttgtgcccgtattacctttttttttttttttttttaacctatgtttggctagccgctgttagttttcgataaaatttttaatactgttttaaacaatattacgattatgatt

SEQ ID NO: 160651 - DNA, 365 bp, Arabidopsis thaliana columbia
  unsure (1)..(365): unsure at all n locations
gacaaacatttgaattacgaccctaatcgttgttatttttattctctgagccgngttcaacgacaagaatcgtttgaattaggaacggacaccaccgtctcctcctggctgtcctatcatcggaaacttgcatcaactcggagaattaccacatcaatctctatggaaactctccaaaaagtatggccctgtgatgcttttaaagcttggaagagtaccaacagtcatagtttctccctctgaaacagcaaaacacgctttgaaaatccatgaccttcattgttggagtctgccaggctttgcaggggcaagagagctctcttacaactatttagacattgttttttctccttatgatgattatt

SEQ ID NO: 160652 - DNA, 428 bp, Arabidopsis thaliana columbia
gacaaacatttggcttctgtcacttatcttcgtcatttgtattcttgtagccgtgttcaaccacaagaatcggaggaattatcaacggacaccaccgtctcctcctggctgtcctatcatcggaaacttgcatcaactcggagaattaccacatcaatctctatggaaactctccaaaaagtatggccctgtgatgcttttaaagcttggaagagtaccaacagtcatagtttcttcctctgaaacagcaaaacaagctttgaaaatccatgacctccattgttgtagtcgtccaggctttgcaggggcaagagagctctcttacaactatctagacattgctttttctccttatgatgattattggaaagaagtaaggaagctcgctgttcaagaacttttcagtagtaaacaagttcactctatac

SEQ ID NO: 160653 - DNA, 399 bp, Arabidopsis thaliana columbia
cctaatgaaaggcttagttgcttgtaccggtagccagttctgcggacaagcgataatcgagactaagctaagagctttaaaagtgacagaagaagtagagagacttgtatctgtgccaagaccgataaggatgcattggacaggatgtcccaacacttgcggacaagtccaagtagcagatatcggattcatgggatgcttaacacgaggcgaggaaggaaagccagtcgagggtgctgacgtgtacgtcgggggacgaataggaagtgactcgcatatcggagagatctataagaaaggtgttcgtgtcacggagttggttccattggtggctgagattctgatcaaagaatttggtgcttggcctagagaaagagaagagaatgaagattgattcaa

SEQ ID NO: 160654 - DNA, 250 bp, Arabidopsis thaliana columbia
  unsure (1)..(250): unsure at all n locations
acgnctaatgaaaggcttagttgcttgtttctgttgccagttctgcggacaagcgataatcgggactaatctaagagctggaaaggcgacagaagaagtatagagacttttatctgtgccaagaccgatatggatgcattggacaggatgtcccaacacttgctgacaagttcaagtagcatatttcggattcatgggatgcttaacactaggctaggaatgaatgccagtttagggtgctgactgtgta

SEQ ID NO: 160655 - DNA, 428 bp, Arabidopsis thaliana columbia
  unsure (1)..(428): unsure at all n locations
gaaagatcaatctagagagaccaaaaagagatcggaagagatggcttctacctccgcgatgtcattggtcacaccacttaaccagacccgttcgtctcctttccttaagccattacctctgaaaccatccaaggctttggttgcaactggaggcagagcacagaggcttcaagttaaggccctcaagatggacaaggctttgaccggtatctccgcggctgctcttactgcttcgatggtgattccggagatagctgaagctgctggttctggaatctctccttccctcaagaatttcttgctcagcattgcttctggtggcctcgtcctcactgtcatcattggtgtcgncgtcggcgtctccaactttgaccctgtcaagagaacctaagacctatatatctntcttacatcattattggaatctg

SEQ ID NO: 160656 - DNA, 427 bp, Arabidopsis thaliana columbia
  unsure (1)..(427): unsure at all n locations
ccaaaaaaaagaaaacacaaaaacaaagattataatggcttcctcaaccatggctttgtcctcccctgccttcgccggaaaggctgtgaagcctgccgcatcagatgtcctcggaagcggccgtgtgaccatgaggaagactgtcgccaagccaaagggtccatcaggcagcccatggtacggatctgaccgagtcaagtacttgggtccattctccggcgagcccccgagctaccttaccggtgagttccccggtgactacggatgggacaccgctggtctatccgccgacccagagaccttcgccaggaaccgtgagctagaagttatccacagcagatgggccatgctcggagccctaggctgcgttttccctgagctattggctaggaacggagtgaagttcggagaagcggnttggttcaag

SEQ ID NO: 160657 - DNA, 211 bp, Arabidopsis thaliana columbia
  unsure (1)..(211): unsure at all n locations
ccccaaagctctcaaacctctgctttttcctctccggccgacgtttcttcaccgggatcagaatgtcaggctgttgctcaccgnctattacaaccaccgccacctcgaagttcaagacgggaacgaagatagagattcaagagtcgcttcttactccgaggttttacacgactgacttcgaggtaatggctcagcttttttacacggcgat

SEQ ID NO: 160658 - DNA, 425 bp, Arabidopsis thaliana columbia
gaagaagagaaacaacaagaagaagtaatggcttcctctatgttctcctccaccgctgtgggtacctccccggctcaagccaccatggtcgctccattcaccggcttgaagtcatccgcttctttcccggtcacccgcaaggccaacaacgacattacttccatcacaagcaacggaggaagagttagctgcatgaaggtgtggccaccaatcggaaagaagaagtttgagactctatcttacctccctgaccttagtgacgttgaattggctaaggaagttgactaccttctccgcaacaagtggattccttgtgttgaattcgagttggagcacggatttgtgtaccgtgagcacggaaacactcccggatactatgatggacgatactggacaatgtggaagctttcattgttcggatgcac

SEQ ID NO: 160659 - DNA, 258 bp, Arabidopsis thaliana columbia
  unsure (1)..(258): unsure at all n locations
gacccacgcggncggaagaagagaaacaacaagaagaagnaangttttttctttatgctcaacccccaccgctgacggaccggcccagctcaagccagcagggggcccccactcaccagactgaagacaaccccacctttccaccacacccaaaaggccaacaacgacataactcccatcacaagcaacagaggaagactcacccccacgaaagaccgcccaccaatcgaaaagaaaaagtccgagacactataccac

SEQ ID NO: 160660 - DNA, 349 bp, Arabidopsis thaliana columbia
gaaaaagtactcgcaagatgtatctttacatgcataaaagctggcccaaatgctggaaacataagatgctgagtatgggagaagtatgattacctttgacgaggccataaacagaaaggattttacacaacacacaacagtgatcaatatgaggaaaagcttcttttgcgagatgatctgcatcgtttaggtccttagtgttttgctcccagctccttaccatatgtcattgcgcagcttcagctgtctattaccatttaacaatcggtaatgtttcaacaatcacttttgttaattccctttcccatattccaaactcctgtagaatcaaatctaatattgtagttgg

SEQ ID NO: 160661 - DNA, 254 bp, Arabidopsis thaliana columbia
gtatactgaggcaaggcgacaactgaaaggcataaaacgatgcttcagtgatgtgatccagtttataactataagagaatccaaaagcctttatgtgtgtatatctgatttctgtttggagaattaagtatatgatgctatgtggttaaacgattgatataaacaaaatcaagcaatgtcgattttcaacttcaaaaaaaaaaaaaactaaagatgatctaactggttaaattagaataaaaagaaatagatga

SEQ ID NO: 160662 - DNA, 310 bp, Arabidopsis thaliana columbia
  unsure (1)..(310): unsure at all n locations
cgacccacggcggcgacagagncaancccagggccaacaggggcattttctttgtttccgagatatgcaccanaaagcagagcgcataaggagcggcgacagggttnctacacattccggtgtagctcaaaggttctacaacaatggaaaccaacctcttgtcatcgctagccgcatggattaagctagccaccagaaccaggttgaccacaacccaaggcgcatttacttagcaagaaaaaacccacaaagccaatcatggctacacggacgagggcaacagccacaaaacaacatccttaatggcttc

SEQ ID NO: 160663 - DNA, 425 bp, Arabidopsis thaliana columbia
gaccgccagagacagcgagtttcagatcaaagatgtcggcgacgcttacaggatcgggaactgctttggggttttcgtgttcctcgaagatctcgaaaagagtttcttcttcaccagcttctaaccgatgctgcatcaagatgtctgtttccgtcgacgagaagaagaaaagtttcagtcttcagaaatctgaggaagctttcaatgctgctaagaatctaatgcctggaggtgtgaattcccctgttcgagcattcaaatccgttggtggacaacctgttttgattgattctgttaaaggctcaaaaatgtgggacattgatggaaatgagtatattgactacgttggctcttggggacctgctattattggccatgctgatgacgaggttcttgcggctctagctgagacgatgaagaaagga

SEQ ID NO: 160664 - DNA, 297 bp, Arabidopsis thaliana columbia
  unsure (1)..(297): unsure at all n locations
cggaattngngagaacgcccacgcgtccgcagaccctaatataatcctcagaaagaatgttttatttcatgctgctaacttcaagcatcgccgcggttcattttttgaggggacaagatccctttggctcaccccaaagttcaccatcttttcctctttggaaactctccggttgcactaccatctaggagacaattattcttacctctctatttttgtaatcccaacaccaaattctttccttatattcttagttatcctcttttttttttttttcctatttctcttccttatttt

SEQ ID NO: 160665 - DNA, 395 bp, Arabidopsis thaliana columbia
caaaaataaaatggagggaagcccattgacctgtgtcaggctctcttcggtggtgcctggggctgtggtaggtgagaacaagccactacagctcacacccatggacttagccatgaagctccactacgtccgagccgtctacttcttcaagggtgcacgtgacttcactgtcgccgacgtgaagaacaccatgtttactctacagtctctactccaatcttatcaccacgtctcaggtcggatccggatgtccgacaacgacaacgacacttcagctgcagccataccttacattcgctgcaacgacagtggcatacgcgtggtctaggccaacgtcgaagagttcacagtggagaagtggctcgagttggacgaccgttccattgaccaccgat

SEQ ID NO: 160666 - DNA, 234 bp, Arabidopsis thaliana columbia
  unsure (1)..(234): unsure at all n locations
gggaagaaaagaaanaggaggagaagaaanttgaagagccacaagcgaaancagaagaaaaggaaccagaagaagagagaaagggggaaccncaagagaaagngcnnaagaaaannangcanngngaaggnngngccaaaaaaanccanagangncnnaaaggcnnngaaggagnggaggangnaacnacnganngnaagacnagnaaagnngnggngaaaggagagaaggcag

SEQ ID NO: 160667 - DNA, 267 bp, Arabidopsis thaliana columbia
  unsure (1)..(267): unsure at all n locations
agaaaccacaacaagggggtgggtctccccgtcaatctgttcttcatctcttcaaaatccgaatgggattcccaaagtttcggtctccctcctctccagtaaccgcttctctctcctctccgtcactcgagctttctgcgacagtggatcaacctntcccaccggcgccgtcttcgaggaggcttctgagcccgggggagtgatagttaaagagccttcgcaatcaacaccgggggttaaaaaggaagaaaccggcaccggtaaaaa

SEQ ID NO: 160668 - DNA, 426 bp, Arabidopsis thaliana columbia
  unsure (1)..(426): unsure at all n locations
gacccacgcgnccgcggacgcgtggggcaaatttatcctcgcctttacatcgctcgngaatttgttcccgttgcgatcactaggaatcgtaccgtgaataaaagtcgatgagatctctcaaaccattgattcagataacttcaccgtccagaactctgttcgtttcgctggtcctttaggtacaaactcgattagcaccaacgctaaattcgaaatccgaagccctaaacgcgtccagattaagtttgagcaaggcgtaattgggacgcctcagctaacggattctattgagataccggaatatgtagaggtttttggtcaaaagattgatcttaacccgatcagagggttacttacctcgtgcaagacacagcctcgtctgtggctagaaccatatcaagccaaccaccgttgaaattctctttg

SEQ ID NO: 160669 - DNA, 428 bp, Arabidopsis thaliana columbia
ctactactttgtggagtttatgcacagagtgtagctgcttctggaaatatgaaacatgcggggcgagtcttcgacatggcggtgacttctatctgtggcctccctaaggttagtttcagatcttttggttatattgttacttgttagcatatgatacaaaatttcaggtttccacgtatgtttctaattccaaggaacttctggatcagtaaccctggttttgtgtttatttctgattcaaattatcgcgtactggtcccaaaaactggggcactgccacttgagtttggacaagataatctctctcatggacggatcatagtagagtttgttatagaacagtctcttcttggtaatgtacagggaagcatggcctagtggatatattctagccccatttccgtgctttctttggatttttatgacat

SEQ ID NO: 160670 - DNA, 331 bp, Arabidopsis thaliana columbia
gaagtacaccaaggaatgcgcagatggaattattaagtcccttggcattgatctcaaaaaggtggacaagtgtatcggagaccctgaagcagatgtggagaacccagttcttaaagcagagcaggagtcacagataggcaaaggttcccgtggagacgtgactatactcccaactcttgtcgtgaacaacagacaatacagaggtaaattggaaaagggggcagtgcttaaggctatgtgttcgggttttcaagagtcaacggaaccagctatctgtcttactgaagatttggaaactaatgaatgtttggaaaacaacggtggatgctgg

SEQ ID NO: 160671 - DNA, 314 bp, Arabidopsis thaliana columbia
  unsure (1)..(314): unsure at all n locations
aaagcaagnancnnccactaaggcacaaantactatttatataagtctcagtactctctgttctgcggactttatacacagagccagcattaagagatggcgagccactacagaaacacaagcgctattgcttatctattgctttgnctcttcattacatctgccactgcacattccttcatacgacaaatcactgatgaccttaaaacaaatcttgagcaggaggtaggagcagaaccaatccaaaacctgggcgtaggacattacttacaagaaaatacggagtactcattcatttattataaggggggggg

SEQ ID NO: 160672 - DNA, 444 bp, Arabidopsis thaliana columbia
ctttaagacagctaaaactaaatacaaagaaacagagatgggtttggttacagaggaggtgagaggtaaggcagagatgtacaccggagatgagatatgtagagagaagacaaagtgtttcctcaaggaaatatctatgcccaatggtttattaccattgaaggatatagaagaggttgggtatgacagagagtcaggtgttgtatggctgaagcagaagaagagcatcactcacaagttcacagagatagataagcttgtctcctatggaaccgaagtcacagtcattgttgagaccgggaaaagcaagaagctcactggagttaaagccaaggaacttcttatttgggtcactatcaatgagatctataccgaggaaccccctaccaagatcaagttcaagacaccgaccacactgatcaggactttcggggaacagtttaa

SEQ ID NO: 160673 - DNA, 434 bp, Arabidopsis thaliana columbia
ctgatccttctctcatcctcagaaagaatggctcattccatgctgcttacttcaggcgtcaccgcgggccattttttgaggaacaggagccctttggctcagcccaaagttcaccatctcttcctctctggaaactctccggttgcactaccatctaggagacaatcattcgttcctctcgctctcttcaaacccaaaaccaaagctgctcctaaaaaggttgagaagccgaagagcaaggttgaggatggcatctttggaacgtctggtgggattggtttcacaaaggcgaatgagctattcgttggtcgtgttgctatgatcggtttcgctgcatcgttgcttggtgaggcgttgacgggaaaagggatattagcttagctgaatctggagacagggataccgatttacgaagcagagccattgctttctct

SEQ ID NO: 160674 - DNA, 244 bp, Arabidopsis thaliana columbia
  unsure (1)..(244): unsure at all n locations
ggaaaacccgngccgacccacacgnccgcngaaccaccgcacaaccncaaaatttatgtttcaaaccacgctncttactncacggggcaccttcaaacagggacggaggaacaatatccctttttctcaacccaaaaatcaccatctcttcctctctgaaaacactccgcatgcactaccatctaagacacaaacattcaatcctcacgctctcaccaaacccaaaaccaaagctattcccaaa

SEQ ID NO: 160675 - DNA, 282 bp, Arabidopsis thaliana columbia
ttaccatttaccaagaaagaaaaatgacaattgcgatgatgatattcgcggttttggttacagtggtggaggtggaagcacagactgagtgcgtgagcaagatagttccctgcttcaggttcttgaacacgacaacaaagccgtcgacggattgttgcaactcgatcaaggaagcgatggagaaagattttagctgtctttgcaccatctacaacactcctggtttactcgctcagttcaacatcactacagattaagctcttggtcttaaccttctatgtg

SEQ ID NO: 160676 - DNA, 166 bp, Arabidopsis thaliana columbia
  unsure (1)..(166): unsure at all n locations
cggcccgacccacgcgnncgnaccgacnccgcncaagngnngaaggaagtttaagaacgcaagaaggagnacccgggcgcggncanaaggagcangggaggggacaacacccgncaagnccaangcancagnnncaaagccgacaagcccccaagcaccaccgaag

SEQ ID NO: 160677 - DNA, 121 bp, Arabidopsis thaliana columbia
tttgaatttcttttcacttggcttcgtttctaaacgagttatgaacatgaatttgttgggttgggtcaacatcttctgagttatcatatccaagtgagaatgttctgagattttctggtgc

SEQ ID NO: 160678 - DNA, 193 bp, Arabidopsis thaliana columbia
ctaattaatactcgcaaaactcagcgattcgtttcgtttctgacaagtttccaattctacagggagtggatctcaatctcgatgcaccgcactccatgggaacgaccatcatcggcgtcacttacaatggaggtgtctttcctggttgttaggtaccatatcaataatggtttcctcattgtgcatcgatgtc

SEQ ID NO: 160679 - DNA, 244 bp, Arabidopsis thaliana columbia
caaggagaaagagctagcaaacgggttaaagattccaccagggtaaccaacttcacccttaggtaagctgtattgcttaaagatagggtcttggttcacacttcctgggttcttgatgtcttgccaccgtctgatctcaacgtaatgaaacaatatgaactcattcacgaacattgtttgcttccaatccaaactctgttatgtgccagcatcttgccactgatgtacatagatgagctcgggc

SEQ ID NO: 160680 - DNA, 448 bp, Arabidopsis thaliana columbia
atcaaatcttattaactaaagagccttttacttgcgccacactctcaccgcaatggccgcctcgacaatggctctctcctctcctgctttgaccggaaaggccgttaagctatccccggcggcctccgaagtatttggaaccggccgaatcaccatgcgcaaagcctccaagcccaccggtccatccggcagcccatggtacggatccgaccgagtcaagtacttgggtccattctccggtgagcctccgagctacctcactggagagttccccggtgattacgggtgggacactgccggtctatccgccgatcccgagaccttcgctaggaaccgtgagctagaagttatccacagcagatgggccatgctcggagccctaggctgcgtttttcctgagctattggctaggaacggagtgaagttcggagaagcggtttggttcaag

SEQ ID NO: 160681 - DNA, 429 bp, Arabidopsis thaliana columbia
  unsure (1)..(429): unsure at all n locations
ntcttatccttcctcttcctccgccagattcttttcttgcgaagatgagcaacgagaaggacagcatgaacatgtccgatcggtccaccgctcttaacgaggaggatcgtgccgggcttgttaatgctcttaagaacaagttgcagaatttggctggacaacactctgatgtccttgaaaacttgactccaccagtcaggaagcgtgtcgagtttctaagagagattcagaaccaatatgatgagatggaagcaaaattctttgaggagagagcagctcttgaagctaagtatcaaaagttatatcagcctttatataccaagcgatatgagattgtgaatggtgtggtcgaagttgaaggtgcagctgaagaagtaaaattcgaacaaggagaagataaatcagctgaagagaaaggagtaccagatt

SEQ ID NO: 160682 - DNA, 217 bp, Arabidopsis thaliana columbia
gaagaatccgaatccaattcaaggagtcttcttcgttttctcctcgttgttgttgttcttcatctttctgcggtggccggcgacgacgccatcgtctccagattccaggagtacctccgaatcaacacggttcagcccaacccggaatactacaaagccgttgactttataatatctcaggcgaaaccactgtccctcgaatctcagacgatcgaat

SEQ ID NO: 160683 - DNA, 259 bp, Arabidopsis thaliana columbia
ctttggtggcaaacacaacgacagatagagtgaaacgatggcgtcgaactcgctgatgagctgtggcatagccgccgggtacccttcgcttctctcttcttccaagtctaaattcgtatccgccggagttccactcccaaacgccgggaatgttggtcgtatcataatggctgctcactggatgcctggcgagccacgaccagcttaccttgacggttttgctctctgtgactttggttttgtcctatttgttcttcta

SEQ ID NO: 160684 - DNA, 360 bp, Arabidopsis thaliana columbia
gaactcttgactgtctctctgcggcgaaaaagagagcgaagcttgaaatctccgattaagccatgaatgctcccgaacgatatgagcgattcgtcgtccctgaaggcaccaagaaggtttcttatgatagggatacgaagatcatcaatgctgcttccttcacggttgagagagaagaccatacgattggaaacattgtccgcatgcaacttcatcgcgacgagaatgtcttgtttgctggataccaacttcctcatcctcttaagtacaaaatcatagtgaggattcacacaacaagccagtctttcccaatgcaagcataccaaccaggccatcaatgacttggacaaggagctcgac

SEQ ID NO: 160685 - DNA, 430 bp, Arabidopsis thaliana columbia
  unsure (1)..(430): unsure at all n locations
gtccattactctgcagccgaagctgaagacgattcatggattagggacagtacttcctggttattcggtcaaatctcactttcgtagtgtctctctccggcgtagcgccgtggtcgtgtcggccattaccggagcttcttccggagctggaatagggaaaggtacagctgattcgctagatacagtgaaagtcttggatttgagaggaaatgagattccgatttctgatttatggaaagataggaaggccgttgttgcatttgctcgtcattttggatgtgtgctctgtcggaaacgagcagcttatcttgcagaaaagaaggatgtgatggatgcatctggtgttgctcttgttctgatcggaccgggaagcatcgatcaggcntaatactttgtggaacagactaagtttaaaggagaggtctatgcg

SEQ ID NO: 160686 - DNA, 451 bp, Arabidopsis thaliana columbia
attgcattagacaggaacgaaaaggaatgcaaaagatgagagtttcggggtttagagttcttctcttggtttcttgtttcttctgcaaatccaaaggagctgttgttcctgcactcatcatgtttggcgactccattgttgacgttggcaacaacaataacttactcagcattgtcaaatccaactttcttccttacggtagagacttcatcgaccaaagacccaccggaagattctgcaacggaaaactcgctgtagatttctcagccgagtaccttggtttctcttcatacccacctgcattcctaagccgggaagcaagcaacgagaatatcctgatcggtgccaactttgcatcagcttcttcaggatactatgatgccacatctgttccatttgtaaaggagacaacacagtcaaacatcattacacacatacccaagaaatgatc

SEQ ID NO: 160687 - DNA, 406 bp, Arabidopsis thaliana columbia
gtaggatgtcttaaccacatagaggattgcttttcctttgagagtcaacaggcttggcaaaggccgaccactatacaatgtggagtttattcaatggttgaaacgtttttgcgattcaataaatggcggcattatgaacgagaattataatccagtagaacgaagatcaagaggtgggagagagaaaagcgtaatgggatctagtacgatctcaaagtcattgcaaacaaacaatatgcatcatcctactgtggctactttcaacaaaccagctggtcccaagcaagcaacatcacatggaattggaggtgggagcaactcatcagccgaagtgcaagctctggcaaaggaggtagaagatcttaaggtctgggttgatcttttggaaaaagtaagagatttttac

SEQ ID NO: 160688 - DNA, 260 bp, Arabidopsis thaliana columbia
ctagaaagctctagagagaaagagagagagtgatggtaggtaaagaagaagatgttagaggcggagctaacaagtttccggagaggcaacctatcggaacttcggctcagagtgacaaggactacaaagagccaccacctgcgccgttgttcgagcccggcgagctagcttcatggtccttctggagagctgggattgctgagtttatagctacgtttttgttcctgtacatcactgttttgactgttatgggttttaaa

SEQ ID NO: 160689 - DNA, 314 bp, Arabidopsis thaliana columbia
ggactattgcgcaataaatataatttttttttctgcttgtgcaactggaacagagggaaggggcgttactgcgatggggccgctttcaccggcgatagtcaggatgagagctcacaactttactatagaggacaacgaatctggcattcaggtatggaagaactactctctataggcatgcaaaaagcagaacaggctctactttctggatgatcagctgggggattagctttcatcctacactgcgatcaggtcaaggaactatttcctggcactactatcagtaaatgcttaatttgattctggaatggtta

SEQ ID NO: 160690 - DNA, 451 bp, Arabidopsis thaliana columbia
gaaagaaagaaaaagaaaaccagagatggcgatgacgacagcatctacggtatttgttctaccggccaatgtcacctcgggcgccggcgcttcgtcgtccaggagctccgtgtctttcttgccgatgagaaacgccggttctaggctcgtagtcagggcagccgaagatcctgctccggcttcctcttcttcaaaagattctccggcagctgccgctgctccggatggagctactgccaccaaacccaagccaccaccgattggtcctaagagagggtctaaggtcaagattctaaggagagaatcctattggttcaagaacgttggatcagttgttgccgttgatcaggaccctaagactcgatacccggttgtggtccggttcgcaaaagtcaattacgccaacatatcgaccaacaactatgcattggatgaggtcgaagaagttgca

SEQ ID NO: 160691 - DNA, 391 bp, Arabidopsis thaliana columbia
gaatggagacattgtcttcaacaaattatgtgtatctgcatgatgtcaatctcaagtctggcaatgcaaatgcatctggtcgcgcagcagcaatcaggaggatgctcttgttagatttggcaacaacaacacaacaacaaatcgatagagaacaacaaaacacactactaaaaaatgtcctcaagcccctttgcatgattcgatcagttatcgtcttccatctgtaaaatttttgcctgcttttcaactttttttcttcatcggattgcttttaaagaagactctgttttagctatggtttgtccctaactgtgatcttttgtggtctttggagtttcaaatgctcgctggttcagtactctcgttaacttatttctcaaaaccgcgattt

SEQ ID NO: 160692 - DNA, 388 bp, Arabidopsis thaliana columbia
cgagtcttatattcagttcgtttcatgaagataacactactgcattcacttgtgctatttgccttgaagactacactgttggagacaagctcaggctcttaccttgctgtcacaagtttcatgctgcgtgtgttgactcatggttaacctcttggagaactttctgtccggtgtgcaaacgagatgcaagaacgagcacgggagagcctccagcttcagagagcacgccattgctctcatctgctgcatcgtctttcacttcttcctctctgcactcttcagtcagatcatctgcactattgattggtccttccttgggctcattaccaacttcaatctctttctctcccgcatacgcaagctcatcctatattagacaatcattcca

SEQ ID NO: 160693 - DNA, 441 bp, Arabidopsis thaliana columbia
gaaaaacaaaatggcttcgatgggtggattacacggtgcatctccggcggttcttgaaggaagcttaaagatcaatggctccagccgtctgaatggctctggaagagtggcggtggctcaaaggtctagacttgtcgtcagagctcagcagagtgaggagacttctcgccggtccgtgattgggcttgttgctgctggtttagctggtggctcgtttgttcaggctgtcctcgccgatgctatttcgatcaaagttggccctcctccagctccttccggtggccttcctgggacagataactcagaccaagcaagagactttgcattggcattgaaagacaggttttacttacagccattgccaccaacagaagctgcagctagagccaaagaatctgcaaaggatatcataaatgtgaagccattgatcgacaggaaagc

SEQ ID NO: 160694 - DNA, 442 bp, Arabidopsis thaliana columbia
gaaaaacaaaatggctgcgatgggtggattatactgtgcatctccggcggttcttgaagggagcttaaagatcaatggctccagccgtctgaatggctctggaagagtggcggtggctcaaaggtctagacttgtcgtcagagctcagcagagtgaggagacttctcgccggtccgtgattgggcttgttgctgctggtttagctggtggctcgtttgttcaggctgtcctcgccgatgctattttgatcaaagttggcccttctccagctccttccggtggcctttctgggacagataactcagaccaagcaagagactttgcattggcattgaaagacaggttttacttacagccattgccaccaacaaaagctgcagctagagccaaagaattttgcaaggatatcataaatgtgaagccattgatcgacaggaaagct

SEQ ID NO: 160695 - DNA, 459 bp, Arabidopsis thaliana columbia
accacgcgtccgactttctctgctcattgcaatgtcaattctcgccgttctagcactatcctctgttctctctctaaaccttcgcttaatttggctaaacctctgactggatttctttctccttccactgcgtcgacgtctcgaaccgcattcaccgtcgctccgaaattcgcggaatcagtcgtcgaagctgaaccggagactaccgatatcgaagctgtggtggtttccgatgtttcggaggttactgaggaaaaagctaaacgagaagagattttcgctgttattatggttggtggacgccaatacatagtgtttccagggagatatctctacactcagaggctaaaagatgcaaatgttgatgaccagattgttctcaacaaagtgttgcttggtggaacaaagacacacacttacattggcaagccggttgtgaccaatgccactgtacatgct

SEQ ID NO: 160696 - DNA, 170 bp, Arabidopsis thaliana columbia
gccatggataccgagtttctccgaaccctagatcgtcagattcttttgggtgtcttcgttgctttcgtcgccgttggtgctggtgctgcttattctcttacattctccaagaaacgcagagtgtgtttggatccagagtatatcaaggagttcaagcttgttaagagaca

SEQ ID NO: 160697 - DNA, 276 bp, Arabidopsis thaliana columbia
accatggataccgagtgtatccgaactttatatcgtcagagcactatgcgcggctgtgtggctaaacctgccgttgatgcggctaaacctcagactggaacattctctacgtacactgcggcgacgtcgcgaaccgcattcaccaaggctccgaagctcgcggaatcacacgtcgaaactgaaccggagactaccgatatcgaagctgtggtggtttccaatgtttcgtagggtactgaggaaaaagctaaacgagaagagatttccgctggtatt

SEQ ID NO: 160698 - DNA, 432 bp, Arabidopsis thaliana columbia
  unsure (1)..(432): unsure at all n locations
cagaaagaatggctcaaaccatgctgtttacttcaggcgtcaccgccggccattttttgaggaacaagagccctttggctcagcccaaagttcaccatctcttcctctctggaaactctccggttgcactaccatctaggagacaatcattcgttcctctcgctctcttcaaacccaaaaccaaagctgctcctaaaaaggttgagaagccgaagagcaaggttgaggatggcatctttggaacgtctggtgggattggtttcacaaaggcgaatgagctattcgttggtcgtgttgctatgatcggtttcgctgcatcgttgcttggtgaggcgttgacgggaaaagggatattagctcagctgaatctggagacagggataccgatttacgaagcagagccaatgcttctcttcttcatctntgtcactc

SEQ ID NO: 160699 - DNA, 419 bp, Arabidopsis thaliana columbia
gagtaaagctggaaactttggactaaaagattggcgtctttgggtgtgtcggaaatgctgggtactccccttaacttcagggcagtttcaagatcgtctgctccgttggcatcaagcccatccacgttcaagactgttgctctcttctctaagaaaaagccagctcctgctaagtccaaggctgtctctgagactagcgatgagctcgccaagtggtatggtcctgacaggagaattttcttgcctgatggtcttttggatagatcagagatcccagagtacttaaacggtgaagttgctggagattatggttatgacccatttggtcttggaaagaagcctgagaactttgctaaataccaagcttttgaattgatccatgcgagatgggctatgtttggagcagctggtttcatcat

SEQ ID NO: 160700 - DNA, 278 bp, Arabidopsis thaliana columbia
  unsure (1)..(278): unsure at all n locations
tttgaatcgaagctaaagaatctctgtcatttacgccattgattccctcnttcggcctgtgagagacttcgctaagcatagtattcntctcgtcaagcgttgccacaagccagatcgcaaagaattcacgaaagttgcagttcgtaccgcgattgggtttgtggttatgggattcgttggcttctttgtgaagctaatcttcattcccgtcaacaacatcatcgtctgtgtcccttattaaggcaagcgatccaccatgtcagttcctttttttttct

SEQ ID NO: 160701 - DNA, 307 bp, Arabidopsis thaliana columbia
gttgtaacggagcatccgggggagcctacgacggagcttccaggggaacatccggaggagaagaaggggattttggaaaagagcaaagagaagcttccaggttatcatgccaagaccactgaagaggaagtgaagaaagaaaaagagtctgatgattaagcaaaatggttaaagaatgaataatgatgtgggagtgggacattcgctgcgttttgtgatcattatctttctcttttaagttgttattgaggctttcgttgattgcatttgatcctttattttgtaataccattctatcttttatata

SEQ ID NO: 160702 - DNA, 423 bp, Arabidopsis thaliana columbia
  unsure (1)..(423): unsure at all n locations
aagagaaacaacaagaagtagtaatggctttctctatgctctcctccgccgctgtggttacatccccggctcaggccaccatggtcgctccattcaccggcttgaagtcatccgctgcattcccggtcacccgcaagaccaacaaggacatcactttcatcgcaagcaacgggggaagagttagctgcatgaaggtgtggccaccaattggaaagaagaagtttgagactctatcttacctccctgaccttagtgacgtcgaattggctaaggaagttgactaccttctccgcaacaagtggattccttgtgttgaattcgagttagagcacggatttgtgtaccgtgagcacggaaacactcccggatactacgatggacggtactggacaatgtggaagcttncattgttcggatgcaccg

SEQ ID NO: 160703 - DNA, 396 bp, Arabidopsis thaliana columbia
gttaagggtttgaatcccaacgatttggttccactaatgggggggggccacagcgtcggggtggaacattgaagttttttccgggacaggttttccgcccgggcaatggaaccttaattgaagtttagttggggggggaaatgcagttcccttaacgccccaccaccgtttttggcccaaaagacttaatttactggggttaacgcattttatggggggatccgaagccaaaggggaattttaggaattgatcaaaactggggtttggatagatcaaccagggggatggggtttggttttgcataaggcattccacttttaagaaggagattggccgaagcatggttgaaaatgggtcccataaaggtttttaccggccgttttgaaaagatcagg

SEQ ID NO: 160704 - DNA, 421 bp, Arabidopsis thaliana columbia
ccgggccgaccacacccttccgttttttcatccactataaaattccttttatatgtaataaagggggaccaaaaagggaaggggccagtcttaaaatgctgacaggccatacaacaattagccaccaagatttactcttttgttgccaagttaacaccaattcatcccttctccaaacacctttccttttttaacctctaaacccgaccttgatccatttttccacccacctaatcacttcaacacctctttgttttagttctccgtatgtcttctttatattctcccttttttttcttttttttccttattttttttggctattccatcggtaatttattcttttttttatcttcttcttacttttttatattctttttacttcttttttttaattttttcctttttttctttatttctt

SEQ ID NO: 160705 - DNA, 320 bp, Arabidopsis thaliana columbia
  unsure (1)..(320): unsure at all n locations
gggaanncccgggccgaccacacccttccaagctgggttaacccggggggaaccacttttttttttgccccaccataaacaccaaactcgggctaaaagttaatactcgaacgggccccatcaacccggttggtcatttcgccctcgtcgtaaaagttaacttaaaagccgttcatccaaggtttcccaatgggggcctaatgtttaaacactaaaactcgttcccaatcgggtcaatgatagatataaaaggtccattagggcccatcgggtccaaaggcaaaggcaccttcctggtcagcggaaaacctaagtttgcc

SEQ ID NO: 160706 - DNA, 418 bp, Arabidopsis thaliana columbia
  unsure (1)..(418): unsure at all n locations
ccggnncggaaancccggggcggcccaacccttccaaccaaatttaaaacgtttaacttggggctgaattattaaacctaaagggccgcttaaacaagggttttttcttcccttgccttggccggtagggccgcaaagctttcccccgcggattttgaagtcctgggaggcggccgggtgccattggggaagactgttgccaagccaaagggcccatcaggcagcccatggtccggttctgcccgggtcaggtccttgggtccattctttggcgaataaccgggctaccttaccggggggttccccggggcctacggatgggccaccgccggactttaagttgaccccgagccattcgcagggaaccgggaactagaagttttccccagcaggtgggccatgctcggagccctaggct

SEQ ID NO: 160707 - DNA, 340 bp, Arabidopsis thaliana columbia
  unsure (1)..(340): unsure at all n locations
gaatncccgggccgcccacacccttccgaccacagggggggaggggggaaagatttaatttttgccagagttattgccttccagggcgggtttcctacaccaaagggcatgggcttaataaccccaccaatcataattttcttcttaatccaagcttaacttgtcgttttccaaacctgttcaaatcatttttaaagttaaccagtttaataaaaacaataactccgccgtttcccgccgtttggttttaattttcctgttaggccccgttgttgttggttccaaagattctcctgctgatcccgcctacggtaaacctgcaaacgtgtttggtaagcca

SEQ ID NO: 160708 - DNA, 388 bp, Arabidopsis thaliana columbia
ggtaaccatggtttcggttccttcttcggttcccaggggttcaactgaatcttaaggatggcgaggctcctttgttttttttcctttcggcaggaaacttttttccgatgggttcgtttccatcgtttccttccagacttttgcattgggaggcagggggggttccaggaagggtgtgcctgaggccaaccttaagggggccattaatggattcggtgggatcggggggaccttcctgggatgttggcttggccgcagggcctctcctttggttatcatggccattaatgccactggtggcgtcaggcaggcttcgcttttccttaattccgactttcctttcggattcttggttgctgttgtcaaaccttttgaggggcctgcattt

SEQ ID NO: 160709 - DNA, 437 bp, Arabidopsis thaliana columbia
ccgggccgacccagccgtccgattgttaataatccaccaaaagggggttttttccatccggtttaaatggccattgggattggaagggctttttaatggttaggccgccccgccttaaaaaataaaaaaggccttgacctttttgtcccccgaatccctactttttttgaaacttttccgttagttttgttttacggaaccggaatttttagacctgccttcccttttagaaggccaaaatcaaattttattttccaccaagtaggtttaactgttaagttttatggtggtgaactcaatggagtgagttttattgatcccccaactgtgaaaaatttttcttaacggcttcaattggttgagatttttgaattagatcgtccaactttgaaatcttatggtttttttcttaccaccccaaaaggttgtttaacttt

SEQ ID NO: 160710 - DNA, 331 bp, Arabidopsis thaliana columbia
cccgtccgaccgtttttggggttggtcaatgggcccacttttttcctacttggtggattggcctcttccattggtggattagaaagaggggagggccattaaattgcccaggaaaggttagaatttgctttcggatcatctgttaagctgggttaactcttcctagaccatcgatggtttcggggttaactatgggaccaaagatgtttgcaggggaaaagaacctattagggatctggggggaaggtaacaaagccgttgtggtaaagtccattgattatgtcagggcccttaaagctggtcctatggcgccattttaaggccctccaag

SEQ ID NO: 160711 - DNA, 430 bp, Arabidopsis thaliana columbia
  unsure (1)..(430): unsure at all n locations
cggaannnccgggncggcccggcccttccaaatttttcaagttccgccgggggaaaacccggtatcttaagtggcaaaaccagaaagggaggggggggtttgggcctgggtgggcgccttttgggcttccttcgctgattccacgaccggggggaatcgccttttttccagatctaattttttcaagggttggattctgtcaaaatctgcaggcgaatcgggatttttcagatctggttttcgctggcccgagattcaaatctgttggggccggggttcaattttctaaaatccaaatggggaacccgggaggcgggaagaaatcggcggggtctgatgtcgggccatggcctatgaatgtaatcagctccgtgggaatcatcatggttaataaacagctcatgttttccctgggttccggtttgggctt

SEQ ID NO: 160712 - DNA, 384 bp, Arabidopsis thaliana columbia
ggggcggaccacaggcgtccgttttgttaaagctaagggcctttttgcacctaaggttaaaccaccaggacgataattattgaagggaccaatcgcagagggaggggcaaatcccttttaaaagagggggtttgctttgttaaaaaggatttaaatctcccaaagcatccgttgttggatgtcccaaacctgcaggggattaacctcatccaaggtttaaagtccaaggagtcctttggggagccatttgcgtggatccatatttattggtttctgcctaatgaaggaattgagttcttgagaccttattttaaccttccttccgatgttgtccctgctcctttaaagaatcttgttaagcccggtggtcgtcctttttgtggc

SEQ ID NO: 160713 - DNA, 305 bp, Arabidopsis thaliana columbia
ggggcgggccacacccttccggatccttaaatctccaaattccctcctaatttttataataataaccaaaaccctttttttggtaaattttttccaaatgtagggaagtccctattaaaaccacaaatttagccaatctccggcaaccattggtggttccggttgtttcggagcgtaaacctccggcagacttcggactcggactaaaaagggttttaacggaccgtagccttccgtcccgaaggcccgtttccttaggggcttccataaaaataaagctacttttccggttggcacttccggca

SEQ ID NO: 160714 - DNA, 351 bp, Arabidopsis thaliana columbia
aaaatcccaaagttaaaccccatttttaaaaggacccaccctttggaccattggtggcgccccataacgccgggcgcgaaattaaattcccaccagccttaaccggaattcaatttttccagtttgattttttcaaaaccggccaccccaaccaagctctttttcttgttcccaaagcccgtttcctcccacctaatccggttcctttattttccttccccataaatctcctccttcctatatgaatcactgaatatttggaagttttaccatttccatcttaacctatttctccagtttgtgattaaccatccaaccaaccatttattttttgtaaaaggttgttttacc

SEQ ID NO: 160715 - DNA, 427 bp, Arabidopsis thaliana columbia
ggcggaccacacccgtccgcgaacccttggccccacaaatcctttgtttttttttttgaaaaaaaaatgccaaccaccgaggggaacttaatcggggcaggggggagtccttttttaataaggccaagaattgttttaaacctaaagtttgtcccttacaatttcttccaaaagacgttggggtttaaaaccaagttgcttttaaaataaaacccgtttaacaagaaaatcccggttttgtttaatgctgataaaccgggaagtgagtccaccataatcgttaagattatcaataacatttgaagctaatttgaaccgcccattttcccttccgaccctaacgatcggcccttggtttgtttctgggctgtttacatcgacaaaaaagtgtttgccgctttaaaaggtttcctaaaatcccgaatgt

SEQ ID NO: 160716 - DNA, 439 bp, Arabidopsis thaliana columbia
tccaacccttccgttaaattgccaccatatttttctcttcagaattccacaaaatcctaaattttttgaaaatttttaacccaagcagccgcaattttaataactaaaaccggttttggagacttccaaaaccctgaaccaccggttaaagaacttttaattgttccaaaaagtttccattccatgattggatcctaaaaaccttaccaagcagcattgagggttggaccaattttaaaggttttttttgtgtggtcacttttaaccaattttaagtgttttttcgattccaaggttcggtttggtctattccatgtgattctaccaccttttaaaagttcacccaaccaatcattttattgttccaaaaatattttctattaacacttttattttaaatatttttttttttatttttttaacccatttttttttaatt

SEQ ID NO: 160717 - DNA, 337 bp, Arabidopsis thaliana columbia
  unsure (1)..(337): unsure at all n locations
ccttccggaaaaagngccttccatttccacaaaggaatttttttttccttatagaattttccaaattgctggaggattttaaatggatccgggggctttccttaacataataatttatcctctgccttatcccaataatcatcagtccaacttcttttttggccttcctcaaaaattttttaagaaaccatttagtattcttatttttgactctaccattttttaattcctagtgtttttaacttaaaatgtaaaactttcttccccccagcaaaaattacttaaaatccttcccagtctaattaaaattgtagagtagttaaactcttacttttta

SEQ ID NO: 160718 - DNA, 281 bp, Arabidopsis thaliana columbia
cccttggcctgagttggttatcaaggttggtttcggcggcgccatttttttaaatggtctgggccaaccaaaacttttgttgggcttcttcaattcgcccttcttttccggtttcttaattcctctcccaaaaaagtattgtcattgtaaattgcaaattaaaatttcccaaaagcctttccgtccgccctttttttaccttagattctgttgggactttgtttgcctccggagctggaattgttcggagcatccttaatgttttttggttatttgtttta

SEQ ID NO: 160719 - DNA, 387 bp, Arabidopsis thaliana columbia
  unsure (1)..(387): unsure at all n locations
cgggncggccggggcgtccggtttttttttcctttttccaaacttaattttttctgaaacccttttttttttaaaattttggggaaaccttttttgccgccgggcgccattttaaggccagcgaatccggagtttccaagacctatcctaaataagccggtaccatccgtaaggggggcaacatggtaataaaaaaccgtccttgcagggttgtgggggtttcgacttccaaaactggcaagcccggtacccccaaatgtaacttggtggttatggatattttaactgttaaaaagctggaagatatggttccattttccaccaatggggatgttccacatgtgacccgggttgattaccagttgattggatttaattgaggatggt

SEQ ID NO: 160720 - DNA, 377 bp, Arabidopsis thaliana columbia
ccgggcgggccacacccttccaaaaaccaatctttccgcccttttgttctcctttaacctgtgaaaactgttaacccaaccggggtttcttcaatggggggcagatcgtcaaactcaattagttttttgcctatcaatccggggaaaaaggccaaataagttaatcctggccttcctatgggttgtcctccattgcttaacattttgattaataaggtcataaggtttaaccccaaaacccctatatttttaaaccgtaaccaattcgtcttatctgttgaacatgaatttattttgtttaaccctttgtttaattttgccggttacaacagcttccagaaggaaaattttaaccatttcctccattgggaaaccaa

SEQ ID NO: 160721 - DNA, 419 bp, Arabidopsis thaliana columbia
ccgtccaaaaaaaaaaaaaaaccttttatttaaacccattgtttgccttttaaacacctgattccaccaggtgctaaccttattggaagcgttgggcctaaaactttttttcctttgttacccaacccttttttggcattttaagcctttgccgcccttgaggaccagaattttccaagacccatttgggcccatttcctttttttcggcaactttccttggttgttttaagccgttttttttcggttgggttcaatgaaaaccttgcccagcttttggaagcctatttattgttttttaaatttttttaccttaggatgttcccttaaagtttttccggaacctttttttttgttaaagtttgttccgtgataatttttataggtttttttttatgttttttcctcttatatttttaa

SEQ ID NO: 160722 - DNA, 452 bp, Arabidopsis thaliana columbia
cggggcggccccaggcgtccgaaaaaaaaaaaaaaccccaaaaggtttaattggccgcttccacaagggttttttcttcccttgctttcgccggaagggttgggaccctttcccccgcggattttgaggtcctgggaggcggccgtttgccattggggaagactgttgccaagccaaggggtccataaggcagcccttggtccggttccgcccgggtaaggtcctggggtccattttttggcgggtaaccgggctcctttaccggggggttccccggggcctccggttggaccaccgttggactttaagttgatcccgagccattcgcagggacccgggggctagaagttttccacagcaggggggctttgctcggagccttaggttgcgttttccttgagctttgggttgggaccggagtcaagttcgggggggcggtttggttcagggcc

SEQ ID NO: 160723 - DNA, 452 bp, Arabidopsis thaliana columbia
ggggcggccccagccgtccgaagaaatcgtttgggccaaatttgaccttcctttattttcttaagcaaaatatgccggaggaggagacccttaaacttaacgggggggccaaatttaaggaatcaagtccttttttgaaggtaaccaagaatgacggcaaaatctgttcaaaaggagatcccaaggcggcccctttggtccctcctcccgcggcggaggaatccggttgaccggcggttggattgcctgtaacccatggtagcgtaattggcaagccgatcaggaaaaaccagtggaattctggcttttttacctgtctgggccgcaaggataaattttgcaccaccaatctcaaagttggtttttttggaagggtggctccttgggtgtggtatggaactaatgcaaaaagacttggttctgctccgggaccattttaaaaccatggtttg

SEQ ID NO: 160724 - DNA, 417 bp, Arabidopsis thaliana columbia
aacgggcccggaattccggggcggcccacacgcgtccggccgaccggtttggttggtttttaaaagtattttgtaaatttggctacggcttttaaaccaatgaaaccagggagggttggtgtgggaagaccaattttggcatattaacaggatcagatttcctttttcttccaagaaggtgaagaacttggaaaagggggtgactgattttgttggggggcttacggccaggaaattgagagttatgggtccagtctgattgcccaccaaggttctaaggaccattcccggtaaggttccttggggggaaggacccaacacttggatcaaattcctgtttaggttccacatgcaagttttggatcttttaagttttccttgggtggccaagcggataacctccataaccattgaacc

SEQ ID NO: 160725 - DNA, 379 bp, Arabidopsis thaliana columbia
cccgggcgggccacacccttccgggaccccaaccggaccaaccaaaaattcatttgaggagcttttaagccgttagggaaagcggatggaaaaatggttgggtgttgcggcctccgtttcaaccgtttccgccgttcgtccggttttctttttaaagcctaccgccgccatctttgctccggttctgggtttgcctccaatggttaagaaaaagggaggattgagattttcattggaaccaaaccagggaaccgtttaatccatgggggctggagttcaagttgcagaaccagtttttttgccggcggttataaccaattccccattggtttgggttaataaaagattttcaccaaaagaaccagatttcccttttgtt

SEQ ID NO: 160726 - DNA, 434 bp, Arabidopsis thaliana columbia
tcttttttaactcttcccacccactccattttttccaaatttaataatccttcctcaaagcagaactttaaataagttgcgtaaaaactacccaaccttaaccaaaaattccaaaaagctttttaaaaattccagaagaaacctaaaaggtttaacccctaaaaaaatctttccacccataatgttccaactcccatgcaactttcttgaaactttcaattgtaaataaagaactgaagttccattcgaaccaataaggtttaacccttaccaacctaattaacccaacaatgttttccacattcctctaagttttttgaaccccatcatgaaccaattccctaccatcttttttcctaatttccataaccttcctgtttttgtgccctttaaatttactgtttgccctaacattcctttcacaccctgaaaaa

SEQ ID NO: 160727 - DNA, 355 bp, Arabidopsis thaliana columbia
cgaaaaaaaggcaaccacattttgctttcaaaattcttttttacttctttttcttaatcaccaaggggggcttttttgggccggggtggagattccccaatttccctttccgtaacttttccggtaaagcccgttgtgaacccatgtcttgttcttgcaaagctaaagctttggaaccgaaaggattgcaacccaaccagttttccttttttccacaaaatccatttcaggtttggggtaccagctcaatgtattttttggccccaacaggggtaaaatcgtgagggttcttaaatattttactaaaaccatctccctggtgatcaaagatttaaccttaaaaccaaaacaaatt

SEQ ID NO: 160728 - DNA, 395 bp, Arabidopsis thaliana columbia
cggggcggccccagccgtccgaaaaaaatgaagtcaagcctaaagactaaggttgtttttggggttccctcctttgatggggggaggcttccagtggacccggcggagggagaaaaccagccttttttggaagctgatgtggacctggtttaagcgggaagaacaccgtcaacttttggactggatctggagaaaatcggagtggaacctgccaaacccgggaggattctggggaatgatagatcctggagtatggtcccaggcgtgattgcttttggggatttgattccaggaccaatgcttgttaccaaagccaaaaaaaacggtgttgtttgtttggagttaatagcaggcaaccacggtcatgttgattttaccagggttccgggggtggt

SEQ ID NO: 160729 - DNA, 433 bp, Arabidopsis thaliana columbia
gggaatccccgggtggcgccacacccgtccggttttttggttggcagggcctgtggttttattattggggaagaccgttaaccttagggggaggaccataaccacagggttgcgttaatgaaaaaatgaaacctttaagtggtaatgccgttggtccaatccttgtaaataaatccaagcttaaagggctcccactgttcgagttccaagtgttagcagtggcaaccaacaatttttttataacaaacaacctcgaccaaggaggatttggtgctgtttccaagggggggtaccaagaagggctcattttcgttgtaaaaaggctttctcgaccatcggaccagggagtcaaggattttttaattgaattggtttgaaccttaaagttgcaacaccggatttcttggggatggctggttttttgcttttaagg

SEQ ID NO: 160730 - DNA, 396 bp, Arabidopsis thaliana columbia
  unsure (1)..(396): unsure at all n locations
cgggccggccacacccttccgaagaaaaaaaaatttaaaattcattaaaaactttaaaaaattggaaaaagaaggaaggaagaggaggccataaaagcatttgagttaatttaactctntttccgtttttttttgggcctttgctgggtcgttttttcggattatttttaatttttcgttctcggttggtttttgtttcttgggaatggatgaattgattaaaaagttttaaactttcctggaaactggatttggtttaatccgttttaactcttttgaaaagagaaaaaaggttgattctttttaatccaaaaaacaaaaaagggatcctttcaatgttctctttcgccgtattgtttttcaccaccgttttaatttcgtctttttaatttaaag

SEQ ID NO: 160731 - DNA, 453 bp, Arabidopsis thaliana columbia
catttttctattactgaaatttttcttagagattaagattaagaagcaaaatggccacaagcgcatcagctttgctctcaccaggcacattctccactgcaatctcccacaaaaaccctaactccatctcattccatggccttcgtcccctccgtctaggtggctcctcctccgccctacccaaactatcaaccaccgggagaaaatcctcctccgctgtcgtgagagctgagctaagcccttccatcgtcataagtctcagcacaggtctctccctcttcctcggccgtttcgtcttcttcaacttccagagagagaacgtagcaaaacagggcttaccggagcagaacggaaaaacccatttcgaagctggagatgatcgtgctaaggagtacgtcagtctcttgaaatcgaacgatccaattggattcaacattgttgatgttcttgctt

SEQ ID NO: 160732 - DNA, 239 bp, Arabidopsis thaliana columbia
  unsure (1)..(239): unsure at all n locations
accgcccgaanaccggtcgaccacgcgtcgttaatcacaatctcaaagcttcggataccattggctgtaccaagcaaaccgcaggaaatccaccggggaaaagccccaggaaacaactcgcaacaaaggcgggaggaaatcagctccgcgaccggaggagttaagaagccacacagattccgtcctggaactgttgtcctaagagatattagtaagtattttaagagcactgtttcttt

SEQ ID NO: 160733 - DNA, 401 bp, Arabidopsis thaliana columbia
atccaagaaacaagaatagctacaacactaagtttttagtaatgctcaagccgagagagacaatggcatgaacatttatgagctcaagcggggttcttaccccaacaacattccttggccagactaaagccttaagctttaacccccttcgtgatgttgtctctctcggatctcccaagtacactatgggaaatgatctttggtatggacctgacagagtgaagtacttaggacccttttccgttcaaactccgtcttacctcaccggagaattccctggcgattatggttgggacaccgccggtttatccgcagaccctgaagcctttgccaaaaacagagcttttgaggtgatccatgggagatgggcattgttgtgagcttttggttgcataactcct

SEQ ID NO: 160734 - DNA, 451 bp, Arabidopsis thaliana columbia
gttcaaggtatgaataccaacgatatggttacacttattggtggtggccacagcgtcggtgttgcacattgcagtctcttccaggacaggctttccgaccgtgcaatggaaccctcattgaagtctagcttgaggaggaaatgcagttcccctaacgacccaacaacgtttttggaccaaaagacttcatttactgtggataacgcaatctatggagagatccgaagacaaagaggaattctaagaattgatcaaaacttgggtcttgatagatcaaccagtgggattgtgtctggttatgcatcaagcaatacactcttcagaaagagatttgccgaagcattggtgaaaatgggtaccattaaggttcttaccggacgttctggagagatcaggagaaactgcagagtcttcaacaactgaggacgttgattcttgcacacattcttta

SEQ ID NO: 160735 - DNA, 449 bp, Arabidopsis thaliana columbia
agcttggtttacccgtggggaagcacgtttttgtttgcgccaacataaacgacaaactctgtctcagagcttatactgcgcaccagcgccatcgacgcggttggtcatatcgacctcgtcgtcaaagtttacttcaaagacgttcatccaaggtttcccaatggtggactcatgtctcaacacttagactcgttaccaatcgggtcaatgatagatatcaaaggtccactagggcacatcgagtacaaaggcaaaggcaacttcctggtcagcggcaaacctaagtttgccaagaaactagcaatgctcgccggaggaacaggcatcactcctatctaccagatcattcaatctatattgagtgatccagaggacgaaaccgagatgtatgtggtttacgcaaacagaaccgaggatgacattcttgtgagggaagagctagaaggatg

SEQ ID NO: 160736 - DNA, 441 bp, Arabidopsis thaliana columbia
ctcaatctcaggcctgatctgattggaggttgtatgccacgtggctactctcacacccaacgggaaacgtcaggcgagagctctagccgtatttttaaactctgaaggtgttcgattcacctccgtcttctcttcgcctctggatcgagctagatccatggctgtttctgtttgccaggaaatgaattttcctgaggagcatttgcaagtctcggatgctgtggttgagatgagtttaggggactgggaaagctgtcatcggtcagagatttacacacctgaaactttaagtttaattgaaagatgccaacctgatttctcagctccatctggtgaatcactcagacaagtagagtttcgtatggttcagtttctgaatgggacaggttcacgtctttcggagaagcttaagccagacctttttgtattttcacagctcac

SEQ ID NO: 160737 - DNA, 313 bp, Arabidopsis thaliana columbia
  unsure (1)..(313): unsure at all n locations
taactttatacatcatactttccacacactttcttatacttaaaacacancgaatcattagctcacgctaaatttttcgagcaccgcgcgggcaaaccaacaaaagcaaacaacaatatagcctatgacacaaaactatgtcaacttatcgacaaatacactcaaatcttaatcacctaatgagacaaccatctgatcgactcagctccataacatcagtaaaggtctctctggagactcataggttctcatcagaaagaacactatgattaaacattccgttagaatccactccgagaactctcgaaacact

SEQ ID NO: 160738 - DNA, 429 bp, Arabidopsis thaliana columbia
  unsure (1)..(429): unsure at all n locations
ctcctttctctttcaatctccaaggattttactgtgagatatttggcgggaaaatgtcggggaaaggtgctaaaggtttgattatggggaaacccagcggtagcgacaaggataaggacaagaagaagcctatcactcgttcttctcgagctggtctccagttcccagttggtagggtgcatcgtctgttaaagacaaggtccactgctcatggaagggttggagcaactgcagctgtttacacagcagcaatattggagtatctgactgcagaagtnttggagttggctggtaacgccagcaaggacttgaaggtgaaacgtatctcgccgaggcatttgcagcttgcgattcgtggagatgaggagctcgatactttcatcaaaggaactatagctggtggtggagtcatctctcatatccacaaga

SEQ ID NO: 160739 - DNA, 411 bp, Arabidopsis thaliana columbia
ccgggccgggccacgcgtccgcgatctcttcccaaattattgattgtttttacttatttttctcatcgcacggtgatattgaggatcggggacctgaatcgagcgggagctttctctgattaccggcggtcaacaccgctgaacacatatgtttgtttgacgacctcttctctccgcgatctttacctcaacaacgagatctgtttccacgaaagaaaggaggatgtcgacgccagcaaggaagaggttaatgagggatttcaagaggttgcagcaagacccacctgcgggtattagtggtgctccacaggacaacaacattatgctctggaatgctgtcatatttgggcctgatgacacaccatgggatggaggtactttcaaactctcactgcagttctttgaagatta

SEQ ID NO: 160740 - DNA, 462 bp, Arabidopsis thaliana columbia
cacagacttcttgccatacaatggagatgggttcaaagtgcaggttccagcaaaatggaacccaagcaaagagattgagtatccaggacaagtccttaggttcgaagacaacttcgatgctactagcaatctcaatgtcatggtcactcctaccgacaagaagtccatcactgattacggttctcccgaagagttcctctctcaggttaattacctcctagggaaacaagcttacttcggtgagactgcctctgagggaggctttgacaacaatgcagtggcaacagcaaacattctggagtcatcatctcaggaagttggtgggaaaccctactattacttgtctgtgttgacaagaacggctgatggagacgaaggtgggaagcatcagctgatcacagcaaccgtgaatggagggaagctttacatctgcaaagcacaagctggagacaagaggtggtt

SEQ ID NO: 160741 - DNA, 450 bp, Arabidopsis thaliana columbia
cacacaaggagagaagagagaaagagagaaagtgtagacagagataatggcgtacagtgcgtggggcctacaccagagcgcattggcttcatcagccgcacgatcatcatcttcctcctcatcccagcgtcacgtgtcgctctccaaacctgttcagatcatctgtaaagctcaacagtctcatgaagacgataactccgccgtctcccgccgtcttgctctcactctcctcgtcggcgccgctgctgttggttccaaagtatctcctgctgatgccgcctacggtgaagctgcaaacgtgtttgggaagccaaagacgaacacagacttcttgccatacaatggagatgggttcaaagtgcaggttccagcaaaatggaacccaagcaaagagattgagtatccaggacacgtccttaggttcgaagacaacttcgatgctactagcaa

SEQ ID NO: 160742 - DNA, 451 bp, Arabidopsis thaliana columbia
ggtcaccatggcttcggttactttctctgttcccaagggtttcactgaattctcaggattgcgaagctcctctgcttctcttcccttcggcaagaaactttcttccgatgagttcgtttccatcgtctccttccagacttctgcaatgggaagcagtggtggatacaggaaaggtgtgactgaggccaagcttaaggtggccattaatggattcggtaggatcgggaggaacttcctgagatgttggcatggtcgcaaggactctcctcttgatatcattgccattaatgacactggtggcgtcaagcaggcttcgcatttacttaaatacgactctactctcggaatctttgatgctgatgtcaaaccttctggagagactgcaatctctgttgatggaaagatcatccaagttgtctctaaccgaaacccgtctcttctcccttggaag

SEQ ID NO: 160743 - DNA, 451 bp, Arabidopsis thaliana columbia
attggtaataatccagcaaaaggggggttattccgagcgggttcaatggacaatggggatggaatagctgttggatggttaggccaccccgtctttagaaataaagaagggcgtgaactttttgtacgccgcatgcctactttttttgaaacttttccggtagttttggtagacggagacggaattgttagagctgacgtcccgtttagaagggcagaatcaaaatatagtgtcgaacaagtaggtgtaactgttgagttttatggtggtgaactcaatggagtgagttatagtgatcccgcaactgtgaaaaaatatgctagacgggctcaattgggtgagatttttgaattagatcgtgcgactttgaaatctgatggtgtttttcgtagcagcccaagaggttggtttacgtttggacatgcttcgtttgctctacttttcttctttg

SEQ ID NO: 160744 - DNA, 386 bp, Arabidopsis thaliana columbia
  unsure (1)..(386): unsure at all n locations
cggaaaattcgggccgagccacgcgnccgctctggcgaatcaccgagctaccttaccggttgttctttggagactacggatgggacaccggcggactttcagctgaccccgagacattcgcaaggaaccgtgaactagaagttatccacagcaggtgggccatgctcggagccctaggctgcgtcttccctgagcttttggctagaaacggagtcaagttcggagaggcggtttggttcaaggccgtttcacagatcttcagtgatggatggctcgattacttgggaaaccctagcttcggttacgctcagagcattttgtccatttgtgccactcacgttattttgatctgtgttcgtctttatgttttatattctctttaatat

SEQ ID NO: 160745 - DNA, 440 bp, Arabidopsis thaliana columbia
ctaaagtctctgtttttgagaatttttctacttatagatccaagcgaattgatctagaggaggggatccaacatgggtaacacggataagctgatgaatcagatattcgatttgaaatttacgtcaaagtctctgcaaaggcaatcaaggaagtgtgagaaggaagagaaagcagagaaattgaaggtgaagaaggctatcgagaagggtaatatggatggtgctcggatctacgctgagaacgccattcgtaagcgtagcgagcagatgaactatctccgtctcgcttctcgccttgacgctgttgttgctcgtcttgatactcaggctaagatgaccaccatcaccaaatccatgaccaatatcgtcaaatcccttgagtcttctcttgccacagggaatctacagaagatgttagagacaatggattcatttgagaa

SEQ ID NO: 160746 - DNA, 399 bp, Arabidopsis thaliana columbia
gaaactctcaagctcaacaccagagtgtagccagaccacaacaagccagtcgaaggaaccgaaacagctacaagaccaggtaccaacgccgagctcatggcaagtgccaaggttgtagctgaagctgctcaagccgcagctcgtaacgaatcagacaaactcgacaagggtaaagtcgccggagcctctgctgatatcttagacgctgccgagaaatacggtaagttcgatgaaaagagtagcactggtcagtacctcgacaaggctgagaagtatctcaacgactacgagtcgtcacactccaccggtgctggtggtcctccttcttcgacgagtcaggctgagccagcaagttagtctgagccggcggctaagaaagacgatgaagagtctggtggt

SEQ ID NO: 160747 - DNA, 209 bp, Arabidopsis thaliana columbia
aattttctcttcttcttcttcttttttgttttgagagaaaacaaaaaaattctgggtctacaggttttacgaaaaggagaaggggaaaacatatacggatcagctcaccgactatcagatctctgagtttaaggaagctttcagcttatttgacaaggatggtgatggttgcattaccaccaattagctggttatctgtgatgctttct

SEQ ID NO: 160748 - DNA, 439 bp, Arabidopsis thaliana columbia
aatatattcagctacgtcgagtgaagaaccagtgaagcataagtagcagagacagagagagatacgtgagtgtgtgtctgtgtttttcgcgttttggctttcttcgctgattccacgaacggcgtgaatcgacttttctccagatctcatctctttcagtgtttgattctgtcaaaatctgcaagcgaatcgagatttctcagatctcgttttcgcttgcacgagattcagatctgatagtgtcggtgttcaattttctcaaatccaaatggagaaaccggagagcgagaagaaatcggcggtgtctgatgtcggtgcatgggctatgaatgtaatcagctccgttggaatcatcatggctaataaacagctcatgtctttctctggtttcggttttggctttgctacaacgttaacgggatttaactttgcattcact

SEQ ID NO: 160749 - DNA, 461 bp, Arabidopsis thaliana columbia
ctttgctcaagctcagtgcctctttgcagcgaaagctcaaccaacaagacgatgattatctcagagaacaatcgcagagagatgtgcaaataccttttcaaagagggagtatgctttgctaagaaggatttcaatctcccaaagcatccgttgattgatgtaccaaacctgcaagtgattaagctcatgcagagtttcaagtccaaggagtacgttagggagacatttgcgtggatgcattattattggtttctgactaatgaaggaattgagttcttgagaacttatcttaaccttccttccgatgttgtccctgctactttgaagaagtctgctaagcccggtggtcgtccctttggtggcccacctggtgatcgccaaagaggaccacctcgctctgatggagaccgtcccagatttggtgaccgtgatggataccgtggaggcccacgtggtggtga

SEQ ID NO: 160750 - DNA, 368 bp, Arabidopsis thaliana columbia
tgaagttcaacctctccaatccaaccaccttgtgtcattagaaactcgagatcgatgacgggcaaaaactccgcgccttgtgggacaagaggctctctcatgaagttagccaagatgctctatgcaacgaattcaagggatacgtattcaagatcatgggaggatgtgacaagcaaggtttcccaatgaaacaaggagttctcactccagggcgtgtccgtcttttgcttcaccgaggtactccttgctttagaggacacggaaggaggactggagagaggagacgaaagtctgtccgtggttgcattgtgagccctgacctgtctgttcttaacttggtcattgtgaaaaaaggtgtaagtgatctt

SEQ ID NO: 160751 - DNA, 447 bp, Arabidopsis thaliana columbia
gatccttaaatctccaaatttcctcctcagtcttatcattatagacaaaacccttttctttggaaattttttcccaatctatgggagtgcctagtgaaaccacgaatttagccgatctccggcgaccattggtggttccggttgtctcggagcgtaaacctccggcagacgtcggactcggactagagagtgttttaacggagcgtagccttccgtaccggaggcgcgtgtacttaggggcatgcatagagatgaagctacttttccggttggcacttccggcgatacttgtctatttagtcaacagcggaatgggtatttccgctcggatcttcgccggacatctcggtaaaaatgagctcgccgccgcgtccatcggaaacagctgcttcagtctcgtctatggcctcatgttaggtatgggcagtgcagtcgaaacactatgtg

SEQ ID NO: 160752 - DNA, 444 bp, Arabidopsis thaliana columbia
cgaagaagagatcaaatcaatctgatcgtagatgggttgtttcagttgcttcgacggaacccaaaaggaacagcgtaaggaaggagagagacaagcctccgccgaagctcgtgccaaagccgccgaagctgcccagcgacggaaagagcagtttgataagtctgcagctggaagagctgcacaagctcaattacaacaaatggctaaacaatctgcaaatactaacaaaggagagcctgttcttaagtggcaaatgacgtagtgatgagtcctggtttcaaaaggaatcaatttgtgcgatttggttctttggaaattgtgtgttcttcaatgtttgcaatactttggttatgtgaattgaagcttattttcctccttattcatctgattatcttttgactttctgaaaacaaaaaagaaattacagagttcattgttaagatc

SEQ ID NO: 160753 - DNA, 381 bp, Arabidopsis thaliana columbia
ggaaggccacctagttgcagactcactgacattgccgatgaccggcttcgagagtggtttggggatgacgatgctcttgaacggactataaagggagaatggtatctaattccacacggcgacgattgttgcgtttcggaaacattatgtctaaccaaagatgaagatcaaccttgcatcgtcggaagcgaaccagatcaagatttttctggaatgcgcattgtgatcccttcgtctcaggtttcgaagatgcatgctcgtgtgatttacaaagacggagcttttttcttgatggatcttttaagcgaacacggaacctatgtgaccgttaactaaggaagacgatattgagcaacaccgaattttcccgccgcggttaaa

SEQ ID NO: 160754 - DNA, 431 bp, Arabidopsis thaliana columbia
ctcaccttccccgaaggtagactacaaatctttcccaccaccgtatgtctacagctcacccggaccaccatactactcacctggcgcctaaggtagattacaaatctccaccaccaccatacgtctatagttcaccaccaccaccatactactcaccttcccctaaggttgactacaaatctcctccaccaccatactactcaccttcccctaaggttgactacaaatctcctccaccaccatatgtctacagttctccaccaccaccatcatactcaccttctccaaaaactgagtactaagcttcacattcaccttcgtattacttgaaattgtaatgagattcttatataagctaccaagttttatttcatttcatctttgcttttgttcttcatgatattcatatctaataaattttaattctgcct

SEQ ID NO: 160755 - DNA, 449 bp, Arabidopsis thaliana columbia
gcagaagatggcccaaaaggtggaagcacaaggagggaaaggagccaacctatgggacgatggatcgacacatgacgccgtgaccaagattcagctcgcagcaggcatagacggaattcaatatgttcagtttgattatgtcaagaacggacaacccgaacaagctcctcttcgtggtaccaaaggccgtgttctcccagctgatccggttcctatattttccttgcccattaatcttcttctttctatatgtatactgttatattttgaagttttgacattttcatcttgatctatttctacagtttgtgattaaccatccagacgaacatctagtttctgtagaaggttggtatagccctgaaggtatcattcaaggaattaagttcatctccaacaagaagacttctgatgtcattggatccgatgagggtactcacttcactcta

SEQ ID NO: 160756 - DNA, 446 bp, Arabidopsis thaliana columbia
cggacgcgtgggcgcaccaatcctctgttttggattttgaagagaaaatggcaagcagcgacgtgaagctgatcggtgcatgggcgagtccctttgtgatgaggccgaggattgctctaaacctcaagtctgtcccctacgagttcctccaagagacgtttgggtctaagagcgagttgcttcttaaatcaaacccggttcacaagaagatcccggttctgcttcatgctgataaaccggtgagtgagtccaacatcatcgttgagtatatcgatgacacttggagctcatctggaccgtacattctcccttccgatccttacgatcgggccatggctcggttctgggctgcttacatcgacgaaaagtggtttgtcgctctaagaggtttcctaaaagccggaggagaagaagagaagaaagctgtgatagctcaactagaagaa

SEQ ID NO: 160757 - DNA, 387 bp, Arabidopsis thaliana columbia
  unsure (1)..(387): unsure at all n locations
gcggaaanagtncatacattgacacagagggaaccttccgttctgataggattgtcccaattgctgaaaggtgttgtaatggatccgggagcggggcttgacaatatcatttatgctcgtgcttatacctatgagcatcagtacaacttgcttcttggccttgctgcaaaaatgtctgaggaaccatttaggattctgatttttgactcgatcattgctttattccgagtggatttcactggaagaggagaactcgcagaccgtcagcaaaaactagctcagatgctttccaggctaatcaaaattgcagaggagttcaacgttgctgtctacatgactaaccaagtcatagctgacccaagtggtggaatgtttcatatcagaccc

SEQ ID NO: 160758 - DNA, 438 bp, Arabidopsis thaliana columbia
gaaaacttcgtctctcttctctgcttcgccctctcatttcctgtgagataaaggcggagtctctctccagttattttgcgtcatgcatcgattcttagagttcaaaatggttgatcaagttcagcaccccactattgcgcagaaagctgccgggcagttcatgcgttcaagtgtttccaaggacgttcaagtgggttaccagaggccttctatgtatcaaagacatgcaacctacggaaactactccaatgctgcatttcaatttcctccgacatcccggatgttggcaacaactgcttctcccgtgtttgtccaaaccccaggagagaaggggttcactaactttgcccttgactttctgatgggtggtgtttctgctgccgtcttcaagactgctgctgttcttattgtacgtggtaagcttttgatccattaacc

SEQ ID NO: 160759 - DNA, 438 bp, Arabidopsis thaliana columbia
ggaatacgagaaactcggttcttactctttatttggtcttccagcttcttacaaggggcgattcgttcagccaggtgggaggaggacgaagtactcaatcatcattggcggtgaaaactttggatgtggatcgtcacgtgaacatgctccggtttgtttaggagcagcgggagctaaagcagtggtggctcagtcttatgctagaatctttttcaggaactctgttgctactggtgaggtttatcctttggattctgaagttagggtttgtgatgagtgtacaactggtgatgttgcgactgttgagttgagggaaggagatagtattttgatcaatcatacgactgggaaagagtacaagcttaagccgattggtgatgctggaccagtgattgatgctggtggtatatttgcttatgctaggaaagctggaatgat

SEQ ID NO: 160760 - DNA, 439 bp, Arabidopsis thaliana columbia
cccttctcccaatctcatcttctccgaaaacctttcttctctcaaatttctgtgaaaacatgtctgacgacgagcaccactttgaggccagcgaatccggagcttccaagacctatcctcaatcagccggtaacatccgtaaaggtggtcacatcgtcatcaaaaaccgtccctgcaaggttgttgaggtttcgacttccaaaactggcaagcacggtcacgccaaatgtcactttgttgctattgatatcttcactgctaagaagcttgaagatattgttccatcttcccacaattgtgatgttccacatgtgaaccgtgttgattaccagttgattgatatcactgaggatggcttcgtgagccttctcactgacagtggtggcaccaaggatgatctcaagcttcccaccgatgatggtctcaccgcccagatgag

SEQ ID NO: 160761 - DNA, 458 bp, Arabidopsis thaliana columbia
aaaaccgatctctccgtcctcttgttcgcgctgcagctgttgagactgttgagccaaccactgattcgtcgattgtggacaaatcggtcaactcgattaggtttttggctatcgatgcggtggagaaggccaaatcaggtcatcctggtcttcctatgggttgtgctccgatggctcacattttgtatgatgaggtcatgaggtataaccccaagaacccttattggttcaaccgtgaccgattcgttctatctgctggacatggatgtatgttgctctacgcgttgcttcatcttgccggctacgacagcgtccaggaggaagatttgaagcagttccgtcaatggggaagcaagacaccaggacatcctgagaatttcgagactcctggaattgaagtcactactggtcctcttggacaaggaatcgctaatgctgttggtttagctcttgctgag

SEQ ID NO: 160762 - DNA, 441 bp, Arabidopsis thaliana columbia
gcttcttgtgttgtgacgcatactcttcgcattcttgagatatggccgccgcagcgtccaccgtcttttccatcaggagagcttctttgagcttgaacgggtcattatcaatagctgtattagtctcagctttaattcttttttcaaagaatgctattactttttcttctatttctcacatttcaataattttatctttcatttaattcttacaactcattattcttcaaccgttactttctctttttatcagttgtacattcaagtatttttctcttacttattttttattttctcgtctatttcattttttaatttgtattatattattatttccgtcttttgtattattttatcttatttcatacttttaatttatagtattctttattttatttttttatttttctttttgacatatatattataaaattttttttt

SEQ ID NO: 160763 - DNA, 303 bp, Arabidopsis thaliana columbia
acgcgacagaactaactaacgacgccggagatggccgccacttcaaccgccgctgctgcttgttcaatcatgggtacccggggggtttccgacattagctccaattcaagccggttcacagcccggttcggattcggaaccaagaaagcatctcccaaaaaggctaagacggttatctcagaccggcctctatggttcccaggcgcaaaatcacccgaatatctcgacggttcacttgtcggggactacgggttcgatccttttggtttaggcaaaccggcggtgtattttccaattcgattt

SEQ ID NO: 160764 - DNA, 453 bp, Arabidopsis thaliana columbia
ctctctttctctcaaactctctcaacaacaacaatggcgtctcttcaacaaactctattctctcttcaggccaaactcccaccatgctccgtccaaatcgccagatctctcccactccgaaaaaccttcccaatccgaatcaacaacggtggaaacgccgccggagcaagaatgtcagccaccgcagcatcaagctacgcgatggcattagcagacgtcgcgaaaagaaacgacacaatggaattaacaggcacagacattgagaagctcgaacaagtcttctcagatccacacgtactaaacttcttcgcgaatccaacaatcaccgtcgagaagaaacgtcaagtcatggtcgacatagtgaaatcgtcgtgtgtttaatcacacacatgtaacttcactcaacgttcttgtcgacgtgaataccgttaatatcgtcaccgtccacgttag

SEQ ID NO: 160765 - DNA, 288 bp, Arabidopsis thaliana columbia
aaaaaaaaaaaaaaacatttagttaaatccattttgagactcttcaacaactgcatccaccaaatcctcaccgttatggaaaccctttgcctcaaactgttgttccgttgatgaccaaaccgtctttggcaatttcagccgttgccgaccttcgagatcagaattctccaagaaccatctcggaccacttgcttcttttcggcgactttcctttgttgatctaagcggttcttcccaatgttagtatcagtgtattgctttcttaagctcttagaggcttcttatatt

SEQ ID NO: 160766 - DNA, 421 bp, Arabidopsis thaliana columbia
aaaaaaaaaaaaaaacacaaaaagtttcaatggccgcctccacaatggctctctcctcccctgccttcgccggaaaggctgtgaacctttcccccgcggcatctgaagtcctcggaagcggccgtgtgacaatgaggaagactgttgccaagccaaagggtccatcaggcagcccatggtacggatccgaccgagtcaagtacttgggtccattctctggcgagtcaccgagctaccttaccggagagttccccggagactacggatgggacaccgctggactttcagctgatcccgagacattcgcaaggaaccgtgagctagaagttatccacagcaggtgggctatgctcggagccctaggctgcgtcttccctgagcttttggctaggaacggagtcaagttcggagaggcgggttg

SEQ ID NO: 160767 - DNA, 444 bp, Arabidopsis thaliana columbia
  unsure (1)..(444): unsure at all n locations
aagaaatcgttttgtgcagatttgatcttgcgttaattttctaagcaaaatatggcgggagaagatagccgtgaagctcaacgaggcgacgaatatgaggaatcgagtcctctcttgaaggtgaacgagaatgacggcaagatctgctcgaaaagagatgccaaggcggcgcctcttgtgcctcctcccgcggcggaggaatacggctggacggcggatggattgcctgtgagccatggtagcgtgattggcgagccgatcaggagaaaccagtggaattctggtctttttacctgtcttggtcgcaatgatgaattttgcagcagcgatctcgaagtttgtcttcttggaagtgtggctccttgtgtgttgtatggaactaatgcagagagacttgggtctgcttccggaacattttcaaaccatngcttgacgtatttggga

SEQ ID NO: 160768 - DNA, 400 bp, Arabidopsis thaliana columbia
gcaaaaacatggatcgttgcacgtcgtcgtttttgcttctcacattggtctctaccttgtggattctccaaatctccttggctgagcttgttccagcaatcatgacattcggtgactctgtagttgatgtcggcaacaacaactatcttccgacccttttcagagctgattatcctccttatggccgcgatttcgctaaccacaaagccaccggtcgtttctgcaacggcaaattagccactgatataactgctgagactttaggcttcactaagtacccaccagcttatctaagtcctgaagcttctggtaagaatcttctcattggtgctaatttcgcttctgcagcttcaggttatgatgacaaagctgctcttcttaatcacgcgatcccggtgta

SEQ ID NO: 160769 - DNA, 423 bp, Arabidopsis thaliana columbia
gacgaacagcttcgttcgtctctgataagaatctgtaaatatggctacagcgtatcaaccaatgaaaccagggaaggcgtggtttggtagatccactttagcatatttacaagatcagaattactttgttcttcaagaatgtcaagaacttggaaaaagtgtgtactgattttgttcggggagctaacgacatgaaactgagagttaagggtccagtcagaatgcccaccaaggttctgacgatcactactcgttatgatacttgtggtgaaggaaccaacacatgggacagattcgtgcttagggtacacatgcgagttatagatcttttcagctctcactgatgtggtcaaacagatcacctacatcaccattgtacctggtgttgaagttgaggtcaccatcgctgactcgacgatcaac

SEQ ID NO: 160770 - DNA, 431 bp, Arabidopsis thaliana columbia
agaacacaaacagaacaaacaaaaaatcaattgaagagtctctcagtcgttaggggaagcaaatagagaaatggctagctttactgcctccgcttccaccgtctccgccgctcgtccggctctccttctcaagcctaccgtcgccatctctgctcctgttcttggtttgcctccaatgggtaagaagaagggaggagtgagatgttcaatggagacaaagcaaggaaacgtctcagtcatgggggctggagtttcagctgcagcaacagctgctttgacggcggtgatgagcaatcccgcgatggctttggttgatgagaggatgtcaacagaaggaacaggattaccctttggtctaagcaacaacctcttgggtcggattctgtttggagtctttggtttgatctgtactttcttcttcgtttacactt

SEQ ID NO: 160771 - DNA, 408 bp, Arabidopsis thaliana columbia
ctaggacagaagcaaggcggtggagttgtcattaccggtgtggacggaggagggaacgcagcaaaagcagggcttaaatctggagatcaagttgtgtacacaagcagtttctttggagatgagctttggcctgcagataagcttggctttactaaaactgcaattcaggcaaaacctgattctgtctactttgttgttagcagaggtgcagaagttgatgttaagaaactaaataagcgtccggctcctccacggtttggaaggaagttaactgagactcagaaggcaagagctactcacatttgtcttgattgtggattcatatacactttacccaaatcttttgacgaacagccggatacatacgtatgtcctcaatgtatagcaccaaaaaagagtgttgcaaag

SEQ ID NO: 160772 - DNA, 410 bp, Arabidopsis thaliana columbia
ctcgtgtcttactcgtgccagccactcgcatttctccagattttattatccttcctcgaaacaagagcttagctaagatgacgaagaactacccaaccgtgagcgaagattacaagaaggctgttgagaagtgcaggaggaagctcagaggtttgatcgctgagaagaactgtgcacccatcatggtccgactcgcatggcactctgctggaactttcgattgtcaatcaaggactggaggtccattcggaacaatgaggtttgacgctgagcaagctcatggagccaacagtggtatccacattgctcttaggttgttggaccccatcagggagcaattccctaccatctcttttgctgatttccatcagcttgctggtgttgtggccgttgaagttactggtggccct

SEQ ID NO: 160773 - DNA, 223 bp, Arabidopsis thaliana columbia
ctcgtgtcttactcgcgccagctatttttattttttcagattgcattattcttccgggaaacaagagtcttagctaggaggacgaagaactacccaaccgtgagcgatgattacacgaaggctgttgagaagtgcaggaggaagcttcagaggcttgatcgttgagatgaactgtgcacccatcatggtcctactcgtatggtactttgttggatctttcgat

SEQ ID NO: 160774 - DNA, 445 bp, Arabidopsis thaliana columbia
cagaagatgaagttcatgctcaagactaaagttgtttctgtggattcctcctctgatggtgtgaagcttacagtggaaccggcagaaggaggagagcagtctattctggaagctgatgtggtacttgtctcagcgggaagaacaccgttcacttctggacttgatctggagaaaatcggagtggaaactgacaaagccgggaggattctggtgaatgatagattcttgagtaatgtcccaggcgtgtatgctattggagatgtgattccaggaccaatgcttgctcacaaagccgaagaagacggtgttgcttgtgtggagttcatagcaggcaaacacggtcatgttgattatgacaaggttcctggtgttgtttacactcatcctgaggttgcttcggttggtaaaaccgaagaacagctgaagaaagaaggtgtgagttacc

SEQ ID NO: 160775 - DNA, 280 bp, Arabidopsis thaliana columbia
  unsure (1)..(280): unsure at all n locations
aaaaaannaatgctaagactaaattttttttttttattcctccactcacctgggaatctgccttattaccagcgggggcgcgacagcaatctattctgtaacctcatgtggtacttctctcagcggtaagaacaccgttcacttctggacttgatctggataaaatcttttttgaaactgacaaagccggtaggattcatggtgaatgatatattcttgagtaatctcccatgcctctatcctattgtagtatttattccagtaccaattcttgctcaca

SEQ ID NO: 160776 - DNA, 436 bp, Arabidopsis thaliana columbia
gcagggactgttgtcttagcactgtggaagatcgctaagcatagagagaagaacagaaacacaaggctacttaatgagagaatggaagctttaagtagtaatgacgttggtgcaatccttgtgaatcaatacaagcttaaagagctaccactgttcgagttccaagtgttagcagtggcgaccaacaatttttctatcacaaacaagctcggacaaggaggatttggtgctgtttacaaggggaggttacaagaagggctcgatatcgctgtgaagaggctttcgcgaacatcgggacaaggagtcgaggagtttgtgaatgaagtggtcgtgatctcaaagctgcaacaccggaatctcgtgagattgcttggtttctgcattgaaagagaagagaggatgttggtctatgagttcatgccagagaattgtttag

SEQ ID NO: 160777 - DNA, 406 bp, Arabidopsis thaliana columbia
ggagacgtgatcgcaacccctacggtagctgttgtctccaaaaccactccgcatcaaccgggcgagcatgtcttcgggatgcggggattcatgaaatgcgaactcattcacggacggtgggcgatgctcgttactattgacgctctcttcgacgaatggcttaccggcgttacatggcaagacgctggcaaggtcgagcttgtagatagatcgacctacttggggcagccattacctttctcgatctcgacattgatatgcatcgaggtgctagtgatcggctacatagagttccagcgcaacgccgagcttgattcggagaagcgtttatacccctgaggcaagttctttgactccctaagtttaacggctgaccactagaagactgcttaacttcaggtagctg

SEQ ID NO: 160778 - DNA, 261 bp, Arabidopsis thaliana columbia
ggccgacccacgcgtacgatggctgcttcatcttcctctttttttttctgttttcacaccacacttcctactggccctctgagaaagacccttggcaccaaaacccaattttcagtttccacaaaatcatcagaatctaacttttttggctccacactcactcactcatcgtatatcttcccagtctctttctcttttctcaaaggcttaatctttgtcaacgttaacacggttcaggctgtaccagactttacactaaag

SEQ ID NO: 160779 - DNA, 438 bp, Arabidopsis thaliana columbia
aagaagaagaagattaaaattcactaaaaacccgagaaaagtggaagaagaaggaaggaagaagaagacaagagagcattctgattcatgtgactctggtttcgtttctttctgtgtctctgctgtgtcgttttctcggcatatttctgatctttcgttctcggttggtttttggtttctgggtattgattgattgattcaaaagtcttcaactttcctggaaactggatctgggtttatccgtttttactcgtctgagaagagaaaaaaggatgaatccttatgatgcgaaagacagaagatggattctctctatgttcttcttcgtcgttttgttctgcaacaacgtttcgacttcgtcttcttcatctgaagttatcacgattaagccaagacatttatccttgctaaagagtgctttacaacggtcaagtggag

SEQ ID NO: 160780 - DNA, 268 bp, Arabidopsis thaliana columbia
cgacccacgcggccgaagaagaagaagattaaaattcactaaaaaccttatttttttggaagaagaaggaaggaagaagaagacgggagagtcattctgatgcatgggactctggtttcgtttctttctgtgtctctgctgtgtcgttttctcggcatatttctgatctttcgttctcggttggtttttggtttctgggtatcgattgattgattcaaaattcttcaactttcctggaatccgtctcttgtttaccccttttttactt

SEQ ID NO: 160781 - DNA, 67 bp, Arabidopsis thaliana columbia
gcgaccaagacaaaaagaacaatgtgcagcgagagctactccataggcgagccagctaaggagcagg

SEQ ID NO: 160782 - DNA, 351 bp, Arabidopsis thaliana columbia
cgcgtccggttgtttttgttcttcttataatctttatattttcagtataacgaaagggaagtgtgtcaggaatctcagagggtgagaatcggaatgaggatcttacccgaacctcgaggttcggttccgtgtcttctccttcttgtgtcggttctcttatcagcgactctctcactcgctcgtgtcgtcgaagttgtcggttacgccgagagcaagatcaaaaccccccatgcattttcaggactttgagtgacgatcgactgtaaggtgaataaaggccattttgttacaaaaggttccggaaacattgacgacaaaggaaagtttggtcttaatattcctcatgacatt

SEQ ID NO: 160783 - DNA, 435 bp, Arabidopsis thaliana columbia
caaagaagaaaaactaaaaaagagaaccccaaagaatcgtatatttattatttcgccccgaagattctatttctgatcatttacacccctaaaaagagtagagctttcgtgaagccaccatgtgtggaggagctataatctccgatttcatacctccgccgaggtccctccgcgtcactaacgagtttatctggccggatctgaaaaacaaagtgaaagcttcaaagaagagatcgaataagcgatccgatttcttcgatcttgacgatgatttcgaagctgatttccaagggtttaaggatgactcggcttttgactgcgaagacgatgatgatgtcttcgtcaatgttaagcctttcgttttcaccgcaactactaagcccgtagctttcgctttcgtcttcactggttcagcatatgccaagaaaactggag

SEQ ID NO: 160784 - DNA, 336 bp, Arabidopsis thaliana columbia
gaaccgttccactttctggaccatgtatcaatttataaagtgatcgacacatttgcgaaagtgccatatgaagaggaaggggaaggcgaagctggtgagggtgaggccgaagctgacgaggctgcaccagcagaacgaggtggtggtgttgcacgtgaccaagacgtgtctccaatggaaatgtaaggcttgtgtgtgtaacgctggaactattttatttcgatgatagttggatttttactttgcaaaatggctgcgggcttagattatattcttgagatgatgaaaccatttttaacatataacactcaattggtgctcatcaagactttctcg

SEQ ID NO: 160785 - DNA, 452 bp, Arabidopsis thaliana columbia
aacagtaccgtttgagctaagctttgattactagtcgtcacacaagacgtccgaagaagaggtaatgaagaacgttgaaagtagtggtgaatgtgttgttaaggtgaaagaggaagaacataagaatgttctgatgctaagattaaactatgactcggtgatatccacttggggagaatggaggagaaagtactcatcagaagcaatacgttggtggatgtttaccatcaagtgggtttggagatggaggtagagaagctagagtttcgagatacagagagaagaggaggacaaggttgttttctaagaagatacggtacgaggtacgtaaattgaatgcagagaaaagaccacgaatgaaaggaagattcgtgaagagagcctcgctcgctgctgctgcttcaccattaggtgttaattactgaatagttaatatctattcatgttatatt

SEQ ID NO: 160786 - DNA, 288 bp, Arabidopsis thaliana columbia
cacaaccaaaaaaaagaaaacacaaaaacaaagattataatggcttcctcaaccatggctttgtcctcccctgccttcgccggaaaggctgtgaagcctgccgcatcagatgtcctcggaagcggccgtgtgaccatgaggaagactgttgccaagccaaagggtccatcaggcagcccatggtacggatctgaccgagtcaagtacttgggtccattctccggcgagcccccgagctaccttaccggtgagttccccggtgactacggatgggacaccgctggtcta

SEQ ID NO: 160787 - DNA, 324 bp, Arabidopsis thaliana columbia
caagttagtcaccaaaaaaaaaaaaaaaacacaaaaagtttcaatggccgcctccacaatggctctctcctcccctgccttcgccggaaaggctgtgaacctttcccccgcggcatctgaagtcctcggaagcggccgtgtgacaatgaggaagactgttgccaagccaaagggtccatcaggcagcccatggtacggatccgaccgagtcaagtacttgggtccattctctggcgagtcaccgagctaccttaccggagagttccccggagactacggatgggacaccgctggactttcagctgatcccgagacattcgcaag

SEQ ID NO: 160788 - DNA, 323 bp, Arabidopsis thaliana columbia
ggaaaaaagggccggcccacgcgtccgatcggacaaaagtaaacgacaatggcggatgtttttttgaaatctatgcacaaggaagaaggtgtgatggagaagatcgctgggaagatccacgatcacgactcttcgtcgtcgtctgattccgagcacgagaaaccagagtctccgtcagctttgaaggccaagatatatcgtttgtttggtagagagaagcctgttcataaggttctcggtggtggcttaccggctgatgtgttcttgtggagggacaaaaaactcttagcttctgtttttggtgtatcgactgccaaatgctt

SEQ ID NO: 160789 - DNA, 227 bp, Arabidopsis thaliana columbia
cccggccgaccacgcgtccggtcttttcgggttaattacttcttcttcttcttttttttactaaattctcttagggttgtggtcatacttaatggcttccggggcggacaaaaatcctcttctttcagatgagaaacccaaatcgactgaggagaattagagttctaagccggaatcagcttttgttatgttcaacctaattatttttgcctggctttaattttaat

SEQ ID NO: 160790 - DNA, 124 bp, Arabidopsis thaliana columbia
ctcgacgagaaaaccctactgcgaaaaaacttcgttttctctggcgagaagtaaatttttatctcggtgcttggtttcaccgtggggctatctctatctcctcgctgggttacggattggtatg

SEQ ID NO: 160791 - DNA, 406 bp, Arabidopsis thaliana columbia
tttaaaacgagagagagagaaagaaatggcgacatcgggaacgtacgtgacggaggttccgttgaaaggatcggcggagaaacactacaagagctggaagagcgagaaccatgtcttcgctgacgccattggccaccacatccaaaatgtcgttgttcacgaaggcgaacatgactctcacgggtctatcaggagttgggactacacatatgatggaaagaaggagatgttcaaagagaagagagagatagatgatgagaataaaacattgacgaaaagaggactggatggtcacgtgatggagcatctcaaagtatttgatatcatctacgaatttattcccaaatctgaggatagctgcgtctgcaaaatcactatgatatgggagaagcgcaacgatgacttt

SEQ ID NO: 160792 - DNA, 345 bp, Arabidopsis thaliana columbia
  unsure (1)..(345): unsure at all n locations
gaaaaaaagaccggcccacgcggncgcaaaacaagatgatgagaagggcataacgctttttttttcttgtgtctcttcccaaancgggtgggcgattaaaaaatcgttgggtgccaccnaaaaaggaggcttttcaagaaatctgcagcgccatgaaattattgagcacgtgttggctatcgaggacgtgttcaagcatagggtgacaaatgtggttttcatgggaatgggtgagccgatgttgaacctaaattcagtacttgatgctcatcgttgtttgaacaatgacattgaaattctacaacgaatgattacaatatcgactgggggtgtgtcaaacacaat

SEQ ID NO: 160793 - DNA, 206 bp, Arabidopsis thaliana columbia
gaacgactattggattacaaagataactttttattttttcactacgcgaaccaaaactggggggtgtttaattcaaagttgagcggtcgccaacttgcttgcacaaaaacatttcacaaaccctctagttgctgctccttctgcaatcagtgttgtctgaatggcgctttgctggaacggtcttaccttttcctttataaacctac

SEQ ID NO: 160794 - DNA, 406 bp, Arabidopsis thaliana columbia
gattcgtcaagatgggctttttcatacgttttgtggtactcctgcttatgttgctcctgaggttttagctaggaaaggttatgatgctgctaaagttgatatttggtcttgtggtgttatcttgtttgtgttgatggctggttatttgccgtttcatgatcggaatgttatggctatgtataagaagatttacagaggggagtttaggtgtcctaggtggttttctactgagcttaccaggttgttgtcgaagcttttggagacgaatccggagaaacggttcactttccctgagattatggagaattcttggtttaagaaagggtttaagcatattaagttttatgtggaggatgataagttgtgtaatggttgtgatgatgatgaaactggagctgactcggtg

SEQ ID NO: 160795 - DNA, 396 bp, Arabidopsis thaliana columbia
cgcattactcgatcataagacaaggacagtatgtgcatttggacgacttatgcaacgctgatatgtgtcttatacgaacaagcgggcgccaagggacgttatatttgttcctctcatgatgcaaccattcttactatctccaaatttctcaggccaaaataccccgaatataacgtaccttcaacgtttgaaggtgttgatgagaatctaaagagcattgaattcagttccaagaagctgacggacatggggtttaacttcaagtatagtctcgaggaaatgtttattgaatctattgagacatgtcgtcaaaagggttttctcccggtttcattatcgtaccaatccatatcggagatcaagacttagaatgaaaacattgacgtaaaaaccgga

SEQ ID NO: 160796 - DNA, 246 bp, Arabidopsis thaliana columbia
  unsure (1)..(246): unsure at all n locations
aacgaaanacnaggagggggggcagaagaagaaagcagcgggcgggccacacangaagaaanngnaccacgacancagagaaagaggcgagaagaacnncnngaacgcnccccggaaagaanaacncagggcngccaccggcgacaaccgcagccaagccgggnaccaaggcnggaccaaccnaangcgcagggggcgagaagaacagcaaaaggaagggaaacaanacaagncagagaagaaaaa

SEQ ID NO: 160797 - DNA, 482 bp, Arabidopsis thaliana columbia
  unsure (1)..(482): unsure at all n locations
acccacgcccgtccgcnncaaaaaaaaaggaaaacaccaaaaacaaatgatttttaatgtgcttcctcaaccccatggctgttgggcgtcccctgtccttacgcgcgggaaaggcnttngtgaagccctgccccgcatctagattgtcacttcggaacgccggccccgttgtgaccctactgaggaaagacctgtgcgcgcaagctccaaaggggtccctatcaggcgagctccatgggtaccttggatctgactntngagtcaagtacccttgggtcccaaattctccggcgaggcccccgatgctactcttacacggtgatgttctcccggtgactaccggatgggacacacgctggtctatccgccgacccagagaccttcgccaggaaccgtgagctagaagttatccacagcagatgggccatgctcggagccctaagctgcggtttccctgagctattggctaggaacggagtgaa

SEQ ID NO: 160798 - DNA, 422 bp, Arabidopsis thaliana columbia
cttttgatcccaaattcaacagatatctctgaatctatcgcttccaagggttttctctagcttaatctcagattcgaatcggtccatagtgatactatgccgaagaacaagggaaagcggaggaaaaatgccggctggacatggagttcgagcgagaacgagggatctgttcgcgaggcctttcaggaagaagggttacattcctctatcgacttacctgaggaccttcaaggtcggcgattacgtcgatgtgaaggtgaatggtgcgatccacaagggtatgcctcacaagttctaccatggtcgtactggtcgtatctggaacgtcaccaagcgcgccgtcggtgttgaagtcaacaaacagattgtgaacaggatcataaggaagaggattcatgttcgtgtggagcatgtgcagcagt

SEQ ID NO: 160799 - DNA, 183 bp, Arabidopsis thaliana columbia
cgagtgacgatcgactgtaaggtgaataatgtccattttgttacaaaaggttcgggaaacattgacgacaaaggaaagtttggtcttaatattcctcatgacattgtctccgacaacggagcgttaaaggaggagtgttactctcagcttcacagcgcggctggaacacctttgtctggctta

SEQ ID NO: 160800 - DNA, 387 bp, Arabidopsis thaliana columbia
cctcaagaaaatcaaagcagcagttatggcctacgtttcaacaaagcaccccatggaagatgaggtgaagaagacggaggcgtctagtttggtggggaagctagagacagacgtggagatcaaggcttcggctgataagtttcaccacatgttcgctgggaaaccacaccatgtctccaaagcaagttcaggcaacattcagggatgtgatctgcacgaaggcgactggggcacagtcggctctatcgtcttctggaattacgtacatgatggggaggcaaatgtggcaaaagagagggttcgtggtggtggagccatattagaacttgatcacgtttagtgttatagaatgtgatctgatttaagtgtacatgattctttttgttt

SEQ ID NO: 160801 - DNA, 246 bp, Arabidopsis thaliana columbia
  unsure (1)..(246): unsure at all n locations
ccgggccgaccacgcgtncgagagaaggaagaagaagaagaagaagttttttttactatggagaacgagagggaaaggcgggtgtacttggctaagctggcggagcaaaccgaaagatacgatgaaatggtggaggcgatgaagaaagttgctcagcttgatgtggagctaactgtggaagagaggaatcttgtatctgtagggtacaagaatgtgattggcgcaaggagagcattatggagaata

SEQ ID NO: 160802 - DNA, 245 bp, Arabidopsis thaliana columbia
gctgaatccaagttctctgctcttggtgccttttctttcgacaccgtggagatagtgatggcgttggaggaaaagtttaacataggggtggaggaatctgatgctcaaaacattattatcatttaagaggctgttaattttatttgattatttttttaaaaaaaattcttttttttatatttattcatttattacttttttttatttattttttattttttaaattttctattattgtctttatt

SEQ ID NO: 160803 - DNA, 290 bp, Arabidopsis thaliana columbia
ccgacccacgcgaccgcttactttgacctgctctagactcatctccctgttttcagacacagcatatatacacaagtatcgcaagaacaagaagaagaataggagaagtcatgtcttgctctttgaggagtggactcgtgatagtgttctgtttcattcttctgcttttgtcttccaatgttggatgtgcctctgccgctcgtcgtttaaggtcacataagcatcatcatcacaaggttgcttctttggacgtcttcaatggtggagaaaggaggcggtcgttgggtgga

SEQ ID NO: 160804 - DNA, 419 bp, Arabidopsis thaliana columbia
ggagaaggagaagaaagagaggaaggagaatgctattaaggagaaagagcttgggaatgctgcgtataaaaagaaggactttgaaactgctattcagcattattctactgctattgagattgatgatgaagacatctcgtacctcacaaatcgtgctgctgtttatcttgagatgggaaagtacaatgagtgcattgaggattgtaacaaggctgtggaaaggggtagagagcttaggtcagattacaagatggtagctagagctttgactagaaaagggactgctttgactaagatggccaaatgctcgaaagactatgaacctgccattgaagctttccagaaggctcttacagagcaccgtaacccttgtacgttgaagagacttaacgatgcgggaagagcaaagaaagagtggg

SEQ ID NO: 160805 - DNA, 209 bp, Arabidopsis thaliana columbia
aatctctctctcactcactcgtttcaacaatttttttttaaactcagcttccttgcgacggagacggtgtatgtatgcggtgccaggtgaatcctccgtcagaagagactctcacgtgtggcacctgtgtcactccatggcacgtgtcgtgtctcctttctgaatcactcgcttcttccactggagactgggagtgtcccgattgctcc

SEQ ID NO: 160806 - DNA, 130 bp, Arabidopsis thaliana columbia
ctcttggggcttactttgctccgttttctattacaactccgttgactcctgccaagcagcggacggcatttggtagtgatgacggaactgtatgggatgatggtgcttacgttggggttaagaatgtgta

SEQ ID NO: 160807 - DNA, 281 bp, Arabidopsis thaliana columbia
  unsure (1)..(281): unsure at all n locations
ggaaaaaccgggccggcccacgcgtccggacaaggagatcctgaagatcgngatatattttttcgatnacagaccaacaatgatgacggtcaacttgtacttgaagggggggggaaatggaaggtttcagaaaacggcagcgtatggacatttcggaagagacgaccctgacttcacctgggaggtcgtgaagccactcaagtgggacaaacctcaagcttaaacttgattttatgtttcttctgtctttttactttaaacatttaccctggaccaataat

SEQ ID NO: 160808 - DNA, 287 bp, Arabidopsis thaliana columbia
gattcttgccgtctgagtttggggtgtttgtttataggacgagtgcagatgaaccggctgagatcttttttgcagggggggtgcagatcaagagaaccatcgaagcggaaggaataccatacacttacgctgttaccggttgctttggtggttactacttgccaacattggttcagttcaagcctggtctcactttttctactatagacaaagttaccattcttggcgatggaaatgccaaagcctggatcaacaatatagaattcattgatgattacacaatcaat

SEQ ID NO: 160809 - DNA, 403 bp, Arabidopsis thaliana columbia
gccggaaccctaactctcgctgacatttgcttagagaaaggacttgttctgatcaattacgctacgggttgtatatttgagtatgattcgggtcatcctctcgggtcgggtattggattcaaggaggaggatactcctaatttcaccggatctttctactctaaaaccaaagctatggtggaggagctgctcaagaactatgaaaatgtatgcacgctaagagtgcgaatgccgatttcatcggatctaacaaacccgagaaacttcattacgaagattgctcggtatgagaaagttgtggacatcccaaactcgatgacaattctcggtgagctttttccgatatcaatcgaaatggggaagaggaacttaaccgggatcttacaattttactaacccgggt

SEQ ID NO: 160810 - DNA, 437 bp, Arabidopsis thaliana columbia
aaataaaaaaaacatcgcacaagaaaataaatgatttgtagaatcaactaagaaaatggctagcactatgatgactacattgcctcagttcaatggtcttcgagccaccaaaatctctgcagctcctgtacaaggcctggcaagtgttcagcccatgagacgcaagggaaatggagctttgggtgcaaagtgtgacttcatcggttcatcaacaaatctgataatggtaacgtcgacgaccctgatgttgttcgcggggagattcggacttgcgccatcagccaataggaaggcgacagctggacttaggttggaggcacgtgactcaggtctacaaacgggtgacccggccgggttcacgcttgcggacactttggcttgtggcaccgttggtcatatcatcggtgtaggagttgtccttggccttaaaaacattg

SEQ ID NO: 160811 - DNA, 264 bp, Arabidopsis thaliana columbia
  unsure (1)..(264): unsure at all n locations
cgtccgaaaactataccaaatccattttcaactccattatctatctacatcaaaaacaaaccancggccacactctttactatcttggctcagtcnaaccccacactactacttcacatttcaccgctgcgtcacaacaatcatataaccataactgcttccacacgcttcaactcagaaagatttcgattacaactcctcttaatatgggtcttcacacttccaaaatcgctgacccaaacgaccctcaagattcaaacaatg

SEQ ID NO: 160812 - DNA, 265 bp, Arabidopsis thaliana columbia
gctccatcatcaaatcttatcaatggtttttttactcgtctcatcttttcaacccaggtcagcatttttgggagatggaagggtgttcaaggtctcaagcacaccttttgctcaagtgggttactccagtaagaccattgagtgcaaagaatcaaggataggaaagcaaccgatcgctgtaccttccaatgtaaccattgcattggaaggtcaagacttgaaagtgaagggtccattaggagagctgtctttaacttacccactc

SEQ ID NO: 160813 - DNA, 349 bp, Arabidopsis thaliana columbia
caaacaaaaaatcaattgaagagtctttcattttttaggggaagcaaatagagaaatggctggctttactgcctccggttccgccgtctccaccgctcgtccggctctccttctcaagcctaccgtcgccatctctgctcctgttcttggtttgcctccaatgggtaagaagaagggaggagtgagatgttcaatggagacaaagcaaggaaacgtctcattcatgggggctggagttttagctgcagcaacagctgctttgacggcggtgatgagcaatccccccatggctttgtgtgatgggggggtgccaacacaaggaacaggaataccctttggtctaatgcaa

SEQ ID NO: 160814 - DNA, 286 bp, Arabidopsis thaliana columbia
cacaagtgaaggttcaagatacaacctcacatttaccttaggcgatgctaacgatgcgtgcggaggacatttcgtggtgggtgctcaagctggctccgtaactcaaaacttcacattggagagtaatgggactggctctggtgagaagtttgggttagtgtttgaagcagacaaagatgcagcacagataagtttcaccagctactcagttacaatgacaaaagagaatgttgtttgtggtcctgtgattgatgaagtgatggtacatcctcttggtggaacagcc

SEQ ID NO: 160815 - DNA, 281 bp, Arabidopsis thaliana columbia
cacattgaactactttggcaagaacatccctatcattcttgttctcgccgaagttgctgaggttggtctccttggtggagccgagggctacagaatcaccaacggattggatttcgaggacaagctacacccaggaggtccatttgatcctctaggccttgctaaggaccctgtgcatggagctcttttcaaaataaagtgatcaataacgggtgatatatccttgtttgctatgctcgtttatttttatttatcccatgttacccgacattttccttttt

SEQ ID NO: 160816 - DNA, 215 bp, Arabidopsis thaliana columbia
cccacgcgtccggctgtagccatcaacgctggctatattcagttttacattggaggagtctcatgcccttacatatgcaccaggaggctgaaccgcggtgtcttattggttggctatggagcggcaggttacgctccggctaggttcaaggagaagccttactggatcatcaagaactcgaggtgagagacttggggtgaaaatggtttttacaa

SEQ ID NO: 160817 - DNA, 412 bp, Arabidopsis thaliana columbia
gagagaaagagagaaagagagacagagataatggcgtacagtgcgtgtttcctacaccagagcgcattggcttcatcagccgcacgatcatcatcttcctcctcatcccagcgtcacgtgtcgctctccaaacctgttcagatcatctgtaaagctcaacagtctcatgaagacgataactccgccgtctcccgccgtcttgctctcactctcctcgtcggcgccgctgctgttggttccaaagtatctcctgctgatgccgcctacggtgaagctgcaaacgtgtttgggaagccaaagacgaacacagacttcttgccatacaatggagatgggttcaaagtgcaggttccagcaaaatggaacccaagcaaagagattgagtatccaggacaagtccttaggttcggag

SEQ ID NO: 160818 - DNA, 303 bp, Arabidopsis thaliana columbia
  unsure (1)..(303): unsure at all n locations
aaaaaccggcccgacccacgcgaccgaaaanctgagatgangaatacagagatatgttctcatctccaacactcgaaaatgcgcgggctctcttccaatatctgggggttccctacaacctcttcatcctctcaccacacatacttctctcttcctctaccctcattaccaccgccgatgacctagacgacctttctttcttccaccgcgccgacgtctcttactacaccaacaacaaccgccgtttcatttccctctctccaaatccacccccaaaagaacgctttacacttactaacaaac

SEQ ID NO: 160819 - DNA, 448 bp, Arabidopsis thaliana columbia
  unsure (1)..(448): unsure at all n locations
cggaatcccggggtgggccacaggcttccgaaaccaacaccaaaaggttaaggaaccttttattaataataataataataatgatcccacaagcttaaacttttcaatgggacgggcataataatataaacattccaccacctttgatcgattaaaaaagattttggcgggcgagcaaattttgaagatggcgttgaaggaaaaggtttccgttggggaagttaaaagagaagccaagaggcaccgggggttaggggaaaacaggtttgcaattgccaaaaggattaggcaaaaggcccaggttgaactcgggggagctaagtttttaagggaccattctatgaagaaattaatttaaccgttcatgcaggtcatttgntaaacatgtaaaggccagtttaaggcatttgcggttccggcggttacggctgttgggacgcttttttgt

SEQ ID NO: 160820 - DNA, 468 bp, Arabidopsis thaliana columbia
  unsure (1)..(468): unsure at all n locations
acgggnggaaattcccgggccgcccacacccttccgaaattttcgnngnttccattggcttaaattgtttcgtggtccccagaaccctcgcccgtcagtgtttaaaaggtttgggcgtgggcactaaataaatggccaattaaggaagtcgattccatgattgaaattggaggaaatccgtctgctaattaaattaatgaagtttttttccctgccacttcctttaagcctggccctgttgttaatcatgcccagcttttggaattcattaggccaaattttgacctgcaggagtttttgaaaccaaccttgcggtttccatccggaaaaggctcaccaaagagttcagttttttttccataaagtttttttagaaagaccatggttggttttcgaccaaattaatcatcgcagccaatttttcaggaaggattggtagagtttattggattgttgaaggtgactttt

SEQ ID NO: 160821 - DNA, 202 bp, Arabidopsis thaliana columbia
  unsure (1)..(202): unsure at all n locations
ttcacacaaaggattcggaaanggncggcaattggatgtggttccagagtcggttttaaagaagaggaaaagagaggaggattggcctttgaaaaaaaaccaaaatgttgaagccgccaagaagaagaacgccgggaccaggaggctaatcttaaaaggagccgggcattcctccagggaatttgccaggaaggagaagggg

SEQ ID NO: 160822 - DNA, 259 bp, Arabidopsis thaliana columbia
  unsure (1)..(259): unsure at all n locations
aaanccaggnaataattttaaggaccttgttggaaggccatcctatgtggccccataagttttaaaggggggctttgaaccaaaggctgatatctgaagtgctggtgtgatcttatccatccttttaaggggggttccgcctttttggggagaaaattaaacggggattttngatcccatctttaaagggcaatttgttttttaagtttttccangnccagcattatcaaatgttgccaaagttctttggaggaaaatt

SEQ ID NO: 160823 - DNA, 230 bp, Arabidopsis thaliana columbia
  unsure (1)..(230): unsure at all n locations
agaggatccgattgcacnaagccnggatggttattttgaagaataagtttaagggcttaagggctttggccacaaaggatcagttgggggctgaccaaaagagggtggtttgggttaaaggggcccctaaagaggatgcagtggttccaaaggtgttagccttggaggaggagctgtgtttcgtgaaggagaagctnaagaactttgggaaagggcctttatttttgaaa

SEQ ID NO: 160824 - DNA, 404 bp, Arabidopsis thaliana columbia
  unsure (1)..(404): unsure at all n locations
acccttccaccgtttgatccaccngntgttttcccggtgttttttttttttttgaaaaacactctcnngcctgtccttttcaaatggcagggtgtccggaaaaatcccaccgccaattgaaaatttaccggaccttcgaaatttgaaaatttccaataccgatttaaccgaaaagattccttctaaaatttcaaacctaactaatctttgccagttaaagttttccaccacctcctggcccggaaaccttcctaccgattccgaaacctttaaaaatctatcttacttgaccccttaaccaaatcttttccaaggcgattaatcgaaccttagttctttacctaatttcgtttaactccaaatttccaaaaacaatttctccgttaaaattcccttgaagtttt

SEQ ID NO: 160825 - DNA, 283 bp, Arabidopsis thaliana columbia
  unsure (1)..(283): unsure at all n locations
ttacactacatttgttaatnttttccgttttttacttccatggatctaagccaatgttccttgattttttttttggattggtcgagtctcaattaatttttgacctaaaatcgtttccgacgccgttgaactgggtccgcttggatttgggttaaggagaaagcttttagggttttggtttgggtggttgngtagaattggttggatctgaaacggaaataaaattgggctttnnnagaccgatcctaggattttgtggtttgggggttgggtttaaattggt

SEQ ID NO: 160826 - DNA, 210 bp, Arabidopsis thaliana columbia
  unsure (1)..(210): unsure at all n locations
ggcgtccaaccaccaaatttaaancnnnnaacttgggctctttttattaaacctaaatggccgcctaagcgaaggcttttttcttaccttgcgtgggccggaaaggccnccaagctttcccccgcggcatttgaagtccttggaagctgccgtttgccaatgaggaaaactgttgccaagccaaagggcccataaagcagcccatggtcc

SEQ ID NO: 160827 - DNA, 319 bp, Arabidopsis thaliana columbia
  unsure (1)..(319): unsure at all n locations
gggccgaccaggcgtccaacctgttaaacaaagnccnttnnaccaaccttttttatctaacatgggcaataacccaaccggcggcttgttttataatgtgggcgggggtttacattgcccaaataaaccctctaatggcccctattttaagcaagggggagtgaaacccattttactaaaactgggaaaccattgcacaattttgagtaagagccccgttgttttttctgattttatttaaaacatatttgttttcccctttgtaattttatatttgggttggaacaacgaaactttccccttttttactaaaacatat

SEQ ID NO: 160828 - DNA, 314 bp, Arabidopsis thaliana columbia
  unsure (1)..(314): unsure at all n locations
gaagcaattnnnnntnngcgaaaaccttaatggtgcccatttgaaaaggttaaaggccaggcgcaaaagggggatggccttttgaagatcaaaaccaagggtggccgatttcggttggtccagcaaaaagtttagagggctgcatacacttccaccgaatgccctccgagttaatcggcgaaaaaatggatgnngggaacctttttgatgccgctaatttcttaatcttattnncaaggggttaatggaggtttgccattttgggggccagttcctggaaaaaaatgtcttgagtggtttatttccggtgggtg

SEQ ID NO: 160829 - DNA, 339 bp, Arabidopsis thaliana columbia
cgggcgggccacccttccttctttttcaaaccaacttaaaccattaattatataaaccaatatgcttgaagtaaggaaggtgccttccataacctgggttggcataattaaacccgtcccaataacagcaaaccccctaataagttggggcaccgcaaacggcaacctgccaggtgccattgcttactttccccgaggtcctcaactaacccaagggtcctgcaccgcctttcctaaccttaaaaccatgcccattccaaccccaaaccgttagcaagcttgcctttgccttaaatctgcccttaaaccctttgttcccggcctaaacacttcccttcc

SEQ ID NO: 160830 - DNA, 335 bp, Arabidopsis thaliana columbia
  unsure (1)..(335): unsure at all n locations
tttttattcctgaaattttttttaggggggaggtttaataaccaaatgggccgcatccccataacttttcttttaaccaaccacattttcaattgaattttcccacaaaacccctaactccatttaattccatggcttttttcccctccttctagtgggttcctcctcctccctaccaaaactataaaccaccggtttaaaatcctcctcctttttcttaagacctaacctaaccccttccatctcaataagttttaaaacaattttttcctttttcctgggccgtttcttttttttaaacttccaaaaataaaactnagcaaaccatgttttta

SEQ ID NO: 160831 - DNA, 338 bp, Arabidopsis thaliana columbia
  unsure (1)..(338): unsure at all n locations
tccaattcgaaaaaaaatcctttgtttgcattttaaaaaccgaaggggccgcaaaaaaataaaatttttaacccgaaatcactttttggtatttcaacttaatcagttatccctgccttgaatttaaatcctttttttttttttaatatggttagaatcccaaacgttcctagcataaaaaaaattgcttgcccaattcttaaaaatcctccttttaaccaattgccttacctccttcaaagttttattcctaacctttcccaggaaggtgttttctcttaactttattccttaacagatttttatttcattncaacattttttctttaacccctaat

SEQ ID NO: 160832 - DNA, 463 bp, Arabidopsis thaliana columbia; identical to SEQ ID NO: 131490

SEQ ID NO: 160833 - DNA, 322 bp, Arabidopsis thaliana columbia
caaatatcggcgtattgattaggtaccattgtatcatgataatcataatcatgatgccacaaacttaaacctctccagtgcgccatactcattatatgaacattacaacaactttgatcgtataaaagagattatggcgagccagcaaattatgaagatagcgatgaaggagaaagcttaccctgcggtaagtcaaagagcagccaagaggcaacccgagatagtcggaaacgtgttggcaaatgccgaacaggttaggcttatagcacaagctgtactcgagagagctcagtttttgatggaacaatatatgaagtagatt

SEQ ID NO: 160834 - DNA, 417 bp, Arabidopsis thaliana columbia
ctccacagaggattcggaaatggttgagtcaaaggttgtagttccagagtcggtgttgaagaagaggaagagagaggaggaatgggctttggagaagaagcagaatgttgaagccgccaagaagaagaacgccgagaacaggaagcttatcttcaaaagagccgagcaatactccaaggaatatgccgagaaggagaaggagttgatctcgttgaaacgcgaggccaagcttaagggaggtttctatgttgaccctgaagctaagctcttgttcatcatccgtatccgtggtatcaatgccattgaccctaagactaagaagattctccagctcttgcgtttgagacagattttcaatggtgttttccttaaagtcaacaaggcttccatgaacatgcttcgccgggttgagcccta

SEQ ID NO: 160835 - DNA, 301 bp, Arabidopsis thaliana columbia
gtcagcagagtgcatctccaatggcgagccagctaatgagcagcttctcctccgcttctctttctcagcgtctcgccgtcccgaagggcatctccggtgctcctttcggtgtttctccgaccaaaagagtctcttccttcactgtccgagctgttaaatacgacaagacaacattccaagttgttcaaccaatcaacggtgatccattcatcggaagcttggaaactcccgtgacatcaagcccattgatcgcgtggtaccttttcaaccttcctggataccgtaccggcgtcaaccctct

SEQ ID NO: 160836 - DNA, 209 bp, Arabidopsis thaliana columbia
gtcagcagagtgcatctgcaatggcgagccagttatttgagcagctcagactccgcgtctctgtctcagcgtatcgcacgcccgagagggcatcttcagtgctcctttcggtgtttcttccaccaaaaaagactcctcctacactgtgcgagtctgtaaagacgtcaagacaacatcccaagttgtgccaccaagcaacggtagtccat

SEQ ID NO: 160837 - DNA, 435 bp, Arabidopsis thaliana columbia
cacatctcctattgcaaacgaacataaaacactacctaagagatcaatatggctggagtgatgaagttggcatgcttgctcttggcctgcatgattgtggccggtccaatcacatcgaacgctgcgctaagctgtggctcagttaacagcaacttggcagcgtgcattggctacgtgctccaaggtggtgtcattcccccagcgtgttgctccggcgttaaaaacctcaacagcatagccaagacgaccccagaccgtcagcaagcttgcaattgcattcaaggtgccgctagagccttaggctctggtctcaacgctggccgtgcagctggaattcctaaggcatgtggagtcaatatttcttacaaaatcagcaccagcaccaactgcaaaaccgtgaggtgatgagctagcaacggtgagatgatgctacta

SEQ ID NO: 160838 - DNA, 318 bp, Arabidopsis thaliana columbia
cacatctactattgcaaacgaacatttatcattactctaagagatcaatatggctggagtgatgaagttggcatgcttgctcttggcctgcatgattgtggccggtccaatcacatcgaacgctgcgctaagctgtggctcagttaacagcaacttggcagcgtgcattggctacgtgcttcaaggtggtgtcattcccccagcgtgttgctccggcgttaaaaacctcaacagcatagtcaagactaccccagacctgttgcaagcttgcaattgcattcaaggtgccgttagagccttacgcttttggcttaactt

SEQ ID NO: 160839 - DNA, 294 bp, Arabidopsis thaliana columbia
agaagatgcgaatgcacgaagacgagattgttaaatcgaagaatcagcttcagagcttcatgtcttttgacacagaggatcatcttggtgctgaacaaaagagtgttgatttggtttaagaggttccatattgttttttagtttttcacttagttctttttttctttttttatcttttctcttatttttcttcattattctctttctttctttttttttttttttttttttatattaattctttcatattttattttttattattttttcttactttccttttcttcttccttc

SEQ ID NO: 160840 - DNA, 235 bp, Arabidopsis thaliana columbia
ctcacgacatctgtttatcttctccgtgaatcacgtccatggatctcagtcaatgttgctgaatctctcttttcgatgagggcaatcttcactaatctctgacctcagatcgcttccgacgccgctgaactgtgtccgtcttgatctgtgtttaggagaaagcttctagggtttttgttttggtcgctgatgtgaatttgttggatctgaaacggaaattaaaatgggctttttt

SEQ ID NO: 160841 - DNA, 172 bp, Arabidopsis thaliana columbia
ctcacgacatctgaacaacacctcctagatacacttccacggaactcagacaacggcgcgggaatttctattgacgcagaggcgcaatccccactaagctctgacctcagatcgctcccgacgccgctgaactgagaccgtctcgatctgagcttaggagaaagcttctagg

SEQ ID NO: 160842 - DNA, 394 bp, Arabidopsis thaliana columbia
gatttctggcattttagcagatatgagaaagatatttccatttgagcttttccacttgggtggtgatgaagttaatacagattgctggaaaaacacaactcatgttaaagaatggcttcagggtcgcaacttcacgactaaggacgcatataaatactttgtactccgagcgcaacagatagctatatcgaaaaattggacacctgtcaactgggaagaaaccttcagttcctttggaaaagatcttgatccgcggactgtgattcaaaactggctagtgtctgatatatgtcaaaaagcagtagcaaaaggattcaggtgcattttcagtaaccaaggatattggtacctcgaccatttagatgttccgtgggaagaggtttataacaccgag

SEQ ID NO: 160843 - DNA, 92 bp, Arabidopsis thaliana columbia
ccgccgttggaatgcgacggctgatttcccgggggaggttgtttctttgaaaaacctttgggggcttaactggtcaaatgcaagattcgccg

SEQ ID NO: 160844 - DNA, 337 bp, Arabidopsis thaliana columbia
  unsure (1)..(337): unsure at all n locations
ctcacgacatctgtttatcttctccgattttcacgtccatggatctcagtcaatgttccttaatctctcttttcgattagtccaatctccactaatctctgacctcagatcgcttccgacgccgctgaactgtgtccgtcttgatctgtgtttaggagaaagcttctagggtttttgttttggttgctgagtagaatttgttggatctgaaacggaaatcaaaatgggctttttcagtacgatactaggattttggggatttggagttgggatttcattgggacttgttattggttacgttctnttcgtctacttgctccccaacgacgtaaaggat

SEQ ID NO: 160845 - DNA, 259 bp, Arabidopsis thaliana columbia
gtcacgacatctgtttatcttctccgtttctacgttcatggatctcagtcaatgttccttaatctctcttttcgattaggccaatctccactaatctctgacctcagatcgcttccgacgccgctgaactgtgtccgtcttgatctgtgtttaggagaaagcttctagggtttttgttttggttgctgagtagaatttgttggatctgaaacggaaatcaaaatgggctttttcagtacgatactaggattttgtggat

SEQ ID NO: 160846 - DNA, 442 bp, Arabidopsis thaliana columbia
caacaacaaatcttaaacgttttactttgtgctgcactactcaacctcaatggccgcctcaacaatggctctctcctcccctgccttcgccggtaaggccgtcaagctttcccccgcggcatctgaagtccttggaagcggccgtgtgacaatgaggaagactgttgccaagccaaagggcccatcaggcagcccatggtacggatctgaccgtgtcaagtacttgggtccattctctggcgaatcaccgagctaccttaccggagagttccccggagactacggatgggacaccgccggactttcagctgaccccgagacattcgcaaggaaccgtgaactagaagttatccacagcaggtgggccatgctcggagccctaggctgcgtcttccctgagcttttggctagaaacggagtcaagttcggagaggcgggttgg

SEQ ID NO: 160847 - DNA, 317 bp, Arabidopsis thaliana columbia
gtggaagcttcattgtcggatgcactgtctccgtcaaggttgaaggaagtgaagaatgcaagaggagtaccctggcgccttcattaggatcatcggattcgcaacacccgcaagtccaatgcatagtttcattgcctacaagcccccaagcttaccgaagctaatccctcttctggaatattcagcgttgattattctggaacccattttatgtggtcaatgcaaattaagaaattatttgccgacttacagttgaggaactattgttgaaagtgaaaatgttttcctatagttctcttatttatagtatatttctt

SEQ ID NO: 160848 - DNA, 454 bp, Arabidopsis thaliana columbia
  unsure (1)..(454): unsure at all n locations
ccattggacgttttcaagtttgccattcgatacatcttgagcggaaaggcgtggctcaacttgtttgagaacaagacggctttcacgatgaagaaagattacggaaaagaagagagagaggctcaatgggcacttgctcaaaggacacttcacggtttacagccaaaagaagctgttaacatcttccctgagaaaggaagttacagagaattgtctgagatcgctgagcaagctaagagaagagctgagatcgctaggcttagggagctgcacacactcaagggacatgtggaatcagtcgtgaagctaaagggcttggacattgaaactcccagtcactacactgtgtagtaaaaccaaacatatgactgatcttcgatcctctcatgntttgtcttcttcttcttctttttttcttcaccacctcttatgattattattcacatagggagag

SEQ ID NO: 160849 - DNA, 374 bp, Arabidopsis thaliana columbia
atctgcttcaacaaaggcccctccaccaatctgttacatcttacattggtcatcaccgcaactgtctgctgttggatgatgtgggcaattgtatacattgcgcagatgaaccctctcattgtccctatcttaagcgaggtggagtagaaaccattctactcaaactaggaaaccaatgcacaaatttgagtaagagccccgctgctctttctgtatcttcttcaaacatatttgttttcccctttgtaattcttatcgtggtgtggaacaacgaaactatccccctctttactcaaacatattctgtctctcattcaattcttgaacagttttcatatactcaaagactctaccagagagtgagtgtattgttg

SEQ ID NO: 160850 - DNA, 345 bp, Arabidopsis thaliana columbia
aagattagcgaaaacctttaaggtgaccatctgaaaatgtttagagacattacaaaagggggatggacttttcaagatcgagaacaagggttgccgatttcggatggtacagcagaaagtatagagtgctgcatacactttcaccgcatgccctccgagttcatcggcgaaaaaatggatgtagagaagctctatgatgccgtcaattttctaatctatttgcagagtgataatggaggtatgccagtttgggagccagcttctggaaaaaaatggctagagtggcttagtccggtggagcatgtggagaacacagttgtggagcaagagttccttgagtgtacg

SEQ ID NO: 160851 - DNA, 102 bp, Arabidopsis thaliana columbia
aaaaccccgaaatcgcctaagaaggctcctttcgtgaaacccacttgtcctaccgacacggggaagtttggagtttgcgcgggcttattaaacctagttaac

SEQ ID NO: 160852 - DNA, 232 bp, Arabidopsis thaliana columbia
cggacgcgtgggttcatagccgtcgttttctccgtgatttctccgctgctggcgccacgtgtgacaaaccggcaacgttcacgtgttgtcgtggccgaatttagggtgaagctacgagggagaacggtggttggtgcttcgcagatttggaaattaccgggtggtaagccaaaagcgccggagccaccatcaccgtggatgtaaccggtggagcatgacgttatgctacgta

SEQ ID NO: 160853 - DNA, 323 bp, Arabidopsis thaliana columbia
cacactctctctttgttcgagtaccaacaatggcccttcaagctgcttctttggtctcctctgctttctctgttcgcaaagatgcgaagttgaatgcttcttcatcatctttcaaggactcgagtctttttggtgcctccattaccgaccaaatcaaatccgaacatggatcttcctcgttaagattcaagagagaacagagcttaaggaatctagcaattcgagcccaaaccgctgcgacttcaagccctacagttacaaaatccgtggacggcaagaaaacgttgaggaaaggaaatgtggtggtcactggagcctcgtct

SEQ ID NO: 160854 - DNA, 248 bp, Arabidopsis thaliana columbia
acccacgcgtccgctcaaaatatggatagtcacaaatggtgtctatgtttcacattacttgctttcctcttcatcactttctcttccgctgagctcatcattaaacaggtcacacagggcagaggaatagagtacaacaactcttacagtctcacgtcgaatcttggagtgacgacaagtagagttgtgagacgagcgatccatcaagtaagatagtgacaatcacacgtttctctgctgttaaggtc

SEQ ID NO: 160855 - DNA, 301 bp, Arabidopsis thaliana columbia
gtctttgacaattgtccatcatcaatggctttaaatggcaaaaccgtaatttcgaactccaccaaggggcaaacttaaaagtcgatgtctttcttcttcacctcggacccatcggagagaagatactactagaagagattcattcacagtgttgaaattaaaaaaccgaaactttctcgtttcttcttcttcttcttcaattttcaaaattcgaaaagatgttgaagctttctcgtaatgtgttttgttttatgttacagtgtttctttctctattatttctcatttattttctcttctta

SEQ ID NO: 160856 - DNA, 265 bp, Arabidopsis thaliana columbia
ccacgcgtccgctcagatgtattttcagaaacggaaccgagttaattcaggctggtccaggaatgctaaccgcaggtatcgcgcatcggctggagcggtatggatcaagctagtggtgaacttcagaagaaccatacatctgagatccagtcacagagctctcttgagatatcatcttctaccaaagagaagttgagtcgaccgcaatctagccataaagaagaaggagatacatcggctttgacagatttttggtctgattttg

SEQ ID NO: 160857 - DNA, 294 bp, Arabidopsis thaliana columbia
aacaaaaaaaaaaatctctctcaatctttttcttatctgaatccatccatcaccgatctcgaatggcggcaccaccagcatcatcctcggcgagggaagagttcgtgtacctcgcaaagctcgcagagcaagcggaacgttacgaagaaatggttgaattcatggaaaaagtcgctgaagccgttgacaaagacgaactcaccgtcgaagaacgtaatctcctctccgtcgcttacaaaaacgtaatcggcgctcgtcgtgcttcctggagaatcattttttccattgaacaaa

SEQ ID NO: 160858 - DNA, 95 bp, Arabidopsis thaliana columbia
ccacgcgtccgtcgttatcttaagaccgtccaaggtggaatctccttcactgcagccatgggaaaaggtgtcacgcgagtatcttttcaaggaga

SEQ ID NO: 160859 - DNA, 445 bp, Arabidopsis thaliana columbia
cgcgtgggtcttgatgtagctcgtttaagtttccccctaacggggttcctcttaaacttctttgggaagccatggacagtattgatcagtcaacagggaaacgtagagggttcatgctcatatctagaccacacagagaacccggattgctctatactctgagctgcaaggatgaaagctggatcgaaatagccaagtatttgaaggaagatgttcctcgtcttgtaagttcacagcatgtagattctgtggagaaaatcatatcagttgtgttcaagtcacttccatcaaatttcaaccaattcatcagatgggtggctgagatccgaattacagaggactcaaaccaaaatctcagcgcagaggagaagtctaggctgaaactaaagcaattggtgctgaaggaagtgcacgaaactgaactgttcaaacacatcaataagtt

SEQ ID NO: 160860 - DNA, 425 bp, Arabidopsis thaliana columbia
  unsure (1)..(425): unsure at all n locations
ctcactggggtcctcttaaactgttttgtgaagccatggacagtattgatcagtcaacagggaaacgtagagggttcatgctcatatctagaccacacagagaacccggattgctctatactctgagctgcnaggatgaaagctggatcgaaatagccaagtatatgaaggaagatgttcctcgtcttgtaagttcacagcatgtagattctgtggagaaaatcatatcagttggtgttaaagtcacttccatcatatttcaaccaattcatcagatgggtggctgagatccgaattacagaggactcaaacccaaaatttagcgcagaggagaggtctaggctgaaacttaagcaattggtgctgaaggaagtgcacgaaactgaactgttaaacacatcaataaagttttatccacagggggg

SEQ ID NO: 160861 - DNA, 311 bp, Arabidopsis thaliana columbia
gaaggaggttacggtctgataatcccaaagatatagacgggaaggccgagaaggttgagccgcttccaaccgagcaattgaatgaacactctttcgccgagtagactgcctctgctcacaccaaaaccgataagctcatctctccttacagtttacctgtgtaggagttagggttcttgaataaacaatgcaacaaagattgtagaagtcagtgtacataaaaaaatggccaaccactctttgttacttttgtggtgaaaaggaagatcttaattctctttccatcagatgatagcaatacattttttcat

SEQ ID NO: 160862 - DNA, 327 bp, Arabidopsis thaliana columbia
cccacgcgtccgaaaagaccatacgatttatttaacctttttttttacagcaaggccgaaaaggacgaggcggttttattctaacaatggggggagacactatatcccctagtagactgtctctgctcacaccaaaacctataaactcatctctccttacagtttacctgtttaggagttacgaatcttgaataaacaatgcaacatatattgttgaactcagtgaacataaaaaaatagccaaccactctttgttactactgtggtgaaaaggacgatcttaattctttttccatcatatgattacaacatcactcttcattcaat

SEQ ID NO: 160863 - DNA, 466 bp, Arabidopsis thaliana columbia
ctcctcttgcaaaccaacgtaaaacactaactaagagatcaatatggctggagtgatgaagttggcatgcatggtcttggcttgcatgattgtggccggtccaatcacagcgaacgcgcttatgagttgtggcaccgtcaacggcaacctggcagggtgcattgcctacttgacccgaggtgctccacttacccaagggtgctgcaacggcgttactaaccttaaaaacatggccagtacaaccccagaccgtcagcaagcttgccgttgccttcaatctgccgctaaagccgttggtcccggtctcaacactgcccgtgcagctggacttcctagcgcatgcaaagtcaatattccttacaaaatcagcgccagcaccaactgcaacaccgtgaggtgatgagcgacggtcaaatgaagctactagcggatgtttcgaattttatataatcgatgagataatatt

SEQ ID NO: 160864 - DNA, 378 bp, Arabidopsis thaliana columbia
ccacgcgtccgctcctcttgcaaaccaacgtaaaacactaactaagagatcaatatggctggagtgatgaaggggtcatgcatggtctgggcgggcatgattgtggccggtccaatcacagcgaacgcgcttatgagttgtggcaccgtcaacggcaacctggcagggtgcattgcctacttgacccgaggtgctccacttacccaagggtgctgtaacggcgttactaaccttaaaaacatggccagttcaaccccagaccgtcagcaagcttgccgttgccttcaatctgccgctaaagccgttggtcccggtctcaacactgcctgtgcagctggacttttctagtgtaagcaaagtcaatatttcttacataat

SEQ ID NO: 160865 - DNA, 457 bp, Arabidopsis thaliana columbia
  unsure (1)..(457): unsure at all n locations
aacaaatcttaaacgttttactttgtgctgcactactcaacctcaatggccgcctcaacaatggctctctcctcccctgccttcgccggtaaggccgtcaagctttcccccgcggcatctgaagtccttggaagcggccgtgtgacaatgaggaagactgttgccaagccaaagggcccatcaggcagcccatggtacggatctgaccgtgtcaagtacttgggtccattctctggcgaatcaccgagctaccttaccggagagttccccggagactacggatgggacaccgccggactttcagctgaccccgagacattcgcaaggaaccgtgaactagaagttatccacagcaggtgggccatgctcggagccctaggctgcgtcttccctgagcttttggctagaaacggagtcaagttcggagaggcgngttggttcaaggccggttcacaga

SEQ ID NO: 160866 - DNA, 369 bp, Arabidopsis thaliana columbia
ctatgctctcttctttttctatggtggcctttccggttaaggccactatggtcgctcctttcaacggacttaagtcctccgctgccttcccagccacccgcagggctaacaacgacattacttccatcacaggcaacggcggaagagttaactgcatgcaggtgtggcctccgattggaaagaagaagtttgagactcttttttaccttcctgaccttaccgattccgaattggctaaggaagttgactaccttatccgcaacaagtggattccttgtgttgaattcgagttggagcacggttttgtgtaccgtgagcacggtaactcacccggatactatgatggacggtactggacaatgtggaagc

SEQ ID NO: 160867 - DNA, 248 bp, Arabidopsis thaliana columbia
  unsure (1)..(248): unsure at all n locations
atccttttgcaaaccaacctataacatttatctagagatcaacatggctgctgagacgagggtgttttgcatggtcatggggcgcatgatcgtggccggtccaatcacaacgaacgcgcttatcaattgcggcactgtcatcgctagcctcgtcatgtgcattaactacttgactcaaannnnaccacttacccaagggtgcttcaacgctgtttctaacctttataacattaccagttcacccctca

SEQ ID NO: 160868 - DNA, 191 bp, Arabidopsis thaliana columbia
aagatttgcaaaggatgacaaagagaagggtgttttattcggacacgaaaaaccaagcagattcagtggtgttccagacagagaagcgaactgaaagaactaggagagaaaattccaggtgaagtgaaagagaagggggaggcttaagctacaagagctgaaagacaagataggaagtggatcaacccaag

SEQ ID NO: 160869 - DNA, 336 bp, Arabidopsis thaliana columbia
  unsure (1)..(336): unsure at all n locations
acccacgcgtccgcattctctgattcggtccatcgatcttttttttttaaagcttaatcgntncctttctggcggttctatccatggctcagaggggtgtcctcaaagttggtatgtcatgccaaggctgcgttggtgccgtcaatagagttttaggcaaaatggaaggggttgagtcatttgacattgatatcaaggagcaaaaggtgacagtgaaaggtaatgttgagcctgaagcagttttccaaacagttttaaagaccggaaagaagacttcttactggccagtggaggctttagcttgacccaaaagccgaggctgttcctaaggtctaa

SEQ ID NO: 160870 - DNA, 279 bp, Arabidopsis thaliana columbia
ctgacggagacatcaccatcacaaacgatggtgctacgatattggagcaaatggatgttgacaaccagattgcgaaactaatggtggaactgtcgcggagtcaggattatgaaattggtgatggaacaacaggtgttgttgttatggctggtgcactttttgagcaagctgaacgtcagtttgatagaggaatgcatcccattctgtattgctgaaggagtttagatcgtttctatggtggctgtagaccatttgtattgtttttttacattattttta

SEQ ID NO: 160871 - DNA, 236 bp, Arabidopsis thaliana columbia
aaaaaaagagagattcttaaactttttatcttatgatcctttcaaaaaatctgaaaagagaagatttttaataaaaaagaatggttgaaactggtcaccatcatcaacatccaccggcaccggctgcagccggtcatccgccggttccatccatggcgatggcgcgtaacatgggaaccacttgttctccggcggtgcaacttcatcatctttaatattgtattcactctaacctt

SEQ ID NO: 160872 - DNA, 349 bp, Arabidopsis thaliana columbia
cacgaatgagagactaataacaaccgtatcttatgactcgtggaaaagatgtgcagcgagacgatttagacataaactgagagctcccaactcagccagagaattaccttcaccggatagcgagaagtggaaggtacgggagaaagggtgtggcgattaactttgggactctggatgatcagagaatgctgtttgatattcagaaattctacaatgtgggtgttgaggagcttccctcaaacgtggctgatttgctgtgaagaagaaaaagaagaagaagaagaaaggttgcttgtgtcgcaaatgtcttatttgatttgtgacccgtgtctctctcttctgaatcatc

SEQ ID NO: 160873 - DNA, 399 bp, Arabidopsis thaliana columbia
gcttggtccacgctcagagcatcttattcatttgggctactcaagttatcctcatgggagctgttgtgggctacagagtcgccggagatggtccattgggagaagcagaggacttgctttacccaggtgggagcttcgacccattgggcctcgctactgaccccgaggctttcgcggagttgaaggtgaaggagctcaagaacggaaggttggctatgttctctatgtttggattcttcgttcaggccattgtcaccggaaagggaccgttggagaacctcgcggaccacttggctgatccagtcaacaacattgcatgggccttcgctaccaacttttttcccggaaagtgggtttaatttgtgatctgtgtgtttgtatcctctttgttgcattttg

SEQ ID NO: 160874 - DNA, 307 bp, Arabidopsis thaliana columbia
  unsure (1)..(307): unsure at all n locations
gcatatattacaaaacacatactaatngnttttctttcnttttcttccttgcaaatggatactggagcttcatactcttcgggtcggacgaccaagtcaagtcttggaatgtcgttgtttaccaacatgtatcttctcacaacgcttcaagcccttgcggccctttgcttcttgatgattcttaacaaaataaagtcatcttcacgaaacaagaagttgtattctcttccgccaggacccatcgtgttttcaattgatggaatgatttcggcgatgcttaaaaaccgttcagtttttctctggtttt

SEQ ID NO: 160875 - DNA, 385 bp, Arabidopsis thaliana columbia
ttatattattggcttcaatcttctctttatctctccaccagatccaagttcgcgagattgcaagctctctaacaaagttcttcacttttactctcaaagctttcatctttcattcaactacttaagctccaagtatggcaggatccgcaccggaaggaacacaatttgatacgcgtcagtttgaccagaggctgaatgaagttctcgatggacaggatgagttcttcacctcatatgatgaggtccatgagagctttgatgccatgggtttgcaagagaatcttcttaggggtatctatgcttacggtttcgaaagccttctgctattcagcaaagaggaattgtacccttttgcaagggtcttgatgtgatccagcaagcacag

SEQ ID NO: 160876 - DNA, 439 bp, Arabidopsis thaliana columbia
ccaccgccgaaacttagatataaaccaaaccacttttttttctattactgcaattttcttagagagggagatttatgacgcagaatggccacaagcgcatcagctttgctctcaccaaccacattctccactgcaatctgccacaaaaaccctaactccatcggattccatggccttcgtccccttcgtctagggggctcctactccgccctacccaaactatcaaccaccgggagaaaatcctccttcgctgtcgtgagagctgagctaagcccttccatcgtcataagtctcagcacaggtctcttcctctttcctggccgtttcgtcttctttaacttccagagagagaacgtagcaaaacagggcttaccggagcagaacggaaaaacccatttcgtagctggagatgatcgtgctaaggagtactgtagttttt

SEQ ID NO: 160877 - DNA, 272 bp, Arabidopsis thaliana columbia
acattgtcttttcggggttttagtcatacttattgtttttcaattcggagaaaaatcctgttgtttcagatgagaaacccagatcgacggaggagaattagagttctaaggcggaatctgcttatgggagttctattataggagttgtgtatggtttgattttgtaaagctaaagatatgtttgttatttcttgtgttttcaaatcattcttgtattttttattttatcttggttaatatctttctgaggatgaaggtgttgattactcttc

SEQ ID NO: 160878 - DNA, 253 bp, Arabidopsis thaliana columbia
accggattcgaaaacccggcccgacccacgcgtccgcaaacgtctcagtggttgaccttgttataatgttgagaagaaaggtttgacagcagagggtgtgaacgaggcctttagagaagccgctaatggaccgatgaaaggcattttagacgtttgcgatgcgcctcttgtctctgttgacttcaggtgctctgatgtctctaccaccattgactcgtccctcactatggttatgggtgatgatttggtcaag

SEQ ID NO: 160879 - DNA, 258 bp, Arabidopsis thaliana columbia
aaatctctctcgatctcaatttcgcaaaatggctgtcaagaagatcagaatcggaatcaacggtttcggaagaatcggtcgtttggttgctagagttgttcttcaaagggatgatgttgagctcgtccctgttaacgatcctttcatcaccaccgagtacatgacatacatgtttaagtatgacagtgttcacggtcagtggaagcaccattagcttaaggtgaatgatgacataaactctttttttggtgagaagcc

SEQ ID NO: 160880 - DNA, 457 bp, Arabidopsis thaliana columbia
gcgtctctctcccgcaaccttcgattttcgtttattcgcatccatcggagagagaaaacaatcaataagcgaccatgttggtgtaccaagatcttctcaccggtgatgagcttctgtctgactctttcccttacaaggagattgagaatggaatcctctgggaagtagaaggaaagtgggttactgtgggagctgtagatgttaacattggtgccaatccatctgctgaagaaggtggtgaggatgaaggtgttgatgactctactcaaaaggttgttgacattgtcgacaccttcagacttcaggagcaaccaacttatgacaagaagggattcatcgcttacattaagaaatacattaagcttttgacacccaagctcagcgaagaagatcaagctgtctttaagaagggtattgagggagctaccaagtttttgctccccaggctcagtgactt

SEQ ID NO: 160881 - DNA, 330 bp, Arabidopsis thaliana columbia
cagcaaagagcaactacaacttcgagaagcttttcttgtaccttgctaggaaactggctggagaccagaaccttcactttgtggagtcaccagctcttgctccaccagaggttcaccttgacattgctgctcagcagcagaatgaggccgatcttgcagctgctgcagctcagcctctccccgatgatgatgatgacgcatttgagtaaaatcttccaaaaatgtctgctgtggttttcctctatgatggtttttgagttgatgttacatataaatcaatcggtctattttagaaccaaaattgggggaattatttggattgctctgttt

SEQ ID NO: 160882 - DNA, 292 bp, Arabidopsis thaliana columbia
cagtatatatcaactacaacttcgagttgtctgttttgtacctagctaggaaactggccggtgaccattaccttcacttggtggagtcaccagctcttgctccaccagaggttcaccttgacattgctgcttaccagcagaatgaggccgaacttgcatctgctgcagctcagcctctccccgctgatgatgatgacgcatttgacttaaatctttcaatattgtctgctgagggttctctctatgaacgtttttgtgttgtttttcatatttattatatcttcttactttt

SEQ ID NO: 160883 - DNA, 446 bp, Arabidopsis thaliana columbia
cccggcccggaattccgggtccgaccacagccgtccgaaccataaaaaccagggggaggttttaaaccgggggggggggggcaaaattggcgccttcggaaccgtccttgccggaggttccgttaaagggatcggccgaaaattcctccaggggggggaggaccgggacccatgttttccttgttgttatgggccaccacatccaaatggttcccgttaacgagggcaaccttgattttaacggttttttcaggggtgggacctccacatgggttggaagggggggggtgttcagggggggaggggggttggccgttgggcccaaaccgttgccgttaaggggccttgggggtaacgtgatggagcagttaaaaggtgccgacgtcgtttaccatttatttcccaattttggggatacctgcttcggcaaaataattttattttgg

SEQ ID NO: 160884 - DNA, 425 bp, Arabidopsis thaliana columbia
ccgtccgacacggttggttgaatcccgcggggaccagtccgaccgctttatccggcccctggacctaaggggggatcaattagaattttgggttaaagggcctctctaagctaaggaaaccatgggagaggaggatttcgggaggatgccccaggatttgggggaaagggggttaaggttggcccaaggcctaaaaaaggggggtttaaaccagaggggggtggtccgaaccccccctttccagccattccagagggttttagccggtttaaccggaattaacccttgttcaaacctgggggctctaaggcttggccaaaggaaccttaccgttttgggttgacttcttggcattggttgttggtcaacaaatggactcctcaaaccttgcaaggcccattggtttctcctaataaacttttatt

SEQ ID NO: 160885 - DNA, 330 bp, Arabidopsis thaliana columbia
gcccatttggttaatcgcctttttaaactaaaaacaaaaggctcagattagcgatcccttggttccttttggcataatgctcttcaacataatttcttttggcaggacccttaataacaccaaaaccttttccgatggattaattaattcctaacccaaagttggagaaggcggttgcttgttcttccacggggaccattaagccaggttgttcctctgggtttaacactagagataggaccagtttatcgttgggggtggtttacggtaccaggggtgttgtgaagggcttagacaatccttcttctaggacgttcgaaaggggttctt

SEQ ID NO: 160886 - DNA, 301 bp, Arabidopsis thaliana columbia
aacattaaaaaacagggggaggtttaaaattttgagtgttgggagcaaaacgggcgacttggggaccgtccttgccggaggtgtcggttaaagggaccggccgagaaatcctacaggggggggaggaccgggacccatgtttcccctgatgttatgggccaccacatccaaatggttcccgttaacaagggcaatcttgactttaacggtattataaggggttggacctccccatgggtgggaagggagggggtgttaagggagggataggtgttttgactttgggcccaaaccgttgcct

SEQ ID NO: 160887 - DNA, 372 bp, Arabidopsis thaliana columbia
cccaaaaaaaggaaaccccaaaaccaaggtttttattggtttcctaaaccatggtttggtcctcccttgccttggccggaagggttgggaagcctgccgaataaaatgtcctgggaggcggccgggtgaccatgaggaaaactgtcgccaagccaaagggtccataaggcagccaatggtccggatctgaccgagtaaggtcctggggtccattttccggggggcccccgggttaccttaccggggggttccccggggactacggatgggacaccgttggtttatccgccgaccaaaagactttcgccgggaaccgggggctagaagttttccacagaaaatgggccatgctcggagccctaggttgcgttt

SEQ ID NO: 160888 - DNA, 407 bp, Arabidopsis thaliana columbia
ttggggtttaactggggccagccactggaatttttccagatttaataatccttcctggaaccaggagcttagttaagaggacgaaaaactccccacccgggggcgaagattacaggagggttgttgagaagggcaggaggaagctcaaaggttggatcgttgaaaagaactgggcacccataatggtccgactggaagggaactttgttggaactttcgatggcaaataaaggactgggggtccattcggaccaatgaggttggacgctgagcaagttaatggggccaccaggggtatccacatggttttaaggtggtgggacccaatcagggagcaattccttaccatctttttggctgatttcaatcactttgctggggttggggccgttgaagttactgggggc

SEQ ID NO: 160889 - DNA, 214 bp, Arabidopsis thaliana columbia
cggaaccgcagttccggcccggccctccgcctccggaaacgagaccccaacctccccttttttcttgtttcttggccagggcttccgtttttccgagggttttaaaatcggccttaaagctggacctttttgagataatggccaaaatgggttttcccatgtttcctaccgggaccgcttttaaacttcctcccaaaaatcctgaagtctccgg

SEQ ID NO: 160890 - DNA, 388 bp, Arabidopsis thaliana columbia
ccgggcccggattcccgggccgcccaacgcgtccgaccgttaaaggccggcccagggccttgtttggggaaggagggggctttgccccagatgaagccggtgcctgggaaaattatccaaacctttgagataagggcggtggaaggacacaggatcgggccggttccttttataattcttaacaggaagcagggcctaaaggttccagccactaaaggatctaattggtttggaatttaatgcattactatgtgcctccatttagtaggaaattattatttagaattttccaaaattctggaataagaggggtatggtttccattaaaataatatttaactttttttataaaaaatatttttttcttattatttataaatatattatt

SEQ ID NO: 160891 - DNA, 439 bp, Arabidopsis thaliana columbia
aaatggcttaatcttctctctatctctctttttatttttactaataatttttaaggttaaggaaccggggtttaaaaattaaaaggccttttggggtggtttaaaattcctgtttaaccgcagtatttaattaaaaaattcctgccgttgacggggcttgcacttaaaaggaaccggccttgattccaaaaccgttgcgttttccccaacgccgggttacttccggggccgtggccggaaaacaaacggattccgccgggttaaatccaccaccgccgccgactaattccatggtaaggaaaacgccgttaatccttggaccaattaccacggccattgtggcctaagccgggcgggttggttcgaataagtttttagccggttccttggttcaggagtttttaaccattgtgccattttttggggggcttgggattcc

SEQ ID NO: 160892 - DNA, 302 bp, Arabidopsis thaliana columbia
ccgaaccaggatggtgggattttccacccttttgatgaaccgtatccagaaggggcggggccgtgtattctaactaaggcttaaaaaaaaaaagcttgaccccctattggcctttgttcccgatgggtctgttttaatgattgttgagatcaaggtcgccaaaaggacttttgaattgttggtttctttaggaaggtttgacacatccggaattttggcattcgagccacatcaggctttggaaccaatcgttgttttcggcggcgggtcacccaaaagaacctatataggcttaagttaat

SEQ ID NO: 160893 - DNA, 425 bp, Arabidopsis thaliana columbia
ttaaattcctaaatcttaagtttcccacttccatcttaaaaactttttttaaccacgttacccccagccttttttccaaggggaaaccggggttggtaccggccgaggattttgggcttttatggaggtgggtgggggccaaagatggcggtcctggtgggatcaaaaggagggcccgaccaaccccaaccttttaatataaggctgggaggcgggaccctgagaaggggcctccccagacccgaagcaaacctgggttgggggatgccactcccgggagggccggggactcttttggggatgatgggtcccgttccaggtgggatgattggctttggattcctattactctcgagcgtggcagggccacggcccctatggctggccattgggtgcgaaggttcccctttttttgtttgacaggg

SEQ ID NO: 160894 - DNA, 410 bp, Arabidopsis thaliana columbia
cccggaattctcgggacggccccacccgtccggttgttcttaagaaaccaccaggtggttcggttcggtgttcccctggcaaaactaaaaccatgggggggggtttgaggaaccatttgagggggttaaatgcccctaagcatggatggctggccaaactggggggggcatttgccccaaggccgttttttggcccacataagccaggggagggccttcccttggtccttataatcaggaccgggtggaagtttgctcttacctaccgggaagggtttccaatctggagccaagggcttatccacgttgttgggaaagtcaggccggccaaaacctaccctgttggtttaagggttgtggggtttttcccaagaaccattgggaccttccgccttttttttaatcccaag

SEQ ID NO: 160895 - DNA, 391 bp, Arabidopsis thaliana columbia
aacgaggagacctgtcaaagggactggtcttatggaatgggcctgcgggaatgaccaacaaaggggcattggatgccgggaaattcaaactcctgaggcctgacctttacctaatcgcctattaattcaagcaaggaggaatggttttgccactcttaaaccgggtaaaaaccaggaaaaatgggaagaccattttgccaaaggttgacggaaccagggccagggtaaataccaccctggcggagaccatggctggaccagcaaataccgaaggggcactaaaggctttggttcaaatttaaccgggccctccgggaccaaatccgataaagcgtgtaccggaaataaccaaacgggttctgtgtttatggggggatcaaaatggactaac

SEQ ID NO: 160896 - DNA, 413 bp, Arabidopsis thaliana columbia
tccgtggcaaaccatacccaacccataataataataatttttgggggccggaggaaaggggtgggggagcggagaaaagggcggaccaggccctggggtttttttaactaacctcctttgttaagccggttggccagattttgggttaaaaaccagtggcgtttgcctaacagaagaggggttccttggtggttaaagttgttgaaactccacctgtaaggcagggggccaccagaccatgggggttggtttaatggaaaagttttttttactgggagggcagtttacctggggactttggattcgaccttttgggtttttaagacccagagggtcctgggggattaatggagccaagatggttggcttccggggggatcataaacggccggttcgccatgttgggggcagtt

SEQ ID NO: 160897 - DNA, 433 bp, Arabidopsis thaliana columbia
gggtcggccccaggcgtccgaaattggttcattggggaccagggaaaaaaaaaccatgggcacctaaggccgccgggatcggaaattccgccttaccaccggcggaaccttccggggtaaggaaactccattttttttaaccacccaacggtccaaaatccttttctttaaccaaaaccgaaatccgggccgggaaaccagattcttccgccgccgttgttgaagccccggccacgaaggaggctccggggggattaacgccaccgaagttggacccaaccacacggtttccgatcttggttggaggcaccgggggtcttttacgtaaggggcaggtggaggagttctacgttattacggggaactaaccgaaggaccagatctttgggatgccgccggggggggcagcgatcttgagggagggtccgatttt

SEQ ID NO: 160898 - DNA, 307 bp, Arabidopsis thaliana columbia
caaatttaataaagggcttcctaactcgtttattttttaacccaaggtaagcattttggggggatggaattgtgttcagggtttaaggcccacctttggctaaggggggttcctccagtaggaccattgatggcaaagattaagggttgggaaggcacccgttcgttgtaccttccaaggaaccctttgcattggagggtcaagacttgaaggtgaagggtccatttggggggttggcttttccttccccacccgaggtttaccttccaaggtaggaatcctgttttttagggtttaaaataccctt

SEQ ID NO: 160899 - DNA, 290 bp, Arabidopsis thaliana columbia
gccccacccgtccgttaatttccaacaggaagacttctgttgtttttggatccgaggggggtcctaacttaactgtccaggttaaagccaggaggatcattgcttttaatgggtttgccgggggcaatctaaattttttgggggcttacttggctccgtggcctactacaactccttggattcttgccaggcagttaacggcttttgttagtgatgccggacctgattgggaggtgggggcttccgttggggttaaaaaggtgtcctttggacagtcccaagatggaatt

SEQ ID NO: 160900 - DNA, 299 bp, Arabidopsis thaliana columbia
  unsure (1)..(299): unsure at all n locations
cgggncgggaatcccggggcggcccacacccgtccgaaaggatgggatggggaatttctggtcaggtttcgggttttccaccaaccaaggggccggttttggaaaagaggaggacttggaatctctttcttctgggggctctttttttacctactggttacaggctggccctttaccctccctttttggttcctcctgaacccgtaggtggaggtggtgttcctccacccaaggttgcccttgtaaccattgttgttgcatcgaattggttaaatactattggccccgttgcccgacct

SEQ ID NO: 160901 - DNA, 476 bp, Arabidopsis thaliana columbia
cccggcctggaataccggggcggacccaggcgtccgtcctaatccaaaaaggctcttccatttaattggcgccggaataagttttttaataatttttttaattttaattcaaaaccggacccttttttttaatttccttttcttcaacaaaatccatggtttttttttcctccttcctaaaccgcggtttttaatttttaactttggtaaaagcctaatggaccgatcccgaaaccatttttttggaggccgaaccaccagaattacccgcaaaggtcgttttggacccaccaatggttcccgagggattcgcctttcctccgaatttcgccgaaggaggcgccaggccagaggaggggatcgctcccgtttttgaggagcttattggacctgcgtttgggggggggggtttgctgggaaaagttttttatgggtgggcctcaaggcttaggaggggttcaggttttgttgggaag

SEQ ID NO: 160902 - DNA, 346 bp, Arabidopsis thaliana columbia
aaaccttgaagaagaaaaaaaattttttaatgtagtttggaggatccagggcgaggtttaaggtccggcctatgctactccgcctggattaatccttctcctaaccggcttggtggggcgccaaaaatttcgaatcctgccccaaaaagggaaccgattccggacccgtaactagcatgggggtctttcaacttgtggggcctaactgaaaccccaaccatccttataaattctttgggttctgcaggcaaaaccatccccgtgggaacccttgggtccgtcgcctttatagatgggaaatttacgggcctttaaaaaatttacaccctttcgggttgggagggct

SEQ ID NO: 160903 - DNA, 317 bp, Arabidopsis thaliana columbia
aaggatggcccaggggtaaacagggttccttcaatttggggaccattgcctccacacatggggggaggtttgcaatggggggaggggttaatcctccaataaatagtaaggggaccagatttttggaccccaatttcagatttagcaaagaagtgcttaaccttgaggccccccctaaaagcgagtggaaaaaatggaattggaaatcttccgaagatttgttgttaaacggggcgttttttactccgtctgggggtgcagcctcgcctagttttgcaaaggcttcaagctttggggttaaaccgttttttttagtg

SEQ ID NO: 160904 - DNA, 383 bp, Arabidopsis thaliana columbia
  unsure (1)..(383): unsure at all n locations
cccgnnnggaatnccgggcggaccagccttccgaaagaccaagggcttccttaaggctctcttccgttattagggtggcctttccggttaaggcgactatggtcgttcttttaaacggactaaagtcctccgttgccttccaagccacccgaagggttaccaccgcctttccttccataacaggcaacggcggaggagttaactgcatgcaggtgtggcctccgatgggaaggaagaagttggggactttttttaaccttcctgcccttaccgtttccgaatgggttaaggaggtggactacttaatccgaaccagggggattcctggggtggaatccaggttggagcacggattggtgtcccgtgggcccggaacctaaccc

SEQ ID NO: 160905 - DNA, 405 bp, Arabidopsis thaliana columbia
aaaaaaccagagcattttttaaaaaatttaaggaaacctaattaaaaggggttaaccggcggagccacatttaattccggggcaggtaaccgccgccaaagctgcctttttggccatgcaattggccggggtttccgtttttccgagggtttaaaaatccgctttagggctggcccttttggggattttggccaagatgggttttcccatgtttcctaccgggatcgtttttaaacttccgaccaaaaatcctgaagttccggtcatgctcgaccgattcctccgttttttaacgttttacttccgtttaaccggttccaaccgtaaactttccggggatggcgttgaacggatttacggccttggtccggttggcaggttttggaccaagaccgaagatggggt

SEQ ID NO: 160906 - DNA, 169 bp, Arabidopsis thaliana columbia
cgggcccggaattccggggcggaccacaggcgtccgaagaaagttggtagccgatggggtttttttttttgaattaaatgaggtcttaaccagaaagttggttaaggatggttactttggggtaaaggttcggataactcctatgcgtccggggatcattataggagcc

SEQ ID NO: 160907 - DNA, 303 bp, Arabidopsis thaliana columbia
cggaattccgggacggacccacccgtccgcttggtttacaaccatggttaaggcagcatttgtgattgtcagcccatgaggcctgcaagctgaaatttttggaatggaagccgaaagggccacaccgtttaatcattaccaagatggaggggcggcataaccaggggatggtggggaaaatcggggaaccgggtacaaaccaatggggccttggctgcaggtcttccagttgatgatggccgttttgccatttccgttttagtttttgtcagttctgagggggtccaagggacgaggtttttt

SEQ ID NO: 160908 - DNA, 341 bp, Arabidopsis thaliana columbia
cggaattccggggcggaccacagccgtccgggggggccggagttgtcaaaggtttccagttaaatcctaaccaaactttgggggggggagccaccacagtcgttaacggttccactaagggctttggttggggggctggaataatcggacccttctccctggtttacacggttttttccgcaactgaccccaaaagaagcgctggggattccaacgttccgattttggcaccattccaaatcggattcgttgggttctgggttaacttggcgacgattccaataaccggaccaggaattaacccagctgggattttgggagctgcattaatttacaccagg

SEQ ID NO: 160909 - DNA, 430 bp, Arabidopsis thaliana columbia
agaccaacaggaatgccttccaggccggccaggccgttgccaaagttgaggagagaagcatggttttgttggccagggccaaggttgctgttgttgcacttgaagcttccggccaccaggcggaaaagagtttatcgattgcggcagtggaaggtgttaacttcgtgaaggacaagaccggcctgaccaagaagcgacccgggtaaactttgggggttataatttccctttcttaataaatggtggggatttccaaataaaattggggggccataatggatcctcgacctcatcgacctggtggtggttttaagggtggaaaggtttaaaggtttcttttcccttaagatgaacaccgttgggaactttaaaggtaatcaaccaaattttgtttaggttcaaaaaaaaaaaaaaaggggggcccttttta

SEQ ID NO: 160910 - DNA, 268 bp, Arabidopsis thaliana columbia
aaccacggaaacaagggttcccggcggcagaaccctgtgccattttgtgcgctggagatctactatttctaactccggccgaccaagatgggaaggtgcctttcttgtaaaaccctccaaccaggggtttaactgggaagagactccattattgtacgtgggaagataaggtatgtcaacttacggggttttttgttggggaccgttcctggaattgggggttaaccccgaaggggggtttaatccgaagtttcttatatgttaaggg

SEQ ID NO: 160911 - DNA, 445 bp, Arabidopsis thaliana columbia
aaaaaaatttttttggggggtaccgaaaaaattgtttccgttggggaccaaatggttaaggggggttcaaaagggacctggtcctggggttagaacttaacttgccatgcccgtcgttgggaccaaagttaactgttttgggggggggtttaacccaccgatccatttggttaccgacctttcctttttggattttgagattaaggaatggtcgttggttcctgcaaccgggggggctcctttcccctgttttgggttttcgatggtaccaatcggttaaactatttatgtttacgggggccgtgacgttaaacgtaaatccaacggcttttattctgttgtttctgggcccaactgatagttaatggtggtctcctggttgggtaggccttcctggtcttattattcattcatttgcttgttaattttctgtaagttttttttt

SEQ ID NO: 160912 - DNA, 310 bp, Arabidopsis thaliana columbia
tttcctttctctcctctttatcttcctttaacacttaggggccttccaccagatttaaaggggtttaaaattccaggttccgtcctaaaaccactttccgtattcggtttctttagagccagggccgtggttcttggtccttacatgggcttaccaggtttttttgaccccaacgggacctttggatccgacccgacccgattggttttttccaggtaagaaacttttgccaacgagttattccggggggttggttcttccgtctttttaaccgtaccggaagatggttgtacggcttgtttatccgatt

SEQ ID NO: 160913 - DNA, 348 bp, Arabidopsis thaliana columbia
aataccgggcccgaccaacgcgtccgacgaacaacaaaaaatgcagattttttgtttaactttgaccggaaggacaataactttgggggttataagcagtgccaccatctccattgtcagggccaagacccaggacaaagaaggattccttccggatcagcataaatggatctttgccggaaggaatttcgaaaatggccgacctttggcggcttacaccatccagaaggaatttacacttaatcttgggtgggggcttaaaggaggattaattgtgctttcctttgaggatgttggttggtaggtccattcaggtaattatgattgtccgtaggtgatttttttttt

SEQ ID NO: 160914 - DNA, 307 bp, Arabidopsis thaliana columbia
cggaattccggggccgcccacacccgtccgtttcctaaggagaatcccagaaggttcaatttagggggcccaaaaggggaccggaggagagggcttttacctccgggaggtaattggtaaaacaattaaaccagacccgtcggtttcctttctttaagccattacctttgaaaccatccaaggtttgggtggcaactgggggcaaagcccaagggcttaaagtaaaggcccttaaaatggccaaggttttgcccggattctccgcggttgttttaacggtttcaagggggatcccggaaatagttga

SEQ ID NO: 160915 - DNA, 405 bp, Arabidopsis thaliana columbia
  unsure (1)..(405): unsure at all n locations
gggnngggaatcccggggccgccccacccgtccgaccaaattttttttaccaggaggtttaccattttggaagcacctttattccttgggtggttttgcattttttaatgtgctaaggggcatttcgccggagctaaacaaaccgccggcaccataaccccttgggggattccattacccccaaaggcttttttgattcgttttgggaccattaacatcaatggcgatcaaccaaaccctttttttttcttttaaagggcctttcctttaaccgccggggcctcaacccgtttggcctaattcgtttttaataccccccttaacacgcataattttgttttttgttccgccgggaaacttttttgtttccctgggttcgccgttaattccctggaaaaccacggg

SEQ ID NO: 160916 - DNA, 385 bp, Arabidopsis thaliana columbia
aaccacccaaacattaatttttccacattttgggggaaaaaaccagaccaggtttattagagacctaatggcaatggcggtttccggagctgtcctaaggggcctgggtttttcgttcctaaccgaaggcaaaaaaggtgccaccgaatggccaggcggcgtaggcactggacctaaaagggttgccaggaaacctttaattgtcgttgttgcggttgttaagcctaagaaatttgggatccctgccgttaaaggggggggaaacttcctggaccctgaatggttcgatggttcgttaccagaaaatttcgggttcgcccaattgggttgggggaaggacccgctttttctgaaatggtccaaaaaggttgagctgttccatggc

SEQ ID NO: 160917 - DNA, 328 bp, Arabidopsis thaliana columbia
gtggttccttgtgaccatggttcctccattttaaatttaataaaatcctttaacctcccgccatggttaccgtttccactaattttttacttaattaaagggaaaggtaagggttttgggggcaaacccaagtcaaattttatttttgaaactaaaccaaacccttaaaacgggaaaccaacagcattttgcgagaccccttgttggggttagccaaacgggggttacgtcgttggaagttgtagttccggaaagattccgttgggataatcttggaccccagccagtttctgggaagaagcatataaaaaaaggtggggggtttttt

SEQ ID NO: 160918 - DNA, 300 bp, Arabidopsis thaliana columbia
ttcggggtgggttaaaacggaggcttgaatttaagggaggaagatggtttcgattccgcagaagtaacagtccagtttccggggggggaccccgtcccgttccttttaacggttaaccagttgggggtttaagggaaccccgaaggcttaaggggcaggttcttagtcccatggtaccggggttggtcctttttggccccaaagggccgggggggttccattgggaccaaaattgcattggttttgcctgccgatggcaatggtaactaggaaaagtcttccatggaaatctttaggatc

SEQ ID NO: 160919 - DNA, 365 bp, Arabidopsis thaliana columbia
cccggaattccggggcggcccacacccgtccggaaaaaccggttcgttggtggtaacttgcaagggtggtccgaccttttgccttagagtttgggtcaagggtcccaaatccggacccaacggggttttggcaccgttccttggttccccggccattttccggcgtccgccaccaggcgatttttgggtggctttccattgcaaaaggatttggttaacacttgcagttttgtttaacactggggtgggagggtttttcatgaccacgatgaaaatggagcctgtaattcatttaaggaccgggggaaaccttattggaattgtcgggaacctttttggagggccaggagagtttttggggtttc

SEQ ID NO: 160920 - DNA, 355 bp, Arabidopsis thaliana columbia
accgaatctattttgggttggacccttttagggttaataacactaactaaatccttgggaccatgtcccaaatcgtttttttggttgccaccataccaatccgaacgttaaaaattgctaaggatctaggagtccgtttccaattaaaccaaccaatgaagttttattaaggctttgggaccgcggttgatggggccacaaggggcggtttaaagaaaaccaatggggccaatgcacctttggttgctttttacaagggattcaacatagatggtggccaagtttttgtggaagccaagtcctgtgccaaacagggccgaatgtggggggatcagaaggagttccgggaccttga

SEQ ID NO: 160921 - DNA, 354 bp, Arabidopsis thaliana columbia
gcccggaatcccggggcggcccacacgcgtccgaaccgggcaaaggaggaggggaacctccaggaggtggtatgggtttcctttatgctctcctccgccgttggggttccatccccggttaaggccaccttggtcgttcatttaaccggctggaagtaatccgttgaattcccggccacccgaaggaccaacagggccataatttcaatggaaggcaacgggggaggagttagttgcttgaaggtgtggccaccaattggaaggaagaagttggggactttatttaacctccttgcccttagggacgtcgattgggttaaggaagtggattactttttccgaaacagggggatt

SEQ ID NO: 160922 - DNA, 361 bp, Arabidopsis thaliana columbia
cccggcccggaattccgggcccgccccacccgtccgaaaaaataaagaaggccaaaaacttgaagcttttcctaacagttggaatgggctcggaccatatggacctccaggcagttgaagttgttggcctgccggtggttgaagcaacggaaggcaccggggtctaaggggcagaggatgagctcatgaaaatcttaatcctaatgcccaactccttcccagggaccacccaggtcgcaaaaggcaagtggaccgtcggggcctttgctaccagagcttttgatcttgaagggaagacgatgggacccgggggagctggaaaaatcggaaggctttggctgcagcgtttgaaaccattcgg

SEQ ID NO: 160923 - DNA, 331 bp, Arabidopsis thaliana columbia
ccgggcccgccccacgcttccggaccagggatccaggtaatgacttggattgatagccaattccgaaccaccttggcctccgaagaaggagcctttaagtaaggcacctatgaacctcatggggggttcgatccgggctcaggaggacccctggcggcatgttaacaacaaccaagtcgttcggaatgggtggtatccaggggcgaccggttatttaccgcttatataacctgcccttggtaggggatcaacagttgtaaacgtttgcaataccccttatggcttatgactaaatgggggaatcccccctaggggggccttcttcttgttt

SEQ ID NO: 160924 - DNA, 415 bp, Arabidopsis thaliana columbia
ttcaacattaaagatgagaggggggggtttttggcagttggggcaatcaataccccgtcgtttggttcaatttgccaggagggtggggtaacgtcgttcctttgcctttgaggctgccctgaaaaggactgttttttccgacttccatgttgcccatgggggaaggatggttcctttggctggtgggggtttgccaattcagtccaaagattcgattttggcctcaccggttaactgcagggaaatggggagttggttggatgttgcccatttgtggggttggggccttaagggtaaggatggggttccttttttggggacacttgtggttgctgatgtggctggttgggctcctggacctggaagcttaactgggttaacaaacgagaaaggaggtgccattgttgactcgggg

SEQ ID NO: 160925 - DNA, 364 bp, Arabidopsis thaliana columbia
agaggatgaggcggggccaccaggaggaggatgaaccagtttcatttggccggaaaagaagaaggatgttgtggaaataatccgtggttgaccatttaatgtgcgaggtggaaggaaaccacttaaaacacgccgccttttttggccaagacggcagggtttgggttaaaagttaagttttccttaagtggaagcctgcaaggatggcaggattcaccaaagactttgaagaagccggcctttttgcccaaaccgggtttttctttggcggggggaagtccatggtggtccaaggggaggttggagccgctttccaggggaaaaggggccctgggggggtaattttaaagaggactcctaaggt

SEQ ID NO: 160926 - DNA, 435 bp, Arabidopsis thaliana columbia
  unsure (1)..(435): unsure at all n locations
cccggnccggaattccggggccgcgcccacccgtccgggttgtggaaaaaaatccctcggcctatgttttttttttggaaaccatgagaaatttcaaattcagggggtttaggcggcagtttaggcccattggaaggtttttcttaggttcgaccaaagggatgcaggtggttttgggtcgttctgcaaaaaatgaactccgttctggtttttccaaagtttccaagctgtttcggggggatcctggccttttggttcctgttttgccaaaggaggaagtcgaaggcttttttaacgctattgaggattccgccttttaagggcccggaggctttgcagtgaaaacggttgacctgaaggagggtcctttagaccagtcaacccatgaaatggaaccactttttcggaggttggaaatgcctgtccaactaacca

SEQ ID NO: 160927 - DNA, 471 bp, Arabidopsis thaliana columbia
aataccggggcggaccaaggcgtccgaactggccgggggggatatgccattgggttaagccgaaagggcagggacccgaaccttttaattggtgttatggtggggggccctgatgctaacaacaatttcgttgccgggggagataactatgagcagactgagccggttattaacaacaaggaacaattcctgggggttctggctggtttaagaaggggtaattccggttttggccagttttttccaggggttccggttcctgtggtccgaagaccaaggcctattcgaggaccgaaggggactactccagcccgggcttttgtgccaggggttttagttaaaaagataactagttaaggggtttaaaggggagggacttactacagatcctaaacaactgggataaacaaatcttttagacctttgaaaggtttaaacctttcgatcaagaatttttatggaccaatttgg

SEQ ID NO: 160928 - DNA, 335 bp, Arabidopsis thaliana columbia
aactaaagagggacttgggggccatggcagcttttttcaaatcaaccgttccattcctccagtgggggaaaatggcaacggttctttttgggggaggttttaacctccgatggattaaggccgtgggcaaatctttggggctggaaacttcttgggttggcttaactggctccttccagcttgattttaaggacttaaccggaaaatgctccgcccctgcaaaattggccggattggttctggcaacctttgcttttgcgtattgggaggcaggtgcggggggggctccaaggggatggccctatgttgggattcagggcaggacttccttggag

SEQ ID NO: 160929 - DNA, 384 bp, Arabidopsis thaliana columbia
aaacataaaaaacaagtggaagctttaaaacgtgagtgtagagagcaaaaatggcgacgtcgggaacgtacgtgacggaagttgcgctaaaaggatcggccgagaaatactacaagaggtggaagaacgagaaccatgtcttccctgatgctatcggccaccacatccaaaatgttaccgttcacgaaggcgaacatgactctcacgggtctatcaggagttggaactacacatgggatggaaaggaggaggtgttcaaggagagaagagagatagacgatgagaccaaaacgttgacgttaagaggacttgagggtcacgtgatggaacagcttaaagtgtacgacgtcgtctaccaattcattcccaaatctgaggatacct

SEQ ID NO: 160930 - DNA, 371 bp, Arabidopsis thaliana columbia
gacagtttgctgaatcccgcgtgggacagtcttaactctctatccgtgcccttgatctaatgggagattcattagaatgtgtggctaaatgggctctctcagctaaggaaaacatgggagaagaagatttcgggaagatgtcacaagatattggggaaatgtggttaaggcttgttcaaggactaagaaaagtgtgtttagaccagagggaggatgtccgaaaccacgctttacagtcattacagaagtgtttaggcggagtagacggaatcaacctagctcatagcatgtggtctcaatgctttgacaaagtaatcttcacggttttggatgacttacttgagatagctgctgggtcacagaaagactac

SEQ ID NO: 160931 - DNA, 363 bp, Arabidopsis thaliana columbia
cccacgcgtccggaccattttgttcatcgactttctcaactcttttacttatttctcagattagcgattcctaggggggttttttcattatgcgtgggtcacattatcttcttctgcaagatccttcatcaccacaaaacctcttccgattgattcatttattcctaaaccaatgctagagaatgcggctgcgtgtctttacacggtgatcattaacacaagctgttcctctgtgtcttacactatagataatatcagtatatctgttggtgatgtctacggcatcaacgtgtttttgaagagactatacaatccattggcgaggacgttcgaaaagttgtcattaaacacatacaagatatc

SEQ ID NO: 160932 - DNA, 368 bp, Arabidopsis thaliana columbia
gagccatagaagaataacagataaaactctttgtttgagtgagtgagactcaaccatggcgtgggtggctcagcaattctggggattgaaatgttccccactctcttcttcttctaggttatcgaggagagcttcgaagaactttccccagaacaaatctgcctctgtttctccgactattgtcgccgcggttgcaatgtctagcggtcaaacaaaggagcgtcttgagctgaagaagatgttcgaagatgcttatgaacgatgtagaacttctcctatggaaggtgttgctttcaccgtcgacgatttggctgctgctattgaacaatacgacttcaattccgaaatcgggactagggttaaaggaa

SEQ ID NO: 160933 - DNA, 396 bp, Arabidopsis thaliana columbia
ccggtcttgaatttccgggccggggccgagccacgcgtccgtcatagagggtgcctcagtctcatggatatattctcaatagcttttatcagtaccatcgtggctgcctatagtggggaacgcagctgaacatgcaggggctatcatgtttgccatgaaagacaagctggatctgtctttgggagtggctattgggtcctcgatccagatttccatgtttgcggtcccattctgcgtggtgattggatggatgatgggtcaacagatggaccttaacttccagctttttgagacggcgatgctgttcatcactgttatagtagtagcattttttcttcaggaagggtcagtggagtacttcaaaggattgatgctgattccttgttatttgatagt

SEQ ID NO: 160934 - DNA, 372 bp, Arabidopsis thaliana columbia
ctcggaattgtttttgcagaaagtctctcatttgaactcagaaaatctccgagttcgtatgggttctccgtttgagcgggggcgttggtcatgcacacatacaagggaaacaaaggtgccaataaggcacttattgctgcagagtatgcgggtgtgaagatcgaggagtccgcagactttcagatgggcgtcactaacaagtcacctgagttccttaagatgaaccctattggaaaggttcctgtgcttgagactcctgaaggtcccatatttgagagcaatgccattgcccgatatgtgagcccgaagaatggtgacaactctttgaatggatccctcctttattgaattcgctcacaattgagcaatgga

SEQ ID NO: 160935 - DNA, 359 bp, Arabidopsis thaliana columbia
accaaaaaaaagaaaacacaaaaacaaagattataatggcttcctcaaccatggctttgtcctcccctgccttcgccggaaaggctgtgaagcctgccgcatcagatgtcctcggaagcggccgtgtgaccatgaggaagactgtcgccaagccaaagggtccatcaggcagcccatggtacggatctgaccgagtcaagtacttgggtccattctccggcgagcccccgagctaccttaccggtgagttccccggtgactacggatgggacaccgctggtctatccgccgacccatagaccttcgccaggaaccgtgagctagaaattatccacagcagatgggccatgctcggagcc

SEQ ID NO: 160936 - DNA, 439 bp, Arabidopsis thaliana columbia
ctcgtgtcttactcgtgccagccactcgcatttctccagattttattatccttcctcgaaacaagagcttagctaagatgacgaagaactacccaaccgtgagcgaagattacaagaaggctgttgagaagtgcaggaggaagctcagaggtttgatcgctgagaagaactgtgcacccatcatggtccgactcgcatggcactctgctggaactttcgattgtcaatcaaggactggaggtccattcggaacaatgaggtttgacgctgagcaagctcatggagccaacagtggtatccacattgctcttaggttgttggaccccatcagggagcaatttcctaccatcttttttgctgattttcatcagcttgcttgtgttgtgggcggtgaagttactggtggccctgacatttctttcaccctggaagagaggac

SEQ ID NO: 160937 - DNA, 299 bp, Arabidopsis thaliana columbia
gcattaagtccaaacactttcatttggctcctttcttcaactccacagagatcttctcatgggtccaattgctgtcggcgagggcgtaccacacggaactatctccttcttccatgagaatgatcaacttcagaccgcctacgttcactctctcgccgccggtaaaaaagtcattctttttggagttcctggtgctttcactcccacttgcagcatgaagcatgttcctgggttcattgagaaagcagaggagctgaagtcaaagggcgttgacgagatcatttgctttagcgtgaacg

SEQ ID NO: 160938 - DNA, 298 bp, Arabidopsis thaliana columbia
gaataccgggccggcccacgcgttcggtcaccgacgacgaatctgccctctttttctttcaactagccagtgcttccgttcttgcgagggctttaaaatccgggtgagagcttgaccttcttgagattatggccaagaatggttctcccatgtctcctaccgagatcgcttctaaacttccgaccaaaaatcctttatctccggtcatgctctaccgtattctccgtcttcttacgtcttacttcgtcttaacctgctccaaaccgtaacttttcggtgatggcgttgtactgattta

SEQ ID NO: 160939 - DNA, 363 bp, Arabidopsis thaliana columbia
  unsure (1)..(363): unsure at all n locations
atcgtttaatgccggtccatggacttgtttgtgttaagaagtggctatgacacanatgaaggcagtgtctgtgagaagtatacaaaactatgagataaaggtcgttgaaggacacaagatcgagccagttccttctattattcttcacatgaagcatggtcttaaagttacagtcactaagagatctaatttgctctgaatattatgcattactattgtactacatttagtatgaaaataattattagaattttacaaaatacttgaataagaggggtaattgtttacaataaaattaatatggtgcggggggtggagaaataatttcttataatattaaatttttttaatataattacttat

SEQ ID NO: 160940 - DNA, 366 bp, Arabidopsis thaliana columbia
  unsure (1)..(366): unsure at all n locations
aaatcgnctaattctctctctatctctctctctatttttacttattatttcttaagttaagggaacatttattataaaggtagaaagccttctcnttttgtttaaaaatactgtttcaccgcattaattaatttaaaaattactgtcgattacgtggcattcacttaaaaagatacagctcattatacaaaaacgattcttcttcccccactcctagttaccttctgcgccttctccgtctaacaaactgattccttcgtgattaatccaccaccgcctcctactaattccatccttaattaaaacgcgcgtcgtgcggtgtccatctaccacctctcctttatccttatcccaatccattttttt

SEQ ID NO: 160941 - DNA, 340 bp, Arabidopsis thaliana columbia
  unsure (1)..(340): unsure at all n locations
ttcgcaacaagattgctggattctcctcttcacttgatgaaacgtatccagaanggaccgggcctttttatctgagtgaggcttcaataaaaatagcgtgaacgccttatggactttgttccctatgagtctgctatcaagactgatgagatcaaggtcgacaaagatactcttgagatgctcgcttctttaggaatgtctgacactatctgctttcttgcagtctatccatatcatgctattggcaccaatttctgctttcggctgtaggtctcccaaattattcttaatattccctgagggggggagtggggggctatatgcttacatattcttttat

SEQ ID NO: 160942 - DNA, 339 bp, Arabidopsis thaliana columbia
ctaaattcctcaatcttcagcttcccacttccatcctcaaaacttcttctcaccacgttaaccccagcctttcttccaaagagaaaactgggtttgtaacggacgatgattttaggcatctatggaagttggttgaggtcaaagatggcggtccttgttggattcaaatgatggaccgatcaaccccaaccttctcatatcaagcttggaggcgagatcctgagaatgggccttcccagtaccgtagcaaaactgtgtttgaggatgccactcccgagatggtcagggacttcttttgggatgatgaggggcgggccaagtttgatgatatgcttttgt

SEQ ID NO: 160943 - DNA, 397 bp, Arabidopsis thaliana columbia
gctgtttctaagaaaacaacaggtagttcggatcgtgttctacgcttgcaaaactcaaaacatggcgaggggtttgaagaagcatctgaagaggcttaatgcgcctaagcattggatgcttgacaaacttggtggtgcatttgccccaaagccgtcttctggaccacataagtcaagggagtgccttcccctcgtccttatcatcaggaacaggttgaagtatgctcttacctaccgtgaagtgatttcaatcttgatgcaaaggcatatccaagttgatgggaaagtcaggacggacaagacctaccctgctggtgtcatggatgtttgtgtctatccccaagaccaatgagaactttcgtcttctctatgataccaatggacgtttccgtctcac

SEQ ID NO: 160944 - DNA, 396 bp, Arabidopsis thaliana columbia
cacgaggagatctggtcaaaggtcttgttctattgaattgtgctggcggtatgaacaacaaagctgcatttgatgactggagaatcaagctactgatgcctgtactcttacttatcgacttattactcaagcaaagaggaattgcttctgcactcttcaaccgtgttaaagacagggaaaatctggagaacatcttgacaaatgtttacgggaacaaggacaatgtagatgacacccttgtagagatcattgctggaccagcaaataccgaaggtgcactagatgcttttgtttcaatcttaacgggtgctcctggaccaaatacgttttagctgataccggaaataaccaaaccggttcttgtcttatggggagatcaagatggactaacccctt

SEQ ID NO: 160945 - DNA, 300 bp, Arabidopsis thaliana columbia
ttgcaaaccataaccaaaccatcatcatcatcatcttttggtgacagaagaaaagagttgaggaacagagaaaatggcagcacaggcacttgtgtcttcttcacttacctcctctgttcagacagctagacagatatttggctcaaaaccagttgcgtctgcctcacagaagaagagttcctttgttgttaaagctgctgcaactccacctgtcaagcaaggagccaacagaccattgtggtttgcttcatcgcagagtctctcttacttggatggcagcttacctggtgactattgatt

SEQ ID NO: 160946 - DNA, 407 bp, Arabidopsis thaliana columbia
  unsure (1)..(407): unsure at all n locations
cgcaatttgcnntcattagagaacangagaaaaaaaaaacaatggcaactcaagccgccgggatctggaactccgccataacaaccggcgcaacctccggcgtcaagaaactccactttttctcaacaacccaccgtcccaaatccctctccttcaccaaaaccgcaatccgcgccgagaaaacagattcctccgccgccgctgctgcagcccccgccacgaaagaagctcccgtgggattcacgccaccgcagctagacccaaacacaccgtctccgatcttcgctggaagcaccggtggtcttctacgtaaagcgcaagtggaagagttctacgttatcacgtggaactcaccgaaagaacagatctttgagatgccgacaggaggagcagcgatcatgagagaa

SEQ ID NO: 160947 - DNA, 350 bp, Arabidopsis thaliana columbia
  unsure (1)..(350): unsure at all n locations
aaattttatcaatggcttcttcactcgnctcttcttttcacacccaggncagcatttttgggagatagttatgtgttcaaggtgtcaagcacaccttttgctcaagtgggttactccagtaagaccattgagtgcaaagaatcaaggataggaaagcaaccgatcgctgtacctttcaatgtaaccattgcattggaaggtcaagacttgaaagtgaagggtccattaggagagctggctttaacttacccacgcgaagttgagcttacaaaggaagaatccggtttcttaagggtcaaaaaaaccgtcggaactagaataaccaacattagacggaaaggagctggtgc

SEQ ID NO: 160948 - DNA, 279 bp, Arabidopsis thaliana columbia
  unsure (1)..(279): unsure at all n locations
tgaaaanccgggccggccgcgacgcgtacgacctaatacacctaaacatttacaaatttttttattacatgaagagttattattgctagctgggtttatttagccagggggttggtggctgttaaactcacctcgatccctaaaccggatggttcagttacggacgttgacctcaaagacttgaaccgtgactcatttgattacttggccaaagtctctgtcaccaatccttacagtcattctattccgatctgtgagatcattttcactttccacaat

SEQ ID NO: 160949 - DNA, 285 bp, Arabidopsis thaliana columbia
ttcatctccaacaagaagacttctgatttcttttgatccgatgagggtactcacttcactggacatgttaaagagcggtgagatcattggctttcatgggtctgccgggggcaatcttaattctcttggggcttactttgctccgttgactactacaactcctttgactcctgccaagcagctaacggcatttggtagtgatgactgaactgcatgggatgatggtgcttaacgttggggttaagaaggtgttcgttggacatgcccatgatgtaatttcatctg

SEQ ID NO: 160950 - DNA, 293 bp, Arabidopsis thaliana columbia
  unsure (1)..(293): unsure at all n locations
tgaattcccgggccggcccgacgcttcctataagattggattgagaatttcttgtttttcttctagtattccatcatacantattgcaggggttttaaagaggaggggttggaatcttcttcttcttgtngctctttctctacctactgtctacatgcttgtcccttactctacctttttttttcctcctgtaaccttatgtgtttgttggtgtacttcatccatttattcccttttaatccatttatttacaactgaatttctttatacttatttttcctattacccaacct

SEQ ID NO: 160951 - DNA, 412 bp, Arabidopsis thaliana columbia
aaacttgaagaagaaaaaaaatctttttaattagctttgaagatccatggcgatgtctcaggtccagcctatgctacggcggggcggatcactcttcttcttaccggctttgcgtggcgccatagatttcgaatactgcgccaaaaatggaaacgattacggaaccgtcactagcattgtggtctctccatctgttgggccttacgaaaacccaaccatcactataaatttattcggttctgcaagcaaaaacatccccgcgggaacccttgtgtacgtagcctttatagattgggaatttaccgggcgtgtgagaacttacaacctttgtgatgtgagtgcatgtaacaatgaagctgtgattgaagctggcaccaactttgagttaactttttccgacgttctttatgtt

SEQ ID NO: 160952 - DNA, 388 bp, Arabidopsis thaliana columbia
aaagaatgcccaggtgtagacatggatacttccattttgtgaacaatgactacacacattgggagatgtatgcgattggtggaagtgctaatcctacaatcaatagtcaagggaacagatttttggcacccaatatcagatttagcaaagaagtgactaagcatgaggacgcgcctgagagcgagtggaagagatggaattggagatcttccggagatttgttgctaaacggtgcgttttttactccgtctggtggtgcagcctcgtctagctatgcaaaggcttcgagccttgtggctaaaccgggttgtgtaagttggaccattgacgtctacttttggtgcactgaatttgccgtaaagtttcccgttgcttattgtggcttaat

SEQ ID NO: 160953 - DNA, 296 bp, Arabidopsis thaliana columbia
gaagaacaatggcttcctctatgctctcttcttctactatggttgcctctccggctcatgcgcactgtggtcgctcctgtggagcggacttaagtcctccgctgccttcccagccacccgcaaggctaacaacgacattacttccatcacaagcaacggcggaagagttaactgcatgcaggtgtggcctccgattggaaagaagaagtttgagactctctcttaccttcctgaccttaccgattccgaattggctaatgaagttgactaccttatccgcaacaagtggattcctt

SEQ ID NO: 160954 - DNA, 362 bp, Arabidopsis thaliana columbia
tacttttttataatcgcttaaacaaatttcaatagttcttgtaagcgcaacgtgtaagtagagacatacacacatgttgagtgttttgttttgtataataacatcatcgcatatagagaaaagaagttaagacgaccgtttttatcgttttgaaaaccgggtcggttaaaaaaaaaccggtttctttaaccgagtcggcgcgcatggagctatgcaatcaaaacaatcacatcaccgccgtcttgggcgatccgttgaactggaacgcgacggccgaatcttttaaagggagccacctggatgaggtgaaacatatggtgaaagagtattggaaagaggcggtgaagttaggaggtgagact

SEQ ID NO: 160955 - DNA, 401 bp, Arabidopsis thaliana columbia
caaaaaacagagcaatctctaaaaaatctcatgaaacctcactaaaatgggttcaacggcagagacacaattaactccggtgcgagtcaccgacgacgaagctgccctcttcgccatgcaactagccagtgcttccgttcttccgatggctttaaaatccgccttagagcttgaccttcttgagattatggccaagaatggttctcccatgtctcctaccgagatcgcttctaaacttccgaccaaaaatcctgaagctccggtcatgctcgaccgtatcctccgtcttcttacgtcttactccgtgttaacctgctccaaccgtaaactttccggtgatggcgttgaacggatttacgggcttggtccggtttgcaagtatttgaccaagaacgaagatg

SEQ ID NO: 160956 - DNA, 369 bp, Arabidopsis thaliana columbia
ctttgattcaaccatggctaatgcagcatcttgaattgcagtccatgatgactgcaagctgaaagtgatggaattgaagacgagaaaggacacaccgtttcatcatttacaagattgaggagctgcagaaacaagtgattgttgagaaaatcggtgaaccgggtcaaacccatgaggaccttgctgcaagtcttccagctgatgaatgccgctatgccattttcgattttgattttgtcagttctgagggtgtcccaaggagcatgatttttttcgtggcatggtcttcggtcactgcaagagtgagtggtaggaggatctattctagcttcaatgacatgtttcatgagagaacttatctgattttat

SEQ ID NO: 160957 - DNA, 327 bp, Arabidopsis thaliana columbia
  unsure (1)..(327): unsure at all n locations
tctgcgcctgagttgtctaatgcttttctttttatccttaccaaactctcttcgtaggaggcaacacagtcgcggacgggtacactaatgtctcttgtttgggtgctgagataatctgaaccttcttccttgtctacacagtcttctccgtcactgactccaagagaaacgctcgtgactcccacatttcgatttttgcaccactcccaatcggattctctgtgttctttgatcactttgctacgattccaattaccgtaacagtaatttacccaactttgattctnttatcttggaggtggggggggggaggaccatctcttttta

SEQ ID NO: 160958 - DNA, 419 bp, Arabidopsis thaliana columbia
tacgacggtaactatgggtaccgtgagcagttcacttttacatttggtgctgagatctacggggggaaaccagcccagcgaagggagaaagtcacattcatatcaaaccctccagacaatgttttcacttggaagatacttcatttctctaccttggaagataaagtctatcagtctaacgagtttcttgttggagaccgatactggaaattaggattaaacccgaaaggaggcttagtcccaatctttctatatgctcaaggctttaaggcaaacgcagttgttcaaccacttatgcagggactgaggtgcggttaagaaataacgaatcagcaaccacgttacaacatatactgcatattggtacctgattccaagcggattatgtttgggagtgtacactattccgttttattttt

SEQ ID NO: 160959 - DNA, 254 bp, Arabidopsis thaliana columbia
tcgaaaaaaatctttctggtgagtaacgaaaaaattgtgttcggtggagaacaaatggttaaaggggggtcaaaaaggagcgggtggtggggctagaatctcacatgccatgaccgtcgttgggaacaaagtttactgttttggtggtgagcttaagccaacgatccatattgattacgatctttacgttttcgatcttgagactcaagaatggtcgatagctcctgcgaccggagaggctccttttccctgtt

SEQ ID NO: 160960 - DNA, 298 bp, Arabidopsis thaliana columbia
ctttctttctctcctctctatctttctctttttctcatgggtcttccaacagatttcaaagagcttgatattccaggggacgtgctaaaaacactttacgtcatcggtttctttagagacatggtcgatgctctttgtccttacataggtctaccaagttttcttgaccacaactagacctttcgatccgacccgacccgacttgcttcttccacgtcagcaactcttgccaacgagttaatcccggtggttcgtttctccgatcttctaaccgatccggaagattgcttgacggttt

SEQ ID NO: 160961 - DNA, 332 bp, Arabidopsis thaliana columbia
tcgacgaaacacaaaagatgcagatcttctttaatactcttgaccggcaagaccatcactctcgaggtctttagcagcgacaggatggacaatttcaaggccaagatccaagacaaagaaggaatccctccggatcagcagagattgatcttcgccggaaagcagctcgaagatggccgtactttgtctgactacaacatccagaaagaatctacacttcatcttgtgttgaggcttagaggaggtattattgagcctttcttgatgatgcttgctcgtaagtacaatcatgattatattatttgccgcaagtgcgatgctcgttttcaccc

SEQ ID NO: 160962 - DNA, 254 bp, Arabidopsis thaliana columbia
  unsure (1)..(254): unsure at all n locations
atttctaaagataatctcanaaagatttatttattatagaccaaaaatatatctcaagagatggcttttacctcggcggggtcagttatcacaccacttaaccagacccttttatctcctttccttattccattacctctgaaaccatccaattctttggttgcaactgtaagcatatctcaattgctttatgttatagcccccaatattgtcataaccttttaccattcacttctcaactgatcttacttttt

SEQ ID NO: 160963 - DNA, 459 bp, Arabidopsis thaliana columbia
aacaaatctctctcaccaagaagatgtacatttttgaagcaactctattcctctgcttctgtgggcatcttctcatgtgggaaggtgcatttcgccggagctaaacaaaccgccggcaacatcacgccatcggagaatccattcacaccaaaagcttctttgattcgttattggaacaatcacatcaatggcgattcaccaaaaccttcttttttcctctcaaaggcctctcctctaaccgccgtggactccacgcgtttcgcctcactcgcttctaatcacgcgcttaacacgcatcactctgatgtgtgctccgccgcgaaactcttttgctttcctgagctcgccgctcattccctggaaaaacaccgcgatgacgttaacttcgccgcttacagcggcaagaactttacaaactaccgctccgaccgtctttccggagcagactcattcaaaaac

SEQ ID NO: 160964 - DNA, 359 bp, Arabidopsis thaliana columbia
  unsure (1)..(359): unsure at all n locations
ctaatcggcaaaattttctgctcctgagaattttgtttagatactaaagatggaatctttgggctgaattctaaacctgggagggggtacctantctttttcggatccagaatcgagctcaaacggttggagccgtgctcgtggtctatttgtcaagactctggttttaattggcggtgctcttttcatcaagcgtctcactaaatccaccactcgtagagatcacgcccgtgtcgtctctcgttctctcaccggagagaagtttacgagggagcaagcgtcaagagatcctgataattacttcaacataagaatgctgatttttccagctgcttaaatggtggatggttcataagttt

SEQ ID NO: 160965 - DNA, 374 bp, Arabidopsis thaliana columbia
caacaaccaaacactcatttctccacatctttagattaaaaaacagagcaagtatattagagatcggatggcgatggcggtctgcggagctgtcctcagtgggcttggttcttcgttcctcaccggaggcaagagaggtgccaccgcattggcaagcggcgtaggcactggagctcagagagttggcaggaaaactcttattgtcgctgctgcggctgctcagcctaagaaatcttggatccctgccgttaaaggtggtggcaacttccttgaccctgaatggctcgatggctcgctaccaggagatttcgggttcgacccattgggtttggggaaagacccggcttttctgaaatggtacaaagaggctgagc

SEQ ID NO: 160966 - DNA, 347 bp, Arabidopsis thaliana columbia
  unsure (1)..(347): unsure at all n locations
cggtntgttcccttgtgatccatggctatctccacttctcatattctctatcaaatcctctcaacctcccgcggcattgttatccgtctcgcagttagtgttctatcttcnnattcaagggannaatgtaagtgttttggggggccaaacccaagtcnagattctattctctgaaactcaaccaatacccttaaaacgagaaaccaacagcaatttgcgagaccccttgttgtggttagccaaacggcggctacgtcgtcggcagttgtagcttcggagagattccgtttggataatcttggaccacagccaggttctatgaagaagcaggagagaaaaggttgagg

SEQ ID NO: 160967 - DNA, 402 bp, Arabidopsis thaliana columbia
ttcgaggttggttcagacggaagcgtttatttcaaggaagaagatggtatcgattacgcaggagtcacagtccaggtggcgggaggagaactcgtgccgttcctcttcacggttaagcagctcgaggcttcagggaaacccgaaagcttcagtggcaagttcttagttccaatcgtaccgtggctcgtcctttttggacccaaagggtcgtggtggatccactgggtacgataatgcagtggctttgcctgccggaggcagaggagacgaggaagagctatccaatgaaaacgtcaagaacacggcgggttgcggcggagagatcactttgaagatcacaaagagcataccggatacaggtgaaatgatcgtagtgttcgagagtctttaatcatcggatac

SEQ ID NO: 160968 - DNA, 345 bp, Arabidopsis thaliana columbia
  unsure (1)..(345): unsure at all n locations
gcaaaaacggttcgtttgtagtcacattctttagtagtacgaacatttgccatanaaggtgggtcaaaggtcccggaggcggaaccaactaggttttcgcaactctccctggttccccggacaatatccggcgtacgccaacaggcgatttctgggtcgcattacattgcaaaaagaatttgttcacacgtgcagttttgattcacacttgtgtcggaaggtttttcatgaacacgattaagatggagactgtaattcatttcatgaacggaggaaaacctcatggaattntctttaaactttctggagagacgggataaattcttgtgatactttatgacagtg

SEQ ID NO: 160969 - DNA, 419 bp, Arabidopsis thaliana columbia
  unsure (1)..(419): unsure at all n locations
aacgaatctatctctggtttgatccttttattgcttatcacacttactcaatcctttggggcatgtaccagatcggatggtttgttgacaacataccaatccgaacgttcaagaatgctaaggatctaggagtacgtttcccattcaaccaaccaatgaagctttactcaagcctttggaacgcggatgattgggccacgagaggcggtttagagaagaccaattgggccaatgcacctttcgttgcatcttacaaaggattccacatagatggttgccaagcttctgtggaagccaagtactgtgccacacaaggccncatgtggtgggatcagaaagagttccgtgaccttgacgctgaacaatggcgtcgtctcaaatgggttcgtatgaagtggaccatctacaaactctgtacc

SEQ ID NO: 160970 - DNA, 281 bp, Arabidopsis thaliana columbia
cgcgtcctaaacgagcaaaagaagaagagaaacttctatgttttagtaatggcttcctctatactggcctggctcgctgtggtggcaggcccggctcatgccaccatggtcgctccattcaccggcttgaagtcatccgctgcattcccggtcacccgcaagaccaacaaggacatcacttccatcgcaagcaacgggggaagagttagctgcatgaaggtgttgccaccaactggaaagaagaagtttgagactctatcttaccttcctgaccttagtga

SEQ ID NO: 160971 - DNA, 327 bp, Arabidopsis thaliana columbia
aaagaatcaagaaagccaaaaacttgttgcttttcctcacagctggtattggctcggatcatattgatctccaggcaggtgcagctgctggcctgacggttgctgaagtcacgggaagcaacgtggtctcagtggcagaagatgagctcatgagaatcttaatcctcatgcgcaacttcgtaccagggtacaaccaggtcgtcaaaggcgagtggaacgtcgcgggcattgcgtacagagcttatgatcttgaagggaagacgataggaaccgtgggagctggaagaaatcgaaagcttgtgctggagcggttgaaaccattcgggt

SEQ ID NO: 160972 - DNA, 372 bp, Arabidopsis thaliana columbia
  unsure (1)..(372): unsure at all n locations
ctcaacatttaagatgagaggtgggagtctatggcatctagggcaatcaataacccgtcgtgttgctcaatctgacaagaaggttgtgtcacgtctctactttgcctctgaagctgacctgaaaaagactgctctttacgacttccatgttgcccatggaggaaagatggttccttttgctggttggagtatgccaattcagtacaaagattcgattatggactcaacggttaactgcagggaaaatgggagtttgtttgatgttgcacatatgtgtggtttgagccttaanggtaaagattgtgttccttttttttgagacactttggggttgctgatgtggcttggtttggcttcctggaacttgggagc

SEQ ID NO: 160973 - DNA, 345 bp, Arabidopsis thaliana columbia
agaagaagaagcagagacaacaagaagaagattaatctgtctcatctcgccggagaagaagaaaggtgtcgtggcaatcatacggggatgaccatctcatgtgcgaggtcgaaggcaaccacctcacacacgccgtcatcttcggccaagacggcagtgtctgggctcagagctcaactttccctcagttgaagcctgcagagatagcaggaatcaacaaagactttgaagaagccggacatcttgccccaaccgggcttattcttggcggtgagaagtacatggttgtccaatgtgaggcttgagccggcatgcgggggaaaaaaggacctggtggagtcacta

SEQ ID NO: 160974 - DNA, 329 bp, Arabidopsis thaliana columbia
cacgcgtccgggctgttgaaaaatattcctctgtctatgttttctcttttgaaaacatgagaaatatcaaggtcaaggtgtttaggcggcagtgtaggcacaatggaaagttcttcctaggttcgaacaaagtgatgcaggttgctcttggtcgttctgcagaagatgaactccgttctggtatctacaaagtctccaagctgcttcgtggtgatactggacttcttgttactgatatgccaaaggaagaagtcgaaagcttatttaacgcttatgaggattccgacttttcaaggaccggaagcattgcagtagaaacggttgaactg

SEQ ID NO: 160975 - DNA, 297 bp, Arabidopsis thaliana columbia
  unsure (1)..(297): unsure at all n locations
gttgatttcttgaagaatcctgataagtattctgcgttaggtgctaagattcctaaaggttgtttgttggttggtccaccgggtacggggaagacgcttttggctagagctgtggctggagaagctggagtgccgttcttttcgtgtgctgcttcggagtttgttgagctttttgttggtgtgggtgcttctagagttagggatttatttgagaaggcgaaatcgaaagctccttgtattgtgtttattgatgagattgatgctgttggtagacaaagaggatctctnatgggtggt

SEQ ID NO: 160976 - DNA, 292 bp, Arabidopsis thaliana columbia
cacctgccgaggtggatatgccactttgttcatccgtaaaggcagtgacccgaaccttctcactggtgctattgtcgggggccctgatgcttacgacaatttcgctgacaggagagataactatgagcagactgagcctgctacttacaacaatgcaccactccttggtgttcttgctcgtctcagcagtggtcattccggttatagccagtttcttccagtggttcctgctcctgttgtccgaagaccaatgcctattcgtagaccgaaagtgactactccagtccgagct

SEQ ID NO: 160977 - DNA, 256 bp, Arabidopsis thaliana columbia
aactcaatatagactttgttgccatattttttctctctccaatccaccgctacattccgccagtcttttattatcggcgagcgctccttttctcataatttctcaccttccatcgactcaagccgttttcaaatcttttggtctctaaacttcctctgctcgccttacttgcttcttccattcttaccttaaggtctttaccgttaaatgctcccactctgtcaaaatcgccgtattcgcttttgccacctcttct

SEQ ID NO: 160978 - DNA, 340 bp, Arabidopsis thaliana columbia
tctggggggacctaaaggaagctttcttgtggcccaagcttggcgtccttaatgagggtgtttttggcggaccaggctggccttttttttccggttggcttccacaaagacgtccaattccatgggggggttggccgcggaaggatcaacgccagaaatggaaaacttttttttttttggttgaacaaatcctttgaacccggttttaagtctaaccagaagtttttttttggcaaagccgaggttaaaatgaaactggtccctggtatataagctggaacagggccaccattttttttaaaatttccgggaactacgggggatgagatcgatttcaagt

SEQ ID NO: 160979 - DNA, 376 bp, Arabidopsis thaliana columbia
accaacgcttccgtacacgcaaactcaatactcccttctttgtttttgagaaagccaacctcccaacaggacagagctttaaaacctttcaattgtttccaaccaaacgccttaaaaccctccttttggggaatataactaatctcctcaaccaaaaactccggttgtgggaactccaccataaccaattgttaatccagccccacccataattgaagaaagccaaccaactcctataattaaccaagccactcctgaaactcctttaattcctgctcctttccaaccaataactgaaccatgcaattcctgaaaaaaccaccctacattaatttgggccttgcttgaatggtgggaaactgttgaagaagctttt

SEQ ID NO: 160980 - DNA, 372 bp, Arabidopsis thaliana columbia
  unsure (1)..(372): unsure at all n locations
ttttcccaaatttctttcccttgtaatatccccccctagggaaccaacaagacagaagggatacttccttggagggagccttnaccaccaatccattgccaccaccaaactttctgaattaataatctaagaaagttgggggaaaaccctactattacttttttgtgttaccaaaaccggctgttgaaaccaaaggtggaaagcttaacctattcacagcacccgtaaatgaaggaaagctttacatctgcaaagcacaacctgaaaacaaaaggtggttcaaggaacccagaaaatttgtcaaaagcccacccccttttttaatggttgcttaattaaaaacaccacaccgtaccattgctctgcttgctt

SEQ ID NO: 160981 - DNA, 431 bp, Arabidopsis thaliana columbia
cgggctaaatttggaggcctttcctcaaggttttttttcaccccaaagtttcataacccatgcatgtttttttgccaaaagggtggggctaaatcccttggggtccctccaggcccgtccggcaccaaacaagggtgtccttgttccaccacctggaaaactcaccagggtggcccaaaatgtccataaccaaaaccattgaaagagaaaccccaaccggttcccaatttaattaaataatttccagattgctttggtggccggaagggttaaatattagggttttggcaggtttaattattaatcgttaaccatttccatataaaacctccaatgttccttcaacgtttggttcctttggtggtagccattccacgaaaggtgtatggcccttttaattaggattttttaaaaatttatttaataattag

SEQ ID NO: 160982 - DNA, 422 bp, Arabidopsis thaliana columbia
cgtttttaattttttccaaattcttaaacctatcttgttaaacccccggcaacttttttttaagaaaggcaattcttcgggaagccgctccctgccaaacctttcactctcaaggttaaaagctctaccaccatcaccattgttaaggcaaaatttcaggccagggaaggctttcctccgaaccaccaaaaattaattttccccggtaaccacctaaaaaatggccgtcccttgcccatttccaccattaaaaaaaaataaaccctcaatttggtcctccgtttaaaagggggtttccaaatctttgccaaaactttacctggcaaaaccattactttgaaggttaaaagctctaccacttttgccaccgtcaaagcaaagttccaggccagggaaggattccctccgaatcagcaaaaact

SEQ ID NO: 160983 - DNA, 352 bp, Arabidopsis thaliana columbia
gcccaacccttccgaatttcccttcctggtgcttcattttcctgtgatttcaatgggaccaagggtccttcaaagaggggtagaagaatttttcgggaacctctttaaaaggaacctcaattccaaataagccccacctccggttttgcaatggttgcctccaaaaaaagcaaataaaaatcctgggcctgctggttaaaaaccatttgctctaatggttcctggttttcccgaatttttaagttttcttactgttgcatctgctaataaggctaaccatggcctgaagtgtcctaactccccttggccacataaggccttcctaagttaatataaccatccttcaacccgt

SEQ ID NO: 160984 - DNA, 421 bp, Arabidopsis thaliana columbia
  unsure (1)..(421): unsure at all n locations
ggttttcttttaaatnnatttaattcatcttttggtgtccgggggaccccacgaaaccacaaacgaactcctccaaggcaaagaggacggacccccaatttccaaagctattgaaaaaggccttgggaccagccttccattttctccaaggaaaaggcctttgcctaatccccatctggttagcaacaacaatttcaaccgccacttgtccttttggtacccccttctttaaaaataccggctttcctttgtttcctaaccaatccactccaatagttgctaacggtattggctaatcgttggccaccgttaaaaaccctccctccgtttccaagccttaataacggccattggtccatttaatttccccttttttggggggaaaagaaagaaaaaagtttaaagaacaaaaccaagtgga

SEQ ID NO: 160985 - DNA, 377 bp, Arabidopsis thaliana columbia
gcccaagccttcctacataccctatttagccgtaattggccgtttctttttccgttgttgaagttgttttttggtgggggttcctcggttggtggcgggtttccatcccggttaaggtcggttaacagccgttttcgttttcgaaaaaaaaaaggcacttcccaaaaaaagtgccaaaaagacggtgactccggcccggcctttttgttcccaaggccccttttttcctaactggcttaatggttccttggttgaaaattacggttttaatcccttcggtttaggcaaaccggccaagttttttaaattcattttcaattaactaaaccagattctggctaaaaacttggccgaagacttgttcggaacccgtccgg

SEQ ID NO: 160986 - DNA, 345 bp, Arabidopsis thaliana columbia
cccgacctgtccgcctttattccatttcccaaggccaattgcttgattaattaatcatatcccattatttttttgttacccaacctgccctaccaagttcaaaacccttttttaccccgtccccaaaaccacctaaaaccacaattgttcctcaccatgaatgaacccaccccaattgctaaaaatattgtcctcaacctgctaccctatggccgtaaaatcccaacccctaaactctttgctagaaccaatcctgttaatcccaccccggtaaaacttgttcccaacaaattattcttttccaaagacatttcaatctaaccttttggcccaacccaaatttcc

SEQ ID NO: 160987 - DNA, 375 bp, Arabidopsis thaliana columbia
tttccaagctgcctatcctttaggacgttttcccatttaaatcggaaaggaggccaattccatggcttttttaaaggaaacaacttttacgggtccttaatttcaaacccatcttaaagctgaaaagatttccaccctgttgcccttcaaggaccagggaggccggaacccgcgtttttccaccggttttcgggcccagccagttccagcccccccgccggcaaacaaagcttcgccggaccaaaaaaaaactgaaagaaaaggccctgcagggaccactggaccttcgcctggtttaggtttagctccggccaaagctttagcagccccagggaaatggcttgtgaccatggcttgcaggaccttcttaaaggc

SEQ ID NO: 160988 - DNA, 346 bp, Arabidopsis thaliana columbia
cgaaccacctccaataagaactttttaaactagccagggagcccccaataaccccaccggcccgtttccagcttccaaaacctaacctggcccctatgtgggtaaacaccacctccttcaactttgtctgggctcaaaacaatatcctggcagctccggtgggggctaagccgtgggtcaaaaaggcttaaaaacctaataaaaccgtcctcaacataataccggttaggaaacctaattccccaatgcaggctgggtcctaattgcatccttggcctccagcattaattgaggccaaggctttgcttaattccaatgggttatcgaaaggtaaagtccccgtttt

SEQ ID NO: 160989 - DNA, 318 bp, Arabidopsis thaliana columbia
ccttatttttaaaggaatgacctttaacctcccacatgtattcaaaaatcctccttctaatcctggttttaaccatgttgaagaaaatatgttggtaagtttccctaaaggtaatcccatatccataaagggattttgccataactgaagtgccaaccattgcttaaaattcttgaaaaactgctccaagccacttccaaaggttggaaaagtgtttttaccaaagtgtttccttccaaaaccaccaaactaaagcctttaaaccaaccaagtagcccatgtcaattgcattatgttgcctaacaatcccgaaggcaa

SEQ ID NO: 160990 - DNA, 387 bp, Arabidopsis thaliana columbia
  unsure (1)..(387): unsure at all n locations
caagaaaaccagaaacgagaagaggttttcctccgccgaggttttcctctccntacccccctcctccgaattttttgccgaaccttaaaaacccaccaaaaaccaacctttatcccctccgcttaaccccttcctaaaaccctaatccagttccaccctttcccctaacctctttttctttgccgtgttacctgccgccggcttcaacctaccgtcccaaaaaaattccttcaagccttcgttaaccctaccattacccgccgagaaccccatttccttaaccggaaaaaacctatccaaaaaaagaaaagacctacacccccccaaaaaaacgccccttaataactgtttgaaaacttttattaaacccctgaccaacctccataa

SEQ ID NO: 160991 - DNA, 304 bp, Arabidopsis thaliana columbia
ttgttcctaactaaacctaattataccaaagaaggaaccacttttcctccaaaagaaagccttttccaagtgaaatatcccattaaacctatcaaccttggtcctactgcattggaagtaaaaccaaaaaaagaagttgtcctaccttccaaaaaccgtttaacttccccattgctgaacccaaccagggggaaaaaaatttcgaaaattgttacccattttgttggtcctataaccgttttaattcctgacccccccccactttttaacaacctaaagtaaaactcaaaccctaaattctttt

SEQ ID NO: 160992 - DNA, 408 bp, Arabidopsis thaliana columbia
cctacccctataatacctccataagaaaattttaaagttcttgaagccaccaaaacctctccacctcctgtccaaggcctgccattttttcaccccttaaaacccaaggaaaatgaacctttggttccaaattttaactccatcggtcaataaccaaatctattattggtaccttcaccacccctatttttgttcccgggaaaattcgaccttcccccttcacccattagaaaggcaacagctgtccttagtttgaagccccttacctcagtcttccaaacggttaacccgcccggttcaacccttgcgaccactttgccttgtgccaccgtggtccttttaatcggtgtagaagtttcccttgcccttaaaaccattgttcctttttgaagtccctaaacctttttt

SEQ ID NO: 160993 - DNA, 305 bp, Arabidopsis thaliana columbia
ccaatcccctttgggttaatcaccccaacaaccataattttcctcctaatccaaccttaacttttcgttctcaaaacctgtcaaaacaatctgtaaagctaaccagcctaataaaaacaataactccgccttttcccgccgttttgttttaactttcctggtaggccccgttgttgttgtttccaaagattttcctgctaatcccgcctacggtaaacctgcaaacttgtttggaaagccaaaaacaaacacaaactttttgccatccaatgaaaatggttccaaagtccagtttccaccaaatt

SEQ ID NO: 160994 - DNA, 311 bp, Arabidopsis thaliana columbia
  unsure (1)..(311): unsure at all n locations
ctaaanccctcccctcccttcccagccacccccaaggctaccaccacctttccttccatcccaaccaccgccggaaaatttttctccatccagttttgccctccaattgaaaaaaaaaagtttaaaactctctcttaccttcctacccttcccatttccaaatggcctaagaaagttacctcccttatccccaccaagagaatcccttgtagtaaatccaagttgaaccacgattttgtttccctgtaccactttaccccacctgattcctataatgaccgttcctgaccattttgaaaccttcccttttt

SEQ ID NO: 160995 - DNA, 351 bp, Arabidopsis thaliana columbia
tggaaaaatccaagaaatgtaacgacattcttattcttggtgtcgggcctttgaaaaatgaacctcggtaggctgccaagcctccaccgcaggtaaaaaaaacccacaaaatggggtggtttttgaagaaagagggttcaatccatggcctcttcctggggttttgaaaccaccacctttattaggggccggttttttattaatcggtttggccgaccgattaatttttagttctggaaccgcaatgattctccggctgggctgggctgggtattttgttggatccgtggtttcatggtttttatttcggtggtattaaggtccagccatggtaagtcttttttttgtttt

SEQ ID NO: 160996 - DNA, 390 bp, Arabidopsis thaliana columbia
  unsure (1)..(390): unsure at all n locations
aaataaattcttattcccatccttttaaaggccngccaaaacctccctaaaagaagcctctttttattcagaacaatcnccncctttccagcaaatccaaatgaccctttttgcccgccgccaaccaaactaacccggccaagttcccctaaaggttttttatttgccccggttcctgcggattaccaggtcgaaggtccaattataaaaccttgccgggacccacccttatggaccatctactgtaaagaatttccaaaaaggtccattacctttaccgccattgtggccgttattttcttccatcgttataagagaaatttccacctaatgataattctaacaacaaccccctttaaattgcttttccaatgaccaatatttttccct

SEQ ID NO: 160997 - DNA, 414 bp, Arabidopsis thaliana columbia
  unsure (1)..(414): unsure at all n locations
ccttaaccttttttttttaaggcgggccnccgnaccacaaaagaaattgttattacaataagaaagaccattaatcaacccacaattttgtttttgaaaaaaataaaacatttaaatttccaaaattaggtttgaaatctaaaagcaatcctaaaactaataaaaggcctccttaagcctaaataccaaaattgtttttgaaaaaaccaaacggttttccaaaacttaaaccatgaaaaattaaccactaattaagaaaagttaataatttaagggtcaaaaaaaaaacctaaaatttaaaaataatatgttaagagccttaatatgttaaggaccactaaccatataatttaaaaaaattgaattccctcttaaaaactaaaattaaaaccttaactaaaaattgtccaattt

SEQ ID NO: 160998 - DNA, 381 bp, Arabidopsis thaliana columbia
gtccgaagatctcctattctctttcactttaacattgggttttccctttaaggttcctctcaaacgagagataacctttccggcttggggattcctccccccccttcctaatttttttccacggtggcctaaaggggggccttgaatcgacctgatccaaaaaacctccgttcaaatttcctcggccagatgggttccaaaaaccggggccaggtaaaacccagttcctgtaaaacctaattacctggaaaaatgccggggaacggcccttttgcttccgccaagtggaccatccaaggaaaaaccctcaagttttcaaacccatttaaccaccatgttgaaaaaaaagtaggcaattctgtccaaaaccccagccatctt

SEQ ID NO: 160999 - DNA, 432 bp, Arabidopsis thaliana columbia
caggcgtccgttttcttaagttaactaattaatttccaattttattgttcaaaaagggaaaccagggggggggaggggagtaccttattgggaggagggttccccccatgcctttagaaaggtccttttaggccaaggccaaaatggtgtgtcttttttaaacgccggttttccaaaggactctaaggttgttgaaggaggtgaccccggaaggaaaccgttccttgattttaaaccgtttaaggttgttccaaccaactccttattaccattgcaggtgacctacaacaccgtgtttggccaaaactttgacatattaacattttttaccttcattccattcaagggaaaaccatttcccccctttggtttggaaacccaaaaaaagtttgtcctcaaggccaaaaacgggggtaaacttgttgccttcca

SEQ ID NO: 161000 - DNA, 401 bp, Arabidopsis thaliana columbia
caatactcctgtgagaacaaaatgaagctttcttgtggtacaagctttgcgttcttacttctgtttcttcttgcggcacaatctgtgcatgtctatgcgggtagcttccacaaagacgttcagatacattggggtgatggccgcggaaagattcacgacagagatggaaaacttctttctctctcgctcgacaaatcctctggatccggttttcagtctaaccaggagtttctctatggcaaagccgaggttcaaatgaaacttgttcctggtaattcagctggaacagtgacaacattctatctaaaatctccgggaactacgtgggatgagatcgatttcgagttcttgggaaacataagtggtcatccatatactctccatactaatgtttacacaaa

SEQ ID NO: 161001 - DNA, 437 bp, Arabidopsis thaliana columbia
cacacgccaactccacacacccctccttgtttctgtggaagtccaccttcccacccttccacgccttcacacccttccactccttcgcacccaacgccatcacaccctccttctggtggatattactcatctcctccaccaagaactccggttgttgtgactccaccatcacccattgttgatccaggcacacccatcattggaggaagcccaccaactcctatcattgacccaggcactcctggaactcctttcattcctgctcctttcccaccaatcactggaacatgcgattactggagaaaccaccctacattgatatggggcttgcttggatggtggggaactgttggaggagcttttggtacaagcagtattcccagtagcattccagggtttgatcctcacatgaaccttcttcaggcactttccaacac

SEQ ID NO: 161002 - DNA, 456 bp, Arabidopsis thaliana columbia
attacggttctcccgaagagttcctctctctttttttttacctcctagggaaacaagcttggttcggtgagactgcctctgagggaggctttgacaacaatgcagtggcaacagcaaacattctggagtcatcatctcaggaagttggtgggaaaccctactattacttgtctgtgttgacaagaacggctgatggagacgaaggtgggaagcatcagctgatcacagcaaccgtgaatggagggaagctttacatctgcaaagcacaagctggagacaagaggtggttcaagggagccaggaaatttgtcgagagcgcagccacttctttcagtgttgcttgagtgaaagcaacacaacgtaacaatgctctgcttgctttcttcatttgtctcttgtaaaaaatggaaaatgaaactgagcttttgagaactatcaagatgatgttaccttttc

SEQ ID NO: 161003 - DNA, 468 bp, Arabidopsis thaliana columbia
ctcaaactctctcaacaacaacaatggcgtctcttcaacaaactctattctctcttcaatccaaactcccaccatcctccttccaaatcgccagatctctcccactccgaaaaaccttcccaatccgaatcaacaacggtggaaacgccgccggagcaagaatgtcagccaccgcagcatcaagctacgcgatggcattagcagacgtcgcgaaaagaaacgacacaatggaattaacagtcacagacatcgagaagctcgaacaagtcttctcagatccacaagtactaaacttcttcgcgaatccaacaatcaccgtcgagaagaaacgtcaagtcatcgacgacatagtgaaatcgtcgtctcttcaatctcacacatctaacttcctcaacgtcctcgtcgacgcgaatcggatcaatatcgtgacggagatcgttaaggagttggagttggttacaataagct

SEQ ID NO: 161004 - DNA, 315 bp, Arabidopsis thaliana columbia
ggagcagagcattcgtcatgctaatgagctttttgttttgaatggaaaccgagttatcgtggtcggggaactcgcttctgaacttggtgttggatcatccatcccgggtcataccattctaaatgactggataagacatactgacgggaagctgagtttcttgggttttgtcaaactgctgcacggagtgtcgactcgacaatctttagcgaaaacgcgatgaggaaagtgactcggggttataacggattcgaaagaggaagaacatacaactgcaagaagcaaatgggtggattggggttgggaattggaact

SEQ ID NO: 161005 - DNA, 453 bp, Arabidopsis thaliana columbia
tcgataaaaatggaatctttgaaacgttttctctgctctattgcgcttcttcttatctcccttcttctaccttcaagcttagctcaacaacaacaacatgaatcaatcagaacaatggaagatttttccggatacccaattcacgaaccgggtcaattcggttccatcaatctcgcttcttcactctccgttgatgctccaggactgcaaaaccagatagatgagctatctagtttctctgatgctccttctccatcagtcaccagagttctttatactgacaaagatgtctcggctcgaaggtatgtgaagaatttgatggcacttgctggtcttactgttagagaagatgctgttggtaacatatttggcaaatgggatggtttagagccaaatctgcctgctgtagccactgggtctcacatcgatgctattccatattccgggaaatat

SEQ ID NO: 161006 - DNA, 453 bp, Arabidopsis thaliana columbia
tggagagcatggccttcaacatcacggccagaatagatgatgtgctttatgttgatgatgccatgagaagatccatctctgtcacagaatcgctatccctattcagcatcaatggactcaaccctcaaaaagcgttctctgtgcagagctctccgcacggttcaccatttgcaacgcctgccctaagtgtagcatcaagaagcccgaggagagcaccgccgctgtattcagtgaagaggaatgggacgagagagaagggaatagtgggagaaacagagaaagcatggtcgtatgcagggaatctgagttcaagaagagtaacgggagtgacgccggaaagagattaagattgaaaatagaagaatgtaaatcaatggttgtagagactggagttggttcttgtttgtctgactacgaagacgaatgtggtaatagcaacaagaatgttatctt

SEQ ID NO: 161007 - DNA, 429 bp, Arabidopsis thaliana columbia
tgcagaatgtggaggacaatgcacaaggagatgtagcaacacaaagtatcataagccatgcatgttcttctgccaaaagtgttgtgctaaatgcctttgtgtccctccaggcacgtacggcaacaaacaagtgtgtccttgttacaacaactggaagactcaacaaggtggaccaaaatgtccataaacaaaaacattgagagagaaaccccaatctgtttcctattttatttaattatttccagtatgcttttgttgtcgtgatggttaaattatagtgtttttgcaggtatcatttatcatcgataaacaatatcatataaaatcttctatgtttctttcacgttttgtttcttttgttgtagtcaatacacgaaatgtgtatggaccttctaattaggaatatataaaattttatttattaattag

SEQ ID NO: 161008 - DNA, 459 bp, Arabidopsis thaliana columbia
ccaagaacaagaacaagaagaagaagaacaatacatgaagaacaaagtacccaagaaaacacacaagaaggaaacacaaagattgatattgatccaaaagcaatggcgtacgagaaagtcaacgagcttaaccttaaggacacagagctatgtcttggattacccggaagaacagagaagatcaaagaagaacaagaggtttcttgcgttaaaagtaacaacaagcatggcatggagtcgtctacggtcacatggttgaacctagaatgaaaacccttgaaggaatcttcgaatgcacggaatcgcttacgcccatgcgaaaagccttcaaaggtacgttcatagtagcaggaggatattctagagaagacgggaacaaggcggtggaagaaggaagaaccgatcttgtggcttatgtgacggccgtcttggcgaatccggatctgacgaggagattcg

SEQ ID NO: 161009 - DNA, 427 bp, Arabidopsis thaliana columbia
ctcttcaatctctcccaaagcctaaagcgatctctgcaaatctctcgcgactctctctttcaagatgcaaatcttcgtgaaaacactcactggcaagactatcactctcgaggttgagagctctgacaccatcgacaatgttaaggcaaagattcaggacaaggaaggcattcctccggatcagcaaagattaatattcgccggtaaacagctagaagatggccgtaccttggccgattacaacattcagaaagaatcaacccttcatttggttctccgtttaagaggtggtatgcaaatctttgtcaagactctgactggcaagaccattactttggaggttgagagctctgacactattgacaacgtcaaagcaaagatccaggacaaggaaggaatccctccggatcagcagagacttatcttt

SEQ ID NO: 161010 - DNA, 464 bp, Arabidopsis thaliana columbia
  unsure (1)..(464): unsure at all n locations
caatcgccgatctcgttgcttcattttccttttgatcgattggtacaagtgttcatccaatggttggaggaggagttatccggcagcttcttagaaggaaacttcattcccaatcagtcgcaactccggtattgtcatggttgtcttcgaagaaagcgaatgaagatgctgggtctgctggtttaagagcatttgctctcatgggtgctggtattaccggattattgagtttttctactgttgcatctgctgatgaggctgaacatggtctggagtgtcctaactacccttggccacatgagggcattctcagctcatatgaccatgcttcgatccgtcgtggtcaccaagtttatcagcaagtttgtgccgtcttgccattcgatgtctctgatctcataccgagactnggtgggtgttgcctacacagaggaagaagcgaaggccatggcagctgaaatcga

SEQ ID NO: 161011 - DNA, 428 bp, Arabidopsis thaliana columbia
ctttatctggtgcccacactctcgtttttatttctcaaggataggactggcttcgcgcgggcatggacatcaaacccgtgtaatcttcaacaactcttacttcaaggaactcttgagcggagagaaggaaggccttcttcagcttgtctctgacaaagcactattggacgaccctgttttccgtcctttggtcgagaaatacgctgctgatgaagatgcctttttcgctgattacgctgaggcccacatgaagctttctgagcttgggtttgctgatgcttaaactgtgacgtatgctctgtgtgtgtgtgtgtgtctccccgagagtcatggctgtttttggttgggggctggaggggtcgcattgcatttgaactttgtcaatatgattgcttaatgtacttttggatttacgtatctggtttttt

SEQ ID NO: 161012 - DNA, 415 bp, Arabidopsis thaliana columbia
ctccgtttcaccgattagtaggcctttttttttttacgagagagctgccactgaggccttgactgattacagagaaggtgtcgctgaaatactcggcgatgtctctatctttactgcttcaggccaacgcgtgcaattcagtgatctctgggatcagaaagatggaattgctgccgttgtactcttgaggcatttcggatgcgtttgctgttgggaacttgctactgctttgaaagaggctaaaccgagatttgatgcggctggtgttaaattgatagctgttggagttggaacttctgacaaggctcgtatacttgcaactcggttaccttttcccatggaatgtctttatgcggatcctgaacgcaaggcatatgatgttcttggtttattactttcgtttgggccccacttt

SEQ ID NO: 161013 - DNA, 450 bp, Arabidopsis thaliana columbia
gttttctttttaattttattgaacattttcatgatgtcggtggatcccacgaaaacacctgctccgccggcgaggcgaagatgacggagcaccaagttgcaaagctaatggaagaggacatgggatcagccatgcaatatctacaaggcaaaggtctttgcctcatgcccatctcgttagccaccaccatctccaccgccacgtgtccttctcgtagccccttcgttaaagataccggcgttcctttgtctcctaacctatccactacaatagttgctaacggtaatggctcatcgttggtcaccgttaaagacgctccctccgtttccaagccgtgataacggccatttgtccatttcattttcccttttttgggtgggaaagagagaaaaaagtttagaagacaaagacaagtgggataggtggttttggtcaaagtttagaaagaat

SEQ ID NO: 161014 - DNA, 180 bp, Arabidopsis thaliana columbia
atcggagtaacatcttctccgcttcatatgactctgtagaacactaggacttacttttgctctcaggcggagctttcaatttacgacatttgtttaacggataaagatttcttcaagtcttcttcgaacttcttacaaacagaacccgtgattgttcattagatctgcaagaccaaaact

SEQ ID NO: 161015 - DNA, 453 bp, Arabidopsis thaliana columbia
ggtggccagcgcaatcggaggagaaggagtgaaattcgcggtggggaatatttattcagtgaaggtgatcaccggagatgagttcagagggatcgtcatggcttacgaccccatccccaacttcgtcttttttgaagagggtacaaaacctagacctgggcatttgaagaacactcggatggtgaatgcgagttttattacagggctttcgtatttaggcaaaactgaagatccacttgattcagacaacttttctgttgatcttaatggtctccgagctaaagaggcacttgctatcaggcaagcggaagcagatgctgaaagaatgggagttggtgttaccgctgaggctcagagcatcttcgacgcgttgtctaagacgcttcctgtgcaatgggaaaactcagacattctggtgatgaaagaggtacgcgttcgtagcccgtatctttc

SEQ ID NO: 161016 - DNA, 450 bp, Arabidopsis thaliana columbia
acaaaacccaattagccggagatggccgcaacatccgccgctgctgcagctgcttcttccatcatgggtactcgggtggctcccggtatccatcccggttcaggtcggttcacagccgtgttcggtttcggaaagaagaaggcagctcccaaaaagagtgccaaaaagacggtgactacggaccggcctctttggtacccaggcgccatttctcctgactggcttgatggttccttggttggagattacggttttgatcccttcggtttaggcaaaccggccgagtatcttcaattcgatatcgattcactagaccagaatctggctaagaacttggccggagacgtgatcggaacccgtacggaagctgccgacgccaaatcgacgccgtttcagccgtacagtgaggtgttcggaatccagagattcagggaatgcgaactcatccac

SEQ ID NO: 161017 - DNA, 438 bp, Arabidopsis thaliana columbia
  unsure (1)..(438): unsure at all n locations
gnnngagaagaagaaggaaaagaatttatttttcttcaggctggactttgcggtgggctcgtggcatacgaacgagaggggggagaaaatgtacattcagacaagaatggcagagtatgcacaagagctgtgggagttgctgaagaaagacaacacctttgtttacatgtgtggtcttaagggtatggagaagggtatcgatgacattatggtctcgcttgctgctaaagatgggatcgattggttggagtacaagaagcaattgaagaggagtgaacagtggaatgttgaagtctactaaggaagcttctgagggagtaattatataatgtaaataaaaagcttctgatgcaattggaaatcttcatatctgctacttttttttttctcaaggatttttcaatcaaaatttttaaaatgagaccttttataccccca

SEQ ID NO: 161018 - DNA, 334 bp, Arabidopsis thaliana columbia
  unsure (1)..(334): unsure at all n locations
aaagaaaggannataaagaggggtggtgtgttttaaaaaatacgtatggagatnnaaatgattatttagagatttttgaacaattgntattttaggaagttaaagattaaattttgtagaataaagatggtgaagaagtatnggtgtgtaaaatgagattggtaatgtagtttaatgagggtgaaaggttttaatttntgttagtaatatatgaatatgaggaggatgaatatgttgatgaaaatgaatttttatttntataaaaagaagaggtgaaagggaattaattttattaatattattattttgtttgtaatgtaatataataaaaata

SEQ ID NO: 161019 - DNA, 356 bp, Arabidopsis thaliana columbia
gtggaaaacacgtgggttctgaccttttctttttggttgccattaatgaaatagcggaaggggtaatggcattcaacactaactacaaggatactggactgttcggcgtttatgcagttgccaaggccgattgcttggatgatttatcatatgccattatgtatgaggtaaccaagctggcctaccgagtttcagacgctgatgtgacacgtgcacgaaatcagctgaaatcatcattgttacttcacatggatggaaccagcccaattgctgaaaatattggtcgacagctgctgacctatgggcgtagaatcccaaccgctgaactctttgctaggatcgatgctgttgatgcc

SEQ ID NO: 161020 - DNA, 462 bp, Arabidopsis thaliana columbia
tgacactctagcaccttcagttccgtacaacaatggctctccaagctgcctattctcttctgccttctaccatttcaatccaaaaagagggcaaattcaatgcttctctaaaggagacgacttttactggttcttcattttcaaaccatcttagagctgaaaagatatccaccctgttgaccatcaaggaacagagaagacagaaaccgcgattttccaccggtattcgtgcacagacagttacagccacgccgccggcaaacgaagcatcgccggagcaaaagaagactgagagaaaaggcactgcagtgatcactggagcttcgtctggtttaggtttagctacggccaaagctttagcagacacagggaaatggcatgtgatcatggcttgcaggaactttctcaaggccgagaaggcagcgagatctgttggaatgtccaaggaagattacacagtga

SEQ ID NO: 161021 - DNA, 450 bp, Arabidopsis thaliana columbia
gattcaagagtatttatatcgacatgtcgttttaagtagcataccgaaacaacttcactggtgagggcttaaactagccaacgaacactcgataaacgcagcggcgcgtctccagcttccagaagctgagcttgtccctatgttggtagacaacaactactttcactttgtcttggcttcagacaatattcttgcagcttcggttgtggctaagtcgttggttcaaaatgctttaagacctcataagatcgttcttcacatcataacggataggaaaacttatttcccaatgcaagcttggttctcattgcatcctctgtctccagcaataattgaggtcaaggctttgcatcatttcgattggttatcgaaaggtaaagtacccgttttggaagctatggagaaagatcagagagtgaggtctcaattcagaggtggatcatcggttat

SEQ ID NO: 161022 - DNA, 341 bp, Arabidopsis thaliana columbia
ccaagatgaataaaaaaatcttttaagttaaatcaattaaagggtgatgatgaatacatcatggtagtgaccacctccttcttttgtgtgttcagccttaatgctttaattatgatgttagtggctttgagttatttaatctaaatgttggctcttcgttgattttgggtttgtggtgggggtgatataatgataatggaaaggatgtatgatatgatggatggtgttgggtatcatgtatgacgatgtaatgataagtaaacatgtccgcctcaaatttaattcactatctaaaattgggtgtgggggtggggtgttgaattattaaataaaagggtggc

SEQ ID NO: 161023 - DNA, 435 bp, Arabidopsis thaliana columbia
  unsure (1)..(435): unsure at all n locations
ggaaaacccgggnccgacccacgcgnnccgacaaganaaaacaagaacaacgangaagncaacacaagcaaaggggaatgcacgaatacataaggggcggcgacaaccgacacacaggcgcggtatgacccaaaacgcatataagacagatgtaagcggcggaaaaaacttgaagaaaaaggtggggcatacccaaagccaaagatggaggaaaacaagaagagatggataatgggaaaggactgcggctcaaacacgaacgttcggtttcatgtgatcgcgcataaatgcagtagctgtggttcctacaatacaagacagaccacanaaaggctctgataggcacgctggctcctctggaatgcctcaggttggtgggtcaaccggntaatttttaaccagagctggttttggtgtccgaaattcccacgagga

SEQ ID NO: 161024 - DNA, 416 bp, Arabidopsis thaliana columbia
  unsure (1)..(416): unsure at all n locations
acatttttattttttataaaaacccaanacancagtggtgcctgggaatatataatgaaaaagctaaataacatttaagggtaaaaagattataagttttctttttttgacaaacaatatttttttacttcgtcctttgcattaaaagaagagatacaaaaaaaatgatatgattcaaccacaaacctatttgaatgtagcagacaacagcggtgctagagaattgatgtgtattcgaataataggagctagtaatcgccgatatgctcatattggtgacgttattgttgctgtaatcaaagaatcaataccaaatactcctctagaaagatcataattgtattacagcttgaattgaacgtacttgttaagaactcaaacgtaacaatgggacgataatacgatatgattacaat

SEQ ID NO: 161025 - DNA, 457 bp, Arabidopsis thaliana columbia
gacaaaaagaacaatggcagcgagtgcatcttcaatgtcgagccagctaaggagcagcttctcctgcgcttctctttctcagcgtctcgccgtcccgaagggcatctccggtgctcctttcggtgtttctccgaccaaaagagtctcttccttcactgtccgagctgttaaatccgacaagacaacattccaagtagttcaaccaatcaacggtgatccattcatcggaagtttggaaactccggtgacatcaagcccattgatcgcgtggtacctttccaacctccctggataccgtaccgccgtcaaccctctcctccgcggtgtggaagtgggcctggcccatggtttcttcttagtgggcccattcgtcaaagctggcccattaaggaacactgcttacgccgggtcagccgggtctttagccgcggctgggctggtagtcatcctcagcatg

SEQ ID NO: 161026 - DNA, 417 bp, Arabidopsis thaliana columbia
attgacttctttggttgatgttggtggtggttttgttgctacactcaaaatgattgtctgcgaggaccctaatcttaaaggcatcaactttgatctcccacatgtcatcgaagatgctccttctcatcctggtattgagcatgttggaggagatatgtttgtaagtgtccctaaaggtgatgccatattcatgaagtggatatgtcatgactggagtgacgaacattgcgtgaaattcttgaagaactgctacgagtcacttccagaggatggaaaagtgatattagcagagtgtatacttccagagacaccagactcaagcctctcaaccaaacaagtagtccatgtcgattgcattatgttggctcaccaatcccggaggcaaaagaacgaaccgagaaagagtttgaggcatta

SEQ ID NO: 161027 - DNA, 432 bp, Arabidopsis thaliana columbia
aatggcaccatcaatgaatgaaattggtgcttttgtttattacaagaaaaacaagaaactgggggggcgtatccgccgacgtagctttgctcttagcagccaccgtcgccggaatctctgccggagcttcaaaagccaacgaaaaacgaactctatccccgtcgactcacgccgagctaagatcctcatgcaactacacgcgttaccctgagctctggatctctgccgtggtaactgccggcggcgtacagctaacgtcgcaaaaagatgtcatcgaggcatcggtgaacctaacaataaccgccggggagcacaattactataccgtgaagaaactgatcaagaagaggaaaggactgactccgcgcgagaagacggcgcttcatgactgtttggagactattgatgagacgctggacgagctccatgaaa

SEQ ID NO: 161028 - DNA, 495 bp, Arabidopsis thaliana columbia
  unsure (1)..(495): unsure at all n locations
tcgacgccacgcccgtccgannaagcttctgtttatgtctactcgattcgcaagattatattattgctgggttttgaaattccgttgtcgcggaaggagctttaatgagcgttttgcgagatccgaacatcggaaggagaacgaagaacgattgtttctcactttagaactgagtatgacnagaggagtgaacaactttttctccagaaggaaggctatttcaagtggaatatgccattgaagctatcaagcttggttctactgcaattggagtaaagacaaaagaaggagttgtgcttgctgtcgagaagcgtatcacgtcgccattgctggaaccgaccantgtggagaagattatggaaattgatgaccatattggttgtgctatgagcggnttaattgctgacgcgcgcacacttgttgagcatgctagagttgaaactcaaaaccatagattctcgtatggtgagccgatgacttgagaggtcacaacac

SEQ ID NO: 161029 - DNA, 453 bp, Arabidopsis thaliana columbia
atctcaaaggctgagtggatcgaattttagtttgcagcgtgggaaaagcaacagaaagagggggactcaactaaggacttgatcgccaggcttggtgctggtgccaattctggtcgtgcttccactgcagaaaagaaactagagaagcttcaagaacaggagctaatagagaagccatttcagcggaagcagatgaagattaggtttccagagcgtgggacaagtggaagatcggtagtcaatgttaaaaacattgattttggtttcgaggataagatgctatttaagaaggctaatctatcaatagaaagaggggagaaaatcgccatccttgggccaaacggttgtgggaaaagtacgttattgaagctaattatgggtttagagaagcctgtgaaaggtgaagttattcttggagagcacaatgtactgccaaactactttgaacagaat

SEQ ID NO: 161030 - DNA, 264 bp, Arabidopsis thaliana columbia
aaaaatcccgggggcacaaccactgcagactaagaatgccattcactctttccctgctcaatgctcctccaagaggctagaagtcgctgaattctcctgtctgcgtatgattagtatcgctggggaagcatctttcttcgatgctgtagctgcacaaatcatccctaaggctgtgacaacatcaacttctgttagaggagagacagaggctaaactaaaagattctattaacgtgtttggaaggatttatatgaactatcttag

SEQ ID NO: 161031 - DNA, 461 bp, Arabidopsis thaliana columbia
aacccgggcgcgagccgcacgcgtcacgcattcacttctcttctaatacaaaaagactttttatttttttattccgttaaatctattctctcgagcatgcgcgaccagtaaacatacggcattggtgcgagtccaagaatgaggtctatcaccccaacgcacttagggcggcgctcgctgagtttatctcgactttgatcttcgtcttcgccggctcaggctccggaattgctttcaacaagatcactgacaatggagcaaccactccttccggcctcgtcgccgctgccttagctcatgctttcggtctctttgacgctgtctctgttggcgctaacatttccggtggccacgtgaaccctgccgttaccttcggagtcttactcggaggtaacattactctccttcgagggtttttcctactggattgctcaactttttggctccgtcgccgcttgttt

SEQ ID NO: 161032 - DNA, 448 bp, Arabidopsis thaliana columbia
aagaaaataaaagatttgtagaatcaactattataaatggctagcactatgatgactacattgcctcagttcaatggtcttcgagccaccaaaatctctgcagctcctgtacaaggcctggcaagtgttcagcccatgagacgcaagggaaatggagctttgggtgcaaagtgtgacttcatcggttcatcaacaaatctgataatggtaacgtcgacgaccctgatgttgttcgcggggagattcggacttgcgccatcagccaataggaaggcgacagctggacttaggttggaggcacgtgactcaggtctacaaacgggtgacccggccgggttcacgcttgcggacactttggcttgtggcaccgttggtcatatcatcggtgtaggagttgtccttggccttaaaaacattggtgctatttgaagttcctaaagctctttta

SEQ ID NO: 161033 - DNA, 266 bp, Arabidopsis thaliana columbia
ctggccccggaggtgatcccatcataaacccaaaggtcttaccaaccggtaaaaacatccatgccttatatcctcatgctattcccacaacatcaacaatgtcaagtgccaagattgtgtttgagatgttggtagagagacaaaatctataaaactaagggaaatattctgagacaatcacgctatttctttaaaaaactgacagcgtgggggcatattaaaagatttatgaacaaaattattattattattttattgagaccaat

SEQ ID NO: 161034 - DNA, 447 bp, Arabidopsis thaliana columbia
  unsure (1)..(447): unsure at all n locations
canggagagaagagagaaagagagaaagagagacagtgataatggcgtacagtgcgtgtttgctacaccagagcgcattggcttcatcagccgcacgatcatcatcttcctcctcatcccagcgtcacgtgtcgctctccaaacctgttcagatcatctgtaaagctcaacagtctcatgaagacgataactccgccgtctcccgccgtcttgctctcactctcctcgtcggcgccgctgctgttggttccaaagtatctcctgctgatgccgcctacggtgaagctgcaaacgtgtttgggaagccaaagacgaacacagacttcttgccatacaatggagatgggttcaaagtgcaggttccagcaaaatggaacccaagcaaagagattgagtatccaggacaagtccttaggttcgaagacaacttcgatgctactagcaatc

SEQ ID NO: 161035 - DNA, 420 bp, Arabidopsis thaliana columbia
  unsure (1)..(420): unsure at all n locations
cgcggccgctaaaaccaatcacgaatggaccctactttttattttttatattcatctacnncatcttccggttcggcttctctcttctctcgacagccgccnacnacttcaccgtcgcttcgctttacacgggaaagccagtttctttctcttcaacaatgtcagcgattcctctggttttgaagcgtttgttcattaccttcctttgggtttctttaatgatgcttgtgtacaactctgtcttcttgttgtttctcgttgttttgatcgtagctatcgatttacaaagcgtgattctcgctgtcttctcgatgggtgtgatgtttcgtctgtttttgggtgttcatgtttacatgactgcttggtggcatttagctagtgtagtctctgttcttgaaccgatttacggtatcgccgcga

SEQ ID NO: 161036 - DNA, 449 bp, Arabidopsis thaliana columbia
  unsure (1)..(449): unsure at all n locations
caaaaataaaaaaaacatcgcacaagaaaattaaagatttgtagaatcaactaagaaaatggctagcactatgatgactacattgcctcagttcaatggtcttcgagccaccaaaatctctgcagctcctgtacaaggcctggcaagtgttcagcccatgagacgcaagggaaatggagctttgggtgcaaagtgtgacttcatcggttcatcaacaaatctgataatggtaacgtcgacgaccctgatgttgttcgcggggagattcggacttgcgccatcagccaataggaaggcgacagctggacttaggttggaggcacgtgactcangtctacaaacgggtgacccggccgggttcacgcttgcggacactntggcttgtggcaccgttggtcatatcatcggtgtaggagttgtccttggccttaaaaacattggtgctattt

SEQ ID NO: 161037 - DNA, 412 bp, Arabidopsis thaliana columbia
aatcttcaaatcgaaaagtttccgattaatattttatgttcctttagaaaatgtcaggtcgtggaaagggaggcaaaggtttgggcaaaggtggagccaaacgtcataggaaggttctgagagacaacatccaaggaatcactaaaccggcgattcggagattggctcgtagaggtggtgttaaacgtattagtggtttgatctacgaggagacacgtggcgttctcaagatctttttggaaaatgttatccgtgacgccgttacttacactgagcacgctcggaggaagacagtgactgctatggatgttgtttatgctcttaagagacaaggaaaaactctctatggattcggtggttgaggattttagtgtcttagagtgttgctacgattgtctttaatgatttcatt

SEQ ID NO: 161038 - DNA, 352 bp, Arabidopsis thaliana columbia
  unsure (1)..(352): unsure at all n locations
aaaaaaaaggaagcaaagaaaccntttcattttttcataaaaacaaaaaacaaaacggggcgggtataccttaaagacggggcgcaacaacaacaacacgaaacaancaaaacaatggaagatagacacggatacccaaatcacgaaccgggtcaattcgagaccatcaagctcagctggtcactcaccgatgatgctccaggactgcaaaaccacacagatgagctatcaaaactctctgaagctccttctccatcacccaccagagtacactatactcacaaagatgacaaccctcgaagggatgggaggaagctgatggcacaagctgcacttacagacagagaaaaag

SEQ ID NO: 161039 - DNA, 449 bp, Arabidopsis thaliana columbia
cttgaataaaatcagaattacattcaaatttggttttgcaaaagcttcctctgagtgggctgcttttgctcctgaccatcgtcgcctctccagcaaatgcagatggacctgtttgcccgccgtcgaacaaactaagccgggcaagtttccctgaaggttttttatttggcacggctactgcggcataccaggtcgaaggtgcgattaatgaaacttgtcgtggaccagccttatgggacatctactgtagaagatatccagagaggtgcaataacgataacggcgatgtggccgttgatttcttccatcgttataaggaagatatccaactaatgaagaatctaaaccccaaacgcctttagaatgtctatcgcatggccaagaatatttcctcatgggagaaaggagaaaggagtgagtcaagctggtgtgcaattttaccacgacct

SEQ ID NO: 161040 - DNA, 445 bp, Arabidopsis thaliana columbia
  unsure (1)..(445): unsure at all n locations
caacatggactcctccaaactctcatttctttttttgcctcancctcatttgcattggctggctcccccaacattctctcgcatgcggctcttgcaacccacggaagggcggaaagcactcccctaaagcccctaagctaccagttcctccggtgaccgtccctaagctaccagttcctccggtgaccgtccctaagctaccagtccctccggtgaccgtccctaagctacccgttcctcctgtgaccatccctaagctacccgttccaccagtgactgtacctaaactacccgttcctcctgtgaccgtccccaagctacccgttcctccagtgaccgtccccaagctacccgttccttcagtgacagtccctaagctacccgtttccccggtaactgtacctaagctacccgttcttacagtgaccgttcctaagctacccct

SEQ ID NO: 161041 - DNA, 393 bp, Arabidopsis thaliana columbia
  unsure (1)..(393): unsure at all n locations
aacaaggaaaccgccgncgccggatttgatttttcatatccatgaagtagaagacgggggggcttactttctgatcttagaacggagtatatgtacagaagattcgcgtccctcaatttttgatctcaagggtcgggtttacctttttttccttcttatttttggtggctttgcgttttctcattcgacgatttctggatttggggatttcaaaaccatgaggaagaagctcgatactcggttcccagctgctcgtattaaaaagattatgcaagctgatgaggatgttggcaagatagctgtggcagtgcctgtcttagtctcaaaatctttggagtttttcttgcaagacctttgtgatcgtacatatgaaattacccttgaaagaagggc

SEQ ID NO: 161042 - DNA, 335 bp, Arabidopsis thaliana columbia
  unsure (1)..(335): unsure at all n locations
aaaccgggggcgacccagcgnncgagcagccaacgacaggnancaaagtttaagtttttttacgagaaaaaacanaagcggagaggcaatcattgcggatggtgaaccacacgtatcctctgctggagttcccaaaaaaaggacgtttaaaaagtttgccttcaaaggagttgatctcgatgctctcctcgaatgtctactgatgatcttgtcaagctcttctcttctcgtattcgtagaaggttctctagaggtttgacaaggaagccaatggctctgattaagaagctgaagaaagcgaaaagggaggcaccacaaggtgagaagccagaacc

SEQ ID NO: 161043 - DNA, 465 bp, Arabidopsis thaliana columbia
ctcgatttcagcaaaatcaaatcggattcagtgatctaaagtcaatttggtcgagaagaaattgagcgttgaagatgacggaggcgatgataagaaataagccaggaatggcgagtgtgaaggatatgccgctgcttcaggatggtccgccaccgggtgggttcgcaccggtccgatatgcccgccggatatccaatacgggtcctagtgcaatggccatgttccttgccgtttctggtgcctttgcttggggaatgtaccaggtcggccagggaaacaaaatccgcagggcattgaaggaagagaaatatgctgctcgtagaacaatacttcccattcttcaagcagaagaagatgaaaggtttgtgtctgagtggaaaaagtatctggaatatgaggctgatgtaatgaaagatgttccgggatggaaagttggcgagaatgtgtacaattctggtcgctgga

SEQ ID NO: 161044 - DNA, 441 bp, Arabidopsis thaliana columbia
gcgaccactttctgaagacaatgccgaatcttgtttattttatgttgagctacgatacaccaaagcatgggatgataccattagaaattacatttattcacccacgattctgtatttggaaaagatgagacaattaaatatgcaaaattaggttttgaatcttaaagtcattcttaaactcatgaaaggcctcctttagtctagatgacaaaattgtttttggaagaaacaaacggttttgcaaaacttgaaacatggaaaattaaacactaatttagtaaagtttattattttagtgttcagaagaaaatctaaaattttaaaattatatgtttagtgtctttatatgtttagtgacactaaacatataattttaaaaaattggatttccttctgaaaactaaaattaaaacctttactaaaatatgttctattttacat

SEQ ID NO: 161045 - DNA, 460 bp, Arabidopsis thaliana columbia
  unsure (1)..(460): unsure at all n locations
attttntctaggaaaatctcaaaacatttacttatacgaacagagagaagaagactgagagtgatggttgttcaacctacaagaataaaactagctggacttgctgtgatgggtcagaacctagctctcaacattgcagagaaaggcttcccaatctctgtttacaacagaactacttccaaagttgatgagaccgtcgaacgagccaaaaaggaaggcaatcttcctctttacggcttccatgaccccgagtcttttgtcaagtccattcagaagccacgcgttattatcatgcttgttaaggctgggtctcccgttgaccagaccatcaagaccctctctgcttatttggagaaaggtgactgtattgacgatggtggtaatgaatggtatgagaacactgagaggagagaaaaagccgtggcggagaacggntttctctacctttgaatgggagttt

SEQ ID NO: 161046 - DNA, 323 bp, Arabidopsis thaliana columbia
  unsure (1)..(323): unsure at all n locations
taaaaaaagttttgttttagaaaaagaaaaaaaaagatggtatgggtaaaaataaaaaagggatgggttaaaaaaaatatttaganttagggaagntaggaggaggaggagtaataagaagtataatatgtaaattaatgatgnnaagaaaagataatttttgtagagaaagaaattaaagtataaaggttagggagaagaaatttaagagagatattagtggagganttggtgttatatgaaaaggtggtgaaaagaatattgagagaatnaaggtgaaatgggaggggggggtaatagaaatgattatgaaaaggggatta

SEQ ID NO: 161047 - DNA, 468 bp, Arabidopsis thaliana columbia
aagatctgcgaatctctctcactctcacaattggcatttcttttaggtttctctcagactaagtttcaccattgcggcgtctggatttctacgccgccgtgctcatcttcttccacggtagtctcaatggtgggcttgaatcggactgattcgaaaaagctccgttcagatttcctcggccagattggttacgaagatcggagacaagtaagacacagttactgtagaagctcattagctgtgaaaatgtcgtgggacggtcctcttgcttccgtcaagttgatcatccaaggaaaaaacctcgagttatcagagccaattaagcagcatgttgaagagaaagtaggcaaatctgttcagaaacacagtcatcttgtgagagaagttgatgtaagactctctgttcgtggtggagagtttggtaaaggccctaggattcgaagatgtgaggtgacattgtttacaaag

SEQ ID NO: 161048 - DNA, 426 bp, Arabidopsis thaliana columbia
  unsure (1)..(426): unsure at all n locations
cgggccgacccacgcgnccgaaaaaaacacaaaaaggnncaanggtttacttttcaanggctctatcctcccctgcggtcggcggaaaggctgagaacctttcccccgcggcatctgaagtcctcggaagcggccgtgtgacaatgaggaagactgttgccaagccaaagggtccatcaggcagcccatggtacggatccgaccgagtcaagtacttgggtccattctctggcgagtcaccgagctaccttaccggagagttccccggagactacggatgggacaccgctggactttcagctgatcccgagacattcgcaaggaaccgtgagctagaaattatacacagcaggtgggctatgctcggagccctaggctgcgtaatacctgagctttttgctaggaacggagtcaagtttggagagg

SEQ ID NO: 161049 - DNA, 479 bp, Arabidopsis thaliana columbia
  unsure (1)..(479): unsure at all n locations
gaaaaagggccggcccacgcgnccggnaaacgcgcaaaatacgagcnngtctatttttttcgggcccanaccggancagaggaccccgcctattaatgagcaactcaggaagaggatgaagatggcatagttggggtttccttgtcaaagaatctaccaatggtagctgcaagaaccctaaagatcaatatcgcaactttgggtccgcttgttcttcccataagcgagaagtttcacttctttgtgaggttcgctaaaaagaagtttctcaaccccaagctaaagcattacattccggatttcaagctcgcattcgagcatttctgtatccatgcgggtggtagagcgctaattgatgagatggagaagaatcttcatataactccactagacgttgaggcttcaagaatgacattacacaagttttaagtgtaatagttcaatttgggtggctctttgtaacgtcaaaccttttacta

SEQ ID NO: 161050 - DNA, 400 bp, Arabidopsis thaliana columbia
  unsure (1)..(400): unsure at all n locations
gaaaacanaaaaaacaagnggaaactttaaattttgagggagagagcaaaaacggcgggggggggaacatacaaaacggaagggcccctaaaaagaacggccgagaaatactacaagagggggaagaacgagaaccatgtcttccctgaagctatcggccaccacatccaaaatgttaccgttcacgaaggcgaacatgactctcacgggtctatcaggagtnggaactacacatgggatggaaaggaggaggtgttcaaggagagaagagagatagacgatgagaccaaaaccttgacgttaagaggacgggagggtcacatgatggaacaactcaaaaggaaacgacggcgcctaccaattcaaacccaaatcagaagatacccgcaccggcaaaaac

SEQ ID NO: 161051 - DNA, 434 bp, Arabidopsis thaliana columbia
cgactacacctgttgatgttgtttcctctttttaaagatatgaggaatctagaagactgagagtcgctattatccatgcaatggcgaggatggctgcaattatggcttccacttacaaagcatacttaggtgttgggcttggtcctctgtctttcttgacaaagtttagagtaccacatccaggaagagttggtggtagattcttcgttgacattgctatgccatcgatgcttgactgggtccttggaggtaacagtgaaaaactccaaggaaggccacctagttgcagactcactgacaaagccgatgaccggcttcgagagtggtttgaagatgacgatgctcttgaacgtactataaaggggagaatggtatctaattccacacggcgacgattgttgcgtttcggaaaccatttgtctaacccaagatga
